United States Patent Application Publication US 2011/0183924 A1 - sequence listing, part 109

SEQ ID NO: 323331 - DNA, 1059 bp, Homo sapiens
  misc_feature (1)..(2): n is a, c, g, or t
  misc_feature (5)..(5): n is a, c, g, or t
nnatnggttcgcagccgccgccgcgccgccgtcgctctccaacgccagcgccgcctctcgctcgccgagctccagccgaaggagaaggggggtaagtaaggaggtctctgtaccatggctcgtacaaagcagactgcccgcaaatcgaccggtggtaaagcacccaggaagcaactggctacaaaagccgctcgcaagagtgcgccctctactggaggggtgaagaaacctcatcgttacaggcctggtactgtggcgctccgtgaaattagacgttatcagaagtccactgaacttctgattcgcaaacttcccttccagcgtctggtgcgagaaattgctcaggactttaaaacagatctgcgcttccagagcgcagctatcggtgctttgcaggaggcaagtgaggcctatctggttggcctttttgaagacaccaacctgtgtgctatccatgccaaacgtgtaacaattatgccaaaagacatccagctagcacgccgcatacgtggagaacgtgcttaagaatccactatgatgggaaacatttcattctcaaaaaaaaaaaaaaaatttctcttcttcctgttattggtagttctgaacgttagatattttttttccatggggtcaaaaggtacctaagtatatgattgcgagtggaaaaataggggacagaaatcaggtattggcagtttttccattttcatttgtgtgtgaatttttaatataaatgcggagacgtaaagcattaatgcaagttaaaatgtttcagtgaacaagtttcagcggttcaactttataataattataaataaacctgttaaatttttctggacaatgccagcatttggatttttttaaaacaagtaaatttcttattgatggcaactaaatggtgtttgtagcatttttatcatacagtagattccatccattcactatacttttctaactgagttgtcctacatgcaagtacatgtttttaatgttgtctgtcttctgtgctgttcctgtaagtttgctattaaaatacattaaactataaaaaaaaaaaaa

SEQ ID NO: 323332 - DNA, 315 bp, Homo sapiens
cggtaccccctagttttagaagtttcaatagcagggtatggatgaggagctggaaagagatgagaaggtatttctgcttggagaagaagttgcccagtatgatggggcatacaaggttagtcgagggctgtggaagaaatatgggtttcaataggtgtttgtagcatttttatcatacagtagattccatccattcactatacttttctaactgagttgtcctacatgcaagtacatgtttttaatgttgtctgtcttctgtgctgttcctgtaagtttgctattaaaatacattaaactataaaaaaaaaaaaa

SEQ ID NO: 323333 - DNA, 1155 bp, Homo sapiens
  misc_feature (1)..(2): n is a, c, g, or t
  misc_feature (5)..(5): n is a, c, g, or t
nnatnggttcgcagccgccgccgcgccgccgtcgctctccaacgccagcgccgcctctcgctcgccgagctccagccgaaggagaaggggggtaagtaaggaggtctctgtaccatggctcgtacaaagcagactgcccgcaaatcgaccggtggtaaagcacccaggaagcaactggctacaaaagccgctcgcaagagtgcgccctctactggaggggtgaagaaacctcatcgttacaggcctggtactgtggcgctccgtgaaattagacgttatcagaagtccactgaacttctgattcgcaaacttcccttccagcgtctggtgcgagaaattgctcaggactttaaaacagatctgcgcttccagagcgcagctatcggtgctttgcaggaggcaagtgaggcctatctggttggcctttttgaagacaccaacctgtgtgctatccatgccaaacgtgtaacaattatgccaaaagacatccagctagcacgccgcatacgtggagaacgtgcttaagaatccactatgatgggaaacatttcattctcaaaaaaaaaaaaaaaatttctcttcttcctgttattggtagttctgaacgttagatattttttttccatggggtcaaaaggtacctaagtatatgattgcgagtggaaaaataggggacagaaatcaggtattggcagtttttccattttcatttgtgtgtgaatttttaatataaatgcggagacgtaaagcattaatgcaagttaaaatgtttcagtgaacaagtttcagcggttcaactttataataattataaataaacctgttaaatttttctggacaatgccagcatttggatttttttaaaacaagtaaatttcttattgatggcaactaaatggtgtttgtagcatttttatcatacagtagattccatccattcactatacttttctaactgagttgtcctacatgcaagtacatgtttttaatgttgtctgtcttctgtgctgttcctgtaagtttgctattaaaatacattaaactataaaaaaaaaaaaacttaatatcatcccctataactactttcattttctaacaattatccctaaagtacaataaacttctccacgaaactaaatgctaactctgcccccc

SEQ ID NO: 323334 - DNA, 1086 bp, Homo sapiens
  misc_feature (1)..(2): n is a, c, g, or t
  misc_feature (5)..(5): n is a, c, g, or t
nnatnggttcgcagccgccgccgcgccgccgtcgctctccaacgccagcgccgcctctcgctcgccgagctccagccgaaggagaaggggggtaagtaaggaggtctctgtaccatggctcgtacaaagcagactgcccgcaaatcgaccggtggtaaagcacccaggaagcaactggctacaaaagccgctcgcaagagtgcgccctctactggaggggtgaagaaacctcatcgttacaggcctggtactgtggcgctccgtgaaattagacgttatcagaagtccactgaacttctgattcgcaaacttcccttccagcgtctggtgcgagaaattgctcaggactttaaaacagatctgcgcttccagagcgcagctatcggtgctttgcaggaggcaagtgaggcctatctggttggcctttttgaagacaccaacctgtgtgctatccatgccaaacgtgtaacaattatgccaaaagacatccagctagcacgccgcatacgtggagaacgtgcttaagaatccactatgatgggaaacatttcattctcaaaaaaaaaaaaaaaatttctcttcttcctgttattggtagttctgaacgttagatattttttttccatggggtcaaaaggtacctaagtatatgattgcgagtggaaaaataggggacagaaatcaggtattggcagtttttccattttcatttgtgtgtgaatttttaatataaatgcggagacgtaaagcattaatgcaagttaaaatgtttcagtgaacaagtttcagcggttcaactttataataattataaataaacctgttaaatttttctggacaatgccagcatttggatttttttaaaacaagtaaatttcttattgatggcaactaaatggtgtttgtagcatttttatcatacagtagattccatccattcactatacttttctaactgagttgtcctacatgcaagtacatgtttttaatgttgtctgtcttctgtgctgttcctgtaagtttgctattaaaatacattaaactataaaaaaaaaaaaaggcggccgctcgcgatctagaactagt

SEQ ID NO: 323335 - DNA, 1015 bp, Homo sapiens
  misc_feature (1)..(2): n is a, c, g, or t
  misc_feature (5)..(5): n is a, c, g, or t
nnatnggttcgcagccgccgccgcgccgccgtcgctctccaacgccagcgccgcctctcgctcgccgagctccagccgaaggagaaggggggtaagtaaggaggtctctgtaccatggctcgtacaaagcagactgcccgcaaatcgaccggtggtaaagcacccaggaagcaactggctacaaaagccgctcgcaagagtgcgccctctactggaggggtgaagaaacctcatcgttacaggcctggtactgtggcgctccgtgaaattagacgttatcagaagtccactgaacttctgattcgcaaacttcccttccagcgtctggtgcgagaaattgctcaggactttaaaacagatctgcgcttccagagcgcagctatcggtgctttgcaggaggcaagtgaggcctatctggttggcctttttgaagacaccaacctgtgtgctatccatgccaaacgtgtaacaattatgccaaaagacatccagctagcacgccgcatacgtggagaacgtgcttaagaatccactatgatgggaaacatttcattctcaaaaaaaaaaaaaaaatttctcttcttcctgttattggtagttctgaacgttagatattttttttccatggggtcaaaaggtacctaagtatatgattgcgagtggaaaaataggggacagaaatcaggtattggcagtttttccattttcatttgtgtgtgaatttttaatataaatgcggagacgtaaagcattaatgcaagttaaaatgtttcagtgaacaagtttcagcggttcaactttataataattataaataaacctgttaaatttttctggacaatgccagcatttggatttttttaaaacaagtaaatttcttattgatggcaactaaatggtgtttgtagcatttttatcatacagtagattccatccattcactatacttttctaactgagttgtcacgattgtcaccggggatccactagagtcggccgcaggaaggagttcaaa

SEQ ID NO: 323336 - DNA, 933 bp, Homo sapiens
  misc_feature (1)..(2): n is a, c, g, or t
  misc_feature (5)..(5): n is a, c, g, or t
nnatnggttcgcagccgccgccgcgccgccgtcgctctccaacgccagcgccgcctctcgctcgccgagctccagccgaaggagaaggggggtaagtaaggaggtctctgtaccatggctcgtacaaagcagactgcccgcaaatcgaccggtggtaaagcacccaggaagcaactggctacaaaagccgctcgcaagagtgcgccctctactggaggggtgaagaaacctcatcgttacaggcctggtactgtggcgctccgtgaaattagacgttatcagaagtccactgaacttctgattcgcaaacttcccttccagcgtctggtgcgagaaattgctcaggactttaaaacagatctgcgcttccagagcgcagctatcggtgctttgcaggaggcaagtgaggcctatctggttggcctttttgaagacaccaacctgtgtgctatccatgccaaacgtgtaacaattatgccaaaagacatccagctagcacgccgcatacgtggagaacgtgcttaagaatccactatgatgggaaacatttcattctcaaaaaaaaaaaaaaaatttctcttcttcctgttattggtagttctgaacgttagatattttttttccatggggtcaaaaggtacctaagtatatgattgcgagtggaaaaataggggacagaaatcaggtattggcagtttttccattttcatttgtgtgtgaatttttaatataaatgcggagacgtaaagcattaatgcaagttaaaatgtttcagtgaacaagtttcagcggttcaactttataataattataaataaacctgttaaatttttctggacaatgccagcatttggatttttttaaaacaagtaaatttcttattgatggcaactaaatgtgtgctgaagggatcctctagactcacctacgctc

SEQ ID NO: 323337 - DNA, 886 bp, Homo sapiens
  misc_feature (1)..(2): n is a, c, g, or t
  misc_feature (5)..(5): n is a, c, g, or t
nnatnggttcgcagccgccgccgcgccgccgtcgctctccaacgccagcgccgcctctcgctcgccgagctccagccgaaggagaaggggggtaagtaaggaggtctctgtaccatggctcgtacaaagcagactgcccgcaaatcgaccggtggtaaagcacccaggaagcaactggctacaaaagccgctcgcaagagtgcgccctctactggaggggtgaagaaacctcatcgttacaggcctggtactgtggcgctccgtgaaattagacgttatcagaagtccactgaacttctgattcgcaaacttcccttccagcgtctggtgcgagaaattgctcaggactttaaaacagatctgcgcttccagagcgcagctatcggtgctttgcaggaggcaagtgaggcctatctggttggcctttttgaagacaccaacctgtgtgctatccatgccaaacgtgtaacaattatgccaaaagacatccagctagcacgccgcatacgtggagaacgtgcttaagaatccactatgatgggaaacatttcattctcaaaaaaaaaaaaaaaatttctcttcttcctgttattggtagttctgaacgttagatattttttttccatggggtcaaaaggtacctaagtatatgattgcgagtggaaaaataggggacagaaatcaggtattggcagtttttccattttcatttgtgtgtgaatttttaatataaatgcggagacgtaaagcattaatgcaagttaaaatgtttcagtgaacaagtttcagcggttcaactttataataattataaataaacctgttaaatttttctggacaattcaataagaaatttacttgttttaaaaaaatccaaatgctggtc

SEQ ID NO: 323338 - DNA, 3133 bp, Homo sapiens
ccggccagcgggcgggctccccagccaggccgctgcacctgtcaggggaacaagctggaggagcaggaccctagacctctgcagcccataccaggtctcatggaggggaacaagctggaggagcaggactctagccctccacagtccactccagggctcatgaaggggaacaagcgtgaggagcaggggctgggccccgaacctgcggcgccccagcagcccacggcggaggaggaggccctgatcgagttccaccgctcctaccgagagctcttcgagttcttctgcaacaacaccaccatccacggcgccatccgcctggtgtgctcccagcacaaccgcatgaagacggccttctgggcagtgctgtggctctgcacctttggcatgatgtactggcaattcggcctgcttttcggagagtacttcagctaccccgtcagcctcaacatcaacctcaactcggacaagctcgtcttccccgcagtgaccatctgcaccctcaatccctacaggtacccggaaattaaagaggagctggaggagctggaccgcatcacagagcagacgctctttgacctgtacaaatacagctccttcaccactctcgtggccggctcccgcagccgtcgcgacctgcgggggactctgccgcaccccttgcagcgcctgagggtcccgcccccgcctcacggggcccgtcgagcccgtagcgtggcctccagcttgcgggacaacaacccccaggtggactggaaggactggaagatcggcttccagctgtgcaaccagaacaaatcggactgcttctaccagacatactcatcaggggtggatgcggtgagggagtggtaccgcttccactacatcaacatcctgtcgaggctgccagagactctgccatccctggaggaggacacgctgggcaacttcatcttcgcctgccgcttcaaccaggtctcctcaaccagcgaattactctcacttccaccacccgatgtatggaaactgctatactttcaatgacaagaacaactccaacctctggatgtcttccatgcctggaatcaacaacggtctgtccctgatgctgcgcgcagagcagaatgacttcattcccctgctgtccacagtgactggggcccgggtaatggtgcacgggcaggatgaacctgcctttatggatgatggtggctttaacttgcggcctggcgtggagacctccatcagcatgaggaaggaaaccctggacagacttgggggcgattatggcgactgcaccaagaatggcagtgatgttcctgttgagaacctttacccttcaaagtacacacagcaggtgtgtattcactcctgcttccaggagagcatgatcaaggagtgtggctgtgcctacatcttctatccgcggccccagaacgtggagtactgtgactacagaaagcacagttcctgggggtactgctactataagctccaggttgacttctcctcagaccacctgggctgtttcaccaagtgccggaagccatgcagcgtgaccagctaccagctctctgctggttactcacgatggccctcggtgacatcccaggaatgggtcttccagatgctatcgcgacagaacaattacaccgtcaacaacaagagaaatggagtggccaaagtcaacatcttcttcaaggagctgaactacaaaaccaattctgagtctccctctgtcacgatggtcaccctcctgtccaacctgggcagccagtggagcctgtggttcggctcctcggtgttgtctgtggtggagatggctgagctcgtctttgacctgctggtcatcatgttcctcatgctgctccgaaggttccgaagccgatactggtctccaggccgagggggcaggggtgctcaggaggtagcctccaccctggcatcctcccctccttcccacttctgcccccaccccatgtctctgtccttgtcccagccaggccctgctccctctccagccttgacagcccctccccctgcctatgccaccctgggcccccgcccatctccagggggctctgcaggggccagttcctccacctgtcctctgggggggccctgagagggaaggagaggtttctcacaccaaggcagatgctcctctggtgggagggtgctggccctggcaagattgaaggatgtgcagggcttcctctcagagccgcccaaactgccgttgatgtgtggaggggaagcaagatgggtaagggctcaggaagttgctccaagaacagtagctgatgaagctgcccagaagtgccttggctccagccctgtaccccttggtactgcctctgaacactctggtttccccacccaactgcggctaagtctctttttcccttggatcagccaagcgaaacttggagctttgacaaggaactttcctaagaaaccgctgataaccaggacaaaacacaaccaagggtacacgcaggcatgcacgggtttcctgcccagcgacggcttaagccagcccccgactggcctggccacactgctctccagtagcacagatgtctgctcctcctcttgaacttgggtgggaaaccccacccaaaagccccctttgttacttaggcaattccccttccctgactcccgagggctagggctagagcagacccgggtaagtaaaggcagacccagggctcctctagcctcatacccgtgccctcacagagccatgccccggcacctctgccctgtgtctttcatacctctacatgtctgcttgagatatttcctcagcctgaaagtttccccaaccatctgccagagaactcctatgcatcccttagaaccctgctcagacaccattacttttgtgaacgcttctgccacatcttgtcttccccaaaattgatcactccgccttctcctgggctcccgtagcacactataacatctgctggagtgttgctgttgcaccatactttcttgtacatttgtgtctcccttcccaactagactgtaagtgccttgcggtcagggactgaatcttgcccgtttatgtatgctccatgtctagcccatcatcctgcttggagcaagtaggcaggagctcaataaatgtttgttgcatgaa

SEQ ID NO: 323339 - DNA, 758 bp, Homo sapiens
gagagggagtgagaggcaggagctgagacacagatcctggaggaagaagaccaaaggaagggggcagagacagaaagggaggtgctaggacaaaactcgaaaggtggccctatcagggaagcagaggagaggccgttctagggaagcccagctccggcacttttggccccaactcccgcaggtctgctggtcctgtccgtcagtcctcagaaccccagatcactcattctttgcccttggccctgccaaggggcttatccccggctgcgtgtcccctctgactctagtctctgtgtccagtgcaaccagaacaaatcggactgcttctaccagacatactcatcaggggtggatgcggtgagggagtggtaccgcttccactacatcaacatcctgtcgaggctgccagagactctgccatccctggaggaggacacgctgggcaacttcatcttcgcctgccgcttcaaccaggtctcctcaaccagccaaccaggcgtgagtcagtcctgcctggctccttgctctccgcggggtccgcttccctgggtcagcctcacgccctgcatgggcagggcccaggaaatgcttgttgactaaaaaaatgccagtgccagcaggccagggggaagcactggctttgggcccacaccctgccccagagagcgccctacgaactcctgctgctccctgcactgctggatctgagggaagtggcctcacaggatgccttgggaagactggggctttgagaaacc

SEQ ID NO: 323340 - DNA, 446 bp, Homo sapiens
ggtcttcctcctgcctccagattccagctcaggggttgccaggtccctttgcgggtcttcctgaacttgcttctcttgcagctttagagactgggcaaggaagggagagtggatttccatctcctaactcttttctaggattcccgcctctgccaactctgctctctctgcacccctaggtctgtccctgatgctgcgcgcagagcagaatgacttcattcccctgctgtccacagtgactggggcccgggtaatggtgcacgggcaggatgaacctgcctttatggatgatggtggctttaacttgcggcctggcgtggagacctccatcagcatgaggaaggaaaccctggacagacttgggggcgattatggcgactgcactccagcctgggcgacagcgagactcggtctcaaaaaaaaataaataaataaaataaataaat

SEQ ID NO: 323341 - DNA, 3459 bp, Homo sapiens
gagagggagtgagaggcaggagctgagacacagatcctggaggaagaagaccaaaggaagggggcagagacagaaagggaggtgctaggacaaaactcgaaaggtggccctatcagggaagcagaggagaggccgttctagggaagcccagctccggcacttttggccccaactcccgcaggtctgctggctccaggaaaggtggaggagggagggaggagtgggagaatgtgggcgcagggtgggacatgggcatggccaggggcagcctcactcgggttccaggggtgatgggagagggcactcagggcccagagctcagccttgaccctgacccttgctctccccaatccactccggggctcatgaaggggaacaagctggaggagcaggaccctagacctctgcagcccataccaggtctcatggaggggaacaagctggaggagcaggactctagccctccacagtccactccagggctcatgaaggggaacaagcgtgaggagcaggggctgggccccgaacctgcggcgccccagcagcccacggcggaggaggaggccctgatcgagttccaccgctcctaccgagagctcttcgagttcttctgcaacaacaccaccatccacggcgccatccgcctggtgtgctcccagcacaaccgcatgaagacggccttctgggcagtgctgtggctctgcacctttggcatgatgtactggcaattcggcctgcttttcggagagtacttcagctaccccgtcagcctcaacatcaacctcaactcggacaagctcgtcttccccgcagtgaccatctgcaccctcaatccctacaggtacccggaaattaaagaggagctggaggagctggaccgcatcacagagcagacgctctttgacctgtacaaatacagctccttcaccactctcgtggccggctcccgcagccgtcgcgacctgcgggggactctgccgcaccccttgcagcgcctgagggtcccgcccccgcctcacggggcccgtcgagcccgtagcgtggcctccagcttgcgggacaacaacccccaggtggactggaaggactggaagatcggcttccagctgtgcaaccagaacaaatcggactgcttctaccagacatactcatcaggggtggatgcggtgagggagtggtaccgcttccactacatcaacatcctgtcgaggctgccagagactctgccatccctggaggaggacacgctgggcaacttcatcttcgcctgccgcttcaaccaggtctcctcaaccagcgaattactctcacttccaccacccgatgtatggaaactgctatactttcaatgacaagaacaactccaacctctggatgtcttccatgcctggaatcaacaacggtctgtccctgatgctgcgcgcagagcagaatgacttcattcccctgctgtccacagtgactggggcccgggtaatggtgcacgggcaggatgaacctgcctttatggatgatggtggctttaacttgcggcctggcgtggagacctccatcagcatgaggaaggaaaccctggacagacttgggggcgattatggcgactgcaccaagaatggcagtgatgttcctgttgagaacctttacccttcaaagtacacacagcaggtgtgtattcactcctgcttccaggagagcatgatcaaggagtgtggctgtgcctacatcttctatccgcggccccagaacgtggagtactgtgactacagaaagcacagttcctgggggtactgctactataagctccaggttgacttctcctcagaccacctgggctgtttcaccaagtgccggaagccatgcagcgtgaccagctaccagctctctgctggttactcacgatggccctcggtgacatcccaggaatgggtcttccagatgctatcgcgacagaacaattacaccgtcaacaacaagagaaatggagtggccaaagtcaacatcttcttcaaggagctgaactacaaaaccaattctgagtctccctctgtcacgatggtcaccctcctgtccaacctgggcagccagtggagcctgtggttcggctcctcggtgttgtctgtggtggagatggctgagctcgtctttgacctgctggtcatcatgttcctcatgctgctccgaaggttccgaagccgatactggtctccaggccgagggggcaggggtgctcaggaggtagcctccaccctggcatcctcccctccttcccacttctgcccccaccccatgtctctgtccttgtcccagccaggccctgctccctctccagccttgacagcccctccccctgcctatgccaccctgggcccccgcccatctccagggggctctgcaggggccagttcctccacctgtcctctgggggggccctgagagggaaggagaggtttctcacaccaaggcagatgctcctctggtgggagggtgctggccctggcaagattgaaggatgtgcagggcttcctctcagagccgcccaaactgccgttgatgtgtggaggggaagcaagatgggtaagggctcaggaagttgctccaagaacagtagctgatgaagctgcccagaagtgccttggctccagccctgtaccccttggtactgcctctgaacactctggtttccccacccaactgcggctaagtctctttttcccttggatcagccaagcgaaacttggagctttgacaaggaactttcctaagaaaccgctgataaccaggacaaaacacaaccaagggtacacgcaggcatgcacgggtttcctgcccagcgacggcttaagccagcccccgactggcctggccacactgctctccagtagcacagatgtctgctcctcctcttgaacttgggtgggaaaccccacccaaaagccccctttgttacttaggcaattccccttccctgactcccgagggctagggctagagcagacccgggtaagtaaaggcagacccagggctcctctagcctcatacccgtgccctcacagagccatgccccggcacctctgccctgtgtctttcatacctctacatgtctgcttgagatatttcctcagcctgaaagtttccccaaccatctgccagagaactcctatgcatcccttagaaccctgctcagacaccattacttttgtgaacgcttctgccacatcttgtcttccccaaaattgatcactccgccttctcctgggctcccgtagcacactataacatctgctggagtgttgctgttgcaccatactttcttgtacatttgtgtctcccttcccaactagactgtaagtgccttgcggtcagggactgaatcttgcccgtttatgtatgctccatgtctagcccatcatcctgcttggagcaagtaggcaggagctcaataaatgtttgttgcatgaa

SEQ ID NO: 323342 - DNA, 3055 bp, Homo sapiens
gcggcactcaagccgaaaggccaccgacactcgcctgcggggatcagggcgggatgacctgggtaccgcggtcacgccaaggccgaggccctcacccttcccctctttgggaaagggcagacaagttccgggttcccttctaggtccgggcgagggggagagcgccccacagacgacaggcgcctcctgcctctctccttcaataaacagtccacagtgtcccggctgggctcgccgtggcctccgccttcccggcggacacacctgtttacccttcaccgccggacggccaggaggcgccacgacgaccccagccccgcccaggcttctccgggatggaccggcctcccggggcacagatgaggaccctgaccccggaggggccagacactcgctccagggcccctggcctgaccctcttcccctcgccccttcaggtacccggaaattaaagaggagctggaggagctggaccgcatcacagagcagacgctctttgacctgtacaaatacagctccttcaccactctcgtggccggctcccgcagccgtcgcgacctgcgggggactctgccgcaccccttgcagcgcctgagggtcccgcccccgcctcacggggcccgtcgagcccgtagcgtggcctccagcttgcgggacaacaacccccaggtggactggaaggactggaagatcggcttccagctgtgcaaccagaacaaatcggactgcttctaccagacatactcatcaggggtggatgcggtgagggagtggtaccgcttccactacatcaacatcctgtcgaggctgccagagactctgccatccctggaggaggacacgctgggcaacttcatcttcgcctgccgcttcaaccaggtctcctcaaccagcgaattactctcacttccaccacccgatgtatggaaactgctatactttcaatgacaagaacaactccaacctctggatgtcttccatgcctggaatcaacaacggtctgtccctgatgctgcgcgcagagcagaatgacttcattcccctgctgtccacagtgactggggcccgggtaatggtgcacgggcaggatgaacctgcctttatggatgatggtggctttaacttgcggcctggcgtggagacctccatcagcatgaggaaggaaaccctggacagacttgggggcgattatggcgactgcaccaagaatggcagtgatgttcctgttgagaacctttacccttcaaagtacacacagcaggtgtgtattcactcctgcttccaggagagcatgatcaaggagtgtggctgtgcctacatcttctatccgcggccccagaacgtggagtactgtgactacagaaagcacagttcctgggggtactgctactataagctccaggttgacttctcctcagaccacctgggctgtttcaccaagtgccggaagccatgcagcgtgaccagctaccagctctctgctggttactcacgatggccctcggtgacatcccaggaatgggtcttccagatgctatcgcgacagaacaattacaccgtcaacaacaagagaaatggagtggccaaagtcaacatcttcttcaaggagctgaactacaaaaccaattctgagtctccctctgtcacgatggtcaccctcctgtccaacctgggcagccagtggagcctgtggttcggctcctcggtgttgtctgtggtggagatggctgagctcgtctttgacctgctggtcatcatgttcctcatgctgctccgaaggttccgaagccgatactggtctccaggccgagggggcaggggtgctcaggaggtagcctccaccctggcatcctcccctccttcccacttctgcccccaccccatgtctctgtccttgtcccagccaggccctgctccctctccagccttgacagcccctccccctgcctatgccaccctgggcccccgcccatctccagggggctctgcaggggccagttcctccacctgtcctctgggggggccctgagagggaaggagaggtttctcacaccaaggcagatgctcctctggtgggagggtgctggccctggcaagattgaaggatgtgcagggcttcctctcagagccgcccaaactgccgttgatgtgtggaggggaagcaagatgggtaagggctcaggaagttgctccaagaacagtagctgatgaagctgcccagaagtgccttggctccagccctgtaccccttggtactgcctctgaacactctggtttccccacccaactgcggctaagtctctttttcccttggatcagccaagcgaaacttggagctttgacaaggaactttcctaagaaaccgctgataaccaggacaaaacacaaccaagggtacacgcaggcatgcacgggtttcctgcccagcgacggcttaagccagcccccgactggcctggccacactgctctccagtagcacagatgtctgctcctcctcttgaacttgggtgggaaaccccacccaaaagccccctttgttacttaggcaattccccttccctgactcccgagggctagggctagagcagacccgggtaagtaaaggcagacccagggctcctctagcctcatacccgtgccctcacagagccatgccccggcacctctgccctgtgtctttcatacctctacatgtctgcttgagatatttcctcagcctgaaagtttccccaaccatctgccagagaactcctatgcatcccttagaaccctgctcagacaccattacttttgtgaacgcttctgccacatcttgtcttccccaaaattgatcactccgccttctcctgggctcccgtagcacactataacatctgctggagtgttgctgttgcaccatactttcttgtacatttgtgtctcccttcccaactagactgtaagtgccttgcggtcagggactgaatcttgcccgtttatgtatgctccatgtctagcccatcatcctgcttggagcaagtaggcaggagctcaataaatgtttgttgcatgaa

SEQ ID NO: 323343 - DNA, 2560 bp, Homo sapiens
ccggccagcgggcgggctccccagccaggccgctgcacctgtcaggtgagggggaggagaggtttggctgccagattcaactggaaaggaaccagtcccagtccagccgcaacctgggagtgggaagctggaggcagcccagacctcctggagccctgcagtcctggggcagagacagaatcaggacacagctcgagatgacaggatctatgcaactaacccagagatgacacagagatgaatgagatgtggctcctgtcatcaaggagctcatgattcaatggggaactaacacttagatgcatgggcagttagggacatgcaagaatctttgtaatgcaacaagagagaagttacaaggcagcacggaagtcaatgccggtgaacccagatggcctggaattactctcacttccaccacccgatgtatggaaactgctatactttcaatgacaagaacaactccaacctctggatgtcttccatgcctggaatcaacaacggtctgtccctgatgctgcgcgcagagcagaatgacttcattcccctgctgtccacagtgactggggcccgggtaatggtgcacgggcaggatgaacctgcctttatggatgatggtggctttaacttgcggcctggcgtggagacctccatcagcatgaggaaggaaaccctggacagacttgggggcgattatggcgactgcaccaagaatggcagtgatgttcctgttgagaacctttacccttcaaagtacacacagcaggtgtgtattcactcctgcttccaggagagcatgatcaaggagtgtggctgtgcctacatcttctatccgcggccccagaacgtggagtactgtgactacagaaagcacagttcctgggggtactgctactataagctccaggttgacttctcctcagaccacctgggctgtttcaccaagtgccggaagccatgcagcgtgaccagctaccagctctctgctggttactcacgatggccctcggtgacatcccaggaatgggtcttccagatgctatcgcgacagaacaattacaccgtcaacaacaagagaaatggagtggccaaagtcaacatcttcttcaaggagctgaactacaaaaccaattctgagtctccctctgtcacgatggtcaccctcctgtccaacctgggcagccagtggagcctgtggttcggctcctcggtgttgtctgtggtggagatggctgagctcgtctttgacctgctggtcatcatgttcctcatgctgctccgaaggttccgaagccgatactggtctccaggccgagggggcaggggtgctcaggaggtagcctccaccctggcatcctcccctccttcccacttctgcccccaccccatgtctctgtccttgtcccagccaggccctgctccctctccagccttgacagcccctccccctgcctatgccaccctgggcccccgcccatctccagggggctctgcaggggccagttcctccacctgtcctctgggggggccctgagagggaaggagaggtttctcacaccaaggcagatgctcctctggtgggagggtgctggccctggcaagattgaaggatgtgcagggcttcctctcagagccgcccaaactgccgttgatgtgtggaggggaagcaagatgggtaagggctcaggaagttgctccaagaacagtagctgatgaagctgcccagaagtgccttggctccagccctgtaccccttggtactgcctctgaacactctggtttccccacccaactgcggctaagtctctttttcccttggatcagccaagcgaaacttggagctttgacaaggaactttcctaagaaaccgctgataaccaggacaaaacacaaccaagggtacacgcaggcatgcacgggtttcctgcccagcgacggcttaagccagcccccgactggcctggccacactgctctccagtagcacagatgtctgctcctcctcttgaacttgggtgggaaaccccacccaaaagccccctttgttacttaggcaattccccttccctgactcccgagggctagggctagagcagacccgggtaagtaaaggcagacccagggctcctctagcctcatacccgtgccctcacagagccatgccccggcacctctgccctgtgtctttcatacctctacatgtctgcttgagatatttcctcagcctgaaagtttccccaaccatctgccagagaactcctatgcatcccttagaaccctgctcagacaccattacttttgtgaacgcttctgccacatcttgtcttccccaaaattgatcactccgccttctcctgggctcccgtagcacactataacatctgctggagtgttgctgttgcaccatactttcttgtacatttgtgtctcccttcccaactagactgtaagtgccttgcggtcagggactgaatcttgcccgtttatgtatgctccatgtctagcccatcatcctgcttggagcaagtaggcaggagctcaataaatgtttgttgcatgaa

SEQ ID NO: 323344 - DNA, 3529 bp, Homo sapiens
gagagggagtgagaggcaggagctgagacacagatcctggaggaagaagaccaaaggaagggggcagagacagaaagggaggtgctaggacaaaactcgaaaggtggccctatcagggaagcagaggagaggccgttctagggaagcccagctccggcacttttggccccaactcccgcaggtctgctggctccaggaaaggtggaggagggagggaggagtgggagaatgtgggcgcagggtgggacatgggcatggccaggggcagcctcactcgggttccaggggtgatgggagagggcactcagggcccagagctcagccttgaccctgacccttgctctccccaatccactccggggctcatgaaggggaacaagctggaggagcaggaccctagacctctgcagcccataccaggtctcatggaggggaacaagctggaggagcaggactctagccctccacagtccactccagggctcatgaaggggaacaagcgtgaggagcaggggctgggccccgaacctgcggcgccccagcagcccacggcggaggaggaggccctgatcgagttccaccgctcctaccgagagctcttcgagttcttctgcaacaacaccaccatccacggcgccatccgcctggtgtgctcccagcacaaccgcatgaagacggccttctgggcagtgctgtggctctgcacctttggcatgatgtactggcaattcggcctgcttttcggagagtacttcagctaccccgtcagcctcaacatcaacctcaactcggacaagctcgtcttccccgcagtgaccatctgcaccctcaatccctacaggtacccggaaattaaagaggagctggaggagctggaccgcatcacagagcagacgctctttgacctgtacaaatacagctccttcaccactctcgtggccggctcccgcagccgtcgcgacctgcgggggactctgccgcaccccttgcagcgcctgagggtcccgcccccgcctcacggggcccgtcgagcccgtagcgtggcctccagcttgcgggacaacaacccccaggtggactggaaggactggaagatcggcttccagctgtgcaaccagaacaaatcggactgcttctaccagacatactcatcaggggtggatgcggtgagggagtggtaccgcttccactacatcaacatcctgtcgaggctgccagagactctgccatccctggaggaggacacgctgggcaacttcatcttcgcctgccgcttcaaccaggtctcctcaaccagcgaattactctcacttccaccacccgatgtatggaaactgctatactttcaatgacaagaacaactccaacctctggatgtcttccatgcctggaatcaacaacggtctgtccctgatgctgcgcgcagagcagaatgacttcattcccctgctgtccacagtgactggggcccgggtaatggtgcacgggcaggatgaacctgcctttatggatgatggtggctttaacttgcggcctggcgtggagacctccatcagcatgaggaaggaaaccctggacagacttgggggcgattatggcgactgcaccaagaatggcagtgatgttcctgttgagaacctttacccttcaaagtacacacagcaggtgtgtattcactcctgcttccaggagagcatgatcaaggagtgtggctgtgcctacatcttctatccgcggccccagaacgtggagtactgtgactacagaaagcacagttcctgggggtactgctactataagctccaggttgacttctcctcagaccacctgggctgtttcaccaagtgccggaagccatgcagcgtgaccagctaccagctctctgctggttactcacgatggccctcggtgacatcccaggaatgggtcttccagatgctatcgcgacagaacaattacaccgtcaacaacaagagaaatggagtggccaaagtcaacatcttcttcaaggagctgaactacaaaaccaattctgagtctccctctgtcacgatggtcaccctcctgtccaacctgggcagccagtggagcctgtggttcggctcctcggtgttgtctgtggtggagatggctgagctcgtctttgacctgctggtcatcatgttcctcatgctgctccgaaggttccgaagccgatactggtctccaggccgagggggcaggggtgctcaggaggtagcctccaccctggcatcctcccctccttcccacttctgcccccaccccatgtctctgtccttgtcccagccaggccctgctccctctccagccttgacagcccctccccctgcctatgccaccctgggcccccgcccatctccagggggctctgcaggggccagttcctccacctgtcctctgggggggccctgagagggaaggagaggtttctcacaccaaggcagatgctcctctggtgggagggtgctggccctggcaagattgaaggatgtgcagggcttcctctcagagccgcccaaactgccgttgatgtgtggaggggaagcaagatgggtaagggctcaggaagttgctccaagaacagtagctgatgaagctgcccagaagtgccttggctccagccctgtaccccttggtactgcctctgaacactctggtttccccacccaactgcggctaagtctctttttcccttggatcagccaagcgaaacttggagctttgacaaggaactttcctaagaaaccgctgataaccaggacaaaacacaaccaagggtacacgcaggcatgcacgggtttcctgcccagcgacggcttaagccagcccccgactggcctggccacactgctctccagtagcacagatgtctgctcctcctcttgaacttgggtgggaaaccccacccaaaagccccctttgttacttaggcaattccccttccctgactcccgagggctagggctagagcagacccgggtaagtaaaggcagacccagggctcctctagcctcatacccgtgccctcacagagccatgccccggcacctctgccctgtgtctttcatacctctacatgtctgcttgagatatttcctcagcctgaaagtttccccaaccatctgccagagaactcctatgcatcccttagaaccctgctcagacaccattacttttgtgaacgcttctgccacatcttgtcttccccaaaattgatcactccgccttctcctgggctcccgtagcacactataacatctgctggagtgttgctgttgcaccatactttcttgtacatttgtgtctcccttcccaactagactgtaagtgccttgcggtcagggactgaatcttgcccgtttatgtatgctccatgtctagcccatcatcctgcttggagcaagtaggcaggagctcaataaatgtttgttgcatgaaaaaaaaaaaaaacaaaccggggacacaaagcgggcgcgaaaacgaggtagaagggcaaggctaggtccga

SEQ ID NO: 323345 - DNA, 3302 bp, Homo sapiens
gagagggagtgagaggcaggagctgagacacagatcctggaggaagaagaccaaaggaagggggcagagacagaaagggaggtgctaggacaaaactcgaaaggtggccctatcagggaagcagaggagaggccgttctagggaagcccagctccggcacttttggccccaactcccgcaggtctgctggctccaggaaaggtggaggagggagggaggagtgggagaatgtgggcgcagggtgggacatgggcatggccaggggcagcctcactcgggttccaggggtgatgggagagggcactcagggcccagagctcagccttgaccctgacccttgctctccccaatccactccggggctcatgaaggggaacaagctggaggagcaggaccctagacctctgcagcccataccaggtctcatggaggggaacaagctggaggagcaggactctagccctccacagtccactccagggctcatgaaggggaacaagcgtgaggagcaggggctgggccccgaacctgcggcgccccagcagcccacggcggaggaggaggccctgatcgagttccaccgctcctaccgagagctcttcgagttcttctgcaacaacaccaccatccacggcgccatccgcctggtgtgctcccagcacaaccgcatgaagacggccttctgggcagtgctgtggctctgcacctttggcatgatgtactggcaattcggcctgcttttcggagagtacttcagctaccccgtcagcctcaacatcaacctcaactcggacaagctcgtcttccccgcagtgaccatctgcaccctcaatccctacaggtacccggaaattaaagaggagctggaggagctggaccgcatcacagagcagacgctctttgacctgtacaaatacagctccttcaccactctcgtggccggctcccgcagccgtcgcgacctgcgggggactctgccgcaccccttgcagcgcctgagggtcccgcccccgcctcacggggcccgtcgagcccgtagcgtggcctccagcttgcgggacaacaacccccaggtggactggaaggactggaagatcggcttccagctgtgcaaccagaacaaatcggactgcttctaccagacatactcatcaggggtggatgcggtgagggagtggtaccgcttccactacatcaacatcctgtcgaggctgccagagactctgccatccctggaggaggacacgctgggcaacttcatcttcgcctgccgcttcaaccaggtctcctcaaccagcgaattactctcacttccaccacccgatgtatggaaactgctatactttcaatgacaagaacaactccaacctctggatgtcttccatgcctggaatcaacaacggtctgtccctgatgctgcgcgcagagcagaatgacttcattcccctgctgtccacagtgactggggcccgggtaatggtgcacgggcaggatgaacctgcctttatggatgatggtggctttaacttgcggcctggcgtggagacctccatcagcatgaggaaggaaaccctggacagacttgggggcgattatggcgactgcaccaagaatggcagtgatgttcctgttgagaacctttacccttcaaagtacacacagcaggtgtgtattcactcctgcttccaggagagcatgatcaaggagtgtggctgtgcctacatcttctatccgcggccccagaacgtggagtactgtgactacagaaagcacagttcctgggggtactgctactataagctccaggttgacttctcctcagaccacctgggctgtttcaccaagtgccggaagccatgcagcgtgaccagctaccagctctctgctggttactcacgatggccctcggtgacatcccaggaatgggtcttccagatgctatcgcgacagaacaattacaccgtcaacaacaagagaaatggagtggccaaagtcaacatcttcttcaaggagctgaactacaaaaccaattctgagtctccctctgtcacgatggtcaccctcctgtccaacctgggcagccagtggagcctgtggttcggctcctcggtgttgtctgtggtggagatggctgagctcgtctttgacctgctggtcatcatgttcctcatgctgctccgaaggttccgaagccgatactggtctccaggccgagggggcaggggtgctcaggaggtagcctccaccctggcatcctcccctccttcccacttctgcccccaccccatgtctctgtccttgtcccagccaggccctgctccctctccagccttgacagcccctccccctgcctatgccaccctgggcccccgcccatctccagggggctctgcaggggccagttcctccacctgtcctctgggggggccctgagagggaaggagaggtttctcacaccaaggcagatgctcctctggtgggagggtgctggccctggcaagattgaaggatgtgcagggcttcctctcagagccgcccaaactgccgttgatgtgtggaggggaagcaagatgggtaagggctcaggaagttgctccaagaacagtagctgatgaagctgcccagaagtgccttggctccagccctgtaccccttggtactgcctctgaacactctggtttccccacccaactgcggctaagtctctttttcccttggatcagccaagcgaaacttggagctttgacaaggaactttcctaagaaaccgctgataaccaggacaaaacacaaccaagggtacacgcaggcatgcacgggtttcctgcccagcgacggcttaagccagcccccgactggcctggccacactgctctccagtagcacagatgtctgctcctcctcttgaacttgggtgggaaaccccacccaaaagccccctttgttacttaggcaattccccttccctgactcccgagggctagggctagagcagacccgggtaagtaaaggcagacccagggctcctctagcctcatacccgtgccctcacagagccatgccccggcacctctgccctgtgtctttcatacctctacatgtctgcttgagatatttcctcagcctgaaagtttccccaaccatctgccagagaactcctatgcatcccttagaaccctgctcagacaccattacttttgtgaacgcttctgccacatcttgtcttccccaaaattgatcactccgcccatcatcctgcttggagcaagtaggcaggagctcaataaatgtttgttgcatgaa

SEQ ID NO: 323346 - DNA, 856 bp, Homo sapiens
accgatgtgcataagatgtctggtgctgccactgatacccgtgtacgctgtgtacacatctggatgtggcatactcaagagtcgactcatgtctctttgctcccttgggatcatggcacgcggaaactagagaacgctctgggcctggaactttcctaagaaaccgctgataaccaggacaaaacacaaccaagggtacacgcaggcatgcacgggtttcctgcccagcgacggcttaagccagcccccgactggcctggccacactgctctccagtagcacagatgtctgctcctcctcttgaacttgggtgggaaaccccacccaaaagccccctttgttacttaggcaattccccttccctgactcccgagggctagggctagagcagacccgggtaagtaaaggcagacccagggctcctctagcctcatacccgtgccctcacagagccatgccccggcacctctgccctgtgtctttcatacctctacatgtctgcttgagatatttcctcagcctgaaagtttccccaaccatctgccagagaactcctatgcatcccttagaaccctgctcagacaccattacttttgtgaacgcttctgccacatcttgtcttccccaaaattgatcactccgccttctcctgggctcccgtagcacactataacatctgctggagtgttgctgttgcaccatactttcttgtacatttgtgtctcccttcccaactagactgtaagtgccttgcggtcagggactgaatcttgcccgtttatgtatgctccatgtctagcccatcatcctgcttggagcaagtaggcaggagctcaataaatgtttgttgcatgaa

SEQ ID NO: 323347 - DNA, 1669 bp, Homo sapiens
gagagggagtgagaggcaggagctgagacacagatcctggaggaagaagaccaaaggaagggggcagagacagaaagggaggtgctaggacaaaactcgaaaggtggccctatcagggaagcagaggagaggccgttctagggaagcccagctccggcacttttggccccaactcccgcaggtctgctggctccaggaaaggtggaggagggagggaggagtgggagaatgtgggcgcagggtgggacatgggcatggccaggggcagcctcactcgggttccaggggtgatgggagagggcactcagggcccagagctcagccttgaccctgacccttgctctccccaatccactccggggctcatgaaggggaacaagctggaggagcaggaccctagacctctgcagcccataccaggtctcatggaggggaacaagctggaggagcaggactctagccctccacagtccactccagggctcatgaaggggaacaagcgtgaggagcaggggctgggccccgaacctgcggcgccccagcagcccacggcggaggaggaggccctgatcgagttccaccgctcctaccgagagctcttcgagttcttctgcaacaacaccaccatccacggcgccatccgcctggtgtgctcccagcacaaccgcatgaagacggccttctgggcagtgctgtggctctgcacctttggcatgatgtactggcaattcggcctgcttttcggagagtacttcagctaccccgtcagcctcaacatcaacctcaactcggacaagctcgtcttccccgcagtgaccatctgcaccctcaatccctacaggtacccggaaattaaagaggagctggaggagctggaccgcatcacagagcagacgctctttgacctgtacaaatacagctccttcaccactctcgtggccggctcccgcagccgtcgcgacctgcgggggactctgccgcaccccttgcagcgcctgagggtcccgcccccgcctcacggggcccgtcgagcccgtagcgtggcctccagcttgcgggacaacaacccccaggtggactggaaggactggaagatcggcttccagctgtgcaaccagaacaaatcggactgcttctaccagacatactcatcaggggtggatgcggtgagggagtggtaccgcttccactacatcaacatcctgtcgaggctgccagagactctgccatccctggaggaggacacgctgggcaacttcatcttcgcctgccgcttcaaccaggtctcctcaaccagcgaattactctcacttccaccacccgatgtatggaaactgctatactttcaatgacaagaacaactccaacctctggatgtcttccatgcctggaatcaacaacggtctgtccctgatgctgcgcgcagagcagaatgacttcattcccctgctgtccacagtgactggggcccgggtaatggtgcacgggcaggatgaacctgcctttatggatgatggtggctttaacttgcggcctggcgtggagacctccatcagcatgaggaaggaaaccctggacagacttgggggcgattatggcgactgcactccagcctgggcgacagcgagactcggtctcaaaaaaaaataaataaataaaataaataaat

SEQ ID NO: 323348 - DNA, 862 bp, Homo sapiens
gagagggagtgagaggcaggagctgagacacagatcctggaggaagaagaccaaaggaagggggcagagacagaaagggaggtgctaggacaaaactcgaaaggtggccctatcagggaagcagaggagaggccgttctagggaagcccagctccggcacttttggccccaactcccgcaggtctgctggctccaggaaaggtggaggagggagggaggagtgggagaatgtgggcgcagggtgggacatgggcatggccaggggcagcctcactcgggttccaggggtgatgggagagggcactcagggcccagagctcagccttgaccctgacccttgctctccccaatccactccggggctcatgaaggggaacaagctggaggagcaggaccctagacctctgcagcccataccaggtctcatggaggggaacaagctggaggagcaggactctagccctccacagtccactccagggctcatgaaggggaacaagcgtgaggagcaggggctgggccccgaacctgcggcgccccagcagcccacggcggaggaggaggccctgatcgagttccaccgctcctaccgagagctcttcgagttcttctgcaacaacaccaccatccacggcgccatccgcctggtgtgctcccagcacaaccgcatgaagacggccttctgggcagtgctgtggctctgcacctttggcatgatgtactggcaattcggcctgcttttcggagagtacttcagctaccccgtcagcctcaacatcaacctcaactcggacaagctcgtcttccccgcagtgaccatctgcaccctcaatccctacaggtcggttagtccctctgcccc

SEQ ID NO: 323349 - DNA, 319 bp, Homo sapiens
ccggccagcgggcgggctccccagccaggccgctgcacctgtcaggtgagggggaggagaggtttggctgccagattcaactggaaaggaaccagtcccagtccagccgcaacctgggagtgggaagctggaggcagcccagacctcctggagccctgcagtcctggggcagagacagaatcaggacacagctcgaggtcagggccagaggctggagctgagggcctagagtgagagggggcaaggcaagggggggagaggaagagaggcaggattagagagaggaggcaggccagaaagaggagagcaggagagaccc

SEQ ID NO: 323350 - DNA, 431 bp, Homo sapiens
caccactggtcacactttctcctttaaccctgctcccctcctccccttcattcattcattcattcattcattcattcattcctcactcaacaactatttattaatcatctcctctatctcctagatgacaggatctatgcaactaacccagagatgacacagagatgaatgagatgtggctcctgtcatcaaggagctcatgattcaatggggaactaacacttagatgcatgggcagttagggacatgcaagaatctttgtaatgcaacaagagagaagttacaaggcagcacggaagtcaatgccggtgaacccagatggcctggtgagaggagcctggactagaaggtagatgtgtgaccttgggccagctgtttgagctctctgagccttagcttcctcctctgtgatatgaggatgagactctcac

SEQ ID NO: 323351 - DNA, 337 bp, Homo sapiens
ccagggggctgctgagaggctgagaggactcgggggtcttcagggatgaagggagacagcttggtgaggagggaagggggctcctctgccagagtccatccagaaccctctgtcccatcgtcaatgtacctctcctctcacagatggtcaccctcctgtccaacctgggcagccagtggagcctgtggttcggctcctcggtgttgtctgtggtggagatggctgagctcgtctttgacctgctggtcatcatgttcctcatgctgctccgaaggttccgaagccgatactggtctccaggccgagggggcaggggtgctcaggaggtagcctccac

SEQ ID NO: 323352 - DNA, 802 bp, Homo sapiens
gagagggagtgagaggcaggagctgagacacagatcctggaggaagaagaccaaaggaagggggcagagacagaaagggaggtgctaggacaaaactcgaaaggtggccctatcagggaagcagaggagaggccgttctagggaagcccagctccggcacttttggccccaactcccgcaggtctgctggctccaggaaaggtggaggagggagggaggagtgggagaatgtgggcgcagggtgggacatgggcatggccaggggcagcctcactcgggttccaggggtgatgggagagggcactcagggcccagagctcagccttgaccctgacccttgctctccccaatccactccggggctcatgaaggggaacaagctggaggagcaggaccctagacctctgcagcccataccaggtctcatggaggggaacaagctggaggagcaggactctagccctccacagtccactccagggctcatgaaggggaacaagcgtgaggagcaggggctgggccccgaacctgcggcgccccagcagcccacggcggaggaggaggccctttgatccgagtttccaagcggttccttaccgaagaaggctctttagaaggttcctttcttgggaagaaagaaccagcaattccaacgggcggcccattcccgcccttgggtgttggtcccccagggacagaaaccggcacttgactgaccggggcctttccttggggcaagttggcttggtggggttcttggccaccttttttggggccttgcaattgttacctgagtcttccg

SEQ ID NO: 323353 - DNA, 2826 bp, Homo sapiens
tcaacgctttatacttctactactttttcactcccatctgcatagtctgtgtctggctcccgtcgctagctccaagatggcagggtagcagaacacagatcctctctgtgccgtgtggcacatgtgctgtgctacaacccacacagcctccctgttctggaacctgtgatttgctgtgaaattgcagtcctactgcagctgtgttgcctctgtgattgctttctctctgtccccacacctgtcacagatgagttttggacctaccattctgagacatactgatgcaagaggctcccaggaaacacttggtactgatcttcctcccctcagctccgtgctcaccactggtcacactttctcctttaaccctgctcccctcctccccttcattcattcattcattcattcattcattcattcctcactcaacaactatttattaatcatctcctctatctcctagatgacaggatctatgcaactaacccagagatgacacagagatgaatgagatgtggctcctgtcatcaaggagctcatgattcaatggggaactaacacttagatgcatgggcagttagggacatgcaagaatctttgtaatgcaacaagagagaagttacaaggcagcacggaagtcaatgccggtgaacccagatggcctggaattactctcacttccaccacccgatgtatggaaactgctatactttcaatgacaagaacaactccaacctctggatgtcttccatgcctggaatcaacaacggtctgtccctgatgctgcgcgcagagcagaatgacttcattcccctgctgtccacagtgactggggcccgggtaatggtgcacgggcaggatgaacctgcctttatggatgatggtggctttaacttgcggcctggcgtggagacctccatcagcatgaggaaggaaaccctggacagacttgggggcgattatggcgactgcaccaagaatggcagtgatgttcctgttgagaacctttacccttcaaagtacacacagcaggtgtgtattcactcctgcttccaggagagcatgatcaaggagtgtggctgtgcctacatcttctatccgcggccccagaacgtggagtactgtgactacagaaagcacagttcctgggggtactgctactataagctccaggttgacttctcctcagaccacctgggctgtttcaccaagtgccggaagccatgcagcgtgaccagctaccagctctctgctggttactcacgatggccctcggtgacatcccaggaatgggtcttccagatgctatcgcgacagaacaattacaccgtcaacaacaagagaaatggagtggccaaagtcaacatcttcttcaaggagctgaactacaaaaccaattctgagtctccctctgtcacgatggtcaccctcctgtccaacctgggcagccagtggagcctgtggttcggctcctcggtgttgtctgtggtggagatggctgagctcgtctttgacctgctggtcatcatgttcctcatgctgctccgaaggttccgaagccgatactggtctccaggccgagggggcaggggtgctcaggaggtagcctccaccctggcatcctcccctccttcccacttctgcccccaccccatgtctctgtccttgtcccagccaggccctgctccctctccagccttgacagcccctccccctgcctatgccaccctgggcccccgcccatctccagggggctctgcaggggccagttcctccacctgtcctctgggggggccctgagagggaaggagaggtttctcacaccaaggcagatgctcctctggtgggagggtgctggccctggcaagattgaaggatgtgcagggcttcctctcagagccgcccaaactgccgttgatgtgtggaggggaagcaagatgggtaagggctcaggaagttgctccaagaacagtagctgatgaagctgcccagaagtgccttggctccagccctgtaccccttggtactgcctctgaacactctggtttccccacccaactgcggctaagtctctttttcccttggatcagccaagcgaaacttggagctttgacaaggaactttcctaagaaaccgctgataaccaggacaaaacacaaccaagggtacacgcaggcatgcacgggtttcctgcccagcgacggcttaagccagcccccgactggcctggccacactgctctccagtagcacagatgtctgctcctcctcttgaacttgggtgggaaaccccacccaaaagccccctttgttacttaggcaattccccttccctgactcccgagggctagggctagagcagacccgggtaagtaaaggcagacccagggctcctctagcctcatacccgtgccctcacagagccatgccccggcacctctgccctgtgtctttcatacctctacatgtctgcttgagatatttcctcagcctgaaagtttccccaaccatctgccagagaactcctatgcatcccttagaaccctgctcagacaccattacttttgtgaacgcttctgccacatcttgtcttccccaaaattgatcactccgccttctcctgggctcccgtagcacactataacatctgctggagtgttgctgttgcaccatactttcttgtacatttgtgtctcccttcccaactagactgtaagtgccttgcggtcagggactgaatcttgcccgtttatgtatgctccatgtctagcccatcatcctgcttggagcaagtaggcaggagctcaataaatgtttgttgcatgaa

SEQ ID NO: 323354 - DNA, 2089 bp, Homo sapiens
tatctatactgacctatctatactacctatctatactacctatctatactgacctatctatactaccttcattcccctgctgtccacagtgactggggcccgggtaatggtgcacgggcaggatgaacctgcctttatggatgatggtggctttaacttgcggcctggcgtggagacctccatcagcatgaggaaggaaaccctggacagacttgggggcgattatggcgactgcaccaagaatggcagtgatgttcctgttgagaacctttacccttcaaagtacacacagcaggtgtgtattcactcctgcttccaggagagcatgatcaaggagtgtggctgtgcctacatcttctatccgcggccccagaacgtggagtactgtgactacagaaagcacagttcctgggggtactgctactataagctccaggttgacttctcctcagaccacctgggctgtttcaccaagtgccggaagccatgcagcgtgaccagctaccagctctctgctggttactcacgatggccctcggtgacatcccaggaatgggtcttccagatgctatcgcgacagaacaattacaccgtcaacaacaagagaaatggagtggccaaagtcaacatcttcttcaaggagctgaactacaaaaccaattctgagtctccctctgtcacgatggtcaccctcctgtccaacctgggcagccagtggagcctgtggttcggctcctcggtgttgtctgtggtggagatggctgagctcgtctttgacctgctggtcatcatgttcctcatgctgctccgaaggttccgaagccgatactggtctccaggccgagggggcaggggtgctcaggaggtagcctccaccctggcatcctcccctccttcccacttctgcccccaccccatgtctctgtccttgtcccagccaggccctgctccctctccagccttgacagcccctccccctgcctatgccaccctgggcccccgcccatctccagggggctctgcaggggccagttcctccacctgtcctctgggggggccctgagagggaaggagaggtttctcacaccaaggcagatgctcctctggtgggagggtgctggccctggcaagattgaaggatgtgcagggcttcctctcagagccgcccaaactgccgttgatgtgtggaggggaagcaagatgggtaagggctcaggaagttgctccaagaacagtagctgatgaagctgcccagaagtgccttggctccagccctgtaccccttggtactgcctctgaacactctggtttccccacccaactgcggctaagtctctttttcccttggatcagccaagcgaaacttggagctttgacaaggaactttcctaagaaaccgctgataaccaggacaaaacacaaccaagggtacacgcaggcatgcacgggtttcctgcccagcgacggcttaagccagcccccgactggcctggccacactgctctccagtagcacagatgtctgctcctcctcttgaacttgggtgggaaaccccacccaaaagccccctttgttacttaggcaattccccttccctgactcccgagggctagggctagagcagacccgggtaagtaaaggcagacccagggctcctctagcctcatacccgtgccctcacagagccatgccccggcacctctgccctgtgtctttcatacctctacatgtctgcttgagatatttcctcagcctgaaagtttccccaaccatctgccagagaactcctatgcatcccttagaaccctgctcagacaccattacttttgtgaacgcttctgccacatcttgtcttccccaaaattgatcactccgccttctcctgggctcccgtagcacactataacatctgctggagtgttgctgttgcaccatactttcttgtacatttgtgtctcccttcccaactagactgtaagtgccttgcggtcagggactgaatcttgcccgtttatgtatgctccatgtctagcccatcatcctgcttggagcaagtaggcaggagctcaataaatgtttgttgcatgaa

SEQ ID NO: 323355 - DNA, 1646 bp, Homo sapiens
gagagggagtgagaggcaggagctgagacacagatcctggaggaagaagaccaaaggaagggggcagagacagaaagggaggtgctaggacaaaactcgaaaggtggccctatcagggaagcagaggagaggccgttctagggaagcccagctccggcacttttggccccaactcccgcaggtctgctggctccaggaaaggtggaggagggagggaggagtgggagaatgtgggcgcagggtgggacatgggcatggccaggggcagcctcactcgggttccaggggtgatgggagagggcactcagggcccagagctcagccttgaccctgacccttgctctccccaatccactccggggctcatgaaggggaacaagctggaggagcaggaccctagacctctgcagcccataccaggtctcatggaggggaacaagctggaggagcaggactctagccctccacagtccactccagggctcatgaaggggaacaagcgtgaggagcaggggctgggccccgaacctgcggcgccccagcagcccacggcggaggaggaggccctgatcgagttccaccgctcctaccgagagctcttcgagttcttctgcaacaacaccaccatccacggcgccatccgcctggtgtgctcccagcacaaccgcatgaagacggccctggcaagattgaaggatgtgcagggcttcctctcagagccgcccaaactgccgttgatgtgtggaggggaagcaagatgggtaagggctcaggaagttgctccaagaacagtagctgatgaagctgcccagaagtgccttggctccagccctgtaccccttggtactgcctctgaacactctggtttccccacccaactgcggctaagtctctttttcccttggatcagccaagcgaaacttggagctttgacaaggaactttcctaagaaaccgctgataaccaggacaaaacacaaccaagggtacacgcaggcatgcacgggtttcctgcccagcgacggcttaagccagcccccgactggcctggccacactgctctccagtagcacagatgtctgctcctcctcttgaacttgggtgggaaaccccacccaaaagccccctttgttacttaggcaattccccttccctgactcccgagggctagggctagagcagacccgggtaagtaaaggcagacccagggctcctctagcctcatacccgtgccctcacagagccatgccccggcacctctgccctgtgtctttcatacctctacatgtctgcttgagatatttcctcagcctgaaagtttccccaaccatctgccagagaactcctatgcatcccttagaaccctgctcagacaccattacttttgtgaacgcttctgccacatcttgtcttccccaaaattgatcactccgccttctcctgggctcccgtagcacactataacatctgctggagtgttgctgttgcaccatactttcttgtacatttgtgtctcccttcccaactagactgtaagtgccttgcggtcagggactgaatcttgcccgtttatgtatgctccatgtctagcccatcatcctgcttggagcaagtaggcaggagctcaataaatgtttgttgcatgaa

SEQ ID NO: 323356 - DNA, 1816 bp, Homo sapiens
gagagggagtgagaggcaggagctgagacacagatcctggaggaagaagaccaaaggaagggggcagagacagaaagggaggtgctaggacaaaactcgaaaggtggccctatcagggaagcagaggagaggccgttctagggaagcccagctccggcacttttggccccaactcccgcaggtctgctggctccaggaaaggtggaggagggagggaggagtgggagaatgtgggcgcagggtgggacatgggcatggccaggggcagcctcactcgggttccaggggtgatgggagagggcactcagggcccagagctcagccttgaccctgacccttgctctccccaatccactccggggctcatgaaggggaacaagctggaggagcaggaccctagacctctgcagcccataccaggtctcatggaggggaacaagctggaggagcaggactctagccctccacagtccactccagggctcatgaaggggaacaagcgtgaggagcaggggctgggccccgaacctgcggcgccccagcagcccacggcggaggaggaggccctgatcgagttccaccgctcctaccgagagctcttcgagttcttctgcaacaacaccaccatccacggcgccatccgcctggtgtgctcccagcacaaccgcatgaagacggccttctgggcagtgctgtggctctgcacctttggcatgatgtactggcaattcggcctgcttttcggagagtacttcagctaccccgtcagcctcaacatcaacctcaactcggacaagctcgtcttccccgcagtgaccatctgcaccctcaatccctacaggtacccggaaattaaagaggagctggaggagctggaccgcatcacagagcagacgctctttgacctgtacaaatacagctccttcaccactctcgtggccggctcccgcagccgtcgcgacctgcgggggactctgccgcaccccttgcagcgcctgagggtcccgcccccgcctcacggggcccgtcgagcccgtagcgtggcctccagcttgcgggacaacaacccccaggtggactggaaggactggaagatcggcttccagctgtgcaaccagaacaaatcggactgcttctaccagacatactcatcaggggtggatgcggtgagggagtggtaccgcttccactacatcaacatcctgtcgaggctgccagagactctgccatccctggaggaggacacgctgggcaacttcatcttcgcctgccgcttcaaccaggtctcctcaaccagcgaattactctcacttccaccacccgatgtatggaaactgctatactttcaatgacaagaacaactccaacctctggatgtcttccatgcctggaatcaacaacggtctgtccctgatgctgcgcgcagagcagaatgacttcattcccctgctgtccacagtgactggggcccgggtaatggtgcacgggcaggatgaacctgcctttatggatgatggtggctttaacttgcggcctggcgtggagacctccatcagcatgaggaaggaaaccctggacagacttgggggcgattatggcgactgcaccaagaatggcagtgatgttcctgttgagaacctttacccttcaaagtacacacagcaggtgtgtattcactcctgcttccaggagagcatgatcaaggagtgtggctgtgcctacatcttctatccgcggccccagaacgtggagtactgtgactacagaaagcacagttcctggggtgagactccagggagcccccaccctgccccac

SEQ ID NO: 323357 - DNA, 715 bp, Homo sapiens
ccggccagcgggcgggctccccagccaggccgctgcacctgtcaggtgagggggaggagaggtttggctgccagattcaactggaaaggaaccagtcccagtccagccgcaacctgggagtgggaagctggaggcagcccagacctcctggagccctgcagtcctggggcagagacagaatcaggacacagctcgaggaattactctcacttccaccacccgatgtatggaaactgctatactttcaatgacaagaacaactccaacctctggatgtcttccatgcctggaatcaacaacggtctgtccctgatgctgcgcgcagagcagaatgacttcattcccctgctgtccacagtgactggggcccgggtaatggtgcacgggcaggatgaacctgcctttatggatgatggtggctttaacttgcggcctggcgtggagacctccatcagcatgaggaaggaaaccctggacagacttgggggcgattatggcgactgcaccaagaatggcagtgatgttcctgttgagaacctttacccttcaaagtacacacagcaggtgtgtattcactcctgcttccaggagagcatgatcaaggagtgtggctgtgcctacatcttctatccgcggccccagaacgtggagtactgtgactacagaaagcacagttcctggggtgagactccagggagcccccaccctgccccac

SEQ ID NO: 323358 - DNA, 639 bp, Homo sapiens
ccacccaaaagccccctttgttacttaggcaattccccttccctgactcccgagggctagggctagagcagacccgggtaagtaaaggcagacccagggctcctctagcctcatacccgtgccctcacagagccatgccccggcacctctgccctgtgtctttcatacctctacatgtctgcttgagatatttcctcagcctgaaagtttccccaaccatctgccagagaactcctatgcatcccttagaaccctgctcagacaccattacttttgtgaacgcttctgccacatcttgtcttccccaaaattgatcactccgccttctcctgggctcccgtagcacactataacatctgctggagtgttgctgttgcaccatactttcttgtacatttgtgtctcccttcccaactagactgtaagtgccttgcggtcagggactgaatcttgcccgtttatgtatgctccatgtctagcccatcatcctgcttggagcaagtaggcaggagctcaataaatgtttgttgcatgaaggaatgtctggagagctggatggggcatcatgaagagggtagggggtggatacaagtcatcacccaagcttctgggaggtcctggggctgggagagggtacag

SEQ ID NO: 323359 - DNA, 2449 bp, Homo sapiens
ctgaactgcaattcctgttttgtctggacaccatgtacaactaaaaatgacaagttgaagtttctacttgaacttgttaaagtcacatatgaaagcagatagactattactgtggaagaacaattctaagtaatttcagtctgtaagaattgttctatgtcctgttataagacattattccatcaaagtctctatgtgacagactgcaatatattggaatacatttaatcatgttttacttttctattttcggttattttgctttgtatgctgtttctgtaaaaatttcccccatattaagtcctataaattaatcagaattaaatcctgtcttaactttcatataaggatatttggcttctgagttggtgataaacaaggttttgacttctgcatgatactgaagagtactttaagccaagaaagttctaattcaagtcagtactcatatccaggacaatcagatcgatatattttttttaatttttaaaattaaagttagactaaactaacttaaacttagactgaaataaagaaatctcatataaggccaggtgcgatggctcacacctgtaatcccagtactttgggaagccaaggtgggcagatcacatgaggacaggagttccagaacagcctcgccaacatggcaaaaccctgtctctactaaaaatacaaaaattagccaggtgtggtggtacacatctgtcatctcagcttcttgggaggccgaggcatgagaatcacttgaaccccggaggcggaaattgcaatgagccgagatttgtgccaccacactctaacctgggagacagaaaagaaaagaaaagaaatctcatgtatgagaagcttagatcataacattaaatgcttaaggtattttgaagttaactatttacttgaacacttaaatatgtaacattttacatataatgctgctgttatagtatatgacaaagcaaaggtatgatttttttcataatccccaaatcttgtactgttcttttattggcttttattagctaaaaatgaatgccaataacagacgtagtatttaatttagttcttttaaacaccacagaaatgatgcgcattcctagtcatagattagtgataagatagagataaagggaagaaaagtttatatgtatatatgaaagacatttaagattctaccttttggtagaatgaaaatgggagaacacaagctctcttgttggcctcattgtattattaatgagccttgactttttcaacaaatgttgtggagtctaaacaagcagtcggtattgaatactaatatctgagaagacctaggttttcatcaccctgaaaattttggatgatagcaaactttgaatttttatatctaaaaatatacaatattatcagtttggtacactgttgaatatttgaagcaagatttcagattttagtttaggtgtaatagaattatccattctgaagtttaatttgctttacttttagctggcatgaaacacaaaacacttgatgaaaaaatttgattatctgggcaggtgcagtggctcatacctgtaattgcaatactttaggagaccaaggcaggaggattgcgttagcccaagaatttgagaccagcctgggcaatatagcaataccttgtctctaccatgtttaaaaaaaaaaatcagtttagtgtgtgtgaatgtaggtatcagttgtttaggacttaaaggcgataatatgactgtggtgccattttaatccttgttttaactttttttggatttttttagatgactctagtgtagcataaaattaaacttttgcgccaggtgtgtggtggctcacgcctgtaatcccagcactttgggaggttgaggtgggtggatcatttgacgtcaggaatttgagaccagcctggccaacatggtgataccccatctctacaaaaaatgtaaaaattagctgggtgtggtggtgtgcacctgtaatcccagctactcgggaagctgaggcacgagagtcgcttgaacctgagaagcagaggttgcagtgagccaagatcatgcccctgcattctagcctgggcgacagagcgaacctctgtctcaaaaaaatgaaaaaattaaacttgaatgaataatgaaaaaaaaagggacaaaactatatttaaaaattttagactgggtgcagtggctcacacttgtaatcccagcagtttgggagctgagacaggcagattatttgagcccaggagttcgagaccagcctggacaacatggcaagaccttgcctctacaaaaaaatcggaaaatagccaggcatggtgccatacacctgtggtcccagctactcagaaggctaaagtggggggattgcttgagcacagaaaggtcgaggctgcagtaagctatgattatgccatggcattccaacctaggcaacagagcaagactcttattta

SEQ ID NO: 323360 - DNA, 1410 bp, Homo sapiens
  misc_feature (1407)..(1408): n is a, c, g, or t
cggaattagggagatagttggtattaggattaggattgttgtgaagtatagtacggatgctacttgtgcaatgatggtaaaagggtagcttactggttgtcctccgattcaggttagaatgaggaggtctgcggcttggagctcctggggcctaacaaaaagaaacctgccatgctgctcttcctcctctctgcactggtcctgctcacacagcccctgggctacctggaagcagaaatgaagacctactcccacagaacaatgcccagtgcttgcaccctggtcatgtgtagctcagtggagagtggcctgcctggtcgcgatggacgggatgggagagagggccctcggggcgagaagggggacccaggtttgccaggagctgcagggcaagcagggatgcctggacaagctggcccagttgggcccaaaggggacaatggctctgttggagaacctggaccaaagggagacactgggccaagtggacctccaggacctcccggtgtgcctggtccagctggaagagaaggtcccctggggaagcaggggaacataggacctcagggcaagccaggcccaaaaggagaagctgggcccaaaggagaagtaggtgccccaggcatgcagggctcggcaggggcaagaggcctcgcaggccctaagggagagcgaggtgtccctggtgagcgtggagtccctggaaacgcaggggcagcagggtctgctggagccatgggtccccagggaagtccaggtgccaggggacccccgggattgaagggggacaaaggcattcctggagacaaaggagcaaagggagaaagtgggcttccagatgttgcttctctgaggcagcaggttgaggccttacagggacaagtacagcacctccaggctgctttctctcagtataagaaagttgagctcttcccaaatggccaaagtgtcggggagaagattttcaagacagcaggctttgtaaaaccatttacggaggcacagctgctgtgcacacaggctggtggacagttggcctctccacgctctgccgctgagaatgccgccttgcaacagctggtcgtagctaagaacgaggctgctttcctgagcatgactgattccaagacagagggcaagttcacctaccccacaggagagtccctggtctattccaactgggccccaggggagcccaacgatgatggcgggtcagaggactgtgtggagatcttcaccaatggcaagtggaatgacagggcttgtggagaaaagcgtcttgtggtctgcgagttctgagccaactggggtgggtggggcagtgcttggcccaggagtttggccagaagtcaaggcttagaccctcatgctgccaatatcctaataaaaaggtgaccatcaaaaaannaa

SEQ ID NO: 323361 - DNA, 400 bp, Homo sapiens
atgcggtgcctgtttgggaggtctgaaaggctcaggttggagcacagaggtctcacagcccctgagctttggccaggtgatgccacaaccccaacctgactttcttcttctcctagttgagctcttcccaaatggccaaagtgtcggggagaagattttcaagacagcaggctttgtaaaaccatttacggaggcacagctgctgtgcacacaggctggtggacagttggcctctccacgctctgccgctgagaatgccgccttgcaacagctggtcgtagctaagaacgaggctgctttcctgagcatgactgattccaagacagagggcaagttcacctaccccacaggagagtccctggtctattccaactgggccccaggggagcccaacgatgat

SEQ ID NO: 323362 - DNA, 3126 bp, Homo sapiens
aactggcagcggggaggaggctctagcgaggcctgaaaggctgcgtaaccaggcaggagtaggggttggggttcggggttgggggacagccagggatcgcgtctgatatgctgttggggtcgtgaccgtctgggggccgaggcaggcactggccagacccagccagggatcctcgtattcgtcgagcctaatttccagcagccgggtaggcctcaccagaggctcctttccgtgaggccgcccccaattcctgcccctattctctgcctgggagatggcttccccgagccccccgccggagtcgaaggaggagtgggattatctggacccagctcagagaagcctgtataaagatgtcatgatggagaattatggaaacctggtctcactggatgttttgaacagagataaggatgaggagccaactgtaaaacaagagattgaagaaattgaggaagaagtggaaccacagggtgtaatagttacaagaatcaaaagtgaaattgaccaggatcctatgggtagagaaacatttgaacttgttggtaggttagataaacaaagagggatcttcctatgggaaataccaagggaatctttgacccaggaacagagaatgttcagagaaaacactaacattatccgtaaaagaccaaactcagaagagaaatgccataaatgtgaagaatgtggaaagggttttgtccgcaaggcccatttcattcaacatcaaagggtccatactggtgagaaaccttttcagtgcaatgaatgtgggaaaagttttagtcgcagttcatttgttattgaacatcagagaattcacactggggaaaggccctatgagtgtaattactgtggaaaaacctttagtgtgagctcaacccttattagacatcagagaatccacactggagaaagaccctatcagtgtaatcagtgtaaacagagcttcagccagagaaggagccttgttaaacatcaaaggattcatacaggtgagaaaccccataaatgtagtgactgtgggaaagccttcagttggaaatcacaccttattgagcatcaaagaactcacactggtgagaaaccttatcactgtaccaaatgtaagaagagctttagtcgaaattcattgcttgttgagcatcaaagaattcacactggggaaagaccccataaatgtggtgaatgtgggaaagcctttcgattaagcacataccttatacaacaccaaaaaattcacactggcgagaagccttttctttgtattgagtgtggaaaaagtttcagtcggagctcattccttattgaacatcagaggatccatactggtgaaagaccttatcagtgcaaagagtgtgggaaaagtttcagtcagctttgcaaccttactcgtcatcagagaattcacacaggagacaagccccataaatgtgaggaatgtggaaaagcctttagtagaagctcaggtcttattcagcatcagagaattcacaccagggagaagacttatccatacaatgaaactaaggaaagttttgatccaaattgcagtcttgttatacagcaggaagtctaccctaaggagaaatcttataaatgtgatgaatgtgggaaaacttttagtgttagtgctcatcttgtacaacatcaaagaatccacactggtgaaaagccctatctatgtactgtctgtgggaagagcttcagccggagctcatttcttattgaacatcagagaatccacactggagagagaccctatctgtgcagacagtgtggaaaaagctttagtcagctttgtaatcttattcgacatcagggtgttcacacaggtaataaaccccataaatgtgatgaatgtggaaaggcctttagccggaactcgggtcttattcagcatcagagaatacacacaggagagaaaccttataagtgtgagaagtgcgacaaaagtttcagtcaacagcgcagtcttgtcaaccatcagatgatccatgcagaggtgaaaacccaagaaacccatgaatgtgatgcttgtggtgaagcctttaattgccgtatttctcttattcagcatcagaaattgcacacagcatggatgcaataaatgtagagcaatacataagctcaatttgatttgagactagtacccaagtgcagttttagtatggctcaacatggatcagatttagtgataaagcaaattctccttgggcctcaggcaaatagtttctaaagattctgtgaatagtggacaactgcccatgagcatttgacttcccttactctttgatgatcgtagagaaagacttggtaatttatctaagtatctttaataaatctttcagcagagagattaaacctaggttcagagcatgggtgctctgagggacaaagttggattagtataagggagctggagcagctgatagtggaaaacagaataatgattcaaagagtcttctgtcaccatgtcatattgtggttctttcagttccatgatatgtttggctctgcatgccaaagtccagtgattaagcatatataagttgtcaaggaaacaaagcccaaatgtttttaaaacaagtatacagtttttgtcattgtttaagaaagccagttgtttggcatgtgagttaaaggcagttccaatgcctgatggttcccagatctatgaaatgagtggaccattaaccttacatgtaaagattatgttagtaattaagaaacctaacaaaggtgttaccaaggaacctttgggagtgccttttttgtttttcaagatggacccaaaaaagtggaggaagatattgttcttttgtgccctcctacctgtgagagatatttgtagtcctatgtgaatgagcttatccctccacaaccaggtgcatatgaaagtgtacatattatgactgccaagtattggaaatgaaaagacctggagtctatgctaggaagctgagatattttggtattgcattggtttttatggtaactaggttttgcatgcaattaaaaatccttatttcttgttctagggcttcccttagttaatggttattataaacctattaattcatctgttttaaccattaaaacctgttttgtttttaagctttg

SEQ ID NO: 323363 - DNA, 3168 bp, Homo sapiens
aactggcagcggggaggaggctctagcgaggcctgaaaggctgcgtaaccaggcaggagtaggggttggggttcggggttgggggacagccagggatcgcgtctgatatgctgttggggtcgtgaccgtctgggggccgaggcaggcactggccagacccagccagggatcctcgtattcgtcgagcctaatttccagcagccgggtaggcctcaccagaggctcctttccgtgaggccgcccccaattcctgcccctattctctgcctgggagatggcttccccgagccccccgccggagtcgaaggggttgctgacatttgaggatgtggctgtgttttttacccaggaggagtgggattatctggacccagctcagagaagcctgtataaagatgtcatgatggagaattatggaaacctggtctcactggatgttttgaacagagataaggatgaggagccaactgtaaaacaagagattgaagaaattgaggaagaagtggaaccacagggtgtaatagttacaagaatcaaaagtgaaattgaccaggatcctatgggtagagaaacatttgaacttgttggtaggttagataaacaaagagggatcttcctatgggaaataccaagggaatctttgacccaggaacagagaatgttcagagaaaacactaacattatccgtaaaagaccaaactcagaagagaaatgccataaatgtgaagaatgtggaaagggttttgtccgcaaggcccatttcattcaacatcaaagggtccatactggtgagaaaccttttcagtgcaatgaatgtgggaaaagttttagtcgcagttcatttgttattgaacatcagagaattcacactggggaaaggccctatgagtgtaattactgtggaaaaacctttagtgtgagctcaacccttattagacatcagagaatccacactggagaaagaccctatcagtgtaatcagtgtaaacagagcttcagccagagaaggagccttgttaaacatcaaaggattcatacaggtgagaaaccccataaatgtagtgactgtgggaaagccttcagttggaaatcacaccttattgagcatcaaagaactcacactggtgagaaaccttatcactgtaccaaatgtaagaagagctttagtcgaaattcattgcttgttgagcatcaaagaattcacactggggaaagaccccataaatgtggtgaatgtgggaaagcctttcgattaagcacataccttatacaacaccaaaaaattcacactggcgagaagccttttctttgtattgagtgtggaaaaagtttcagtcggagctcattccttattgaacatcagaggatccatactggtgaaagaccttatcagtgcaaagagtgtgggaaaagtttcagtcagctttgcaaccttactcgtcatcagagaattcacacaggagacaagccccataaatgtgaggaatgtggaaaagcctttagtagaagctcaggtcttattcagcatcagagaattcacaccagggagaagacttatccatacaatgaaactaaggaaagttttgatccaaattgcagtcttgttatacagcaggaagtctaccctaaggagaaatcttataaatgtgatgaatgtgggaaaacttttagtgttagtgctcatcttgtacaacatcaaagaatccacactggtgaaaagccctatctatgtactgtctgtgggaagagcttcagccggagctcatttcttattgaacatcagagaatccacactggagagagaccctatctgtgcagacagtgtggaaaaagctttagtcagctttgtaatcttattcgacatcagggtgttcacacaggtaataaaccccataaatgtgatgaatgtggaaaggcctttagccggaactcgggtcttattcagcatcagagaatacacacaggagagaaaccttataagtgtgagaagtgcgacaaaagtttcagtcaacagcgcagtcttgtcaaccatcagatgatccatgcagaggtgaaaacccaagaaacccatgaatgtgatgcttgtggtgaagcctttaattgccgtatttctcttattcagcatcagaaattgcacacagcatggatgcaataaatgtagagcaatacataagctcaatttgatttgagactagtacccaagtgcagttttagtatggctcaacatggatcagatttagtgataaagcaaattctccttgggcctcaggcaaatagtttctaaagattctgtgaatagtggacaactgcccatgagcatttgacttcccttactctttgatgatcgtagagaaagacttggtaatttatctaagtatctttaataaatctttcagcagagagattaaacctaggttcagagcatgggtgctctgagggacaaagttggattagtataagggagctggagcagctgatagtggaaaacagaataatgattcaaagagtcttctgtcaccatgtcatattgtggttctttcagttccatgatatgtttggctctgcatgccaaagtccagtgattaagcatatataagttgtcaaggaaacaaagcccaaatgtttttaaaacaagtatacagtttttgtcattgtttaagaaagccagttgtttggcatgtgagttaaaggcagttccaatgcctgatggttcccagatctatgaaatgagtggaccattaaccttacatgtaaagattatgttagtaattaagaaacctaacaaaggtgttaccaaggaacctttgggagtgccttttttgtttttcaagatggacccaaaaaagtggaggaagatattgttcttttgtgccctcctacctgtgagagatatttgtagtcctatgtgaatgagcttatccctccacaaccaggtgcatatgaaagtgtacatattatgactgccaagtattggaaatgaaaagacctggagtctatgctaggaagctgagatattttggtattgcattggtttttatggtaactaggttttgcatgcaattaaaaatccttatttcttgttctagggcttcccttagttaatggttattataaacctattaattcatctgttttaaccattaaaacctgttttgtttttaagctttg

SEQ ID NO: 323364 - DNA, 4450 bp, Homo sapiens
  misc_feature (829)..(829): n is a, c, g, or t
tgctggaaacagaaaccagatttcgccacaggttgcagaatagattgaataggaagaggttgggcttggaaaacataagaaatagaaaacctcggtgttaagattttttttcaatgcttggctttcataaagagaaggatttcaggttcaagataaaattggacatatttatgtaatggtaggaaagtgtcaatagagagtgtgtattgaagaaagaggaaagacgggataattaagcaaatgcccagaggtgagtaggatcggtaagtgatggatggattagccttgcataagaatcagatatatctttatgtaccattggcagataattttataggtagaggacagaaagttgagggagttctttcatgttttttcattatgtgaaagaaaatacagcccactgaaaaatttgagaggggacactaaaaagccttagaagaaataaaatttctagtagtttcttaggggaataggaaaaggttattttagaataaaataatgaagtaagcaaatagaaaattcaaagatgactccacaaaaaattgagagaaaagaggatgtatgaaaaaggagcttgtttagggccaaatataaatgtggtcattattgaatcttctagcggaattatctaatatctattccagcaagagatggaaaatcaggaagatgtccgaagcgggcctagatgtactatatgacactctgttatatcatagaccactgtgctgtcttttcttcaacacatgcaagattttcatttctcagatgtcatgcagcctctcagttggaacaagatggtgaaccttgggtcttatattgttagagngtttagaatcacatgtacttgaggtatgatttgtggtaggtaaagtcataagctaccacagactgccctttttggttgttgctcccatgaactctgaccatgtttcttaatacttattttattctgcatctcgatatcatagactctctgtcacctaacccttattattgtttttaaaagccattttgtctctttatacaggagctgctttttacttaatattttctttatcatattattttctttccccattttttacttaacatccattccatttggcaggggggcttcatgtcttatctctgaatcctggctgattacaatgtttctggagtgcttttgatgggcagtgagtaaatgcttgttaatgaatgaattattgtttcccctggatctttgtcttttatccttcttagcatctttttttatttttatttttatttttttgagattaggtctcactctattgcctaggctggtgtgcagcgacgcaaacacagcttgctgcagcctcaacctgttgggcttaagtgatcaatcctcccacctcagctacctgagtagctgggactacaggtgtgtaccaccatgtctggctaattaaaaaaaaattttttttttgtagagatgaagtctcactgttgcccaggctggtctcaaactcctgagctcaagtgatcctcccacctcactctcccaaaatgctgggattacaggcatgagccactatgcctggccattagcatctggtcccttctgttaattatttggtctgatcatattccaataatgctttctcatccttaattttcttgaacttagtggagttttttttcatcctaccctgttttccttgatagactgattaatcccaccttgactttatttgtttctttgtttgcccatcttactttgtttctccttgcttcaaagaccttggttgatctttgtatttcctttttattattccagatgttttgaacagagataaggatgaggagccaactgtaaaacaagagattgaagaaattgaggaagaagtggaaccacagggtgtaatagttacaagaatcaaaagtgaaattgaccaggatcctatgggtagagaaacatttgaacttgttggtaggttagataaacaaagagggatcttcctatgggaaataccaagggaatctttgacccaggaacagagaatgttcagagaaaacactaacattatccgtaaaagaccaaactcagaagagaaatgccataaatgtgaagaatgtggaaagggttttgtccgcaaggcccatttcattcaacatcaaagggtccatactggtgagaaaccttttcagtgcaatgaatgtgggaaaagttttagtcgcagttcatttgttattgaacatcagagaattcacactggggaaaggccctatgagtgtaattactgtggaaaaacctttagtgtgagctcaacccttattagacatcagagaatccacactggagaaagaccctatcagtgtaatcagtgtaaacagagcttcagccagagaaggagccttgttaaacatcaaaggattcatacaggtgagaaaccccataaatgtagtgactgtgggaaagccttcagttggaaatcacaccttattgagcatcaaagaactcacactggtgagaaaccttatcactgtaccaaatgtaagaagagctttagtcgaaattcattgcttgttgagcatcaaagaattcacactggggaaagaccccataaatgtggtgaatgtgggaaagcctttcgattaagcacataccttatacaacaccaaaaaattcacactggcgagaagccttttctttgtattgagtgtggaaaaatttcagtcagctttgcaaccttactcgtcatcagagaattcacacaggagacaagccccataaatgtgaggaatgtggaaaagcctttagtagaagctcaggtcttattcagcatcagagaattcacaccagggagaagacttatccatacaatgaaactaaggaaagttttgatccaaattgcagtcttgttatacagcaggaagtctaccctaaggagaaatcttataaatgtgatgaatgtgggaaaacttttagtgttagtgctcatcttgtacaacatcaaagaatccacactggtgaaaagccctatctatgtactgtctgtgggaagagcttcagccggagctcatttcttattgaacatcagagaatccacactggagagagaccctatctgtgcagacagtgtggaaaaagctttagtcagctttgtaatcttattcgacatcagggtgttcacacaggtaataaaccccataaatgtgatgaatgtggaaaggcctttagccggaactcgggtcttattcagcatcagagaatacacacaggagagaaaccttataagtgtgagaagtgcgacaaaagtttcagtcaacagcgcagtcttgtcaaccatcagatgatccatgcagaggtgaaaacccaagaaacccatgaatgtgatgcttgtggtgaagcctttaattgccgtatttctcttattcagcatcagaaattgcacacagcatggatgcaataaatgtagagcaatacataagctcaatttgatttgagactagtacccaagtgcagttttagtatggctcaacatggatcagatttagtgataaagcaaattctccttgggcctcaggcaaatagtttctaaagattctgtgaatagtggacaactgcccatgagcatttgacttcccttactctttgatgatcgtagagaaagacttggtaatttatctaagtatctttaataaatctttcagcagagagattaaacctaggttcagagcatgggtgctctgagggacaaagttggattagtataagggagctggagcagctgatagtggaaaacagaataatgattcaaagagtcttctgtcaccatgtcatattgtggttctttcagttccatgatatgtttggctctgcatgccaaagtccagtgattaagcatatataagttgtcaaggaaacaaagcccaaatgtttttaaaacaagtatacagtttttgtcattgtttaagaaagccagttgtttggcatgtgagttaaaggcagttccaatgcctgatggttcccagatctatgaaatgagtggaccattaaccttacatgtaaagattatgttagtaattaagaaacctaacaaaggtgttaccaaggaacctttgggagtgccttttttgtttttcaagatggacccaaaaaagtggaggaagatattgttcttttgtgccctcctacctgtgagagatatttgtagtcctatgtgaatgagcttatccctccacaaccaggtgcatatgaaagtgtacatattatgactgccaagtattggaaatgaaaagacctggagtctatgctaggaagctgagatattttggtattgcattggtttttatggtaactaggttttgcatgcaattaaaaatccttatttcttgttctagggcttcccttagttaatggttattataaacctattaattcatctgttttaaccattaaaacctgttttgtttttaagctttg

SEQ ID NO: 323365 - DNA, 4644 bp, Homo sapiens
  misc_feature (829)..(829): n is a, c, g, or t
tgctggaaacagaaaccagatttcgccacaggttgcagaatagattgaataggaagaggttgggcttggaaaacataagaaatagaaaacctcggtgttaagattttttttcaatgcttggctttcataaagagaaggatttcaggttcaagataaaattggacatatttatgtaatggtaggaaagtgtcaatagagagtgtgtattgaagaaagaggaaagacgggataattaagcaaatgcccagaggtgagtaggatcggtaagtgatggatggattagccttgcataagaatcagatatatctttatgtaccattggcagataattttataggtagaggacagaaagttgagggagttctttcatgttttttcattatgtgaaagaaaatacagcccactgaaaaatttgagaggggacactaaaaagccttagaagaaataaaatttctagtagtttcttaggggaataggaaaaggttattttagaataaaataatgaagtaagcaaatagaaaattcaaagatgactccacaaaaaattgagagaaaagaggatgtatgaaaaaggagcttgtttagggccaaatataaatgtggtcattattgaatcttctagcggaattatctaatatctattccagcaagagatggaaaatcaggaagatgtccgaagcgggcctagatgtactatatgacactctgttatatcatagaccactgtgctgtcttttcttcaacacatgcaagattttcatttctcagatgtcatgcagcctctcagttggaacaagatggtgaaccttgggtcttatattgttagagngtttagaatcacatgtacttgaggtatgatttgtggtaggtaaagtcataagctaccacagactgccctttttggttgttgctcccatgaactctgaccatgtttcttaatacttattttattctgcatctcgatatcatagactctctgtcacctaacccttattattgtttttaaaagccattttgtctctttatacaggagctgctttttacttaatattttctttatcatattattttctttccccattttttacttaacatccattccatttggcaggggggcttcatgtcttatctctgaatcctggctgattacaatgtttctggagtgcttttgatgggcagtgagtaaatgcttgttaatgaatgaattattgtttcccctggatctttgtcttttatccttcttagcatctttttttatttttatttttatttttttgagattaggtctcactctattgcctaggctggtgtgcagcgacgcaaacacagcttgctgcagcctcaacctgttgggcttaagtgatcaatcctcccacctcagctacctgagtagctgggactacaggtgtgtaccaccatgtctggctaattaaaaaaaaattttttttttgtagagatgaagtctcactgttgcccaggctggtctcaaactcctgagctcaagtgatcctcccacctcactctcccaaaatgctgggattacaggcatgagccactatgcctggccattagcatctggtcccttctgttaattatttggtctgatcatattccaataatgctttctcatccttaattttcttgaacttagtggagttttttttcatcctaccctgttttccttgatagactgattaatcccaccttgactttatttgtttctttgtttgcccatcttactttgtttctccttgcttcaaagaccttggttgatctttgtatttcctttttattattccagatgttttgaacagagataaggatgaggagccaactgtaaaacaagagattgaagaaattgaggaagaagtggaaccacagggtgtaatagttacaagaatcaaaagtgaaattgaccaggatcctatgggtagagaaacatttgaacttgttggtaggttagataaacaaagagggatcttcctatgggaaataccaagggaatctttgacccaggaacagagaatgttcagagaaaacactaacattatccgtaaaagaccaaactcagaagagaaatgccataaatgtgaagaatgtggaaagggttttgtccgcaaggcccatttcattcaacatcaaagggtccatactggtgagaaaccttttcagtgcaatgaatgtgggaaaagttttagtcgcagttcatttgttattgaacatcagagaattcacactggggaaaggccctatgagtgtaattactgtggaaaaacctttagtgtgagctcaacccttattagacatcagagaatccacactggagaaagaccctatcagtgtaatcagtgtaaacagagcttcagccagagaaggagccttgttaaacatcaaaggattcatacaggtgagaaaccccataaatgtagtgactgtgggaaagccttcagttggaaatcacaccttattgagcatcaaagaactcacactggtgagaaaccttatcactgtaccaaatgtaagaagagctttagtcgaaattcattgcttgttgagcatcaaagaattcacactggggaaagaccccataaatgtggtgaatgtgggaaagcctttcgattaagcacataccttatacaacaccaaaaaattcacactggcgagaagccttttctttgtattgagtgtggaaaaagtttcagtcggagctcattccttattgaacatcagaggatccatactggtgaaagaccttatcagtgcaaagagtgtgggaaaagtttcagtcagctttgcaaccttactcgtcatcagagaattcacacaggagacaagccccataaatgtgaggaatgtggaaaagcctttagtagaagctcaggtcttattcagcatcagagaattcacaccagggagaagacttatccatacaatgaaactaaggaaagttttgatccaaattgcagtcttgttatacagcaggaagtctaccctaaggagaaatcttataaatgtgatgaatgtgggaaaacttttagtgttagtgctcatcttgtacaacatcaaagaatccacactggtgaaaagccctatctatgtactgtctgtgggaagagcttcagccggagctcatttcttattgaacatcagagaatccacactggagagagaccctatctgtgcagacagtgtggaaaaagctttagtcagctttgtaatcttattcgacatcagggtgttcacacaggtaataaaccccataaatgtgatgaatgtggaaaggcctttagccggaactcgggtcttattcagcatcagagaatacacacaggagagaaaccttataagtgtgagaagtgcgacaaaagtttcagtcaacagcgcagtcttgtcaaccatcagatgatccatgcagaggtgaaaacccaagaaacccatgaatgtgatgcttgtggtgaagcctttaattgccgtatttctcttattcagcatcagaaattgcacacagcatggatgcaataaatgtagagcaatacataagctcaatttgatttgagactagtacccaagtgcagttttagtatggctcaacatggatcagatttagtgataaagcaaattctccttgggcctcaggcaaatagtttctaaagattctgtgaatagtggacaactgcccatgagcatttgacttcccttactctttgatgatcgtagagaaagacttggtaatttatctaagtatctttaataaatctttcagcagagagattaaacctaggttcagagcatgggtgctctgagggacaaagttggattagtataagggagctggagcagctgatagtggaaaacagaataatgattcaaagagtcttctgtcaccatgtcatattgtggttctttcagttccatgatatgtttggctctgcatgccaaagtccagtgattaagcatatataagttgtcaaggaaacaaagcccaaatgtttttaaaacaagtatacagtttttgtcattgtttaagaaagccagttgtttggcatgtgagttaaaggcagttccaatgcctgatggttcccagatctatgaaatgagtggaccattaaccttacatgtaaagattatgttagtaattaagaaacctaacaaaggtgttaccaaggaacctttgggagtgccttttttgtttttcaagatggacccaaaaaagtggaggaagatattgttcttttgtgccctcctacctgtgagagatatttgtagtcctatgtgaatgagcttatccctccacaaccaggtgcatatgaaagtgtacatattatgactgccaagtattggaaatgaaaagacctggagtctatgctaggaagctgagatattttggtattgcattggtttttatggtaactaggttttgcatgcaattaaaaatccttatttcttgttctagggcttcccttagttaatggttattataaacctattaattcatctgttttaaccattaaaacctgttttgtttttaagctttgtgtaagagttgttactttaagtgtaaaaccaattctgtcaaacgcattactgtgtttttaaaattagaatcaaaaataggaaggaaatagctgtcatttgttctgtgtg

SEQ ID NO: 323366 - DNA, 3262 bp, Homo sapiens
aactggcagcggggaggaggctctagcgaggcctgaaaggctgcgtaaccaggcaggagtaggggttggggttcggggttgggggacagccagggatcgcgtctgatatgctgttggggtcgtgaccgtctgggggccgaggcaggcactggccagacccagccagggatcctcgtattcgtcgagcctaatttccagcagccgggtaggcctcaccagaggctcctttccgtgaggccgcccccaattcctgcccctattctctgcctgggagatggcttccccgagccccccgccggagtcgaagagagacttgataaatcggcctgagaaaataagtaatgctccagactagctctctcatttgtgagttctccaggtgaagcaccatttttgaccttcccttgtgtcttctgttcctggcacagtgcctggaccccaaggaggagtgggattatctggacccagctcagagaagcctgtataaagatgtcatgatggagaattatggaaacctggtctcactggatgttttgaacagagataaggatgaggagccaactgtaaaacaagagattgaagaaattgaggaagaagtggaaccacagggtgtaatagttacaagaatcaaaagtgaaattgaccaggatcctatgggtagagaaacatttgaacttgttggtaggttagataaacaaagagggatcttcctatgggaaataccaagggaatctttgacccaggaacagagaatgttcagagaaaacactaacattatccgtaaaagaccaaactcagaagagaaatgccataaatgtgaagaatgtggaaagggttttgtccgcaaggcccatttcattcaacatcaaagggtccatactggtgagaaaccttttcagtgcaatgaatgtgggaaaagttttagtcgcagttcatttgttattgaacatcagagaattcacactggggaaaggccctatgagtgtaattactgtggaaaaacctttagtgtgagctcaacccttattagacatcagagaatccacactggagaaagaccctatcagtgtaatcagtgtaaacagagcttcagccagagaaggagccttgttaaacatcaaaggattcatacaggtgagaaaccccataaatgtagtgactgtgggaaagccttcagttggaaatcacaccttattgagcatcaaagaactcacactggtgagaaaccttatcactgtaccaaatgtaagaagagctttagtcgaaattcattgcttgttgagcatcaaagaattcacactggggaaagaccccataaatgtggtgaatgtgggaaagcctttcgattaagcacataccttatacaacaccaaaaaattcacactggcgagaagccttttctttgtattgagtgtggaaaaagtttcagtcggagctcattccttattgaacatcagaggatccatactggtgaaagaccttatcagtgcaaagagtgtgggaaaagtttcagtcagctttgcaaccttactcgtcatcagagaattcacacaggagacaagccccataaatgtgaggaatgtggaaaagcctttagtagaagctcaggtcttattcagcatcagagaattcacaccagggagaagacttatccatacaatgaaactaaggaaagttttgatccaaattgcagtcttgttatacagcaggaagtctaccctaaggagaaatcttataaatgtgatgaatgtgggaaaacttttagtgttagtgctcatcttgtacaacatcaaagaatccacactggtgaaaagccctatctatgtactgtctgtgggaagagcttcagccggagctcatttcttattgaacatcagagaatccacactggagagagaccctatctgtgcagacagtgtggaaaaagctttagtcagctttgtaatcttattcgacatcagggtgttcacacaggtaataaaccccataaatgtgatgaatgtggaaaggcctttagccggaactcgggtcttattcagcatcagagaatacacacaggagagaaaccttataagtgtgagaagtgcgacaaaagtttcagtcaacagcgcagtcttgtcaaccatcagatgatccatgcagaggtgaaaacccaagaaacccatgaatgtgatgcttgtggtgaagcctttaattgccgtatttctcttattcagcatcagaaattgcacacagcatggatgcaataaatgtagagcaatacataagctcaatttgatttgagactagtacccaagtgcagttttagtatggctcaacatggatcagatttagtgataaagcaaattctccttgggcctcaggcaaatagtttctaaagattctgtgaatagtggacaactgcccatgagcatttgacttcccttactctttgatgatcgtagagaaagacttggtaatttatctaagtatctttaataaatctttcagcagagagattaaacctaggttcagagcatgggtgctctgagggacaaagttggattagtataagggagctggagcagctgatagtggaaaacagaataatgattcaaagagtcttctgtcaccatgtcatattgtggttctttcagttccatgatatgtttggctctgcatgccaaagtccagtgattaagcatatataagttgtcaaggaaacaaagcccaaatgtttttaaaacaagtatacagtttttgtcattgtttaagaaagccagttgtttggcatgtgagttaaaggcagttccaatgcctgatggttcccagatctatgaaatgagtggaccattaaccttacatgtaaagattatgttagtaattaagaaacctaacaaaggtgttaccaaggaacctttgggagtgccttttttgtttttcaagatggacccaaaaaagtggaggaagatattgttcttttgtgccctcctacctgtgagagatatttgtagtcctatgtgaatgagcttatccctccacaaccaggtgcatatgaaagtgtacatattatgactgccaagtattggaaatgaaaagacctggagtctatgctaggaagctgagatattttggtattgcattggtttttatggtaactaggttttgcatgcaattaaaaatccttatttcttgttctagggcttcccttagttaatggttattataaacctattaattcatctgttttaaccattaaaacctgttttgtttttaagctttg

SEQ ID NO: 323367 - DNA, 4535 bp, Homo sapiens
  misc_feature (829)..(829): n is a, c, g, or t
tgctggaaacagaaaccagatttcgccacaggttgcagaatagattgaataggaagaggttgggcttggaaaacataagaaatagaaaacctcggtgttaagattttttttcaatgcttggctttcataaagagaaggatttcaggttcaagataaaattggacatatttatgtaatggtaggaaagtgtcaatagagagtgtgtattgaagaaagaggaaagacgggataattaagcaaatgcccagaggtgagtaggatcggtaagtgatggatggattagccttgcataagaatcagatatatctttatgtaccattggcagataattttataggtagaggacagaaagttgagggagttctttcatgttttttcattatgtgaaagaaaatacagcccactgaaaaatttgagaggggacactaaaaagccttagaagaaataaaatttctagtagtttcttaggggaataggaaaaggttattttagaataaaataatgaagtaagcaaatagaaaattcaaagatgactccacaaaaaattgagagaaaagaggatgtatgaaaaaggagcttgtttagggccaaatataaatgtggtcattattgaatcttctagcggaattatctaatatctattccagcaagagatggaaaatcaggaagatgtccgaagcgggcctagatgtactatatgacactctgttatatcatagaccactgtgctgtcttttcttcaacacatgcaagattttcatttctcagatgtcatgcagcctctcagttggaacaagatggtgaaccttgggtcttatattgttagagngtttagaatcacatgtacttgaggtatgatttgtggtaggtaaagtcataagctaccacagactgccctttttggttgttgctcccatgaactctgaccatgtttcttaatacttattttattctgcatctcgatatcatagactctctgtcacctaacccttattattgtttttaaaagccattttgtctctttatacaggagctgctttttacttaatattttctttatcatattattttctttccccattttttacttaacatccattccatttggcaggggggcttcatgtcttatctctgaatcctggctgattacaatgtttctggagtgcttttgatgggcagtgagtaaatgcttgttaatgaatgaattattgtttcccctggatctttgtcttttatccttcttagcatctttttttatttttatttttatttttttgagattaggtctcactctattgcctaggctggtgtgcagcgacgcaaacacagcttgctgcagcctcaacctgttgggcttaagtgatcaatcctcccacctcagctacctgagtagctgggactacaggtgtgtaccaccatgtctggctaattaaaaaaaaattttttttttgtagagatgaagtctcactgttgcccaggctggtctcaaactcctgagctcaagtgatcctcccacctcactctcccaaaatgctgggattacaggcatgagccactatgcctggccattagcatctggtcccttctgttaattatttggtctgatcatattccaataatgctttctcatccttaattttcttgaacttagtggagttttttttcatcctaccctgttttccttgatagactgattaatcccaccttgactttatttgtttctttgtttgcccatcttactttgtttctccttgcttcaaagaccttggttgatctttgtatttcctttttattattccagatgttttgaacagagataaggatgaggagccaactgtaaaacaagagattgaagaaattgaggaagaagtggaaccacagggtgtaatagttacaagaatcaaaagtgaaattgaccaggatcctatgggtagagaaacatttgaacttgttggtaggttagataaacaaagagggatcttcctatgggaaataccaagggaatctttgacccaggaacagagaatgttcagagaaaacactaacattatccgtaaaagaccaaactcagaagagaaatgccataaatgtgaagaatgtggaaagggttttgtccgcaaggcccatttcattcaacatcaaagggtccatactggtgagaaaccttttcagtgcaatgaatgtgggaaaagttttagtcgcagttcatttgttattgaacatcagagaattcacactggggaaaggccctatgagtgtaattactgtggaaaaacctttagtgtgagctcaacccttattagacatcagagaatccacactggagaaagaccctatcagtgtaatcagtgtaaacagagcttcagccagagaaggagccttgttaaacatcaaaggattcatacaggtgagaaaccccataaatgtagtgactgtgggaaagccttcagttggaaatcacaccttattgagcatcaaagaactcacactggtgagaaaccttatcactgtaccaaatgtaagaagagctttagtcgaaattcattgcttgttgagcatcaaagaattcacactggggaaagaccccataaatgtggtgaatgtgggaaagcctttcgattaagcacataccttatacaacaccaaaaaattcacactggcgagaagccttttctttgtattgagtgtggaaaaagtttcagtcggagctcattccttattgaacatcagaggatccatactggtgaaagaccttatcagtgcaaagagtgtgggaaaagtttcagtcagctttgcaaccttactcgtcatcagagaattcacacaggagacaagccccataaatgtgaggaatgtggaaaagcctttagtagaagctcaggtcttattcagcatcagagaattcacaccagggagaagacttatccatacaatgaaactaaggaaagttttgatccaaattgcagtcttgttatacagcaggaagtctaccctaaggagaaatcttataaatgtgatgaatgtgggaaaacttttagtgttagtgctcatcttgtacaacatcaaagaatccacactggtgaaaagccctatctatgtactgtctgtgggaagagcttcagccggagctcatttcttattgaacatcagagaatccacactggagagagaccctatctgtgcagacagtgtggaaaaagctttagtcagctttgtaatcttattcgacatcagggtgttcacacaggtaataaaccccataaatgtgatgaatgtggaaaggcctttagccggaactcgggtcttattcagcatcagagaatacacacaggagagaaaccttataagtgtgagaagtgcgacaaaagtttcagtcaacagcgcagtcttgtcaaccatcagatgatccatgcagaggtgaaaacccaagaaacccatgaatgtgatgcttgtggtgaagcctttaattgccgtatttctcttattcagcatcagaaattgcacacagcatggatgcaataaatgtagagcaatacataagctcaatttgatttgagactagtacccaagtgcagttttagtatggctcaacatggatcagatttagtgataaagcaaattctccttgggcctcaggcaaatagtttctaaagattctgtgaatagtggacaactgcccatgagcatttgacttcccttactctttgatgatcgtagagaaagacttggtaatttatctaagtatctttaataaatctttcagcagagagattaaacctaggttcagagcatgggtgctctgagggacaaagttggattagtataagggagctggagcagctgatagtggaaaacagaataatgattcaaagagtcttctgtcaccatgtcatattgtggttctttcagttccatgatatgtttggctctgcatgccaaagtccagtgattaagcatatataagttgtcaaggaaacaaagcccaaatgtttttaaaacaagtatacagtttttgtcattgtttaagaaagccagttgtttggcatgtgagttaaaggcagttccaatgcctgatggttcccagatctatgaaatgagtggaccattaaccttacatgtaaagattatgttagtaattaagaaacctaacaaaggtgttaccaaggaacctttgggagtgccttttttgtttttcaagatggacccaaaaaagtggaggaagatattgttcttttgtgccctcctacctgtgagagatatttgtagtcctatgtgaatgagcttatccctccacaaccaggtgcatatgaaagtgtacatattatgactgccaagtattggaaatgaaaagacctggagtctatgctaggaagctgagatattttggtattgcattggtttttatggtaactaggttttgcatgcaattaaaaatccttatttcttgttctagggcttcccttagttaatggttattataaacctattaattcatctgttttaaccattaaaacctgttttgtttttaagctttg

SEQ ID NO: 323368 - DNA, 669 bp, Homo sapiens
  misc_feature (354)..(354): n is a, c, g, or t
tcttacgtggactcagagggctccccagtgggtgtggtccagctcaccttcctgcggctgctcagcgtcctggaggtccccccggcctccccggacctgctggccccaaaggagccaaaggagccacaggcccaggcggacccaagggagagaagggtgtgcagggccctccaggacacccgggtcccccaggcgaggtgatccagccactgcccattcagatgcccaagaagactcggcgctcggtggatggaagccgtctgatgcaggaagatgaggccataccgaccgggggagcccccggcagtcctggggggctggaggagatctttggctcactcgactccctgcggnaggagatcgagcagatgaggcggccaacagggacccagggaagaaacggaatagtgtggggtgtgtgcagggctgcatcccgcagatggctggaatattaaaattcttctatattggctggtaaattgccatggccctgagccactgagtatgttcattgccacccctgtccctcccctgggcacccctcactttccctgatcctgcaattaaagggttaatgtgtggcatatggaagggactcccaggaccctgtgcccagcttccatgctgactgatggttaaataatgtgattgtctcctcaaaagtgtctg

SEQ ID NO: 323369 - DNA, 5847 bp, Homo sapiens
  misc_feature (79)..(79): n is a, c, g, or t
  misc_feature (869)..(869): n is a, c, g, or t
  misc_feature (1242)..(1242): n is a, c, g, or t
  misc_feature (1277)..(1277): n is a, c, g, or t
  misc_feature (1296)..(1296): n is a, c, g, or t
  misc_feature (1643)..(1643): n is a, c, g, or t
  misc_feature (1809)..(1809): n is a, c, g, or t
  misc_feature (1826)..(1826): n is a, c, g, or t
  misc_feature (2262)..(2262): n is a, c, g, or t
  misc_feature (2297)..(2297): n is a, c, g, or t
  misc_feature (2333)..(2333): n is a, c, g, or t
  misc_feature (2348)..(2348): n is a, c, g, or t
  misc_feature (2919)..(2920): n is a, c, g, or t
  misc_feature (2989)..(2989): n is a, c, g, or t
  misc_feature (3017)..(3018): n is a, c, g, or t
  misc_feature (4298)..(4298): n is a, c, g, or t
cccctgtggatgtgctccgggccctgaggttcccctccctccctgatggtgtccggagagcgaaaggcatctgtccagntgatgtggcctaccgagtggcacgacctgcccagctcagtgcacccactcgccagcttttcccaggaggatttcccaaagatttctctctgctgactgttgtccggacccgccctggtctccaagctcccctcctgactctctacagtgcccagggtgtccgacagctgggcctggagctgggccgacctgtccgcttcctgtatgaagaccagactgggcggcctcaacctccctctcagccagtcttccgaggcctcagcctagcagatggcaagtggcaccgtgtggctgtggctgtgaagggccagtctgtcaccctcattgttgactgcaagaagcgagtcacccggcctctcccccgaagtgctcgtccagtattggacacccatggagtgatcatctttggtgcccgtattctggatgaagaagtctttgagggtgatgtccaggagctggccattgtcccaggggtccaggcagcctatgaatcatgtgaacagaaggagctggaatgcgaggggggccagagggaaagaccccaaaaccaacagcctcacagagcccagagatctccacagcagcaaccatcaagacttcacaggccacaaaatcaggaaccccagagccaggaccccaccccaggtgaagaggaagaaatcctggagtcgagcctcttgccaccccttgaggaggctgcccatggaccccgagggctgaagggagagaaaggagagcctgcagtgttggaacctggtatgctcgtggaggggccccctggcccagaaggncctgcgggattgattggtccccctggcatccaggggaacccaggcccagttggagaccctggagagaggggcccccctggccgagcagggctccctggatcagatggggctcctggtcctcctggcacatctctcatgctcccattccggtttggcagtggtgggggtgacaagggccctgtggtggcggcccaggaggctcaggcccaggcgatcctgcagcaggcgaggctggcgctccgtggaccccctggccccatgggatacacagggcgccctggacccttgggccaacctgggagccctggcctgaaaggagagtctggagacttaggacctcagggccccagaggacctcagggcctcacaggcnccctggcaaggctgggcgaaggggccgggcaggtnctgatggagcccgagggancctggagatcctggagtgaagggtgaccgaggttttgatggactcccagggctccctggagagaagggccataggggtgatactggtcccagggccttcctggtccccctggtgaggatggagagaggggagatgacggggagattgggcctcgagggctgcctggagagtcgggacctcgaggtctccttggccccaaaggcccacctggtattcctggaccccctggcgtccgaggcatggatggtccccagggccccaaagggagcttgggaccccagggagagccaggacctcctggacaacagggcacccctgggacccagggtcttcccgggccccagggngccatcggccctcatggagagaagggtcctcaagggaagccagggctccccggcatgcctggctcagacggacccccgggtcacccagggaaggaaggtccccctggaaccaaaggaaaccaggtccctctggacctcagggacctctaggatacccaggacctcnaggggtcaagggtgtgnacggaattcggggtctgaagggtcataagggtgagaagggtgaggatggctttcctgggttcaaaggtgacataggcgtgaaaggtgacaggggcgaagttggagtccctggttccaggggagaggatggtcctgaggggccaaagggacgcactggaccgactggagaccctgggcccccagggctcatgggcgagaagggcaagctgggtgttcctggtctgcctggctatcctggacgtcagggacccaaggggtccctaggatttcctggctttcctggtgccagtggagagaagggagcccggggcctgtcggggaagtcagggcctcggggagaacggggccccacgggtccacgggtcagcggggaccccgaggtgccactgggaagtctggagctaagggaacatctggtggtgatggcccccatggnccccctggagagaggggcctccctggacctcaggntccaacgggtttcctggaccgaaaggacccccgggnccccctgggaaggangggctgccgggacacccaggccaaagaggagaagtgggtttccaagggaagaccggcccccctggtcctccaggagtggtgggacctcagggagcagcaggagaaaccggccctatgggggagagaggtcacccaggccccccggggccccctggagagcagggactacctgggacagctggaaaagaaggaacaaagggtgaccctggtccccctggggccccagggaaggatggtcctgctggtctgaggggattcccaggagagagaggcctcccaggcactgctggtggacctggtttgaaggggaatgaaggtccgtctggcccccctggccctgcaggctcccctggggaacgaggtgcagcaggatcagggggacccattggtcgccagggcgcccaggcccgcagggtccccctggagcagcaggagagaaaggtgtcccaggtgagaagggccccattggcccgactggccgagatggagtgcagggtcctgtggggcttcctggtcctgctgggcctccaggtgtggctggagaggatggagacaagggtgaggtgggggnncccggacagaagggcaccaaagggaacaagggtgaacatggccctcctggaccccctggacccattggncctgtggggcagcctggagcagcgggannagatggggagccggagctcgggacccagggacactttggagccaaaggtgatgaaggaacaagaggattcaatgggcccccaggacccattggcctacagggtttgccaggcccctctggggagaagggagaaacaggagatgtgggtcctatgggaccacctggccccccaggacctcgaggtccagctggacccaatggcgctgatggcccacaaggtcccccaggaggtgttgggaacctgggtccccctggagagaagggggaaccaggagagtcaggatctccagggatccagggcgagccaggtgtcaagggtccacgcggggaacgtggagagaaaggagagtcggggcagccaggagagccagggccaccagggcctaaaggccccacaggcgatgatggccccaaagggaaccctggtcctgttggttttcctggtgaccctggcccccctggagaaggtggccctcggggccaggatggtgctaagggtgaccgaggcgaggatggtgagccaggacagcctggatcccctggtcccaccggggagaatggacccccagggccacttggaaagcgaggtcctgctggctcgcctggttccgaggggcgacaaggagggaagggagccaagggagatcctggcgctataggtgccccggggaagacaggcccggtgggtcctgcaggcccagcagggaaacctggccctgatggtctgagggggctcccaggctcagtgggtcagcaaggccgacctggagctacaggccaggctgggcccccaggtcctgtgggacccccagggctgcctggtctccggggcgatgctggagccaagggagagaagggccacccaggtctcattggactgattgggcccccgggtgagcagggagagaagggagatcggggacttcctgggcctcagggctcccctgggcagaagggtgagatgggtatcccaggagcatccggccccattggtcctggaggtccccccggcctccccggacctgctggccccaaaggagccaaaggagccacaggcccaggcggacccaagggagagaagggtgtgcagggccctccaggacacccgggtcccccaggcgaggtgatccagccactgcccattcagatgcccaagaagactcggcgctcggtggatggaagccgtctgatgcaggaagatgaggccataccgaccgggggagcccccggcagtcctggggggctggaggagatctttggctcactcgactccctgcggnaggagatcgagcagatgaggcggccaacagggacccaggacagccctgctcgcacctgccaggacctgaagctgtgccacccagagcttcccgatggagagtactgggtcgaccccaaccagggctgtgctcgggatgccttccgagttttctgcaacttcacagcagggggtgagacctgtgtgacgcctagggatgacgtcacgcagttctcttacgtggactcagagggctccccagtgggtgtggtccagctcaccttcctgcggctgctcagcgtctcagcccaccaggacgtctcctacccctgctctggagcagcccgtgacggtcccctgagactccgtggggccaatgaggatgagctgagcccggagactagcccctatgtcaaagaattcagagatggctgccagacacagcaaggccggacggtgctggaggtgcgaacgcctgtgctggagcagctgccagtgctggatgcctccttctcagacctgggagccccaccgaggcggggaggggtgctgctggggcctgtctgcttcatgggataggaccgtctctgtctgatcctgtccattcggaaccaggcccacctggaatcccacaacatcagctctgtgccacctcccaagagggctcctcactatctagggagccctgggccagggcgtggagagccctcagtcggggcaggccaggggaggggtgaagtggttgcctggacaccccacgggaggagtggcatctggggctcttggccctcccacctggagcctgttacccgttagagagctgagacccttatttaaaactcacctcccaatcaccccaaacaaatggaagagaagagaaaggacatggcgtattttgtatttaaaagtaattgtattaattatttaaagtgtggaaagcaaaataacaaaaaagagaaacgccaacaaaaatcagcagatgttgaagacaggggtctcgggggtgggctccggcacccacatcctggagtcaggactttcctcagtgactgtgtgtaggggggtttcagggctgaaccccacctccctcccaccttcctcccacctcacctgtcgcacccactgtgaaagttggaatatgtggtctccctggcctcagggctctgactctgccagggtggggctctctaacccacaggtgttggctgcctggcccatgtgcccactgtctcttccacttggtctgggtttggcaggcactgcctgctacttgagggccaggatgctcccccagggaagaaacggaatagtgtggggtgtgtgcagggctgcatcccgcagatggctggaatattaaaattcttctatattggctggtaaattgccatggccctgagccactgagtatgttcattgccacccctgtccctcccctgggcacccctcactttccctgatcctgcaattaaagggttaatgtgtggcatatggaagggactcccaggaccctgtgcccagcttccatgctgactgatggttaaataatgtgattgtctcctcaaaagtgtctg

SEQ ID NO: 323370 - DNA, 1136 bp, Homo sapiens
  misc_feature (79)..(79): n is a, c, g, or t
cccctgtggatgtgctccgggccctgaggttcccctccctccctgatggtgtccggagagcgaaaggcatctgtccagntgatgtggcctaccgagtggcacgacctgcccagctcagtgcacccactcgccagcttttcccaggaggatttcccaaagatttctctctgctgactgttgtccggacccgccctggtctccaagctcccctcctgactctctacagtgcccagggtgtccgacagctgggcctggagctgggccgacctgtccgcttcctgtatgaagaccagactgggcggcctcaacctccctctcagccagtcttccgaggcctcagcctagcagatggcaagtggcaccgtgtggctgtggctgtgaagggccagtctgtcaccctcattgttgactgcaagaagcgagtcacccggcctctcccccgaagtgctcgtccagtattggacacccatggagtgatcatctttggtgcccgtattctggatgaagaagtctttgagggtgatgtccaggagctggccattgtcccaggggtccaggcagcctatgaatcatgtgaacagaaggagctggaatgcgaggggggccagagggaaagaccccaaaaccaacagcctcacagagcccagagatctccacagcagcaaccatcaagacttcacaggccacaaaatcaggaaccccagagccaggtgagggagctgggagaacccccaagtgcagcacaccccagagagggaagacacccaggcatctctcctccttagttgtcctccccaccctcatctccctattcccatcaccccctcctcctagtcctcattcatcagcctttttattttcatctaaaaataaaaagagttgttatgaagaatttgtggctgggagctgtgttccctgctctgcgtctcctcttccagtcttcctggaactgtgtccctgggttttcccttccttctttgaattaagagattgggagacagtgggagaggggtgagagctggggaggcaggtaggagaggggactgaagccaggagaaagcagtcgggatggtgagaccaaggaggaggaatgggaaggagtagggatggagggaatatcaaaggaggggtgggtc

SEQ ID NO: 323371 - DNA, 404 bp, Homo sapiens
gagagagagagtagagagagagagagagagagagagagagagagtgcgagatatagagattgcccacccggctcctccacccctctggaggccatgaaaggacccagggaagagatcgtctacctgccctgcatttaccgaaacacaggcactgaggccccagattatctggccactgtggatgttgaccccaagtctccccagtattgccaggtcattgagcccaaggacatccatgccaagtgcgaactggcctttctccacaccagccactgcctggccagcggtgcgtttcgattcatctcctggtagacgtcatgttcttggctatttttctttgtgctatttgatttctgtcttttttcttttctgtttatcctctttcctttctgttttgtctttgc

SEQ ID NO: 323372 - DNA, 2861 bp, Homo sapiens
tcccttcgctccttagcggggaacagcggcctctgacaccagcacagcaaacccgccgggatcaaagtgtaccagtcggcagcatggctacgaaatgtgggaattgtggacccggctactccacccctctggaggccatgaaaggtaattgcccatggtctgagagccagcgccctactactgattccacagctgggggtggagggacttcagacctagcccccaccctctggcacacccagcacttcccctacctttccttcccaccctgccgtccctgctgcctgctttctaccgtgcaggacccagggaagagatcgtctacctgccctgcatttaccgaaacacaggcactgaggccccagattatctggccactgtggatgttgaccccaagtctccccagtattgccaggttaggcggggcttgggcgccagctactttgagaccatagctgccctcatccctggccctgggcccccccttcccagctccatccttcttggccctccctggggatgcttgtgcacgctcaacctgggacaaggggagtgctgaaatccagcctgtgccgtgcttccaaaccaaaatgagtccacaggggcgcctcttccaaaagtggacagaggcgtggcctgggggagcaccacctctccccgcatcctaggtcatccaccggctgcccatgcccaacctgaaggacgagctgcatcactcaggatggaacacctgcagcagctgcttcggtgatagcaccaagtcgcgcaccaagctggtgctgcccagtctcatctcctctcgcatctatgtggtggacgtgggctctgagccccgggccccaaagctgcacaaggtcattgagcccaaggacatccatgccaagtgcgaactggcctttctccacaccagccactgcctggccagcggggaagtgatgatcagctccctgggagacgtcaagggcaatggcaaagggggttttgtgctgctggatggggagacgttcgaggtgaaggggacatgggagagacctgggggtgctgcaccgttgggctatgacttctggtaccagcctcgacacaatgtcatgatcagcactgagtgggcagctcccaatgtcttacgagatggcttcaaccccgctgatgtggaggctggactgtacgggagccacttatatgtatgggactggcagcgccatgagattgtgcagaccctgtctctaaaagatgggcttattcccttggagatccgcttcctgcacaacccagacgctgcccaaggctttgtgggctgcgcactcagctccaccatccagcgcttctacaagaacgaggtgacatacgccctctggccctcccctcccagtagtcttgtcagcagctctacctaagcaggcttctgtaacggtgctcccaggcgtctccaggaacgaaaaaaatgaggctgcatgccctgtctctcttctctcagtgctagggcaacttctgcctgaaccctaactggccgtatttattcattcattcaaaaactacttagtgaatgtctgtgctaggcactgtgctatgttctgggaatgcagtggtgaagcagacacaacccctgcctcaaggggcttgcatggagttagatcctgctggcaagaaggccgggcatctattctctccctcccaggtctgggcaacccagatctaacccctagtccccaattctgataggctgacctctctgccagctaacctcaccctccacccctcaatgtagggaggtacatggtcagtggagaaggtgatccaggtgccccccaagaaagtgaagggctggctgctgcccgaaatgccaggcctgatcaccgacatcctgctctccctggacgaccgcttcctctacttcagcaactggctgcatggggacctgaggcagtatgacatctctgacccacagagaccccgcctcacaggacaggtggagaccctggcaggaggagcagaagggaaggaaggaaagagaagagaagctggggatggggtggatgatctgaagcagctgcaggatgttgagggaggtgcaggaaaagcagacatgtgtgctgtgggacagcacaggcccaggactgtccaggccagggatgggcatgcagagcatgtctgaaaggagagaggggttccagccaggcaagctgctcttcctgcaatgtttgcgcctcccactatggtcctccttatactctgcacctccccatctagctcttcctcggaggcagcattgttaagggaggccctgtgcaagtgctggaggacgaggaactaaagtcccagccagagcccctagtggtcaagggaaaacgggtggctggaggccctcagatgatccagctcagcctggatgggaagcgcctctacatcaccacgtcgctgtacagtgcctgggacaagcagttttaccctgatctcatcagggaaggctctgtgatgctgcaggttgatgtagacacagtaaaaggagggctgaagttgaaccccaacttcctggtggacttcgggaaggagccccttggcccagcccttgcccatgagctccgctaccctgggggcgattgtagctctgacatctggatttgaactccaccctcatcacccacactccctattttgggccctcacttccttggggacctggcttcattctgctctctcttggcacccgacccttggcagcatgtaccacacagccaagctgagactgtggcaatgtgttgagtcatatacatttactgaccactgttgcttgttgctcactgtgctgcttttccatgagctcttggaggcaccaagaaataaactcgtaaccctgtccttca

SEQ ID NO: 323373 - DNA, 1606 bp, Homo sapiens
acttgaggcagtggctggtgtggagaaaggccagttcgcacttggcatggatgtccttgggctcaactgaccttgttgcagctttgtggcctgggggagcaccacctctccccgcatcctaggtcatccaccggctgcccatgcccaacctgaaggacgagctgcatcactcaggatggaacacctgcagcagctgcttcggtgatagcaccaagtcgcgcaccaagctggtgctgcccagtctcatctcctctcgcatctatgtggtggacgtgggctctgagccccgggccccaaagctgcacaaggtcattgagcccaaggacatccatgccaagtgcgaactggcctttctccacaccagccactgcctggccagcggggaagtgatgatcagctccctgggagacgtcaagggcaatggcaaagggggttttgtgctgctggatggggagacgttcgaggtgaaggggacatgggagagacctgggggtgctgcaccgttgggctatgacttctggtaccagcctcgacacaatgtcatgatcagcactgagtgggcagctcccaatgtcttacgagatggcttcaaccccgctgatgtggaggctggactgtacgggagccacttatatgtatgggactggcagcgccatgagattgtgcagaccctgtctctaaaagatgggcttattcccttggagatccgcttcctgcacaacccagacgctgcccaaggctttgtgggctgcgcactcagctccaccatccagcgcttctacaagaacgagggaggtacatggtcagtggagaaggtgatccaggtgccccccaagaaagtgaagggctggctgctgcccgaaatgccaggcctgatcaccgacatcctgctctccctggacgaccgcttcctctacttcagcaactggctgcatggggacctgaggcagtatgacatctctgacccacagagaccccgcctcacaggacagctcttcctcggaggcagcattgttaagggaggccctgtgcaagtgctggaggacgaggaactaaagtcccagccagagcccctagtggtcaagggaaaacgggtggctggaggccctcagatgatccagctcagcctggatgggaagcgcctctacatcaccacgtcgctgtacagtgcctgggacaagcagttttaccctgatctcatcagggaaggctctgtgatgctgcaggttgatgtagacacagtaaaaggagggctgaagttgaaccccaacttcctggtggacttcgggaaggagccccttggcccagcccttgcccatgagctccgctaccctgggggcgattgtagctctgacatctggatttgaactccaccctcatcacccacactccctattttgggccctcacttccttggggacctggcttcattctgctctctcttggcacccgacccttggcagcatgtaccacacagccaagctgagactgtggcaatgtgttgagtcatatacatttactgaccactgttgcttgttgctcactgtgctgcttttccatgagctcttggaggcaccaagaaataaactcgtaaccctgtccttca

SEQ ID NO: 323374 - DNA, 2098 bp, Homo sapiens
tcccttcgctccttagcggggaacagcggcctctgacaccagcacagcaaacccgccgggatcaaagtgtaccagtcggcagcatggctacgaaatgtgggaattgtggacccggctactccacccctctggaggccatgaaaggtaattgcccatggtctgagagccagcgccctactactgattccacagctgggggtggagggacttcagacctagcccccaccctctggcacacccagcacttcccctacctttccttcccaccctgccgtccctgctgcctgctttctaccgtgcaggacccagggaagagatcgtctacctgccctgcatttaccgaaacacaggcactgaggccccagattatctggccactgtggatgttgaccccaagtctccccagtattgccaggttaggcggggcttgggcgccagctactttgagaccatagctgccctcatccctggccctgggcccccccttcccagctccatccttcttggccctccctggggatgcttgtgcacgctcaacctgggacaaggggagtgctgaaatccagcctgtgccgtgcttccaaaccaaaatgagtccacaggggcgcctcttccaaaagtggacagaggcgtggcctgggggagcaccacctctccccgcatcctaggtcatccaccggctgcccatgcccaacctgaaggacgagctgcatcactcaggatggaacacctgcagcagctgcttcggtgatagcaccaagtcgcgcaccaagctggtgctgcccagtctcatctcctctcgcatctatgtggtggacgtgggctctgagccccgggccccaaagctgcacaaggtcattgagcccaaggacatccatgccaagtgcgaactggcctttctccacaccagccactgcctggccagcggggaagtgatgatcagctccctgggagacgtcaagggcaatggcaaagggggttttgtgctgctggatggggagacgttcgaggtgaaggggacatgggagagacctgggggtgctgcaccgttgggctatgacttctggtaccagcctcgacacaatgtcatgatcagcactgagtgggcagctcccaatgtcttacgagatggcttcaaccccgctgatgtggaggctggactgtacgggagccacttatatgtatgggactggcagcgccatgagattgtgcagaccctgtctctccaaggctttgtgggctgcgcactcagctccaccatccagcgcttctacaagaacgagggaggtacatggtcagtggagaaggtgatccaggtgccccccaagaaagtgaagggctggctgctgcccgaaatgccaggcctgatcaccgacatcctgctctccctggacgaccgcttcctctacttcagcaactggctgcatggggacctgaggcagtatgacatctctgacccacagagaccccgcctcacaggacagctcttcctcggaggcagcattgttaagggaggccctgtgcaagtgctggaggacgaggaactaaagtcccagccagagcccctagtggtcaagggaaaacgggtggctggaggccctcagatgatccagctcagcctggatgggaagcgcctctacatcaccacgtcgctgtacagtgcctgggacaagcagttttaccctgatctcatcagggaaggctctgtgatgctgcaggttgatgtagacacagtaaaaggagggctgaagttgaaccccaacttcctggtggacttcgggaaggagccccttggcccagcccttgcccatgagctccgctaccctgggggcgattgtagctctgacatctggatttgaactccaccctcatcacccacactccctattttgggccctcacttccttggggacctggcttcattctgctctctcttggcacccgacccttggcagcatgtaccacacagccaagctgagactgtggcaatgtgttgagtcatatacatttactgaccactgttgcttgttgctcactgtgctgcttttccatgagctcttggaggcaccaagaaataaactcgtaaccctgtccttca

SEQ ID NO: 323375 - DNA, 1224 bp, Homo sapiens
gcgtaggatcatgcgtctggtggctcggggaccacggtacgtagaggtggaagcgagtgagtctgtaactagaccccgtagggatgatcgctggcgtctatgagctagttgcttgctgttcatccaccacattaaaaaacggccggggatcaaccgatgcgtgctgagcatcatccatgatgttactactagtgggttataactggatgtatgctaggaggcagtccatgtcgcagctacgacatctatatgatcgtggcactggcagcgccatgagattgtgcagaccctgtctctaaaagatgggcttattcccttggagatccgcttcctgcacaacccagacgctgcccaaggctttgtgggctgcgcactcagctccaccatccagcgcttctacaagaacgagggaggtacatggtcagtggagaaggtgatccaggtgccccccaagaaagtgaagggctggctgctgcccgaaatgccaggcctgatcaccgacatcctgctctccctggacgaccgcttcctctacttcagcaactggctgcatggggacctgaggcagtatgacatctctgacccacagagaccccgcctcacaggacagctcttcctcggaggcagcattgttaagggaggccctgtgcaagtgctggaggacgaggaactaaagtcccagccagagcccctagtggtcaagggaaaacgggtggctggaggccctcagatgatccagctcagcctggatgggaagcgcctctacatcaccacgtcgctgtacagtgcctgggacaagcagttttaccctgatctcatcagggaaggctctgtgatgctgcaggttgatgtagacacagtaaaaggagggctgaagttgaaccccaacttcctggtggacttcgggaaggagccccttggcccagcccttgcccatgagctccgctaccctgggggcgattgtagctctgacatctggatttgaactccaccctcatcacccacactccctattttgggccctcacttccttggggacctggcttcattctgctctctcttggcacccgacccttggcagcatgtaccacacagccaagctgagactgtggcaatgtgttgagtcatatacatttactgaccactgttgcttgttgctcactgtgctgcttttccatgagctcttggaggcaccaagaaataaactcgtaaccctgtccttca

SEQ ID NO: 323376 - DNA, 2343 bp, Homo sapiens
  misc_feature (2207)..(2207): n is a, c, g, or t
  misc_feature (2209)..(2209): n is a, c, g, or t
  misc_feature (2215)..(2215): n is a, c, g, or t
  misc_feature (2245)..(2245): n is a, c, g, or t
  misc_feature (2252)..(2252): n is a, c, g, or t
  misc_feature (2264)..(2264): n is a, c, g, or t
  misc_feature (2269)..(2269): n is a, c, g, or t
  misc_feature (2273)..(2273): n is a, c, g, or t
  misc_feature (2276)..(2276): n is a, c, g, or t
  misc_feature (2283)..(2283): n is a, c, g, or t
  misc_feature (2298)..(2298): n is a, c, g, or t
  misc_feature (2306)..(2306): n is a, c, g, or t
  misc_feature (2309)..(2309): n is a, c, g, or t
  misc_feature (2314)..(2314): n is a, c, g, or t
  misc_feature (2316)..(2317): n is a, c, g, or t
  misc_feature (2319)..(2319): n is a, c, g, or t
  misc_feature (2322)..(2322): n is a, c, g, or t
  misc_feature (2327)..(2328): n is a, c, g, or t
tcccttcgctccttagcggggaacagcggcctctgacaccagcacagcaaacccgccgggatcaaagtgtaccagtcggcagcatggctacgaaatgtgggaattgtggacccggctactccacccctctggaggccatgaaaggtaattgcccatggtctgagagccagcgccctactactgattccacagctgggggtggagggacttcagacctagcccccaccctctggcacacccagcacttcccctacctttccttcccaccctgccgtccctgctgcctgctttctaccgtgcaggacccagggaagagatcgtctacctgccctgcatttaccgaaacacaggcactgaggccccagattatctggccactgtggatgttgaccccaagtctccccagtattgccaggttaggcggggcttgggcgccagctactttgagaccatagctgccctcatccctggccctgggcccccccttcccagctccatccttcttggccctccctggggatgcttgtgcacgctcaacctgggacaaggggagtgctgaaatccagcctgtgccgtgcttccaaaccaaaatgagtccacaggggcgcctcttccaaaagtggacagaggcgtggcctgggggagcaccacctctccccgcatcctaggtcatccaccggctgcccatgcccaacctgaaggacgagctgcatcactcaggatggaacacctgcagcagctgcttcggtgatagcaccaagtcgcgcaccaagctggtgctgcccagtctcatctcctctcgcatctatgtggtggacgtgggctctgagccccgggccccaaagctgcacaaggtcattgagcccaaggacatccatgccaagtgcgaactggcctttctccacaccagccactgcctggccagcggggaagtgatgatcagctccctgggagacgtcaagggcaatggcaaagggggttttgtgctgctggatggggagacgttcgaggtgaaggggacatgggagagacctgggggtgctgcaccgttgggctatgacttctggtaccagcctcgacacaatgtcatgatcagcactgagtgggcagctcccaatgtcttacgagatggcttcaaccccgctgatgtggaggctggactgtacgggagccacttatatgtatgggactggcagcgccatgagattgtgcagaccctgtctctaaaagatgggcttattcccttggagatccgcttcctgcacaacccagacgctgcccaaggctttgtgggctgcgcactcagctccaccatccagcgcttctacaagaacgagggaggtacatggtcagtggagaaggtgatccaggtgccccccaagaaagtgaagggctggctgctgcccgaaatgccaggcctgatcaccgacatcctgctctccctggacgaccgcttcctctacttcagcaactggctgcatggggacctgaggcagtatgacatctctgacccacagagaccccgcctcacaggacagctcttcctcggaggcagcattgttaagggaggccctgtgcaagtgctggaggacgaggaactaaagtcccagccagagcccctagtggtcaagggaaaacgggtggctggaggccctcagatgatccagctcagcctggatgggaagcgcctctacatcaccacgtcgctgtacagtgcctgggacaagcagttttaccctgatctcatcagggaaggctctgtgatgctgcaggttgatgtagacacagtaaaaggagggctgaagttgaaccccaacttcctggtggacttcgggaaggagccccttggcccagcccttgcccatgagctccgctaccctgggggcgattgtagctctgacatctggatttgaactccaccctcatcacccacactccctattttgggccctcacttccttggggacctggcttcattctgctctctcttggcacccgacccttggcagcatgtaccacacagccaagctgagactgtggcaatgtgttgagtcatatacatttactgaccactgttgcttgttgctcactgtgctgcttttccatgagctcttggaggcaccaagaaataaactcgtaaccctgtccttcaaaaaaaaaaaaaaaaaaaaaaaaaaaaaaaaaaaaaaaaaaaaaagaaaaaaaananaaaaanaaaaaaaaaaaaaaaaaaggggggggggcnaaaaatncccccggggggnccatncccnccngtttttnttggaaaaagggggncccccaanagngaggngnngntanaaaannaacagaaggacggcg

SEQ ID NO: 323377 - DNA, 741 bp, Homo sapiens
gaggatccccactgtacggcgacgtggtgatgtagaggcgcttcccatccaggctgagctggatcatctgagggcctccagccacccgttttcccttgacccacagagaccccgcctcacaggacagctcttcctcggaggcagcattgttaagggaggccctgtgcaagtgctggaggacgaggaactaaagtcccagccagagcccctagtggtcaagggaaaacgggtggctggaggccctcagatgatccagctcagcctggatgggaagcgcctctacatcaccacgtcgctgtacagtgcctgggacaagcagttttaccctgatctcatcagggaaggctctgtgatgctgcaggttgatgtagacacagtaaaaggagggctgaagttgaaccccaacttcctggtggacttcgggaaggagccccttggcccagcccttgcccatgagctccgctaccctgggggcgattgtagctctgacatctggatttgaactccaccctcatcacccacactccctattttgggccctcacttccttggggacctggcttcattctgctctctcttggcacccgacccttggcagcatgtaccacacagccaagctgagactgtggcaatgtgttgagtcatatacatttactgaccactgttgcttgttgctcactgtgctgcttttccatgagctcttggaggcaccaagaaataaactcgtaaccctgtccttca

SEQ ID NO: 323378 - DNA, 2098 bp, Homo sapiens
tcccttcgctccttagcggggaacagcggcctctgacaccagcacagcaaacccgccgggatcaaagtgtaccagtcggcagcatggctacgaaatgtgggaattgtggacccggctactccacccctctggaggccatgaaaggtaattgcccatggtctgagagccagcgccctactactgattccacagctgggggtggagggacttcagacctagcccccaccctctggcacacccagcacttcccctacctttccttcccaccctgccgtccctgctgcctgctttctaccgtgcaggacccagggaagagatcgtctacctgccctgcatttaccgaaacacaggcactgaggccccagattatctggccactgtggatgttgaccccaagtctccccagtattgccaggttaggcggggcttgggcgccagctactttgagaccatagctgccctcatccctggccctgggcccccccttcccagctccatccttcttggccctccctggggatgcttgtgcacgctcaacctgggacaaggggagtgctgaaatccagcctgtgccgtgcttccaaaccaaaatgagtccacaggggcgcctcttccaaaagtggacagaggcgtggcctgggggagcaccacctctccccgcatcctaggtcatccaccggctgcccatgcccaacctgaaggacgagctgcatcactcaggatggaacacctgcagcagctgcttcggtgatagcaccaagtcgcgcaccaagctggtgctgcccagtctcatctcctctcgcatctatgtggtggacgtgggctctgagccccgggccccaaagctgcacaaggtcattgagcccaaggacatccatgccaagtgcgaactggcctttctccacaccagccactgcctggccagcggggaagtgatgatcagctccctgggagacgtcaagggcaatggcaaagggggttttgtgctgctggatggggagacgttcgaggtgaaggggacatgggagagacctgggggtgctgcaccgttgggctatgacttctggtaccagcctcgacacaatgtcatgatcagcactgagtgggcagctcccaatgtcttacgagatggcttcaaccccgctgatgtggaggctggactgtacgggagccacttatatgtatgggactggcagcgccatgagattgtgcagaccctgtctctaaaagatgggcttattcccttggagatccgcttcctgcacaacccagacgctgcccaaggctttgtgggctgcgcactcagctccaccatccagcgcttctacaagaacgagggaggtacatggtcagtggagaaggtgatccaggtgccccccaagaaagtgaagggctggctgctgcccgaaatgccaggcctgatcaccgacatcctgctctccctggacgaccgcttcctctacttcagcaactggctgcatggggacctgaggcagtatgacatctctgacccacagagaccccgcctcacaggacagctcttcctcggaggcagcattgttaagggaggccctgtgcaagtgctggaggacgaggaactaaagtcccagccagagcccctagtggtcaagcgcctctacatcaccacgtcgctgtacagtgcctgggacaagcagttttaccctgatctcatcagggaaggctctgtgatgctgcaggttgatgtagacacagtaaaaggagggctgaagttgaaccccaacttcctggtggacttcgggaaggagccccttggcccagcccttgcccatgagctccgctaccctgggggcgattgtagctctgacatctggatttgaactccaccctcatcacccacactccctattttgggccctcacttccttggggacctggcttcattctgctctctcttggcacccgacccttggcagcatgtaccacacagccaagctgagactgtggcaatgtgttgagtcatatacatttactgaccactgttgcttgttgctcactgtgctgcttttccatgagctcttggaggcaccaagaaataaactcgtaaccctgtccttca

SEQ ID NO: 323379 - DNA, 2100 bp, Homo sapiens
tcccttcgctccttagcggggaacagcggcctctgacaccagcacagcaaacccgccgggatcaaagtgtaccagtcggcagcatggctacgaaatgtgggaattgtggacccggctactccacccctctggaggccatgaaaggtaattgcccatggtctgagagccagcgccctactactgattccacagctgggggtggagggacttcagacctagcccccaccctctggcacacccagcacttcccctacctttccttcccaccctgccgtccctgctgcctgctttctaccgtgcaggacccagggaagagatcgtctacctgccctgcatttaccgaaacacaggcactgaggccccagattatctggccactgtggatgttgaccccaagtctccccagtattgccaggttaggcggggcttgggcgccagctactttgagaccatagctgccctcatccctggccctgggcccccccttcccagctccatccttcttggccctccctggggatgcttgtgcacgctcaacctgggacaaggggagtgctgaaatccagcctgtgccgtgcttccaaaccaaaatgagtccacaggggcgcctcttccaaaagtggacagaggcgtggcctgggggagcaccacctctccccgcatcctaggtcatccaccggctgcccatgcccaacctgaaggacgagctgcatcactcaggatggaacacctgcagcagctgcttcggtgatagcaccaagtcgcgcaccaagctggtgctgcccagtctcatctcctctcgcatctatgtggtggacgtgggctctgagccccgggccccaaagctgcacaaggtcattgagcccaaggacatccatgccaagtgcgaactggcctttctccacaccagccactgcctggccagcggggaagtgatgatcagctccctgggagacgtcaagggcaatggcaaagggggttttgtgctgctggatggggagacgttcgaggtgaaggggacatgggagagacctgggggtgctgcaccgttgggctatgacttctggtaccagcctcgacacaatgtcatgatcagcactgagtgggcagctcccaatgtcttacgagatggcttcaaccccgctgatgtggaggctggactgtacgggagccacttatatgtatgggactggcagcgccatgagattgtgcagaccctgtctctaaaagatgggcttattcccttggagatccgcttcctgcacaacccagacgctgcccaaggctttgtgggctgcgcactcagctccaccatccagcgcttctacaagaacgagggaggtacatggtcagtggagaaggtgatccaggtgccccccaagaaagtgaagggctggctgctgcccgaaatgccaggcctgatcaccgacatcctgctctccctggacgaccgcttcctctacttcagcaactggctgcatggggacctgaggcagtatgacatctctgacccacagagaccccgcctcacaggacagctcttcctcggaggcagcattgttaagggaggccctgtgcaagtgctggaggacgaggaactaaagtcccagccagagcccctagtggtcaagggaaaacgggtggctggaggccctcagatgatccagctcagcctggatgggaagcgcctctacatcaccacgtcgctgtacagtgcctgggacaagcagttttaccctgatctcatcagggaaggctctgtgatgctgcaggttgatgtagacacaagccccttggcccagcccttgcccatgagctccgctaccctgggggcgattgtagctctgacatctggatttgaactccaccctcatcacccacactccctattttgggccctcacttccttggggacctggcttcattctgctctctcttggcacccgacccttggcagcatgtaccacacagccaagctgagactgtggcaatgtgttgagtcatatacatttactgaccactgttgcttgttgctcactgtgctgcttttccatgagctcttggaggcaccaagaaataaactcgtaaccctgtccttca

SEQ ID NO: 323380 - DNA, 1944 bp, Homo sapiens
tcccttcgctccttagcggggaacagcggcctctgacaccagcacagcaaacccgccgggatcaaagtgtaccagtcggcagcatggctacgaaatgtgggaattgtggacccggctactccacccctctggaggccatgaaaggtaattgcccatggtctgagagccagcgccctactactgattccacagctgggggtggagggacttcagacctagcccccaccctctggcacacccagcacttcccctacctttccttcccaccctgccgtccctgctgcctgctttctaccgtgcaggacccagggaagagatcgtctacctgccctgcatttaccgaaacacaggcactgaggccccagattatctggccactgtggatgttgaccccaagtctccccagtattgccaggttaggcggggcttgggcgccagctactttgagaccatagctgccctcatccctggccctgggcccccccttcccagctccatccttcttggccctccctggggatgcttgtgcacgctcaacctgggacaaggggagtgctgaaatccagcctgtgccgtgcttccaaaccaaaatgagtccacaggggcgcctcttccaaaagtggacagaggcgtggcctgggggagcaccacctctccccgcatcctaggtcatccaccggctgcccatgcccaacctgaaggacgagctgcatcactcaggatggaacacctgcagcagctgcttcggtgatagcaccaagtcgcgcaccaagctggtgctgcccagtctcatctcctctcgcatctatgtggtggacgtgggctctgagccccgggccccaaagctgcacaaggtcattgagcccaaggacatccatgccaagtgcgaactggcctttctccacaccagccactgcctggccagcggggaagtgatgatcagctccctgggagacgtcaagggcaatggcaaagggggttttgtgctgctggatggggagacgttcgaggtgaaggggacatgggagagacctgggggtgctgcaccgttgggctatgacttctggtaccagcctcgacacaatgtcatgatcagcactgagtgggcagctcccaatgtcttacgagatggcttcaaccccgctgatgtggaggctggactgtacgggagccacttatatgtatgggactggcagcgccatgagattgtgcagaccctgtctctaaaagatgggcttattcccttggagatccgcttcctgcacaacccagacgctgcccaaggctttgtgggctgcgcactcagctccaccatccagcgcttctacaagaacgagggaggtacatggtcagtggagaaggtgatccaggtgccccccaagaaagtgaagggctggctgctgcccgaaatgccaggcctgatcaccgacatcctgctctccctggacgaccgcttcctctacttcagcaactggctgcatggggacctgaggcagtatgacatctctgacccacagagaccccgcctcacaggacagctcttcctcggaggcagcattgttaagggaggccctgtgcaagtgctggaggacgaggaactaaagtcccagccagagcccctagtggtcaagagccccttggcccagcccttgcccatgagctccgctaccctgggggcgattgtagctctgacatctggatttgaactccaccctcatcacccacactccctattttgggccctcacttccttggggacctggcttcattctgctctctcttggcacccgacccttggcagcatgtaccacacagccaagctgagactgtggcaatgtgttgagtcatatacatttactgaccactgttgcttgttgctcactgtgctgcttttccatgagctcttggaggcaccaagaaataaactcgtaaccctgtccttca

SEQ ID NO: 323381 - DNA, 1524 bp, Homo sapiens
tcccttcgctccttagcggggaacagcggcctctgacaccagcacagcaaacccgccgggatcaaagtgtaccagtcggcagcatggctacgaaatgtgggaattgtggacccggctactccacccctctggaggccatgaaaggtaattgcccatggtctgagagccagcgccctactactgattccacagctgggggtggagggacttcagacctagcccccaccctctggcacacccagcacttcccctacctttccttcccaccctgccgtccctgctgcctgctttctaccgtgcaggacccagggaagagatcgtctacctgccctgcatttaccgaaacacaggcactgaggccccagattatctggccactgtggatgttgaccccaagtctccccagtattgccaggttaggcggggcttgggcgccagctactttgagaccatagctgccctcatccctggccctgggcccccccttcccagctccatccttcttggccctccctggggatgcttgtgcacgctcaacctgggacaaggggagtgctgaaatccagcctgtgccgtgcttccaaaccaaaatgagtccacaggggcgcctcttccaaaagtggacagaggcgtggcctgggggagcaccacctctccccgcatcctaggtcatccaccggctgcccatgcccaacctgaaggacgagctgcatcactcaggatggaacacctgcagcagctgcttcggtgatagcaccaagtcgcgcaccaagctggtgctgcccagtctcatctcctctcgcatctatgtggtggacgtgggctctgagccccgggccccaaagctgcacaaggtcattgagcccaaggacatccatgccaagtgcgaactggcctttctccacaccagccactgcctggccagcggggaagtgatgatcagctccctgggagacgtcaagggcaatggcaaagggggttttgtgctgctggatggggagacgttcgaggtgaaggggacatgggagagacctgggggtgctgcaccgttgggctatgacttctggtaccagcctcgacacaatgtcatgatcagcactgagtgggcagctcccaatgtcttacgagatggcttcaaccccgctgatgtggaggctggactgtacgggagccacttatatgtatgggactggcagcgccatgagattgtgcagaccctgtctctaaaagatgggcttattcccttggagatccgcttcctgcacaacccagacgctgcccaaggctttgtgggctgcgcactcagctccaccatccagcgcttctacaagaacgagacctggcttcattctgctctctcttggcacccgacccttggcagcatgtaccacacagccaagctgagactgtggcaatgtgttgagtcatatacatttactgaccactgttgcttgttgctcactgtgctgcttttccatgagctcttggaggcaccaagaaataaactcgtaaccctgtccttca

SEQ ID NO: 323382 - DNA, 545 bp, Homo sapiens
gccctcccctcccagtagtcttgtcagcagctctacctaagcaggcttctgtaacggtgctcccaggcgtctccaggaacgaaaaaaatgaggctgcatgccctgtctctcttctctcagtgctagggcaacttctgcctgaaccctaactggccgtatttattcattcattcaaaaactacttagtgaatgtctgtgctaggcactgtgctatgttctgggaatgcagtggtgaagcagacacaacccctgcctcaaggggcttgcatggagttagatcctgctggcaagaaggccgggcatctattctctccctcccaggtctgggcaacccagatctaacccctagtccccaattctgataggctgacctctctgccagctaacctcaccctccacccctcaatgtagggaggtacatggtcagtggagaaggtgatccaggtgccccccaagaaagtgaagggctggctgctgcccgaaatgccaggtgagtgcctagggcataggaaagttgattcttggcctgggaaacaagagtcctt

SEQ ID NO: 323383 - DNA, 1279 bp, Homo sapiens
gaatgaaataagacaaaccatcaggcttgctgtattgtaaaccaacacaatatagttataacagatctgtagaaggatccttagaataagagagtcatttgtcgggggtcatcagggagaatactgatagtatcttcggctttgccgcataacagacacagcatggtatactcgatcataggtaactatttcttctccatcttcttctttcaaggatttgtttgtgatcagcataaaatcccgcttactgcacactgcacagcctgtaaagttcagtaagaaagatccattctccaggcaggtattaccccggttgggatattccttctccacacagtcgccacacatcgcgacgcagtcaacagggaatgtcctccatccgcttcctgcacaacccagacgctgcccaaggctttgtgggctgcgcactcagctccaccatccagcgcttctacaagaacgagggaggtacatggtcagtggagaaggtgatccaggtgccccccaagaaagtgaagggctggctgctgcccgaaatgccaggcctgatcaccgacatcctgctctccctggacgaccgcttcctctacttcagcaactggctgcatggggacctgaggcagtatgacatctctgacccacagagaccccgcctcacaggacagctcttcctcggaggcagcattgttaagggaggccctgtgcaagtgctggaggacgaggaactaaagtcccagccagagcccctagtggtcaagggaaaacgggtggctggaggccctcagatgatccagctcagcctggatgggaagcgcctctacatcaccacgtcgctgtacagtgcctgggacaagcagttttaccctgatctcatcagggaaggctctgtgatgctgcaggttgatgtagacacagtaaaaggagggctgaagttgaaccccaacttcctggtggacttcgggaaggagccccttggcccagcccttgcccatgagctccgctaccctgggggcgattgtagctctgacatctggatttgaactccaccctcatcacccacactccctattttgggccctcacttccttggggacctggcttcattctgctctctcttggcacccgacccttggcagcatgtaccacacagccaagctgagactgtggcaatgtgttgagtcatatacatttactgaccactgttgcttgttgctcactgtgctgcttttccatgagctcttggaggcaccaagaaataaactcgtaaccctgtccttca

SEQ ID NO: 323384 - DNA, 2152 bp, Homo sapiens
tcccttcgctccttagcggggaacagcggcctctgacaccagcacagcaaacccgccgggatcaaagtgtaccagtcggcagcatggctacgaaatgtgggaattgtggacccggctactccacccctctggaggccatgaaaggtaattgcccatggtctgagagccagcgccctactactgattccacagctgggggtggagggacttcagacctagcccccaccctctggcacacccagcacttcccctacctttccttcccaccctgccgtccctgctgcctgctttctaccgtgcaggacccagggaagagatcgtctacctgccctgcatttaccgaaacacaggcactgaggccccagattatctggccactgtggatgttgaccccaagtctccccagtattgccaggttaggcggggcttgggcgccagctactttgagaccatagctgccctcatccctggccctgggcccccccttcccagctccatccttcttggccctccctggggatgcttgtgcacgctcaacctgggacaaggggagtgctgaaatccagcctgtgccgtgcttccaaaccaaaatgagtccacaggggcgcctcttccaaaagtggacagaggcgtggcctgggggagcaccacctctccccgcatcctaggtcatccaccggctgcccatgcccaacctgaaggacgagctgcatcactcaggatggaacacctgcagcagctgcttcggtgatagcaccaagtcgcgcaccaagctggtgctgcccagtctcatctcctctcgcatctatgtggtggacgtgggctctgagccccgggccccaaagctgcacaaggtcattgagcccaaggacatccatgccaagtgcgaactggcctttctccacaccagccactgcctggccagcggggaagtgatgatcagctccctgggagacgtcaagggcaatggcaaagggggttttgtgctgctggatggggagacgttcgaggtgaaggggacatgggagagacctgggggtgctgcaccgttgggctatgacttctggtaccagcctcgacacaatgtcatgatcagcactgagtgggcagctcccaatgtcttacgagatggcttcaaccccgctgatgtggaggctggactgtacgggagccacttatatgtatgggactggcagcgccatgagattgtgcagaccctgtctctaaaagatgggcttattcccttggagatccgcttcctgcacaacccagacgctgcccaaggctttgtgggctgcgcactcagctccaccatccagcgcttctacaagaacgagggaggtacatggtcagtggagaaggtgatccaggtgccccccaagaaagtgaagggctggctgctgcccgaaatgccaggcctgatcaccgacatcctgctctccctggacgaccgcttcctctacttcagcaactggctgcatggggacctgaggcagtatgacatctctgacccacagagaccccgcctcacaggacagctcttcctcggaggcagcattgttaagggaggccctgtgcaagtgctggaggacgaggaactaaagtcccagccagagcccctagtggtcaagggaaaacgggtggctggaggccctcagatgatccagctcagcctggatgggaagcgcctctacatcaccacgtcgctgtacagtgcctgggacaagcagttttaccctgatctcatcagggaaggctctgtgatgctgcaggttgatgtagacacagtaaaaggagggctgaagttgaaccccaacttcctggtggacttcgggaaggagccccttggcccagcccttgcccatgagctccgctaccctgggggcgattgtagctctgacatctggatttgaactccaccctcatcacccacactccctattttgggccctcacttccttggggacctggcttcattctgctctctcttggcacccgacccttggcagcatgtaccacacagccaagctgagactgtggcaatgtgttgagtcatatacatttactgaccactgttgcttgttgctcactgtgctgcttttccatgagctcttggaggcaccaagaaataaactcgtaaccctgtccttca

SEQ ID NO: 323385 - DNA, 2420 bp, Homo sapiens
tcccttcgctccttagcggggaacagcggcctctgacaccagcacagcaaacccgccgggatcaaagtgtaccagtcggcagcatggctacgaaatgtgggaattgtggacccggctactccacccctctggaggccatgaaaggtaattgcccatggtctgagagccagcgccctactactgattccacagctgggggtggagggacttcagacctagcccccaccctctggcacacccagcacttcccctacctttccttcccaccctgccgtccctgctgcctgctttctaccgtgcaggacccagggaagagatcgtctacctgccctgcatttaccgaaacacaggcactgaggccccagattatctggccactgtggatgttgaccccaagtctccccagtattgccaggttaggcggggcttgggcgccagctactttgagaccatagctgccctcatccctggccctgggcccccccttcccagctccatccttcttggccctccctggggatgcttgtgcacgctcaacctgggacaaggggagtgctgaaatccagcctgtgccgtgcttccaaaccaaaatgagtccacaggggcgcctcttccaaaagtggacagaggcgtggcctgggggagcaccacctctccccgcatcctaggtcatccaccggctgcccatgcccaacctgaaggacgagctgcatcactcaggatggaacacctgcagcagctgcttcggtgatagcaccaagtcgcgcaccaagctggtgctgcccagtctcatctcctctcgcatctatgtggtggacgtgggctctgagccccgggccccaaagctgcacaaggtcattgagcccaaggacatccatgccaagtgcgaactggcctttctccacaccagccactgcctggccagcggggaagtgatgatcagctccctgggagacgtcaagggcaatggcaaagggggttttgtgctgctggatggggagacgttcgaggtgaaggggacatgggagagacctgggggtgctgcaccgttgggctatgacttctggtaccagcctcgacacaatgtcatgatcagcactgagtgggcagctcccaatgtcttacgagatggcttcaaccccgctgatgtggaggctggtgagaatccccccatgtgccagcaggagccttgggcctacatccccttgctttctgctccaaatctcccacccccacacttccctcctgtggccccagaatctaagagagatggcataggatgtaccgcatgctcagattgctcaagcgtcttcctgatccctccaatccatttcttaaccttctgccctgattggtggcccagtctttgcccatgccttccaacctctgatgctgagcctatcctccggccccactcccaccccaggactgtacgggagccacttatatgtatgggactggcagcgccatgagattgtgcagaccctgtctctaaaagatgggcttattcccttggagatccgcttcctgcacaacccagacgctgcccaaggctttgtgggctgcgcactcagctccaccatccagcgcttctacaagaacgagggaggtacatggtcagtggagaaggtgatccaggtgccccccaagaaagtgaagggctggctgctgcccgaaatgccaggcctgatcaccgacatcctgctctccctggacgaccgcttcctctacttcagcaactggctgcatggggacctgaggcagtatgacatctctgacccacagagaccccgcctcacaggacagctcttcctcggaggcagcattgttaagggaggccctgtgcaagtgctggaggacgaggaactaaagtcccagccagagcccctagtggtcaagggaaaacgggtggctggaggccctcagatgatccagctcagcctggatgggaagcgcctctacatcaccacgtcgctgtacagtgcctgggacaagcagttttaccctgatctcatcagggaaggctctgtgatgctgcaggttgatgtagacacagtaaaaggagggctgaagttgaaccccaacttcctggtggacttcgggaaggagccccttggcccagcccttgcccatgagctccgctaccctgggggcgattgtagctctgacatctggatttgaactccaccctcatcacccacactccctattttgggccctcacttccttggggacctggcttcattctgctctctcttggcacccgacccttggcagcatgtaccacacagccaagctgagactgtggcaatgtgttgagtcatatacatttactgaccactgttgcttgttgctcactgtgctgcttttccatgagctcttggaggcaccaagaaataaactcgtaaccctgtccttca

SEQ ID NO: 323386 - DNA, 2848 bp, Homo sapiens
tcccttcgctccttagcggggaacagcggcctctgacaccagcacagcaaacccgccgggatcaaagtgtaccagtcggcagcatggctacgaaatgtgggaattgtggacccggctactccacccctctggaggccatgaaaggtaattgcccatggtctgagagccagcgccctactactgattccacagctgggggtggagggacttcagacctagcccccaccctctggcacacccagcacttcccctacctttccttcccaccctgccgtccctgctgcctgctttctaccgtgcaggacccagggaagagatcgtctacctgccctgcatttaccgaaacacaggcactgaggccccagattatctggccactgtggatgttgaccccaagtctccccagtattgccaggttaggcggggcttgggcgccagctactttgagaccatagctgccctcatccctggccctgggcccccccttcccagctccatccttcttggccctccctggggatgcttgtgcacgctcaacctgggacaaggggagtgctgaaatccagcctgtgccgtgcttccaaaccaaaatgagtccacaggggcgcctcttccaaaagtggacagaggcgtggcctgggggagcaccacctctccccgcatcctaggtcatccaccggctgcccatgcccaacctgaaggacgagctgcatcactcaggatggaacacctgcagcagctgcttcggtgatagcaccaagtcgcgcaccaagctggtgctgcccagtctcatctcctctcgcatctatgtggtggacgtgggctctgagccccgggccccaaagctgcacaaggtcattgagcccaaggacatccatgccaagtgcgaactggcctttctccacaccagccactgcctggccagcggggaagtgatgatcagctccctgggagacgtcaagggcaatggcaaagggggttttgtgctgctggatggggagacgttcgaggtgaaggggacatgggagagacctgggggtgctgcaccgttgggctatgacttctggtaccagcctcgacacaatgtcatgatcagcactgagtgggcagctcccaatgtcttacgagatggcttcaaccccgctgatgtggaggctggtgagaatccccccatgtgccagcaggagccttgggcctacatccccttgctttctgctccaaatctcccacccccacacttccctcctgtggccccagaatctaagagagatggcataggatgtaccgcatgctcagattgctcaagcgtcttcctgatccctccaatccatttcttaaccttctgccctgattggtggcccagtctttgcccatgccttccaacctctgatgctgagcctatcctccggccccactcccaccccaggactgtacgggagccacttatatgtatgggactggcagcgccatgagattgtgcagaccctgtctctaaaagatgggcttattcccttggagatccgcttcctgcacaacccagacgctgcccaaggctttgtgggctgcgcactcagctccaccatccagcgcttctacaagaacgaggtgacatacgccctctggccctcccctcccagtagtcttgtcagcagctctacctaagcaggcttctgtaacggtgctcccaggcgtctccaggaacgaaaaaaatgaggctgcatgccctgtctctcttctctcagtgctagggcaacttctgcctgaaccctaactggccgtatttattcattcattcaaaaactacttagtgaatgtctgtgctaggcactgtgctatgttctgggaatgcagtggtgaagcagacacaacccctgcctcaaggggcttgcatggagttagatcctgctggcaagaaggccgggcatctattctctccctcccaggtctgggcaacccagatctaacccctagtccccaattctgataggctgacctctctgccagctaacctcaccctccacccctcaatgtagggaggtacatggtcagtggagaaggtgatccaggtgccccccaagaaagtgaagggctggctgctgcccgaaatgccaggcctgatcaccgacatcctgctctccctggacgaccgcttcctctacttcagcaactggctgcatggggacctgaggcagtatgacatctctgacccacagagaccccgcctcacaggacagctcttcctcggaggcagcattgttaagggaggccctgtgcaagtgctggaggacgaggaactaaagtcccagccagagcccctagtggtcaagggaaaacgggtggctggaggccctcagatgatccagctcagcctggatgggaagcgcctctacatcaccacgtcgctgtacagtgcctgggacaagcagttttaccctgatctcatcagggaaggctctgtgatgctgcaggttgatgtagacacagtaaaaggagggctgaagttgaaccccaacttcctggtggacttcgggaaggagccccttggcccagcccttgcccatgagctccgctaccctgggggcgattgtagctctgacatctggatttgaactccaccctcatcacccacactccctattttgggccctcacttccttggggacctggcttcattctgctctctcttggcacccgacccttggcagcatgtaccacacagccaagctgagactgtggcaatgtgttgagtcatatacatttactgaccactgttgcttgttgctcactgtgctgcttttccatgagctcttggaggcaccaagaaataaactcgtaaccctgtccttca

SEQ ID NO: 323387 - DNA, 2297 bp, Homo sapiens
  misc_feature (2199)..(2199): n is a, c, g, or t
  misc_feature (2206)..(2206): n is a, c, g, or t
  misc_feature (2218)..(2218): n is a, c, g, or t
  misc_feature (2223)..(2223): n is a, c, g, or t
  misc_feature (2227)..(2227): n is a, c, g, or t
  misc_feature (2230)..(2230): n is a, c, g, or t
  misc_feature (2237)..(2237): n is a, c, g, or t
  misc_feature (2252)..(2252): n is a, c, g, or t
  misc_feature (2260)..(2260): n is a, c, g, or t
  misc_feature (2263)..(2263): n is a, c, g, or t
  misc_feature (2268)..(2268): n is a, c, g, or t
  misc_feature (2270)..(2271): n is a, c, g, or t
  misc_feature (2273)..(2273): n is a, c, g, or t
  misc_feature (2276)..(2276): n is a, c, g, or t
  misc_feature (2281)..(2282): n is a, c, g, or t
tcccttcgctccttagcggggaacagcggcctctgacaccagcacagcaaacccgccgggatcaaagtgtaccagtcggcagcatggctacgaaatgtgggaattgtggacccggctactccacccctctggaggccatgaaaggtaattgcccatggtctgagagccagcgccctactactgattccacagctgggggtggagggacttcagacctagcccccaccctctggcacacccagcacttcccctacctttccttcccaccctgccgtccctgctgcctgctttctaccgtgcaggacccagggaagagatcgtctacctgccctgcatttaccgaaacacaggcactgaggccccagattatctggccactgtggatgttgaccccaagtctccccagtattgccaggttaggcggggcttgggcgccagctactttgagaccatagctgccctcatccctggccctgggcccccccttcccagctccatccttcttggccctccctggggatgcttgtgcacgctcaacctgggacaaggggagtgctgaaatccagcctgtgccgtgcttccaaaccaaaatgagtccacaggggcgcctcttccaaaagtggacagaggcgtggcctgggggagcaccacctctccccgcatcctaggtcatccaccggctgcccatgcccaacctgaaggacgagctgcatcactcaggatggaacacctgcagcagctgcttcggtgatagcaccaagtcgcgcaccaagctggtgctgcccagtctcatctcctctcgcatctatgtggtggacgtgggctctgagccccgggccccaaagctgcacaaggtcattgagcccaaggacatccatgccaagtgcgaactggcctttctccacaccagccactgcctggccagcggggaagtgatgatcagctccctgggagacgtcaagggcaatggcaaagggggttttgtgctgctggatggggagacgttcgaggtgaaggggacatgggagagacctgggggtgctgcaccgttgggctatgacttctggtaccagcctcgacacaatgtcatgatcagcactgagtgggcagctcccaatgtcttacgagatggcttcaaccccgctgatgtggaggctggactgtacgggagccacttatatgtatgggactggcagcgccatgagattgtgcagaccctgtctctaaaagatgggcttattcccttggagatccgcttcctgcacaacccagacgctgcccaaggctttgtgggctgcgcactcagctccaccatccagcgcttctacaagaacgagggaggtacatggtcagtggagaaggtgatccaggtgccccccaagaaagtgaagggctggctgctgcccgaaatgccaggcctgatcaccgacatcctgctctccctggacgaccgcttcctctacttcagcaactggctgcatggggacctgaggcagtatgacatctctgacccacagagaccccgcctcacaggacagctcttcctcggaggcagcattgttaagggaggccctgtgcaagtgctggaggacgaggaactaaagtcccagccagagcccctagtggtcaagggaaaacgggtggctggaggccctcagatgatccagctcagcctggatgggaagcgcctctacatcaccacgtcgctgtacagtgcctgggacaagcagttttaccctgatctcatcagggaaggctctgtgatgctgcaggttgatgtagacacagtaaaaggagggctgaagttgaaccccaacttcctggtggacttcgggaaggagccccttggcccagcccttgcccatgagctccgctaccctgggggcgattgtagctctgacatctggatttgaactccaccctcatcacccacactccctattttgggccctcacttccttggggacctggcttcattctgctctctcttggcacccgacccttggcagcatgtaccacacagccaagctgagactgtggcaatgtgttgagtcatatacatttactgaccactgttgcttgttgctcactgtgctgcttttccatgagctcttggaggcaccaagaaataaactcgtaaccctgtccttcaaaaaaaaaaaaaaaaaaaaaaaaaaaaaaaaaaaaaaaaaaaaaagnaaaaatncccccggggggnccatncccnccngtttttnttggaaaaagggggncccccaanagngaggngnngntanaaaannaacagaaggacggcg

SEQ ID NO: 323388 - DNA, 2297 bp, Homo sapiens
  misc_feature (2161)..(2161): n is a, c, g, or t
  misc_feature (2163)..(2163): n is a, c, g, or t
  misc_feature (2169)..(2169): n is a, c, g, or t
  misc_feature (2199)..(2199): n is a, c, g, or t
  misc_feature (2206)..(2206): n is a, c, g, or t
  misc_feature (2218)..(2218): n is a, c, g, or t
  misc_feature (2223)..(2223): n is a, c, g, or t
  misc_feature (2227)..(2227): n is a, c, g, or t
  misc_feature (2230)..(2230): n is a, c, g, or t
  misc_feature (2237)..(2237): n is a, c, g, or t
  misc_feature (2252)..(2252): n is a, c, g, or t
  misc_feature (2260)..(2260): n is a, c, g, or t
  misc_feature (2263)..(2263): n is a, c, g, or t
  misc_feature (2268)..(2268): n is a, c, g, or t
  misc_feature (2270)..(2271): n is a, c, g, or t
  misc_feature (2273)..(2273): n is a, c, g, or t
  misc_feature (2276)..(2276): n is a, c, g, or t
  misc_feature (2281)..(2282): n is a, c, g, or t
tcccttcgctccttagcggggaacagcggcctctgacaccagcacagcaaacccgccgggatcaaagtgtaccagtcggcagcatggctacgaaatgtgggaattgtggacccggctactccacccctctggaggccatgaaaggtaattgcccatggtctgagagccagcgccctactactgattccacagctgggggtggagggacttcagacctagcccccaccctctggcacacccagcacttcccctacctttccttcccaccctgccgtccctgctgcctgctttctaccgtgcaggacccagggaagagatcgtctacctgccctgcatttaccgaaacacaggcactgaggccccagattatctggccactgtggatgttgaccccaagtctccccagtattgccaggttaggcggggcttgggcgccagctactttgagaccatagctgccctcatccctggccctgggcccccccttcccagctccatccttcttggccctccctggggatgcttgtgcacgctcaacctgggacaaggggagtgctgaaatccagcctgtgccgtgcttccaaaccaaaatgagtccacaggggcgcctcttccaaaagtggacagaggcgtggcctgggggagcaccacctctccccgcatcctaggtcatccaccggctgcccatgcccaacctgaaggacgagctgcatcactcaggatggaacacctgcagcagctgcttcggtgatagcaccaagtcgcgcaccaagctggtgctgcccagtctcatctcctctcgcatctatgtggtggacgtgggctctgagccccgggccccaaagctgcacaaggtcattgagcccaaggacatccatgccaagtgcgaactggcctttctccacaccagccactgcctggccagcggggaagtgatgatcagctccctgggagacgtcaagggcaatggcaaagggggttttgtgctgctggatggggagacgttcgaggtgaaggggacatgggagagacctgggggtgctgcaccgttgggctatgacttctggtaccagcctcgacacaatgtcatgatcagcactgagtgggcagctcccaatgtcttacgagatggcttcaaccccgctgatgtggaggctggactgtacgggagccacttatatgtatgggactggcagcgccatgagattgtgcagaccctgtctctaaaagatgggcttattcccttggagatccgcttcctgcacaacccagacgctgcccaaggctttgtgggctgcgcactcagctccaccatccagcgcttctacaagaacgagggaggtacatggtcagtggagaaggtgatccaggtgccccccaagaaagtgaagggctggctgctgcccgaaatgccaggcctgatcaccgacatcctgctctccctggacgaccgcttcctctacttcagcaactggctgcatggggacctgaggcagtatgacatctctgacccacagagaccccgcctcacaggacagctcttcctcggaggcagcattgttaagggaggccctgtgcaagtgctggaggacgaggaactaaagtcccagccagagcccctagtggtcaagggaaaacgggtggctggaggccctcagatgatccagctcagcctggatgggaagcgcctctacatcaccacgtcgctgtacagtgcctgggacaagcagttttaccctgatctcatcagggaaggctctgtgatgctgcaggttgatgtagacacagtaaaaggagggctgaagttgaaccccaacttcctggtggacttcgggaaggagccccttggcccagcccttgcccatgagctccgctaccctgggggcgattgtagctctgacatctggatttgaactccaccctcatcacccacactccctattttgggccctcacttccttggggacctggcttcattctgctctctcttggcacccgacccttggcagcatgtaccacacagccaagctgagactgtggcaatgtgttgagtcatatacatttactgaccactgttgcttgttgctcactgtgctgcttttccatgagctcttggaggcaccaagaaataaactcgtaaccctgtccttcaaaaaaaaananaaaaanaaaaaaaaaaaaaaaaaaggggggggggcnaaaaatncccccggggggnccatncccnccngtttttnttggaaaaagggggncccccaanagngaggngnngntanaaaannaacagaaggacggcg

SEQ ID NO: 323389 - DNA, 764 bp, Homo sapiens
ctgcacgaagtgcaacattaagatccacgagacacagccactgctcaacctcaaactggaccgggtcatgcaggacatcgtgtatagctggtgcctggcttgcaagacagtgaagagaaacggattcgggaattctaccagtcccgaggtttggaccgggtcacccagcccactggggaagagccagcactgagcaacctcggcctccacttcgtgggcagcgctgcccacgaagtggtcaagggaaaacgggtggctggaggccctcagatgatccagctcagcctggatgggaagcgcctctacatcaccacgtcgctgtacagtgcctgggacaagcagttttaccctgatctcatcagggaaggctctgtgatgctgcaggttgatgtagacacagtaaaaggagggctgaagttgaaccccaacttcctggtggacttcgggaaggagccccttggcccagcccttgcccatgagctccgctaccctgggggcgattgtagctctgacatctggatttgaactccaccctcatcacccacactccctattttgggccctcacttccttggggacctggcttcattctgctctctcttggcacccgacccttggcagcatgtaccacacagccaagctgagactgtggcaatgtgttgagtcatatacatttactgaccactgttgcttgttgctcactgtgctgcttttccatgagctcttggaggcaccaagaaataaactcgtaaccctgtccttca

SEQ ID NO: 323390 - DNA, 1834 bp, Homo sapiens
tcccttcgctccttagcggggaacagcggcctctgacaccagcacagcaaacccgccgggatcaaagtgtaccagtcggcagcatggctacgaaatgtgggaattgtggacccggctactccacccctctggaggccatgaaaggtaattgcccatggtctgagagccagcgccctactactgattccacagctgggggtggagggacttcagacctagcccccaccctctggcacacccagcacttcccctacctttccttcccaccctgccgtccctgctgcctgctttctaccgtgcaggacccagggaagagatcgtctacctgccctgcatttaccgaaacacaggcactgaggccccagattatctggccactgtggatgttgaccccaagtctccccagtattgccaggttaggcggggcttgggcgccagctactttgagaccatagctgccctcatccctggccctgggcccccccttcccagctccatccttcttggccctccctggggatgcttgtgcacgctcaacctgggacaaggggagtgctgaaatccagcctgtgccgtgcttccaaaccaaaatgagtccacaggggcgcctcttccaaaagtggacagaggcgtggcctgggggagcaccacctctccccgcatcctaggtcatccaccggctgcccatgcccaacctgaaggacgagctgcatcactcaggatggaacacctgcagcagctgcttcggtgatagcaccaagtcgcgcaccaagctggtgctgcccagtctcatctcctctcgcatctatgtggtggacgtgggctctgagccccgggccccaaagctgcacaaggtcattgagcccaaggacatccatgccaagtgcgaactggcctttctccacaccagccactgcctggccagcggggaagtgatgatcagctccctgggagacgtcaagggcaatggcaaagggggttttgtgctgctggatggggagacgttcgaggtgaaggggacatgggagagacctgggggtgctgcaccgttgggctatgacttctggtaccagcctcgacacaatgtcatgatcagcactgagtgggcagctcccaatgtcttacgagatggcttcaaccccgctgatgtggaggctggactgtacgggagccacttatatgtatgggactggcagcgccatgagattgtgcagaccctgtctctaaaagatgggcttattcccttggagatccgcttcctgcacaacccagacgctgcccaaggctttgtgggctgcgcactcagctccaccatccagcgcttctacaagaacgagggaggtacatggtcagtggagaaggtgatccaggtgccccccaagaaagtgaagggctggctgctgcccgaaatgccaggcctgatcaccgacatcctgctctccctggacgaccgcttcctctacttcagcaactggctgcatggggacctgaggcagtatgacatctctgacccacagagaccccgcctcacaggacagctcttcctcggaggcagcattgttaagggaggccctgtgcaagtgctggaggacgaggaactaaagtcccagccagagcccctagtggtcaagcgagcggggtccgctcggaccagggcacctatgaggattatgtcggaggacttcgggtgtttgacaaggaaggaaatggcaccgtcatgggtgctgaaatccggcatgttcttgtcacactgggtgagaagatgacagaggaagaagtagagatgctgtggcagggcatgaggacagcaatggttgtatcaactatatgagct

SEQ ID NO: 323391 - DNA, 1257 bp, Homo sapiens
tcccttcgctccttagcggggaacagcggcctctgacaccagcacagcaaacccgccgggatcaaagtgtaccagtcggcagcatggctacgaaatgtgggaattgtggacccggctactccacccctctggaggccatgaaaggtaattgcccatggtctgagagccagcgccctactactgattccacagctgggggtggagggacttcagacctagcccccaccctctggcacacccagcacttcccctacctttccttcccaccctgccgtccctgctgcctgctttctaccgtgcaggacccagggaagagatcgtctacctgccctgcatttaccgaaacacaggcactgaggccccagattatctggccactgtggatgttgaccccaagtctccccagtattgccaggttaggcggggcttgggcgccagctactttgagaccatagctgccctcatccctggccctgggcccccccttcccagctccatccttcttggccctccctggggatgcttgtgcacgctcaacctgggacaaggggagtgctgaaatccagcctgtgccgtgcttccaaaccaaaatgagtccacaggggcgcctcttccaaaagtggacagaggcgtggcctgggggagcaccacctctccccgcatcctaggtcatccaccggctgcccatgcccaacctgaaggacgagctgcatcactcaggatggaacacctgcagcagctgcttcggtgatagcaccaagtcgcgcaccaagctggtgctgcccagtctcatctcctctcgcatctatgtggtggacgtgggctctgagccccgggccccaaagctgcacaaggtcattgagcccaaggacatccatgccaagtgcgaactggccttttccaccatccagcgcttctacaagaacgagggaggtacatggtcagtggagaaggtgatccaggtgcccatgagctccgctaccctgggggcgattgtagctctgacatctggatttgaactccaccctcatcacccacactccctattttgggccctcacttccttggggacctggcttcattctgctctctcttggcacccgacccttggcagcatgtaccacacagccaagctgagactgtggcaatgtgttgagtcatatacatttactgaccactgttgcttgttgctcactgtgctgcttttccatgagctcttggaggcaccaagaaataaactcgtaaccctgtccttca

SEQ ID NO: 323392 - DNA, 6110 bp, Homo sapiens
cgttggccgggcccgggggaggaggggaatctcccgccatttttcaataatttcctccggtgctgctgaggaggagtcgtgactgccggccgccgggacccgaagcggaggtcggcggggggctgctgggaggcgcggcggtgtgcgcgggagctctgcgccgtggcgttccgctccatgactgtcgcgcggccgcgccggcggtgagggagccggagttcgcgccgccctctcacccctcccttcccccaccccacccccgggcgcctggcgctcgctccgggccgcggggcctagtgctgcgccgcggggccggccccagcagccgccagtccccaccgccgccgccgcgatggcgccgctcctgggccgcaagcccttcccgctggtgaagccgttgcccggagaggagccgctcttcaccatcccgcacactcaggaggccttccgcacccgggaagagtatgaagcccgcttggaaaggtacagtgagcgcatttggacgtgcaagagtactggaagcagtcagctaacacacaaggaagcctgggaggaagaacaggaagttgctgagcttttgaaggaggagtttcctgcctggtatgagaagcttgttctggaaatggttcaccataacacagcctccttagagaagttagtagatactgcttggttggagatcatgaccaaatatgctgtgggagaagagtgtgacttcgaggttgggaaggagaaaatgctcaaggtgaagattgtgaagattcatcctttggagaaagtggatgaagaggccactgagaagaaatctgatggtgcctgtgattctccatcaagtgacaaagagaactccagtcagattgctcaggaccatcagaagaaggagacagttgtgaaagaggatgaaggaaggagagagagtattaatgacagagcacgtagatcgccacgaaaacttcctacttcattaaaaaaaggagaaaggaaatgggctcctccaaaatttctgcctcacaaatatgatgtgaaactacaaaatgaagataagatcatcagtaacgtgccagcagacagcttgattcgtacagagcgcccaccaaataaggagatagttcgatactttatacggcataatgcattacgagctggtactggtgaaaatgcaccttgggtcgtagaagatgaattggtgaagaaatactctctgcccagcaagttcagtgactttttacttgatccatacaagtatatgactctcaacccttctactaagaggaagaatactggatccccagacaggaagccctcaaagaaatccaagacagacaactcttctcttagttcaccactaaatcctaagttatggtgtcacgtacacttgaagaagtcattgagtggctcgccactcaaagtgaagaactcaaagaattccaaatctcctgaagaacatctagaagaaatgatgaagatgatgtcgcccaataagctgcacactaactttcacattcctaaaaaaggcccacctgccaagaaaccagggaagcacagtgacaagcctttgaaggcaaagggcagaagcaaaggcatcctgaatggacagaaatccacagggaattccaaatctcccaaaaaaggactgaagactcctaaaaccaaaatgaagcagatgactttgttggatatggccaaaggcacgcagaagatgacacgagccccacggaattctgggggtacacctaggacctctagtaaacctcataaacatctgcctcctgcagccctacacctcattgcatactacaaagaaaacaaagacagggaggacaagaggagcgccctgtcctgtgttatctccaaaacagctcgtcttctctctagtgaagatagagctcgtctcccagaagaattgcgaagtcttgttcaaaaacgctatgaacttctagagcacaaaaagaggtgggcttctatgtctgaagaacaacggaaagaatatttgaaaaagaaacgggaggagctgaaaaagaagttgaaggaaaaagccaaagaacgaagagagaaagaaatgcttgagagattagaaaaacagaagcggtatgaggaccaagagttaactggcaaaaaccttccagcattcagattggtggatacccctgaagggctgcccaacacgctgtttggggatgtggccatggtggtggaattcttgagctgttattctgggctacttttaccagatgctcagtatcctattactgctgtgtcccttatggaagccttgagtgcagataagggtggctttttataccttaacagggtgttggtcatcctcttacagaccctcctacaagatgagatagcagaagactatggtgaattgggaatgaagctgtcggaaatccccttgactctgcattctgtttcagagctggtgcggctctgcttgcgcagatctgatgttcaggaggaaagcgagggctcagacacagatgacaataaagattcagctgcatttgaggataatgaggtacaagatgagttcctagaaaagctggagacctctgaattttttgagctgacgtcagaggagaagctacagatcttgacagcactgtgccaccggatcctcatgacatactcagtgcaagaccacatggagaccagacagcagatgtctgcagagttgtggaaggaacggcttgctgtgttgaaggaagaaaatgataagaagagagcagagaaacagaaacggaaagaaatggaagccaaaaataaagaaaatggaaaagttgagaatgggttaggcaaaactgataggaaaaaagaaattgtgaagtttgagccccaagtagatacagaagctgaagacatgattagtgctgtgaagagcagaaggttgcttgccattcaagctaagaaggaacgggaaatccaggaaagagaaatgaaagtgaaactggaacgccaagctgaagaagaacgaatacggaagcacaaagcagctgctgagaaagctttccaggaagggattgccaaggccaaactagtcatgcgcaggactcctattggcacagatcgaaaccataatagatactggctcttctcagatgaagttccaggattattcattgaaaaaggctgggtacatgacagcattgactaccgattcaaccatcactgcaaagaccacacagtctctggtgatgaggattactgtcctcgcagtaagaaagcaaacttaggtaaaaatgcaagcatgaacacacaacatggaacagcaacagaagttgctgtagagacaaccacacccaaacaaggacagaacctatggtttttatgtgatagtcaaaaggagctggatgagttgctaaactgtcttcaccctcagggaataagagaaagtcaacttaaagagagactagagaagaggtaccaggacattattcactctattcatctagcacggaagccaaatttgggtctaaaatcttgtgatggcaaccaggagcttttaaacttccttcgtagtgatctcattgaagttgcaacaaggttacaaaaaggaggacttggatatgtggaagaaacatcagaatttgaagcccgggtcatttcattagagaaattgaaggattttggtgagtgtgtgattgcccttcaggccagtgtcataaagaaatttctccaaggcttcatggctcccaagcaaaagagaagaaaactccaaagtgaagattcagcaaaaactgaggaagtggatgaagagaagaaaatggtagaggaagcaaaggttgcatctgcactggagaaatggaagacagcaatccgggaagctcagactttctccaggatgcacgtgctgcttgggatgcttgatgcctgtatcaagtgggatatgtccgcagaaaatgctaggtgcaaagtttgtcgaaagaaaggtgaggatgacaaattgatcttgtgtgatgagtgtaataaagccttccacctgttttgtctgaggccggccctctatgaagtaccagatggtgagtggcagtgcccagcttgccagcccgctactgccaggcgcaactcccgtggcaggaactatactgaagagtctgcttctgaggacagtgaagatgatgagagtgatgaagaggaggaggaggaagaagaggaggaggaggaagaagattatgaggtggctggtttgcgattgagacctcgaaagaccatccggggcaagcacagcgtcatcccccctgcagcaaggtcaggccggcgcccgggtaagaagccacactctaccaggaggtctcagcccaaggcaccacctgtggatgatgctgaggtggatgagctggtgcttcagaccaagcggagctcccggaggcaaagcctggagctgcagaagtgtgaagagatcctccacaagatcgtgaagtaccgcttcagctggcccttcagggagcctgtgaccagagatgaggccgaggactactatgatgtgatcacgcaccccatggactttcagacagtgcagaacaaatgttcctgtgggagctaccgctctgtgcaggagtttcttactgacatgaagcaagtgtttaccaatgctgaggtttacaactgccgtggcagccatgtgctaagctgcatggtgaagacagaacagtgtctagtggctctgttgcataaacaccttcctggccacccatatgtccgcaggaagcgcaagaagtttcctgataggcttgctgaagatgaaggggacagtgagccagaggccgttggacagtccaggggacgaagacagaagaagtagagaggcagggccgtggtgacagtatcagtgagtgccatacagaattgtgtattcaccagcatcatgaaacagttgtggtcttttgagttgatcttggcagagtaaagggacgtgtcctggagccattcctgaatctccccttctttgtgacagctcctcccacccccccaaaaaataaaaaaaccacaaaaaacaaaaaaacaaaactaaggcacttcacttagagactggagtcctgcttataatcatgcatataacctttactttgatggatctggccagaggggtgttggagcccagcccacccacataccagtcaagctcttaggggagcagaagaaaagcaggaagaatttaaatgtttaattttttttttaaattgacttttctagttattaaaagttgcttgtttcagcagtgatattgtataaagaacatcttgtaagatactcctgacatcttgctttagcacatgtacagtacagtttctatgataatgtgtttgctctaacttccctggcttctccttcagcccatccactctcctctagagcagttgggttggaggctcattgaggcaagcagcaacattggagggggagcagggcagtgctgtgtctgctgcctcccatgcccgttctgacctcagccttggaactcctcaagaacctgaagattccagtggtcagtgtcggtggggggtgggaggagagagcggcagagaagctctgagagccccttcccccacaacaaatctagctctagttgttatatttaggcaaaactttgtagtcttctttcccttttatgatggattttgataaaagtacaaaacagggtttttcttttttatcacctttgaatttggaaattttgagcacccaagctcttctgtacctatttaaagtccaccaaggggactgcagctcctagaacatgagaatcaagcctcttaattttaaactgcggaatgtggcctctgcttcctccgtcctcctgcccaaggacgacgaggattgctccagggctgctgggtagtttaccgtcccttctataggcatggagttggcactgacatcacagcttcataaccccaccaccgccagcttcccctgcctcctacatccagtctgttcttgttcatagtgagaatcctgtgttcccacttcagtgacacctgaattgtttgttgttgttttttttttttattgtcttcaaagaggaagggccccattaaagggtgaacttgtaataaattggaatttcaaataaacctcatgtacttgtgtttataaagaagaaacca

SEQ ID NO: 323393 - DNA, 5570 bp, Homo sapiens
cgttggccgggcccgggggaggaggggaatctcccgccatttttcaataatttcctccggtgctgctgaggaggagtcgtgactgccggccgccgggacccgaagcggaggtcggcggggggctgctgggaggcgcggcggtgtgcgcgggagctctgcgccgtggcgttccgctccatgactgtcgcgcggccgcgccggcggtgagggagccggagttcgcgccgccctctcacccctcccttcccccaccccacccccgggcgcctggcgctcgctccgggccgcggggcctagtgctgcgccgcggggccggccccagcagccgccagtccccaccgccgccgccgcgatggcgccgctcctgggccgcaagcccttcccgctggtgaagccgttgcccggagaggagccgctcttcaccatcccgcacactcaggaggccttccgcacccgggaagagtatgaagcccgcttggaaaggtacagtgagcgcatttggacgtgcaagagtactggaagcagtcagctaacacacaaggaagcctgggaggaagaacaggaagttgctgagcttttgaaggaggagtttcctgcctggtatgagaagcttgttctggaaatggttcaccataacacagcctccttagagaagttagtagatactgcttggttggagatcatgaccaaatatgctgtgggagaagagtgtgacttcgaggttgggaaggagaaaatgctcaaggtgaagattgtgaagattcatcctttggagaaagtggatgaagaggccactgagaagaaatctgatggtgcctgtgattctccatcaagtgacaaagagaactccagtcagattgctcaggaccatcagaagaaggagacagttgtgaaagaggatgaaggaaggagagagagtattaatgacagagcacgtagatcgccacgaaaacttcctacttcattaaaaaaaggagaaaggaaatgggctcctccaaaatttctgcctcacaaatatgatgtgaaactacaaaatgaagataagatcatcagtaacgtgccagcagacagcttgattcgtacagagcgcccaccaaataaggagatagttcgatactttatacggcataatgcattacgagctggtactggtgaaaatgcaccttgggtcgtagaagatgaattggtgaagaaatactctctgcccagcaagttcagtgactttttacttgatccatacaagtatatgactctcaacccttctactaagaggaagaatactggatccccagacaggaagccctcaaagaaatccaagacagacaactcttctcttagttcaccactaaatcctaagttatggtgtcacgtacacttgaagaagtcattgagtggctcgccactcaaagtgaagaactcaaagaattccaaatctcctgaagaacatctagaagaaatgatgaagatgatgtcgcccaataagctgcacactaactttcacattcctaaaaaaggcccacctgccaagaaaccagggaagcacagtgacaagcctttgaaggcaaagggcagaagcaaaggcatcctgaatggacagaaatccacagggaattccaaatctcccaaaaaaggactgaagactcctaaaaccaaaatgaagcagatgactttgttggatatggccaaaggcacgcagaagatgacacgagccccacggaattctgggggtacacctaggacctctagtaaacctcataaacatctgcctcctgcagccctacacctcattgcatactacaaagaaaacaaagacagggaggacaagaggagcgccctgtcctgtgttatctccaaaacagctcgtcttctctctagtgaagatagagctcgtctcccagaagaattgcgaagtcttgttcaaaaacgctatgaacttctagagcacaaaaagaggtgggcttctatgtctgaagaacaacggaaagaatatttgaaaaagaaacgggaggagctgaaaaagaagttgaaggaaaaagccaaagaacgaagagagaaagaaatgcttgagagattagaaaaacagaagcggtatgaggaccaagagttaactggcaaaaaccttccagcattcagattggtggatacccctgaagggctgcccaacacgctgtttggggatgtggccatggtggtggaattcttgagctgttattctgggctacttttaccagatgctcagtatcctattactgctgtgtcccttatggaagccttgagtgcagataagggtggctttttataccttaacagggtgttggtcatcctcttacagaccctcctacaagatgagatagcagaagactatggtgaattgggaatgaagctgtcggaaatccccttgactctgcattctgtttcagagctggtgcggctctgcttgcgcagatctgatgttcaggaggaaagcgagggctcagacacagatgacaataaagattcagctgcatttgaggataatgaggtacaagatgagttcctagaaaagctggagacctctgaattttttgagctgacgtcagaggagaagctacagatcttgacagcactgtgccaccggatcctcatgacatactcagtgcaagaccacatggagaccagacagcagatgtctgcagagttgtggaaggaacggcttgctgtgttgaaggaagaaaatgataagaagagagcagagaaacagaaacggaaagaaatggaagccaaaaataaagaaaatggaaaagttgagaatgggttaggcaaaactgataggaaaaaagaaattgtgaagtttgagccccaagtagatacagaagctgaagacatgattagtgctgtgaagagcagaaggttgcttgccattcaagctaagaaggaacgggaaatccaggaaagagaaatgaaagtgaaactggaacgccaagctgaagaagaacgaatacggaagcacaaagcagctgctgagaaagctttccaggaagggattgccaaggccaaactagtcatgcgcaggactcctattggcacagatcgaaaccataatagatactggctcttctcagatgaagttccaggattattcattgaaaaaggctgggtacatgacagcattgactaccgattcaaccatcactgcaaagaccacacagtctctggtgatgaggattactgtcctcgcagtaagaaagcaaacttaggtaaaaatgcaagcatgaacacacaacatggaacagcaacagaagttgctgtagagacaaccacacccaaacaaggacagaacctatggtttttatgtgatagtcaaaaggagctggatgagttgctaaactgtcttcaccctcagggaataagagaaagtcaacttaaagagagactagagaagaggtaccaggacattattcactctattcatctagcacggaagccaaatttgggtctaaaatcttgtgatggcaaccaggagcttttaaacttccttcgtagtgatctcattgaagttgcaacaaggttacaaaaaggaggacttggatatgtggaagaaacatcagaatttgaagcccgggtcatttcattagagaaattgaaggattttggtgagtgtgtgattgcccttcaggccagtgtcataaagaaatttctccaaggcttcatggctcccaagcaaaagagaagaaaactccaaagtgaagattcagcaaaaactgaggaagtggatgaagagaagaaaatggtagaggaagcaaaggttgcatctgcactggagaaatggaagacagcaatccgggaagctcagactttctccaggatgcacgtgctgcttgggatgcttgatgcctgtatcaagtgggatatgtccgcagaaaatgctaggtgcaaagtttgtcgaaagaaaggtgaggatgacaaattgatcttgtgtgatgagtgtaataaagccttccacctgttttgtctgaggccggccctctatgaagtaccagatggtgagtggcagtgcccagcttgccagcccgctactgccaggcgcaactcccgtggcaggaactatactgaagagtctgcttctgaggacagtgaagatgatgagagtgatgaagaggaggaggaggaagaagaggaggaggaggaagaagattatgaggtggctggtttgcgattgagacctcgaaagaccatccggggcaagcacagcgtcatcccccctgcagcaaggtcaggccggcgcccgggtaagaagccacactctaccaggaggtctcagcccaaggcaccacctgtggatgatgctgaggtggatgagctggtgcttcagaccaagcggagctcccggaggcaaagcctggagctgcagaagtgtgaagagatcctccacaagatcgtgaagtaccgcttcagctggcccttcagggagcctgtgaccagagatgaggccgaggactactatgatgtgatcacgcaccccatggactttcagacagtgcagaacaaatgttcctgtgggagctaccgctctgtgcaggagtttcttactgacatgaagcaagtgtttaccaatgctgaggtttacaactgccgtggcagccatgtgctaagctgcatggtgaagacagaacagtgtctagtggctctgttgcataaacaccttcctggccacccatatgtccgcaggaagcgcaagaagtttcctgataggcttgctgaagatgaaggggacagtgagccagaggccgttggacagtccaggggacgaagacagaagaagtagagaggcagggccgtgaggaatggctccaggacacgtccctttactctgccaagatcaactcaaaagaccacaactgtttcatgatgctggtgaatacacaattctgtatggcactcactgatactgtcacctgagaggaagacgggggaagagacagagtatgggcttaaagaaacaagactgtataataaatacagattaaaaaagaaaaatcgccaccatctcccctgttggcctgattaccccgatcctgctatgtaacacagcaatccctcccctggagaccagaggggcttggcactgtggtggaagccagaacgagcaggcccttaggaaagaaggcaggaacaggaactggcttcaccagaaaagctagaccctcggactcctcctggaaactctcagaagggagggttatggccctctttgtcccttcatatttctggacaaagaccaccaacccaatatcaagccccataaagagcttttagaaaaacagcataagcttgggatgacaggcgtttctggactccctgtgatctcttccaggttcttggtcttcctcgctcgcctccctcccaccctccctagctgtccccccacctcagctcccttaccacggccctgcctctctacttcttctgtcttcgtcccctggactgtccaacggcctctggctcactgtcccttcatcttcagcaacctatcaggaaacttcttgcgcttcctgcggacatatgggtggccaggaagtgtttatgcaaca

SEQ ID NO: 323394 - DNA, 673 bp, Homo sapiens
cgttggccgggcccgggggaggaggggaatctcccgccatttttcaataatttcctccggtgctgctgaggaggagtcgtgactgccggccgccgggacccgaagcggaggtcggcggggggctgctgggaggcgcggcggtgtgcgcgggagctctgcgccgtggcgttccgctccatgactgtcgcgcggccgcgccggcggtgagggagccggagttcgcgccgccctctcacccctcccttcccccaccccacccccgggcgcctggcgctcgctccgggccgcggggcctagtgctgcgccgcggggccggccccagcagccgccagtccccaccgccgccgccgcgatggcgccgctcctgggccgcaagcccttcccgctggtgaagccgttgcccggagaggagccgctcttcaccatcccgcacactcaggaggccttccgcacccgggagtatccttttccagccgcgcgggccgggctgggccgggctgggccggggtagggcctggggctcgcgagaccaggtcagccgcgcatccccggcccggggcagctgtcagcgcgccccggccgctcgcgggcctggaggctgagtctcagcctgcgcccgccgatccttccaggggatccggcggggggcgcgcaccggccctggaaggagaag

SEQ ID NO: 323395 - DNA, 6679 bp, Homo sapiens
cgttggccgggcccgggggaggaggggaatctcccgccatttttcaataatttcctccggtgctgctgaggaggagtcgtgactgccggccgccgggacccgaagcggaggtcggcggggggctgctgggaggcgcggcggtgtgcgcgggagctctgcgccgtggcgttccgctccatgactgtcgcgcggccgcgccggcggtgagggagccggagttcgcgccgccctctcacccctcccttcccccaccccacccccgggcgcctggcgctcgctccgggccgcggggcctagtgctgcgccgcggggccggccccagcagccgccagtccccaccgccgccgccgcgatggcgccgctcctgggccgcaagcccttcccgctggtgaagccgttgcccggagaggagccgctcttcaccatcccgcacactcaggaggccttccgcacccgggaagagtatgaagcccgcttggaaaggtacagtgagcgcatttggacgtgcaagagtactggaagcagtcagctaacacacaaggaagcctgggaggaagaacaggaagttgctgagcttttgaaggaggagtttcctgcctggtatgagaagcttgttctggaaatggttcaccataacacagcctccttagagaagttagtagatactgcttggttggagatcatgaccaaatatgctgtgggagaagagtgtgacttcgaggttgggaaggagaaaatgctcaaggtgaagattgtgaagattcatcctttggagaaagtggatgaagaggccactgagaagaaatctgatggtgcctgtgattctccatcaagtgacaaagagaactccagtcagattgctcaggaccatcagaagaaggagacagttgtgaaagaggatgaaggaaggagagagagtattaatgacagagcacgtagatcgccacgaaaacttcctacttcattaaaaaaaggagaaaggaaatgggctcctccaaaatttctgcctcacaaatatgatgtgaaactacaaaatgaagataagatcatcagtaacgtgccagcagacagcttgattcgtacagagcgcccaccaaataaggagatagttcgatactttatacggcataatgcattacgagctggtactggtgaaaatgcaccttgggtcgtagaagatgaattggtgaagaaatactctctgcccagcaagttcagtgactttttacttgatccatacaagtatatgactctcaacccttctactaagaggaagaatactggatccccagacaggaagccctcaaagaaatccaagacagacaactcttctcttagttcaccactaaatcctaagttatggtgtcacgtacacttgaagaagtcattgagtggctcgccactcaaagtgaagaactcaaagaattccaaatctcctgaagaacatctagaagaaatgatgaagatgatgtcgcccaataagctgcacactaactttcacattcctaaaaaaggcccacctgccaagaaaccagggaagcacagtgacaagcctttgaaggcaaagggcagaagcaaaggcatcctgaatggacagaaatccacagggaattccaaatctcccaaaaaaggactgaagactcctaaaaccaaaatgaagcagatgactttgttggatatggccaaaggcacgcagaagatgacacgagccccacggaattctgggggtacacctaggacctctagtaaacctcataaacatctgcctcctgcagccctacacctcattgcatactacaaagaaaacaaagacagggaggacaagaggagcgccctgtcctgtgttatctccaaaacagctcgtcttctctctagtgaagatagagctcgtctcccagaagaattgcgaagtcttgttcaaaaacgctatgaacttctagagcacaaaaagaggtgggcttctatgtctgaagaacaacggaaagaatatttgaaaaagaaacgggaggagctgaaaaagaagttgaaggaaaaagccaaagaacgaagagagaaagaaatgcttgagagattagaaaaacagaagcggtatgaggaccaagagttaactggcaaaaaccttccagcattcagattggtggatacccctgaagggctgcccaacacgctgtttggggatgtggccatggtggtggaattcttgagctgttattctgggctacttttaccagatgctcagtatcctattactgctgtgtcccttatggaagccttgagtgcagataagggtggctttttataccttaacagggtgttggtcatcctcttacagaccctcctacaagatgagatagcagaagactatggtgaattgggaatgaagctgtcggaaatccccttgactctgcattctgtttcagagctggtgcggctctgcttgcgcagatctgatgttcaggaggaaagcgagggctcagacacagatgacaataaagattcagctgcatttgaggataatgaggtacaagatgagttcctagaaaagctggagacctctgaattttttgagctgacgtcagaggagaagctacagatcttgacagcactgtgccaccggatcctcatgacatactcagtgcaagaccacatggagaccagacagcagatgtctgcagagttgtggaaggaacggcttgctgtgttgaaggaagaaaatgataagaagagagcagagaaacagaaacggaaagaaatggaagccaaaaataaagaaaatggaaaagttgagaatgggttaggcaaaactgataggaaaaaagaaattgtgaagtttgagccccaagtagatacagaagctgaagacatgattagtgctgtgaagagcagaaggttgcttgccattcaagctaagaaggaacgggaaatccaggaaagagaaatgaaagtgaaactggaacgccaagctgaagaagaacgaatacggaagcacaaagcagctgctgagaaagctttccaggaagggattgccaaggccaaactagtcatgcgcaggactcctattggcacagatcgaaaccataatagatactggctcttctcagatgaagttccaggattattcattgaaaaaggctgggtacatgacagcattgactaccgattcaaccatcactgcaaagaccacacagtctctggtgatgaggattactgtcctcgcagtaagaaagcaaacttaggtaaaaatgcaagcatgaacacacaacatggaacagcaacagaagttgctgtagagacaaccacacccaaacaaggacagaacctatggtttttatgtgatagtcaaaaggagctggatgagttgctaaactgtcttcaccctcagggaataagagaaagtcaacttaaagagagactagagaagaggtaccaggacattattcactctattcatctagcacggaagccaaatttgggtctaaaatcttgtgatggcaaccaggagcttttaaacttccttcgtagtgatctcattgaagttgcaacaaggttacaaaaaggaggacttggatatgtggaagaaacatcagaatttgaagcccgggtagatgtgaagcttaaaaagagatcagtgaagcaggaggatcgcttcaggccaggagtttgagaccagcctgcgcaacatagtcatttcattagagaaattgaaggattttggtgagtgtgtgattgcccttcaggccagtgtcataaagaaatttctccaaggcttcatggctcccaagcaaaagagaagaaaactccaaagtgaagattcagcaaaaactgaggaagtggatgaagagaagaaaatggtagaggaagcaaaggttgcatctgcactggagaaatggaagacagcaatccgggaagctcagactttctccaggatgcacgtgctgcttgggatgcttgatgcctgtatcaagtgggatatgtccgcagaaaatgctaggtgcaaagtttgtcgaaagaaaggtgaggatgacaaattgatcttgtgtgatgagtgtaataaagccttccacctgttttgtctgaggccggccctctatgaagtaccagatggtgagtggcagtgcccagcttgccagcccgctactgccaggcgcaactcccgtggcaggaactatactgaagagtctgcttctgaggacagtgaagatgatgagagtgatgaagaggaggaggaggaagaagaggaggaggaggaagaagattatgaggtggctggtttgcgattgagacctcgaaagaccatccggggcaagcacagcgtcatcccccctgcagcaaggtcaggccggcgcccgggtaagaagccacactctaccaggaggtctcagcccaaggcaccacctgtggatgatgctgaggtggatgagctggtgcttcagaccaagcggagctcccggaggcaaagcctggagctgcagaagtgtgaagagatcctccacaagatcgtgaagtaccgcttcagctggcccttcagggagcctgtgaccagagatgaggccgaggactactatgatgtgatcacgcaccccatggactttcagacagtgcagaacaaatgttcctgtgggagctaccgctctgtgcaggagtttcttactgacatgaagcaagtgtttaccaatgctgaggtttacaactgccgtggcagccatgtgctaagctgcatggtgaagacagaacagtgtctagtggctctgttgcataaacaccttcctggccacccatatgtccgcaggaagcgcaagaagtttcctgataggcttgctgaagatgaaggggacagtgagccagaggccgttggacagtccaggggacgaagacagaagaagtagagaggcagggccgtggtaagggagctgaggtggggggacagctagggagggtgggagggaggcgagcgaggaagaccaagaacctggaagagatcacagggagtccagaaacgcctgtcatcccaagcttatgctgtttttctaaaagctctttatggggcttgatattgggttggtggtctttgtccagaaatatgaagggacaaagagggccataaccctcccttctgagagtttccaggaggagtccgagggtctagcttttctggtgaagccagttcctgttcctgccttctttcctaagggcctgctcgctctggcttccaccacagtgccaagcccctctggtctccaggggagggattgctgtgttacatagcaggatcggggtaatcaggccaacaggggagatggtggcgatttttcttttttaatctgtatttattatacagtcttgtttctttaagcccatactctgtctcttcccccgtcttcctctcaggtgacagtatcagtgagtgccatacagaattgtgtattcaccagcatcatgaaacagttgtggtcttttgagttgatcttggcagagtaaagggacgtgtcctggagccattcctgaatctccccttctttgtgacagctcctcccacccccccaaaaaataaaaaaaccacaaaaaacaaaaaaacaaaactaaggcacttcacttagagactggagtcctgcttataatcatgcatataacctttactttgatggatctggccagaggggtgttggagcccagcccacccacataccagtcaagctcttaggggagcagaagaaaagcaggaagaatttaaatgtttaattttttttttaaattgacttttctagttattaaaagttgcttgtttcagcagtgatattgtataaagaacatcttgtaagatactcctgacatcttgctttagcacatgtacagtacagtttctatgataatgtgtttgctctaacttccctggcttctccttcagcccatccactctcctctagagcagttgggttggaggctcattgaggcaagcagcaacattggagggggagcagggcagtgctgtgtctgctgcctcccatgcccgttctgacctcagccttggaactcctcaagaacctgaagattccagtggtcagtgtcggtggggggtgggaggagagagcggcagagaagctctgagagccccttcccccacaacaaatctagctctagttgttatatttaggcaaaactttgtagtcttctttcccttttatgatggattttgataaaagtacaaaacagggtttttcttttttatcacctttgaatttggaaattttgagcacccaagctcttctgtacctatttaaagtccaccaaggggactgcagctcctagaacatgagaatcaagcctcttaattttaaactgcggaatgtggcctctgcttcctccgtcctcctgcccaaggacgacgaggattgctccagggctgctgggtagtttaccgtcccttctataggcatggagttggcactgacatcacagcttcataaccccaccaccgccagcttcccctgcctcctacatccagtctgttcttgttcatagtgagaatcctgtgttcccacttcagtgacacctgaattgtttgttgttgttttttttttttattgtcttcaaagaggaagggccccattaaagggtgaacttgtaataaattggaatttcaaataaacctcatgtacttgtgtttataaagaagaaacca

SEQ ID NO: 323396 - DNA, 3975 bp, Homo sapiens
cgctgccgtaagggacacagcagtaataggatactgagcatctggtaaaagtagcccagaataacagctcaagaattccaccaccatggccacatccccaaacagggtgttggtcatcctcttacagaccctcctacaagatgagatagcagaagactatggtgaattgggaatgaagctgtcggaaatccccttgactctgcattctgtttcagagctggtgcggctctgcttgcgcagatctgatgttcaggaggaaagcgagggctcagacacagatgacaataaagattcagctgcatttgaggataatgaggtacaagatgagttcctagaaaagctggaagaagaacgaatacggaagcacaaagcagctgctgagaaagctttccaggaagggattgccaaggccaaactagtcatgcgcaggactcctattggcacagatcgaaaccataatagatactggctcttctcagatgaagttccaggattattcattgaaaaaggctgggtacatgacagcattgactaccgattcaaccatcactgcaaagaccacacagtctctggtgatgaggattactgtcctcgcagtaagaaagcaaacttaggtaaaaatgcaagcatgaacacacaacatggaacagcaacagaagttgctgtagagacaaccacacccaaacaaggacagaacctatggtttttatgtgatagtcaaaaggagctggatgagttgctaaactgtcttcaccctcagggaataagagaaagtcaacttaaagagagactagagaagaggtaccaggacattattcactctattcatctagcacggaagccaaatttgggtctaaaatcttgtgatggcaaccaggagcttttaaacttccttcgtagtgatctcattgaagttgcaacaaggttacaaaaaggaggacttggatatgtggaagaaacatcagaatttgaagcccgggtcatttcattagagaaattgaaggattttggtgagtgtgtgattgcccttcaggccagtgtcataaagaaatttctccaaggcttcatggctcccaagcaaaagagaagaaaactccaaagtgaagattcagcaaaaactgaggaagtggatgaagagaagaaaatggtagaggaagcaaaggttgcatctgcactggagaaatggaagacagcaatccgggaagctcagactttctccaggatgcacgtgctgcttgggatgcttgatgcctgtatcaagtgggatatgtccgcagaaaatgctaggtgcaaagtttgtcgaaagaaaggtgaggatgacaaattgatcttgtgtgatgagtgtaataaagccttccacctgttttgtctgaggccggccctctatgaagtaccagatggtgagtggcagtgcccagcttgccagcccgctactgccaggcgcaactcccgtggcaggaactatactgaagagtctgcttctgaggacagtgaagatgatgagagtgatgaagaggaggaggaggaagaagaggaggaggaggaagaagattatgaggtggctggtttgcgattgagacctcgaaagaccatccggggcaagcacagcgtcatcccccctgcagcaaggtcaggccggcgcccgggtaagaagccacactctaccaggaggtctcagcccaaggcaccacctgtggatgatgctgaggtggatgagctggtgcttcagaccaagcggagctcccggaggcaaagcctggagctgcagaagtgtgaagagatcctccacaagatcgtgaagtaccgcttcagctggcccttcagggagcctgtgaccagagatgaggccgaggactactatgatgtgatcacgcaccccatggactttcagacagtgcagaacaaatgttcctgtgggagctaccgctctgtgcaggagtttcttactgacatgaagcaagtgtttaccaatgctgaggtttacaactgccgtggcagccatgtgctaagctgcatggtgaagacagaacagtgtctagtggctctgttgcataaacaccttcctggccacccatatgtccgcaggaagcgcaagaagtttcctgataggcttgctgaagatgaaggggacagtgagccagaggccgttggacagtccaggggacgaagacagaagaagtagagaggcagggccgtggtaagggagctgaggtggggggacagctagggagggtgggagggaggcgagcgaggaagaccaagaacctggaagagatcacagggagtccagaaacgcctgtcatcccaagcttatgctgtttttctaaaagctctttatggggcttgatattgggttggtggtctttgtccagaaatatgaagggacaaagagggccataaccctcccttctgagagtttccaggaggagtccgagggtctagcttttctggtgaagccagttcctgttcctgccttctttcctaagggcctgctcgctctggcttccaccacagtgccaagcccctctggtctccaggggagggattgctgtgttacatagcaggatcggggtaatcaggccaacaggggagatggtggcgatttttcttttttaatctgtatttattatacagtcttgtttctttaagcccatactctgtctcttcccccgtcttcctctcaggtgacagtatcagtgagtgccatacagaattgtgtattcaccagcatcatgaaacagttgtggtcttttgagttgatcttggcagagtaaagggacgtgtcctggagccattcctgaatctccccttctttgtgacagctcctcccacccccccaaaaaataaaaaaaccacaaaaaacaaaaaaacaaaactaaggcacttcacttagagactggagtcctgcttataatcatgcatataacctttactttgatggatctggccagaggggtgttggagcccagcccacccacataccagtcaagctcttaggggagcagaagaaaagcaggaagaatttaaatgtttaattttttttttaaattgacttttctagttattaaaagttgcttgtttcagcagtgatattgtataaagaacatcttgtaagatactcctgacatcttgctttagcacatgtacagtacagtttctatgataatgtgtttgctctaacttccctggcttctccttcagcccatccactctcctctagagcagttgggttggaggctcattgaggcaagcagcaacattggagggggagcagggcagtgctgtgtctgctgcctcccatgcccgttctgacctcagccttggaactcctcaagaacctgaagattccagtggtcagtgtcggtggggggtgggaggagagagcggcagagaagctctgagagccccttcccccacaacaaatctagctctagttgttatatttaggcaaaactttgtagtcttctttcccttttatgatggattttgataaaagtacaaaacagggtttttcttttttatcacctttgaatttggaaattttgagcacccaagctcttctgtacctatttaaagtccaccaaggggactgcagctcctagaacatgagaatcaagcctcttaattttaaactgcggaatgtggcctctgcttcctccgtcctcctgcccaaggacgacgaggattgctccagggctgctgggtagtttaccgtcccttctataggcatggagttggcactgacatcacagcttcataaccccaccaccgccagcttcccctgcctcctacatccagtctgttcttgttcatagtgagaatcctgtgttcccacttcagtgacacctgaattgtttgttgttgttttttttttttattgtcttcaaagaggaagggccccattaaagggtgaacttgtaataaattggaatttcaaataaacctcatgtacttgtgtttataaagaagaaacca

SEQ ID NO: 323397 - DNA, 1462 bp, Homo sapiens
aattcgcggccgcgtcgacacggtgcgagaagacgacagaagggatagcaggatcggggtaatcaggccaacaggggagatggtggcgatttttcttttttaatctgtatttattatacagtcttgtttctttaagcccatactctgtctcttcccccgtcttcctctcaggtgacagtatcagtgagtgccatacagaattgtgtattcaccagcatcatgaaacagttgtggtcttttgagttgatcttggcagagtaaagggacgtgtcctggagccattcctgaatctccccttctttgtgacagctcctcccacccccccaaaaaataaaaaaaccacaaaaaacaaaaaaacaaaactaaggcacttcacttagagactggagtcctgcttataatcatgcatataacctttactttgatggatctggccagaggggtgttggagcccagcccacccacataccagtcaagctcttaggggagcagaagaaaagcaggaagaatttaaatgtttaattttttttttaaattgacttttctagttattaaaagttgcttgtttcagcagtgatattgtataaagaacatcttgtaagatactcctgacatcttgctttagcacatgtacagtacagtttctatgataatgtgtttgctctaacttccctggcttctccttcagcccatccactctcctctagagcagttgggttggaggctcattgaggcaagcagcaacattggagggggagcagggcagtgctgtgtctgctgcctcccatgcccgttctgacctcagccttggaactcctcaagaacctgaagattccagtggtcagtgtcggtggggggtgggaggagagagcggcagagaagctctgagagccccttcccccacaacaaatctagctctagttgttatatttaggcaaaactttgtagtcttctttcccttttatgatggattttgataaaagtacaaaacagggtttttcttttttatcacctttgaatttggaaattttgagcacccaagctcttctgtacctatttaaagtccaccaaggggactgcagctcctagaacatgagaatcaagcctcttaattttaaactgcggaatgtggcctctgcttcctccgtcctcctgcccaaggacgacgaggattgctccagggctgctgggtagtttaccgtcccttctataggcatggagttggcactgacatcacagcttcataaccccaccaccgccagcttcccctgcctcctacatccagtctgttcttgttcatagtgagaatcctgtgttcccacttcagtgacacctgaattgtttgttgttgttttttttttttattgtcttcaaagaggaagggccccattaaagggtgaacttgtaataaattggaatttcaaataaacctcatgtacttgtgtttataaagaagaaacca

SEQ ID NO: 323398 - DNA, 1848 bp, Homo sapiens
  misc_feature (42)..(42): n is a, c, g, or t
  misc_feature (58)..(60): n is a, c, g, or t
  misc_feature (111)..(111): n is a, c, g, or t
  misc_feature (129)..(129): n is a, c, g, or t
  misc_feature (131)..(131): n is a, c, g, or t
  misc_feature (144)..(144): n is a, c, g, or t
  misc_feature (147)..(147): n is a, c, g, or t
  misc_feature (149)..(149): n is a, c, g, or t
  misc_feature (160)..(160): n is a, c, g, or t
  misc_feature (163)..(163): n is a, c, g, or t
  misc_feature (200)..(200): n is a, c, g, or t
  misc_feature (205)..(205): n is a, c, g, or t
  misc_feature (208)..(208): n is a, c, g, or t
  misc_feature (226)..(226): n is a, c, g, or t
  misc_feature (240)..(240): n is a, c, g, or t
  misc_feature (266)..(266): n is a, c, g, or t
  misc_feature (270)..(270): n is a, c, g, or t
  misc_feature (272)..(272): n is a, c, g, or t
  misc_feature (275)..(275): n is a, c, g, or t
  misc_feature (280)..(280): n is a, c, g, or t
  misc_feature (283)..(283): n is a, c, g, or t
  misc_feature (286)..(286): n is a, c, g, or t
  misc_feature (301)..(301): n is a, c, g, or t
  misc_feature (312)..(312): n is a, c, g, or t
  misc_feature (326)..(326): n is a, c, g, or t
  misc_feature (330)..(330): n is a, c, g, or t
  misc_feature (345)..(345): n is a, c, g, or t
  misc_feature (349)..(349): n is a, c, g, or t
  misc_feature (355)..(355): n is a, c, g, or t
  misc_feature (357)..(357): n is a, c, g, or t
  misc_feature (360)..(360): n is a, c, g, or t
  misc_feature (374)..(374): n is a, c, g, or t
  misc_feature (386)..(386): n is a, c, g, or t
  misc_feature (402)..(402): n is a, c, g, or t
  misc_feature (408)..(408): n is a, c, g, or t
  misc_feature (413)..(413): n is a, c, g, or t
  misc_feature (442)..(442): n is a, c, g, or t
  misc_feature (444)..(444): n is a, c, g, or t
  misc_feature (450)..(450): n is a, c, g, or t
  misc_feature (456)..(456): n is a, c, g, or t
gttcaactcctaactgcggcggaaacgtgggagccgcgcggngccgctgtcgtcccannncccgccgccctcgtcgcgcgcggggcctccgcgcccccggctgctgctcangccccgcccgggagccanantttgtggaagtanaanantttgtcattanganatgtcgtctctcggtgcctcctttgtgcaaattaaanttganganttgcagttttttgaaaantgcggtggaagaanttttgggagtgtttatcgagccaaangganancanaaganaangangtggctgtaaaaaanctcctcaaaanaaaaaaaaaagcanaaanaatcaatgtcctcantcanaaaaanancanccaattttatggantaattcttgaanctcccaactatggcantgtcanaaaanatgcttctctgggatcactctatgattanantaacantaacanaagtgggagatggtggcgatttttcttttttaatctgtatttattatacagtcttgtttctttaagcccatactctgtctcttcccccgtcttcctctcaggtgacagtatcagtgagtgccatacagaattgtgtattcaccagcatcatgaaacagttgtggtcttttgagttgatcttggcagagtaaagggacgtgtcctggagccattcctgaatctccccttctttgtgacagctcctcccacccccccaaaaaataaaaaaaccacaaaaaacaaaaaaacaaaactaaggcacttcacttagagactggagtcctgcttataatcatgcatataacctttactttgatggatctggccagaggggtgttggagcccagcccacccacataccagtcaagctcttaggggagcagaagaaaagcaggaagaatttaaatgtttaattttttttttaaattgacttttctagttattaaaagttgcttgtttcagcagtgatattgtataaagaacatcttgtaagatactcctgacatcttgctttagcacatgtacagtacagtttctatgataatgtgtttgctctaacttccctggcttctccttcagcccatccactctcctctagagcagttgggttggaggctcattgaggcaagcagcaacattggagggggagcagggcagtgctgtgtctgctgcctcccatgcccgttctgacctcagccttggaactcctcaagaacctgaagattccagtggtcagtgtcggtggggggtgggaggagagagcggcagagaagctctgagagccccttcccccacaacaaatctagctctagttgttatatttaggcaaaactttgtagtcttctttcccttttatgatggattttgataaaagtacaaaacagggtttttcttttttatcacctttgaatttggaaattttgagcacccaagctcttctgtacctatttaaagtccaccaaggggactgcagctcctagaacatgagaatcaagcctcttaattttaaactgcggaatgtggcctctgcttcctccgtcctcctgcccaaggacgacgaggattgctccagggctgctgggtagtttaccgtcccttctataggcatggagttggcactgacatcacagcttcataaccccaccaccgccagcttcccctgcctcctacatccagtctgttcttgttcatagtgagaatcctgtgttcccacttcagtgacacctgaattgtttgttgttgttttttttttttattgtcttcaaagaggaagggccccattaaagggtgaacttgtaataaattggaatttcaaataaacctcatgtacttgtgtttataaagaagaaacca

SEQ ID NO: 323399 - DNA, 5679 bp, Homo sapiens
cgttggccgggcccgggggaggaggggaatctcccgccatttttcaataatttcctccggtgctgctgaggaggagtcgtgactgccggccgccgggacccgaagcggaggtcggcggggggctgctgggaggcgcggcggtgtgcgcgggagctctgcgccgtggcgttccgctccatgactgtcgcgcggccgcgccggcggtgagggagccggagttcgcgccgccctctcacccctcccttcccccaccccacccccgggcgcctggcgctcgctccgggccgcggggcctagtgctgcgccgcggggccggccccagcagccgccagtccccaccgccgccgccgcgatggcgccgctcctgggccgcaagcccttcccgctggtgaagccgttgcccggagaggagccgctcttcaccatcccgcacactcaggaggccttccgcacccgggaagagtatgaagcccgcttggaaaggtacagtgagcgcatttggacgtgcaagagtactggaagcagtcagctaacacacaaggaagcctgggaggaagaacaggaagttgctgagcttttgaaggaggagtttcctgcctggtatgagaagcttgttctggaaatggttcaccataacacagcctccttagagaagttagtagatactgcttggttggagatcatgaccaaatatgctgtgggagaagagtgtgacttcgaggttgggaaggagaaaatgctcaaggtgaagattgtgaagattcatcctttggagaaagtggatgaagaggccactgagaagaaatctgatggtgcctgtgattctccatcaagtgacaaagagaactccagtcagattgctcaggaccatcagaagaaggagacagttgtgaaagaggatgaaggaaggagagagagtattaatgacagagcacgtagatcgccacgaaaacttcctacttcattaaaaaaaggagaaaggaaatgggctcctccaaaatttctgcctcacaaatatgatgtgaaactacaaaatgaagataagatcatcagtaacgtgccagcagacagcttgattcgtacagagcgcccaccaaataaggagatagttcgatactttatacggcataatgcattacgagctggtactggtgaaaatgcaccttgggtcgtagaagatgaattggtgaagaaatactctctgcccagcaagttcagtgactttttacttgatccatacaagtatatgactctcaacccttctactaagaggaagaatactggatccccagacaggaagccctcaaagaaatccaagacagacaactcttctcttagttcaccactaaatcctaagttatggtgtcacgtacacttgaagaagtcattgagtggctcgccactcaaagtgaagaactcaaagaattccaaatctcctgaagaacatctagaagaaatgatgaagatgatgtcgcccaataagctgcacactaactttcacattcctaaaaaaggcccacctgccaagaaaccagggaagcacagtgacaagcctttgaaggcaaagggcagaagcaaaggcatcctgaatggacagaaatccacagggaattccaaatctcccaaaaaaggactgaagactcctaaaaccaaaatgaagcagatgactttgttggatatggccaaaggcacgcagaagatgacacgagccccacggaattctgggggtacacctaggacctctagtaaacctcataaacatctgcctcctgcagccctacacctcattgcatactacaaagaaaacaaagacagggaggacaagaggagcgccctgtcctgtgttatctccaaaacagctcgtcttctctctagtgaagatagagctcgtctcccagaagaattgcgaagtcttgttcaaaaacgctatgaacttctagagcacaaaaagaggtgggcttctatgtctgaagaacaacggaaagaatatttgaaaaagaaacgggaggagctgaaaaagaagttgaaggaaaaagccaaagaacgaagagagaaagaaatgcttgagagattagaaaaacagaagcggtatgaggaccaagagttaactggcaaaaaccttccagcattcagattggtggatacccctgaagggctgcccaacacgctgtttggggatgtggccatggtggtggaattcttgagctgttattctgggctacttttaccagatgctcagtatcctattactgctgtgtcccttatggaagccttgagtgcagataagggtggctttttataccttaacagggtgttggtcatcctcttacagaccctcctacaagatgagatagcagaagactatggtgaattgggaatgaagctgtcggaaatccccttgactctgcattctgtttcagagctggtgcggctctgcttgcgcagatctgatgttcaggaggaaagcgagggctcagacacagatgacaataaagattcagctgcatttgaggataatgaggtacaagatgagttcctagaaaagctggagacctctgaattttttgagctgacgtcagaggagaagctacagatcttgacagcactgtgccaccggatcctcatgacatactcagtgcaagaccacatggagaccagacagcagatgtctgcagagttgtggaaggaacggcttgctgtgttgaaggaagaaaatgataagaagagagcagagaaacagaaacggaaagaaatggaagccaaaaataaagaaaatggaaaagttgagaatgggttaggcaaaactgataggaaaaaagaaattgtgaagtttgagccccaagtagatacagaagctgaagacatgattagtgctgtgaagagcagaaggttgcttgccattcaagctaagaaggaacgggaaatccaggaaagagaaatgaaagtgaaactggaacgccaagctgaagaagaacgaatacggaagcacaaagcagctgctgagaaagctttccaggaagggattgccaaggccaaactagtcatgcgcaggactcctattggcacagatcgaaaccataatagatactggctcttctcagatgaagttccaggattattcattgaaaaaggctgggtacatgacagcattgactaccgattcaaccatcactgcaaagaccacacagtctctggtgatgaggattactgtcctcgcagtaagaaagcaaacttaggtaaaaatgcaagcatgaacacacaacatggaacagcaacagaagttgctgtagagacaaccacacccaaacaaggacagaacctatggtttttatgtgatagtcaaaaggagctggatgagttgctaaactgtcttcaccctcagggaataagagaaagtcaacttaaagagagactagagaagaggtaccaggacattattcactctattcatctagcacggaagccaaatttgggtctaaaatcttgtgatggcaaccaggagcttttaaacttccttcgtagtgatctcattgaagttgcaacaaggttacaaaaaggaggacttggatatgtggaagaaacatcagaatttgaagcccgggtcatttcattagagaaattgaaggattttggtgagtgtgtgattgcccttcaggccagtgtcataaagaaatttctccaaggcttcatggctcccaagcaaaagagaagaaaactccaaagtgaagattcagcaaaaactgaggaagtggatgaagagaagaaaatggtagaggaagcaaaggttgcatctgcactggagaaatggaagacagcaatccgggaagctcagactttctccaggatgcacgtgctgcttgggatgcttgatgcctgtatcaagtgggatatgtccgcagaaaatgctaggtgcaaagtttgtcgaaagaaaggtgaggatgacaaattgatcttgtgtgatgagtgtaataaagccttccacctgttttgtctgaggccggccctctatgaagtaccagatggtgagtggcagtgcccagcttgccagcccgctactgccaggcgcaactcccgtggcaggaactatactgaagagtctgcttctgaggacagtgaagatgatgagagtgatgaagaggaggaggaggaagaagaggaggaggaggaagaagattatgaggtggctggtttgcgattgagacctcgaaagaccatccggggcaagcacagcgtcatcccccctgcagcaaggtcaggccggcgcccgggtaagaagccacactctaccaggaggtctcagcccaaggcaccacctgtggatgatgctgaggtggatgagctggtgcttcagaccaagcggagctcccggaggcaaagcctggagctgcagaagtgtgaagagatcctccacaagatcgtgaagtaccgcttcagctggcccttcagggagcctgtgaccagagatgaggccgaggactactatgatgtgatcacgcaccccatggactttcagacagtgcagaacaaatgttcctgtgggagctaccgctctgtgcaggagtttcttactgacatgaagcaagtgtttaccaatgctgaggtttacaactgccgtggcagccatgtgctaagctgcatggtgaagacagaacagtgtctagtggctctgttgcataaacaccttcctggccacccatatgtccgcaggaagcgcaagaagtttcctgataggcttgctgaagatgaaggggacagtgagccagaggccgttggacagtccaggggacgaagacagaagaagtagagaggcagggccgtggtaagggagctgaggtggggggacagctagggagggtgggagggaggcgagcgaggaagaccaagaacctggaagagatcacagggagtccagaaacgcctgtcatcccaagcttatgctgtttttctaaaagctctttatggggcttgatattgggttggtggtctttgtccagaaatatgaagggacaaagagggccataaccctcccttctgagagtttccaggaggagtccgagggtctagcttttctggtgaagccagttcctgttcctgccttctttcctaagggcctgctcgctctggcttccaccacagtgccaagcccctctggtctccaggggagggattgctgtgttacatagcaggatcggggtaatcaggccaacaggggagatggtggcgatttttcttttttaatctgtatttattatacagtcttgtttctttaagcccatactctgtctcttcccccgtcttcctctcaggtgacagtatcagtgagtgccatacagaattgtgtattcaccagcatcatgaaacagttgtggtcttttgagttgatcttggcagagtaaagggctgctgggtagtttaccgtcccttctataggcatggagttggcactgacatcacagcttcataaccccaccaccgccagcttcccctgcctcctacatccagtctgttcttgttcatagtgagaatcctgtgttcccacttcagtgacacctgaattgtttgttgttgttttttttttttattgtcttcaaagaggaagggccccattaaagggtgaacttgtaataaattggaatttcaaataaacctcatgtacttgtgtttataaagaagaaacca

SEQ ID NO: 323400 - DNA, 4791 bp, Homo sapiens
  misc_feature (4467)..(4467): n is a, c, g, or t
  misc_feature (4496)..(4496): n is a, c, g, or t
cgttggccgggcccgggggaggaggggaatctcccgccatttttcaataatttcctccggtgctgctgaggaggagtcgtgactgccggccgccgggacccgaagcggaggtcggcggggggctgctgggaggcgcggcggtgtgcgcgggagctctgcgccgtggcgttccgctccatgactgtcgcgcggccgcgccggcggtgagggagccggagttcgcgccgccctctcacccctcccttcccccaccccacccccgggcgcctggcgctcgctccgggccgcggggcctagtgctgcgccgcggggccggccccagcagccgccagtccccaccgccgccgccgcgatggcgccgctcctgggccgcaagcccttcccgctggtgaagccgttgcccggagaggagccgctcttcaccatcccgcacactcaggaggccttccgcacccgggaagagtatgaagcccgcttggaaaggtacagtgagcgcatttggacgtgcaagagtactggaagcagtcagctaacacacaaggaagcctgggaggaagaacaggaagttgctgagcttttgaaggaggagtttcctgcctggtatgagaagcttgttctggaaatggttcaccataacacagcctccttagagaagttagtagatactgcttggttggagatcatgaccaaatatgctgtgggagaagagtgtgacttcgaggttgggaaggagaaaatgctcaaggtgaagattgtgaagattcatcctttggagaaagtggatgaagaggccactgagaagaaatctgatggtgcctgtgattctccatcaagtgacaaagagaactccagtcagattgctcaggaccatcagaagaaggagacagttgtgaaagaggatgaaggaaggagagagagtattaatgacagagcacgtagatcgccacgaaaacttcctacttcattaaaaaaaggagaaaggaaatgggctcctccaaaatttctgcctcacaaatatgatgtgaaactacaaaatgaagataagatcatcagtaacgtgccagcagacagcttgattcgtacagagcgcccaccaaataaggagatagttcgatactttatacggcataatgcattacgagctggtactggtgaaaatgcaccttgggtcgtagaagatgaattggtgaagaaatactctctgcccagcaagttcagtgactttttacttgatccatacaagtatatgactctcaacccttctactaagaggaagaatactggatccccagacaggaagccctcaaagaaatccaagacagacaactcttctcttagttcaccactaaatcctaagttatggtgtcacgtacacttgaagaagtcattgagtggctcgccactcaaagtgaagaactcaaagaattccaaatctcctgaagaacatctagaagaaatgatgaagatgatgtcgcccaataagctgcacactaactttcacattcctaaaaaaggcccacctgccaagaaaccagggaagcacagtgacaagcctttgaaggcaaagggcagaagcaaaggcatcctgaatggacagaaatccacagggaattccaaatctcccaaaaaaggactgaagactcctaaaaccaaaatgaagcagatgactttgttggatatggccaaaggcacgcagaagatgacacgagccccacggaattctgggggtacacctaggacctctagtaaacctcataaacatctgcctcctgcagccctacacctcattgcatactacaaagaaaacaaagacagggaggacaagaggagcgccctgtcctgtgttatctccaaaacagctcgtcttctctctagtgaagatagagctcgtctcccagaagaattgcgaagtcttgttcaaaaacgctatgaacttctagagcacaaaaagaggtgggcttctatgtctgaagaacaacggaaagaatatttgaaaaagaaacgggaggagctgaaaaagaagttgaaggaaaaagccaaagaacgaagagagaaagaaatgcttgagagattagaaaaacagaagcggtatgaggaccaagagttaactggcaaaaaccttccagcattcagattggtggatacccctgaagggctgcccaacacgctgtttggggatgtggccatggtggtggaattcttgagctgttattctgggctacttttaccagatgctcagtatcctattactgctgtgtcccttatggaagccttgagtgcagataagggtggctttttataccttaacagggtgttggtcatcctcttacagaccctcctacaagatgagatagcagaagactatggtgaattgggaatgaagctgtcggaaatccccttgactctgcattctgtttcagagctggtgcggctctgcttgcgcagatctgatgttcaggaggaaagcgagggctcagacacagatgacaataaagattcagctgcatttgaggataatgaggtacaagatgagttcctagaaaagctggagacctctgaattttttgagctgacgtcagaggagaagctacagatcttgacagcactgtgccaccggatcctcatgacatactcagtgcaagaccacatggagaccagacagcagatgtctgcagagttgtggaaggaacggcttgctgtgttgaaggaagaaaatgataagaagagagcagagaaacagaaacggaaagaaatggaagccaaaaataaagaaaatggaaaagttgagaatgggttaggcaaaactgataggaaaaaagaaattgtgaagtttgagccccaagtagatacagaagctgaagacatgattagtgctgtgaagagcagaaggttgcttgccattcaagctaagaaggaacgggaaatccaggaaagagaaatgaaagtgaaactggaacgccaagctgaagaagaacgaatacggaagcacaaagcagctgctgagaaagctttccaggaagggattgccaaggccaaactagtcatgcgcaggactcctattggcacagatcgaaaccataatagatactggctcttctcagatgaagttccaggattattcattgaaaaaggctgggtacatgacagcattgactaccgattcaaccatcactgcaaagaccacacagtctctggtgatgaggattactgtcctcgcagtaagaaagcaaacttaggtaaaaatgcaagcatgaacacacaacatggaacagcaacagaagttgctgtagagacaaccacacccaaacaaggacagaacctatggtttttatgtgatagtcaaaaggagctggatgagttgctaaactgtcttcaccctcagggaataagagaaagtcaacttaaagagagactagagaagaggtaccaggacattattcactctattcatctagcacggaagccaaatttgggtctaaaatcttgtgatggcaaccaggagcttttaaacttccttcgtagtgatctcattgaagttgcaacaaggttacaaaaaggaggacttggatatgtggaagaaacatcagaatttgaagcccgggtcatttcattagagaaattgaaggattttggtgagtgtgtgattgcccttcaggccagtgtcataaagaaatttctccaaggcttcatggctcccaagcaaaagagaagaaaactccaaagtgaagattcagcaaaaactgaggaagtggatgaagagaagaaaatggtagaggaagcaaaggttgcatctgcactggagaaatggaagacagcaatccgggaagctcagactttctccaggatgcacgtgctgcttgggatgcttgatgcctgtatcaagtgggatatgtccgcagaaaatgctaggtgcaaagtttgtcgaaagaaaggtgaggatgacaaattgatcttgtgtgatgagtgtaataaagccttccacctgttttgtctgaggccggccctctatgaagtaccagatggtgagtggcagtgcccagcttgccagcccgctactgccaggcgcaactcccgtggcaggaactatactgaagagtctgcttctgaggacagtgaagatgatgagagtgatgaagaggaggaggaggaagaagaggaggaggaggaagaagattatgaggtggctggtttgcgattgagacctcgaaagaccatccggggcaagcacagcgtcatcccccctgcagcaaggtcaggccggcgcccgggtaagaagccacactctaccaggaggtctcagcccaaggcaccacctgtggatgatgctgaggtggatgagctggtgcttcagaccaagcggagctcccggaggcaaagcctggagctgcagaagtgtgaagagatcctccacaagatcgtgaagtacccccccccccgggggcttcagctggcccttcagggagcctngtgaccaaagggaaagattgaacgggggncccccgggaaaagggggggaaaaaccttttaaaccctcttttaaacgttttggcaaactttttggggtttttggggaactacaacgcaccccccccaaagttgggggcatccttttccacgaacagttgccatgaaacaaaattgttacctgtgggagctaccgctctgtgaccacggggggaaaggttttctttttaacctgacattggcaacaaagggggccccaaaaaaaaggtggtttttttaaccccaaattgggcccttttttggggcaaaagggggggatttttttac

SEQ ID NO: 323401 - DNA, 367 bp, Homo sapiens
tacaggcgtgagccactgcacccggccagtcaagtacttttaaatgcatgagccatgcagtgaactgaggagcacagttaaattaatggtatgtggctctcgattttgtttaatgaatgttatgtggcatttgagtctagatttatttgaatttgaggttggattcctttcgtcttcctctgggccttttctcagtctggttttaaaatcctttcctataggtcatttcattagagaaattgaaggattttggtgagtgtgtgattgcccttcaggccagtgtcataaagaaatttctccaaggcttcatggctcccaagcaaaagagaagaaaactccaaagtgaagattcagcaaaaactgagga

SEQ ID NO: 323402 - DNA, 6078 bp, Homo sapiens
cgttggccgggcccgggggaggaggggaatctcccgccatttttcaataatttcctccggtgctgctgaggaggagtcgtgactgccggccgccgggacccgaagcggaggtcggcggggggctgctgggaggcgcggcggtgtgcgcgggagctctgcgccgtggcgttccgctccatgactgtcgcgcggccgcgccggcggtgagggagccggagttcgcgccgccctctcacccctcccttcccccaccccacccccgggcgcctggcgctcgctccgggccgcggggcctagtgctgcgccgcggggccggccccagcagccgccagtccccaccgccgccgccgcgatggcgccgctcctgggccgcaagcccttcccgctggtgaagccgttgcccggagaggagccgctcttcaccatcccgcacactcaggaggccttccgcacccgggaagagtatgaagcccgcttggaaaggtacagtgagcgcatttggacgtgcaagagtactggaagcagtcagctaacacacaaggaagcctgggaggaagaacaggaagttgctgagcttttgaaggaggagtttcctgcctggtatgagaagcttgttctggaaatggttcaccataacacagcctccttagagaagttagtagatactgcttggttggagatcatgaccaaatatgctgtgggagaagagtgtgacttcgaggttgggaaggagaaaatgctcaaggtgaagattgtgaagattcatcctttggagaaagtggatgaagaggccactgagaagaaatctgatggtgcctgtgattctccatcaagtgacaaagagaactccagtcagattgctcaggaccatcagaagaaggagacagttgtgaaagaggatgaaggaaggagagagagtattaatgacagagcacgtagatcgccacgaaaacttcctacttcattaaaaaaaggagaaaggaaatgggctcctccaaaatttctgcctcacaaatatgatgtgaaactacaaaatgaagataagatcatcagtaacgtgccagcagacagcttgattcgtacagagcgcccaccaaataaggagatagttcgatactttatacggcataatgcattacgagctggtactggtgaaaatgcaccttgggtcgtagaagatgaattggtgaagaaatactctctgcccagcaagttcagtgactttttacttgatccatacaagtatatgactctcaacccttctactaagaggaagaatactggatccccagacaggaagccctcaaagaaatccaagacagacaactcttctcttagttcaccactaaatcctaagttatggtgtcacgtacacttgaagaagtcattgagtggctcgccactcaaagtgaagaactcaaagaattccaaatctcctgaagaacatctagaagaaatgatgaagatgatgtcgcccaataagctgcacactaactttcacattcctaaaaaaggcccacctgccaagaaaccagggaagcacagtgacaagcctttgaaggcaaagggcagaagcaaaggcatcctgaatggacagaaatccacagggaattccaaatctcccaaaaaaggactgaagactcctaaaaccaaaatgaagcagatgactttgttggatatggccaaaggcacgcagaagatgacacgagccccacggaattctgggggtacacctaggacctctagtaaacctcataaacatctgcctcctgcagccctacacctcattgcatactacaaagaaaacaaagacagggaggacaagaggagcgccctgtcctgtgttatctccaaaacagctcgtcttctctctagtgaagatagagctcgtctcccagaagaattgcgaagtcttgttcaaaaacgctatgaacttctagagcacaaaaagaggtgggcttctatgtctgaagaacaacggaaagaatatttgaaaaagaaacgggaggagctgaaaaagaagttgaaggaaaaagccaaagaacgaagagagaaagaaatgcttgagagattagaaaaacagaagcggtatgaggaccaagagttaactggcaaaaaccttccagcattcagattggtggatacccctgaagggctgcccaacacgctgtttggggatgtggccatggtggtggaattcttgagctgttattctgggctacttttaccagatgctcagtatcctattactgctgtgtcccttatggaagccttgagtgcagataagggtggctttttataccttaacagggtgttggtcatcctcttacagaccctcctacaagatgagatagcagaagactatggtgaattgggaatgaagctgtcggaaatccccttgactctgcattctgtttcagagctggtgcggctctgcttgcgcagatctgatgttcaggaggaaagcgagggctcagacacagatgacaataaagattcagctgcatttgaggataatgaggtacaagatgagttcctagaaaagctggagacctctgaattttttgagctgacgtcagaggagaagctacagatcttgacagcactgtgccaccggatcctcatgacatactcagtgcaagaccacatggagaccagacagcagatgtctgcagagttgtggaaggaacggcttgctgtgttgaaggaagaaaatgataagaagagagcagagaaacagaaacggaaagaaatggaagccaaaaataaagaaaatggaaaagttgagaatgggttaggcaaaactgataggaaaaaagaaattgtgaagtttgagccccaagtagatacagaagctgaagacatgattagtgctgtgaagagcagaaggttgcttgccattcaagctaagaaggaacgggaaatccaggaaagagaaatgaaagtgaaactggaacgccaagctgaagaagaacgaatacggaagcacaaagcagctgctgagaaagctttccaggaagggattgccaaggccaaactagtcatgcgcaggactcctattggcacagatcgaaaccataatagatactggctcttctcagatgaagttccaggattattcattgaaaaaggctgggtacatgacagcattgactaccgattcaaccatcactgcaaagaccacacagtctctggtgatgaggattactgtcctcgcagtaagaaagcaaacttaggtaaaaatgcaagcatgaacacacaacatggaacagcaacagaagttgctgtagagacaaccacacccaaacaaggacagaacctatggtttttatgtgatagtcaaaaggagctggatgagttgctaaactgtcttcaccctcagggaataagagaaagtcaacttaaagagagactagagaagaggtaccaggacattattcactctattcatctagcacggaagccaaatttgggtctaaaatcttgtgatggcaaccaggagcttttaaacttccttcgtagtgatctcattgaagttgcaacaaggttacaaaaaggaggacttggatatgtggaagaaacatcagaatttgaagcccgggtcatttcattagagaaattgaaggattttggtgagtgtgtgattgcccttcaggccagtgtcataaagaaatttctccaaggcttcatggctcccaagcaaaagagaagaaaactccaaagtgaagattcagcaaaaactgaggaagtggatgaagagaagaaaatggtagaggaagcaaaggttgcatctgcactggagaaatggaagacagcaatccgggaagctcagactttctccaggatgcacgtgctgcttgggatgcttgatgcctgtatcaagtgggatatgtccgcagaaaatgctaggtgcaaagtttgtcgaaagaaaggtgaggatgacaaattgatcttgtgtgatgagtgtaataaagccttccacctgttttgtctgaggccggccctctatgaagtaccagatggtgagtggcagtgcccagcttgccagcccgctactgccaggcgcaactcccgtggcaggaactatactgaagagtctgcttctgaggacagtgaagatgatgagagtgatgaagaggaggaggaggaagaagaggaggaggaggaagaagattatgaggtggctggtttgcgattgagacctcgaaagaccatccggggcaagcacagcgtcatcccccctgcagcaaggtcaggccggcgcccgggtaagaagccacactctaccaggaggtctcagcccaaggcaccacctgtggatgatgctgaggtggatgagctggtgcttcagaccaagcggagctcccggaggcaaagcctggagctgcagaagtgtgaagagatcctccacaagatcgtgaagtaccgcttcagctggcccttcagggagcctgtgaccagagatgaggccgaggactactatgatgtgatcacgcaccccatggactttcagacagtgcagaacaaatgttcctgtgggagctaccgctctgtgcaggagtttcttactgacatgaagcaagtgtttaccaatgctgaggtttacaactgccgtggcagccatgtgctaagctgcatggtgaagacagaacagtgtctagtggctctgttgcataaacaccttcctggccacccatatgtccgcaggaagcgcaagaagtttcctgataggcttgctgaagatgaaggggacagtgagccagaggccgttggacagtccaggggacgaagacagaagaagtagagaggcagggccgtggtgacagtatcagtgagtgccatacagaattgtgtattcaccagcatcatgaaacagttgtggtcttttgagttgatcttggcagagtaaagggacgtgtcctggagccattcctgaatctccccttctttgtgacagctcctcccacccccccaaaaaataaaaaaaccacaaaaaacaaaaaaacaaaactaaggcacttcacttagagactggagtcctgcttataatcatgcatataacctttactttgatggatctggccagaggggtgttggagcccagcccacccacataccagtcaagctcttaggggagcagaagaaaagcaggaagaatttaaatgtttaattttttttttaaattgacttttctagttattaaaagttgcttgtttcagcagtgatattgtataaagaacatcttgtaagatactcctgacatcttgctttagcacatgtacagtacagtttctatgataatgtgtttgctctaacttccctggcttctccttcagcccatccactctcctctagagcagttgggttggaggctcattgaggcaagcagcaacattggagggggagcagggcagtgctgtgtctgctgcctcccatgcccgttctgacctcagccttggaactcctcaagaacctgaagattcagagcggcagagaagctctgagagccccttcccccacaacaaatctagctctagttgttatatttaggcaaaactttgtagtcttctttcccttttatgatggattttgataaaagtacaaaacagggtttttcttttttatcacctttgaatttggaaattttgagcacccaagctcttctgtacctatttaaagtccaccaaggggactgcagctcctagaacatgagaatcaagcctcttaattttaaactgcggaatgtggcctctgcttcctccgtcctcctgcccaaggacgacgaggattgctccagggctgctgggtagtttaccgtcccttctataggcatggagttggcactgacatcacagcttcataaccccaccaccgccagcttcccctgcctcctacatccagtctgttcttgttcatagtgagaatcctgtgttcccacttcagtgacacctgaattgtttgttgttgttttttttttttattgtcttcaaagaggaagggccccattaaagggtgaacttgtaataaattggaatttcaaataaacctcatgtacttgtgtttataaagaagaaacca

SEQ ID NO: 323403 - DNA, 6597 bp, Homo sapiens
cgttggccgggcccgggggaggaggggaatctcccgccatttttcaataatttcctccggtgctgctgaggaggagtcgtgactgccggccgccgggacccgaagcggaggtcggcggggggctgctgggaggcgcggcggtgtgcgcgggagctctgcgccgtggcgttccgctccatgactgtcgcgcggccgcgccggcggtgagggagccggagttcgcgccgccctctcacccctcccttcccccaccccacccccgggcgcctggcgctcgctccgggccgcggggcctagtgctgcgccgcggggccggccccagcagccgccagtccccaccgccgccgccgcgatggcgccgctcctgggccgcaagcccttcccgctggtgaagccgttgcccggagaggagccgctcttcaccatcccgcacactcaggaggccttccgcacccgggaagagtatgaagcccgcttggaaaggtacagtgagcgcatttggacgtgcaagagtactggaagcagtcagctaacacacaaggaagcctgggaggaagaacaggaagttgctgagcttttgaaggaggagtttcctgcctggtatgagaagcttgttctggaaatggttcaccataacacagcctccttagagaagttagtagatactgcttggttggagatcatgaccaaatatgctgtgggagaagagtgtgacttcgaggttgggaaggagaaaatgctcaaggtgaagattgtgaagattcatcctttggagaaagtggatgaagaggccactgagaagaaatctgatggtgcctgtgattctccatcaagtgacaaagagaactccagtcagattgctcaggaccatcagaagaaggagacagttgtgaaagaggatgaaggaaggagagagagtattaatgacagagcacgtagatcgccacgaaaacttcctacttcattaaaaaaaggagaaaggaaatgggctcctccaaaatttctgcctcacaaatatgatgtgaaactacaaaatgaagataagatcatcagtaacgtgccagcagacagcttgattcgtacagagcgcccaccaaataaggagatagttcgatactttatacggcataatgcattacgagctggtactggtgaaaatgcaccttgggtcgtagaagatgaattggtgaagaaatactctctgcccagcaagttcagtgactttttacttgatccatacaagtatatgactctcaacccttctactaagaggaagaatactggatccccagacaggaagccctcaaagaaatccaagacagacaactcttctcttagttcaccactaaatcctaagttatggtgtcacgtacacttgaagaagtcattgagtggctcgccactcaaagtgaagaactcaaagaattccaaatctcctgaagaacatctagaagaaatgatgaagatgatgtcgcccaataagctgcacactaactttcacattcctaaaaaaggcccacctgccaagaaaccagggaagcacagtgacaagcctttgaaggcaaagggcagaagcaaaggcatcctgaatggacagaaatccacagggaattccaaatctcccaaaaaaggactgaagactcctaaaaccaaaatgaagcagatgactttgttggatatggccaaaggcacgcagaagatgacacgagccccacggaattctgggggtacacctaggacctctagtaaacctcataaacatctgcctcctgcagccctacacctcattgcatactacaaagaaaacaaagacagggaggacaagaggagcgccctgtcctgtgttatctccaaaacagctcgtcttctctctagtgaagatagagctcgtctcccagaagaattgcgaagtcttgttcaaaaacgctatgaacttctagagcacaaaaagaggtgggcttctatgtctgaagaacaacggaaagaatatttgaaaaagaaacgggaggagctgaaaaagaagttgaaggaaaaagccaaagaacgaagagagaaagaaatgcttgagagattagaaaaacagaagcggtatgaggaccaagagttaactggcaaaaaccttccagcattcagattggtggatacccctgaagggctgcccaacacgctgtttggggatgtggccatggtggtggaattcttgagctgttattctgggctacttttaccagatgctcagtatcctattactgctgtgtcccttatggaagccttgagtgcagataagggtggctttttataccttaacagggtgttggtcatcctcttacagaccctcctacaagatgagatagcagaagactatggtgaattgggaatgaagctgtcggaaatccccttgactctgcattctgtttcagagctggtgcggctctgcttgcgcagatctgatgttcaggaggaaagcgagggctcagacacagatgacaataaagattcagctgcatttgaggataatgaggtacaagatgagttcctagaaaagctggagacctctgaattttttgagctgacgtcagaggagaagctacagatcttgacagcactgtgccaccggatcctcatgacatactcagtgcaagaccacatggagaccagacagcagatgtctgcagagttgtggaaggaacggcttgctgtgttgaaggaagaaaatgataagaagagagcagagaaacagaaacggaaagaaatggaagccaaaaataaagaaaatggaaaagttgagaatgggttaggcaaaactgataggaaaaaagaaattgtgaagtttgagccccaagtagatacagaagctgaagacatgattagtgctgtgaagagcagaaggttgcttgccattcaagctaagaaggaacgggaaatccaggaaagagaaatgaaagtgaaactggaacgccaagctgaagaagaacgaatacggaagcacaaagcagctgctgagaaagctttccaggaagggattgccaaggccaaactagtcatgcgcaggactcctattggcacagatcgaaaccataatagatactggctcttctcagatgaagttccaggattattcattgaaaaaggctgggtacatgacagcattgactaccgattcaaccatcactgcaaagaccacacagtctctggtgatgaggattactgtcctcgcagtaagaaagcaaacttaggtaaaaatgcaagcatgaacacacaacatggaacagcaacagaagttgctgtagagacaaccacacccaaacaaggacagaacctatggtttttatgtgatagtcaaaaggagctggatgagttgctaaactgtcttcaccctcagggaataagagaaagtcaacttaaagagagactagagaagaggtaccaggacattattcactctattcatctagcacggaagccaaatttgggtctaaaatcttgtgatggcaaccaggagcttttaaacttccttcgtagtgatctcattgaagttgcaacaaggttacaaaaaggaggacttggatatgtggaagaaacatcagaatttgaagcccgggtcatttcattagagaaattgaaggattttggtgagtgtgtgattgcccttcaggccagtgtcataaagaaatttctccaaggcttcatggctcccaagcaaaagagaagaaaactccaaagtgaagattcagcaaaaactgaggaagtggatgaagagaagaaaatggtagaggaagcaaaggttgcatctgcactggagaaatggaagacagcaatccgggaagctcagactttctccaggatgcacgtgctgcttgggatgcttgatgcctgtatcaagtgggatatgtccgcagaaaatgctaggtgcaaagtttgtcgaaagaaaggtgaggatgacaaattgatcttgtgtgatgagtgtaataaagccttccacctgttttgtctgaggccggccctctatgaagtaccagatggtgagtggcagtgcccagcttgccagcccgctactgccaggcgcaactcccgtggcaggaactatactgaagagtctgcttctgaggacagtgaagatgatgagagtgatgaagaggaggaggaggaagaagaggaggaggaggaagaagattatgaggtggctggtttgcgattgagacctcgaaagaccatccggggcaagcacagcgtcatcccccctgcagcaaggtcaggccggcgcccgggtaagaagccacactctaccaggaggtctcagcccaaggcaccacctgtggatgatgctgaggtggatgagctggtgcttcagaccaagcggagctcccggaggcaaagcctggagctgcagaagtgtgaagagatcctccacaagatcgtgaagtaccgcttcagctggcccttcagggagcctgtgaccagagatgaggccgaggactactatgatgtgatcacgcaccccatggactttcagacagtgcagaacaaatgttcctgtgggagctaccgctctgtgcaggagtttcttactgacatgaagcaagtgtttaccaatgctgaggtttacaactgccgtggcagccatgtgctaagctgcatggtgaagacagaacagtgtctagtggctctgttgcataaacaccttcctggccacccatatgtccgcaggaagcgcaagaagtttcctgataggcttgctgaagatgaaggggacagtgagccagaggccgttggacagtccaggggacgaagacagaagaagtagagaggcagggccgtggtaagggagctgaggtggggggacagctagggagggtgggagggaggcgagcgaggaagaccaagaacctggaagagatcacagggagtccagaaacgcctgtcatcccaagcttatgctgtttttctaaaagctctttatggggcttgatattgggttggtggtctttgtccagaaatatgaagggacaaagagggccataaccctcccttctgagagtttccaggaggagtccgagggtctagcttttctggtgaagccagttcctgttcctgccttctttcctaagggcctgctcgctctggcttccaccacagtgccaagcccctctggtctccaggggagggattgctgtgttacatagcaggatcggggtaatcaggccaacaggggagatggtggcgatttttcttttttaatctgtatttattatacagtcttgtttctttaagcccatactctgtctcttcccccgtcttcctctcaggtgacagtatcagtgagtgccatacagaattgtgtattcaccagcatcatgaaacagttgtggtcttttgagttgatcttggcagagtaaagggacgtgtcctggagccattcctgaatctccccttctttgtgacagctcctcccacccccccaaaaaataaaaaaaccacaaaaaacaaaaaaacaaaactaaggcacttcacttagagactggagtcctgcttataatcatgcatataacctttactttgatggatctggccagaggggtgttggagcccagcccacccacataccagtcaagctcttaggggagcagaagaaaagcaggaagaatttaaatgtttaattttttttttaaattgacttttctagttattaaaagttgcttgtttcagcagtgatattgtataaagaacatcttgtaagatactcctgacatcttgctttagcacatgtacagtacagtttctatgataatgtgtttgctctaacttccctggcttctccttcagcccatccactctcctctagagcagttgggttggaggctcattgaggcaagcagcaacattggagggggagcagggcagtgctgtgtctgctgcctcccatgcccgttctgacctcagccttggaactcctcaagaacctgaagattccagtggtcagtgtcggtggggggtgggaggagagagcggcagagaagctctgagagccccttcccccacaacaaatctagctctagttgttatatttaggcaaaactttgtagtcttctttcccttttatgatggattttgataaaagtacaaaacagggtttttcttttttatcacctttgaatttggaaattttgagcacccaagctcttctgtacctatttaaagtccaccaaggggactgcagctcctagaacatgagaatcaagcctcttaattttaaactgcggaatgtggcctctgcttcctccgtcctcctgcccaaggacgacgaggattgctccagggctgctgggtagtttaccgtcccttctataggcatggagttggcactgacatcacagcttcataaccccaccaccgccagcttcccctgcctcctacatccagtctgttcttgttcatagtgagaatcctgtgttcccacttcagtgacacctgaattgtttgttgttgttttttttttttattgtcttcaaagaggaagggccccattaaagggtgaacttgtaataaattggaatttcaaataaacctcatgtacttgtgtttataaagaagaaacca

SEQ ID NO: 323404 - DNA, 6687 bp, Homo sapiens
cgttggccgggcccgggggaggaggggaatctcccgccatttttcaataatttcctccggtgctgctgaggaggagtcgtgactgccggccgccgggacccgaagcggaggtcggcggggggctgctgggaggcgcggcggtgtgcgcgggagctctgcgccgtggcgttccgctccatgactgtcgcgcggccgcgccggcggtgagggagccggagttcgcgccgccctctcacccctcccttcccccaccccacccccgggcgcctggcgctcgctccgggccgcggggcctagtgctgcgccgcggggccggccccagcagccgccagtccccaccgccgccgccgcgatggcgccgctcctgggccgcaagcccttcccgctggtgaagccgttgcccggagaggagccgctcttcaccatcccgcacactcaggaggccttccgcacccgggaagagtatgaagcccgcttggaaaggtacagtgagcgcatttggacgtgcaagagtactggaagcagtcagctaacacacaaggaagcctgggaggaagaacaggaagttgctgagcttttgaaggaggagtttcctgcctggtatgagaagcttgttctggaaatggttcaccataacacagcctccttagagaagttagtagatactgcttggttggagatcatgaccaaatatgctgtgggagaagagtgtgacttcgaggttgggaaggagaaaatgctcaaggtgaagattgtgaagattcatcctttggagaaagtggatgaagaggccactgagaagaaatctgatggtgcctgtgattctccatcaagtgacaaagagaactccagtcagattgctcaggaccatcagaagaaggagacagttgtgaaagaggatgaaggaaggagagagagtattaatgacagagcacgtagatcgccacgaaaacttcctacttcattaaaaaaaggagaaaggaaatgggctcctccaaaatttctgcctcacaaatatgatgtgaaactacaaaatgaagataagatcatcagtaacgtgccagcagacagcttgattcgtacagagcgcccaccaaataaggagatagttcgatactttatacggcataatgcattacgagctggtactggtgaaaatgcaccttgggtcgtagaagatgaattggtgaagaaatactctctgcccagcaagttcagtgactttttacttgatccatacaagtatatgactctcaacccttctactaagaggaagaatactggatccccagacaggaagccctcaaagaaatccaagacagacaactcttctcttagttcaccactaaatcctaagttatggtgtcacgtacacttgaagaagtcattgagtggctcgccactcaaagtgaagaactcaaagaattccaaatctcctgaagaacatctagaagaaatgatgaagatgatgtcgcccaataagctgcacactaactttcacattcctaaaaaaggcccacctgccaagaaaccagggaagcacagtgacaagcctttgaaggcaaagggcagaagcaaaggcatcctgaatggacagaaatccacagggaattccaaatctcccaaaaaaggactgaagactcctaaaaccaaaatgaagcagatgactttgttggatatggccaaaggcacgcagaagatgacacgagccccacggaattctgggggtacacctaggacctctagtaaacctcataaacatctgcctcctgcagccctacacctcattgcatactacaaagaaaacaaagacagggaggacaagaggagcgccctgtcctgtgttatctccaaaacagctcgtcttctctctagtgaagatagagctcgtctcccagaagaattgcgaagtcttgttcaaaaacgctatgaacttctagagcacaaaaagaggtgggcttctatgtctgaagaacaacggaaagaatatttgaaaaagaaacgggaggagctgaaaaagaagttgaaggaaaaagccaaagaacgaagagagaaagaaatgcttgagagattagaaaaacagaagcggtatgaggaccaagagttaactggcaaaaaccttccagcattcagattggtggatacccctgaagggctgcccaacacgctgtttggggatgtggccatggtggtggaattcttgagctgttattctgggctacttttaccagatgctcagtatcctattactgctgtgtcccttatggaagccttgagtgcagataagggtggctttttataccttaacagggtgttggtcatcctcttacagaccctcctacaagatgagatagcagaagactatggtgaattgggaatgaagctgtcggaaatccccttgactctgcattctgtttcagagctggtgcggctctgcttgcgcagatctgatgttcaggaggaaagcgagggctcagacacagatgacaataaagattcagctgcatttgaggataatgaggtacaagatgagttcctagaaaagctggagacctctgaattttttgagctgacgtcagaggagaagctacagatcttgacagcactgtgccaccggatcctcatgacatactcagtgcaagaccacatggagaccagacagcagatgtctgcagagttgtggaaggaacggcttgctgtgttgaaggaagaaaatgataagaagagagcagagaaacagaaacggaaagaaatggaagccaaaaataaagaaaatggaaaagttgagaatgggttaggcaaaactgataggaaaaaagaaattgtgaagtttgagccccaagtagatacagaagctgaagacatgattagtgctgtgaagagcagaaggttgcttgccattcaagctaagaaggaacgggaaatccaggaaagagaaatgaaagtgaaactggaacgccaagctgaagaagaacgaatacggaagcacaaagcagctgctgagaaagctttccaggaagggattgccaaggccaaactagtcatgcgcaggactcctattggcacagatcgaaaccataatagatactggctcttctcagatgaagttccaggattattcattgaaaaaggctgggtacatgacagcattgactaccgattcaaccatcactgcaaagaccacacagtctctggtgatgaggattactgtcctcgcagtaagaaagcaaacttaggtaaaaatgcaagcatgaacacacaacatggaacagcaacagaagttgctgtagagacaaccacacccaaacaaggacagaacctatggtttttatgtgatagtcaaaaggagctggatgagttgctaaactgtcttcaccctcagggaataagagaaagtcaacttaaagagagactagagaagaggtaccaggacattattcactctattcatctagcacggaagccaaatttgggtctaaaatcttgtgatggcaaccaggagcttttaaacttccttcgtagtgatctcattgaagttgcaacaaggttacaaaaaggaggacttggatatgtggaagaaacatcagaatttgaagcccgggtcatttcattagagaaattgaaggattttggtgagtgtgtgattgcccttcaggccagtgtcataaagaaatttctccaaggcttcatggctcccaagcaaaagagaagaaaactccaaagtgaagattcagcaaaaactgaggaagtggatgaagagaagaaaatggtagaggaagcaaaggttgcatctgcactggagaaatggaagacagcaatccgggaagctcagactttctccaggatgcacgtgctgcttgggatgcttgatgcctgtatcaagtgggatatgtccgcagaaaatgctaggtgcaaagtttgtcgaaagaaaggtgaggatgacaaattgatcttgtgtgatgagtgtaataaagccttccacctgttttgtctgaggccggccctctatgaagtaccagatggtgagtggcagtgcccagcttgccagcccgctactgccaggcgcaactcccgtggcaggaactatactgaagagtctgcttctgaggacagtgaagatgatgagagtgatgaagaggaggaggaggaagaagaggaggaggaggaagaagattatgaggtggctggtttgcgattgagacctcgaaagaccatccggggcaagcacagcgtcatcccccctgcagcaaggtcaggccggcgcccgggtaagaagccacactctaccaggaggtctcagcccaaggcaccacctgtggatgatgctgaggtggatgagctggtgcttcagaccaagcggagctcccggaggcaaagcctggagctgcagaagtgtgaagagatcctccacaagatcgtgaagtaccgcttcagctggcccttcagggagcctgtgaccagagatgaggccgaggactactatgatgtgatcacgcaccccatggactttcagacagtgcagaacaaatgttcctgtgggagctaccgctctgtgcaggagtttcttactgacatgaagcaagtgtttaccaatgctgaggtttacaactgccgtggcagccatgtgctaagctgcatggtgaagacagaacagtgtctagtggctctgttgcataaacaccttcctggccacccatatgtccgcaggaagcgcaagaagtttcctgataggcttgctgaagatgaaggggacagtgagccagaggccgttggacagtccaggggacgaagacagaagaagtagagaggcagggccgtggtaagggagctgaggtggggggacagctagggagggtgggagggaggcgagcgaggaagaccaagaacctggaagagatcacagggagtccagaaacgcctgtcatcccaagcttatgctgtttttctaaaagctctttatggggcttgatattgggttggtggtctttgtccagaaatatgaagggacaaagagggccataaccctcccttctgagagtttccaggaggagtccgagggtctagcttttctggtgaagccagttcctgttcctgccttctttcctaagggcctgctcgctctggcttccaccacagtgccaagcccctctggtctccaggggagggattgctgtgttacatagcaggatcggggtaatcaggccaacaggggagatggtggcgatttttcttttttaatctgtatttattatacagtcttgtttctttaagcccatactctgtctcttcccccgtcttcctctcaggtgacagtatcagtgagtgccatacagaattgtgtattcaccagcatcatgaaacagttgtggtcttttgagttgatcttggcagagtaaagggacgtgtcctggagccattcctgaatctccccttctttgtgacagctcctcccacccccccaaaaaataaaaaaaccacaaaaaacaaaaaaacaaaactaaggcacttcacttagagactggagtcctgcttataatcatgcatataacctttactttgatggatctggccagaggggtgttggagcccagcccacccacataccagtcaagctcttaggggagcagaagaaaagcaggaagaatttaaatgtttaattttttttttaaattgacttttctagttattaaaagttgcttgtttcagcagtgatattgtataaagaacatcttgtaagatactcctgacatcttgctttagcacatgtacagtacagtttctatgataatgtgtttgctctaacttccctggcttctccttcagcccatccactctcctctagagcagttgggttggaggctcattgaggcaagcagcaacattggagggggagcagggcagtgctgtgtctgctgcctcccatgcccgttctgacctcagccttggaactcctcaagaacctgaagattccagtggtcagtgtcggtggggggtgggaggagagagcggcagagaagctctgagagccccttcccccacaacaaatctagctctagttgttatatttaggcaaaactttgtagtcttctttcccttttatgatggattttgataaaagtacaaaacagggtttttcttttttatcacctttgaatttggaaattttgagcacccaagctcttctgtacctatttaaagtccaccaaggggactgcagctcctagaacatgagaatcaagcctcttaattttaaactgcggaatgtggcctctgcttcctccgtcctcctgcccaaggacgacgaggattgctccagggctgctgggtagtttaccgtcccttctataggcatggagttggcactgacatcacagcttcataaccccaccaccgccagcttcccctgcctcctacatccagtctgttcttgttcatagtgagaatcctgtgttcccacttcagtgacacctgaattgtttgttgttgttttttttttttattgtcttcaaagaggaagggccccattaaagggtgaacttgtaataaattggaatttcaaataaacctcatgtacttgtgtttataaagaagaaaccaaaaaaaaagggggggggctaaaatactgggggccaagttagggtccaggtttgtcccagggccaaggggcggaaaaagaggaggggggta

SEQ ID NO: 323405 - DNA, 4280 bp, Homo sapiens
gcaatgagtgtgaagactgaacttaacattttcataattaatccggacgagactggtcatagatagggccatccctgtagatgatggcactaatagtttttcaccaggtaagtcccaagtaaagagaataaacagtaagatctttcaaggttctaggaagagacagatgacaataaagattcagctgcatttgaggataatgaggtacaagatgagttcctagaaaagctggagacctctgaattttttgagctgacgtcagaggagaagctacagatcttgacagcactgtgccaccggatcctcatgacatactcagtgcaagaccacatggagaccagacagcagatgtctgcagagttgtggaaggaacggcttgctgtgttgaaggaagaaaatgataagaagagagcagagaaacagaaacggaaagaaatggaagccaaaaataaagaaaatggaaaagttgagaatgggttaggcaaaactgataggaaaaaagaaattgtgaagtttgagccccaagtagatacagaagctgaagacatgattagtgctgtgaagagcagaaggttgcttgccattcaagctaagaaggaacgggaaatccaggaaagagaaatgaaagtgaaactggaacgccaagctgaagaagaacgaatacggaagcacaaagcagctgctgagaaagctttccaggaagggattgccaaggccaaactagtcatgcgcaggactcctattggcacagatcgaaaccataatagatactggctcttctcagatgaagttccaggattattcattgaaaaaggctgggtacatgacagcattgactaccgattcaaccatcactgcaaagaccacacagtctctggtgatgaggattactgtcctcgcagtaagaaagcaaacttaggtaaaaatgcaagcatgaacacacaacatggaacagcaacagaagttgctgtagagacaaccacacccaaacaaggacagaacctatggtttttatgtgatagtcaaaaggagctggatgagttgctaaactgtcttcaccctcagggaataagagaaagtcaacttaaagagagactagagaagaggtaccaggacattattcactctattcatctagcacggaagccaaatttgggtctaaaatcttgtgatggcaaccaggagcttttaaacttccttcgtagtgatctcattgaagttgcaacaaggttacaaaaaggaggacttggatatgtggaagaaacatcagaatttgaagcccgggtcatttcattagagaaattgaaggattttggtgagtgtgtgattgcccttcaggccagtgtcataaagaaatttctccaaggcttcatggctcccaagcaaaagagaagaaaactccaaagtgaagattcagcaaaaactgaggaagtggatgaagagaagaaaatggtagaggaagcaaaggttgcatctgcactggagaaatggaagacagcaatccgggaagctcagactttctccaggatgcacgtgctgcttgggatgcttgatgcctgtatcaagtgggatatgtccgcagaaaatgctaggtgcaaagtttgtcgaaagaaaggtgaggatgacaaattgatcttgtgtgatgagtgtaataaagccttccacctgttttgtctgaggccggccctctatgaagtaccagatggtgagtggcagtgcccagcttgccagcccgctactgccaggcgcaactcccgtggcaggaactatactgaagagtctgcttctgaggacagtgaagatgatgagagtgatgaagaggaggaggaggaagaagaggaggaggaggaagaagattatgaggtggctggtttgcgattgagacctcgaaagaccatccggggcaagcacagcgtcatcccccctgcagcaaggtcaggccggcgcccgggtaagaagccacactctaccaggaggtctcagcccaaggcaccacctgtggatgatgctgaggtggatgagctggtgcttcagaccaagcggagctcccggaggcaaagcctggagctgcagaagtgtgaagagatcctccacaagatcgtgaagtaccgcttcagctggcccttcagggagcctgtgaccagagatgaggccgaggactactatgatgtgatcacgcaccccatggactttcagacagtgcagaacaaatgttcctgtgggagctaccgctctgtgcaggagtttcttactgacatgaagcaagtgtttaccaatgctgaggtttacaactgccgtggcagccatgtgctaagctgcatggtgaagacagaacagtgtctagtggctctgttgcataaacaccttcctggccacccatatgtccgcaggaagcgcaagaagtttcctgataggcttgctgaagatgaaggggacagtgagccagaggccgttggacagtccaggggacgaagacagaagaagtagagaggcagggccgtggtaagggagctgaggtggggggacagctagggagggtgggagggaggcgagcgaggaagaccaagaacctggaagagatcacagggagtccagaaacgcctgtcatcccaagcttatgctgtttttctaaaagctctttatggggcttgatattgggttggtggtctttgtccagaaatatgaagggacaaagagggccataaccctcccttctgagagtttccaggaggagtccgagggtctagcttttctggtgaagccagttcctgttcctgccttctttcctaagggcctgctcgctctggcttccaccacagtgccaagcccctctggtctccaggggagggattgctgtgttacatagcaggatcggggtaatcaggccaacaggggagatggtggcgatttttcttttttaatctgtatttattatacagtcttgtttctttaagcccatactctgtctcttcccccgtcttcctctcaggtgacagtatcagtgagtgccatacagaattgtgtattcaccagcatcatgaaacagttgtggtcttttgagttgatcttggcagagtaaagggacgtgtcctggagccattcctgaatctccccttctttgtgacagctcctcccacccccccaaaaaataaaaaaaccacaaaaaacaaaaaaacaaaactaaggcacttcacttagagactggagtcctgcttataatcatgcatataacctttactttgatggatctggccagaggggtgttggagcccagcccacccacataccagtcaagctcttaggggagcagaagaaaagcaggaagaatttaaatgtttaattttttttttaaattgacttttctagttattaaaagttgcttgtttcagcagtgatattgtataaagaacatcttgtaagatactcctgacatcttgctttagcacatgtacagtacagtttctatgataatgtgtttgctctaacttccctggcttctccttcagcccatccactctcctctagagcagttgggttggaggctcattgaggcaagcagcaacattggagggggagcagggcagtgctgtgtctgctgcctcccatgcccgttctgacctcagccttggaactcctcaagaacctgaagattccagtggtcagtgtcggtggggggtgggaggagagagcggcagagaagctctgagagccccttcccccacaacaaatctagctctagttgttatatttaggcaaaactttgtagtcttctttcccttttatgatggattttgataaaagtacaaaacagggtttttcttttttatcacctttgaatttggaaattttgagcacccaagctcttctgtacctatttaaagtccaccaaggggactgcagctcctagaacatgagaatcaagcctcttaattttaaactgcggaatgtggcctctgcttcctccgtcctcctgcccaaggacgacgaggattgctccagggctgctgggtagtttaccgtcccttctataggcatggagttggcactgacatcacagcttcataaccccaccaccgccagcttcccctgcctcctacatccagtctgttcttgttcatagtgagaatcctgtgttcccacttcagtgacacctgaattgtttgttgttgttttttttttttattgtcttcaaagaggaagggccccattaaagggtgaacttgtaataaattggaatttcaaataaacctcatgtacttgtgtttataaagaagaaacca

SEQ ID NO: 323406 - DNA, 5970 bp, Homo sapiens
cgttggccgggcccgggggaggaggggaatctcccgccatttttcaataatttcctccggtgctgctgaggaggagtcgtgactgccggccgccgggacccgaagcggaggtcggcggggggctgctgggaggcgcggcggtgtgcgcgggagctctgcgccgtggcgttccgctccatgactgtcgcgcggccgcgccggcggtgagggagccggagttcgcgccgccctctcacccctcccttcccccaccccacccccgggcgcctggcgctcgctccgggccgcggggcctagtgctgcgccgcggggccggccccagcagccgccagtccccaccgccgccgccgcgatggcgccgctcctgggccgcaagcccttcccgctggtgaagccgttgcccggagaggagccgctcttcaccatcccgcacactcaggaggccttccgcacccgggaagagtatgaagcccgcttggaaaggtacagtgagcgcatttggacgtgcaagagtactggaagcagtcagctaacacacaaggaagcctgggaggaagaacaggaagttgctgagcttttgaaggaggagtttcctgcctggtatgagaagcttgttctggaaatggttcaccataacacagcctccttagagaagttagtagatactgcttggttggagatcatgaccaaatatgctgtgggagaagagtgtgacttcgaggttgggaaggagaaaatgctcaaggtgaagattgtgaagattcatcctttggagaaagtggatgaagaggccactgagaagaaatctgatggtgcctgtgattctccatcaagtgacaaagagaactccagtcagattgctcaggaccatcagaagaaggagacagttgtgaaagaggatgaaggaaggagagagagtattaatgacagagcacgtagatcgccacgaaaacttcctacttcattaaaaaaaggagaaaggaaatgggctcctccaaaatttctgcctcacaaatatgatgtgaaactacaaaatgaagataagatcatcagtaacgtgccagcagacagcttgattcgtacagagcgcccaccaaataaggagatagttcgatactttatacggcataatgcattacgagctggtactggtgaaaatgcaccttgggtcgtagaagatgaattggtgaagaaatactctctgcccagcaagttcagtgactttttacttgatccatacaagtatatgactctcaacccttctactaagaggaagaatactggatccccagacaggaagccctcaaagaaatccaagacagacaactcttctcttagttcaccactaaatcctaagttatggtgtcacgtacacttgaagaagtcattgagtggctcgccactcaaagtgaagaactcaaagaattccaaatctcctgaagaacatctagaagaaatgatgaagatgatgtcgcccaataagctgcacactaactttcacattcctaaaaaaggcccacctgccaagaaaccagggaagcacagtgacaagcctttgaaggcaaagggcagaagcaaaggcatcctgaatggacagaaatccacagggaattccaaatctcccaaaaaaggactgaagactcctaaaaccaaaatgaagcagatgactttgttggatatggccaaaggcacgcagaagatgacacgagccccacggaattctgggggtacacctaggacctctagtaaacctcataaacatctgcctcctgcagccctacacctcattgcatactacaaagaaaacaaagacagggaggacaagaggagcgccctgtcctgtgttatctccaaaacagctcgtcttctctctagtgaagatagagctcgtctcccagaagaattgcgaagtcttgttcaaaaacgctatgaacttctagagcacaaaaagaggtgggcttctatgtctgaagaacaacggaaagaatatttgaaaaagaaacgggaggagctgaaaaagaagttgaaggaaaaagccaaagaacgaagagagaaagaaatgcttgagagattagaaaaacagaagcggtatgaggaccaagagttaactggcaaaaaccttccagcattcagattggtggatacccctgaagggctgcccaacacgctgtttggggatgtggccatggtggtggaattcttgagctgttattctgggctacttttaccagatgctcagtatcctattactgctgtgtcccttatggaagccttgagtgcagataagggtggctttttataccttaacagggtgttggtcatcctcttacagaccctcctacaagatgagatagcagaagactatggtgaattgggaatgaagctgtcggaaatccccttgactctgcattctgtttcagagctggtgcggctctgcttgcgcagatctgatgttcaggaggaaagcgagggctcagacacagatgacaataaagattcagctgcatttgaggataatgaggtacaagatgagttcctagaaaagctggagacctctgaattttttgagctgacgtcagaggagaagctacagatcttgacagcactgtgccaccggatcctcatgacatactcagtgcaagaccacatggagaccagacagcagatgtctgcagagttgtggaaggaacggcttgctgtgttgaaggaagaaaatgataagaagagagcagagaaacagaaacggaaagaaatggaagccaaaaataaagaaaatggaaaagttgagaatgggttaggcaaaactgataggaaaaaagaaattgtgaagtttgagccccaagtagatacagaagctgaagacatgattagtgctgtgaagagcagaaggttgcttgccattcaagctaagaaggaacgggaaatccaggaaagagaaatgaaagtgaaactggaacgccaagctgaagaagaacgaatacggaagcacaaagcagctgctgagaaagctttccaggaagggattgccaaggccaaactagtcatgcgcaggactcctattggcacagatcgaaaccataatagatactggctcttctcagatgaagttccaggattattcattgaaaaaggctgggtacatgacagcattgactaccgattcaaccatcactgcaaagaccacacagtctctggtgatgaggattactgtcctcgcagtaagaaagcaaacttaggtaaaaatgcaagcatgaacacacaacatggaacagcaacagaagttgctgtagagacaaccacacccaaacaaggacagaacctatggtttttatgtgatagtcaaaaggagctggatgagttgctaaactgtcttcaccctcagggaataagagaaagtcaacttaaagagagactagagaagaggtaccaggacattattcactctattcatctagcacggaagccaaatttgggtctaaaatcttgtgatggcaaccaggagcttttaaacttccttcgtagtgatctcattgaagttgcaacaaggttacaaaaaggaggacttggatatgtggaagaaacatcagaatttgaagcccgggtcatttcattagagaaattgaaggattttggtgagtgtgtgattgcccttcaggccagtgtcataaagaaatttctccaaggcttcatggctcccaagcaaaagagaagaaaactccaaagtgaagattcagcaaaaactgaggaagtggatgaagagaagaaaatggtagaggaagcaaaggttgcatctgcactggagaaatggaagacagcaatccgggaagctcagactttctccaggatgcacgtgctgcttgggatgcttgatgcctgtatcaagtgggatatgtccgcagaaaatgctaggtgcaaagtttgtcgaaagaaaggtgaggatgacaaattgatcttgtgtgatgagtgtaataaagccttccacctgttttgtctgaggccggccctctatgaagtaccagatggtgagtggcagtgcccagcttgccagcccgctactgccaggcgcaactcccgtggcaggaactatactgaagagtctgcttctgaggacagtgaagatgatgagagtgatgaagaggaggaggaggaagaagaggaggaggaggaagaagattatgaggtggctggtttgcgattgagacctcgaaagaccatccggggcaagcacagcgtcatcccccctgcagcaaggtcaggccggcgcccgggtaagaagccacactctaccaggaggtctcagcccaaggcaccacctgtggatgatgctgaggtggatgagctggtgcttcagaccaagcggagctcccggaggcaaagcctggagctgcagaagtgtgaagagatcctccacaagatcgtgaagtaccgcttcagctggcccttcagggagcctgtgaccagagatgaggccgaggactactatgatgtgatcacgcaccccatggactttcagacagtgcagaacaaatgttcctgtgggagctaccgctctgtgcaggagtttcttactgacatgaagcaagtgtttaccaatgctgaggtttacaactgccgtggcagccatgtgctaagctgcatggtgaagacagaacagtgtctagtggctctgttgcataaacaccttcctggccacccatatgtccgcaggaagcgcaagaagtttcctgataggcttgctgaagatgaaggggacagtgagccagaggccgttggacagtccaggggacgaagacagaagaagtagagaggcagggccgtggtaagggagctgaggtggggggacagctagggagggtgggagggaggcgagcgaggaagaccaagaacctggaagagatcacagggagtccagaaacgcctgtcatcccaagcttatgctgtttttctaaaagctctttatggggcttgatattgggttggtggtctttgtccagaaatatgaagggacaaagagggccataaccctcccttctgagagtttccaggaggagtccgagggtctagcttttctggtgaagccagttcctgttcctgccttctttcctaagggcctgctcgctctggcttccaccacagtgccaagcccctctggtctccaggggagggattgctgtgttacatagcaggatcggggtaatcaggccaacaggggagatggtggcgatttttcttttttaatctgtatttattatacagtcttgtttctttaagcccatactctgtctcttcccccgtcttcctctcaggtgacagtatcagtgagtgccatacagaattgtgtattcaccagcatcatgaaacagttgtggtcttttgagttgatcttggcagagtaaagggacgtgtcctggagccattcctgaatctccccttctttgtgacagctcctcccacccccccaaaaaataaaaaaaccacaaaaaacaaaaaaacaaaactaaggcacttcacttagagactggagtcctgcttataatcatgcatataacctttactttgatggatctggccagaggggtgttggagcccagcccacccacataccagtcaagctcttaggggagcagaagaaaagcaggaagaatttaaatgtttaattttttttttaaattgacttttctagttattaaaagttgcttgtttcagcagtgatattgtataaagaacatcttgtaagatactcctgacatcttgctttagccaccgccagcttcccctgcctcctacatccagtctgttcttgttcatagtgagaatcctgtgttcccacttcagtgacacctgaattgtttgttgttgttttttttttttattgtcttcaaagaggaagggccccattaaagggtgaacttgtaataaattggaatttcaaataaacctcatgtacttgtgtttataaagaagaaacca

SEQ ID NO: 323407 - DNA, 5474 bp, Homo sapiens
cgttggccgggcccgggggaggaggggaatctcccgccatttttcaataatttcctccggtgctgctgaggaggagtcgtgactgccggccgccgggacccgaagcggaggtcggcggggggctgctgggaggcgcggcggtgtgcgcgggagctctgcgccgtggcgttccgctccatgactgtcgcgcggccgcgccggcggtgagggagccggagttcgcgccgccctctcacccctcccttcccccaccccacccccgggcgcctggcgctcgctccgggccgcggggcctagtgctgcgccgcggggccggccccagcagccgccagtccccaccgccgccgccgcgatggcgccgctcctgggccgcaagcccttcccgctggtgaagccgttgcccggagaggagccgctcttcaccatcccgcacactcaggaggccttccgcacccgggaagagtatgaagcccgcttggaaaggtacagtgagcgcatttggacgtgcaagagtactggaagcagtcagctaacacacaaggaagcctgggaggaagaacaggaagttgctgagcttttgaaggaggagtttcctgcctggtatgagaagcttgttctggaaatggttcaccataacacagcctccttagagaagttagtagatactgcttggttggagatcatgaccaaatatgctgtgggagaagagtgtgacttcgaggttgggaaggagaaaatgctcaaggtgaagattgtgaagattcatcctttggagaaagtggatgaagaggccactgagaagaaatctgatggtgcctgtgattctccatcaagtgacaaagagaactccagtcagattgctcaggaccatcagaagaaggagacagttgtgaaagaggatgaaggaaggagagagagtattaatgacagagcacgtagatcgccacgaaaacttcctacttcattaaaaaaaggagaaaggaaatgggctcctccaaaatttctgcctcacaaatatgatgtgaaactacaaaatgaagataagatcatcagtaacgtgccagcagacagcttgattcgtacagagcgcccaccaaataaggagatagttcgatactttatacggcataatgcattacgagctggtactggtgaaaatgcaccttgggtcgtagaagatgaattggtgaagaaatactctctgcccagcaagttcagtgactttttacttgatccatacaagtatatgactctcaacccttctactaagaggaagaatactggatccccagacaggaagccctcaaagaaatccaagacagacaactcttctcttagttcaccactaaatcctaagttatggtgtcacgtacacttgaagaagtcattgagtggctcgccactcaaagtgaagaactcaaagaattccaaatctcctgaagaacatctagaagaaatgatgaagatgatgtcgcccaataagctgcacactaactttcacattcctaaaaaaggcccacctgccaagaaaccagggaagcacagtgacaagcctttgaaggcaaagggcagaagcaaaggcatcctgaatggacagaaatccacagggaattccaaatctcccaaaaaaggactgaagactcctaaaaccaaaatgaagcagatgactttgttggatatggccaaaggcacgcagaagatgacacgagccccacggaattctgggggtacacctaggacctctagtaaacctcataaacatctgcctcctgcagccctacacctcattgcatactacaaagaaaacaaagacagggaggacaagaggagcgccctgtcctgtgttatctccaaaacagctcgtcttctctctagtgaagatagagctcgtctcccagaagaattgcgaagtcttgttcaaaaacgctatgaacttctagagcacaaaaagaggtgggcttctatgtctgaagaacaacggaaagaatatttgaaaaagaaacgggaggagctgaaaaagaagttgaaggaaaaagccaaagaacgaagagagaaagaaatgcttgagagattagaaaaacagaagcggtatgaggaccaagagttaactggcaaaaaccttccagcattcagattggtggatacccctgaagggctgcccaacacgctgtttggggatgtggccatggtggtggaattcttgagctgttattctgggctacttttaccagatgctcagtatcctattactgctgtgtcccttatggaagccttgagtgcagataagggtggctttttataccttaacagggtgttggtcatcctcttacagaccctcctacaagatgagatagcagaagactatggtgaattgggaatgaagctgtcggaaatccccttgactctgcattctgtttcagagctggtgcggctctgcttgcgcagatctgatgttcaggaggaaagcgagggctcagacacagatgacaataaagattcagctgcatttgaggataatgaggtacaagatgagttcctagaaaagctggagacctctgaattttttgagctgacgtcagaggagaagctacagatcttgacagcactgtgccaccggatcctcatgacatactcagtgcaagaccacatggagaccagacagcagatgtctgcagagttgtggaaggaacggcttgctgtgttgaaggaagaaaatgataagaagagagcagagaaacagaaacggaaagaaatggaagccaaaaataaagaaaatggaaaagttgagaatgggttaggcaaaactgataggaaaaaagaaattgtgaagtttgagccccaagtagatacagaagctgaagacatgattagtgctgtgaagagcagaaggttgcttgccattcaagctaagaaggaacgggaaatccaggaaagagaaatgaaagtgaaactggaacgccaagctgaagaagaacgaatacggaagcacaaagcagctgctgagaaagctttccaggaagggattgccaaggccaaactagtcatgcgcaggactcctattggcacagatcgaaaccataatagatactggctcttctcagatgaagttccaggattattcattgaaaaaggctgggtacatgacagcattgactaccgattcaaccatcactgcaaagaccacacagtctctggtgatgaggattactgtcctcgcagtaagaaagcaaacttaggtaaaaatgcaagcatgaacacacaacatggaacagcaacagaagttgctgtagagacaaccacacccaaacaaggacagaacctatggtttttatgtgatagtcaaaaggagctggatgagttgctaaactgtcttcaccctcagggaataagagaaagtcaacttaaagagagactagagaagaggtaccaggacattattcactctattcatctagcacggaagccaaatttgggtctaaaatcttgtgatggcaaccaggagcttttaaacttccttcgtagtgatctcattgaagttgcaacaaggttacaaaaaggaggacttggatatgtggaagaaacatcagaatttgaagcccgggtcatttcattagagaaattgaaggattttggtgagtgtgtgattgcccttcaggccagtgtcataaagaaatttctccaaggcttcatggctcccaagcaaaagagaagaaaactccaaagtgaagattcagcaaaaactgaggaagtggatgaagagaagaaaatggtagaggaagcaaaggttgcatctgcactggagaaatggaagacagcaatccgggaagctcagactttctccaggatgcacgtgctgcttgggatgcttgatgcctgtatcaagtgggatatgtccgcagaaaatgctaggtgcaaagtttgtcgaaagaaaggtgaggatgacaaattgatcttgtgtgatgagtgtaataaagccttccacctgttttgtctgaggccggccctctatgaagtaccagatggtgagtggcagtgcccagcttgccagcccgctactgccaggcgcaactcccgtggcaggaactatactgaagagtctgcttctgaggacagtgaagatgatgagagtgatgaagaggaggaggaggaagaagaggaggaggaggaagaagattatgaggtggctggtttgcgattgagacctcgaaagaccatccggggcaagcacagcgtcatcccccctgcagcaaggtcaggccggcgcccgggtaagaagccacactctaccaggaggtctcagcccaaggcaccacctgtggatgatgctgaggtggatgagctggtgcttcagaccaagcggagctcccggaggcaaagcctggagctgcagaagtgtgaagagatcctccacaagatcgtgaagtaccgcttcagctggcccttcagggagcctgtgaccagagatgaggccgaggactactatgatgtgatcacgcaccccatggactttcagacagtgcagaacaaatgttcctgtgggagctaccgctctgtgcaggagtttcttactgacatgaagcaagtgtttaccaatgctgaggtttacaactgccgtggcagccatgtgctaagctgcatggtgaagacagaacagtgtctagtggctctgttgcataaacaccttcctggccacccatatgtccgcaggaagcgcaagaagtttcctgataggcttgctgaagatgaaggggacagtgagccagaggccgttggacagtccaggggacgaagacagaagaagtagagaggcagggccgtggtaagggagctgaggtggggggacagctagggagggtgggagggaggcgagcgaggaagaccaagaacctggaagagatcacagggagtccagaaacgcctgtcatcccaagcttatgctgtttttctaaaagctctttatggggcttgatattgggttggtggtctttgtccagaaatatgaagggacaaagagggccataaccctcccttctgagagtttccaggaggagtccgagggtctagcttttctggtgaagccagttcctgttcctgccttctttcctaagggcctgctcgctctggcttccaccacagtgccaagcccctctggtctccaggggagggattgctgtgttacatagcaggatcggggtaatcaggccaacaggggagatggtggcgatttttcttttttaatctgtatttattatacagtcttgtttctttaagcccatactctgtctcttcccccgtcttcctctcaggtgacagtatcagtgagtgccatacagaattgtgtattcaccagcatcatgaaacagttgtggtcttttgagttgatcttggcagagtaaagggacgtgtcctggagccattccaggatcgtgcacgcgactgggcagatcacagggatacatcatagagacagccag

SEQ ID NO: 323408 - DNA, 3972 bp, Homo sapiens
cgttggccgggcccgggggaggaggggaatctcccgccatttttcaataatttcctccggtgctgctgaggaggagtcgtgactgccggccgccgggacccgaagcggaggtcggcggggggctgctgggaggcgcggcggtgtgcgcgggagctctgcgccgtggcgttccgctccatgactgtcgcgcggccgcgccggcggtgagggagccggagttcgcgccgccctctcacccctcccttcccccaccccacccccgggcgcctggcgctcgctccgggccgcggggcctagtgctgcgccgcggggccggccccagcagccgccagtccccaccgccgccgccgcgatggcgccgctcctgggccgcaagcccttcccgctggtgaagccgttgcccggagaggagccgctcttcaccatcccgcacactcaggaggccttccgcacccgggaagagtatgaagcccgcttggaaaggtacagtgagcgcatttggacgtgcaagagtactggaagcagtcagctaacacacaaggaagcctgggaggaagaacaggaagttgctgagcttttgaaggaggagtttcctgcctggtatgagaagcttgttctggaaatggttcaccataacacagcctccttagagaagttagtagatactgcttggttggagatcatgaccaaatatgctgtgggagaagagtgtgacttcgaggttgggaaggagaaaatgctcaaggtgaagattgtgaagattcatcctttggagaaagtggatgaagaggccactgagaagaaatctgatggtgcctgtgattctccatcaagtgacaaagagaactccagtcagattgctcaggaccatcagaagaaggagacagttgtgaaagaggatgaaggaaggagagagagtattaatgacagagcacgtagatcgccacgaaaacttcctacttcattaaaaaaaggagaaaggaaatgggctcctccaaaatttctgcctcacaaatatgatgtgaaactacaaaatgaagataagatcatcagtaacgtgccagcagacagcttgattcgtacagagcgcccaccaaataaggagatagttcgatactttatacggcataatgcattacgagctggtactggtgaaaatgcaccttgggtcgtagaagatgaattggtgaagaaatactctctgcccagcaagttcagtgactttttacttgatccatacaagtatatgactctcaacccttctactaagaggaagaatactggatccccagacaggaagccctcaaagaaatccaagacagacaactcttctcttagttcaccactaaatcctaagttatggtgtcacgtacacttgaagaagtcattgagtggctcgccactcaaagtgaagaactcaaagaattccaaatctcctgaagaacatctagaagaaatgatgaagatgatgtcgcccaataagctgcacactaactttcacattcctaaaaaaggcccacctgccaagaaaccagggaagcacagtgacaagcctttgaaggcaaagggcagaagcaaaggcatcctgaatggacagaaatccacagggaattccaaatctcccaaaaaaggactgaagactcctaaaaccaaaatgaagcagatgactttgttggatatggccaaaggcacgcagaagatgacacgagccccacggaattctgggggtacacctaggacctctagtaaacctcataaacatctgcctcctgcagccctacacctcattgcatactacaaagaaaacaaagacagggaggacaagaggagcgccctgtcctgtgttatctccaaaacagctcgtcttctctctagtgaagatagagctcgtctcccagaagaattgcgaagtcttgttcaaaaacgctatgaacttctagagcacaaaaagaggtgggcttctatgtctgaagaacaacggaaagaatatttgaaaaagaaacgggaggagctgaaaaagaagttgaaggaaaaagccaaagaacgaagagagaaagaaatgcttgagagattagaaaaacagaagcggtatgaggaccaagagttaactggcaaaaaccttccagcattcagattggtggatacccctgaagggctgcccaacacgctgtttggggatgtggccatggtggtggaattcttgagctgttattctgggctacttttaccagatgctcagtatcctattactgctgtgtcccttatggaagccttgagtgcagataagggtggctttttataccttaacagggtgttggtcatcctcttacagaccctcctacaagatgagatagcagaagactatggtgaattgggaatgaagctgtcggaaatccccttgactctgcattctgtttcagagctggtgcggctctgcttgcgcagatctgatgttcaggaggaaagcgagggctcagacacagatgacaataaagattcagctgcatttgaggataatgaggtacaagatgagttcctagaaaagctggagacctctgaattttttgagctgacgtcagaggagaagctacagatcttgacagcactgtgccaccggatcctcatgacatactcagtgcaagaccacatggagaccagacagcagatgtctgcagagttgtggaaggaacggcttgctgtgttgaaggaagaaaatgataagaagagagcagagaaacagaaacggaaagaaatggaagccaaaaataaagaaaatggaaaagttgagaatgggttaggcaaaactgataggaaaaaagaaattgtgaagtttgagccccaagtagatacagaagctgaagacatgattagtgctgtgaagagcagaaggttgcttgccattcaagctaagaaggaacgggaaatccaggaaagagaaatgaaagtgaaactggaacgccaagctgaagaagaacgaatacggaagcacaaagcagctgctgagaaagctttccaggaagggattgccaaggccaaactagtcatgcgcaggactcctattggcacagatcgaaaccataatagatactggctcttctcagatgaagttccaggattattcattgaaaaaggctgggtacatgacagcattgactaccgattcaaccatcactgcaaagaccacacagtctctggtgatgaggattactgtcctcgcagtaagaaagcaaacttaggtaaaaatgcaagcatgaacacacaacatggaacagcaacagaagttgctgtagagacaaccacacccaaacaaggacagaacctatggtttttatgtgatagtcaaaaggagctggatgagttgctaaactgtcttcaccctcagggaataagagaaagtcaacttaaagagagactagagaagaggtaccaggacattattcactctattcatctagcacggaagccaaatttgggtctaaaatcttgtgatggcaaccaggagcttttaaacttccttcgtagtgatctcattgaagttgcaacaaggttacaaaaaggaggacttggatatgtggaagaaacatcagaatttgaagcccgggtcatttcattagagaaattgaaggattttggtgagtgtgtgattgcccttcaggccagtgtcataaagaaatttctccaaggcttcatggctcccaagcaaaagagaagaaaactccaaagtgaagattcagcaaaaactgaggaagtggatgaagagaagaaaatggtagaggaagcaaagaaagaaaaagatgaagaaaggaagaagaataaggaagaagaagaaagagaagaaagaagaagaaaaggaagaagaggaagaaagaagaaggaagaagaagaaaggaagaactaagaagaagaagaggaaagaagaagaaaaagaagatagaagatggaagaagaaagaaaagaaagaagaataagaag

SEQ ID NO: 323409 - DNA, 599 bp, Homo sapiens
  misc_feature (8)..(8): n is a, c, g, or t
ggcgtggngaatcggcacgagggcaggatcaaggtgaaaaggagaaccccatgcgggaacttcgcatccgcaaactctgtctcaacatctgtgttggggagagtggagacagactgacgcgagcagccaaggtgttggagcagctcacagggcagacccctgtgttttccaaagctagatacactgtcagatcctttggcatccggagaaatgaaaagattgctgtccactgcacagttcgaggggccaaggcagaagaaatcttggagaagggtctaaaggtgcgggagtatgagttaagaaaaaacaacttctcagatactggaaactttggttttgggatccaggaacacatcgatctgggtatcaaatatgacccaagcattggtatctacggcctggacttctatgtggtgctgggtaggccaggtttcagcatcgcagacaagaagcgcaggacaggctgcattggggccaaacacagaatcagcaaagaggaggccatgcgctggttccagcagaagtatgatgggatcatccttcctggcaaataaattcccgtttctatccaaaagagcaataaaaagttttcagtgaaa

SEQ ID NO: 323410 - DNA, 994 bp, Homo sapiens
  misc_feature (18)..(20): n is a, c, g, or t
atccttaattaaattatnnncccccccccccgctcttcctgctctccatcatggcgcaggatcaaggtgaaaaggagaaccccatgcgggaacttcgcatccgcaaactctgtctcaacatctgtgttggggagagtggagacagactgacgcgagcagccaaggtgttggagcagctcacagggcagacccctgtgttttccaaagctagatacactgtcagatcctttggcatccggagaaatgaaaagattgctgtccactgcacagttcgaggggccaaggcagaagaaatcttggagaagggtctaaaggtgcgggagtatgagttaagaaaaaacaacttctcagatactggaaactttggttttgggatccaggaacacatcgatctgggtatcaaatatgacccaagcattggtatctacggcctggacttctatgtggtgctgggtaggccaggtttcagcatcgcagacaagaagcgcaggacaggctgcattggggccaaacacagaatcagcaaagaggaggccatgcgctggttccagcagaagtatgatgggatcatccttcctggcaaataaattcccgtttctatccaaaagagcaataaaaagttttcagtgaaaaaaaaaaaaaaaaaaactccggggcttttttttgggggggggaaaaaagggtataaagggcaggggcatgggtttcggaccccgttttcgggtcacagggggtacatcgccgggtcccgcaaaagagaagccggcataattgcaaaaggcagttacctgctagattgtgcgccgaaacgaacgacgaagcacaagacaacacagaacagaacaaccaacacgcaagacagcagaagcaaagcagaacacagacaagagcaaaggacagagaagcaagaacacaggaacacgacgagcagagacagagagaagagacgagcgcaagacacacaaacacgcatcaacacatcaggcgcaaaatg

SEQ ID NO: 323411 - DNA, 592 bp, Homo sapiens
atcatggcgcaggagtgtggtcgtatgtggaggtcgcttgtcgttgatggtagaggcggcccgcaaactctgtctcaacatctgtgttggggagagtggagacagactgacgcgagcagccaaggtgttggagcagctcacagggcagacccctgtgttttccaaagctagatacactgtcagatcctttggcatccggagaaatgaaaagattgctgtccactgcacagttcgaggggccaaggcagaagaaatcttggagaagggtctaaaggtgcgggagtatgagttaagaaaaaacaacttctcagatactggaaactttggttttgggatccaggaacacatcgatctgggtatcaaatatgacccaagcattggtatctacggcctggacttctatgtggtgctgggtaggccaggtttcagcatcgcagacaagaagcgcaggacaggctgcattggggccaaacacagaatcagcaaagaggaggccatgcgctggttccagcagaagtatgatgggatcatccttcctggcaaataaattcccgtttctatccaaaagagcaataaaaagttttcagtgaaa

SEQ ID NO: 323412 - DNA, 632 bp, Homo sapiens
  misc_feature (18)..(20): n is a, c, g, or t
atccttaattaaattatnnncccccccccccgctcttcctgctctccatcatggcgcaggatcaaggtgaaaaggagaaccccatgcgggaacttcgcatccgcaaactctgtctcaacatctgtgttggggagagtggagacagactgacgcgagcagccaaggtgttggagcagctcacagggcagacccctgtgttttccaaagctagatacactgtcagatcctttggcatccggagaaatgaaaagattgctgtccactgcacagttcgaggggccaaggcagaagaaatcttggagaagggtctaaaggtgcgggagtatgagttaagaaaaaacaacttctcagatactggaaactttggttttgggatccaggaacacatcgatctgggtatcaaatatgacccaagcattggtatctacggcctggacttctatgtggtgctgggtaggccaggtttcagcatcgcagacaagaagcgcaggacaggctgcattggggccaaacacagaatcagcaaagaggaggccatgcgctggttccagcagaagtatgatgggatcatccttcctggcaaataaattcccgtttctatccaaaagagcaataaaaagttttcagtgaaa

SEQ ID NO: 323413 - DNA, 628 bp, Homo sapiens
taaggccctcggccggaagctccgctttctcttcctgctctccatcatggcgcaggatcaaggtgaaaaggagaaccccatgcgggaacttcgcatccgcaaactctgtctcaacatctgtgttggggagagtggagacagactgacgcgagcagccaaggtgttggagcagctcacagggcagacccctgtgttttccaaagctagatacactgtcagatcctttggcatccggagaaatgaaaagattgctgtccactgcacagttcgaggggccaaggcagaagaaatcttggagaagggtctaaaggtgcgggagtatgagttaagaaaaaacaacttctcagatactggaaactttggttttgggatccaggaacacatcgatctgggtatcaaatatgacccaagcattggtatctacggcctggacttctatgtggtgctgggtaggccaggtttcagcatcgcagacaagaagcgcaggacaggctgcattggggccaaacacagaatcagcaaagaggaggccatgcgctggttccagcagaagtatgatgggatcatccttcctggcaaataaattcccgtttctatccaaaagagcaataaaaagttttcagtgaaa

SEQ ID NO: 323414 - DNA, 879 bp, Homo sapiens
ggccttacaatgggggcgctctttgttaccctgagcctcttagggttcgatctcagtgtccgtatcttttaacactcaataactgtcctgagttttctcttcacccgttccgttcgtggaggaaggataggttccgagctgtcttcttcccttgatgtcccctaaacattataccttttaaacattcagggtcttcgttacgatttgggatgagcagaaataaaaatgctgtgcagatagaaagtagtaaaactcagggccctcagctgtgagtgtattgctctgctgctctccatcatggcgcaggatcaaggtgaaaaggagaaccccatgcgggaacttcgcatccgcaaactctgtctcaacatctgtgttggggagagtggagacagactgacgcgagcagccaaggtgttggagcagctcacagggcagacccctgtgttttccaaagctagatacactgtcagatcctttggcatccggagaaatgaaaagattgctgtccactgcacagttcgaggggccaaggcagaagaaatcttggagaagggtctaaaggtgcgggagtatgagttaagaaaaaacaacttctcagatactggaaactttggttttgggatccaggaacacatcgatctgggtatcaaatatgacccaagcattggtatctacggcctggacttctatgtggtgctgggtaggccaggtttcagcatcgcagacaagaagcgcaggacaggctgcattggggccaaacacagaatcagcaaagaggaggccatgcgctggttccagcagaagtatgatgggatcatccttcctggcaaataaattcccgtttctatccaaaagagcaataaaaagttttcagtgaaa

SEQ ID NO: 323415 - DNA, 809 bp, Homo sapiens
  misc_feature (18)..(20): n is a, c, g, or t
  misc_feature (725)..(725): n is a, c, g, or t
  misc_feature (748)..(748): n is a, c, g, or t
  misc_feature (775)..(775): n is a, c, g, or t
atccttaattaaattatnnncccccccccccgctcttcctgctctccatcatggcgcaggatcaaggtgaaaaggagaaccccatgcgggaacttcgcatccgcaaactctgtctcaacatctgtgttggggagagtggagacagactgacgcgagcagccaaggtgttggagcagctcacagggcagacccctgtgttttccaaagctagatacactgtcagatcctttggcatccggagaaatgaaaagattgctgtccactgcacagttcgaggggccaaggcagaagaaatcttggagaagggtctaaaggtgcgggagtatgagttaagaaaaaacaacttctcagatactggaaactttggttttgggatccaggaacacatcgatctgggtatcaaatatgacccaagcattggtatctacggcctggacttctatgtggtgctgggtaggccaggtttcagcatcgcagacaagaagcgcaggacaggctgcattggggccaaacacagaatcagcaaagaggaggccatgcgctggttccagcagaagtatgatgggatcatccttcctggcaaataaattcccgtttctatccaaaagagcaataaaaagttttcagtgaaaaaaaaaaaacaaaaaaaaaacaaaaaaaaaaaaaacggggggttttattgggggggggggaaaaaggggtttggaaggggcctgggcataggngttccgggccccgtttttttgtncaagggggaaaatgggggggcccccangggggggggaataatcagaggccggtctgcatcc

SEQ ID NO: 323416 - DNA, 822 bp, Homo sapiens
  misc_feature (288)..(288): n is a, c, g, or t
gttcgtttaccatccgcagctttccaaacatttttcccttttctgggtccttacaccaaatggtttcatagcaccgatttttctctcctttatcccctccttcttttttttatcttctgtggccctcttactacatggtggaacttatttgcctctgtttttttatacgccccccttttttgtttttatagtgtttcgtgctgctatattatttctcattgttttgttactgatcatcatttagctgcttttttttttttttttttttagtttgagggggaatctggnacccgcaaactctgtctcaacatctgtgttggggagagtggagacagactgacgcgagcagccaaggtgttggagcagctcacagggcagacccctgtgttttccaaagctagatacactgtcagatcctttggcatccggagaaatgaaaagattgctgtccactgcacagttcgaggggccaaggcagaagaaatcttggagaagggtctaaaggtgcgggagtatgagttaagaaaaaacaacttctcagatactggaaactttggttttgggatccaggaacacatcgatctgggtatcaaatatgacccaagcattggtatctacggcctggacttctatgtggtgctgggtaggccaggtttcagcatcgcagacaagaagcgcaggacaggctgcattggggccaaacacagaatcagcaaagaggaggccatgcgctggttccagcagaagtatgatgggatcatccttcctggcaaataaattcccgtttctatccaaaagagcaataaaaagttttcagtgaaa

SEQ ID NO: 323417 - DNA, 603 bp, Homo sapiens
  misc_feature (18)..(20): n is a, c, g, or t
atccttaattaaattatnnncccccccccccgctcttcctgctctccatcatggcgcaggatcaaggtgaaaaggagaaccccatgcgggaacttcgcatccgcaaactctgtctcaacatctgtgttggggagagtggagacagactgacgcgagcagccaaggtgttggagcagctcacagggcagacccctgtgttttccaaagctagatacactgtcagatcctttggcatccggagaaatgaaaagattgctgtccactgcacagttcgaggggccaaggcagaagaaatcttggagaagggtctaaaggtgcgggagtatgagttaagaaaaaacaacttctcagatactggaaactttggttttgggatccaggaacacatcgatctgggtatcaaatatgacccaagcattggtatctacggcctggacttctatgtggtgctgggtaggccaggtttcagcatcgcagacaagaagcgcaggacaggctgcattggggccaaacacagaatcagcaaagaggaggccatgcgctggttccagcagaagtatgatgggatcatccttcctggcaaataaattcccgtttctatcc

SEQ ID NO: 323418 - DNA, 1241 bp, Homo sapiens
ggccttacaatgggggcgctctttgttaccctgagcctcttagggttcgatctcagtgtccgtatcttttaacactcaataactgtcctgagttttctcttcacccgttccgttcgtggaggaaggataggttccgagctgtcttcttcccttgatgtcccctaaacattataccttttaaacattcagggtcttcgttacgatttgggatgagcagaaataaaaatgctgtgcagatagaaagtagtaaaactcagggccctcagctgtgagtgtattgctctgctgctctccatcatggcgcaggatcaaggtgaaaaggagaaccccatgcgggaacttcgcatccgcaaactctgtctcaacatctgtgttggggagagtggagacagactgacgcgagcagccaaggtgttggagcagctcacagggcagacccctgtgttttccaaagctagatacactgtcagatcctttggcatccggagaaatgaaaagattgctgtccactgcacagttcgaggggccaaggcagaagaaatcttggagaagggtctaaaggtgcgggagtatgagttaagaaaaaacaacttctcagatactggaaactttggttttgggatccaggaacacatcgatctgggtatcaaatatgacccaagcattggtatctacggcctggacttctatgtggtgctgggtaggccaggtttcagcatcgcagacaagaagcgcaggacaggctgcattggggccaaacacagaatcagcaaagaggaggccatgcgctggttccagcagaagtatgatgggatcatccttcctggcaaataaattcccgtttctatccaaaagagcaataaaaagttttcagtgaaaaaaaaaaaaaaaaaaactccggggcttttttttgggggggggaaaaaagggtataaagggcaggggcatgggtttcggaccccgttttcgggtcacagggggtacatcgccgggtcccgcaaaagagaagccggcataattgcaaaaggcagttacctgctagattgtgcgccgaaacgaacgacgaagcacaagacaacacagaacagaacaaccaacacgcaagacagcagaagcaaagcagaacacagacaagagcaaaggacagagaagcaagaacacaggaacacgacgagcagagacagagagaagagacgagcgcaagacacacaaacacgcatcaacacatcaggcgcaaaatg

SEQ ID NO: 323419 - DNA, 599 bp, Homo sapiens
taaggccctcggccggaagctccgctttctcttcctgctctccatcatggcgcaggatcaaggtgaaaaggagaaccccatgcgggaacttcgcatccgcaaactctgtctcaacatctgtgttggggagagtggagacagactgacgcgagcagccaaggtgttggagcagctcacagggcagacccctgtgttttccaaagctagatacactgtcagatcctttggcatccggagaaatgaaaagattgctgtccactgcacagttcgaggggccaaggcagaagaaatcttggagaagggtctaaaggtgcgggagtatgagttaagaaaaaacaacttctcagatactggaaactttggttttgggatccaggaacacatcgatctgggtatcaaatatgacccaagcattggtatctacggcctggacttctatgtggtgctgggtaggccaggtttcagcatcgcagacaagaagcgcaggacaggctgcattggggccaaacacagaatcagcaaagaggaggccatgcgctggttccagcagaagtatgatgggatcatccttcctggcaaataaattcccgtttctatcc

SEQ ID NO: 323420 - DNA, 890 bp, Homo sapiens
  misc_feature (858)..(858): n is a, c, g, or t
ggccttacaatgggggcgctctttgttaccctgagcctcttagggttcgatctcagtgtccgtatcttttaacactcaataactgtcctgagttttctcttcacccgttccgttcgtggaggaaggataggttccgagctgtcttcttcccttgatgtcccctaaacattataccttttaaacattcagggtcttcgttacgatttgggatgagcagaaataaaaatgctgtgcagatagaaagtagtaaaactcagggccctcagctgtgagtgtattgctctgctgctctccatcatggcgcaggatcaaggtgaaaaggagaaccccatgcgggaacttcgcatccgcaaactctgtctcaacatctgtgttggggagagtggagacagactgacgcgagcagccaaggtgttggagcagctcacagggcagacccctgtgttttccaaagctagatacactgtcagatcctttggcatccggagaaatgaaaagattgctgtccactgcacagttcgaggggccaaggcagaagaaatcttggagaagggtctaaaggtgcgggagtatgagttaagaaaaaacaacttctcagatactggaaactttggttttgggatccaggaacacatcgatctgggtatcaaatatgacccaagcattggtatctacggcctggacttctatgtggtgctgggtaggccaggtttcagcatcgcagacaagaagcgcaggacaggctgcattggggccaaacacagaatcagcaacagtgaatactgctacagtggcggggcaaatgcctgcatccatagttgggagattccggacctcagcatggattcctaagatggntacgacccaagcgtgctgagccacgtcctgga

SEQ ID NO: 323421 - DNA, 397 bp, Homo sapiens
  misc_feature (11)..(11): n is a, c, g, or t
acccacgcgtncgcccacgcgtccgcggacgcgtgggtcgacccacgcgtccgcgacccacgcgtccggaagggtctaagtgcgggagtatgagttaagaaaaaacaacttctcagatactggaaactttggttttgggatccaggaacacatcgatctgggtatcaaatatgacccaagcattggtatctacggcctggacttctatgtggtgctgggtaggccaggtttcagcatcgcagacaagaagcgcaggacaggctgcattggggccaaacacagaatcagcaaagaggaggccatgcgctggttccagcagaagtatgatgggatcatccttcctggcaaataaattcccgtttctatccaaaagagcaataaaaagttttcagtgaaa

SEQ ID NO: 323422 - DNA, 539 bp, Homo sapiens
gaggatatggtgcagaaggtgcacagccacagcgccgagatggaggctcagctgtcgcaggccctggaggagctgggaggccagaaacaaagagcagacatgctggagatggagctgaagatgccgaagtctcagtccagctctgccgaacagagcttcctgttctccagggaggaggcggacacgctcaggttgaaggtcgaggagctggaaggcgagcggagtcggctggaggaggaaaagaggatgctggaggcacagctggagcggcgagctctgcagggtgggaacacatcgatctgggtatcaaatatgacccaagcattggtatctacggcctggacttctatgtggtgctgggtaggccaggtttcagcatcgcagacaagaagcgcaggacaggctgcattggggccaaacacagaatcagcaaagaggaggccatgcgctggttccagcagaagtatgatgggatcatccttcctggcaaataaattcccgtttctatccaaaagagcaataaaaagttttcagtgaaa

SEQ ID NO: 323423 - DNA, 450 bp, Homo sapiens
gcccccatacctgagaggatccgcacacttctggagctggagaaggcagagcgtcacgggagtcgggctcgggccgggccctggagaggcggcggcggcggaaggtggatcggggtggggagggcgatgacccagcccgagaggagctagagccaaagagggtacggagctcagggccagaggctgaggaggtccaggaggaggaaaagctggaggaggagactgggggtgagggcccccctgcacccatccccaccactggcagtgctgggtaggccaggtttcagcatcgcagacaagaagcgcaggacaggctgcattggggccaaacacagaatcagcaaagaggaggccatgcgctggttccagcagaagtatgatgggatcatccttcctggcaaataaattcccgtttctatccaaaagagcaataaaaagttttcagtgaaa

SEQ ID NO: 323424 - DNA, 331 bp, Homo sapiens
gaccctggtgagctgggtggccttaacagcagggctggtggctggaacgcggtgcccagatggtcagttctgccctgtggcctgctgcctggacaccggaggagccagctacagctgctgccgtccccttctggacttctatgtggtgctgggtaggccaggtttcagcatcgcagacaagaagcgcaggacaggctgcattggggccaaacacagaatcagcaaagaggaggccatgcgctggttccagcagaagtatgatgggatcatccttcctggcaaataaattcccgtttctatccaaaagagcaataaaaagttttcagtgaaa

SEQ ID NO: 323425 - DNA, 412 bp, Homo sapiens
atcatggcgcaggagtgtggtcgtatgtggaggtcgcttgtcgttgatggtagaggcggcccgcaaactctgtctcaacatctgtgttggggagagtggagacagactgacgcgagcagccaaggtgttggagcagctcacagggcagacccctgtgttttccaaagctagatacactgtcagatcctttggcatccggagaaatgaaaagattgctgtccactgcacagttcgaggggccaaggcagaagaaatcttggagaagggtctaaaggtgcgggagtatgagttaagaaaaaacaacttctcagatactggaaactttggttttgggatccacgctacacgtatgaatcctgggtcatcacagatacagcatacgactcatgattacgactggacgttctgtatc

SEQ ID NO: 323426 - DNA, 617 bp, Homo sapiens
gcggccgcctactactactaaattcgcggccgcgtcgacggcaggatcaaggtgaaaaggagaaccccatgcgggaacttcgcatccgcaaactctgtctcaacatctgtgttggggagagtggagacagactgacgcgagcagccaaggtgttggagcagctcacagggcagacccctgtgttttccaaagctagatacactgtcagatcctttggcatccggagaaatgaaaagattgctgtccactgcacagttcgaggggccaaggcagaagaaatcttggagaagggtctaaaggtgcgggagtatgagttaagaaaaaacaacttctcagatactggaaactttggttttgggatccaggaacacatcgatctgggtatcaaatatgacccaagcattggtatctacggcctggacttctatgtggtgctgggtaggccaggtttcagcatcgcagacaagaagcgcaggacaggctgcattggggccaaacacagaatcagcaaagaggaggccatgcgctggttccagcagaagtatgatgggatcatccttcctggcaaataaattcccgtttctatccaaaagagcaataaaaagttttcagtgaaa

SEQ ID NO: 323427 - DNA, 802 bp, Homo sapiens
tagctgggacctggatttgctttcctttatccgtcgccatccatggcaggccgagcctgcgggggctacttcgcccgcagcccgaggaatatggagcccgcaatgcctgctggcccaaaactagcagagccgttcgagccaaggacgcagggttgaattctgtcactttccctgccatcgttttaggagcggctccgggcacttgcccggagtgctcagaagcacgcaggatcaaggtgaaaaggagaaccccatgcgggaacttcgcatccgcaaactctgtctcaacatctgtgttggggagagtggagacagactgacgcgagcagccaaggtgttggagcagctcacagggcagacccctgtgttttccaaagctagatacactgtcagatcctttggcatccggagaaatgaaaagattgctgtccactgcacagttcgaggggccaaggcagaagaaatcttggagaagggtctaaaggtgcgggagtatgagttaagaaaaaacaacttctcagatactggaaactttggttttgggatccaggaacacatcgatctgggtatcaaatatgacccaagcattggtatctacggcctggacttctatgtggtgctgggtaggccaggtttcagcatcgcagacaagaagcgcaggacaggctgcattggggccaaacacagaatcagcaaagaggaggccatgcgctggttccagcagaagtatgatgggatcatccttcctggcaaataaattcccgtttctatccaaaagagcaataaaaagttttcagtgaaa

SEQ ID NO: 323428 - DNA, 1013 bp, Homo sapiens
  misc_feature (18)..(20): n is a, c, g, or t
atccttaattaaattatnnncccccccccccgctcttcctgctctccatcatggcgcaggatcaaggtgaaaaggagaaccccatgcgggaacttcgcatccgcaaactctgtctcaacatctgtgttggggagagtggagacagactgacgcgagcagccaaggtgttggagcagctcacagggcagacccctgtgttttccaaagctagatacactgtcagatcctttggcatccggagaaatgaaaagattgctgtccactgcacagttcgaggggccaaggcagaagaaatcttggagaagggtctaaaggtgcgggagtatgagttaagaaaaaacaacttctcagatactggaaactttggttttgggatccaggaacacatcgatctgggtatcaaatatgacccaagcattggtatctacggcctggacttctatgtggtgctgggtaggccaggtttcagcatcgcagacaagaagcgcaggacaggctgcattggggccaaacacagaatcagcaaagaggaggccatgcgctggttccagcagaagtatgatgggatcatccttcctggcaaataaattcccgtttctatccaaaagagcaataaaaagttttcagtgaaaaaaaaaaaacaaaaaaaaaaaagaagagcgggcgcgcgcgcgcgcgcgccccgcggccccgcgaaagagcttcccaagacccgcggggggggggcgcgcgcgggccccatagtggaactgcaggtagacacgtggcacaaaaacagctgctatcaccaaaagagaaagccccgggacacaaagacacagggcggcgtggggaccaccaccaacacaaaacaacaacagagcgccgcgcgcggggacacacacgagagcgtgattacaaaaaacaccagcagccgagaatggagagatcccaagagaggcgataacgtggagcacatacatggaacgtgaggattcccaaacgggaagagccacgaagtaagaaacacccgc

SEQ ID NO: 323429 - DNA, 1056 bp, Homo sapiens
  misc_feature (972)..(972): n is a, c, g, or t
  misc_feature (995)..(995): n is a, c, g, or t
  misc_feature (1022)..(1022): n is a, c, g, or t
ggccttacaatgggggcgctctttgttaccctgagcctcttagggttcgatctcagtgtccgtatcttttaacactcaataactgtcctgagttttctcttcacccgttccgttcgtggaggaaggataggttccgagctgtcttcttcccttgatgtcccctaaacattataccttttaaacattcagggtcttcgttacgatttgggatgagcagaaataaaaatgctgtgcagatagaaagtagtaaaactcagggccctcagctgtgagtgtattgctctgctgctctccatcatggcgcaggatcaaggtgaaaaggagaaccccatgcgggaacttcgcatccgcaaactctgtctcaacatctgtgttggggagagtggagacagactgacgcgagcagccaaggtgttggagcagctcacagggcagacccctgtgttttccaaagctagatacactgtcagatcctttggcatccggagaaatgaaaagattgctgtccactgcacagttcgaggggccaaggcagaagaaatcttggagaagggtctaaaggtgcgggagtatgagttaagaaaaaacaacttctcagatactggaaactttggttttgggatccaggaacacatcgatctgggtatcaaatatgacccaagcattggtatctacggcctggacttctatgtggtgctgggtaggccaggtttcagcatcgcagacaagaagcgcaggacaggctgcattggggccaaacacagaatcagcaaagaggaggccatgcgctggttccagcagaagtatgatgggatcatccttcctggcaaataaattcccgtttctatccaaaagagcaataaaaagttttcagtgaaaaaaaaaaaacaaaaaaaaaacaaaaaaaaaaaaaacggggggttttattgggggggggggaaaaaggggtttggaaggggcctgggcataggngttccgggccccgtttttttgtncaagggggaaaatgggggggcccccangggggggggaataatcagaggccggtctgcatcc

SEQ ID NO: 323430 - DNA, 965 bp, Homo sapiens
  misc_feature (881)..(881): n is a, c, g, or t
  misc_feature (904)..(904): n is a, c, g, or t
  misc_feature (931)..(931): n is a, c, g, or t
gatgggtttccccgagggtcgcccaccgaaattttaaagcaactttggtaatttaggacctggggtttttagggactcggtggcaagtaataattaaagctccatagggtcttcttctcttgctgtggttatgcccccgccttttcacggccaggtccattttcaactgggttaaaaggtaagagacacctggaccctcgtgcatcatggcgcaggatcaaggtgaaaaggagaaccccatgcgggaacttcgcatccgcaaactctgtctcaacatctgtgttggggagagtggagacagactgacgcgagcagccaaggtgttggagcagctcacagggcagacccctgtgttttccaaagctagatacactgtcagatcctttggcatccggagaaatgaaaagattgctgtccactgcacagttcgaggggccaaggcagaagaaatcttggagaagggtctaaaggtgcgggagtatgagttaagaaaaaacaacttctcagatactggaaactttggttttgggatccaggaacacatcgatctgggtatcaaatatgacccaagcattggtatctacggcctggacttctatgtggtgctgggtaggccaggtttcagcatcgcagacaagaagcgcaggacaggctgcattggggccaaacacagaatcagcaaagaggaggccatgcgctggttccagcagaagtatgatgggatcatccttcctggcaaataaattcccgtttctatccaaaagagcaataaaaagttttcagtgaaaaaaaaaaaacaaaaaaaaaacaaaaaaaaaaaaaacggggggttttattgggggggggggaaaaaggggtttggaaggggcctgggcataggngttccgggccccgtttttttgtncaagggggaaaatgggggggcccccangggggggggaataatcagaggccggtctgcatcc

SEQ ID NO: 323431 - DNA, 789 bp, Homo sapiens
  misc_feature (18)..(20): n is a, c, g, or t
atccttaattaaattatnnncccccccccccgctcttcctgctctccatcatggcgcaggatcaaggtgaaaaggagaaccccatgcgggaacttcgcatccgcaaactctgtctcaacatctgtgttggggagagtggagacagactgacgcgagcagccaaggtgttggagcagctcacagggcagacccctgtgttttccaaagctagatacactgtcagatcctttggcatccggagaaatgaaaagattgctgtccactgcacagttcgaggggccaaggcagaagaaatcttggagaagggtctaaaggtgcgggagtatgagttaagaaaaaacaacttctcagatactggaaactttggttttgggatccaggaacacatcgatctgggtatcaaatatgacccaagcattggtatctacggcctggacttctatgtggtgctgggtaggccaggtttcagcatcgcagacaagaagcgcaggacaggctgcattggggccaaacacagaatcagcaaagaggaggccatgcgctggttccagcagaagtatgatgggatcatccttcctggcaaataaattcccgtttctatccaaaagagcaataaaaagttttcagtgaaaaaaaaaaaaaaaacaaaaaaaaaaaaaaaaaaaaaaaaaaaaaaaaaaaaaacaaaaaaaaaaacaaccggcggcccgcaccacccccccacccccccccccccccacgcccccccgccccccccccgcgcgcccccaccacgcccgccaccgctgg

SEQ ID NO: 323432 - DNA, 1279 bp, Homo sapiens
  misc_feature (18)..(20): n is a, c, g, or t
atccttaattaaattatnnncccccccccccgctcttcctgctctccatcatggcgcaggatcaaggtgaaaaggagaaccccatgcgggaacttcgcatccgcaaactctgtctcaacatctgtgttggggagagtggagacagactgacgcgagcagccaaggtgttggagcagctcacagggcagacccctgtgttttccaaagctagatacactgtcagatcctttggcatccggagaaatgaaaagattgctgtccactgcacagttcgaggggccaaggcagaagaaatcttggagaagggtctaaaggtgcgggagtatgagttaagaaaaaacaacttctcagatactggaaactttggttttgggatccaggaacacatcgatctgggtatcaaatatgacccaagcattggtatctacggcctggacttctatgtggtgctgggtaggccaggtttcagcatcgcagacaagaagcgcaggacaggctgcattggggccaaacacagaatcagcaaagaggaggccatgcgctggttccagcagaagtatgatgggatcatccttcctggcaaataaattcccgtttctatccaaaagagcaataaaaagttttcagtgaaaaaaaaaaaaaaaacaaaaaaaaaaaaaaaaaaaaaaaaaaaaaaaaaaaaaaagggggggggcgcaaaaaatccccaccggggggcgccccagacatactacgcggcgtacccgccagctctttgtgagacacaggggggcccccataagagaggcgagcgccgcttaaataataaacgctgagaggcagcgcgggcccgcgcgggtttataaaacacagcgctgggcggacgggcgaaacaacgcgtgcaccgggcggaacagcctagggggagaaaggaaccccaacatcggcggggggggggggaaccaatggtgggcaccacacacccctcacgggaattaaagcgacgcgggggagactactacaaacccctggggggggtctacagggggggcaacccccacgaaggccatttcctctcgcggcgtgggaaaaatttcggcgcgccggggagattttcagattccgcggaaccaatatttacagacgaaggagtagagatcagaaacgggtccgcacccgcacactcacacctccagccacgcacaactaacccctgcccgctaacgcagcctcgcacacctcacgctagcaccctcacgagagcatcagcagtccgacaccacacctcaagaccaaccac

SEQ ID NO: 323433 - DNA, 603 bp, Homo sapiens
  misc_feature (52)..(52): n is a, c, g, or t
gtgtttattccccatttctttgagggatcaggaaggaatcctgggtatgccnataacccccctctctgaacccgcaaactctgtctcaacatctgtgttggggagagtggagacagactgacgcgagcagccaaggtgttggagcagctcacagggcagacccctgtgttttccaaagctagatacactgtcagatcctttggcatccggagaaatgaaaagattgctgtccactgcacagttcgaggggccaaggcagaagaaatcttggagaagggtctaaaggtgcgggagtatgagttaagaaaaaacaacttctcagatactggaaactttggttttgggatccaggaacacatcgatctgggtatcaaatatgacccaagcattggtatctacggcctggacttctatgtggtgctgggtaggccaggtttcagcatcgcagacaagaagcgcaggacaggctgcattggggccaaacacagaatcagcaaagaggaggccatgcgctggttccagcagaagtatgatgggatcatccttcctggcaaataaattcccgtttctatccaaaagagcaataaaaagttttcagtgaaa

SEQ ID NO: 323434 - DNA, 776 bp, Homo sapiens
  misc_feature (18)..(20): n is a, c, g, or t
  misc_feature (646)..(647): n is a, c, g, or t
  misc_feature (656)..(656): n is a, c, g, or t
  misc_feature (680)..(680): n is a, c, g, or t
  misc_feature (699)..(700): n is a, c, g, or t
  misc_feature (717)..(717): n is a, c, g, or t
  misc_feature (719)..(720): n is a, c, g, or t
  misc_feature (728)..(728): n is a, c, g, or t
  misc_feature (733)..(733): n is a, c, g, or t
  misc_feature (738)..(739): n is a, c, g, or t
  misc_feature (750)..(750): n is a, c, g, or t
  misc_feature (753)..(754): n is a, c, g, or t
  misc_feature (756)..(756): n is a, c, g, or t
  misc_feature (766)..(766): n is a, c, g, or t
  misc_feature (768)..(768): n is a, c, g, or t
  misc_feature (770)..(770): n is a, c, g, or t
atccttaattaaattatnnncccccccccccgctcttcctgctctccatcatggcgcaggatcaaggtgaaaaggagaaccccatgcgggaacttcgcatccgcaaactctgtctcaacatctgtgttggggagagtggagacagactgacgcgagcagccaaggtgttggagcagctcacagggcagacccctgtgttttccaaagctagatacactgtcagatcctttggcatccggagaaatgaaaagattgctgtccactgcacagttcgaggggccaaggcagaagaaatcttggagaagggtctaaaggtgcgggagtatgagttaagaaaaaacaacttctcagatactggaaactttggttttgggatccaggaacacatcgatctgggtatcaaatatgacccaagcattggtatctacggcctggacttctatgtggtgctgggtaggccaggtttcagcatcgcagacaagaagcgcaggacaggctgcattggggccaaacacagaatcagcaaagaggaggccatgcgctggttccagcagaagtatgatgggatcatccttcctggcaaataaattcccgtttctatccaaaagagcaataaaaagttttcagtgaaagaaaaaaaaatatnnaaattatanttaataataaaaaaaaaaaaaaanctgaggggggcccggtccnnattcgcctatagggagngnnttacattnactgnccggnntttaacaacgnggnncnggggaaaccntngngttccc

SEQ ID NO: 323435 - DNA, 789 bp, Homo sapiens
  misc_feature (18)..(20): n is a, c, g, or t
  misc_feature (705)..(705): n is a, c, g, or t
  misc_feature (728)..(728): n is a, c, g, or t
  misc_feature (755)..(755): n is a, c, g, or t
atccttaattaaattatnnncccccccccccgctcttcctgctctccatcatggcgcaggatcaaggtgaaaaggagaaccccatgcgggaacttcgcatccgcaaactctgtctcaacatctgtgttggggagagtggagacagactgacgcgagcagccaaggtgttggagcagctcacagggcagacccctgtgttttccaaagctagatacactgtcagatcctttggcatccggagaaatgaaaagattgctgtccactgcacagttcgaggggccaaggcagaagaaatcttggagaagggtctaaaggtgcgggagtatgagttaagaaaaaacaacttctcagatactggaaactttggttttgggatccaggaacacatcgatctgggtatcaaatatgacccaagcattggtatctacggcctggacttctatgtggtgctgggtaggccaggtttcagcatcgcagacaagaagcgcaggacaggctgcattggggccaaacacagaatcagcaaagaggaggccatgcgctggttccagcagaagtatgatgggatcatccttcctggcaaataaattcccgtttctatccaaaagagcaataaaaagttttcagtgaaacaaaaaaaaaaaaaacggggggttttattgggggggggggaaaaaggggtttggaaggggcctgggcataggngttccgggccccgtttttttgtncaagggggaaaatgggggggcccccangggggggggaataatcagaggccggtctgcatcc

SEQ ID NO: 323436 - DNA, 709 bp, Homo sapiens
  misc_feature (18)..(20): n is a, c, g, or t
atccttaattaaattatnnncccccccccccgctcttcctgctctccatcatggcgcaggatcaaggtgaaaaggagaaccccatgcgggaacttcgcatccgcaaactctgtctcaacatctgtgttggggagagtggagacagactgacgcgagcagccaaggtgttggagcagctcacagggcagacccctgtgttttccaaagctagatacactgtcagatcctttggcatccggagaaatgaaaagattgctgtccactgcacagttcgaggggccaaggcagaagaaatcttggagaagggtctaaaggtgcgggagtatgagttaagaaaaaacaacttctcagatactggaaactttggttttgggatccaggaacacatcgatctgggtatcaaatatgacccaagcattggtatctacggcctggacttctatgtggtgctgggtaggccaggtttcagcatcgcagacaagaagcgcaggacaggctgcattggggccaaacacagaatcagcaaagaggaggccatgcgctggttccagcagaagtatgatgggatcatccttcctggcaaataaattcccgtttctatccaaaagagcaataaaaagttttcagtgaaaaaaacaaacctggagtccccactataggccctgcgtacctttgttttcccagttggcttatctgaaaagacaaataa

SEQ ID NO: 323437 - DNA, 1359 bp, Homo sapiens
  misc_feature (18)..(20): n is a, c, g, or t
atccttaattaaattatnnncccccccccccgctcttcctgctctccatcatggcgcaggatcaaggtgaaaaggagaaccccatgcgggaacttcgcatccgcaaactctgtctcaacatctgtgttggggagagtggagacagactgacgcgagcagccaaggtgttggagcagctcacagggcagacccctgtgttttccaaagctagatacactgtcagatcctttggcatccggagaaatgaaaagattgctgtccactgcacagttcgaggggccaaggcagaagaaatcttggagaagggtctaaaggtgcgggagtatgagttaagaaaaaacaacttctcagatactggaaactttggttttgggatccaggaacacatcgatctgggtatcaaatatgacccaagcattggtatctacggcctggacttctatgtggtgctgggtaggccaggtttcagcatcgcagacaagaagcgcaggacaggctgcattggggccaaacacagaatcagcaaagaggaggccatgcgctggttccagcagaagtatgatgggatcatccttcctggcaaataaattcccgtttctatccaaaagagcaataaaaagttttcagtgaaagaaatgtgcaattctgttgtgtgttctgtgaaaggatcctggccatattcaagtccttggacctcaagccacttaaagcttcgatgggagtagctggtaacaaccccgtcatcctctgattggatgccagtatttcctggcagatccaagtccaagcttcatagcattcattgcctgtgcttgccacaccttggttgatgtgctgtggtgcagtagccccatttggaagggagggtttggttgatgttggggtttgaatttagagccttgattaagcagggtgcagtgctcctgtgttccaggaggccccctgctattcagtgattctgttctgtactagaaattttatcagcattgatgcgtcatgaaggaatgacaggctttggtgtgatggttgagattaaatttagacttaactgttcaggctcaggtttcttttacaatgagagtataaggttcttgggaggcagtatgtgcagataagagggcagtctttccgtttccagccctttcctttaactgttacctcgggtgagttgttaatctgcctcagtttccttatctgtatcaggaggcagtaatagtagtatctctcagaggattaaatgatttaatacttaacaaaatgctcagactagcaccagccacgtagtgctcaaaaggggtttcatttttgtgtttgggtataagaaatattacttctgctagcttgcttccctttggtgca

SEQ ID NO: 323438 - DNA, 743 bp, Homo sapiens
  misc_feature (18)..(20): n is a, c, g, or t
  misc_feature (647)..(647): n is a, c, g, or t
  misc_feature (666)..(667): n is a, c, g, or t
  misc_feature (684)..(684): n is a, c, g, or t
  misc_feature (686)..(687): n is a, c, g, or t
  misc_feature (695)..(695): n is a, c, g, or t
  misc_feature (700)..(700): n is a, c, g, or t
  misc_feature (705)..(706): n is a, c, g, or t
  misc_feature (717)..(717): n is a, c, g, or t
  misc_feature (720)..(721): n is a, c, g, or t
  misc_feature (723)..(723): n is a, c, g, or t
  misc_feature (733)..(733): n is a, c, g, or t
  misc_feature (735)..(735): n is a, c, g, or t
  misc_feature (737)..(737): n is a, c, g, or t
atccttaattaaattatnnncccccccccccgctcttcctgctctccatcatggcgcaggatcaaggtgaaaaggagaaccccatgcgggaacttcgcatccgcaaactctgtctcaacatctgtgttggggagagtggagacagactgacgcgagcagccaaggtgttggagcagctcacagggcagacccctgtgttttccaaagctagatacactgtcagatcctttggcatccggagaaatgaaaagattgctgtccactgcacagttcgaggggccaaggcagaagaaatcttggagaagggtctaaaggtgcgggagtatgagttaagaaaaaacaacttctcagatactggaaactttggttttgggatccaggaacacatcgatctgggtatcaaatatgacccaagcattggtatctacggcctggacttctatgtggtgctgggtaggccaggtttcagcatcgcagacaagaagcgcaggacaggctgcattggggccaaacacagaatcagcaaagaggaggccatgcgctggttccagcagaagtatgatgggatcatccttcctggcaaataaattcccgtttctatccaaaagagcaataaaaagttttcagtgaaaaaaaaaaaaaaaaanctgaggggggcccggtccnnattcgcctatagggagngnnttacattnactgnccggnntttaacaacgnggnncnggggaaaccntngngttccc

SEQ ID NO: 323439 - DNA, 695 bp, Homo sapiens
  misc_feature (18)..(20): n is a, c, g, or t
  misc_feature (634)..(635): n is a, c, g, or t
  misc_feature (667)..(667): n is a, c, g, or t
  misc_feature (671)..(671): n is a, c, g, or t
  misc_feature (681)..(681): n is a, c, g, or t
atccttaattaaattatnnncccccccccccgctcttcctgctctccatcatggcgcaggatcaaggtgaaaaggagaaccccatgcgggaacttcgcatccgcaaactctgtctcaacatctgtgttggggagagtggagacagactgacgcgagcagccaaggtgttggagcagctcacagggcagacccctgtgttttccaaagctagatacactgtcagatcctttggcatccggagaaatgaaaagattgctgtccactgcacagttcgaggggccaaggcagaagaaatcttggagaagggtctaaaggtgcgggagtatgagttaagaaaaaacaacttctcagatactggaaactttggttttgggatccaggaacacatcgatctgggtatcaaatatgacccaagcattggtatctacggcctggacttctatgtggtgctgggtaggccaggtttcagcatcgcagacaagaagcgcaggacaggctgcattggggccaaacacagaatcagcaaagaggaggccatgcgctggttccagcagaagtatgatgggatcatccttcctggcaaataaattcccgtttctatccaaaagagcaataaaaagttttcagtgaaatnnttgctcttttggatagaaacggtcgacgcggncgcnaatttagtantagtaggcggctgc

SEQ ID NO: 323440 - DNA, 699 bp, Homo sapiens
  misc_feature (18)..(20): n is a, c, g, or t
  misc_feature (635)..(635): n is a, c, g, or t
  misc_feature (680)..(681): n is a, c, g, or t
atccttaattaaattatnnncccccccccccgctcttcctgctctccatcatggcgcaggatcaaggtgaaaaggagaaccccatgcgggaacttcgcatccgcaaactctgtctcaacatctgtgttggggagagtggagacagactgacgcgagcagccaaggtgttggagcagctcacagggcagacccctgtgttttccaaagctagatacactgtcagatcctttggcatccggagaaatgaaaagattgctgtccactgcacagttcgaggggccaaggcagaagaaatcttggagaagggtctaaaggtgcgggagtatgagttaagaaaaaacaacttctcagatactggaaactttggttttgggatccaggaacacatcgatctgggtatcaaatatgacccaagcattggtatctacggcctggacttctatgtggtgctgggtaggccaggtttcagcatcgcagacaagaagcgcaggacaggctgcattggggccaaacacagaatcagcaaagaggaggccatgcgctggttccagcagaagtatgatgggatcatccttcctggcaaataaattcccgtttctatccaaaagagcaataaaaagttttcagtgaaaaanaaaaaagtcgacgcggccgcgaatttagtagtagtagtaggggcnnctaggatccaagttacta

SEQ ID NO: 323441 - DNA, 1255 bp, Homo sapiens
  misc_feature (18)..(20): n is a, c, g, or t
atccttaattaaattatnnncccccccccccgctcttcctgctctccatcatggcgcaggatcaaggtgaaaaggagaaccccatgcgggaacttcgcatccgcaaactctgtctcaacatctgtgttggggagagtggagacagactgacgcgagcagccaaggtgttggagcagctcacagggcagacccctgtgttttccaaagctagatacactgtcagatcctttggcatccggagaaatgaaaagattgctgtccactgcacagttcgaggggccaaggcagaagaaatcttggagaagggtctaaaggtgcgggagtatgagttaagaaaaaacaacttctcagatactggaaactttggttttgggatccaggaacacatcgatctgggtatcaaatatgacccaagcattggtatctacggcctggacttctatgtggtgctgggtaggccaggtttcagcatcgcagacaagaagcgcaggacaggctgcattggggccaaacacagaatcagcaaagaggaggccatgcgctggttccagcagaagtatgatgggatcatccttcctggcaaataaattcccgtttctatccaaaagagcaataaaaagttttcagtgaaacacaaaaaaaaaatcacacaaaaaaacaacttgtgggcgcaaaggacccagaaaaaatttataaaacaccactcctatgtggcgccgcggctccccaaaaagaaccagagacacaggaggacacacaagcgagtatcacacagagcaccccccggaacagaaacaagaacgacgagaatccaccaccaaaataaaatagcccccggccgtaacaccgacagcttcagctgaaacaaaaccccaagcaagtaggagcacgaagaagacaacatagcggcacataatacacaaaggcgaagcacacagaacggtaatcgagataataaaatttaaacccccggatcgatgattaaattatataagttatcatagaacaaaataagaaggacgataaaaaaatataatatacatagatgttaggacagaatgaaagtaataattctttatagtataggtaataaagaagtaagaaataaatagaatagtaagaaaaataagttaggagaacaattagatacataagaagcagaatttaaatagatagatacgagataaaaaatgatttaatagataataagattttataatatatgaatcttatgaaaaaaattaatagaaataac

SEQ ID NO: 323442 - DNA, 785 bp, Homo sapiens
taaggccctcggccggaagctccgctttctcttcctgctctccatcatggcgcaggatcaaggtgaaaaggagaaccccatgcgggaacttcgcatccgcaaactctgtctcaacatctgtgttggggagagtggagacagactgacgcgagcagccaaggtgttggagcagctcacagggcagacccctgtgttttccaaagctagatacactgtcagatcctttggcatccggagaaatgaaaagattgctgtccactgcacagttcgaggggccaaggcagaagaaatcttggagaagggtctaaaggtgcgggagtatgagttaagaaaaaacaacttctcagatactggaaactttggttttgggatccaggaacacatcgatctgggtatcaaatatgacccaagcattggtatctacggcctggacttctatgtggtgctgggtaggccaggtttcagcatcgcagacaagaagcgcaggacaggctgcattggggccaaacacagaatcagcaaagaggaggccatgcgctggttccagcagaagtatgatgggatcatccttcctggcaaataaattcccgtttctatccaaaagagcaataaaaagttttcagtgaaaaaaaaaaaaaaaacaaaaaaaaaaaaaaaaaaaaaaaaaaaaaaaaaaaaaacaaaaaaaaaaacaaccggcggcccgcaccacccccccacccccccccccccccacgcccccccgccccccccccgcgcgcccccaccacgcccgccaccgctgg

SEQ ID NO: 323443 - DNA, 743 bp, Homo sapiens
  misc_feature (8)..(8): n is a, c, g, or t
  misc_feature (613)..(614): n is a, c, g, or t
  misc_feature (623)..(623): n is a, c, g, or t
  misc_feature (647)..(647): n is a, c, g, or t
  misc_feature (666)..(667): n is a, c, g, or t
  misc_feature (684)..(684): n is a, c, g, or t
  misc_feature (686)..(687): n is a, c, g, or t
  misc_feature (695)..(695): n is a, c, g, or t
  misc_feature (700)..(700): n is a, c, g, or t
  misc_feature (705)..(706): n is a, c, g, or t
  misc_feature (717)..(717): n is a, c, g, or t
  misc_feature (720)..(721): n is a, c, g, or t
  misc_feature (723)..(723): n is a, c, g, or t
  misc_feature (733)..(733): n is a, c, g, or t
  misc_feature (735)..(735): n is a, c, g, or t
  misc_feature (737)..(737): n is a, c, g, or t
ggcgtggngaatcggcacgagggcaggatcaaggtgaaaaggagaaccccatgcgggaacttcgcatccgcaaactctgtctcaacatctgtgttggggagagtggagacagactgacgcgagcagccaaggtgttggagcagctcacagggcagacccctgtgttttccaaagctagatacactgtcagatcctttggcatccggagaaatgaaaagattgctgtccactgcacagttcgaggggccaaggcagaagaaatcttggagaagggtctaaaggtgcgggagtatgagttaagaaaaaacaacttctcagatactggaaactttggttttgggatccaggaacacatcgatctgggtatcaaatatgacccaagcattggtatctacggcctggacttctatgtggtgctgggtaggccaggtttcagcatcgcagacaagaagcgcaggacaggctgcattggggccaaacacagaatcagcaaagaggaggccatgcgctggttccagcagaagtatgatgggatcatccttcctggcaaataaattcccgtttctatccaaaagagcaataaaaagttttcagtgaaagaaaaaaaaatatnnaaattatanttaataataaaaaaaaaaaaaaanctgaggggggcccggtccnnattcgcctatagggagngnnttacattnactgnccggnntttaacaacgnggnncnggggaaaccntngngttccc

SEQ ID NO: 323444 - DNA, 1051 bp, Homo sapiens
ggcctggtacaggccggaatccttaggatccatcatggcgcaggatcaaggtgaaaaggagaaccccatgcgggaacttcgcatccgcaaactctgtctcaacatctgtgttggggagagtggagacagactgacgcgagcagccaaggtgttggagcagctcacagggcagacccctgtgttttccaaagctagatacactgtcagatcctttggcatccggagaaatgaaaagattgctgtccactgcacagttcgaggggccaaggcagaagaaatcttggagaagggtctaaaggtgcgggagtatgagttaagaaaaaacaacttctcagatactggaaactttggttttgggatccaggaacacatcgatctgggtatcaaatatgacccaagcattggtatctacggcctggacttctatgtggtgctgggtaggccaggtttcagcatcgcagacaagaagcgcaggacaggctgcattggggccaaacacagaatcagcaaagaggaggccatgcgctggttccagcagaaggtaaagctgatttatctcaagtgaagtggtggaatgtggtgttggtgaatggagttgggatttggggatgcaaaatatagtactatttgctgggtatcttctttaaagttagaatattgggcatcttgacaaatcaggggcttccagggatgatggtttaaaagaacatccagaactaggccttctccctgtcaccatgaatgggggtagatggaaggggaggaatatggcttttaacaggagccccctttctcagatgatagtgcagttcagcacagtgtaaaaaccagccagcttcctatttagtccagaaaaggatgggattcagagcccaagttcatgtatcaatcagatgtgaattctcaaaagttagccattgctgcaatctctgctgttgcctcctgttctgaaaaaattaaatctcttctctttcagtatgatgggatcatccttcctggcaaataaattcccgtttctatccaaaagagcaataaaaagttttcagtgaaa

SEQ ID NO: 323445 - DNA, 1067 bp, Homo sapiens
  misc_feature (18)..(20): n is a, c, g, or t
atccttaattaaattatnnncccccccccccgctcttcctgctctccatcatggcgcaggatcaaggtgaaaaggagaaccccatgcgggaacttcgcatccgcaaactctgtctcaacatctgtgttggggagagtggagacagactgacgcgagcagccaaggtgttggagcagctcacagggcagacccctgtgttttccaaagctagatacactgtcagatcctttggcatccggagaaatgaaaagattgctgtccactgcacagttcgaggggccaaggcagaagaaatcttggagaagggtctaaaggtgcgggagtatgagttaagaaaaaacaacttctcagatactggaaactttggttttgggatccaggaacacatcgatctgggtatcaaatatgacccaagcattggtatctacggcctggacttctatgtggtgctgggtaggccaggtttcagcatcgcagacaagaagcgcaggacaggctgcattggggccaaacacagaatcagcaaagaggaggccatgcgctggttccagcagaaggtaaagctgatttatctcaagtgaagtggtggaatgtggtgttggtgaatggagttgggatttggggatgcaaaatatagtactatttgctgggtatcttctttaaagttagaatattgggcatcttgacaaatcaggggcttccagggatgatggtttaaaagaacatccagaactaggccttctccctgtcaccatgaatgggggtagatggaaggggaggaatatggcttttaacaggagccccctttctcagatgatagtgcagttcagcacagtgtaaaaaccagccagcttcctatttagtccagaaaaggatgggattcagagcccaagttcatgtatcaatcagatgtgaattctcaaaagttagccattgctgcaatctctgctgttgcctcctgttctgaaaaaattaaatctcttctctttcagtatgatgggatcatccttcctggcaaataaattcccgtttctatccaaaagagcaataaaaagttttcagtgaaa

SEQ ID NO: 323446 - DNA, 619 bp, Homo sapiens
ggcctggtacaggccggaatccttaggatccatcatggcgcaggatcaaggtgaaaaggagaaccccatgcgggaacttcgcatccgcaaactctgtctcaacatctgtgttggggagagtggagacagactgacgcgagcagccaaggtgttggagcagctcacagggcagacccctgtgttttccaaagctagatacactgtcagatcctttggcatccggagaaatgaaaagattgctgtccactgcacagttcgaggggccaaggcagaagaaatcttggagaagggtctaaaggtgcgggagtatgagttaagaaaaaacaacttctcagatactggaaactttggttttgggatccaggaacacatcgatctgggtatcaaatatgacccaagcattggtatctacggcctggacttctatgtggtgctgggtaggccaggtttcagcatcgcagacaagaagcgcaggacaggctgcattggggccaaacacagaatcagcaaagaggaggccatgcgctggttccagcagaagtatgatgggatcatccttcctgagcaataatttacgcgcgatccaaaggagcataagttcttttgtttttttttctgt

SEQ ID NO: 323447 - DNA, 1622 bp, Homo sapiens
ggcctggtacaggccggaatccttaggatccatcatggcgcaggatcaaggtgaaaaggagaaccccatgcgggaacttcgcatccgcaaactctgtctcaacatctgtgttggggagagtggagacagactgacgcgagcagccaaggtgttggagcagctcacagggcagacccctgtgttttccaaagctagatacactgtcagatcctttggcatccggagaaatgaaaagattgctgtccactgcacagttcgaggggccaaggcagaagaaatcttggagaagggtctaaaggtgcgggagtatgagttaagaaaaaacaacttctcagatactggaaactttggttttgggatccaggaacacatcgatctgggtatcaaatatgacccaagcattggtatctacggcctggacttctatgtggtatgaatatttaatcttttcccgctcctggtctgtgaggagaggggaatctttatttcatatgtggtatgttggtgttcacatgttgagttgcagctttgaatattgtctgcctttgtgttctcctcccccttggggaaatgtgcctcatttgtggcaaatgtaggggtgcagctctgaacaaggtggacaagatccctgctgttggggaacttgcagtcgaggatctgtaaagcacccacatggcttaaaggtggatgaaggaaactgttccctccagccagtgatttgaaactttggagagaggcagtattggtgccacatttggcctatgggttggttggctgcactgaggctgttctccccctggttcttcctatagaaacagctttgggtgatgcagtggtttgctcaggaagggggttttaacatagaaatgaccttttgtgttactgccgtgttttggtccaacaataaaactgaatagcctaaatcagaagtcctgactagtgtggaacctgaaagatggtggcaccctcattagacagacaagtaataagaattggatactcacaggatgttggaggaacagcacacctttgggaagcatttttgagctgaagcagaaggaagaaaatatatatatttgtgcttctcagagttgtatgttttctacactgctggtgtggcaatagatttttaaatgttacttttaaaaagaaaaatggagatttgggagcagtaatggaggatcctcagcaccactggaaaataggctgggttaggggggtgctgaaagttccagcctccaaagcaaacttatagtatggctgtgtgttgcgtgggatgctggtggcagctttgtcagacacagatcatgggtcttgctccagaatccattgggctgccaagtgactctttgaagatctgtctgtaatgtgtgagtcttgtccatctgctcttgactctgagctggctaggtgactgttggttattcctgggacaggtgctgggtaggccaggtttcagcatcgcagacaagaagcgcaggacaggctgcattggggccaaacacagaatcagcaaagaggaggccatgcgctggttccagcagaagtatgatgggatcatccttcctggcaaataaattcccgtttctatccaaaagagcaataaaaagttttcagtgaaa

SEQ ID NO: 323448 - DNA, 1108 bp, Homo sapiens
ggcctggtacaggccggaatccttaggatccatcatggcgcaggatcaaggtgaaaaggagaaccccatgcgggaacttcgcatccgcaaactctgtctcaacatctgtgttggggagagtggagacagactgacgcgagcagccaaggtgttggagcagctcacagggcagacccctgtgttttccaaagctagatacactgtcagatcctttggcatccggagaaatgaaaagattgctgtccactgcacagttcgaggggccaaggcagaagaaatcttggagaagggtctaaaggtgcgggagtatgagttaagaaaaaacaacttctcagatactggaaactttggttttgggatccaggaacacatcgatctgggtatcaaatatgacccaagcattggtatctacggcctggacttctatgtggtgctgggtaggccaggtttcagcatcgcagacaagaagcgcaggacaggctgcattggggccaaacacagaatcagcaacgcaggcggctgaccatgagggtagaacgaaggaagcaggcaagaaggtggggacggacagaggaggaccgcagaagaaaggtgatggtgaaggaaagagggatggagcatgcaagatgagagaagtgaagtcaggatagggggaaagcggtgaagatgacggattgatgaggaatgaacaatgttgagatgcaaggaagcagaagaaccgaagagggatgcactaagaaaaggaacaaaaagggaaaaaggataaaaccagaagacacgaaaaaggggcggcgggacgaaacctatgcaacgcgctcaaaataccacagcacttacagaattcgtaaaaaggagtaggtaacaccatttagagaagtaggagaagggggacacgcagccgagatacaacaacgagtgttaggcaagaaggagccaacacccgaggaagatttgatcaacagagggtagcaacgacgacgcagggaaaggcaagagacaagagagaaatattggagcaaagagaggaagatgaaacaagcagaaaccaccaaacataatcgaagacggacaagagtataagcataaaaaaaagacagacataaaaaac

SEQ ID NO: 323449 - DNA, 2028 bp, Homo sapiens
ggcctggtacaggccggaatccttaggatccatcatggcgcaggatcaaggtgaaaaggagaaccccatgcgggaacttcgcatccgcaaactctgtctcaacatctgtgttggggagagtggagacagactgacgcgagcagccaaggtgttggagcagctcacagggcagacccctgtgttttccaaagctagatacactgtcagatcctttggcatccggagaaatgaaaagattgctgtccactgcacagttcgaggggccaaggcagaagaaatcttggagaagggtctaaaggtgcgggagtatgagttaagaaaaaacaacttctcagatactggaaactttggttttgggatccaggaacacatcgatctgggtatcaaatatgacccaagcattggtatctacggcctggacttctatgtggtatgaatatttaatcttttcccgctcctggtctgtgaggagaggggaatctttatttcatatgtggtatgttggtgttcacatgttgagttgcagctttgaatattgtctgcctttgtgttctcctcccccttggggaaatgtgcctcatttgtggcaaatgtaggggtgcagctctgaacaaggtggacaagatccctgctgttggggaacttgcagtcgaggatctgtaaagcacccacatggcttaaaggtggatgaaggaaactgttccctccagccagtgatttgaaactttggagagaggcagtattggtgccacatttggcctatgggttggttggctgcactgaggctgttctccccctggttcttcctatagaaacagctttgggtgatgcagtggtttgctcaggaagggggttttaacatagaaatgaccttttgtgttactgccgtgttttggtccaacaataaaactgaatagcctaaatcagaagtcctgactagtgtggaacctgaaagatggtggcaccctcattagacagacaagtaataagaattggatactcacaggatgttggaggaacagcacacctttgggaagcatttttgagctgaagcagaaggaagaaaatatatatatttgtgcttctcagagttgtatgttttctacactgctggtgtggcaatagatttttaaatgttacttttaaaaagaaaaatggagatttgggagcagtaatggaggatcctcagcaccactggaaaataggctgggttaggggggtgctgaaagttccagcctccaaagcaaacttatagtatggctgtgtgttgcgtgggatgctggtggcagctttgtcagacacagatcatgggtcttgctccagaatccattgggctgccaagtgactctttgaagatctgtctgtaatgtgtgagtcttgtccatctgctcttgactctgagctggctaggtgactgttggttattcctgggacaggtgctgggtaggccaggtttcagcatcgcagacaagaagcgcaggacaggctgcattggggccaaacacagaatcagcaaagaggaggccatgcgctggttccagcagaaggtaaagctgatttatctcaagtgaagtggtggaatgtggtgttggtgaatggagttgggatttggggatgcaaaatatagtactatttgctgggtatcttctttaaagttagaatattgggcatcttgacaaatcaggggcttccagggatgatggtttaaaagaacatccagaactaggccttctccctgtcaccatgaatgggggtagatggaaggggaggaatatggcttttaacaggagccccctttctcagatgatagtgcagttcagcacagtgtaaaaaccagccagcttcctatttagtccagaaaaggatgggattcagagcccaagttcatgtatcaatcagatgtgaattctcaaaagttagccattgctgcaatctctgctgttgcctcctgttctgaaaaaattaaatctcttctctttcagtatgatgggatcatccttcctggcaaataaattcccgtttctatcc

SEQ ID NO: 323450 - DNA, 972 bp, Homo sapiens
  misc_feature (845)..(845): n is a, c, g, or t
  misc_feature (904)..(904): n is a, c, g, or t
ggccttacaatgggggcgctctttgttaccctgagcctcttagggttcgatctcagtgtccgtatcttttaacactcaataactgtcctgagttttctcttcacccgttccgttcgtggaggaaggataggttccgagctgtcttcttcccttgatgtcccctaaacattataccttttaaacattcagggtcttcgttacgatttgggatgagcagaaataaaaatgctgtgcagatagaaagtagtaaaactcagggccctcagctgtgagtgtattgctctgctgctctccatcatggcgcaggatcaaggtgaaaaggagaaccccatgcgggaacttcgcatccgcaaactctgtctcaacatctgtgttggggagagtggagacagactgacgcgagcagccaaggtgttggagcagctcacagggcagacccctgtgttttccaaagctagatacactgtcagatcctttggcatccggagaaatgaaaagattgctgtccactgcacagttcgaggggccaaggcagaagaaatcttggagaagggtctaaaggtgcgggagtatgagttaagaaaaaacaacttctcagatactggaaactttggttttgggatccaggaacacatcgatctgggtatcaaatatgacccaagcattggtatctacggcctggacttctatgtggtgctgggtaggccaggtttcagcatcgcagacaagaagcgcaggacaggctgcattggggccaaacacagaatcagcaaagaggaggccatgcgctggttccagcagaagtatgatgggatcatccttcctgagcaaataaattccccggntttctttttttttttaaaaaaaaaaagggtttttttttttccccgcccaaaagagcaantaaaacacgggggtttttcttttttcccaaaagggggttgggaaaaacaaaaccaaaccaaaacatca

SEQ ID NO: 323451 - DNA, 709 bp, Homo sapiens
  misc_feature (582)..(582): n is a, c, g, or t
  misc_feature (641)..(641): n is a, c, g, or t
cagcggaacaagcaagctcttcctgctctccatcatggcgcaggatcaaggtgaaaaggagaaccccatgcgggaacttcgcatccgcaaactctgtctcaacatctgtgttggggagagtggagacagactgacgcgagcagccaaggtgttggagcagctcacagggcagacccctgtgttttccaaagctagatacactgtcagatcctttggcatccggagaaatgaaaagattgctgtccactgcacagttcgaggggccaaggcagaagaaatcttggagaagggtctaaaggtgcgggagtatgagttaagaaaaaacaacttctcagatactggaaactttggttttgggatccaggaacacatcgatctgggtatcaaatatgacccaagcattggtatctacggcctggacttctatgtggtgctgggtaggccaggtttcagcatcgcagacaagaagcgcaggacaggctgcattggggccaaacacagaatcagcaaagaggaggccatgcgctggttccagcagaagtatgatgggatcatccttcctgagcaaataaattccccggntttctttttttttttaaaaaaaaaaagggtttttttttttccccgcccaaaagagcaantaaaacacgggggtttttcttttttcccaaaagggggttgggaaaaacaaaaccaaaccaaaacatca

SEQ ID NO: 323452 - DNA, 506 bp, Homo sapiens
ggcctggtacaggccggaatccttaggatccatcatggcgcaggatcaaggtgaaaaggagaaccccatgcgggaacttcgcatccgcaaactctgtctcaacatctgtgttggggagagtggagacagactgacgcgagcagccaaggtgttggagcagctcacagggcagacccctgtgttttccaaagctagatacactgtcagatcctttggcatccggagaaatgaaaagattgctgtccactgcacagttcgaggggccaaggcagaagaaatcttggagaagggtctaaaggtgcgggagtatgagttaagaaaaaacaacttctcagatactggaaactttggttttgggatccaggaacacatcgatctgggtatcaaatatgacccaagcattggtatctacggcctggacttctatgtggtgctgggtaggccaggtttcagcatcgcataagaagcgcagacacggacacgaataaccggtagcgagctcgatc

SEQ ID NO: 323453 - DNA, 572 bp, Homo sapiens
ggcctggtacaggccggaatccttaggatccatcatggcgcaggatcaaggtgaaaaggagaaccccatgcgggaacttcgcatccgcaaactctgtctcaacatctgtgttggggagagtggagacagactgacgcgagcagccaaggtgttggagcagctcacagggcagacccctgtgttttccaaagctagatacactgtcagatcctttggcatccggagaaatgaaaagattgctgtccactgcacagttcgaggggccaaggcagaagaaatcttggagaagggtctaaaggtgcgggagtatgagttaagaggaacacatcgatctgggtatcaaatatgacccaagcattggtatctacggcctggacttctatgtggtgctgggtaggccaggtttcagcatcgcagacaagaagcgcaggacaggctgcattggggccaaacacagaatcagcaaagaggaggccatgcgctggttccagcagaagtatgatgggatcatccttcctggcaaataaattcccgtttctatccaaaagagcaataaaaagttttcagtgaaa

SEQ ID NO: 323454 - DNA, 525 bp, Homo sapiens
  misc_feature (18)..(20): n is a, c, g, or t
atccttaattaaattatnnncccccccccccgctcttcctgctctccatcatggcgcaggatcaaggtgaaaaggagaaccccatgcgggaacttcgcatccgcaaactctgtctcaacatctgtgttggggagagtggagacagactgacgcgagcagccaaggtgttggagcagctcacagggcagacccctgtgttttccaaaggtgcgggagtatgagttaagaaaaaacaacttctcagatactggaaactttggttttgggatccaggaacacatcgatctgggtatcaaatatgacccaagcattggtatctacggcctggacttctatgtggtgctgggtaggccaggtttcagcatcgcagacaagaagcgcaggacaggctgcattggggccaaacacagaatcagcaaagaggaggccatgcgctggttccagcagaagtatgatgggatcatccttcctggcaaataaattcccgtttctatccaaaagagcaataaaaagttttcagtgaaa

SEQ ID NO: 323455 - DNA, 616 bp, Homo sapiens
  misc_feature (390)..(390): n is a, c, g, or t
ggcctggtacaggccggaatccttaggatccatcatggcgcaggatcaaggtgaaaaggagaaccccatgcgggaacttcgcatccgcaaactctgtctcaacatctgtgttggggagagtggagacagactgacgcgagcagccaaggtgttggagcagctcacagggcagacccctgtgttttccaaagctagatacactgtcagatcctttggcatccggagaaatgaaaagattgctgtccactgcacagttcgaggggccaaggcagaagaaatcttggagaagggtctaaagcgggagtatgagttaagatttataggtagaggcgacaaacctaccgagcctggtgatagctggttgtccaagatagaatcttagttcaactntaaatttgcccacagaaccctctaaatccccttgtaaatttaactgttagtccaaagaggaacagctctttggacactaagaaaaaaccttgtagagagagtaaaaaattaacacccatagtaggcctaaaagcagccaccatttaagaaagcgttcaagcctcacacccccttccttaaaaattccaaacatttaacttgaacttctcacacccaattggaccaa

SEQ ID NO: 323456 - DNA, 284 bp, Homo sapiens
ggcatccggagaaatgaaaagattgctgtccactgcacagttcgaggggccaaggcagaagaaatcttggagaagggtctaaaggtgagcctaatcccctaatggagtgatattgatcagcactcctttagtaacacatgtagataagttacatttaatgttctgttctttggtgtcttgatatttatttacttaagcttctaaaaggctttttctacaatcagcagggttaaactgttcttggtggtttaaaagatgcttgaggctgggcacggtggctcaac

SEQ ID NO: 323457 - DNA, 616 bp, Homo sapiens
ggcctggtacaggccggaatccttaggatccatcatggcgcaggatcaaggtgaaaaggagaaccccatgcgggaacttcgcatccgcaaactctgtctcaacatctgtgttggggagagtggagacagactgacgcgagcagccaaggtgttggagcagctcacagggcagacccctgtgttttccaaagctagatacactgtcagatcctttggcatccggagaaatgaaaagattgctgtccactgcacagttcgaggggccaaggcagaagaaatcttggagaagggtctaaaggtgcgggagtatgagttaagaaaaaacaacttctcagatactggaaactttggttttgggatccaggaacacatcgatctgggtatcaaatatgacccaagcattggtatctacggcctggacttctatgtggtgctgggtaggccaggtttcagcatcgcagacaagaagcgcaggacaggctgcattggggccaaacacagaatcagcaaagaggaggccatgcgctggttccagcagaagtatgatgggatcatccttcctggcaaataaattcccgtttctatccaaaagagcaataaaaagttttcagtgaaa

SEQ ID NO: 323458 - DNA, 788 bp, Homo sapiens
gatgggtttccccgagggtcgcccaccgaaattttaaagcaactttggtaatttaggacctggggtttttagggactcggtggcaagtaataattaaagctccatagggtcttcttctcttgctgtggttatgcccccgccttttcacggccaggtccattttcaactgggttaaaaggtaagagacacctggaccctcgtgcatcatggcgcaggatcaaggtgaaaaggagaaccccatgcgggaacttcgcatccgcaaactctgtctcaacatctgtgttggggagagtggagacagactgacgcgagcagccaaggtgttggagcagctcacagggcagacccctgtgttttccaaagctagatacactgtcagatcctttggcatccggagaaatgaaaagattgctgtccactgcacagttcgaggggccaaggcagaagaaatcttggagaagggtctaaaggtgcgggagtatgagttaagaaaaaacaacttctcagatactggaaactttggttttgggatccaggaacacatcgatctgggtatcaaatatgacccaagcattggtatctacggcctggacttctatgtggtgctgggtaggccaggtttcagcatcgcagacaagaagcgcaggacaggctgcattggggccaaacacagaatcagcaaagaggaggccatgcgctggttccagcagaagtatgatgggatcatccttcctggcaaataaattcccgtttctatccaaaagagcaataaaaagttttcagtgaaa

SEQ ID NO: 323459 - DNA, 626 bp, Homo sapiens
  misc_feature (21)..(21): n is a, c, g, or t
  misc_feature (26)..(26): n is a, c, g, or t
  misc_feature (35)..(35): n is a, c, g, or t
ttacgggcttaagtcgaggcngggtngaatcggcngaggccatcatggcgcaggatcaaggtgaaaaggagaaccccatgcgggaacttcgcatccgcaaactctgtctcaacatctgtgttggggagagtggagacagactgacgcgagcagccaaggtgttggagcagctcacagggcagacccctgtgttttccaaagctagatacactgtcagatcctttggcatccggagaaatgaaaagattgctgtccactgcacagttcgaggggccaaggcagaagaaatcttggagaagggtctaaaggtgcgggagtatgagttaagaaaaaacaacttctcagatactggaaactttggttttgggatccaggaacacatcgatctgggtatcaaatatgacccaagcattggtatctacggcctggacttctatgtggtgctgggtaggccaggtttcagcatcgcagacaagaagcgcaggacaggctgcattggggccaaacacagaatcagcaaagaggaggccatgcgctggttccagcagaagtatgatgggatcatccttcctggcaaataaattcccgtttctatccaaaagagcaataaaaagttttcagtgaaa

SEQ ID NO: 323460 - DNA, 612 bp, Homo sapiens
tggtatgttattttcaattcaacgggcgggcgtctcattgtccattgtcatgccctgtggttttcatattccacgtgtgcccgcaaactctgtctcaacatctgtgttggggagagtggagacagactgacgcgagcagccaaggtgttggagcagctcacagggcagacccctgtgttttccaaagctagatacactgtcagatcctttggcatccggagaaatgaaaagattgctgtccactgcacagttcgaggggccaaggcagaagaaatcttggagaagggtctaaaggtgcgggagtatgagttaagaaaaaacaacttctcagatactggaaactttggttttgggatccaggaacacatcgatctgggtatcaaatatgacccaagcattggtatctacggcctggacttctatgtggtgctgggtaggccaggtttcagcatcgcagacaagaagcgcaggacaggctgcattggggccaaacacagaatcagcaaagaggaggccatgcgctggttccagcagaagtatgatgggatcatccttcctggcaaataaattcccgtttctatccaaaagagcaataaaaagttttcagtgaaa

SEQ ID NO: 323461 - DNA, 620 bp, Homo sapiens
ggatcatacatcatgtcgcgggatctatgtgaggtgcagaaccccgaatggctagtaacttggcatactggtcattctggttcacctgtactgcagttggctagagtgaagaggtacagctgccagcctcccatatagtagagatcgatattcactattgcgcatgaccctggtttatccgcatctatgatatcgctagatacactgtcagatcctttggcatccggagaaatgaaaagattgctgtccactgcacagttcgaggggccaaggcagaagaaatcttggagaagggtctaaaggtgcgggagtatgagttaagaaaaaacaacttctcagatactggaaactttggttttgggatccaggaacacatcgatctgggtatcaaatatgacccaagcattggtatctacggcctggacttctatgtggtgctgggtaggccaggtttcagcatcgcagacaagaagcgcaggacaggctgcattggggccaaacacagaatcagcaaagaggaggccatgcgctggttccagcagaagtatgatgggatcatccttcctggcaaataaattcccgtttctatccaaaagagcaataaaaagttttcagtgaaa

SEQ ID NO: 323462 - DNA, 361 bp, Homo sapiens
  misc_feature (297)..(297): n is a, c, g, or t
  misc_feature (342)..(343): n is a, c, g, or t
gcggccgcctactactactaaattcgcggccgcgtcgacggggaacacatcgatctgggtatcaaatatgacccaagcattggtatctacggcctggacttctatgtggtgctgggtaggccaggtttcagcatcgcagacaagaagcgcaggacaggctgcattggggccaaacacagaatcagcaaagaggaggccatgcgctggttccagcagaagtatgatgggatcatccttcctggcaaataaattcccgtttctatccaaaagagcaataaaaagttttcagtgaaaaanaaaaaagtcgacgcggccgcgaatttagtagtagtagtaggggcnnctaggatccaagttacta

SEQ ID NO: 323463 - DNA, 293 bp, Homo sapiens
  misc_feature (228)..(228): n is a, c, g, or t
  misc_feature (230)..(230): n is a, c, g, or t
  misc_feature (238)..(238): n is a, c, g, or t
  misc_feature (242)..(242): n is a, c, g, or t
ggctcgttgcgtggctcatagtgtggctcctggagataacagagagccagtctgcagatgctgaacctccacctccccaagagccgcaggctgcattggggccaaacacagaatcagcaaagaggaggccatgcgctggttccagcagaagtatgatgggatcatccttcctggcaaataaattcccgtttctatccaaaagagcaataaaaagttttcagtgaaacncnacgagccncgcnaagagcccacaaagagccacccgacgagccactctaagcgcccgcaacgag

SEQ ID NO: 323464 - DNA, 616 bp, Homo sapiens
cagcggaacaagcaagctcttcctgctctccatcatggcgcaggatcaaggtgaaaaggagaaccccatgcgggaacttcgcatccgcaaactctgtctcaacatctgtgttggggagagtggagacagactgacgcgagcagccaaggtgttggagcagctcacagggcagacccctgtgttttccaaagctagatacactgtcagatcctttggcatccggagaaatgaaaagattgctgtccactgcacagttcgaggggccaaggcagaagaaatcttggagaagggtctaaaggtgcgggagtatgagttaagaaaaaacaacttctcagatactggaaactttggttttgggatccaggaacacatcgatctgggtatcaaatatgacccaagcattggtatctacggcctggacttctatgtggtgctgggtaggccaggtttcagcatcgcagacaagaagcgcaggacaggctgcattggggccaaacacagaatcagcaaagaggaggccatgcgctggttccagcagaagtatgatgggatcatccttcctggcaaataaattcccgtttctatccaaaagagcaataaaaagttttcagtgaaa

SEQ ID NO: 323465 - DNA, 803 bp, Homo sapiens
  misc_feature (21)..(21): n is a, c, g, or t
  misc_feature (26)..(26): n is a, c, g, or t
  misc_feature (35)..(35): n is a, c, g, or t
  misc_feature (719)..(719): n is a, c, g, or t
  misc_feature (742)..(742): n is a, c, g, or t
  misc_feature (769)..(769): n is a, c, g, or t
ttacgggcttaagtcgaggcngggtngaatcggcngaggccatcatggcgcaggatcaaggtgaaaaggagaaccccatgcgggaacttcgcatccgcaaactctgtctcaacatctgtgttggggagagtggagacagactgacgcgagcagccaaggtgttggagcagctcacagggcagacccctgtgttttccaaagctagatacactgtcagatcctttggcatccggagaaatgaaaagattgctgtccactgcacagttcgaggggccaaggcagaagaaatcttggagaagggtctaaaggtgcgggagtatgagttaagaaaaaacaacttctcagatactggaaactttggttttgggatccaggaacacatcgatctgggtatcaaatatgacccaagcattggtatctacggcctggacttctatgtggtgctgggtaggccaggtttcagcatcgcagacaagaagcgcaggacaggctgcattggggccaaacacagaatcagcaaagaggaggccatgcgctggttccagcagaagtatgatgggatcatccttcctggcaaataaattcccgtttctatccaaaagagcaataaaaagttttcagtgaaaaaaaaaaaacaaaaaaaaaacaaaaaaaaaaaaaacggggggttttattgggggggggggaaaaaggggtttggaaggggcctgggcataggngttccgggccccgtttttttgtncaagggggaaaatgggggggcccccangggggggggaataatcagaggccggtctgcatcc

SEQ ID NO: 323466 - DNA, 917 bp, Homo sapiens
  misc_feature (18)..(20): n is a, c, g, or t
  misc_feature (691)..(691): n is a, c, g, or t
  misc_feature (695)..(695): n is a, c, g, or t
  misc_feature (699)..(699): n is a, c, g, or t
  misc_feature (702)..(702): n is a, c, g, or t
atccttaattaaattatnnncccccccccccgctcttcctgctctccatcatggcgcaggatcaaggtgaaaaggagaaccccatgcgggaacttcgcatccgcaaactctgtctcaacatctgtgttggggagagtggagacagactgacgcgagcagccaaggtgttggagcagctcacagggcagacccctgtgttttccaaagctagatacactgtcagatcctttggcatccggagaaatgaaaagattgctgtccactgcacagttcgaggggccaaggcagaagaaatcttggagaagggtctaaaggtgcgggagtatgagttaagaaaaaacaacttctcagatactggaaactttggttttgggatccaggaacacatcgatctgggtatcaaatatgacccaagcattggtatctacggcctggacttctatgtggtgctgggtaggccaggtttcagcatcgcagacaagaagcgcaggacaggctgcattggggccaaacacagaatcagcaaagaggaggccatgcgctggttccagcagaagtatgatgggatcatccttcctggcaaataaattcccgtttctatccaaaagagcaataaaaagttttcagtgaaaaaaaaaaaaaaaacaaaaaaaaaaaaaaaaaaaaaaaaaaaaatttgggggggctgggncctngaanagntttctgaaccctcggtgtggggcgccggcccgtagtttagtgaaccgtggcctggggtgccagaaagacccggccagaccaggtgctgcgttcccaccataaaaagccggcgaccaggttggacgactccaggggttcggccacggtctacacggtccgcgtgctatcccccgcgcgcgcgtgaagggcagaaaaaagaggagaacacaagcgct

SEQ ID NO: 323467 - DNA, 572 bp, Homo sapiens
cagcggaacaagcaagctcttcctgctctccatcatggcgccgcaaactctgtctcaacatctgtgttggggagagtggagacagactgacgcgagcagccaaggtgttggagcagctcacagggcagacccctgtgttttccaaagctagatacactgtcagatcctttggcatccggagaaatgaaaagattgctgtccactgcacagttcgaggggccaaggcagaagaaatcttggagaagggtctaaaggtgcgggagtatgagttaagaaaaaacaacttctcagatactggaaactttggttttgggatccaggaacacatcgatctgggtatcaaatatgacccaagcattggtatctacggcctggacttctatgtggtgctgggtaggccaggtttcagcatcgcagacaagaagcgcaggacaggctgcattggggccaaacacagaatcagcaaagaggaggccatgcgctggttccagcagaagtatgatgggatcatccttcctggcaaataaattcccgtttctatccaaaagagcaataaaaagttttcagtgaaa

SEQ ID NO: 323468 - DNA, 671 bp, Homo sapiens
  misc_feature (18)..(20): n is a, c, g, or t
  misc_feature (643)..(643): n is a, c, g, or t
  misc_feature (647)..(647): n is a, c, g, or t
  misc_feature (657)..(657): n is a, c, g, or t
atccttaattaaattatnnncccccccccccgctcttcctgctctccatcatggcgcaggatcaaggtgaaaaggagaaccccatgcgggaacttcgcatccgcaaactctgtctcaacatctgtgttggggagagtggagacagactgacgcgagcagccaaggtgttggagcagctcacagggcagacccctgtgttttccaaagctagatacactgtcagatcctttggcatccggagaaatgaaaagattgctgtccactgcacagttcgaggggccaaggcagaagaaatcttggagaagggtctaaaggtgcgggagtatgagttaagaaaaaacaacttctcagatactggaaactttggttttgggatccaggaacacatcgatctgggtatcaaatatgacccaagcattggtatctacggcctggacttctatgtggtgctgggtaggccaggtttcagcatcgcagacaagaagcgcaggacaggctgcattggggccaaacacagaatcagcaaagaggaggccatgcgctggttccagcagaagtatgatgggatcatccttcctggcaaataaattcccgtttctatccaaaagagcaataaaaagttttcagtgaaagtcgacgcggncgcnaatttagtantagtaggcggctgc

SEQ ID NO: 323469 - DNA, 699 bp, Homo sapiens
  misc_feature (18)..(20): n is a, c, g, or t
  misc_feature (634)..(634): n is a, c, g, or t
  misc_feature (636)..(636): n is a, c, g, or t
  misc_feature (644)..(644): n is a, c, g, or t
  misc_feature (648)..(648): n is a, c, g, or t
atccttaattaaattatnnncccccccccccgctcttcctgctctccatcatggcgcaggatcaaggtgaaaaggagaaccccatgcgggaacttcgcatccgcaaactctgtctcaacatctgtgttggggagagtggagacagactgacgcgagcagccaaggtgttggagcagctcacagggcagacccctgtgttttccaaagctagatacactgtcagatcctttggcatccggagaaatgaaaagattgctgtccactgcacagttcgaggggccaaggcagaagaaatcttggagaagggtctaaaggtgcgggagtatgagttaagaaaaaacaacttctcagatactggaaactttggttttgggatccaggaacacatcgatctgggtatcaaatatgacccaagcattggtatctacggcctggacttctatgtggtgctgggtaggccaggtttcagcatcgcagacaagaagcgcaggacaggctgcattggggccaaacacagaatcagcaaagaggaggccatgcgctggttccagcagaagtatgatgggatcatccttcctggcaaataaattcccgtttctatccaaaagagcaataaaaagttttcagtgaaacncnacgagccncgcnaagagcccacaaagagccacccgacgagccactctaagcgcccgcaacgag

SEQ ID NO: 323470 - DNA, 709 bp, Homo sapiens
  misc_feature (582)..(582): n is a, c, g, or t
  misc_feature (641)..(641): n is a, c, g, or t
ggcctggtacaggccggaatccttaggatccatcatggcgcaggatcaaggtgaaaaggagaaccccatgcgggaacttcgcatccgcaaactctgtctcaacatctgtgttggggagagtggagacagactgacgcgagcagccaaggtgttggagcagctcacagggcagacccctgtgttttccaaagctagatacactgtcagatcctttggcatccggagaaatgaaaagattgctgtccactgcacagttcgaggggccaaggcagaagaaatcttggagaagggtctaaaggtgcgggagtatgagttaagaaaaaacaacttctcagatactggaaactttggttttgggatccaggaacacatcgatctgggtatcaaatatgacccaagcattggtatctacggcctggacttctatgtggtgctgggtaggccaggtttcagcatcgcagacaagaagcgcaggacaggctgcattggggccaaacacagaatcagcaaagaggaggccatgcgctggttccagcagaagtatgatgggatcatccttcctgagcaaataaattccccggntttctttttttttttaaaaaaaaaaagggtttttttttttccccgcccaaaagagcaantaaaacacgggggtttttcttttttcccaaaagggggttgggaaaaacaaaaccaaaccaaaacatca

SEQ ID NO: 323471 - DNA, 2349 bp, Homo sapiens
ggcctggtacaggccggaatccttaggatccatcatggcgcaggatcaaggtgaaaaggagaaccccatgcgggaacttcgcatccgcaaactctgtctcaacatctgtgttggggagagtggagacagactgacgcgagcagccaaggtgttggagcagctcacagggcagacccctgtgttttccaaagctagatacactgtcagatcctttggcatccggagaaatgaaaagattgctgtccactgcacagttcgaggggccaaggcagaagaaatcttggagaagggtctaaaggtgcgggagtatgagttaagaaaaaacaacttctcagatactggaaactttggttttgggatccaggaacacatcgatctgggtatcaaatatgacccaagcattggtatctacggcctggacttctatgtggtatgaatatttaatcttttcccgctcctggtctgtgaggagaggggaatctttatttcatatgtggtatgttggtgttcacatgttgagttgcagctttgaatattgtctgcctttgtgttctcctcccccttggggaaatgtgcctcatttgtggcaaatgtaggggtgcagctctgaacaaggtggacaagatccctgctgttggggaacttgcagtcgaggatctgtaaagcacccacatggcttaaaggtggatgaaggaaactgttccctccagccagtgatttgaaactttggagagaggcagtattggtgccacatttggcctatgggttggttggctgcactgaggctgttctccccctggttcttcctatagaaacagctttgggtgatgcagtggtttgctcaggaagggggttttaacatagaaatgaccttttgtgttactgccgtgttttggtccaacaataaaactgaatagcctaaatcagaagtcctgactagtgtggaacctgaaagatggtggcaccctcattagacagacaagtaataagaattggatactcacaggatgttggaggaacagcacacctttgggaagcatttttgagctgaagcagaaggaagaaaatatatatatttgtgcttctcagagttgtatgttttctacactgctggtgtggcaatagatttttaaatgttacttttaaaaagaaaaatggagatttgggagcagtaatggaggatcctcagcaccactggaaaataggctgggttaggggggtgctgaaagttccagcctccaaagcaaacttatagtatggctgtgtgttgcgtgggatgctggtggcagctttgtcagacacagatcatgggtcttgctccagaatccattgggctgccaagtgactctttgaagatctgtctgtaatgtgtgagtcttgtccatctgctcttgactctgagctggctaggtgactgttggttattcctgggacaggtgctgggtaggccaggtttcagcatcgcagacaagaagcgcaggacaggctgcattggggccaaacacagaatcagcaaagaggaggccatgcgctggttccagcagaagtatgatgggatcatccttcctggcaaataaattcccgtttctatccaaaagagcaataaaaagttttcagtgaaagaaatgtgcaattctgttgtgtgttctgtgaaaggatcctggccatattcaagtccttggacctcaagccacttaaagcttcgatgggagtagctggtaacaaccccgtcatcctctgattggatgccagtatttcctggcagatccaagtccaagcttcatagcattcattgcctgtgcttgccacaccttggttgatgtgctgtggtgcagtagccccatttggaagggagggtttggttgatgttggggtttgaatttagagccttgattaagcagggtgcagtgctcctgtgttccaggaggccccctgctattcagtgattctgttctgtactagaaattttatcagcattgatgcgtcatgaaggaatgacaggctttggtgtgatggttgagattaaatttagacttaactgttcaggctcaggtttcttttacaatgagagtataaggttcttgggaggcagtatgtgcagataagagggcagtctttccgtttccagccctttcctttaactgttacctcgggtgagttgttaatctgcctcagtttccttatctgtatcaggaggcagtaatagtagtatctctcagaggattaaatgatttaatacttaacaaaatgctcagactagcaccagccacgtagtgctcaaaaggggtttcatttttgtgtttgggtataagaaatattacttctgctagcttgcttccctttggtgca

SEQ ID NO: 323472 - DNA, 1298 bp, Homo sapiens
ggcctggtacaggccggaatccttaggatccatcatggcgcaggatcaaggtgaaaaggagaaccccatgcgggaacttcgcatccgcaaactctgtctcaacatctgtgttggggagagtggagacagactgacgcgagcagccaaggtgttggagcagctcacagggcagacccctgtgttttccaaagctagatacactgtcagatcctttggcatccggagaaatgaaaagattgctgtccactgcacagttcgaggggccaaggcagaagaaatcttggagaagggtctaaaggtgcgggagtatgagttaagaaaaaacaacttctcagatactggaaactttggttttgggatccaggaacacatcgatctgggtatcaaatatgacccaagcattggtatctacggcctggacttctatgtggtatgaatatttaatcttttcccgctcctggtctgtgaggagaggggaatctttatttcatatgtggtatgttggtgttcacatgttgagttgcagctttgaatattgtctgcctttgtgttctcctcccccttggggaaatgtgcctcatttgtggcaaatgtaggggtgcagctctgaacaaggtggacaagatccctgctgttggggaacttgcagtcgaggatctgtaaagcacccacatggcttaaaggtggatgaaggaaactgttccctccagccagtgatttgaaactttggagagaggcagtattggtgccacatttggcctatgggttggttggctgcactgaggctgttctccccctggttcttcctatagaaacagctttgggtgatgcagtggtttgctcaggaagggggttttaacatagaaatgaccttttgtgttactgccgtgttttggtccaacaataaaactgaatagcctaaatcagaagtcctgactagtgtggaacctgaaagatggtggcagctttgtcagacacagatcatgggtcttgctccagaatccattgggctgccaagtgactctttgaagatctgtctgtaatgtgtgagtcttgtccatctgctcttgactctgagctggctaggtgactgttggttattcctgggacaggtgctgggtaggccaggtttcagcatcgcagacaagaagcgcaggacaggctgcattggggccaaacacagaatcagcaaagaggaggccatgcgctggttccagcagaagtatgatgggatcatccttcctggcaaataaattcccgtttctatccaaaagagcaataaaaagttttcagtgaaa

SEQ ID NO: 323473 - DNA, 469 bp, Homo sapiens
ggcctggtacaggccggaatccttaggatccatcatggcgcaggatcaaggtgaaaaggagaaccccatgcgggaacttcgcatccgcaaactctgtctcaacatctgtgttggggagagtggagacagactgacgcgagcagccaaggtgttggagcagctcacagggcagacccctgtgttttccaaagctagatacactgtcagatcctttggcatccggagaaatgaaaagattgctgtccactgcacagttcgaggggccaaggcagaagaaatcttggagaagggtctaaaggtgcgggagtatgagttaagaaaaaacaacttctcagatactggaaactttggttttgggatccaggaacacatcgatctgggtatcaaatatgacccaagcattggtatctcgcctgctctattgtctggagcagttcacatccaaaagagccagcaagctcattggcca

SEQ ID NO: 323474 - DNA, 758 bp, Homo sapiens
tagctgggacctggatttgctttcctttatccgtcgccatccatggcaggccgagcctgcgggggctacttcgcccgcagcccgaggaatatggagcccgcaatgcctgctggcccaaaactagcagagccgttcgagccaaggacgcagggttgaattctgtcactttccctgccatcgttttaggagcggctccgggcacttgcccggagtgctcagaagcacgcaggatcaaggtgaaaaggagaaccccatgcgggaacttcgcatccgcaaactctgtctcaacatctgtgttggggagagtggagacagactgacgcgagcagccaaggtgttggagcagctcacagggcagacccctgtgttttccaaagctagatacactgtcagatcctttggcatccggagaaatgaaaagattgctgtccactgcacagttcgaggggccaaggcagaagaaatcttggagaagggtctaaaggtgcgggagtatgagttaagaggaacacatcgatctgggtatcaaatatgacccaagcattggtatctacggcctggacttctatgtggtgctgggtaggccaggtttcagcatcgcagacaagaagcgcaggacaggctgcattggggccaaacacagaatcagcaaagaggaggccatgcgctggttccagcagaagtatgatgggatcatccttcctggcaaataaattcccgtttctatccaaaagagcaataaaaagttttcagtgaaa

SEQ ID NO: 323475 - DNA, 362 bp, Homo sapiens
ggcctggtacaggccggaatccttaggatccatcatggcgcaggatcaaggtgaaaaggagaaccccatgcgggaacttcgcatccgcaaactctgtctcaacatctgtgttggggagagtggagacagactgacgcgagcagccaaggtgttggagcagctcacagggcagacccctgtgttttccaaagctagatacactgtcagatcctttggcatccggagaaatgaaaagattgctgtccactgcacagttcgaggggccaaggcagaagaaatcttggagaagggtctaaagggtccggagtttagttatgaaccacctctagttctgacttggtttggtcggccaatgtcttgtt

SEQ ID NO: 323476 - DNA, 698 bp, Homo sapiens
tgtctagcattaaactcacacacattaatgtagtatttcaggctttctgcttactattctcttaaaaaatacatctacaaatatctaaaaatgtactcatctttgaagaaccagcctaatataaggcgatattctgtatgaattgtttcttgagatgtcttactttgaaagaggtgaaattctttcaaggtagagaaacactactgcagttagcaagccaccttagacatattctttgccacattcaatttaattttaactctctttgctttttttctttcctttatttaatatttactacaagttcattttatcctagatgggctagtttgcttatctattcatctttcatatatttaaacatatacacttctattaaattttttcttttattttaaaatttaaaattcatttttaaaatataaagattttttaaaatcatatgttactccatttatttattaattaaatttttagggttcttctgttttgtatgaaatacaagtgatttttaagcacagaatactctactaatcctttattgccttatagttttcatcaactctatgacagttctttccattacatggaatatgctatgtgtgcttaagtgtgtataatgtttacattgtctagtgtgaagtatgcttaagtgtatgcggataaatggtgtgtgtgtgtgtgtgtgtgtatgtaca

SEQ ID NO: 323477 - DNA, 750 bp, Homo sapiens
aaatatagcggtctgtaactgctatgatgatctataagtataagagacacatcaaaaattctcagtcattattcatgtttctttatgctgctggcttttgtgccctggaagatcataatagtgaccaaaatatacatgcagacttgttttttattattgttgtttaagcataatttaagaaaaaaaatttttacctggtgaacttgctatctgctctgtttctagttaaaatataataaatattatcttcctgtgctgtaaaaaaaaaaaaaaaaaaaaaaaaaaaaaaaaaaaaaaaaaaaaaaaaaaaaaaaaaaaaaaaaaaaaaaaaaaaaaaaaagaaaagaaaaaagaagcagcagagacaacaaaaaaaaaaaaaaaaagaaagaacaaagcagagaggaacgagagggggaggagggagagaagacagagagagaacaagagaaaaaacagagagggagagaggggaggaatgaagagaaggagaaaaagagaagggagaaggagaaggagagaagaggagacacgcacagcaaggaaggaggggggagtgaaagggcgcgagcaccggaggagaaaggaggagcaaggcagaggcgaagaagcacgagagggagagacaaacgaacgaagaaaaaaaagcacaagacacaaagcgagagacggagagagaggaggaggaggagcgtgggcgcagagaaacaagcggacgcacaacccattggaaaacgcacgcagcgggag

SEQ ID NO: 323478 - DNA, 2335 bp, Homo sapiens
acaaaggcggggattgcgtagggaaaggccctaggccataaacgggggtggggcctccccggaggccagtgcgcggccgcggtgctctaccggcgtgtcgctccgccccagggagagccggcgctaccatggaggagtaccatcgccactgcgacgaggttggcttcaatgctgaggaagcccacaatattgtcaaagagtgtgtagatggggttttaggtggtgaagattataatcacaacaacatcaaccagtggactgcaagcatagtggaacaatccttaacacacctggttaagttgggaaaagcctataaatatattgtgacctgtgcagtggtccagaagagcgcatatggctttcacacagccagctcctgtttttgggataccacatctgatggaacctgtaccgtaagatgggagaaccggaccatgaactgtattgtcaacgtttttgccattgctattgttctttaactgactaaaaatgttgggctaaagccattaacttaagaatttgtcagtgtatcctttccaaaaagagtaatagttgtttactagtgtgctagatgaaaagcgtgcaatatgctttaaagctatcaacaaaaactgaatattataagcaagcaatatcatagtaattggcagattagctcatattctatacagcatcgtttaaataggaaaaatttaatgctagcaaaaaataaatttagaaatatggcatgacatgaaaatacaatcttatatttacaccagcttttcactaatattttgtacctaaggtgatggggaactccattcagataataaaattctctttcagctagagaagttaacaggaataaatatatgaacaaaaaagctgcaaggataaatgtggagaaaatgatgagaattagctaacatttttaagtttttttaaactttcttcccctcagttgtacttaatatttagtggaaagtaataatttttttaattttctatcaactaatagtatagtaacaactatgattaacttgtttactttttctgaggattagtaaatcaattttttttaatttcaaatttttggatttacacttgagggtaaattaaatctggtaaactgaatttcctagttaaataaaattagttgcagtatatgatgaacagtgtatgactcaaacagctgccttacaattcactcattccatgtggaacaaacatttatcagatgcctattatgggcatatgtctctgctaagcaccatagttgtcaatgtgctgtgcaaatgctaagttccttttagcaattgttcagttggaagacgtattaatatttggggaaggaaaagaaagtagttgttttacaagggaggaaaaaagtgaatctggttacacatatggaagtaagcaaaatgaaaagcacttattgctttctgacagaattatagatgtaattttaagagttgctcctagcaagttaaaagtgcatataaaatatgcaactcttagttaaaggccttattatcagtcttacctatacaagtagtaaattttgtcattgctttagttacaaccatctgtaaataacttaaaagacttattatgtggggttcaaattgagtggaataaagtatagattaaaagtatacaatccttagcacgttatctcagggcttatgaaatgtaattaaatttattaagaaaatagatgaaaaattagggtacacagctggccaccaaatgcgaagtcaatctgctacttaaccctgaaaacaaaatcagttttgcatattaccactaacactaatacatatagagagcggaaccataactcattgaattttggagaggaataagcttagcgttaatattgacaatattaaggcaatattcttgtaggaatactatgtgcatgtttgatattttgccaaataacaataattaataattgttcaatgtttaagaataatattaacaaaataaaggagtttaatgcagtgatctttgtttttggcacatcaaaaattctcagtcattattcatgtttctttatgctgctggcttttgtgccctggaagatcataatagtgaccaaaatatacatgcagacttgttttttattattgttgtttaagcataatttaagaaaaaaaatttttacctggtgaacttgctatctgctctgtttctagttaaaatataataaatattatcttcctgtgctgtaaaaaacaacaaaaaaaaacaacacaaacaaccacaacaacacaacaaacaaacaaccacaacaacaacaaacacaacagcaacaacacagaccacaccaaacaacaacacaacacaa

SEQ ID NO: 323479 - DNA, 2167 bp, Homo sapiens
aagctggtacggtcctcagtcgtatcatcggtgctctaccggcgtgtcgctccgccccagggagagccggcgctaccatggaggagtaccatcgccactgcgacgaggttggcttcaatgctgaggaagcccacaatattgtcaaagagtgtgtagatggggttttaggtggtgaagattataatcacaacaacatcaaccagtggactgcaagcatagtggaacaatccttaacacacctggttaagttgggaaaagcctataaatatattgtgacctgtgcagtggtccagaagagcgcatatggctttcacacagccagctcctgtttttgggataccacatctgatggaacctgtaccgtaagatgggagaaccggaccatgaactgtattgtcaacgtttttgccattgctattgttctttaactgactaaaaatgttgggctaaagccattaacttaagaatttgtcagtgtatcctttccaaaaagagtaatagttgtttactagtgtgctagatgaaaagcgtgcaatatgctttaaagctatcaacaaaaactgaatattataagcaagcaatatcatagtaattggcagattagctcatattctatacagcatcgtttaaataggaaaaatttaatgctagcaaaaaataaatttagaaatatggcatgacatgaaaatacaatcttatatttacaccagcttttcactaatattttgtacctaaggtgatggggaactccattcagataataaaattctctttcagctagagaagttaacaggaataaatatatgaacaaaaaagctgcaaggataaatgtggagaaaatgatgagaattagctaacatttttaagtttttttaaactttcttcccctcagttgtacttaatatttagtggaaagtaataatttttttaattttctatcaactaatagtatagtaacaactatgattaacttgtttactttttctgaggattagtaaatcaattttttttaatttcaaatttttggatttacacttgagggtaaattaaatctggtaaactgaatttcctagttaaataaaattagttgcagtatatgatgaacagtgtatgactcaaacagctgccttacaattcactcattccatgtggaacaaacatttatcagatgcctattatgggcatatgtctctgctaagcaccatagttgtcaatgtgctgtgcaaatgctaagttccttttagcaattgttcagttggaagacgtattaatatttggggaaggaaaagaaagtagttgttttacaagggaggaaaaaagtgaatctggttacacatatggaagtaagcaaaatgaaaagcacttattgctttctgacagaattatagatgtaattttaagagttgctcctagcaagttaaaagtgcatataaaatatgcaactcttagttaaaggccttattatcagtcttacctatacaagtagtaaattttgtcattgctttagttacaaccatctgtaaataacttaaaagacttattatgtggggttcaaattgagtggaataaagtatagattaaaagtatacaatccttagcacgttatctcagggcttatgaaatgtaattaaatttattaagaaaatagatgaaaaattagggtacacagctggccaccaaatgcgaagtcaatctgctacttaaccctgaaaacaaaatcagttttgcatattaccactaacactaatacatatagagagcggaaccataactcattgaattttggagaggaataagcttagcgttaatattgacaatattaaggcaatattcttgtaggaatactatgtgcatgtttgatattttgccaaataacaataattaataattgttcaatgtttaagaataatattaacaaaataaaggagtttaatgcagtgatctttgtttttggcacatcaaaaattctcagtcattattcatgtttctttatgctgctggcttttgtgccctggaagatcataatagtgaccaaaatatacatgcagacttgttttttattattgttgtttaagcataatttaagaaaaaaaatttttacctggtgaacttgctatctgctctgtttctagttaaaatataataaatattatcttcctgtgctgta

SEQ ID NO: 323480 - DNA, 1293 bp, Homo sapiens
acgggaataagtaccattcgtttgctatccgctactagtatagtagcgactatgatcatactcggttacttaggcggtacccgtagtgtacgtagaatcagatgcttggaaactccccattaaaaggatgcccgatgctgggaggggaaactgtaactgctggtatcctgatggagctcaggagagttataaacttggttcgtcatgcatctggaagacacaggtatcgacgtccaatacagattgccgtctcaccagatccagctcattccatgtggaacaaacatttatcagatgcctattatgggcatatgtctctgctaagcaccatagttgtcaatgtgctgtgcaaatgctaagttccttttagcaattgttcagttggaagacgtattaatatttggggaaggaaaagaaagtagttgttttacaagggaggaaaaaagtgaatctggttacacatatggaagtaagcaaaatgaaaagcacttattgctttctgacagaattatagatgtaattttaagagttgctcctagcaagttaaaagtgcatataaaatatgcaactcttagttaaaggccttattatcagtcttacctatacaagtagtaaattttgtcattgctttagttacaaccatctgtaaataacttaaaagacttattatgtggggttcaaattgagtggaataaagtatagattaaaagtatacaatccttagcacgttatctcagggcttatgaaatgtaattaaatttattaagaaaatagatgaaaaattagggtacacagctggccaccaaatgcgaagtcaatctgctacttaaccctgaaaacaaaatcagttttgcatattaccactaacactaatacatatagagagcggaaccataactcattgaattttggagaggaataagcttagcgttaatattgacaatattaaggcaatattcttgtaggaatactatgtgcatgtttgatattttgccaaataacaataattaataattgttcaatgtttaagaataatattaacaaaataaaggagtttaatgcagtgatctttgtttttggcacatcaaaaattctcagtcattattcatgtttctttatgctgctggcttttgtgccctggaagatcataatagtgaccaaaatatacatgcagacttgttttttattattgttgtttaagcataatttaagaaaaaaaatttttacctggtgaacttgctatctgctctgtttctagttaaaatataataaatattatcttcctgtgctgta

SEQ ID NO: 323481 - DNA, 587 bp, Homo sapiens
tacatacttccggataggccgagaaagtgttgagggaagaaagttagatttacgccgatgaatatgatatgaaaaattagggtacacagctggccaccaaatgcgaagtcaatctgctacttaaccctgaaaacaaaatcagttttgcatattaccactaacactaatacatatagagagcggaaccataactcattgaattttggagaggaataagcttagcgttaatattgacaatattaaggcaatattcttgtaggaatactatgtgcatgtttgatattttgccaaataacaataattaataattgttcaatgtttaagaataatattaacaaaataaaggagtttaatgcagtgatctttgtttttggcacatcaaaaattctcagtcattattcatgtttctttatgctgctggcttttgtgccctggaagatcataatagtgaccaaaatatacatgcagacttgttttttattattgttgtttaagcataatttaagaaaaaaaatttttacctggtgaacttgctatctgctctgtttctagttaaaatataataaatattatcttcctgtgctgta

SEQ ID NO: 323482 - DNA, 2218 bp, Homo sapiens
acaaaggcggggattgcgtagggaaaggccctaggccataaacgggggtggggcctccccggaggccagtgcgcggccgcggtgctctaccggcgtgtcgctccgccccagggagagccggcgctaccatggaggagtaccatcgccactgcgacgaggttggcttcaatgctgaggaagcccacaatattgtcaaagagtgtgtagatggggttttaggtggtgaagattataatcacaacaacatcaaccagtggactgcaagcatagtggaacaatccttaacacacctggttaagttgggaaaagcctataaatatattgtgacctgtgcagtggtccagaagagcgcatatggctttcacacagccagctcctgtttttgggataccacatctgatggaacctgtaccgtaagatgggagaaccggaccatgaactgtattgtcaacgtttttgccattgctattgttctttaactgactaaaaatgttgggctaaagccattaacttaagaatttgtcagtgtatcctttccaaaaagagtaatagttgtttactagtgtgctagatgaaaagcgtgcaatatgctttaaagctatcaacaaaaactgaatattataagcaagcaatatcatagtaattggcagattagctcatattctatacagcatcgtttaaataggaaaaatttaatgctagcaaaaaataaatttagaaatatggcatgacatgaaaatacaatcttatatttacaccagcttttcactaatattttgtacctaaggtgatggggaactccattcagataataaaattctctttcagctagagaagttaacaggaataaatatatgaacaaaaaagctgcaaggataaatgtggagaaaatgatgagaattagctaacatttttaagtttttttaaactttcttcccctcagttgtacttaatatttagtggaaagtaataatttttttaattttctatcaactaatagtatagtaacaactatgattaacttgtttactttttctgaggattagtaaatcaattttttttaatttcaaatttttggatttacacttgagggtaaattaaatctggtaaactgaatttcctagttaaataaaattagttgcagtatatgatgaacagtgtatgactcaaacagctgccttacaattcactcattccatgtggaacaaacatttatcagatgcctattatgggcatatgtctctgctaagcaccatagttgtcaatgtgctgtgcaaatgctaagttccttttagcaattgttcagttggaagacgtattaatatttggggaaggaaaagaaagtagttgttttacaagggaggaaaaaagtgaatctggttacacatatggaagtaagcaaaatgaaaagcacttattgctttctgacagaattatagatgtaattttaagagttgctcctagcaagttaaaagtgcatataaaatatgcaactcttagttaaaggccttattatcagtcttacctatacaagtagtaaattttgtcattgctttagttacaaccatctgtaaataacttaaaagacttattatgtggggttcaaattgagtggaataaagtatagattaaaagtatacaatccttagcacgttatctcagggcttatgaaatgtaattaaatttattaagaaaatagatgaaaaattagggtacacagctggccaccaaatgcgaagtcaatctgctacttaaccctgaaaacaaaatcagttttgcatattaccactaacactaatacatatagagagcggaaccataactcattgaattttggagaggaataagcttagcgttaatattgacaatattaaggcaatattcttgtaggaatactatgtgcatgtttgatattttgccaaataacaataattaataattgttcaatgtttaagaataatattaacaaaataaaggagtttaatgcagtgatctttgtttttggcacatcaaaaattctcagtcattattcatgtttctttatgctgctggcttttgtgccctggaagatcataatagtgaccaaaatatacatgcagacttgttttttattattgttgtttaagcataatttaagaaaaaaaatttttacctggtgaacttgctatctgctctgtttctagttaaaatataataaatattatcttcctgtgctgta

SEQ ID NO: 323483 - DNA, 513 bp, Homo sapiens
acaaaggcggggattgcgtagggaaaggccctaggccataaacgggggtggggcctccccggaggccagtgcgcggccgcggtgctctaccggcgtgtcgctccgccccagggagagccggcgctaccatggaggagtaccatcgccactgcgacgaggttggcttcaatgctgaggaagcccacaatattgtcaaagagtgtgtagatggggttttaggtggtgaagattataatcacaacaacatcaaccagtggactgcaagcatagtggaacaatccttaacacacctggttaagttgggaaaagcctataaatatattgtgacctgtgcagtggtccagaagagcgcatatggctttcacacagccagctcctgtttttgggataccacatctgatggaacctgtaccgtaagatgggagaaccggaccatgaactgtattgtcaacgtttttgccattgctattgttctttaactgactaaaaatgttgggctaaagccattaactt

SEQ ID NO: 323484 - DNA, 96 bp, Homo sapiens
cacacagcagctgaagccatcttttcaaaatgcaaattggatcatgtcacctccctcactgcagggcctgacattttaagggttttccgttgccct

SEQ ID NO: 323485 - DNA, 515 bp, Homo sapiens
  misc_feature (31)..(31): n is a, c, g, or t
cgttaccaatctgaagtgggagcggccgagnggacgcaaacatgcagatctttgtgaagaccctcactggcaaaaccatcacccttgaggtcgagcccagtgacaccattgagaatgtcaaagccaaaattcaagacaaggagggtatcccacctgaccagcagcgtctgatatttgccggcaaacagctggaggatggccgcactctctcagactacaacatccagaaagagtccaccctgcacctggtgttgcgcctgcgaggtggcattattgagccttctctccgccagcttgcccagaaatacaactgcgacaagatgatctgccgcaagtgctatgctcgccttcaccctcgtgctgtcaactgccgcaagaagaagtgtggtcacaccaacaacctgcgtcccaagaagaaggtcaaataaggttgttctttccttgaagggcagcctcctgcccaggccccgtggccctggagcctcaataaagtgtccctttcattgactggagca

SEQ ID NO: 323486 - DNA, 524 bp, Homo sapiens
gcggccgcctactattactaaattcgcggccgcgtcgacctgacgcaaacatgcagatctttgtgaagaccctcactggcaaaaccatcacccttgaggtcgagcccagtgacaccattgagaatgtcaaagccaaaattcaagacaaggagggtatcccacctgaccagcagcgtctgatatttgccggcaaacagctggaggatggccgcactctctcagactacaacatccagaaagagtccaccctgcacctggtgttgcgcctgcgaggtggcattattgagccttctctccgccagcttgcccagaaatacaactgcgacaagatgatctgccgcaagtgctatgctcgccttcaccctcgtgctgtcaactgccgcaagaagaagtgtggtcacaccaacaacctgcgtcccaagaagaaggtcaaataaggttgttctttccttgaagggcagcctcctgcccaggccccgtggccctggagcctcaataaagtgtccctttcattgactggagca

SEQ ID NO: 323487 - DNA, 568 bp, Homo sapiens
gtgctccgtgcgcaagcgctttcggcggcgattaggtggtttccggttccgctatcttctttttcttcagcgaggcggccgagctgacgcaaacatgcagatctttgtgaagaccctcactggcaaaaccatcacccttgaggtcgagcccagtgacaccattgagaatgtcaaagccaaaattcaagacaaggagggtatcccacctgaccagcagcgtctgatatttgccggcaaacagctggaggatggccgcactctctcagactacaacatccagaaagagtccaccctgcacctggtgttgcgcctgcgaggtggcattattgagccttctctccgccagcttgcccagaaatacaactgcgacaagatgatctgccgcaagtgctatgctcgccttcaccctcgtgctgtcaactgccgcaagaagaagtgtggtcacaccaacaacctgcgtcccaagaagaaggtcaaataaggttgttctttccttgaagggcagcctcctgcccaggccccgtggccctggagcctcaataaagtgtccctttcattgactggagca

SEQ ID NO: 323488 - DNA, 765 bp, Homo sapiens
aggtggttggtagatactaagtgatgttcgtggtttggggtcaaggcaagaagtggggtctggagagttttggtgtaattgagaaggaagctaagagtgttgggtgctccagcttggagttagagaggagagaggctgcgacaggaaggcatgtgtgttgtaggggatggcttcccatccaggctggcagcaggagcagcctgtgcagatcaggacctggctgccgtggaagagggtgggaccgccttcagggaagatggatctagcaagatgatgccaaaggacgcaaacatgcagatctttgtgaagaccctcactggcaaaaccatcacccttgaggtcgagcccagtgacaccattgagaatgtcaaagccaaaattcaagacaaggagggtatcccacctgaccagcagcgtctgatatttgccggcaaacagctggaggatggccgcactctctcagactacaacatccagaaagagtccaccctgcacctggtgttgcgcctgcgaggtggcattattgagccttctctccgccagcttgcccagaaatacaactgcgacaagatgatctgccgcaagtgctatgctcgccttcaccctcgtgctgtcaactgccgcaagaagaagtgtggtcacaccaacaacctgcgtcccaagaagaaggtcaaataaggttgttctttccttgaagggcagcctcctgcccaggccccgtggccctggagcctcaataaagtgtccctttcattgactggagca

SEQ ID NO: 323489 - DNA, 680 bp, Homo sapiens
tgtttagactacaggccagggtgtgtgagaagcctagcagggccaggcttggaggagtgaaaggaagacaggtactggggcaggaccagttggacttggtgcaggcaaagggatagcaactgtggtgtaggcacctgagcttgtgctactcaggcatgcattgctcaccagtctatcctgcctcccttcctcctgcagacgcaaacatgcagatctttgtgaagaccctcactggcaaaaccatcacccttgaggtcgagcccagtgacaccattgagaatgtcaaagccaaaattcaagacaaggagggtatcccacctgaccagcagcgtctgatatttgccggcaaacagctggaggatggccgcactctctcagactacaacatccagaaagagtccaccctgcacctggtgttgcgcctgcgaggtggcattattgagccttctctccgccagcttgcccagaaatacaactgcgacaagatgatctgccgcaagtgctatgctcgccttcaccctcgtgctgtcaactgccgcaagaagaagtgtggtcacaccaacaacctgcgtcccaagaagaaggtcaaataaggttgttctttccttgaagggcagcctcctgcccaggccccgtggccctggagcctcaataaagtgtccctttcattgactggagca

SEQ ID NO: 323490 - DNA, 1028 bp, Homo sapiens
  misc_feature (817)..(817): n is a, c, g, or t
tgatgaggatccccgaaactctggcggacgagctggttggtggcggcggtcgtgcggacgcaaacatgcagatctttgtgaagaccctcactggcaaaaccatcacccttgaggtcgagcccagtgacaccattgagaatgtcaaagccaaaattcaagacaaggagggtatcccacctgaccagcagcgtctgatatttgccggcaaacagctggaggatggccgcactctctcagactacaacatccagaaagagtccaccctgcacctggtgttgcgcctgcgaggtggcattattgagccttctctccgccagcttgcccagaaatacaactgcgacaagatgatctgccgcaagtgctatgctcgccttcaccctcgtgctgtcaactgccgcaagaagaagtgtggtcacaccaacaacctgcgtcccaagaagaaggtcaaataaggttgttctttccttgaagggcagcctcctgcccaggccccgtggccctggagcctcaataaagtgtccctttcattgactggagcaaaaaaaaaaaaaaaaaaaaaaaaaaaaaaaaaaaaaaaaaaaaaaaaagggggggggcggaaaaattttccccggggggggcccaaatttacgggacacccgttttttttgaacagaggcgggcccaaggagggcgctaaaataggccagagcggggccgcggctaacaccagcgccctgaggaacacctggacctggggatttgggagaagagccctcctgcggggggggctatgtgggaccaccccaagagagattaacggccaaggaatatcccntacagtgtaggtgtaccccaccggcttctcgccgagcagttgtgcagggattgattaagattacgagggcacgaatacataagtgcatctacgaatagcgatctatcatgatacggcaacagtcaccatgccacagcagctggtaaagctcaaccaagtaacactcaagagctactcacaaccacaaccagtaagtgataggatatcgaaa

SEQ ID NO: 323491 - DNA, 1260 bp, Homo sapiens
  misc_feature (964)..(964): n is a, c, g, or t
aggtggttggtagatactaagtgatgttcgtggtttggggtcaaggcaagaagtggggtctggagagttttggtgtaattgagaaggaagctaagagtgttgggtgctccagcttggagttagagaggagagaggctgcgacaggaaggcatgtgtgttgtaggggatggcttcccatccaggctggcagcaggagcagcctgtgcagatcaggacctggctgccgtggaagagggtgggaccgccttcagggaagatggatctagcaagatgatgccaaaggacgcaaacatgcagatctttgtgaagaccctcactggcaaaaccatcacccttgaggtcgagcccagtgacaccattgagaatgtcaaagccaaaattcaagacaaggagggtatcccacctgaccagcagcgtctgatatttgccggcaaacagctggaggatggccgcactctctcagactacaacatccagaaagagtccaccctgcacctggtgttgcgcctgcgaggtggcattattgagccttctctccgccagcttgcccagaaatacaactgcgacaagatgatctgccgcaagtgctatgctcgccttcaccctcgtgctgtcaactgccgcaagaagaagtgtggtcacaccaacaacctgcgtcccaagaagaaggtcaaataaggttgttctttccttgaagggcagcctcctgcccaggccccgtggccctggagcctcaataaagtgtccctttcattgactggagcaaaaaaaaaaaaaaaaaaaaaaaaacgggggcctcattggcggggggggggaaaaagaggggttggaagggggcggggaaaaaggggtccgggccccagttttttggcccaggggggaaaacgggcgggctccccaagggggggggataaaattgcaaaacgccgcggctagcctgctaggacggtggtggcaaaaaacngggggtgacagcacccgggacaatcccaggccactgagtacccattgtgtaacacaaaacgtggcgtgaacacaacacttgaaggggcatggctataccaagtttccctaccggagatcacgtgacagcctcgatacaaaccaaccgaggttccgggacgaggacagggacaagtaggtgtaacaaaagggcgtgatgacacacacacaaggagcagggggacaacaacaatagctacacacagggacagcatggcgggacacagaataacagcaagtcccagatccgcgcagagc

SEQ ID NO: 323492 - DNA, 813 bp, Homo sapiens
tgtttagactacaggccagggtgtgtgagaagcctagcagggccaggcttggaggagtgaaaggaagacaggtactggggcaggaccagttggacttggtgcaggcaaagggatagcaactgtggtgtaggcacctgagcttgtgctactcaggcatgcattgctcaccagtctatcctgcctcccttcctcctgcagacgcaaacatgcagatctttgtgaagaccctcactggcaaaaccatcacccttgaggtcgagcccagtgacaccattgagaatgtcaaagccaaaattcaagacaaggagggtatcccacctgaccagcagcgtctgatatttgccggcaaacagctggaggatggccgcactctctcagactacaacatccagaaagagtccaccctgcacctggtgttgcgcctgcgaggtggcattattgagccttctctccgccagcttgcccagaaatacaactgcgacaagatgatctgccgcaagtgctatgctcgccttcaccctcgtgctgtcaactgccgcaagaagaagtgtggtcacaccaacaacctgcgtcccaagaagaaggtcaaataaggttgttctttccttgaagggcagcctcctgcccaggccccgtggccctggagcctcaataaagtgtccctttcattgactggagcacaaaaaaaaaaaaaaaaagggcggccgaaatatttgaaaaaagaaattgcattggtactgaacacgtacagacctttttttcttgccattaataccaaatacaatataaatgctatgtaaatatgctacacca

SEQ ID NO: 323493 - DNA, 377 bp, Homo sapiens
  misc_feature (22)..(22): n is a, c, g, or t
  misc_feature (31)..(31): n is a, c, g, or t
gagagagatctagaggatcccnacgaggcgnggcgagctgacgcaaacatgcagatctttgtgaagaccctcactggcaaaaccatcacccttgaggtcgagcccagtgacaccattgagaatgtcaaagccaaaattcaagacaaggagggtatcccacctgaccagcagcgtctgatatttgccggcaaacagctggaggatggccgcactctctcagactacaacatccagaaagagtccaccctgcacctggtgttgcgcctgcgaggtggcattattgagccttctctccgccagcttgcccagaaatacaactgcgacaagatgatctgccgcaagctatgctcgccttcaccctcgtgccgggtaccgag

SEQ ID NO: 323494 - DNA, 268 bp, Homo sapiens
cgcggccgcgcgacaagacgacagaagtgagccttctctccgccagcttgcccagaaatacaactgcgacaagatgatctgccgcaagtgctatgctcgccttcaccctcgtgctgtcaactgccgcaagaagaagtgtggtcacaccaacaacctgcgtcccaagaagaaggtcaaataaggttgttctttccttgaagggcagcctcctgcccaggccccgtggccctggagcctcaataaagtgtccctttcattgactggagca

SEQ ID NO: 323495 - DNA, 222 bp, Homo sapiens
aggacacaaaaacaaaaacaatatgcgcctagcgctcgaggcctggtgtaattggcagagcctcgtgctgtcaactgccgcaagaagaagtgtggtcacaccaacaacctgcgtcccaagaagaaggtcaaataaggttgttctttccttgaagggcagcctcctgcccaggccccgtggccctggagcctcaataaagtgtccctttcattgactggagca

SEQ ID NO: 323496 - DNA, 329 bp, Homo sapiens
aggtggttggtagatactaagtgatgttcgtggtttggggtcaaggcaagaagtggggtctggagagttttggtgtaattgagaaggaagctaagagtgttgggtgctccagcttggagttagagaggagagaggctgcgacaggaaggcatgtgtgttgtaggggatggcttcccatccaggctggcagcaggagcagcctgtgcagatcaggacctggctgccgtggaagagggtgggaccgccttcagggaagatggatctagcaagatgatgccaaagggtacttattccatcaggagatactgacgagtccttccgccgctaaa

SEQ ID NO: 323497 - DNA, 170 bp, Homo sapiens
gcgtcgaccttcttcttgggacgcaggttgttggtgtgaccacacttcttcttgcggcagttgacagcacgagggtcaaataaggttgttctttccttgaagggcagcctcctgcccaggccccgtggccctggagcctcaataaagtgtccctttcattgactggagca

SEQ ID NO: 323498 - DNA, 637 bp, Homo sapiens
  misc_feature (16)..(16): n is a, c, g, or t
  misc_feature (118)..(118): n is a, c, g, or t
  misc_feature (121)..(122): n is a, c, g, or t
gatccccctgaccttnggacgccctcactattaatctactgggagaactctctgtgctagtaaccacgttctcctgatcaaatatcactctctcagactacaacatccagaaaggtcnacnngctttctttttcttcagcgaggcggccgagctgacgcaaacatgcagatctttgtgaagaccctcactggcaaaaccatcacccttgaggtcgagcccagtgacaccattgagaatgtcaaagccaaaattcaagacaaggagggtatcccacctgaccagcagcgtctgatatttgccggcaaacagctggaggatggccgcactctctcagactacaacatccagaaagagtccaccctgcacctggtgttgcgcctgcgaggtggcattattgagccttctctccgccagcttgcccagaaatacaactgcgacaagatgatctgccgcaagtgctatgctcgccttcaccctcgtgctgtcaactgccgcaagaagaagtgtggtcacaccaacaacctgcgtcccaagaagaaggtcaaataaggttgttctttccttgaagggcagcctcctgcccaggccccgtggccctggagcctcaataaagtgtccctttcattgactggagca

SEQ ID NO: 323499 - DNA, 842 bp, Homo sapiens
  misc_feature (16)..(16): n is a, c, g, or t
  misc_feature (118)..(118): n is a, c, g, or t
  misc_feature (121)..(122): n is a, c, g, or t
gatccccctgaccttnggacgccctcactattaatctactgggagaactctctgtgctagtaaccacgttctcctgatcaaatatcactctctcagactacaacatccagaaaggtcnacnngctttctttttcttcagcgaggcggccgagctgacgcaaacatgcagatctttgtgaagaccctcactggcaaaaccatcacccttgaggtcgagcccagtgacaccattgagaatgtcaaagccaaaattcaagacaaggagggtatcccacctgaccagcagcgtctgatatttgccggcaaacagctggaggatggccgcactctctcagactacaacatccagaaagagtccaccctgcacctggtgttgcgcctgcgaggtggcattattgagccttctctccgccagcttgcccagaaatacaactgcgacaagatgatctgccgcaagtgctatgctcgccttcaccctcgtgctgtcaactgccgcaagaagaagtgtggtcacaccaacaacctgcgtcccaagaagaaggtcaaataaggttgttctttccttgaagggcagcctcctgcccaggccccgtggccctggagcctcaataaagtgtccctttcattgactggagcagcaattggtgtcctcatggctgatctgtccagggaggtggctgaagagtgggcatctcccttagggactctactcagcactccattctgtgccacctgtggggtcttctgtcctagattctgtcacatcggcattggtccctgccctatgcccctgactctggatttgtcatctgtaaaactggagtaaaaacctcagtcgtgta

SEQ ID NO: 323500 - DNA, 677 bp, Homo sapiens
taaaaatacggaagtttattgtaggacactcagtgtgaataaatggaatggaaaggcctacacatcgagactcatccatgattgatatgaatttaaaaattacaagcaaagacattttattcatcatgatgctttcttttgtttcttcttttcgttttcttctttgtctttttcttcagcgaggcggccgagctgacgcaaacatgcagatctttgtgaagaccctcactggcaaaaccatcacccttgaggtcgagcccagtgacaccattgagaatgtcaaagccaaaattcaagacaaggagggtatcccacctgaccagcagcgtctgatatttgccggcaaacagctggaggatggccgcactctctcagactacaacatccagaaagagtccaccctgcacctggtgttgcgcctgcgaggtggcattattgagccttctctccgccagcttgcccagaaatacaactgcgacaagatgatctgccgcaagtgctatgctcgccttcaccctcgtgctgtcaactgccgcaagaagaagtgtggtcacaccaacaacctgcgtcccaagaagaaggtcaaataaggttgttctttccttgaagggcagcctcctgcccaggccccgtggccctggagcctcaataaagtgtccctttcattgactggagca

SEQ ID NO: 323501 - DNA, 1288 bp, Homo sapiens
gactctacaggatcttcgtacttgtgacgccttggacgcctgatcttgacgctatcttctttttcttcagcgaggcggccgagctggttggtggcggcggtcgtgcgggttcgcgccgggccgagagcgggttgggggctgcgggaggctgcaggggcctgggcggcagaagaggcggccctgagctggctcatgcgggccagtctcggcagggtggctgggcagggctcgcgaggccacggctcggagcccagaccggggcccaggaggcgagcgccgttttggagaggagcctgcctgctctgcctgccagcgtgaccccacgaggcctcgggcgggaagaggtcctcggggcagatccgagttaatgagagaggggtattgagcgtgtagcgttaactctgccagtcactgcgtcagtcgctttggaaatactaaatttctcgagctgagtcttcatacctggctccattactacgtctgtaaggaggagctggtggtagtgtctgctttttagacttttctttagactatttgtatttttttcagatggagtcttgctctgtcgcctaagctggagttcagtggtgcggtctcggctcactgcaatctccacctcccgggctcgagcgattcttctgcctcagcctcccgagtagctgggattataggcgcctgccaccacgcccagttgatttttgtagttttagtagagacggagtttcaccatgttagccaggctcatcttgaactcttgacctcaaatgatccgtctgcctcggccttccaaagtgctgggattacagacgcaaacatgcagatctttgtgaagaccctcactggcaaaaccatcacccttgaggtcgagcccagtgacaccattgagaatgtcaaagccaaaattcaagacaaggagggtatcccacctgaccagcagcgtctgatatttgccggcaaacagctggaggatggccgcactctctcagactacaacatccagaaagagtccaccctgcacctggtgttgcgcctgcgaggtggcattattgagccttctctccgccagcttgcccagaaatacaactgcgacaagatgatctgccgcaagtgctatgctcgccttcaccctcgtgctgtcaactgccgcaagaagaagtgtggtcacaccaacaacctgcgtcccaagaagaaggtcaaataaggttgttctttccttgaagggcagcctcctgcccaggccccgtggccctggagcctcaataaagtgtccctttcattgactggagca

SEQ ID NO: 323502 - DNA, 590 bp, Homo sapiens
gactctacaggatcttcgtacttgtgacgccttggacgcctgatcttgacgctatcttctttttcttcagcgaggcggccgagctggttggtggcggcggtcgtgcggacgcaaacatgcagatctttgtgaagaccctcactggcaaaaccatcacccttgaggtcgagcccagtgacaccattgagaatgtcaaagccaaaattcaagacaaggagggtatcccacctgaccagcagcgtctgatatttgccggcaaacagctggaggatggccgcactctctcagactacaacatccagaaagagtccaccctgcacctggtgttgcgcctgcgaggtggcattattgagccttctctccgccagcttgcccagaaatacaactgcgacaagatgatctgccgcaagtgctatgctcgccttcaccctcgtgctgtcaactgccgcaagaagaagtgtggtcacaccaacaacctgcgtcccaagaagaaggtcaaataaggttgttctttccttgaagggcagcctcctgcccaggccccgtggccctggagcctcaataaagtgtccctttcattgactggagca

SEQ ID NO: 323503 - DNA, 590 bp, Homo sapiens
gtgctccgtgcgcaagcgctttcggcggcgattaggtggtttccggttccgctatcttctttttcttcagcgaggcggccgagctggttggtggcggcggtcgtgcggacgcaaacatgcagatctttgtgaagaccctcactggcaaaaccatcacccttgaggtcgagcccagtgacaccattgagaatgtcaaagccaaaattcaagacaaggagggtatcccacctgaccagcagcgtctgatatttgccggcaaacagctggaggatggccgcactctctcagactacaacatccagaaagagtccaccctgcacctggtgttgcgcctgcgaggtggcattattgagccttctctccgccagcttgcccagaaatacaactgcgacaagatgatctgccgcaagtgctatgctcgccttcaccctcgtgctgtcaactgccgcaagaagaagtgtggtcacaccaacaacctgcgtcccaagaagaaggtcaaataaggttgttctttccttgaagggcagcctcctgcccaggccccgtggccctggagcctcaataaagtgtccctttcattgactggagca

SEQ ID NO: 323504 - DNA, 2875 bp, Homo sapiens
gactctacaggatcttcgtacttgtgacgccttggacgcctgatcttgacgctatcttctttttcttcagcgaggcggccgagctggttggtggcggcggtcgtgcgggttcgcgccgggccgagagcgggttgggggctgcgggaggctgcaggggcctgggcggcagaagaggcggccctgagctggctcatgcgggccagtctcggcagggtggctgggcagggctcgcgaggccacggctcggagcccagaccggggcccaggaggcgagcgccgttttggagaggagcctgcctgctctgcctgccagcgtgaccccacgaggcctcgggcgggaagaggtcctcggggcagatccgagttaatgagagaggggtattgagcgtgtagcgttaactctgccagtcactgcgtcagtcgctttggaaatactaaatttctcgagctgagtcttcatacctggctccattactacgtctgtaaggaggagctggtggtagtgtctgctttttagacttttctttagactatttgtatttttttcagatggagtcttgctctgtcgcctaagctggagttcagtggtgcggtctcggctcactgcaatctccacctcccgggctcgagcgattcttctgcctcagcctcccgagtagctgggattataggcgcctgccaccacgcccagttgatttttgtagttttagtagagacggagtttcaccatgttagccaggctcatcttgaactcttgacctcaaatgatccgtctgcctcggccttccaaagtgctgggattacagacgcaaacatgcagatctttgtgaagaccctcactggcaaaaccatcacccttgaggtcgagcccagtgacaccattgagaatgtcaaagccaaaattcaagacaaggagggtatcccacctgaccagcagcgtctgatatttgccggcaaacagctggaggatggccgcactctctcagactacaacatccagaaagagtccaccctgcacctggtgttgcgcctgcgaggtggcattattgagccttctctccgccagcttgcccagaaatacaactgcgacaagatgatctgccgcaagtgctatgctcgccttcaccctcgtgctgtcaactgccgcaagaagaagtgtggtcacaccaacaacctgcgtcccaagaagaaggtcaaataaggttgttctttccttgaagggcagcctcctgcccaggccccgtggccctggagcctcaataaagtgtccctttcattgactggagcagcaattggtgtcctcatggctgatctgtccagggaggtggctgaagagtgggcatctcccttagggactctactcagcactccattctgtgccacctgtggggtcttctgtcctagattctgtcacatcggcattggtccctgccctatgcccctgactctggatttgtcatctgtaaaactggagtaaaaacctcagtcgtgtaattggtgggactgaggatcagttttgtcattgctgggatcctgtcaggcactttgaggtgtccctcaggccttggccctgaagtgtctaggtgtgtggagatgggtagaaaattaggtacacccaatggtgtagaacgttgattctcaaatttttttattttatacaaatggggtctcactatgttgtccaggctggtcttgaactcctgggctcaagccatccgcccatctcagcccctcaaagtgttgggattacaagcaagaactgccatgcctgacccagttctcagttttttgtttgtttgtttgtttgtttgttttgagacggagtcttgctctgtcgcccaggctggagtgcagtggcgcagtctcggcttactacaacctctgcctccggggttcacatccttctcctgcctcagcctcccgagtagctgggactacaggtgcccgccacaactcctggctaattttttgtatttttagtagagacggggtttcactgggttagccaggttggtctcgatctcctgaccttgtgatccattcgccttggcctcccagaatgctggtattacaggcgtgagccagcacgcctggcccagttactcagttttgaatctgaggccgtgacatcactcatggtctgcagtcagtgctctgcccctgagctgtaccctctcctatgataatcactcttaagaagggcaacccttggtgttttccccttaaggtcacccaggctggaatgcagtggtgtggtcatggctccctgtaccctggaactcaggcttgggtgatcctctctcctttgcctccgaagtagccaggactacaggtgtgcacccaccaccacactcagataattgctttggtgtttttaaagcttgtaatgatcagtaggctgaggtgggcaaatcataaggtcaagagttttttagatggggtgagcacagaccaattcctgttttatttactgatttaaaattttgagacagtctcactgtcacccaggttggggtgcagtggtaggatcatagcttgctgcagccttgatctcccaggatcttgcctcagcctcccgagtagctgggactgcatgcttgtgccaccacactcggttaatattttgtagagatggggtcttgctatgttgcccaggctggcttcaaactcctgaacttaaaagcctcctgtttagttttggttttttatcactttttttttttttttttggagatggagccttgctcccatcgtgcaggctggagtgcggtggcgcagtctcggctcactgcagcttctgcctctcgggttcaagcgattctcctttctcagcctcttgagtagctggaattaccagtgtgcgccaccaccacca

SEQ ID NO: 323505 - DNA, 860 bp, Homo sapiens
gactctacaggatcttcgtacttgtgacgccttggacgcctgatcttgacgctatcttctttttcttcagcgaggcggccgagctggttggtggcggcggtcgtgcgggttcgcgccgggccgagagcgggttgggggctgcgggaggctgcaggggcctgggcggcagaagaggcggccctgagctggctcatgcgggccagtctcggcagggtggctgggcagggctcgcgaggccacggctcggagcccagaccggggcccaggaggcgagcgccgttttggagaggagcctgcctgctctgcctgccagcgtgaccccacgaggcctcgggcgggaagaggtcctcggggcagatccgagttaatgagagagggacgcaaacatgcagatctttgtgaagaccctcactggcaaaaccatcacccttgaggtcgagcccagtgacaccattgagaatgtcaaagccaaaattcaagacaaggagggtatcccacctgaccagcagcgtctgatatttgccggcaaacagctggaggatggccgcactctctcagactacaacatccagaaagagtccaccctgcacctggtgttgcgcctgcgaggtggcattattgagccttctctccgccagcttgcccagaaatacaactgcgacaagatgatctgccgcaagtgctatgctcgccttcaccctcgtgctgtcaactgccgcaagaagaagtgtggtcacaccaacaacctgcgtcccaagaagaaggtcaaataaggttgttctttccttgaagggcagcctcctgcccaggccccgtggccctggagcctcaataaagtgtccctttcattgactggagca

SEQ ID NO: 323506 - DNA, 539 bp, Homo sapiens
tgatgaggatccccgaaactctggcggacgagctggttggtggcggcggtcgtgcggacgcaaacatgcagatctttgtgaagaccctcactggcaaaaccatcacccttgaggtcgagcccagtgacaccattgagaatgtcaaagccaaaattcaagacaaggagggtatcccacctgaccagcagcgtctgatatttgccggcaaacagctggaggatggccgcactctctcagactacaacatccagaaagagtccaccctgcacctggtgttgcgcctgcgaggtggcattattgagccttctctccgccagcttgcccagaaatacaactgcgacaagatgatctgccgcaagtgctatgctcgccttcaccctcgtgctgtcaactgccgcaagaagaagtgtggtcacaccaacaacctgcgtcccaagaagaaggtcaaataaggttgttctttccttgaagggcagcctcctgcccaggccccgtggccctggagcctcaataaagtgtccctttcattgactggagca

SEQ ID NO: 323507 - DNA, 518 bp, Homo sapiens
  misc_feature (4)..(4): n is a, c, g, or t
  misc_feature (22)..(22): n is a, c, g, or t
  misc_feature (34)..(34): n is a, c, g, or t
ggcntgcatggaatttggacgngggcggtcgtgnggacgcaaacatgcagatctttgtgaagaccctcactggcaaaaccatcacccttgaggtcgagcccagtgacaccattgagaatgtcaaagccaaaattcaagacaaggagggtatcccacctgaccagcagcgtctgatatttgccggcaaacagctggaggatggccgcactctctcagactacaacatccagaaagagtccaccctgcacctggtgttgcgcctgcgaggtggcattattgagccttctctccgccagcttgcccagaaatacaactgcgacaagatgatctgccgcaagtgctatgctcgccttcaccctcgtgctgtcaactgccgcaagaagaagtgtggtcacaccaacaacctgcgtcccaagaagaaggtcaaataaggttgttctttccttgaagggcagcctcctgcccaggccccgtggccctggagcctcaataaagtgtccctttcattgactggagca

SEQ ID NO: 323508 - DNA, 536 bp, Homo sapiens
tagccggtacctaacttttatttctttttttttcttcagcgaggcggcgagctgacgcaaacatgcagatctttgtgaagaccctcactggcaaaaccatcacccttgaggtcgagcccagtgacaccattgagaatgtcaaagccaaaattcaagacaaggagggtatcccacctgaccagcagcgtctgatatttgccggcaaacagctggaggatggccgcactctctcagactacaacatccagaaagagtccaccctgcacctggtgttgcgcctgcgaggtggcattattgagccttctctccgccagcttgcccagaaatacaactgcgacaagatgatctgccgcaagtgctatgctcgccttcaccctcgtgctgtcaactgccgcaagaagaagtgtggtcacaccaacaacctgcgtcccaagaagaaggtcaaataaggttgttctttccttgaagggcagcctcctgcccaggccccgtggccctggagcctcaataaagtgtccctttcattgactggagca

SEQ ID NO: 323509 - DNA, 952 bp, Homo sapiens
gactctacaggatcttcgtacttgtgacgccttggacgcctgatcttgacgctatcttctttttcttcagcgaggcggccgagctggttggtggcggcggtcgtgcggacgcaaacatgcagatctttgtgaagaccctcactggcaaaaccatcacccttgaggtcgagcccagtgacaccattgagaatgtcaaagccaaaattcaagacaaggagggtatcccacctgaccagcagcgtctgatatttgccggcaaacagctggaggatggccgcactctctcagactacaacatccagaaagagtccaccctgcacctggtgttgcgcctgcgaggtggcattattgagccttctctccgccagcttgcccagaaatacaactgcgacaagatgatctgccgcaagtgctatgctcgccttcaccctcgtgctgtcaactgccgcaagaagaagtgtggtcacaccaacaacctgcgtcccaagaagaaggtcaaataaggttgttctttccttgaagggcagcctcctgcccaggccccgtggccctggagcctcaataaagtgtccctttcattgactggagcaaaaaaaaaaaaaaaaaaaaaaaaaaaaaaaaaaaaaaaaaaaaaacgcgggggacatggggggggggaaaaaggggaaaagggggccagtgggccaaggatggttccgaacaaccgatttttgtgtcaacacgggaacatcgcgccggcccccataagggcgggcaataactggcaagaccggggtacgcgttataatgcgaaatgtaatcacataacaagacgacgacgacgaggctcacctctgaacacaacgtcacaaacatccgacatagaactcggacagaacagcagcaaaaacagtgcagaggataatagagagaaaagaaagacgaaaaagacaacagcaccagcaacctgaac

SEQ ID NO: 323510 - DNA, 1026 bp, Homo sapiens
  misc_feature (16)..(16): n is a, c, g, or t
  misc_feature (118)..(118): n is a, c, g, or t
  misc_feature (121)..(122): n is a, c, g, or t
gatccccctgaccttnggacgccctcactattaatctactgggagaactctctgtgctagtaaccacgttctcctgatcaaatatcactctctcagactacaacatccagaaaggtcnacnngctttctttttcttcagcgaggcggccgagctgacgcaaacatgcagatctttgtgaagaccctcactggcaaaaccatcacccttgaggtcgagcccagtgacaccattgagaatgtcaaagccaaaattcaagacaaggagggtatcccacctgaccagcagcgtctgatatttgccggcaaacagctggaggatggccgcactctctcagactacaacatccagaaagagtccaccctgcacctggtgttgcgcctgcgaggtggcattattgagccttctctccgccagcttgcccagaaatacaactgcgacaagatgatctgccgcaagtgctatgctcgccttcaccctcgtgctgtcaactgccgcaagaagaagtgtggtcacaccaacaacctgcgtcccaagaagaaggtcaaataaggttgttctttccttgaagggcagcctcctgcccaggccccgtggccctggagcctcaataaagtgtccctttcattgactggagcaaaaaaaaaaaaaaaaaaaaaaaaaaaaaaaaaaaaaaaaaaaaaaaaaaaaaaaaaaaaaaaaaaaaaaaaacgcgggggacatggggggggggaaaaaggggaaaagggggccagtgggccaaggatggttccgaacaaccgatttttgtgtcaacacgggaacatcgcgccggcccccataagggcgggcaataactggcaagaccggggtacgcgttataatgcgaaatgtaatcacataacaagacgacgacgacgaggctcacctctgaacacaacgtcacaaacatccgacatagaactcggacagaacagcagcaaaaacagtgcagaggataatagagagaaaagaaagacgaaaaagacaacagcaccagcaacctgaac

SEQ ID NO: 323511 - DNA, 747 bp, Homo sapiens
  misc_feature (16)..(16): n is a, c, g, or t
  misc_feature (118)..(118): n is a, c, g, or t
  misc_feature (121)..(122): n is a, c, g, or t
gatccccctgaccttnggacgccctcactattaatctactgggagaactctctgtgctagtaaccacgttctcctgatcaaatatcactctctcagactacaacatccagaaaggtcnacnngctttctttttcttcagcgaggcggccgagctgacgcaaacatgcagatctttgtgaagaccctcactggcaaaaccatcacccttgaggtcgagcccagtgacaccattgagaatgtcaaagccaaaattcaagacaaggagggtatcccacctgaccagcagcgtctgatatttgccggcaaacagctggaggatggccgcactctctcagactacaacatccagaaagagtccaccctgcacctggtgttgcgcctgcgaggtggcattattgagccttctctccgccagcttgcccagaaatacaactgcgacaagatgatctgccgcaagtgctatgctcgccttcaccctcgtgctgtcaactgccgcaagaagaagtgtggtcacaccaacaacctgcgtcccaagaagaaggtcaaataaggttgttctttccttgaagggcagcctcctgcccaggccccgtggccctggagcctcaataaagtgtccctttcattgactggagcatacctcgaggtatgcctgcaccaggaagcctgagactgagaaatgcttctgggattcttctgagcttggaaaattagtatgaggcaccgaaatcatctcaatgaaactga

SEQ ID NO: 323512 - DNA, 1001 bp, Homo sapiens
  misc_feature (16)..(16): n is a, c, g, or t
  misc_feature (118)..(118): n is a, c, g, or t
  misc_feature (121)..(122): n is a, c, g, or t
gatccccctgaccttnggacgccctcactattaatctactgggagaactctctgtgctagtaaccacgttctcctgatcaaatatcactctctcagactacaacatccagaaaggtcnacnngctttctttttcttcagcgaggcggccgagctgacgcaaacatgcagatctttgtgaagaccctcactggcaaaaccatcacccttgaggtcgagcccagtgacaccattgagaatgtcaaagccaaaattcaagacaaggagggtatcccacctgaccagcagcgtctgatatttgccggcaaacagctggaggatggccgcactctctcagactacaacatccagaaagagtccaccctgcacctggtgttgcgcctgcgaggtggcattattgagccttctctccgccagcttgcccagaaatacaactgcgacaagatgatctgccgcaagtgctatgctcgccttcaccctcgtgctgtcaactgccgcaagaagaagtgtggtcacaccaacaacctgcgtcccaagaagaaggtcaaataaggttgttctttccttgaagggcagcctcctgcccaggccccgtggccctggagcctcaataaagtgtccctttcattgactggagcaaaaaaaacaaaacaaaacaaaaaaaaaaaaaaaaaaaaaaaaaaaaacgcgggggacatggggggggggaaaaaggggaaaagggggccagtgggccaaggatggttccgaacaaccgatttttgtgtcaacacgggaacatcgcgccggcccccataagggcgggcaataactggcaagaccggggtacgcgttataatgcgaaatgtaatcacataacaagacgacgacgacgaggctcacctctgaacacaacgtcacaaacatccgacatagaactcggacagaacagcagcaaaaacagtgcagaggataatagagagaaaagaaagacgaaaaagacaacagcaccagcaacctgaac

SEQ ID NO: 323513 - DNA, 1677 bp, Homo sapiens
gactctacaggatcttcgtacttgtgacgccttggacgcctgatcttgacgctatcttctttttcttcagcgaggcggccgagctggttggtggcggcggtcgtgcgggttcgcgccgggccgagagcgggttgggggctgcgggaggctgcaggggcctgggcggcagaagaggcggccctgagctggctcatgcgggccagtctcggcagggtggctgggcagggctcgcgaggccacggctcggagcccagaccggggcccaggaggcgagcgccgttttggagaggagcctgcctgctctgcctgccagcgtgaccccacgaggcctcgggcgggaagaggtcctcggggcagatccgagttaatgagagaggggtattgagcgtgtagcgttaactctgccagtcactgcgtcagtcgctttggaaatactaaatttctcgagctgagtcttcatacctggctccattactacgtctgtaaggaggagctggtggtagtgtctgctttttagacttttctttagactatttgtatttttttcagatggagtcttgctctgtcgcctaagctggagttcagtggtgcggtctcggctcactgcaatctccacctcccgggctcgagcgattcttctgcctcagcctcccgagtagctgggattataggcgcctgccaccacgcccagttgatttttgtagttttagtagagacggagtttcaccatgttagccaggctcatcttgaactcttgacctcaaatgatccgtctgcctcggccttccaaagtgctgggattacagacgcaaacatgcagatctttgtgaagaccctcactggcaaaaccatcacccttgaggtcgagcccagtgacaccattgagaatgtcaaagccaaaattcaagacaaggagggtatcccacctgaccagcagcgtctgatatttgccggcaaacagctggaggatggccgcactctctcagactacaacatccagaaagagtccaccctgcacctggtgttgcgcctgcgaggtggcattattgagccttctctccgccagcttgcccagaaatacaactgcgacaagatgatctgccgcaagtgctatgctcgccttcaccctcgtgctgtcaactgccgcaagaagaagtgtggtcacaccaacaacctgcgtcccaagaagaaggtcaaataaggttgttctttccttgaagggcagcctcctgcccaggccccgtggccctggagcctcaataaagtgtccctttcattgactggagcaaaaaaaaaaaaaaaaaaaaaaaaaaaaaaaaaaaaaaaaaaaaaaaaaaaaaaaaaaaaaaaaaaaaaaaaacgcgggggacatggggggggggaaaaaggggaaaagggggccagtgggccaaggatggttccgaacaaccgatttttgtgtcaacacgggaacatcgcgccggcccccataagggcgggcaataactggcaagaccggggtacgcgttataatgcgaaatgtaatcacataacaagacgacgacgacgaggctcacctctgaacacaacgtcacaaacatccgacatagaactcggacagaacagcagcaaaaacagtgcagaggataatagagagaaaagaaagacgaaaaagacaacagcaccagcaacctgaac

SEQ ID NO: 323514 - DNA, 3002 bp, Homo sapiens
gactctacaggatcttcgtacttgtgacgccttggacgcctgatcttgacgctatcttctttttcttcagcgaggcggccgagctggttggtggcggcggtcgtgcgggttcgcgccgggccgagagcgggttgggggctgcgggaggctgcaggggcctgggcggcagaagaggcggccctgagctggctcatgcgggccagtctcggcagggtggctgggcagggctcgcgaggccacggctcggagcccagaccggggcccaggaggcgagcgccgttttggagaggagcctgcctgctctgcctgccagcgtgaccccacgaggcctcgggcgggaagaggtcctcggggcagatccgagttaatgagagaggggtattgagcgtgtagcgttaactctgccagtcactgcgtcagtcgctttggaaatactaaatttctcgagctgagtcttcatacctggctccattactacgtctgtaaggaggagctggtggtagtgtctgctttttagacttttctttagactatttgtatttttttcagatggagtcttgctctgtcgcctaagctggagttcagtggtgcggtctcggctcactgcaatctccacctcccgggctcgagcgattcttctgcctcagcctcccgagtagctgggattataggcgcctgccaccacgcccagttgatttttgtagttttagtagagacggagtttcaccatgttagccaggctcatcttgaactcttgacctcaaatgatccgtctgcctcggccttccaaagtgctgggattacagacgcaaacatgcagatctttgtgaagaccctcactggcaaaaccatcacccttgaggtcgagcccagtgacaccattgagaatgtcaaagccaaaattcaagacaaggaggaacgtttgttatcttctacctcagttggccttttgagaaactgggggtagtgctggagctcccctgcagaggacactgccagtaatatggtccgcagagcctctaactgagcctccctccccctcaggtatcccacctgaccagcagcgtctgatatttgccggcaaacagctggaggatggccgcactctctcagactacaacatccagaaagagtccaccctgcacctggtgttgcgcctgcgaggtggcattattgagccttctctccgccagcttgcccagaaatacaactgcgacaagatgatctgccgcaagtgctatgctcgccttcaccctcgtgctgtcaactgccgcaagaagaagtgtggtcacaccaacaacctgcgtcccaagaagaaggtcaaataaggttgttctttccttgaagggcagcctcctgcccaggccccgtggccctggagcctcaataaagtgtccctttcattgactggagcagcaattggtgtcctcatggctgatctgtccagggaggtggctgaagagtgggcatctcccttagggactctactcagcactccattctgtgccacctgtggggtcttctgtcctagattctgtcacatcggcattggtccctgccctatgcccctgactctggatttgtcatctgtaaaactggagtaaaaacctcagtcgtgtaattggtgggactgaggatcagttttgtcattgctgggatcctgtcaggcactttgaggtgtccctcaggccttggccctgaagtgtctaggtgtgtggagatgggtagaaaattaggtacacccaatggtgtagaacgttgattctcaaatttttttattttatacaaatggggtctcactatgttgtccaggctggtcttgaactcctgggctcaagccatccgcccatctcagcccctcaaagtgttgggattacaagcaagaactgccatgcctgacccagttctcagttttttgtttgtttgtttgtttgtttgttttgagacggagtcttgctctgtcgcccaggctggagtgcagtggcgcagtctcggcttactacaacctctgcctccggggttcacatccttctcctgcctcagcctcccgagtagctgggactacaggtgcccgccacaactcctggctaattttttgtatttttagtagagacggggtttcactgggttagccaggttggtctcgatctcctgaccttgtgatccattcgccttggcctcccagaatgctggtattacaggcgtgagccagcacgcctggcccagttactcagttttgaatctgaggccgtgacatcactcatggtctgcagtcagtgctctgcccctgagctgtaccctctcctatgataatcactcttaagaagggcaacccttggtgttttccccttaaggtcacccaggctggaatgcagtggtgtggtcatggctccctgtaccctggaactcaggcttgggtgatcctctctcctttgcctccgaagtagccaggactacaggtgtgcacccaccaccacactcagataattgctttggtgtttttaaagcttgtaatgatcagtaggctgaggtgggcaaatcataaggtcaagagttttttagatggggtgagcacagaccaattcctgttttatttactgatttaaaattttgagacagtctcactgtcacccaggttggggtgcagtggtaggatcatagcttgctgcagccttgatctcccaggatcttgcctcagcctcccgagtagctgggactgcatgcttgtgccaccacactcggttaatattttgtagagatggggtcttgctatgttgcccaggctggcttcaaactcctgaacttaaaagcctcctgtttagttttggttttttatcactttttttttttttttttggagatggagccttgctcccatcgtgcaggctggagtgcggtggcgcagtctcggctcactgcagcttctgcctctcgggttcaagcgattctcctttctcagcctcttgagtagctggaattaccagtgtgcgccaccaccacca

SEQ ID NO: 323515 - DNA, 1415 bp, Homo sapiens
gactctacaggatcttcgtacttgtgacgccttggacgcctgatcttgacgctatcttctttttcttcagcgaggcggccgagctggttggtggcggcggtcgtgcgggttcgcgccgggccgagagcgggttgggggctgcgggaggctgcaggggcctgggcggcagaagaggcggccctgagctggctcatgcgggccagtctcggcagggtggctgggcagggctcgcgaggccacggctcggagcccagaccggggcccaggaggcgagcgccgttttggagaggagcctgcctgctctgcctgccagcgtgaccccacgaggcctcgggcgggaagaggtcctcggggcagatccgagttaatgagagaggggtattgagcgtgtagcgttaactctgccagtcactgcgtcagtcgctttggaaatactaaatttctcgagctgagtcttcatacctggctccattactacgtctgtaaggaggagctggtggtagtgtctgctttttagacttttctttagactatttgtatttttttcagatggagtcttgctctgtcgcctaagctggagttcagtggtgcggtctcggctcactgcaatctccacctcccgggctcgagcgattcttctgcctcagcctcccgagtagctgggattataggcgcctgccaccacgcccagttgatttttgtagttttagtagagacggagtttcaccatgttagccaggctcatcttgaactcttgacctcaaatgatccgtctgcctcggccttccaaagtgctgggattacagacgcaaacatgcagatctttgtgaagaccctcactggcaaaaccatcacccttgaggtcgagcccagtgacaccattgagaatgtcaaagccaaaattcaagacaaggaggaacgtttgttatcttctacctcagttggccttttgagaaactgggggtagtgctggagctcccctgcagaggacactgccagtaatatggtccgcagagcctctaactgagcctccctccccctcaggtatcccacctgaccagcagcgtctgatatttgccggcaaacagctggaggatggccgcactctctcagactacaacatccagaaagagtccaccctgcacctggtgttgcgcctgcgaggtggcattattgagccttctctccgccagcttgcccagaaatacaactgcgacaagatgatctgccgcaagtgctatgctcgccttcaccctcgtgctgtcaactgccgcaagaagaagtgtggtcacaccaacaacctgcgtcccaagaagaaggtcaaataaggttgttctttccttgaagggcagcctcctgcccaggccccgtggccctggagcctcaataaagtgtccctttcattgactggagca

SEQ ID NO: 323516 - DNA, 1986 bp, Homo sapiens
tgtcaagccaaaattcaagacaaggagggtatcccacctgaccagcagcgtctgatatttgccggcaaacagctggaggatggccgcactctctcagactacaacatccagaaagagtccaccctgcacctggtgttgcgcctgcgaggtggcattattgagccttctctccgccagcttgcccagaaatacaactgcgacaagatgatctgccgcaagtgctatgctcgccttcaccctcgtgctgtcaactgccgcaagaagaagtgtggtcacaccaacaacctgcgtcccaagaagaaggtcaaataaggttgttctttccttgaagggcagcctcctgcccaggccccgtggccctggagcctcaataaagtgtccctttcattgactggagcagcaattggtgtcctcatggctgatctgtccagggaggtggctgaagagtgggcatctcccttagggactctactcagcactccattctgtgccacctgtggggtcttctgtcctagattctgtcacatcggcattggtccctgccctatgcccctgactctggatttgtcatctgtaaaactggagtaaaaacctcagtcgtgtaattggtgggactgaggatcagttttgtcattgctgggatcctgtcaggcactttgaggtgtccctcaggccttggccctgaagtgtctaggtgtgtggagatgggtagaaaattaggtacacccaatggtgtagaacgttgattctcaaatttttttattttatacaaatggggtctcactatgttgtccaggctggtcttgaactcctgggctcaagccatccgcccatctcagcccctcaaagtgttgggattacaagcaagaactgccatgcctgacccagttctcagttttttgtttgtttgtttgtttgtttgttttgagacggagtcttgctctgtcgcccaggctggagtgcagtggcgcagtctcggcttactacaacctctgcctccggggttcacatccttctcctgcctcagcctcccgagtagctgggactacaggtgcccgccacaactcctggctaattttttgtatttttagtagagacggggtttcactgggttagccaggttggtctcgatctcctgaccttgtgatccattcgccttggcctcccagaatgctggtattacaggcgtgagccagcacgcctggcccagttactcagttttgaatctgaggccgtgacatcactcatggtctgcagtcagtgctctgcccctgagctgtaccctctcctatgataatcactcttaagaagggcaacccttggtgttttccccttaaggtcacccaggctggaatgcagtggtgtggtcatggctccctgtaccctggaactcaggcttgggtgatcctctctcctttgcctccgaagtagccaggactacaggtgtgcacccaccaccacactcagataattgctttggtgtttttaaagcttgtaatgatcagtaggctgaggtgggcaaatcataaggtcaagagttttttagatggggtgagcacagaccaattcctgttttatttactgatttaaaattttgagacagtctcactgtcacccaggttggggtgcagtggtaggatcatagcttgctgcagccttgatctcccaggatcttgcctcagcctcccgagtagctgggactgcatgcttgtgccaccacactcggttaatattttgtagagatggggtcttgctatgttgcccaggctggcttcaaactcctgaacttaaaagcctcctgtttagttttggttttttatcactttttttttttttttttggagatggagccttgctcccatcgtgcaggctggagtgcggtggcgcagtctcggctcactgcagcttctgcctctcgggttcaagcgattctcctttctcagcctcttgagtagctggaattaccagtgtgcgccaccaccacca

SEQ ID NO: 323517 - DNA, 867 bp, Homo sapiens
gtgctccgtgcgcaagcgctttcggcggcgattaggtggtttccggttccgctatcttctttttcttcagcgaggcggccgagctgacgcaaacatgcagatctttgtgaagaccctcactggcaaaaccatcacccttgaggtcgagcccagtgacaccattgagaatgtcaaagccaaaattcaagacaaggagggtatcccacctgaccagcagcgtctgatatttgccggcaaacagctggaggatggccgcactctctcagactacaacatccagaaagagtccaccctgcacctggtgttgcgcctgcgaggtggcattattgagccttctctccgccagcttgcccagaaatacaactgcgacaagatgatctgccgcaagtgctatgctcgccttcaccctcgtgctgtcaactgccgcaagaagaagtgtggtcacaccaacaacctgcgtcccaagaagaaggtcaaataaggttgttctttccttgaagggcagcctcctgcccaggccccgtggccctggagcctcaataaagtgtccctttcattgactggagcaaaaaaaaagacatgccaacaaacaaagcaagaacacacaaacaagagcacagacaggagcccgaacaccaaaggccgaagtgacagaaacactcgcgggccgaatgcaagccgcaagccgcgaaaccgggaggccccagtaaccgcggagggaaacccctttcgaagtggcattcaaaggacggcgaactgacaacacgtgaccacagtaccgacaagccgcacacggaacacagaaattagaaccacaaacacgagcccgaacgccgtaacacacggggagggtaccacacgcccggc

SEQ ID NO: 323518 - DNA, 2959 bp, Homo sapiens
gactctacaggatcttcgtacttgtgacgccttggacgcctgatcttgacgctatcttctttttcttcagcgaggcggccgagctggttggtggcggcggtcgtgcgggttcgcgccgggccgagagcgggttgggggctgcgggaggctgcaggggcctgggcggcagaagaggcggccctgagctggctcatgcgggccagtctcggcagggtggctgggcagggctcgcgaggccacggctcggagcccagaccggggcccaggaggcgagcgccgttttggagaggagcctgcctgctctgcctgccagcgtgaccccacgaggcctcgggcgggaagaggtcctcggggcagatccgagttaatgagagaggggtattgagcgtgtagcgttaactctgccagtcactgcgtcagtcgctttggaaatactaaatttctcgagctgagtcttcatacctggctccattactacgtctgtaaggaggagctggtggtagtgtctgctttttagacttttctttagactatttgtatttttttcagatggagtcttgctctgtcgcctaagctggagttcagtggtgcggtctcggctcactgcaatctccacctcccgggctcgagcgattcttctgcctcagcctcccgagtagctgggattataggcgcctgccaccacgcccagttgatttttgtagttttagtagagacggagtttcaccatgttagccaggctcatcttgaactcttgacctcaaatgatccgtctgcctcggccttccaaagtgctgggattacagacgcaaacatgcagatctttgtgaagaccctcactggcaaaaccatcacccttgaggtcgagcccagtgacaccattgagaatgtcaaagccaaaattcaagacaaggagggtatcccacctgaccagcagcgtctgatatttgccggcaaacagctggaggatggccgcactctctcagactacaacatccagaaagagtccaccctgcacctggtgttgcgcctgcgaggtggcattattgagccttctctccgccagcttgcccagaaatacaactgcgacaagatgatctgccgcaagtatgtgtgctccgatgcttggggggctgtgggggctgccggagtcggggtatgccctcacccacccctcctgtctctgtgcaggtgctatgctcgccttcaccctcgtgctgtcaactgccgcaagaagaagtgtggtcacaccaacaacctgcgtcccaagaagaaggtcaaataaggttgttctttccttgaagggcagcctcctgcccaggccccgtggccctggagcctcaataaagtgtccctttcattgactggagcagcaattggtgtcctcatggctgatctgtccagggaggtggctgaagagtgggcatctcccttagggactctactcagcactccattctgtgccacctgtggggtcttctgtcctagattctgtcacatcggcattggtccctgccctatgcccctgactctggatttgtcatctgtaaaactggagtaaaaacctcagtcgtgtaattggtgggactgaggatcagttttgtcattgctgggatcctgtcaggcactttgaggtgtccctcaggccttggccctgaagtgtctaggtgtgtggagatgggtagaaaattaggtacacccaatggtgtagaacgttgattctcaaatttttttattttatacaaatggggtctcactatgttgtccaggctggtcttgaactcctgggctcaagccatccgcccatctcagcccctcaaagtgttgggattacaagcaagaactgccatgcctgacccagttctcagttttttgtttgtttgtttgtttgtttgttttgagacggagtcttgctctgtcgcccaggctggagtgcagtggcgcagtctcggcttactacaacctctgcctccggggttcacatccttctcctgcctcagcctcccgagtagctgggactacaggtgcccgccacaactcctggctaattttttgtatttttagtagagacggggtttcactgggttagccaggttggtctcgatctcctgaccttgtgatccattcgccttggcctcccagaatgctggtattacaggcgtgagccagcacgcctggcccagttactcagttttgaatctgaggccgtgacatcactcatggtctgcagtcagtgctctgcccctgagctgtaccctctcctatgataatcactcttaagaagggcaacccttggtgttttccccttaaggtcacccaggctggaatgcagtggtgtggtcatggctccctgtaccctggaactcaggcttgggtgatcctctctcctttgcctccgaagtagccaggactacaggtgtgcacccaccaccacactcagataattgctttggtgtttttaaagcttgtaatgatcagtaggctgaggtgggcaaatcataaggtcaagagttttttagatggggtgagcacagaccaattcctgttttatttactgatttaaaattttgagacagtctcactgtcacccaggttggggtgcagtggtaggatcatagcttgctgcagccttgatctcccaggatcttgcctcagcctcccgagtagctgggactgcatgcttgtgccaccacactcggttaatattttgtagagatggggtcttgctatgttgcccaggctggcttcaaactcctgaacttaaaagcctcctgtttagttttggttttttatcactttttttttttttttttggagatggagccttgctcccatcgtgcaggctggagtgcggtggcgcagtctcggctcactgcagcttctgcctctcgggttcaagcgattctcctttctcagcctcttgagtagctggaattaccagtgtgcgccaccaccacca

SEQ ID NO: 323519 - DNA, 1242 bp, Homo sapiens
gactctacaggatcttcgtacttgtgacgccttggacgcctgatcttgacgctatcttctttttcttcagcgaggcggccgagctggttggtggcggcggtcgtgcgggttcgcgccgggccgagagcgggttgggggctgcgggaggctgcaggggcctgggcggcagaagaggcggccctgagctggctcatgcgggccagtctcggcagggtggctgggcagggctcgcgaggccacggctcggagcccagaccggggcccaggaggcgagcgccgttttggagaggagcctgcctgctctgcctgccagcgtgaccccacgaggcctcgggcgggaagaggtcctcggggcagatccgagttaatgagagaggggtattgagcgtgtagcgttaactctgccagtcactgcgtcagtcgctttggaaatactaaatttctcgagctgagtcttcatacctggctccattactacgtctgtaaggaggagctggtggtagtgtctgctttttagacttttctttagactatttgtatttttttcagatggagtcttgctctgtcgcctaagctggagttcagtggtgcggtctcggctcactgcaatctccacctcccgggctcgagcgattcttctgcctcagcctcccgagtagctgggattataggcgcctgccaccacgcccagttgatttttgtagttttagtagagacggagtttcaccatgttagccaggctcatcttgaactcttgacctcaaatgatccgtctgcctcggccttccaaagtgctgggattacagacgcaaacatgcagatctttgtgaagaccctcactggcaaaaccatcacccttgaggtcgagcccagtgacaccattgagaatgtcaaagccaaaattcaagacaaggagggtatcccacctgaccagcagcgtctgatatttgccggcaaacagctggaggatggccgcactctctcagactacaacatccagaaagagtccaccctgcacctggtgttgcgcctgcgaggtggcattattgagccttctctccgccagcttgcccagaaatacaactgcgacaagatgatctgccgcaaaagtgtggtcacaccaacaacctgcgtcccaagaagaaggtcaaataaggttgttctttccttgaagggcagcctcctgcccaggccccgtggccctggagcctcaataaagtgtccctttcattgactggagca

SEQ ID NO: 323520 - DNA, 1997 bp, Homo sapiens
  misc_feature (16)..(16): n is a, c, g, or t
  misc_feature (118)..(118): n is a, c, g, or t
  misc_feature (121)..(122): n is a, c, g, or t
gatccccctgaccttnggacgccctcactattaatctactgggagaactctctgtgctagtaaccacgttctcctgatcaaatatcactctctcagactacaacatccagaaaggtcnacnngcttagtccaccctgcacctggtgttgcgcctgcgaggtggcattattgagccttctctccgccagcttgcccagaaatacaactgcgacaagatgatctgccgcaagtgctatgctcgccttcaccctcgtgctgtcaactgccgcaagaagaagtgtggtcacaccaacaacctgcgtcccaagaagaaggtcaaataaggttgttctttccttgaagggcagcctcctgcccaggccccgtggccctggagcctcaataaagtgtccctttcattgactggagcagcaattggtgtcctcatggctgatctgtccagggaggtggctgaagagtgggcatctcccttagggactctactcagcactccattctgtgccacctgtggggtcttctgtcctagattctgtcacatcggcattggtccctgccctatgcccctgactctggatttgtcatctgtaaaactggagtaaaaacctcagtcgtgtaattggtgggactgaggatcagttttgtcattgctgggatcctgtcaggcactttgaggtgtccctcaggccttggccctgaagtgtctaggtgtgtggagatgggtagaaaattaggtacacccaatggtgtagaacgttgattctcaaatttttttattttatacaaatggggtctcactatgttgtccaggctggtcttgaactcctgggctcaagccatccgcccatctcagcccctcaaagtgttgggattacaagcaagaactgccatgcctgacccagttctcagttttttgtttgtttgtttgtttgtttgttttgagacggagtcttgctctgtcgcccaggctggagtgcagtggcgcagtctcggcttactacaacctctgcctccggggttcacatccttctcctgcctcagcctcccgagtagctgggactacaggtgcccgccacaactcctggctaattttttgtatttttagtagagacggggtttcactgggttagccaggttggtctcgatctcctgaccttgtgatccattcgccttggcctcccagaatgctggtattacaggcgtgagccagcacgcctggcccagttactcagttttgaatctgaggccgtgacatcactcatggtctgcagtcagtgctctgcccctgagctgtaccctctcctatgataatcactcttaagaagggcaacccttggtgttttccccttaaggtcacccaggctggaatgcagtggtgtggtcatggctccctgtaccctggaactcaggcttgggtgatcctctctcctttgcctccgaagtagccaggactacaggtgtgcacccaccaccacactcagataattgctttggtgtttttaaagcttgtaatgatcagtaggctgaggtgggcaaatcataaggtcaagagttttttagatggggtgagcacagaccaattcctgttttatttactgatttaaaattttgagacagtctcactgtcacccaggttggggtgcagtggtaggatcatagcttgctgcagccttgatctcccaggatcttgcctcagcctcccgagtagctgggactgcatgcttgtgccaccacactcggttaatattttgtagagatggggtcttgctatgttgcccaggctggcttcaaactcctgaacttaaaagcctcctgtttagttttggttttttatcactttttttttttttttttggagatggagccttgctcccatcgtgcaggctggagtgcggtggcgcagtctcggctcactgcagcttctgcctctcgggttcaagcgattctcctttctcagcctcttgagtagctggaattaccagtgtgcgccaccaccacca

SEQ ID NO: 323521 - DNA, 2195 bp, Homo sapiens
gcggccgcctactattactaaattcgcggccgcgtcgacctgacgcaaacatgcagatctttgtgaagaccctcactggcaaaaccatcacccttgaggtcgagcccagtgacaccattgagaatgtcaaagccaaaattcaagacaaggagggtatcccacctgaccagcagcgtctgatatttgccggcaaacagctggaggatggccgcactctctcagactacaacatccagaaagagtccaccctgcacctggtgttgcgcctgcgaggtggcattattgagccttctctccgccagcttgcccagaaatacaactgcgacaagatgatctgccgcaagtatgtgtgctccgatgcttggggggctgtgggggctgccggagtcggggtatgccctcacccacccctcctgtctctgtgcaggtgctatgctcgccttcaccctcgtgctgtcaactgccgcaagaagaagtgtggtcacaccaacaacctgcgtcccaagaagaaggtcaaataaggttgttctttccttgaagggcagcctcctgcccaggccccgtggccctggagcctcaataaagtgtccctttcattgactggagcagcaattggtgtcctcatggctgatctgtccagggaggtggctgaagagtgggcatctcccttagggactctactcagcactccattctgtgccacctgtggggtcttctgtcctagattctgtcacatcggcattggtccctgccctatgcccctgactctggatttgtcatctgtaaaactggagtaaaaacctcagtcgtgtaattggtgggactgaggatcagttttgtcattgctgggatcctgtcaggcactttgaggtgtccctcaggccttggccctgaagtgtctaggtgtgtggagatgggtagaaaattaggtacacccaatggtgtagaacgttgattctcaaatttttttattttatacaaatggggtctcactatgttgtccaggctggtcttgaactcctgggctcaagccatccgcccatctcagcccctcaaagtgttgggattacaagcaagaactgccatgcctgacccagttctcagttttttgtttgtttgtttgtttgtttgttttgagacggagtcttgctctgtcgcccaggctggagtgcagtggcgcagtctcggcttactacaacctctgcctccggggttcacatccttctcctgcctcagcctcccgagtagctgggactacaggtgcccgccacaactcctggctaattttttgtatttttagtagagacggggtttcactgggttagccaggttggtctcgatctcctgaccttgtgatccattcgccttggcctcccagaatgctggtattacaggcgtgagccagcacgcctggcccagttactcagttttgaatctgaggccgtgacatcactcatggtctgcagtcagtgctctgcccctgagctgtaccctctcctatgataatcactcttaagaagggcaacccttggtgttttccccttaaggtcacccaggctggaatgcagtggtgtggtcatggctccctgtaccctggaactcaggcttgggtgatcctctctcctttgcctccgaagtagccaggactacaggtgtgcacccaccaccacactcagataattgctttggtgtttttaaagcttgtaatgatcagtaggctgaggtgggcaaatcataaggtcaagagttttttagatggggtgagcacagaccaattcctgttttatttactgatttaaaattttgagacagtctcactgtcacccaggttggggtgcagtggtaggatcatagcttgctgcagccttgatctcccaggatcttgcctcagcctcccgagtagctgggactgcatgcttgtgccaccacactcggttaatattttgtagagatggggtcttgctatgttgcccaggctggcttcaaactcctgaacttaaaagcctcctgtttagttttggttttttatcactttttttttttttttttggagatggagccttgctcccatcgtgcaggctggagtgcggtggcgcagtctcggctcactgcagcttctgcctctcgggttcaagcgattctcctttctcagcctcttgagtagctggaattaccagtgtgcgccaccaccacca

SEQ ID NO: 323522 - DNA, 740 bp, Homo sapiens
gaaaaaaaaaaaaaagcaaagaaaacagaaaagaaacattggcatggatcgaggcgtgggtgggcggcgagctgacgcaaacatgcagatctttgtgaagaccctcactggcaaaaccatcacccttgaggtcgagcccagtgacaccattgagaatgtcaaagccaaaattcaagacaaggagggtatcccacctgaccagcagcgtctgatatttgccggcaaacagctggaggatggccgcactctctcagactacaacatccagaaagagtccaccctgcacctggtgttgcgcctgcgaggtggcattattgagccttctctccgccagcttgcccagaaatacaactgcgacaagatgatctgccgcaagtgctatgctcgccttcaccctcgtgctgtcaactgccgcaagaagaagtgtggtcacaccaacaacctgcgtcccaagaagaaggtcaaataaggttgttctttccttgaagggcagcctcctgcccaggccccgtggccctggagcctcaataaagtgtccctttcattgactggagcaaaaaaaaaaaaaaaaaaaaaaaaaaaaaaaaaaaaaaaaaaaaaaaaacaagaacacagaaaacagacaacaccccgcgacacacttagcagacgcgccccacacgacacaaaaccagggcgatcgcacaacgcaaccacacacgaatataaaacaaggcgcaaccgcggccaccaaagggaga

SEQ ID NO: 323523 - DNA, 900 bp, Homo sapiens
  misc_feature (4)..(4): n is a, c, g, or t
  misc_feature (22)..(22): n is a, c, g, or t
  misc_feature (34)..(34): n is a, c, g, or t
ggcntgcatggaatttggacgngggcggtcgtgnggacgcaaacatgcagatctttgtgaagaccctcactggcaaaaccatcacccttgaggtcgagcccagtgacaccattgagaatgtcaaagccaaaattcaagacaaggagggtatcccacctgaccagcagcgtctgatatttgccggcaaacagctggaggatggccgcactctctcagactacaacatccagaaagagtccaccctgcacctggtgttgcgcctgcgaggtggcattattgagccttctctccgccagcttgcccagaaatacaactgcgacaagatgatctgccgcaagtgctatgctcgccttcaccctcgtgctgtcaactgccgcaagaagaagtgtggtcacaccaacaacctgcgtcccaagaagaaggtcaaataagacatggtctcgctatgttgcccagaatggttttgcactgggtccaagcagttctgccgcagcctcccaaagtgctgggattacaggggtgaggcaccttgctggcccctgttttgattagggtgcagtgctggtgaagccggtgcacgaggccagtgatgcatcctaatgaggggtggagttggcgggacttcctgggccagtttggggactttcacaaaagacccccatgactcagggttttgagttcttaactgatcgaatgaaggattcaaaattaaccactccaaggggggattgaaggaagaaccactcttaatggacaaaaagaaagaaaggggagggagtaacagggatatgagctctagccgcccaagctagcaatggcaacccttctgggtccccttccagcatgtggaagctttcctttcgcttcattcaataaacagctgctgctcactctcctggt

SEQ ID NO: 323524 - DNA, 2224 bp, Homo sapiens
  misc_feature (16)..(16): n is a, c, g, or t
  misc_feature (118)..(118): n is a, c, g, or t
  misc_feature (121)..(122): n is a, c, g, or t
gatccccctgaccttnggacgccctcactattaatctactgggagaactctctgtgctagtaaccacgttctcctgatcaaatatcactctctcagactacaacatccagaaaggtcnacnngctttctttttcttcagcgaggcggccgagctgacgcaaacatgcagatctttgtgaagaccctcactggcaaaaccatcacccttgaggtcgagcccagtgacaccattgagaatgtcaaagccaaaattcaagacaaggagggtatcccacctgaccagcagcgtctgatatttgccggcaaacagctggaggatggccgcactctctcagactacaacatccagaaagagtccaccctgcacctggtgttgcgcctgcgaggtggcattattgagccttctctccgccagcttgcccagaaatacaactgcgacaagatgatctgccgcaagtgctatgctcgccttcaccctcgtgctgtcaactgccgcaagaagaagtgtggtcacaccaacaacctgcgtcccaagaagaaggtcaaataaggttgttctttccttgaagggcagcctcctgcccaggccccgtggccctggagcctcaataaagtgtccctttcattgactggagcagcaattggtgtcctcatggctgatctgtccagggaggtggctgaagagtgggcatctcccttagggactctactcagcactccattctgtgccacctgtggggtcttctgtcctagattctgtcacatcggcattggtccctgccctatgcccctgactctggatttgtcatctgtaaaactggagtaaaaacctcagtcgtgtaattggtgggactgaggatcagttttgtcattgctgggatcctgtcaggcactttgaggtgtccctcaggccttggccctgaagtgtctaggtgtgtggagatgggtagaaaattaggtacacccaatggtgtagaacgttgattctcaaatttttttattttatacaaatggggtctcactatgttgtccaggctggtcttgaactcctgggctcaagccatccgcccatctcagcccctcaaagtgttgggattacaagcaagaactgccatgcctgacccagttctcagttttttgtttgtttgtttgtttgtttgttttgagacggagtcttgctctgtcgcccaggctggagtgcagtggcgcagtctcggcttactacaacctctgcctccggggttcacatccttctcctgcctcagcctcccgagtagctgggactacaggtgcccgccacaactcctggctaattttttgtatttttagtagagacggggtttcactgggttagccaggttggtctcgatctcctgaccttgtgatccattcgccttggcctcccagaatgctggtattacaggcgtgagccagcacgcctggcccagttactcagttttgaatctgaggccgtgacatcactcatggtctgcagtcagtgctctgcccctgagctgtaccctctcctatgataatcactcttaagaagggcaacccttggtgttttccccttaaggtcacccaggctggaatgcagtggtgtggtcatggctccctgtaccctggaactcaggcttgggtgatcctctctcctttgcctccgaagtagccaggactacaggtgtgcacccaccaccacactcagataattgctttggtgtttttaaagcttgtaatgatcagtaggctgaggtgggcaaatcataaggtcaagagttttttagatggggtgagcacagaccaattcctgttttatttactgatttaaaattttgagacagtctcactgtcacccaggttggggtgcagtggtaggatcatagcttgctgcagccttgatctcccaggatcttgcctcagcctcccgagtagctgggactgcatgcttgtgccaccacactcggttaatattttgtagagatggggtcttgctatgttgcccaggctggcttcaaactcctgaacttaaaagcctcctgtttagttttggttttttatcactttttttttttttttttggagatggagccttgctcccatcgtgcaggctggagtgcggtggcgcagtctcggctcactgcagcttctgcctctcgggttcaagcgattctcctttctcagcctcttgagtagctggaattaccagtgtgcgccaccaccacca

SEQ ID NO: 323525 - DNA, 1185 bp, Homo sapiens
  misc_feature (16)..(16): n is a, c, g, or t
  misc_feature (118)..(118): n is a, c, g, or t
  misc_feature (121)..(122): n is a, c, g, or t
  misc_feature (1128)..(1128): n is a, c, g, or t
  misc_feature (1182)..(1182): n is a, c, g, or t
gatccccctgaccttnggacgccctcactattaatctactgggagaactctctgtgctagtaaccacgttctcctgatcaaatatcactctctcagactacaacatccagaaaggtcnacnngctttctttttcttcagcgaggcggccgagctgacgcaaacatgcagatctttgtgaagaccctcactggcaaaaccatcacccttgaggtcgagcccagtgacaccattgagaatgtcaaagccaaaattcaagacaaggagggtatcccacctgaccagcagcgtctgatatttgccggcaaacagctggaggatggccgcactctctcagactacaacatccagaaagagtccaccctgcacctggtgttgcgcctgcgaggtggcattattgagccttctctccgccagcttgcccagaaatacaactgcgacaagatgatctgccgcaagtgctatgctcgccttcaccctcgtgctgtcaactgccgcaagaagaagtgtggtcacaccaacaacctgcgtcccaagaagaaggtcaaataaggttgttctttccttgaagggcagcctcctgcccaggccccgtggccctggagcctcaataaagtgtccctttcattgactggagcagcaattggtgtcctcatggctgatctgtccagggaggtggctgaagagtgggcatctcccttagggactctactcagcactccattctgtgccacctgtggggtcttctgtcctagattctgtcacatcggcattggtccctgccctatgcccctgactctggatttgtcatctgtaaaactggagtaaaaacctcagtcgtgtaattggtgggactgaggatcagttttgtcattgctgggatcctgtcaggcactttgaggtgtccctcaggccttggccctgaagtgtctaggtgtgtggagatgggtagaaaattaggtacacccaatggtgtagaacgttgattctcaaatttttttattttatacaaatggggtctcactatgttgtccaggctggtcttgaactcctgggctcaagccatccgcccatctcagcccctcaaagtgttgggattaccaaaccaaaaaaactggccattgccctgnaacccagtttcctcaatttttttttccccccccccccccccccccccccccccnttt

SEQ ID NO: 323526 - DNA, 2177 bp, Homo sapiens
gtgctccgtgcgcaagcgctttcggcggcgattaggtggtttccggttccgctatcttctttttcttcagcgaggcggccgagctggttggtggcggcggtcgtgcggacgcaaacatgcagatctttgtgaagaccctcactggcaaaaccatcacccttgaggtcgagcccagtgacaccattgagaatgtcaaagccaaaattcaagacaaggagggtatcccacctgaccagcagcgtctgatatttgccggcaaacagctggaggatggccgcactctctcagactacaacatccagaaagagtccaccctgcacctggtgttgcgcctgcgaggtggcattattgagccttctctccgccagcttgcccagaaatacaactgcgacaagatgatctgccgcaagtgctatgctcgccttcaccctcgtgctgtcaactgccgcaagaagaagtgtggtcacaccaacaacctgcgtcccaagaagaaggtcaaataaggttgttctttccttgaagggcagcctcctgcccaggccccgtggccctggagcctcaataaagtgtccctttcattgactggagcagcaattggtgtcctcatggctgatctgtccagggaggtggctgaagagtgggcatctcccttagggactctactcagcactccattctgtgccacctgtggggtcttctgtcctagattctgtcacatcggcattggtccctgccctatgcccctgactctggatttgtcatctgtaaaactggagtaaaaacctcagtcgtgtaattggtgggactgaggatcagttttgtcattgctgggatcctgtcaggcactttgaggtgtccctcaggccttggccctgaagtgtctaggtgtgtggagatgggtagaaaattaggtacacccaatggtgtagaacgttgattctcaaatttttttattttatacaaatggggtctcactatgttgtccaggctggtcttgaactcctgggctcaagccatccgcccatctcagcccctcaaagtgttgggattacaagcaagaactgccatgcctgacccagttctcagttttttgtttgtttgtttgtttgtttgttttgagacggagtcttgctctgtcgcccaggctggagtgcagtggcgcagtctcggcttactacaacctctgcctccggggttcacatccttctcctgcctcagcctcccgagtagctgggactacaggtgcccgccacaactcctggctaattttttgtatttttagtagagacggggtttcactgggttagccaggttggtctcgatctcctgaccttgtgatccattcgccttggcctcccagaatgctggtattacaggcgtgagccagcacgcctggcccagttactcagttttgaatctgaggccgtgacatcactcatggtctgcagtcagtgctctgcccctgagctgtaccctctcctatgataatcactcttaagaagggcaacccttggtgttttccccttaaggtcacccaggctggaatgcagtggtgtggtcatggctccctgtaccctggaactcaggcttgggtgatcctctctcctttgcctccgaagtagccaggactacaggtgtgcacccaccaccacactcagataattgctttggtgtttttaaagcttgtaatgatcagtaggctgaggtgggcaaatcataaggtcaagagttttttagatggggtgagcacagaccaattcctgttttatttactgatttaaaattttgagacagtctcactgtcacccaggttggggtgcagtggtaggatcatagcttgctgcagccttgatctcccaggatcttgcctcagcctcccgagtagctgggactgcatgcttgtgccaccacactcggttaatattttgtagagatggggtcttgctatgttgcccaggctggcttcaaactcctgaacttaaaagcctcctgtttagttttggttttttatcactttttttttttttttttggagatggagccttgctcccatcgtgcaggctggagtgcggtggcgcagtctcggctcactgcagcttctgcctctcgggttcaagcgattctcctttctcagcctcttgagtagctggaattaccagtgtgcgccaccaccacca

SEQ ID NO: 323527 - DNA, 795 bp, Homo sapiens
gtgctccgtgcgcaagcgctttcggcggcgattaggtggtttccggttccgctatcttctttttcttcagcgaggcggccgagctggttggtggcggcggtcgtgcggacgcaaacatgcagatctttgtgaagaccctcactggcaaaaccatcacccttgaggtcgagcccagtgacaccattgagaatgtcaaagccaaaattcaagacaaggagggtatcccacctgaccagcagcgtctgatatttgccggcaaacagctggaggatggccgcactctctcagactacaacatccagaaagagtccaccctgcacctggtgttgcgcctgcgaggtggcattattgagccttctctccgccagcttgcccagaaatacaactgcgacaagatgatctgccgcaagtgctatgctcgccttcaccctcgtgctgtcaactgccgcaagaagaagtgtggtcacaccaacaacctgcgtcccaagaagaaggtcaaataaggttgttctttccttgaagggcagcctcctgcccaggccccgtggccctggagcctcaataaagtgtccctttcattgactggagcagcaattggtgtcctcatggctgatctgtccagggaggtggctgaagagtgggcatctcccttagggactctactcagcactccattctgtgccacctgtggggtcttctgtcctagattctgtcacatcggcattggtccctgccctatgcccctgactctggatttgtcatctgtaaaactggagtaaaaacctcagtcgtgta

SEQ ID NO: 323528 - DNA, 978 bp, Homo sapiens
  misc_feature (16)..(16): n is a, c, g, or t
  misc_feature (118)..(118): n is a, c, g, or t
  misc_feature (121)..(122): n is a, c, g, or t
gatccccctgaccttnggacgccctcactattaatctactgggagaactctctgtgctagtaaccacgttctcctgatcaaatatcactctctcagactacaacatccagaaaggtcnacnngctttctttttcttcagcgaggcggccgagctgacgcaaacatgcagatctttgtgaagaccctcactggcaaaaccatcacccttgaggtcgagcccagtgacaccattgagaatgtcaaagccaaaattcaagacaaggagggtatcccacctgaccagcagcgtctgatatttgccggcaaacagctggaggatggccgcactctctcagactacaacatccagaaagagtccaccctgcacctggtgttgcgcctgcgaggtggcattattgagccttctctccgccagcttgcccagaaatacaactgcgacaagatgatctgccgcaagtgctatgctcgccttcaccctcgtgctgtcaactgccgcaagaagaagtgtggtcacaccaacaacctgcgtcccaagaagaaggtcaaataaggttgttctttccttgaagggcagcctcctgcccaggccccgtggccctggagcctcaataaagtgtccctttcattgactggagcaaaaaaaaaaaaaaaaaaaaaaaaacgcgggggacatggggggggggaaaaaggggaaaagggggccagtgggccaaggatggttccgaacaaccgatttttgtgtcaacacgggaacatcgcgccggcccccataagggcgggcaataactggcaagaccggggtacgcgttataatgcgaaatgtaatcacataacaagacgacgacgacgaggctcacctctgaacacaacgtcacaaacatccgacatagaactcggacagaacagcagcaaaaacagtgcagaggataatagagagaaaagaaagacgaaaaagacaacagcaccagcaacctgaac

SEQ ID NO: 323529 - DNA, 867 bp, Homo sapiens
  misc_feature (16)..(16): n is a, c, g, or t
  misc_feature (118)..(118): n is a, c, g, or t
  misc_feature (121)..(122): n is a, c, g, or t
  misc_feature (688)..(688): n is a, c, g, or t
  misc_feature (694)..(696): n is a, c, g, or t
  misc_feature (699)..(700): n is a, c, g, or t
  misc_feature (711)..(711): n is a, c, g, or t
  misc_feature (720)..(721): n is a, c, g, or t
gatccccctgaccttnggacgccctcactattaatctactgggagaactctctgtgctagtaaccacgttctcctgatcaaatatcactctctcagactacaacatccagaaaggtcnacnngctttctttttcttcagcgaggcggccgagctgacgcaaacatgcagatctttgtgaagaccctcactggcaaaaccatcacccttgaggtcgagcccagtgacaccattgagaatgtcaaagccaaaattcaagacaaggagggtatcccacctgaccagcagcgtctgatatttgccggcaaacagctggaggatggccgcactctctcagactacaacatccagaaagagtccaccctgcacctggtgttgcgcctgcgaggtggcattattgagccttctctccgccagcttgcccagaaatacaactgcgacaagatgatctgccgcaagtgctatgctcgccttcaccctcgtgctgtcaactgccgcaagaagaagtgtggtcacaccaacaacctgcgtcccaagaagaaggtcaaataaggttgttctttccttgaagggcagcctcctgcccaggccccgtggccctggagcctcaataaagtgtccctttcattgactggagcaaaaaaaaaaaaaaaaaaaaaaaaaaaaaaaaaaaaaaaaaaaaaaaaaccngggggnnnttnnggggggggggnaaaaagggnnaaaaaggggaaaaggggacaagagagcaccgagacacacacatatattggaaaaaagaggggacaaaaaggcggggaccccacaaaagaggagcggaaaaaaaatcgagaaaacacggggaccggttataaacaagacaaaaaagt

SEQ ID NO: 323530 - DNA, 702 bp, Homo sapiens
  misc_feature (16)..(16): n is a, c, g, or t
  misc_feature (118)..(118): n is a, c, g, or t
  misc_feature (121)..(122): n is a, c, g, or t
gatccccctgaccttnggacgccctcactattaatctactgggagaactctctgtgctagtaaccacgttctcctgatcaaatatcactctctcagactacaacatccagaaaggtcnacnngctttctttttcttcagcgaggcggccgagctgacgcaaacatgcagatctttgtgaagaccctcactggcaaaaccatcacccttgaggtcgagcccagtgacaccattgagaatgtcaaagccaaaattcaagacaaggagggtatcccacctgaccagcagcgtctgatatttgccggcaaacagctggaggatggccgcactctctcagactacaacatccagaaagagtccaccctgcacctggtgttgcgcctgcgaggtggcattattgagccttctctccgccagcttgcccagaaatacaactgcgacaagatgatctgccgcaagtgctatgctcgccttcaccctcgtgctgtcaactgccgcaagaagaagtgtggtcacaccaacaacctgcgtcccaagaagaaggtcaaataaggttgttctttccttgaagggcagcctcctgcccaggccccgtggccctggagcctcaataaagtgtccctttcattgactggagcacacaagaacaaaaacaaaaaaacacaacgtccgcaggccgcgaatttagtagtagtaggggcagc

SEQ ID NO: 323531 - DNA, 743 bp, Homo sapiens
  misc_feature (616)..(616): n is a, c, g, or t
  misc_feature (631)..(631): n is a, c, g, or t
  misc_feature (647)..(647): n is a, c, g, or t
  misc_feature (655)..(655): n is a, c, g, or t
  misc_feature (675)..(676): n is a, c, g, or t
  misc_feature (681)..(681): n is a, c, g, or t
  misc_feature (684)..(684): n is a, c, g, or t
  misc_feature (715)..(715): n is a, c, g, or t
  misc_feature (718)..(718): n is a, c, g, or t
gtgctccgtgcgcaagcgctttcggcggcgattaggtggtttccggttccgctatcttctttttcttcagcgaggcggccgagctgacgcaaacatgcagatctttgtgaagaccctcactggcaaaaccatcacccttgaggtcgagcccagtgacaccattgagaatgtcaaagccaaaattcaagacaaggagggtatcccacctgaccagcagcgtctgatatttgccggcaaacagctggaggatggccgcactctctcagactacaacatccagaaagagtccaccctgcacctggtgttgcgcctgcgaggtggcattattgagccttctctccgccagcttgcccagaaatacaactgcgacaagatgatctgccgcaagtgctatgctcgccttcaccctcgtgctgtcaactgccgcaagaagaagtgtggtcacaccaacaacctgcgtcccaagaagaaggtcaaataaggttgttctttccttgaagggcagcctcctgcccaggccccgtggccctggagcctcaataaagtgtccctttcattgactggagcaaaaaaaaaaaaaaaaaaaaaaaaactcgggggggggcccggtacccantttggcctattagtngagtcgtattacaatnaacttggnccgtcggttttacaaacggnnggtgnctngggaaaaaccccttgggggtttaccccaacnttnatttggctttgaaggaaaattcccc

SEQ ID NO: 323532 - DNA, 1670 bp, Homo sapiens
gactctacaggatcttcgtacttgtgacgccttggacgcctgatcttgacgctatcttctttttcttcagcgaggcggccgagctggttggtggcggcggtcgtgcgggttcgcgccgggccgagagcgggttgggggctgcgggaggctgcaggggcctgggcggcagaagaggcggccctgagctggctcatgcgggccagtctcggcagggtggctgggcagggctcgcgaggccacggctcggagcccagaccggggcccaggaggcgagcgccgttttggagaggagcctgcctgctctgcctgccagcgtgaccccacgaggcctcgggcgggaagaggtcctcggggcagatccgagttaatgagagaggggtattgagcgtgtagcgttaactctgccagtcactgcgtcagtcgctttggaaatactaaatttctcgagctgagtcttcatacctggctccattactacgtctgtaaggaggagctggtggtagtgtctgctttttagacttttctttagactatttgtatttttttcagatggagtcttgctctgtcgcctaagctggagttcagtggtgcggtctcggctcactgcaatctccacctcccgggctcgagcgattcttctgcctcagcctcccgagtagctgggattataggcgcctgccaccacgcccagttgatttttgtagttttagtagagacggagtttcaccatgttagccaggctcatcttgaactcttgacctcaaatgatccgtctgcctcggccttccaaagtgctgggattacagacgcaaacatgcagatctttgtgaagaccctcactggcaaaaccatcacccttgaggtcgagcccagtgacaccattgagaatgtcaaagccaaaattcaagacaaggagggtatcccacctgaccagcagcgtctgatatttgccggcaaacagctggaggatggccgcactctctcagactacaacatccagaaagagtccaccctgcacctggtgttgcgcctgcgaggtggcattattgagccttctctccgccagcttgcccagaaatacaactgcgacaagatgatctgccgcaagtgctatgctcgccttcaccctcgtgctgtcaactgccgcaagaagaagtgtggtcacaccaacaacctgcgtcccaagaagaaggtcaaataagacatggtctcgctatgttgcccagaatggttttgcactgggtccaagcagttctgccgcagcctcccaaagtgctgggattacaggggtgaggcaccttgctggcccctgttttgattagggtgcagtgctggtgaagccggtgcacgaggccagtgatgcatcctaatgaggggtggagttggcgggacttcctgggccagtttggggactttcacaaaagacccccatgactcagggttttgagttcttaactgatcgaatgaaggattcaaaattaaccactccaaggggggattgaaggaagaaccactcttaatggacaaaaagaaagaaaggggagggagtaacagggatatgagctctagccgcccaagctagcaatggcaacccttctgggtccccttccagcatgtggaagctttcctttcgcttcattcaataaacagctgctgctcactctcctggt

SEQ ID NO: 323533 - DNA, 769 bp, Homo sapiens
  misc_feature (590)..(590): n is a, c, g, or t
  misc_feature (596)..(598): n is a, c, g, or t
  misc_feature (601)..(602): n is a, c, g, or t
  misc_feature (613)..(613): n is a, c, g, or t
  misc_feature (622)..(623): n is a, c, g, or t
tgatgaggatccccgaaactctggcggacgagctggttggtggcggcggtcgtgcggacgcaaacatgcagatctttgtgaagaccctcactggcaaaaccatcacccttgaggtcgagcccagtgacaccattgagaatgtcaaagccaaaattcaagacaaggagggtatcccacctgaccagcagcgtctgatatttgccggcaaacagctggaggatggccgcactctctcagactacaacatccagaaagagtccaccctgcacctggtgttgcgcctgcgaggtggcattattgagccttctctccgccagcttgcccagaaatacaactgcgacaagatgatctgccgcaagtgctatgctcgccttcaccctcgtgctgtcaactgccgcaagaagaagtgtggtcacaccaacaacctgcgtcccaagaagaaggtcaaataaggttgttctttccttgaagggcagcctcctgcccaggccccgtggccctggagcctcaataaagtgtccctttcattgactggagcaaaaaaaaaaaaaaaaaaaaaaaaaaaaaaaaaaaaaaaaaaaaaaaaaccngggggnnnttnnggggggggggnaaaaagggnnaaaaaggggaaaaggggacaagagagcaccgagacacacacatatattggaaaaaagaggggacaaaaaggcggggaccccacaaaagaggagcggaaaaaaaatcgagaaaacacggggaccggttataaacaagacaaaaaagt

SEQ ID NO: 323534 - DNA, 2123 bp, Homo sapiens
gactctacaggatcttcgtacttgtgacgccttggacgcctgatcttgacgctatcttctttttcttcagcgaggcggccgagctggttggtggcggcggtcgtgcggacgcaaacatgcagatctttgtgaagaccctcactggcaaaaccatcacccttgaggtcgagcccagtgacaccattgagaatgtcaaagccggcaaacagctggaggatggccgcactctctcagactacaacatccagaaagagtccaccctgcacctggtgttgcgcctgcgaggtggcattattgagccttctctccgccagcttgcccagaaatacaactgcgacaagatgatctgccgcaagtgctatgctcgccttcaccctcgtgctgtcaactgccgcaagaagaagtgtggtcacaccaacaacctgcgtcccaagaagaaggtcaaataaggttgttctttccttgaagggcagcctcctgcccaggccccgtggccctggagcctcaataaagtgtccctttcattgactggagcagcaattggtgtcctcatggctgatctgtccagggaggtggctgaagagtgggcatctcccttagggactctactcagcactccattctgtgccacctgtggggtcttctgtcctagattctgtcacatcggcattggtccctgccctatgcccctgactctggatttgtcatctgtaaaactggagtaaaaacctcagtcgtgtaattggtgggactgaggatcagttttgtcattgctgggatcctgtcaggcactttgaggtgtccctcaggccttggccctgaagtgtctaggtgtgtggagatgggtagaaaattaggtacacccaatggtgtagaacgttgattctcaaatttttttattttatacaaatggggtctcactatgttgtccaggctggtcttgaactcctgggctcaagccatccgcccatctcagcccctcaaagtgttgggattacaagcaagaactgccatgcctgacccagttctcagttttttgtttgtttgtttgtttgtttgttttgagacggagtcttgctctgtcgcccaggctggagtgcagtggcgcagtctcggcttactacaacctctgcctccggggttcacatccttctcctgcctcagcctcccgagtagctgggactacaggtgcccgccacaactcctggctaattttttgtatttttagtagagacggggtttcactgggttagccaggttggtctcgatctcctgaccttgtgatccattcgccttggcctcccagaatgctggtattacaggcgtgagccagcacgcctggcccagttactcagttttgaatctgaggccgtgacatcactcatggtctgcagtcagtgctctgcccctgagctgtaccctctcctatgataatcactcttaagaagggcaacccttggtgttttccccttaaggtcacccaggctggaatgcagtggtgtggtcatggctccctgtaccctggaactcaggcttgggtgatcctctctcctttgcctccgaagtagccaggactacaggtgtgcacccaccaccacactcagataattgctttggtgtttttaaagcttgtaatgatcagtaggctgaggtgggcaaatcataaggtcaagagttttttagatggggtgagcacagaccaattcctgttttatttactgatttaaaattttgagacagtctcactgtcacccaggttggggtgcagtggtaggatcatagcttgctgcagccttgatctcccaggatcttgcctcagcctcccgagtagctgggactgcatgcttgtgccaccacactcggttaatattttgtagagatggggtcttgctatgttgcccaggctggcttcaaactcctgaacttaaaagcctcctgtttagttttggttttttatcactttttttttttttttttggagatggagccttgctcccatcgtgcaggctggagtgcggtggcgcagtctcggctcactgcagcttctgcctctcgggttcaagcgattctcctttctcagcctcttgagtagctggaattaccagtgtgcgccaccaccacca

SEQ ID NO: 323535 - DNA, 1260 bp, Homo sapiens
gactctacaggatcttcgtacttgtgacgccttggacgcctgatcttgacgctatcttctttttcttcagcgaggcggccgagctggttggtggcggcggtcgtgcgggttcgcgccgggccgagagcgggttgggggctgcgggaggctgcaggggcctgggcggcagaagaggcggccctgagctggctcatgcgggccagtctcggcagggtggctgggcagggctcgcgaggccacggctcggagcccagaccggggcccaggaggcgagcgccgttttggagaggagcctgcctgctctgcctgccagcgtgaccccacgaggcctcgggcgggaagaggtcctcggggcagatccgagttaatgagagaggggtattgagcgtgtagcgttaactctgccagtcactgcgtcagtcgctttggaaatactaaatttctcgagctgagtcttcatacctggctccattactacgtctgtaaggaggagctggtggtagtgtctgctttttagacttttctttagactatttgtatttttttcagatggagtcttgctctgtcgcctaagctggagttcagtggtgcggtctcggctcactgcaatctccacctcccgggctcgagcgattcttctgcctcagcctcccgagtagctgggattataggcgcctgccaccacgcccagttgatttttgtagttttagtagagacggagtttcaccatgttagccaggctcatcttgaactcttgacctcaaatgatccgtctgcctcggccttccaaagtgctgggattacagacgcaaacatgcagatctttgtgaagaccctcactggcaaaaccatcacccttgaggtcgagcccagtgacaccattgagaatgtcaaagccaaaattcaagacaaggagggtatcccacctgaccagcagcgtctgatatttgccggcaaacagctggaggatggccgcactctctcagactacaacatccagaaagagtccaccctgcacctggtgttgcgcctgcgaggtggcattataaatacaactgcgacaagatgatctgccgcaagtgctatgctcgccttcaccctcgtgctgtcaactgccgcaagaagaagtgtggtcacaccaacaacctgcgtcccaagaagaaggtcaaataaggttgttctttccttgaagggcagcctcctgcccaggccccgtggccctggagcctcaataaagtgtccctttcattgactggagca

SEQ ID NO: 323536 - DNA, 314 bp, Homo sapiens
  misc_feature (204)..(204): n is a, c, g, or t
  misc_feature (270)..(270): n is a, c, g, or t
gactctacaggatcttcgtacttgtgacgccttggacgcctgatcttgacgctatcttctttttcttcagcgaggcggccgagctggttggtggcggcggtcgtgcggacgcaaacatgcagatctttgtgaagaccctcactggcaaaaccatcacccttgaggtcgagcccagtgacaccattgagaatgtcaaatgcgganagctctaagattggatttctgttgcgtttcctccatgttggagggtgtcggaatagagtctgagangcagaaggaggtctgggagtcatgcaggaatgaatacttctggt

SEQ ID NO: 323537 - DNA, 147 bp, Homo sapiens
tcagaacgcttacattcacctacagctgggcaaaatcacctaacacaaaaccaatttaataatgaagagttgaggccatgtgtggtagctcaagccagtaatcccagcactttgtgagacccaggtaggcagttcacttgaggccag

SEQ ID NO: 323538 - DNA, 1107 bp, Homo sapiens
tgctgtgttgcaagaataaactttgggtcttggattgcaataccacctgtggagaaaatggtatgcgagggaaagcgatcagcctcttgcccttgtttcttcctcttgaccgccaagttctactggatcctcacaatgatgcaaagaactcacagccaggagtatgcccattccatacgggtggatggggacattattttggggggtctcttccctgtccacgcaaagggagagagaggggtgccttgtggggagctgaagaaggaaaaggggattcacagactggaggccatgctttatgcaattgaccagattaacaaggaccctgatctcctttccaacatcactctgggtgtccgcatcctcgacacgtgctctagggacacctatgctttggagcagtctctaacattcgtgcaggcattaatagagaaagatgcttcggatgtgaagtgtgctaatggagatccacccattttcaccaagcccgacaagatttctggcgtcataggtgctgcagcaagctccgtgtccatcatggttgctaacattttaagactttttaaggtaggtaaaggcattgtctttctgaccattgtgaaagaacaatgaaatgctatgactcctactgcaggtttaagaagaaagtgaagatggtgaaggtgctcatagacccttttggtgttaccaggttcctcaaatgggacattctatatggggcattctacatgtattggtttagttccattacttacaattaactggattaattttgactcttttttttttttcctgaacaaagagaaaggtgaaaagttctgtgatatattgggtccttgtcatcttgggataacctctttgttaggctcattttaaattaaacaagcatttttgaagagaataatgaactcagcgcatttatcatggaaaacatttctatggtatttgagctatttaatttactgagtgaaacttctttaaggtgggatgctctgttatgacaaaagtttgttcatgaagaaacagtatttattactaatgtgtagatgggagtgacactctgggagatgagatggtcataaaattgtcaggcttattataactaca

SEQ ID NO: 323539 - DNA, 653 bp, Homo sapiens
aggtctgttgagctgaggctgaaggatgagaaaggccaggaaggacttacttgggaaaatgtttgtggtgatatgtatgagtgctgcaggtgaaacaaaaaggaagccagtgtagttggatcagcaccaaataactccccaggcacatgactatctgctaagaactgcgttcgagataattcagcttgaacctgtgcctcctactcttgcaccatatctcaaccttgggacccacttctgcctgcacggaagacttaaagttcacttgcaatacctcaaatcagctatgcatccacagccccagagctaagtgataacaccaggtatgactttttctctcgagtggttccgcctgactcctaccaagcccaagccatggtggacatcgtgacagcactgggatggaattatgtttcgacactggcttctgaggggaactatggtgagagcggtgtggaggccttcacccagatctcgagggagattgaaaatgtatgaaaggcctggtcttgttggacagattgggctaattgatttaattggacaactgttcacacctgctaggtggaaagcataccacagacatctttcattagcactgtagctgcactgtctagaagataatctgagagtgcttgttgaatgaaggaata

SEQ ID NO: 323540 - DNA, 3402 bp, Homo sapiens
tgctgtgttgcaagaataaactttgggtcttggattgcaataccacctgtggagaaaatggtatgcgagggaaagcgatcagcctcttgcccttgtttcttcctcttgaccgccaagttctactggatcctcacaatgatgcaaagaactcacagccaggagtatgcccattccatacgggtggatggggacattattttggggggtctcttccctgtccacgcaaagggagagagaggggtgccttgtggggagctgaagaaggaaaaggggattcacagactggaggccatgctttatgcaattgaccagattaacaaggaccctgatctcctttccaacatcactctgggtgtccgcatcctcgacacgtgctctagggacacctatgctttggagcagtctctaacattcgtgcaggcattaatagagaaagatgcttcggatgtgaagtgtgctaatggagatccacccattttcaccaagcccgacaagatttctggcgtcataggtgctgcagcaagctccgtgtccatcatggttgctaacattttaagactttttaagatacctcaaatcagctatgcatccacagccccagagctaagtgataacaccaggtatgactttttctctcgagtggttccgcctgactcctaccaagcccaagccatggtggacatcgtgacagcactgggatggaattatgtttcgacactggcttctgaggggaactatggtgagagcggtgtggaggccttcacccagatctcgagggagattggtggtgtttgcattgctcagtcacagaaaatcccacgtgaaccaagacctggagaatttgaaaaaattatcaaacgcctgctagaaacacctaatgctcgagcagtgattatgtttgccaatgaggatgacatcaggaggatattggaagcagcaaaaaaactaaaccaaagtgggcattttctctggattggctcagatagttggggatccaaaatagcacctgtctatcagcaagaggagattgcagaaggggctgtgacaattttgcccaaacgagcatcaattgatggatttgatcgatactttagaagccgaactcttgccaataatcgaagaaatgtgtggtttgcagaattctgggaggagaattttggctgcaagttaggatcacatgggaaaaggaacagtcatataaagaaatgcacagggctggagcgaattgctcgggattcatcttatgaacaggaaggaaaggtccaatttgtaattgatgctgtatattccatggcttacgccctgcacaatatgcacaaagatctctgccctggatacattggcctttgtccacgaatgagtaccattgatgggaaagagctacttggttatattcgggctgtaaattttaatggcagtgctggcactcctgtcacttttaatgaaaacggagatgctcctggacgttatgatatcttccagtatcaaataaccaacaaaagcacagagtacaaagtcatcggccactggaccaatcagcttcatctaaaagtggaagacatgcagtgggctcatagagaacatactcacccggcgtctgtctgcagcctgccgtgtaagccaggggagaggaagaaaacggtgaaaggggtcccttgctgctggcactgtgaacgctgtgaaggttacaactaccaggtggatgagctgtcctgtgaactttgccctctggatcagagacccaacatgaaccgcacaggctgccagcttatccccatcatcaaattggagtggcattctccctgggctgtggtgcctgtgtttgttgcaatattgggaatcatcgccaccacctttgtgatcgtgacctttgtccgctataatgacacacctatcgtgagggcttcaggacgcgaacttagttacgtgctcctaacggggatttttctctgttattcaatcacgtttttaatgattgcagcaccagatacaatcatatgctccttccgacgggtcttcctaggacttggcatgtgtttcagctatgcagcccttctgaccaaaacaaaccgtatccaccgaatatttgagcaggggaagaaatctgtcacagcgcccaagttcattagtccagcatctcagctggtgatcaccttcagcctcatctccgtccagctccttggagtgtttgtctggtttgttgtggatcccccccacatcatcattgactatggagagcagcggacactagatccagagaaggccaggggagtgctcaagtgtgacatttctgatctctcactcatttgttcacttggatacagtatcctcttgatggtcacttgtactgtttatgccattaaaacgagaggtgtcccagagactttcaatgaagccaaacctattggatttaccatgtataccacctgcatcatttggttagctttcatccccatcttttttggtacagcccagtcagcagaaaagatgtacatccagacaacaacacttactgtctccatgagtttaagtgcttcagtatctctgggcatgctctatatgcccaaggtttatattataatttttcatccagaacagaatgttcaaaaacgcaagaggagcttcaaggctgtggtgacagctgccaccatgcaaagcaaactgatccaaaaaggaaatgacagaccaaatggcgaggtgaaaagtgaactctgtgagagtcttgaaaccaacagtaagtcatctgtagagtttccgatggtcaagagcgggagcacttcctaatagatcttcctctaccaagacaacatatatcagttacagcaatcattcaatctgaaacagggaaatggcacaatctgaagagatgtggtatatgatcttaaatgatgaacatgagaccgcaaaaattcactcctggagatctccgtagactacaatcaatcaaatcaatagtcagtcttgtaaggaacaaaaattagccatgagccaaaagtatcaataaacggggagtgaagaaacccgttttatacaataaaaccaatgagtgtcaagctaaagtattgcttattcatgagcagttaaaacaaatcacaaaaggaaaactaatgttagctcgtgaaaaaaaatgctgttgaaataaataatgtctgatgttattcttgtatttttctgtgattgtgagaactcccgttcctgtcccacattgtttaacttgtataagacaatgagtctgtttcttgtaatggctgaccagattgaagccctgggttgtgctaaaaataaatgcaatgattgatgcatgcaattttttatacaaataatttatttctaataataaagggtcgcaggcgaccagatctttctatccacatttcctatcaatacctccacaattatcta

SEQ ID NO: 323541 - DNA, 892 bp, Homo sapiens
gattctcttaatttccaccgctacagatgtacatgtacatccagacaacaacacttactgtctccatgagtttaagtgcttcagtatctctgggcatgctctatatgcccaaggtttatattataatttttcatccagaacagaatgttcaaaaacgcaagaggagcttcaaggctgtggtgacagctgccaccatgcaaagcaaactgatccaaaaaggaaatgacagaccaaatggcgaggtgaaaagtgaactctgtgagagtcttgaaaccaacacttcctctaccaagacaacatatatcagttacagcaatcattcaatctgaaacagggaaatggcacaatctgaagagatgtggtatatgatcttaaatgatgaacatgagaccgcaaaaattcactcctggagatctccgtagactacaatcaatcaaatcaatagtcagtcttgtaaggaacaaaaattagccatgagccaaaagtatcaataaacggggagtgaagaaacccgttttatacaataaaaccaatgagtgtcaagctaaagtattgcttattcatgagcagttaaaacaaatcacaaaaggaaaactaatgttagctcgtgaaaaaaaatgctgttgaaataaataatgtctgatgttattcttgtatttttctgtgattgtgagaactcccgttcctgtcccacattgtttaacttgtataagacaatgagtctgtttcttgtaatggctgaccagattgaagccctgggttgtgctaaaaataaatgcaatgattgatgcatgcaattttttatacaaataatttatttctaataataaagggtcgcaggcgaccagatctttctatccacatttcctatcaatacctccacaattatcta

SEQ ID NO: 323542 - DNA, 1042 bp, Homo sapiens
gtggtggttggtcgaaatttattaagccattaatgtgttcggtcgttgtttatgttctgggaccaagaagagcgaagacagtctggagaaaaaaattaagttggaagacatatactaccaagtattgagattcttaacctctagcttgtagaaagaaaaaccttccagaaagagctctctctatgtacatccagacaacaacacttactgtctccatgagtttaagtgcttcagtatctctgggcatgctctatatgcccaaggtttatattataatttttcatccagaacagaatgttcaaaaacgcaagaggagcttcaaggctgtggtgacagctgccaccatgcaaagcaaactgatccaaaaaggaaatgacagaccaaatggcgaggtgaaaagtgaactctgtgagagtcttgaaaccaacacttcctctaccaagacaacatatatcagttacagcaatcattcaatctgaaacagggaaatggcacaatctgaagagatgtggtatatgatcttaaatgatgaacatgagaccgcaaaaattcactcctggagatctccgtagactacaatcaatcaaatcaatagtcagtcttgtaaggaacaaaaattagccatgagccaaaagtatcaataaacggggagtgaagaaacccgttttatacaataaaaccaatgagtgtcaagctaaagtattgcttattcatgagcagttaaaacaaatcacaaaaggaaaactaatgttagctcgtgaaaaaaaatgctgttgaaataaataatgtctgatgttattcttgtatttttctgtgattgtgagaactcccgttcctgtcccacattgtttaacttgtataagacaatgagtctgtttcttgtaatggctgaccagattgaagccctgggttgtgctaaaaataaatgcaatgattgatgcatgcaattttttatacaaataatttatttctaataataaagggtcgcaggcgaccagatctttctatccacatttcctatcaatacctccacaattatcta

SEQ ID NO: 323543 - DNA, 914 bp, Homo sapiens
  misc_feature (33)..(33): n is a, c, g, or t
caggggtttcaggggggaagtgtagcatgaaanggggggtcttattaggacgccatgtacatccagacaacaacacttactgtctccatgagtttaagtgcttcagtatctctgggcatgctctatatgcccaaggtttatattataatttttcatccagaacagaatgttcaaaaacgcaagaggagcttcaaggctgtggtgacagctgccaccatgcaaagcaaactgatccaaaaaggaaatgacagaccaaatggcgaggtgaaaagtgaactctgtgagagtcttgaaaccaacacttcctctaccaagacaacatatatcagttacagcaatcattcaatctgaaacagggaaatggcacaatctgaagagatgtggtatatgatcttaaatgatgaacatgagaccgcaaaaattcactcctggagatctccgtagactacaatcaatcaaatcaatagtcagtcttgtaaggaacaaaaattagccatgagccaaaagtatcaataaacggggagtgaagaaacccgttttatacaataaaaccaatgagtgtcaagctaaagtattgcttattcatgagcagttaaaacaaatcacaaaaggaaaactaatgttagctcgtgaaaaaaaatgctgttgaaataaataatgtctgatgttattcttgtatttttctgtgattgtgagaactcccgttcctgtcccacattgtttaacttgtataagacaatgagtctgtttcttgtaatggctgaccagattgaagccctgggttgtgctaaaaataaatgcaatgattgatgcatgcaattttttatacaaataatttatttctaataataaagggtcgcaggcgaccagatctttctatccacatttcctatcaatacctccacaattatcta

SEQ ID NO: 323544 - DNA, 973 bp, Homo sapiens
  misc_feature (53)..(53): n is a, c, g, or t
aacatataagcaacttccaacaataaacacccccgcaaacaaagttaagagtnaccccatgtacatccagacaacaacacttactgtctccatgagtttaagtgcttcagtatctctgggcatgctctatatgcccaaggtttatattataatttttcatccagaacagaatgttcaaaaacgcaagaggagcttcaaggctgtggtgacagctgccaccatgcaaagcaaactgatccaaaaaggaaatgacagaccaaatggcgaggtgaaaagtgaactctgtgagagtcttgaaaccaacagtaagtcatctgtagagtttccgatggtcaagagcgggagcacttcctaatagatcttcctctaccaagacaacatatatcagttacagcaatcattcaatctgaaacagggaaatggcacaatctgaagagatgtggtatatgatcttaaatgatgaacatgagaccgcaaaaattcactcctggagatctccgtagactacaatcaatcaaatcaatagtcagtcttgtaaggaacaaaaattagccatgagccaaaagtatcaataaacggggagtgaagaaacccgttttatacaataaaaccaatgagtgtcaagctaaagtattgcttattcatgagcagttaaaacaaatcacaaaaggaaaactaatgttagctcgtgaaaaaaaatgctgttgaaataaataatgtctgatgttattcttgtatttttctgtgattgtgagaactcccgttcctgtcccacattgtttaacttgtataagacaatgagtctgtttcttgtaatggctgaccagattgaagccctgggttgtgctaaaaataaatgcaatgattgatgcatgcaattttttatacaaataatttatttctaataataaagggtcgcaggcgaccagatctttctatccacatttcctatcaatacctccacaattatcta

SEQ ID NO: 323545 - DNA, 1097 bp, Homo sapiens
gtggtggttggtcgaaatttattaagccattaatgtgttcggtcgttgtttatgttctgggaccaagaagagcgaagacagtctggagaaaaaaattaagttggaagacatatactaccaagtattgagattcttaacctctagcttgtagaaagaaaaaccttccagaaagagctctctctatgtacatccagacaacaacacttactgtctccatgagtttaagtgcttcagtatctctgggcatgctctatatgcccaaggtttatattataatttttcatccagaacagaatgttcaaaaacgcaagaggagcttcaaggctgtggtgacagctgccaccatgcaaagcaaactgatccaaaaaggaaatgacagaccaaatggcgaggtgaaaagtgaactctgtgagagtcttgaaaccaacagtaagtcatctgtagagtttccgatggtcaagagcgggagcacttcctaatagatcttcctctaccaagacaacatatatcagttacagcaatcattcaatctgaaacagggaaatggcacaatctgaagagatgtggtatatgatcttaaatgatgaacatgagaccgcaaaaattcactcctggagatctccgtagactacaatcaatcaaatcaatagtcagtcttgtaaggaacaaaaattagccatgagccaaaagtatcaataaacggggagtgaagaaacccgttttatacaataaaaccaatgagtgtcaagctaaagtattgcttattcatgagcagttaaaacaaatcacaaaaggaaaactaatgttagctcgtgaaaaaaaatgctgttgaaataaataatgtctgatgttattcttgtatttttctgtgattgtgagaactcccgttcctgtcccacattgtttaacttgtataagacaatgagtctgtttcttgtaatggctgaccagattgaagccctgggttgtgctaaaaataaatgcaatgattgatgcatgcaattttttatacaaataatttatttctaataataaagggtcgcaggcgaccagatctttctatccacatttcctatcaatacctccacaattatcta

SEQ ID NO: 323546 - DNA, 971 bp, Homo sapiens
  misc_feature (32)..(34): n is a, c, g, or t
gggggtggtacgacccctataaacagaaaggnnngctatagtcacccagaatactcatgtacatccagacaacaacacttactgtctccatgagtttaagtgcttcagtatctctgggcatgctctatatgcccaaggtttatattataatttttcatccagaacagaatgttcaaaaacgcaagaggagcttcaaggctgtggtgacagctgccaccatgcaaagcaaactgatccaaaaaggaaatgacagaccaaatggcgaggtgaaaagtgaactctgtgagagtcttgaaaccaacagtaagtcatctgtagagtttccgatggtcaagagcgggagcacttcctaatagatcttcctctaccaagacaacatatatcagttacagcaatcattcaatctgaaacagggaaatggcacaatctgaagagatgtggtatatgatcttaaatgatgaacatgagaccgcaaaaattcactcctggagatctccgtagactacaatcaatcaaatcaatagtcagtcttgtaaggaacaaaaattagccatgagccaaaagtatcaataaacggggagtgaagaaacccgttttatacaataaaaccaatgagtgtcaagctaaagtattgcttattcatgagcagttaaaacaaatcacaaaaggaaaactaatgttagctcgtgaaaaaaaatgctgttgaaataaataatgtctgatgttattcttgtatttttctgtgattgtgagaactcccgttcctgtcccacattgtttaacttgtataagacaatgagtctgtttcttgtaatggctgaccagattgaagccctgggttgtgctaaaaataaatgcaatgattgatgcatgcaattttttatacaaataatttatttctaataataaagggtcgcaggcgaccagatctttctatccacatttcctatcaatacctccacaattatcta

SEQ ID NO: 323547 - DNA, 453 bp, Homo sapiens
aaaataattgtgctgtttatgaggagaaaaattttcccccgggccaaaatttttcaatagggggggggtaaaaaacccctttttaaacataaaacccaaagggggggcagaaaaaaagttttttttttcgggcgcgttaaccccttccaaaaggaaactttgtttgggtccggaaaaaaaggggggaaaaaaaaaaaggggggaaggaattgggggatttttctgtgattgtgagaactcccgttcctgtcccacattgtttaacttgtataagacaatgagtctgtttcttgtaatggctgaccagattgaagccctgggttgtgctaaaaataaatgcaatgattgatgcatgcaattttttatacaaataatttatttctaataataaagggtcgcaggcgaccagatctttctatccacatttcctatcaatacctccacaattatcta

SEQ ID NO: 323548 - DNA, 3347 bp, Homo sapiens
tgctgtgttgcaagaataaactttgggtcttggattgcaataccacctgtggagaaaatggtatgcgagggaaagcgatcagcctcttgcccttgtttcttcctcttgaccgccaagttctactggatcctcacaatgatgcaaagaactcacagccaggagtatgcccattccatacgggtggatggggacattattttggggggtctcttccctgtccacgcaaagggagagagaggggtgccttgtggggagctgaagaaggaaaaggggattcacagactggaggccatgctttatgcaattgaccagattaacaaggaccctgatctcctttccaacatcactctgggtgtccgcatcctcgacacgtgctctagggacacctatgctttggagcagtctctaacattcgtgcaggcattaatagagaaagatgcttcggatgtgaagtgtgctaatggagatccacccattttcaccaagcccgacaagatttctggcgtcataggtgctgcagcaagctccgtgtccatcatggttgctaacattttaagactttttaagatacctcaaatcagctatgcatccacagccccagagctaagtgataacaccaggtatgactttttctctcgagtggttccgcctgactcctaccaagcccaagccatggtggacatcgtgacagcactgggatggaattatgtttcgacactggcttctgaggggaactatggtgagagcggtgtggaggccttcacccagatctcgagggagattggtggtgtttgcattgctcagtcacagaaaatcccacgtgaaccaagacctggagaatttgaaaaaattatcaaacgcctgctagaaacacctaatgctcgagcagtgattatgtttgccaatgaggatgacatcaggaggatattggaagcagcaaaaaaactaaaccaaagtgggcattttctctggattggctcagatagttggggatccaaaatagcacctgtctatcagcaagaggagattgcagaaggggctgtgacaattttgcccaaacgagcatcaattgatggatttgatcgatactttagaagccgaactcttgccaataatcgaagaaatgtgtggtttgcagaattctgggaggagaattttggctgcaagttaggatcacatgggaaaaggaacagtcatataaagaaatgcacagggctggagcgaattgctcgggattcatcttatgaacaggaaggaaaggtccaatttgtaattgatgctgtatattccatggcttacgccctgcacaatatgcacaaagatctctgccctggatacattggcctttgtccacgaatgagtaccattgatgggaaagagctacttggttatattcgggctgtaaattttaatggcagtgctggcactcctgtcacttttaatgaaaacggagatgctcctggacgttatgatatcttccagtatcaaataaccaacaaaagcacagagtacaaagtcatcggccactggaccaatcagcttcatctaaaagtggaagacatgcagtgggctcatagagaacatactcacccggcgtctgtctgcagcctgccgtgtaagccaggggagaggaagaaaacggtgaaaggggtcccttgctgctggcactgtgaacgctgtgaaggttacaactaccaggtggatgagctgtcctgtgaactttgccctctggatcagagacccaacatgaaccgcacaggctgccagcttatccccatcatcaaattggagtggcattctccctgggctgtggtgcctgtgtttgttgcaatattgggaatcatcgccaccacctttgtgatcgtgacctttgtccgctataatgacacacctatcgtgagggcttcaggacgcgaacttagttacgtgctcctaacggggatttttctctgttattcaatcacgtttttaatgattgcagcaccagatacaatcatatgctccttccgacgggtcttcctaggacttggcatgtgtttcagctatgcagcccttctgaccaaaacaaaccgtatccaccgaatatttgagcaggggaagaaatctgtcacagcgcccaagttcattagtccagcatctcagctggtgatcaccttcagcctcatctccgtccagctccttggagtgtttgtctggtttgttgtggatcccccccacatcatcattgactatggagagcagcggacactagatccagagaaggccaggggagtgctcaagtgtgacatttctgatctctcactcatttgttcacttggatacagtatcctcttgatggtcacttgtactgtttatgccattaaaacgagaggtgtcccagagactttcaatgaagccaaacctattggatttaccatgtataccacctgcatcatttggttagctttcatccccatcttttttggtacagcccagtcagcagaaaagatgtacatccagacaacaacacttactgtctccatgagtttaagtgcttcagtatctctgggcatgctctatatgcccaaggtttatattataatttttcatccagaacagaatgttcaaaaacgcaagaggagcttcaaggctgtggtgacagctgccaccatgcaaagcaaactgatccaaaaaggaaatgacagaccaaatggcgaggtgaaaagtgaactctgtgagagtcttgaaaccaacacttcctctaccaagacaacatatatcagttacagcaatcattcaatctgaaacagggaaatggcacaatctgaagagatgtggtatatgatcttaaatgatgaacatgagaccgcaaaaattcactcctggagatctccgtagactacaatcaatcaaatcaatagtcagtcttgtaaggaacaaaaattagccatgagccaaaagtatcaataaacggggagtgaagaaacccgttttatacaataaaaccaatgagtgtcaagctaaagtattgcttattcatgagcagttaaaacaaatcacaaaaggaaaactaatgttagctcgtgaaaaaaaatgctgttgaaataaataatgtctgatgttattcttgtatttttctgtgattgtgagaactcccgttcctgtcccacattgtttaacttgtataagacaatgagtctgtttcttgtaatggctgaccagattgaagccctgggttgtgctaaaaataaatgcaatgattgatgcatgcaattttttatacaaataatttatttctaataataaagggtcgcaggcgaccagatctttctatccacatttcctatcaatacctccacaattatcta

SEQ ID NO: 323549 - DNA, 3418 bp, Homo sapiens
tgctgtgttgcaagaataaactttgggtcttggattgcaataccacctgtggagaaaatggtatgcgagggaaagcgatcagcctcttgcccttgtttcttcctcttgaccgccaagttctactggatcctcacaatgatgcaaagaactcacagccaggagtatgcccattccatacgggtggatggggacattattttggggggtctcttccctgtccacgcaaagggagagagaggggtgccttgtggggagctgaagaaggaaaaggggattcacagactggaggccatgctttatgcaattgaccagattaacaaggaccctgatctcctttccaacatcactctgggtgtccgcatcctcgacacgtgctctagggacacctatgctttggagcagtctctaacattcgtgcaggcattaatagagaaagatgcttcggatgtgaagtgtgctaatggagatccacccattttcaccaagcccgacaagatttctggcgtcataggtgctgcagcaagctccgtgtccatcatggttgctaacattttaagactttttaagatacctcaaatcagctatgcatccacagccccagagctaagtgataacaccaggtatgactttttctctcgagtggttccgcctgactcctaccaagcccaagccatggtggacatcgtgacagcactgggatggaattatgtttcgacactggcttctgaggggaactatggtgagagcggtgtggaggccttcacccagatctcgagggagattggtggtgtttgcattgctcagtcacagaaaatcccacgtgaaccaagacctggagaatttgaaaaaattatcaaacgcctgctagaaacacctaatgctcgagcagtgattatgtttgccaatgaggatgacatcaggaggatattggaagcagcaaaaaaactaaaccaaagtgggcattttctctggattggctcagatagttggggatccaaaatagcacctgtctatcagcaagaggagattgcagaaggggctgtgacaattttgcccaaacgagcatcaattgatggatttgatcgatactttagaagccgaactcttgccaataatcgaagaaatgtgtggtttgcagaattctgggaggagaattttggctgcaagttaggatcacatgggaaaaggaacagtcatataaagaaatgcacagggctggagcgaattgctcgggattcatcttatgaacaggaaggaaaggtccaatttgtaattgatgctgtatattccatggcttacgccctgcacaatatgcacaaagatctctgccctggatacattggcctttgtccacgaatgagtaccattgatgggaaagagctacttggttatattcgggctgtaaattttaatggttgccgaagagggatccagatgtctctaccctggccaactctttttactccttcattttccagtagttgggcagtgctggcactcctgtcacttttaatgaaaacggagatgctcctggacgttatgatatcttccagtatcaaataaccaacaaaagcacagagtacaaagtcatcggccactggaccaatcagcttcatctaaaagtggaagacatgcagtgggctcatagagaacatactcacccggcgtctgtctgcagcctgccgtgtaagccaggggagaggaagaaaacggtgaaaggggtcccttgctgctggcactgtgaacgctgtgaaggttacaactaccaggtggatgagctgtcctgtgaactttgccctctggatcagagacccaacatgaaccgcacaggctgccagcttatccccatcatcaaattggagtggcattctccctgggctgtggtgcctgtgtttgttgcaatattgggaatcatcgccaccacctttgtgatcgtgacctttgtccgctataatgacacacctatcgtgagggcttcaggacgcgaacttagttacgtgctcctaacggggatttttctctgttattcaatcacgtttttaatgattgcagcaccagatacaatcatatgctccttccgacgggtcttcctaggacttggcatgtgtttcagctatgcagcccttctgaccaaaacaaaccgtatccaccgaatatttgagcaggggaagaaatctgtcacagcgcccaagttcattagtccagcatctcagctggtgatcaccttcagcctcatctccgtccagctccttggagtgtttgtctggtttgttgtggatcccccccacatcatcattgactatggagagcagcggacactagatccagagaaggccaggggagtgctcaagtgtgacatttctgatctctcactcatttgttcacttggatacagtatcctcttgatggtcacttgtactgtttatgccattaaaacgagaggtgtcccagagactttcaatgaagccaaacctattggatttaccatgtataccacctgcatcatttggttagctttcatccccatcttttttggtacagcccagtcagcagaaaagatgtacatccagacaacaacacttactgtctccatgagtttaagtgcttcagtatctctgggcatgctctatatgcccaaggtttatattataatttttcatccagaacagaatgttcaaaaacgcaagaggagcttcaaggctgtggtgacagctgccaccatgcaaagcaaactgatccaaaaaggaaatgacagaccaaatggcgaggtgaaaagtgaactctgtgagagtcttgaaaccaacacttcctctaccaagacaacatatatcagttacagcaatcattcaatctgaaacagggaaatggcacaatctgaagagatgtggtatatgatcttaaatgatgaacatgagaccgcaaaaattcactcctggagatctccgtagactacaatcaatcaaatcaatagtcagtcttgtaaggaacaaaaattagccatgagccaaaagtatcaataaacggggagtgaagaaacccgttttatacaataaaaccaatgagtgtcaagctaaagtattgcttattcatgagcagttaaaacaaatcacaaaaggaaaactaatgttagctcgtgaaaaaaaatgctgttgaaataaataatgtctgatgttattcttgtatttttctgtgattgtgagaactcccgttcctgtcccacattgtttaacttgtataagacaatgagtctgtttcttgtaatggctgaccagattgaagccctgggttgtgctaaaaataaatgcaatgattgatgcatgcaattttttatacaaataatttatttctaataataaagggtcgcaggcgaccagatctttctatccacatttcctatcaatacctccacaattatcta

SEQ ID NO: 323550 - DNA, 927 bp, Homo sapiens
gttgttttgtatatggttagggataggagggggggggggggtcttcagagtgacgccagacacattcatgtacatccagacaacaacacttactgtctccatgagtttaagtgcttcagtatctctgggcatgctctatatgcccaaggtttatattataatttttcatccagaacagaatgttcaaaaacgcaagaggagcttcaaggctgtggtgacagctgccaccatgcaaagcaaactgatccaaaaaggaaatgacagaccaaatggcgaggtgaaaagtgaactctgtgagagtcttgaaaccaacacttcctctaccaagacaacatatatcagttacagcaatcattcaatctgaaacagggaaatggcacaatctgaagagatgtggtatatgatcttaaatgatgaacatgagaccgcaaaaattcactcctggagatctccgtagactacaatcaatcaaatcaatagtcagtcttgtaaggaacaaaaattagccatgagccaaaagtatcaataaacggggagtgaagaaacccgttttatacaataaaaccaatgagtgtcaagctaaagtattgcttattcatgagcagttaaaacaaatcacaaaaggaaaactaatgttagctcgtgaaaaaaaatgctgttgaaataaataatgtctgatgttattcttgtatttttctgtgattgtgagaactcccgttcctgtcccacattgtttaacttgtataagacaatgagtctgtttcttgtaatggctgaccagattgaagccctgggttgtgctaaaaataaatgcaatgattgatgcatgcaattttttatacaaataatttatttctaataataaagggtcgcaggcgaccagatctttctatccacatttcctatcaatacctccacaattatcta

SEQ ID NO: 323551 - DNA, 1059 bp, Homo sapiens
tgctgtgttgcaagaataaactttgggtcttggattgcaataccacctgtggagaaaatggtatgcgagggaaagcgatcagcctcttgcccttgtttcttcctcttgaccgccaagttctactggatcctcacaatgatgcaaagaactcacagccaggagtatgcccattccatacgggtggatggggacattattttggggggtctcttccctgtccacgcaaagggagagagaggggtgccttgtggggagctgaagaaggaaaaggggattcacagactggaggccatgctttatgcaattgaccagattaacaaggaccctgatctcctttccaacatcactctgggtgtccgcatcctcgacacgtgctctagggacacctatgctttggagcagtctctaacattcgtgcaggcattaatagagaaagatgcttcggatgtgaagtgtgctaatggagatccacccattttcaccaagcccgacaagatttctggcgtcataggtgctgcagcaagctccgtgtccatcatggttgctaacattttaagactttttaagatacctcaaatcagctatgcatccacagccccagagctaagtgataacaccaggtatgactttttctctcgagtggttccgcctgactcctaccaagcccaagccatggtggacatcgtgacagcactgggatggaattatgtttcgacactggcttctgaggggaactatggtgagagcggtgtggaggccttcacccagatctcgagggagattggttatccatccctgtttgggattcagggctgccttcatgaatgttttgctatactatgtcaagttgtttaccaatttctgcttctaatgcagctgtcagatgctcaaactgtctattagtcgaagaggctctctactgaccacctttctcaagtttcttcttcttacatacaatgtttttgacaagactaagcatatcaaaccatcttttaacaattgtaaagcctaatattggccagcatacaattcaattcattaaacattgtagcactgaaa

SEQ ID NO: 323552 - DNA, 243 bp, Homo sapiens
gtttttttggtcttatacagaattttccattctttcttttatggcttctggatttcgagtcacagaaagcatttccaccaaccccttccacacatacacgcacaagaattgacccatattttcttgcagaatttctatgctattactttttttacatttaaatatttgctccatttgaggtttatcctgatattctgttaagtatggattcaagttttttgtttttgtttttgtttttgtttt

SEQ ID NO: 323553 - DNA, 302 bp, Homo sapiens
atgcattaggggtagatgaatggatggatggatgatggatggaatcatttattctcaggatataaagatgacaatgctgattcacttccatagggtaggtgttttgcattctctctttttttgaaacagagtcttactctgttacccaggctggagtacaatggtgcaaactcagctcactgcagcctccacctcctgagttcaagcaattctcctgcctcagcctcctgagtaactgggactacaggtgtgcaccaccatgcctggctaatttttgtattttttagtagagtcagggtttc

SEQ ID NO: 323554 - DNA, 893 bp, Homo sapiens
catgctgaaagcagggcgggaccggggcggtcttccagcagggaaaatggcgctggccatgctggtcttggtggtttcgccgtggtctgcggcccggggagtgcttcgaaactactgggagcgactgctacggaagcttccgcagagccggccgggctttcccagtcctccgtggggaccagcattagcagtacagggcccagccatgtttacagagccagcaaatgataccagtggaagtaaagagaattccagccttttggacagtatcttttggatggcagctcccaaaaatagacgcaccattgaagttaaccggtgtaggagaagaaatccgcagaagcttattaaagttaagaacaacatagacgtttgtcctgaatgtggtcacctgaaacagaaacatgtcctttgtgcctactgctatgaaaaggtgtgcaaggagactgcagaaatcagacgacagatagggaagcaagaagggggcccttttaaggctcccaccatagagactgtggtgctgtacacaggagagacaccgtctgaacaagatcagggcaagaggatcattgaacgagacagaaagcgaccatcctggttcacccagaattgacaccaaagatgttaaaaggataacttcacagtaaatcatttctcctgaaatagaggaagattctttacgttgttgtgcttgtttttaaatcatcagtatagtttaacacattctttctaagcagttttgtgtgggataatttgaagaatatattatgagtaaactccgaaaattttgtttatccaaaggctcaatggattatgtttctattatatacaaggttttaagtaaacataaaatttccagaacaaaaataaaaaatttaaaattcatagcaaaa

SEQ ID NO: 323555 - DNA, 1305 bp, Homo sapiens
taatgatcctgtttagtatttttctttgtattttctttcaaacctacatctagaataagttgataaatcttttagaggttataatgtttctattttatatttaaagttggagatatatatatatctatatctatctatatatatatatatatacacacacatatatatatcattaaaataccctaagaatgtaacatagaaaataattttacattaaggaataatcagtgttcatttttaaaaagaaaaattataccatatacgaaacctgtattctgtacaggaatttgaattacactgtgataaaaagaggaagccaaggaagtcaacttgtaatgttcttatcttgttttccctaagatagattgaaagacaaagggaattcacttttccttggtgtcttatttaagatgctgattgtttgggtcacttcattatgttgacaaattccttatttgatatttagtatttggagttaggggaaatgagtatttcttttttcttttttacataactacaactgctgtgtttaagtaaagataccagattcaggttggctgaattctagttctagtttttctctaattcaaactcagtgttgcttgtcttcagtcttcctgttaaagtgaggtggaactggatggtgtatgatgacctcatgtagcctgaacatcctaagaaagttaaaatgtaagcattgctcctgtcagtggttatttgttcgttatattgcctcatgttaaaatacgtttttgtttattgttttaaagaacaacatagacgtttgtcctgaatgtggtcacctgaaacagaaacatgtcctttgtgcctactgctatgaaaaggtgtgcaaggagactgcagaaatcagacgacagatagggaagcaagaagggggcccttttaaggctcccaccatagagactgtggtgctgtacacaggagagacaccgtctgaacaagatcagggcaagaggatcattgaacgagacagaaagcgaccatcctggttcacccagaattgacaccaaagatgttaaaaggataacttcacagtaaatcatttctcctgaaatagaggaagattctttacgttgttgtgcttgtttttaaatcatcagtatagtttaacacattctttctaagcagttttgtgtgggataatttgaagaatatattatgagtaaactccgaaaattttgtttatccaaaggctcaatggattatgtttctattatatacaaggttttaagtaaacataaaatttccagaacaaaaataaaaaatttaaaattcatagcaaaa

SEQ ID NO: 323556 - DNA, 689 bp, Homo sapiens
gcggccgcctactactactaaattcgcggccgcgtcgacagagaattccagccttttggacagtatcttttggatggcagctcccaaaaatagacgcaccattgaagttaaccggtgtaggagaagaaatccgcagaagcttattaaagttaagaacaacatagacgtttgtcctgaatgtggtcacctgaaacagaaacatgtcctttgtgcctactgctatgaaaaggtgtgcaaggagactgcagaaatcagacgacagatagggaagcaagaagggggcccttttaaggctcccaccatagagactgtggtgctgtacacaggagagacaccgtctgaacaagatcagggcaagaggatcattgaacgagacagaaagcgaccatcctggttcacccagaattgacaccaaagatgttaaaaggataacttcacagtaaatcatttctcctgaaatagaggaagattctttacgttgttgtgcttgtttttaaatcatcagtatagtttaacacattctttctaagcagttttgtgtgggataatttgaagaatatattatgagtaaactccgaaaattttgtttatccaaaggctcaatggattatgtttctattatatacaaggttttaagtaaacataaaatttccagaacaaaaataaaaaatttaaaattcatagcaaaa

SEQ ID NO: 323557 - DNA, 839 bp, Homo sapiens
catgctgaaagcagggcgggaccggggcggtcttccagcagggaaaatggcgctggccatgctggtcttggtggtttcgccgtggtctgcggcccggggagtgcttcgaaactactgggagcgactgctacggaagcttccgcagagccggccgggctttcccagtcctccgtggggaccagcattagcagtacagggcccagccatgtttacagagccagcaaatgataccagtggaagtaaagagaattccagccttttggacagtatcttttggatggcagctcccaaaaatagacgcaccattgaagttaaccggtgtaggagaagaaatccgcagaagcttattaaagttaagaacaacatagacgtttgtcctgaatgtggtcacctgaaacagaaacatgtcctttgtgcctactgctatgggggcccttttaaggctcccaccatagagactgtggtgctgtacacaggagagacaccgtctgaacaagatcagggcaagaggatcattgaacgagacagaaagcgaccatcctggttcacccagaattgacaccaaagatgttaaaaggataacttcacagtaaatcatttctcctgaaatagaggaagattctttacgttgttgtgcttgtttttaaatcatcagtatagtttaacacattctttctaagcagttttgtgtgggataatttgaagaatatattatgagtaaactccgaaaattttgtttatccaaaggctcaatggattatgtttctattatatacaaggttttaagtaaacataaaatttccagaacaaaaataaaaaatttaaaattcatagcaaaa

SEQ ID NO: 323558 - DNA, 979 bp, Homo sapiens
catgctgaaagcagggcgggaccggggcggtcttccagcagggaaaatggcgctggccatgctggtcttggtggtttcgccgtggtctgcggcccggggagtgcttcgaaactactgggagcgactgctacggaagcttccgcagagccggccgggctttcccagtcctccgtggggaccagcattagcagtacagggcccagccatgtttacagagccagcaaatgataccagtggaagtaaagagaattccagccttttggacagtatcttttggatggcagctcccaaaaatagacgcaccattgaagttaaccggtgtaggagaagaaatccgcagaagcttattaaagttaaggtcttcagtcttcctgttaaagtgaggtggaactggatggtgtatgatgacctcatgtagcctgaacatcctaagaaagttaaaataacaacatagacgtttgtcctgaatgtggtcacctgaaacagaaacatgtcctttgtgcctactgctatgaaaaggtgtgcaaggagactgcagaaatcagacgacagatagggaagcaagaagggggcccttttaaggctcccaccatagagactgtggtgctgtacacaggagagacaccgtctgaacaagatcagggcaagaggatcattgaacgagacagaaagcgaccatcctggttcacccagaattgacaccaaagatgttaaaaggataacttcacagtaaatcatttctcctgaaatagaggaagattctttacgttgttgtgcttgtttttaaatcatcagtatagtttaacacattctttctaagcagttttgtgtgggataatttgaagaatatattatgagtaaactccgaaaattttgtttatccaaaggctcaatggattatgtttctattatatacaaggttttaagtaaacataaaatttccagaacaaaaataaaaaatttaaaattcatagcaaaa

SEQ ID NO: 323559 - DNA, 93 bp, Homo sapiens
catgagagaaaacttgactcacttagctagttcattttcagaggtgtgtgttactgattaatgtagcactctctcttgctccacctacacagc

SEQ ID NO: 323560 - DNA, 1376 bp, Homo sapiens
gtttgggctcgcggccccagcctcccagctctcagggcacggccggtctgtgccggctgctcccgcggttaggtcccgccccgcgcagcgcgcgcagcctgcggagccagcggccgtgacgcgacaacgattcggctgtgacgcgacaacgattcggctgtgacgcgagcgcggccgctcccgatgcgctcgtgccgcccccgccgtgctcctcggcagccgttgctcggccggttttggtaggcccgggccgccgccaggcctccgcctgagcccgcacccgccatggacaactacgcagatctttcggataccgagctgaccaccttgctgcgccggtacaacatcccgcacgggcctgtagtaggatcaactcgtaggctttacgagaagaagatcttcgagtacgagacccagaggcggcggctctcgccccccagctcgtccgccgcctcctcttatagcttctctgacttgaattcgactagaggggatgcagatatgtatgatcttcccaagaaagaggacgctttactctaccagagcaagggctacaatgacgactactatgaagagagctacttcaccaccaggacttatggggagcccgagtctgccggcccgtccagggctgtccgccagtcagtgacttcattcccagatgctgacgctttccatcaccaggtgcatgatgacgatcttttgtcttcttctgaagaggagtgcaaggatagggaacgccccatgtacggccgggacagtgcctaccagagcatcacgcactaccgccctgtttcagcctccaggagctccctggacctgtcctattatcctacttcctcctccacctcttttatgtcctcctcatcatcttcctcttcatggctcacccgccgtgccatccggcctgaaaaccgtgctcctggggctgggctgggccaggatcgccaggtcccgctctggggccagctgctgcttttcctggtctttgtgatcgtcctcttcttcatttaccacttcatgcaggctgaagaaggcaaccccttctagagggagccatgagggtctgggcttcagagctaggtctttggggaagtcctggctgactgccttagcagtgggggtgggggtgggggcaggggcaggggctttatgtgtttttgcttggggggcgctgggcctagcccagagtagtgcttgctccccctgccttgtcccaccagggaggcagcagactcaggccctccatggtcctctttgtcattttgttgacatgcattcctccttttgtcatcttgttggggggaggggattaaccaaaggccaccctgactttgtttttgtggacacacaataaaagccccgtttatttgtaa

SEQ ID NO: 323561 - DNA, 2185 bp, Homo sapiens
gtttgggctcgcggccccagcctcccagctctcagggcacggccggtctgtgccggctgctcccgcggttaggtcccgccccgcgcagcgcgcgcagcctgcggagccagcggccgtgacgcgacaacgattcggctgtgacgcgacaacgattcggctgtgacgcgagcgcggccgctcccgatgcgctcgtgccgcccccgccgtgctcctcggcagccgttgctcggccggttttggtaggcccgggccgccgccaggcctccgcctgagcccgcacccgccatggacaactacgcagatctttcggataccgagctgaccaccttgctgcgccggtacaacatcccgcacgggcctgtagtaggatcaactcgtaggctttacgagaagaagatcttcgagtacgagacccagaggcggcggctctcgccccccagctcgtccgccgcctcctcttatagcttctctgacttgaattcgactagaggggatgcagatatgtatgatcttcccaagaaagaggacgctttactctaccagagcaagggctacaatgacgactactatgaagagagctacttcaccaccaggacttatggggagcccgagtctgccggcccgtccagggctgtccgccagtcagtgacttcattcccagatgctgacgctttccatcaccaggtgcatgatgacgatcttttgtcttcttctgaagaggagtgcaaggatagggaacgccccatgtacggccgggacagtgcctaccagagcatcacgcactaccgccctgtttcagcctccaggagctccctggacctgtcctattatcctacttcctcctccacctcttttatgtcctcctcatcatcttcctcttcatggctcacccgccgtgccatccggcctgaaaaccgtgctcctggggctgggctgggccaggatcgccaggtcccgctctggggccagctgctgcttttcctggtctttgtgatcgtcctcttcttcatttaccacttcatgcaggctgaagaaggcaaccccttctagagggagccatgagggtctgggcttcagagctaggtctttggggaagtcctggctgactgccttagcagtgggggtgggggtgggggcaggggcaggggctttatgtgtttttgcttggggggcgctgggcctagcccagagtagtgcttgctccccctgccttgtcccaccagggaggcagcagactcaggccctccatggtcctctttgtcattttgttgacatgcattcctccttttgtcatcttgttggggggaggggattaaccaaaggccaccctgactttgtttttgtggacacacaataaaagccccgtttatttgtaaaaaaaaaaaaaaaaaaaaaaaaaaaaaaaaaaaaaaaacaaaaaaaaaaaacaaaaaaaagaaaacgaccagaaacgacggagcaacaaacaggacgaccgacgagggcggggagcggcccacatcggggagcgaggccggaggcgcgcaccgagccaggcacgggccgtgcaaggagagcggcgacggacgagcacgaccgcagcctcggagcgacgtgggtcgagcgcggcagagaacgcgcgagggcgcggcccctcccgccggccgaacgagcactccgcacagaggggccgaaagacgaggcgggggccgacatgggacggacgaagggggagaagacggaggagagggagaagccagagagagggcgcacagggaggacggagagcggagggagggagcggaagagacagggagagggagggcacggagggagagcggagagggacgagcgtaacaggaacgaacgagcggagaagcacaagagggaagctaggcggcagagtgccagggaggcaacaacaggaggagggagaccgaggagggagcgggacaaggaggcagcgggagcggaaggagcgagacgggcgcgaagaggggccgaaagggcatcgaaggggaagcgcgaagaggagcgacgcagcagggaagagagggaggagaagaaggaggcaccgaaccgaacgagacgacaaccgcgaagcagaaagagaggccggagaggccgggcggagaggaggggagagacagtgtcgaggcggcggcgggaaggagaccgaagtgacagggcaggaggacgagacagg

SEQ ID NO: 323562 - DNA, 1233 bp, Homo sapiens
cccctcgtctccacagcgcttcctcgcgagcggacgctggtagtgcgcgtcatgtcgtcggctcgtgtctgtgatatttgtgcccgcgcgtttggcgcccgttcggctctagagttcttcctgtcttgatcccgcacccgccatggacaactacgcagatctttcggataccgagctgaccaccttgctgcgccggtacaacatcccgcacgggcctgtagtaggatcaactcgtaggctttacgagaagaagatcttcgagtacgagacccagaggcggcggctctcgccccccagctcgtccgccgcctcctcttatagcttctctgacttgaattcgactagaggggatgcagatatgtatgatcttcccaagaaagaggacgctttactctaccagagcaagggctacaatgacgactactatgaagagagctacttcaccaccaggacttatggggagcccgagtctgccggcccgtccagggctgtccgccagtcagtgacttcattcccagatgctgacgctttccatcaccaggtgcatgatgacgatcttttgtcttcttctgaagaggagtgcaaggatagggaacgccccatgtacggccgggacagtgcctaccagagcatcacgcactaccgccctgtttcagcctccaggagctccctggacctgtcctattatcctacttcctcctccacctcttttatgtcctcctcatcatcttcctcttcatggctcacccgccgtgccatccggcctgaaaaccgtgctcctggggctgggctgggccaggatcgccaggtcccgctctggggccagctgctgcttttcctggtctttgtgatcgtcctcttcttcatttaccacttcatgcaggctgaagaaggcaaccccttctagagggagccatgagggtctgggcttcagagctaggtctttggggaagtcctggctgactgccttagcagtgggggtgggggtgggggcaggggcaggggctttatgtgtttttgcttggggggcgctgggcctagcccagagtagtgcttgctccccctgccttgtcccaccagggaggcagcagactcaggccctccatggtcctctttgtcattttgttgacatgcattcctccttttgtcatcttgttggggggaggggattaaccaaaggccaccctgactttgtttttgtggacacacaataaaagccccgtttatttgtaa

SEQ ID NO: 323563 - DNA, 1347 bp, Homo sapiens
gtttgggctcgcggccccagcctcccagctctcagggcacggccggtctgtgccggctgctcccgcggttaggtcccgccccgcgcagcgcgcgcagcctgcggagccagcggccgtgacgcgacaacgattcggctgtgacgcgacaacgattcggctgtgacgcgagcgcggccgctcccgatgcgctcgtgccgcccccgccgtgctcctcggcagccgttgctcggccggttttggtaggcccgggccgccgccaggcctccgcctgagcccgcacccgccatggacaactacgcagatctttcggataccgagctgaccaccttgctgcgccggatcaactcgtaggctttacgagaagaagatcttcgagtacgagacccagaggcggcggctctcgccccccagctcgtccgccgcctcctcttatagcttctctgacttgaattcgactagaggggatgcagatatgtatgatcttcccaagaaagaggacgctttactctaccagagcaagggctacaatgacgactactatgaagagagctacttcaccaccaggacttatggggagcccgagtctgccggcccgtccagggctgtccgccagtcagtgacttcattcccagatgctgacgctttccatcaccaggtgcatgatgacgatcttttgtcttcttctgaagaggagtgcaaggatagggaacgccccatgtacggccgggacagtgcctaccagagcatcacgcactaccgccctgtttcagcctccaggagctccctggacctgtcctattatcctacttcctcctccacctcttttatgtcctcctcatcatcttcctcttcatggctcacccgccgtgccatccggcctgaaaaccgtgctcctggggctgggctgggccaggatcgccaggtcccgctctggggccagctgctgcttttcctggtctttgtgatcgtcctcttcttcatttaccacttcatgcaggctgaagaaggcaaccccttctagagggagccatgagggtctgggcttcagagctaggtctttggggaagtcctggctgactgccttagcagtgggggtgggggtgggggcaggggcaggggctttatgtgtttttgcttggggggcgctgggcctagcccagagtagtgcttgctccccctgccttgtcccaccagggaggcagcagactcaggccctccatggtcctctttgtcattttgttgacatgcattcctccttttgtcatcttgttggggggaggggattaaccaaaggccaccctgactttgtttttgtggacacacaataaaagccccgtttatttgtaa

SEQ ID NO: 323564 - DNA, 991 bp, Homo sapiens
gtttgggctcgcggccccagcctcccagctctcagggcacggccggtctgtgccggctgctcccgcggttaggtcccgccccgcgcagcgcgcgcagcctgcggagccagcggccgtgacgcgacaacgattcggctgtgacgcgacaacgattcggctgtgacgcgagcgcggccgctcccgatgcgctcgtgccgcccccgccgtgctcctcggcagccgttgctcggccggttttggtaggcccgggccgccgccaggcctccgcctgagcccgcacccgccatggacaactacgcagatctttcggataccgagctgaccaccttgctgcgccggtacaacatcccgcacgggcctgtagtaggatcaactcgtaggctttacgagaagaagatcttcgagtacgagacccagaggcggcggctctcgccccccagctcgtccgccgcctcctcttatagcttctctgacttgaattcgactagaggggatgcagatatgtatgatcttcccaagaaagaggacgctttactctaccagagcaagggctacaatgacgactactatgaagagagctacttcaccaccaggacttatggggagcccgagtctgccggcccgtccagggctgtccgccagtcagtgacttcattcccagatgctgacgctttccatcaccaggtgcatgatgacgatcttttgtcttcttctgaagaggagtgcaaggatagggaacgccccatgtacggccgggacagtgcctaccagagcatcacgcactaccgccctgtttcagcctccaggagctccctggacctgtcctattatcctacttcctcctccacctcttttatgtcctcctcatctctttgtcattttgttgacatgcattcctccttttgtcatcttgttggggggaggggattaaccaaaggccaccctgactttgtttttgtggacacacaataaaagccccgtttatttgtaa

SEQ ID NO: 323565 - DNA, 1271 bp, Homo sapiens
gtttgggctcgcggccccagcctcccagctctcagggcacggccggtctgtgccggctgctcccgcggttaggtcccgccccgcgcagcgcgcgcagcctgcggagccagcggccgtgacgcgacaacgattcggctgtgacgcgacaacgattcggctgtgacgcgagcgcggccgctcccgatgcgctcgtgccgcccccgccgtgctcctcggcagccgttgctcggccggttttggtaggcccgggccgccgccaggcctccgcctgagcccgcacccgccatggacaactacgcagatctttcggataccgagctgaccaccttgctgcgccggtacaacatcccgcacgggcctgtagtagacttgaattcgactagaggggatgcagatatgtatgatcttcccaagaaagaggacgctttactctaccagagcaagggctacaatgacgactactatgaagagagctacttcaccaccaggacttatggggagcccgagtctgccggcccgtccagggctgtccgccagtcagtgacttcattcccagatgctgacgctttccatcaccaggtgcatgatgacgatcttttgtcttcttctgaagaggagtgcaaggatagggaacgccccatgtacggccgggacagtgcctaccagagcatcacgcactaccgccctgtttcagcctccaggagctccctggacctgtcctattatcctacttcctcctccacctcttttatgtcctcctcatcatcttcctcttcatggctcacccgccgtgccatccggcctgaaaaccgtgctcctggggctgggctgggccaggatcgccaggtcccgctctggggccagctgctgcttttcctggtctttgtgatcgtcctcttcttcatttaccacttcatgcaggctgaagaaggcaaccccttctagagggagccatgagggtctgggcttcagagctaggtctttggggaagtcctggctgactgccttagcagtgggggtgggggtgggggcaggggcaggggctttatgtgtttttgcttggggggcgctgggcctagcccagagtagtgcttgctccccctgccttgtcccaccagggaggcagcagactcaggccctccatggtcctctttgtcattttgttgacatgcattcctccttttgtcatcttgttggggggaggggattaaccaaaggccaccctgactttgtttttgtggacacacaataaaagccccgtttatttgtaa

SEQ ID NO: 323566 - DNA, 1590 bp, Homo sapiens
gtttgggctcgcggccccagcctcccagctctcagggcacggccggtctgtgccggctgctcccgcggttaggtcccgccccgcgcagcgcgcgcagcctgcggagccagcggccgtgacgcgacaacgattcggctgtgacgcgacaacgattcggctgtgacgcgagcgcggccgctcccgatgcgctcgtgccgcccccgccgtgctcctcggcagccgttgctcggccggttttggtaggcccgggccgccgccaggcctccgcctgagcccgcacccgccatggacaactacgcagatctttcggataccgagctgaccaccttgctgcgccggtacaacatcccgcacgggcctgtagtaggatcaactcgtaggctttacgagaagaagatcttcgagtacgagacccagaggcggcggctctcgccccccagctcgtccgccgcctcctcttatagcttctctgacttgaattcgactagaggggatgcagatatgtatgatcttcccaagaaagaggacgctttactctaccagagcaagggtaaggcaggggttgggtgggcacgctggcaccttcacccgacttcgtcagggaccccgctcacagggaggacctgagacctcagtcccaaccactccagcagccttaggagggagaaactgttacaggtcccgaaatgggattcagattagggccatcaggccaggcggggcacaccgatgccccctctgctaccgctgccccccttcccaaggctacaatgacgactactatgaagagagctacttcaccaccaggacttatggggagcccgagtctgccggcccgtccagggctgtccgccagtcagtgacttcattcccagatgctgacgctttccatcaccaggtgcatgatgacgatcttttgtcttcttctgaagaggagtgcaaggatagggaacgccccatgtacggccgggacagtgcctaccagagcatcacgcactaccgccctgtttcagcctccaggagctccctggacctgtcctattatcctacttcctcctccacctcttttatgtcctcctcatcatcttcctcttcatggctcacccgccgtgccatccggcctgaaaaccgtgctcctggggctgggctgggccaggatcgccaggtcccgctctggggccagctgctgcttttcctggtctttgtgatcgtcctcttcttcatttaccacttcatgcaggctgaagaaggcaaccccttctagagggagccatgagggtctgggcttcagagctaggtctttggggaagtcctggctgactgccttagcagtgggggtgggggtgggggcaggggcaggggctttatgtgtttttgcttggggggcgctgggcctagcccagagtagtgcttgctccccctgccttgtcccaccagggaggcagcagactcaggccctccatggtcctctttgtcattttgttgacatgcattcctccttttgtcatcttgttggggggaggggattaaccaaaggccaccctgactttgtttttgtggacacacaataaaagccccgtttatttgtaa

SEQ ID NO: 323567 - DNA, 965 bp, Homo sapiens
gtttgggctcgcggccccagcctcccagctctcagggcacggccggtctgtgccggctgctcccgcggttaggtcccgccccgcgcagcgcgcgcagcctgcggagccagcggccgtgacgcgacaacgattcggctgtgacgcgacaacgattcggctgtgacgcgagcgcggccgctcccgatgcgctcgtgccgcccccgccgtgctcctcggcagccgttgctcggccggttttggtaggcccgggccgccgccaggcctccgcctgagcccgcacccgccatggacaactacgcagatctttcggataccgagctgaccaccttgctgcgccggtacaacatcccgcacgggcctgtagtaggatcaactcgtaggctttacgagaagaagatcttcgagtacgagacccagaggcggcggctctcgccccccagctcgtccgccgcctcctcttatagcttctctgacttgaattcgactagaggggatgcagatatgtatgatcttcccaagaaagaggacgctttactctaccagagcaagggctacaatgacgactactatgaagagagctacttcaccaccaggacttatggggagcccgagtctgccggcccgtccagggctgtccgccagtcagtgacttcattcccagatgctgacgctttccatcaccaggtgcatgatgacgatcttttgtcttcttctgaagaggagtgcaaggatagggaacgccccatgtacggccgggacagtgcctaccagagcatcacgcactaccgccctgtttcagcctccaggagctccctggacctgtcctattatcctacttcctcctctttgtcattttgttgacatgcattcctccttttgtcatcttgttggggggaggggattaaccaaaggccaccctgactttgtttttgtggacacacaataaaagccccgtttatttgtaa

SEQ ID NO: 323568 - DNA, 910 bp, Homo sapiens
taggctaggtacgaggcctggtggtgaatcggccgacgcagatatttgatcttccagaagaggacgctttactctacagagcaggctacaatgacgactactatgaagagagctacttcaccaccaggacttatggggagcccgagtctgccggcccgtccagggctgtccgccagtcagtgacttcattcccagatgctgacgctttccatcaccaggtgcatgatgacgatcttttgtcttcttctgaagaggagtgcaaggatagggaacgccccatgtacggccgggacagtgcctaccagagcatcacgcactaccgccctgtttcagcctccaggagctccctggacctgtcctattatcctacttcctcctccacctcttttatgtcctcctcatcatcttcctcttcatggctcacccgccgtgccatccggcctgaaaaccgtgctcctggggctgggctgggccaggatcgccaggtcccgctctggggccagctgctgcttttcctggtctttgtgatcgtcctcttcttcatttaccacttcatgcaggctgaagaaggcaaccccttctagagggagccatgagggtctgggcttcagagctaggtctttggggaagtcctggctgactgccttagcagtgggggtgggggtgggggcaggggcaggggctttatgtgtttttgcttggggggcgctgggcctagcccagagtagtgcttgctccccctgccttgtcccaccagggaggcagcagactcaggccctccatggtcctctttgtcattttgttgacatgcattcctccttttgtcatcttgttggggggaggggattaaccaaaggccaccctgactttgtttttgtggacacacaataaaagccccgtttatttgtaa

SEQ ID NO: 323569 - DNA, 850 bp, Homo sapiens
  misc_feature (33)..(33): n is a, c, g, or t
cgtttttgcttggggggcgctgggctagccaangtgagtgcttgctccccctgccttgtcccaccaggacttatggggagcccgagtctgccggcccgtccagggctgtccgccagtcagtgacttcattcccagatgctgacgctttccatcaccaggtgcatgatgacgatcttttgtcttcttctgaagaggagtgcaaggatagggaacgccccatgtacggccgggacagtgcctaccagagcatcacgcactaccgccctgtttcagcctccaggagctccctggacctgtcctattatcctacttcctcctccacctcttttatgtcctcctcatcatcttcctcttcatggctcacccgccgtgccatccggcctgaaaaccgtgctcctggggctgggctgggccaggatcgccaggtcccgctctggggccagctgctgcttttcctggtctttgtgatcgtcctcttcttcatttaccacttcatgcaggctgaagaaggcaaccccttctagagggagccatgagggtctgggcttcagagctaggtctttggggaagtcctggctgactgccttagcagtgggggtgggggtgggggcaggggcaggggctttatgtgtttttgcttggggggcgctgggcctagcccagagtagtgcttgctccccctgccttgtcccaccagggaggcagcagactcaggccctccatggtcctctttgtcattttgttgacatgcattcctccttttgtcatcttgttggggggaggggattaaccaaaggccaccctgactttgtttttgtggacacacaataaaagccccgtttatttgtaa

SEQ ID NO: 323570 - DNA, 1195 bp, Homo sapiens
gtttgggctcgcggccccagcctcccagctctcagggcacggccggtctgtgccggctgctcccgcggttaggtcccgccccgcgcagcgcgcgcagcctgcggagccagcggccgtgacgcgacaacgattcggctgtgacgcgacaacgattcggctgtgacgcgagcgcggccgctcccgatgcgctcgtgccgcccccgccgtgctcctcggcagccgttgctcggccggttttggtaggcccgggccgccgccaggcctccgcctgagcccgcacccgccatggacaactacgcagatctttcggataccgagctgaccaccttgctgcgccggtacaacatcccgcacgggcctgtagtaggatcaactcgtaggctttacgagaagaagatcttcgagtacgagacccagaggcggcggctctcgccccccagctcgtccgccgcctcctcttatagcttctctgacttgaattcgactagaggggatgcagatatgtatgatcttcccaagaaagaggacgctttactctaccagagcaagggctacaatgacgactactatgaagagagctacttcaccaccaggacttatggggagcccgagtctgccggcccgtccagggctgtccgccagtcagtgacttcattcccagatgctgacgctttccatcaccaggtgcatgatgacgatcttttgtcttcttctgaagaggagtgcaaggatagcgtgctcctggggctgggctgggccaggatcgccaggtcccgctctggggccagctgctgcttttcctggtctttgtgatcgtcctcttcttcatttaccacttcatgcaggctgaagaaggcaaccccttctagagggagccatgagggtctgggcttcagagctaggtctttggggaagtcctggctgactgccttagcagtgggggtgggggtgggggcaggggcaggggctttatgtgtttttgcttggggggcgctgggcctagcccagagtagtgcttgctccccctgccttgtcccaccagggaggcagcagactcaggccctccatggtcctctttgtcattttgttgacatgcattcctccttttgtcatcttgttggggggaggggattaaccaaaggccaccctgactttgtttttgtggacacacaataaaagccccgtttatttgtaa

SEQ ID NO: 323571 - DNA, 880 bp, Homo sapiens
ggcatgagcacaagtggcaaggccccatggataaagggctgaacacccagagccattcaggagggtgtgggttcctggcctctaaccaaaggtcagaggggactggctggggaagtttggactgagggacatgacagggccatggtggccctgccagccagtcccctcgccctgactctcttctgcaggtgcatgatgacgatcttttgtcttcttctgaagaggagtgcaaggatagggaacgccccatgtacggccgggacagtgcctaccagagcatcacgcactaccgccctgtttcagcctccaggagctccctggacctgtcctattatcctacttcctcctccacctcttttatgtcctcctcatcatcttcctcttcatggctcacccgccgtgccatccggcctgaaaaccgtgctcctggggctgggctgggccaggatcgccaggtcccgctctggggccagctgctgcttttcctggtctttgtgatcgtcctcttcttcatttaccacttcatgcaggctgaagaaggcaaccccttctagagggagccatgagggtctgggcttcagagctaggtctttggggaagtcctggctgactgccttagcagtgggggtgggggtgggggcaggggcaggggctttatgtgtttttgcttggggggcgctgggcctagcccagagtagtgcttgctccccctgccttgtcccaccagggaggcagcagactcaggccctccatggtcctctttgtcattttgttgacatgcattcctccttttgtcatcttgttggggggaggggattaaccaaaggccaccctgactttgtttttgtggacacacaataaaagccccgtttatttgtaa

SEQ ID NO: 323572 - DNA, 924 bp, Homo sapiens
gtttgggctcgcggccccagcctcccagctctcagggcacggccggtctgtgccggctgctcccgcggttaggtcccgccccgcgcagcgcgcgcagcctgcggagccagcggccgtgacgcgacaacgattcggctgtgacgcgacaacgattcggctgtgacgcgagcgcggccgctcccgatgcgctcgtgccgcccccgccgtgctcctcggcagccgttgctcggccggttttggtaggcccgggccgccgccaggcctccgcctgagcccgcacccgccatggacaactacgcagatctttcggataccgagctgaccaccttgctgcgccggtacaacatcccgcacgggcctgtagtagctgtcctattatcctacttcctcctccacctcttttatgtcctcctcatcatcttcctcttcatggctcacccgccgtgccatccggcctgaaaaccgtgctcctggggctgggctgggccaggatcgccaggtcccgctctggggccagctgctgcttttcctggtctttgtgatcgtcctcttcttcatttaccacttcatgcaggctgaagaaggcaaccccttctagagggagccatgagggtctgggcttcagagctaggtctttggggaagtcctggctgactgccttagcagtgggggtgggggtgggggcaggggcaggggctttatgtgtttttgcttggggggcgctgggcctagcccagagtagtgcttgctccccctgccttgtcccaccagggaggcagcagactcaggccctccatggtcctctttgtcattttgttgacatgcattcctccttttgtcatcttgttggggggaggggattaaccaaaggccaccctgactttgtttttgtggacacacaataaaagccccgtttatttgtaa

SEQ ID NO: 323573 - DNA, 337 bp, Homo sapiens
ccgcgcgggccccgccccctccatcactagccaatccccgtgcttgtgacatatgggcttgcggccccgcccgctcccatcgcgagaccggttcccaccgccctgactcccgggcgggccccgccctctccgccgctagccaatcctcgcgttgatgacgtttgggctcgcggccccagcctcccagctctcagggcacggccggtctgtgccggctgctcccgcggttaggtcccgccccgcgcagcgcgcgcagcctgcggagccagcggccgtgacgcgacaacgattcggctgtgacgcgacaacgattcggctgtgacgcgagcgcggccgc

SEQ ID NO: 323574 - DNA, 787 bp, Homo sapiens
ggtaggcccgggccgccgccaggcctccgcctgagcccgcacccgccatggacaactacgcagatctttcggataccgagctgaccaccttgctgcgccggtacaacatcccgcacgggcctgtagtagggtacgcggcggcgggcgggaccccttccgggccccctcctcgtgctccgcctcgcgacctccccgctgccctccccgcgcgccttccccggcccgcggccctgaccgccccgtgtccggccaggatcaactcgtaggctttacgagaagaagatcttcgagtacgagacccagaggcggcggctctcgccccccagctcgtccgccgcctcctcttatagcttctctggtgagagcctcgcctgtggggacagcctgggacgcggggaggatggggtcgcgagggtgtggcaggggggccggtcgagagcggcactggagaaaggggagggaagtctgggggggcaaacagttctgtctcctcctttcaatccagacttgaattcgactagaggggatgcagatatgtatgatcttcccaagaaagaggacgctttactctaccagagcaagggtaaggcaggggttgggtgggcacgctggcaccttcacccgacttcgtcagggaccccgctcacagggaggacctgagacctcagtcccaaccactccagcagccttaggagggagaaactgttacaggtcccgaaatgggattcagattagggccatcaggccaggcggggcacaccgatgccccctctgctaccgctgcccc

SEQ ID NO: 323575 - DNA, 1189 bp, Homo sapiens
  misc_feature (1038)..(1038): n is a, c, g, or t
  misc_feature (1060)..(1060): n is a, c, g, or t
  misc_feature (1065)..(1065): n is a, c, g, or t
  misc_feature (1068)..(1068): n is a, c, g, or t
  misc_feature (1070)..(1070): n is a, c, g, or t
  misc_feature (1075)..(1075): n is a, c, g, or t
gtttgggctcgcggccccagcctcccagctctcagggcacggccggtctgtgccggctgctcccgcggttaggtcccgccccgcgcagcgcgcgcagcctgcggagccagcggccgtgacgcgacaacgattcggctgtgacgcgacaacgattcggctgtgacgcgagcgcggccgctcccgatgcgctcgtgccgcccccgccgtgctcctcggcagccgttgctcggccggttttggtaggcccgggccgccgccaggcctccgcctgagcccgcacccgccatggacaactacgcagatctttcggataccgagctgaccaccttgctgcgccggtacaacatcccgcacgggcctgtagtaggatcaactcgtaggctttacgagaagaagatcttcgagtacgagacccagaggcggcggctctcgccccccagctcgtccgccgcctcctcttatagcttctctgacttgaattcgactagaggggatgcagatatgtatgatcttcccaagaaagaggacgctttactctaccagagcaagggctacaatgacgactactatgaagagagctacttcaccaccaggacttatggggagcccgagtctgccggcccgtccagggctgtccgccagtcagtgacttcattcccagatgctgacgctttccatcaccaggtgcatgatgacgatcttttgtcttcttctgaagaggagtgcaaggatagggaacgccccatgtacggccgggacagtgcctaccagagcatcacgcactaccgccctgtttcagcctccaggagctccctggacctgtcctattatcctacttcctcctccacctcttttatgtcctcctcatcatcttcctcttcatggctcacccgccgtgccatccggcctgaaaaccgtgctcctggggctgggctgggccaggatcgccaggtcccgctctggggccagctgctgcttttcctggtctttgtgatcgtcctcttcttcatttaccacttcatgcaggtgagaggaccnttaaagggccagagggctgggncaacnagntnggganccggtcagctccacagggggcgggccgcgcggcctttttgtggggcggcacccaaagttcccgttctccgggggaacccgccttttggcctttgggggaaaccctttcgcttca

SEQ ID NO: 323576 - DNA, 1270 bp, Homo sapiens
aaaaaaaacaaaaaaaaacaaaaacatattactacgtacgagacctggtgtttacgacgcgagcgcggccgctcccgatgcgctcgtgccgcccccgccgtgctcctcggcagccgttgctcggccggttttggtaggcccgggccgccgccaggcctccgcctgagcccgcacccgccatggacaactacgcagatctttcggataccgagctgaccaccttgctgcgccggtacaacatcccgcacgggcctgtagtaggatcaactcgtaggctttacgagaagaagatcttcgagtacgagacccagaggcggcggctctcgccccccagctcgtccgccgcctcctcttatagcttctctgacttgaattcgactagaggggatgcagatatgtatgatcttcccaagaaagaggacgctttactctaccagagcaagggctacaatgacgactactatgaagagagctacttcaccaccaggacttatggggagcccgagtctgccggcccgtccagggctgtccgccagtcagtgacttcattcccagatgctgacgctttccatcaccaggtgcatgatgacgatcttttgtcttcttctgaagaggagtgcaaggatagggaacgccccatgtacggccgggacagtgcctaccagagcatcacgcactaccgccctgtttcagcctccaggagctccctggacctgtcctattatcctacttcctcctccacctcttttatgtcctcctcatcatcttcctcttcatggctcacccgccgtgccatccggcctgaaaaccgtgctcctggggctgggctgggccaggatcgccaggtcccgctctggggccagctgctgcttttcctggtctttgtgatcgtcctcttcttcatttaccacttcatgcaggctgaagaaggcaaccccttctagagggagccatgagggtctgggcttcagagctaggtctttggggaagtcctggctgactgccttagcagtgggggtgggggtgggggcaggggcaggggctttatgtgtttttgcttggggggcgctgggcctagcccagagtagtgcttgctccccctgccttgtcccaccagggaggcagcagactcaggccctccatggtcctctttgtcattttgttgacatgcattcctccttttgtcatcttgttggggggaggggattaaccaaaggccaccctgactttgtttttgtggacacacaataaaagccccgtttatttgtaa

SEQ ID NO: 323577 - DNA, 1500 bp, Homo sapiens
gtttgggctcgcggccccagcctcccagctctcagggcacggccggtctgtgccggctgctcccgcggttaggtcccgccccgcgcagcgcgcgcagcctgcggagccagcggccgtgacgcgacaacgattcggctgtgacgcgacaacgattcggctgtgacgcgagcgcggccgctcccgatgcgctcgtgccgcccccgccgtgctcctcggcagccgttgctcggccggttttggtaggcccgggccgccgccaggcctccgcctgagcccgcacccgccatggacaactacgcagatctttcggataccgagctgaccaccttgctgcgccggtacaacatcccgcacgggcctgtagtagggtacgcggcggcgggcgggaccccttccgggccccctcctcgtgctccgcctcgcgacctccccgctgccctccccgcgcgccttccccggcccgcggccctgaccgccccgtgtccggccaggatcaactcgtaggctttacgagaagaagatcttcgagtacgagacccagaggcggcggctctcgccccccagctcgtccgccgcctcctcttatagcttctctgacttgaattcgactagaggggatgcagatatgtatgatcttcccaagaaagaggacgctttactctaccagagcaagggctacaatgacgactactatgaagagagctacttcaccaccaggacttatggggagcccgagtctgccggcccgtccagggctgtccgccagtcagtgacttcattcccagatgctgacgctttccatcaccaggtgcatgatgacgatcttttgtcttcttctgaagaggagtgcaaggatagggaacgccccatgtacggccgggacagtgcctaccagagcatcacgcactaccgccctgtttcagcctccaggagctccctggacctgtcctattatcctacttcctcctccacctcttttatgtcctcctcatcatcttcctcttcatggctcacccgccgtgccatccggcctgaaaaccgtgctcctggggctgggctgggccaggatcgccaggtcccgctctggggccagctgctgcttttcctggtctttgtgatcgtcctcttcttcatttaccacttcatgcaggctgaagaaggcaaccccttctagagggagccatgagggtctgggcttcagagctaggtctttggggaagtcctggctgactgccttagcagtgggggtgggggtgggggcaggggcaggggctttatgtgtttttgcttggggggcgctgggcctagcccagagtagtgcttgctccccctgccttgtcccaccagggaggcagcagactcaggccctccatggtcctctttgtcattttgttgacatgcattcctccttttgtcatcttgttggggggaggggattaaccaaaggccaccctgactttgtttttgtggacacacaataaaagccccgtttatttgtaa

SEQ ID NO: 323578 - DNA, 1196 bp, Homo sapiens
  misc_feature (158)..(158): n is a, c, g, or t
  misc_feature (222)..(222): n is a, c, g, or t
atagcgctggtgtatgtagagcgcgtccgatgcgctcgtgccgcccccgccgtgtctcggagcgtgtcgcgttgtagccggcgcgcaggcctccgcctgagcccgcaccgccagacataccgttttcggatagatgacacttgctggcgccggtacanacatcccgcacgggcctgtagtagatatcgtagtacgagaagaagatcttcagaaagattaccnagagaacccaaagaaaggcggcggctctcgccccccagctcgtccgccgcctcctcttatagcttctctgacttgaattcgactagaggggatgcagatatgtatgatcttcccaagaaagaggacgctttactctaccagagcaagggctacaatgacgactactatgaagagagctacttcaccaccaggacttatggggagcccgagtctgccggcccgtccagggctgtccgccagtcagtgacttcattcccagatgctgacgctttccatcaccaggtgcatgatgacgatcttttgtcttcttctgaagaggagtgcaaggatagggaacgccccatgtacggccgggacagtgcctaccagagcatcacgcactaccgccctgtttcagcctccaggagctccctggacctgtcctattatcctacttcctcctccacctcttttatgtcctcctcatcatcttcctcttcatggctcacccgccgtgccatccggcctgaaaaccgtgctcctggggctgggctgggccaggatcgccaggtcccgctctggggccagctgctgcttttcctggtctttgtgatcgtcctcttcttcatttaccacttcatgcaggctgaagaaggcaaccccttctagagggagccatgagggtctgggcttcagagctaggtctttggggaagtcctggctgactgccttagcagtgggggtgggggtgggggcaggggcaggggctttatgtgtttttgcttggggggcgctgggcctagcccagagtagtgcttgctccccctgccttgtcccaccagggaggcagcagactcaggccctccatggtcctctttgtcattttgttgacatgcattcctccttttgtcatcttgttggggggaggggattaaccaaaggccaccctgactttgtttttgtggacacacaataaaagccccgtttatttgtaa

SEQ ID NO: 323579 - DNA, 1523 bp, Homo sapiens
gtttgggctcgcggccccagcctcccagctctcagggcacggccggtctgtgccggctgctcccgcggttaggtcccgccccgcgcagcgcgcgcagcctgcggagccagcggccgtgacgcgacaacgattcggctgtgacgcgacaacgattcggctgtgacgcgagcgcggccgctcccgatgcgctcgtgccgcccccgccgtgctcctcggcagccgttgctcggccggttttggtaggcccgggccgccgccaggcctccgcctgagcccgcacccgccatggacaactacgcagatctttcggataccgagctgaccaccttgctgcgccggtacaacatcccgcacgggcctgtagtaggatcaactcgtaggctttacgagaagaagatcttcgagtacgagacccagaggcggcggctctcgccccccagctcgtccgccgcctcctcttatagcttctctggtgagagcctcgcctgtggggacagcctgggacgcggggaggatggggtcgcgagggtgtggcaggggggccggtcgagagcggcactggagaaaggggagggaagtctgggggggcaaacagttctgtctcctcctttcaatccagacttgaattcgactagaggggatgcagatatgtatgatcttcccaagaaagaggacgctttactctaccagagcaagggctacaatgacgactactatgaagagagctacttcaccaccaggacttatggggagcccgagtctgccggcccgtccagggctgtccgccagtcagtgacttcattcccagatgctgacgctttccatcaccaggtgcatgatgacgatcttttgtcttcttctgaagaggagtgcaaggatagggaacgccccatgtacggccgggacagtgcctaccagagcatcacgcactaccgccctgtttcagcctccaggagctccctggacctgtcctattatcctacttcctcctccacctcttttatgtcctcctcatcatcttcctcttcatggctcacccgccgtgccatccggcctgaaaaccgtgctcctggggctgggctgggccaggatcgccaggtcccgctctggggccagctgctgcttttcctggtctttgtgatcgtcctcttcttcatttaccacttcatgcaggctgaagaaggcaaccccttctagagggagccatgagggtctgggcttcagagctaggtctttggggaagtcctggctgactgccttagcagtgggggtgggggtgggggcaggggcaggggctttatgtgtttttgcttggggggcgctgggcctagcccagagtagtgcttgctccccctgccttgtcccaccagggaggcagcagactcaggccctccatggtcctctttgtcattttgttgacatgcattcctccttttgtcatcttgttggggggaggggattaaccaaaggccaccctgactttgtttttgtggacacacaataaaagccccgtttatttgtaa

SEQ ID NO: 323580 - DNA, 1455 bp, Homo sapiens
gtttgggctcgcggccccagcctcccagctctcagggcacggccggtctgtgccggctgctcccgcggttaggtcccgccccgcgcagcgcgcgcagcctgcggagccagcggccgtgacgcgacaacgattcggctgtgacgcgacaacgattcggctgtgacgcgagcgcggccgctcccgatgcgctcgtgccgcccccgccgtgctcctcggcagccgttgctcggccggttttggtaggcccgggccgccgccaggcctccgcctgagcccgcacccgccatggacaactacgcagatctttcggataccgagctgaccaccttgctgcgccggtacaacatcccgcacgggcctgtagtaggatcaactcgtaggctttacgagaagaagatcttcgagtacgagacccagaggcggcggctctcgccccccagctcgtccgccgcctcctcttatagcttctctgacttgaattcgactagaggggatgcagatatgtatgatcttcccaagaaagaggacgctttactctaccagagcaagggctacaatgacgactactatgaagagagctacttcaccaccaggacttatggggagcccgagtctgccggcccgtccagggctgtccgccagtcagtgacttcattcccagatgctgacgctttccatcaccaggtgcatgatgacgatcttttgtcttcttctgaagaggagtgcaaggataggtgcgtagtgggggagcccagggacgggctggttctgggtccaggctcctggcccacttgctcccctcttttgcctcagggaacgccccatgtacggccgggacagtgcctaccagagcatcacgcactaccgccctgtttcagcctccaggagctccctggacctgtcctattatcctacttcctcctccacctcttttatgtcctcctcatcatcttcctcttcatggctcacccgccgtgccatccggcctgaaaaccgtgctcctggggctgggctgggccaggatcgccaggtcccgctctggggccagctgctgcttttcctggtctttgtgatcgtcctcttcttcatttaccacttcatgcaggctgaagaaggcaaccccttctagagggagccatgagggtctgggcttcagagctaggtctttggggaagtcctggctgactgccttagcagtgggggtgggggtgggggcaggggcaggggctttatgtgtttttgcttggggggcgctgggcctagcccagagtagtgcttgctccccctgccttgtcccaccagggaggcagcagactcaggccctccatggtcctctttgtcattttgttgacatgcattcctccttttgtcatcttgttggggggaggggattaaccaaaggccaccctgactttgtttttgtggacacacaataaaagccccgtttatttgtaa

SEQ ID NO: 323581 - DNA, 1669 bp, Homo sapiens
gtttgggctcgcggccccagcctcccagctctcagggcacggccggtctgtgccggctgctcccgcggttaggtcccgccccgcgcagcgcgcgcagcctgcggagccagcggccgtgacgcgacaacgattcggctgtgacgcgacaacgattcggctgtgacgcgagcgcggccgctcccgatgcgctcgtgccgcccccgccgtgctcctcggcagccgttgctcggccggttttggtaggcccgggccgccgccaggcctccgcctgagcccgcacccgccatggacaactacgcagatctttcggataccgagctgaccaccttgctgcgccggtacaacatcccgcacgggcctgtagtaggatcaactcgtaggctttacgagaagaagatcttcgagtacgagacccagaggcggcggctctcgccccccagctcgtccgccgcctcctcttatagcttctctgacttgaattcgactagaggggatgcagatatgtatgatcttcccaagaaagaggacgctttactctaccagagcaagggtaaggcaggggttgggtgggcacgctggcaccttcacccgacttcgtcagggaccccgctcacagggaggacctgagacctcagtcccaaccactccagcagccttaggagggagaaactgttacaggtcccgaaatgggattcagattagggccatcaggccaggcggggcacaccgatgccccctctgctaccgctgccccccttcccaaggctacaatgacgactactatgaagagagctacttcaccaccaggacttatggggagcccgagtctgccggcccgtccagggctgtccgccagtcagtgacttcattcccagatgctgacgctttccatcaccaggtgcatgatgacgatcttttgtcttcttctgaagaggagtgcaaggataggtgcgtagtgggggagcccagggacgggctggttctgggtccaggctcctggcccacttgctcccctcttttgcctcagggaacgccccatgtacggccgggacagtgcctaccagagcatcacgcactaccgccctgtttcagcctccaggagctccctggacctgtcctattatcctacttcctcctccacctcttttatgtcctcctcatcatcttcctcttcatggctcacccgccgtgccatccggcctgaaaaccgtgctcctggggctgggctgggccaggatcgccaggtcccgctctggggccagctgctgcttttcctggtctttgtgatcgtcctcttcttcatttaccacttcatgcaggctgaagaaggcaaccccttctagagggagccatgagggtctgggcttcagagctaggtctttggggaagtcctggctgactgccttagcagtgggggtgggggtgggggcaggggcaggggctttatgtgtttttgcttggggggcgctgggcctagcccagagtagtgcttgctccccctgccttgtcccaccagggaggcagcagactcaggccctccatggtcctctttgtcattttgttgacatgcattcctccttttgtcatcttgttggggggaggggattaaccaaaggccaccctgactttgtttttgtggacacacaataaaagccccgtttatttgtaa

SEQ ID NO: 323582 - DNA, 1564 bp, Homo sapiens
gtttgggctcgcggccccagcctcccagctctcagggcacggccggtctgtgccggctgctcccgcggttaggtcccgccccgcgcagcgcgcgcagcctgcggagccagcggccgtgacgcgacaacgattcggctgtgacgcgacaacgattcggctgtgacgcgagcgcggccgctcccgatgcgctcgtgccgcccccgccgtgctcctcggcagccgttgctcggccggttttggtaggcccgggccgccgccaggcctccgcctgagcccgcacccgccatggacaactacgcagatctttcggataccgagctgaccaccttgctgcgccggtacaacatcccgcacgggcctgtagtagacttgaattcgactagaggggatgcagatatgtatgatcttcccaagaaagaggacgctttactctaccagagcaagggtaaggcaggggttgggtgggcacgctggcaccttcacccgacttcgtcagggaccccgctcacagggaggacctgagacctcagtcccaaccactccagcagccttaggagggagaaactgttacaggtcccgaaatgggattcagattagggccatcaggccaggcggggcacaccgatgccccctctgctaccgctgccccccttcccaaggctacaatgacgactactatgaagagagctacttcaccaccaggacttatggggagcccgagtctgccggcccgtccagggctgtccgccagtcagtgacttcattcccagatgctgacgctttccatcaccaggtgcatgatgacgatcttttgtcttcttctgaagaggagtgcaaggataggtgcgtagtgggggagcccagggacgggctggttctgggtccaggctcctggcccacttgctcccctcttttgcctcagggaacgccccatgtacggccgggacagtgcctaccagagcatcacgcactaccgccctgtttcagcctccaggagctccctggacctgtcctattatcctacttcctcctccacctcttttatgtcctcctcatcatcttcctcttcatggctcacccgccgtgccatccggcctgaaaaccgtgctcctggggctgggctgggccaggatcgccaggtcccgctctggggccagctgctgcttttcctggtctttgtgatcgtcctcttcttcatttaccacttcatgcaggctgaagaaggcaaccccttctagagggagccatgagggtctgggcttcagagctaggtctttggggaagtcctggctgactgccttagcagtgggggtgggggtgggggcaggggcaggggctttatgtgtttttgcttggggggcgctgggcctagcccagagtagtgcttgctccccctgccttgtcccaccagggaggcagcagactcaggccctccatggtcctctttgtcattttgttgacatgcattcctccttttgtcatcttgttggggggaggggattaaccaaaggccaccctgactttgtttttgtggacacacaataaaagccccgtttatttgtaa

SEQ ID NO: 323583 - DNA, 993 bp, Homo sapiens
gtttgggctcgcggccccagcctcccagctctcagggcacggccggtctgtgccggctgctcccgcggttaggtcccgccccgcgcagcgcgcgcagcctgcggagccagcggccgtgacgcgacaacgattcggctgtgacgcgacaacgattcggctgtgacgcgagcgcggccgctcccgatgcgctcgtgccgcccccgccgtgctcctcggcagccgttgctcggccggttttggtaggcccgggccgccgccaggcctccgcctgagcccgcacccgccatggacaactacgcagatctttcggataccgagctgaccaccttgctgcgccggtacaacatcccgcacgggcctgtagtaggatcaactcgtaggctttacgagaagaagatcttcgagtacgagacccagaggcggcggctctcgccccccagctcgtccgccgcctcctcttatagcttctctgacttgaattcgactagaggggatgcagatatgtatgatcttcccaagaaagaggacgctttactctaccagagcaagggtaaggcaggggttgggtgggcacgctggcaccttcacccgacttcgtcagggaccccgctcacagggaggacctgagacctcagtcccaaccactccagcagccttaggagggagaaactgttacaggtcccgaaatgggattcagattagggccatcaggccaggcggggcacaccgatgccccctctgctaccgctgccccccttcccaaggctacaatgacgactactatgaagagagctacttcaccaccaggacttatggggagcccgagtctgccggcccgtccagggctgtccgccagtcagtgacttcattcccagatgctgacgctttccatcaccaggtgagctggctggcaggcgtcctgtacttgggtacaacctaggggatcgcggctgtgtttggataaatccaggggggcactgggtacaaatggtg

SEQ ID NO: 323584 - DNA, 389 bp, Homo sapiens
gcatccattctctaatgcttacccagtatcaggcactaatctagacactggagatacagcaatcattaaacaaaatccccaacctcagataatttaaattgtagtaggccaagacagactaggtgggaagggagaagaaaatagacagtgagctgcccatacagtgaattagtcaatgccacaggtctacatgagtcagactattctgactgttgctttgcttctgctgtctgttatgataaccatgtccaccttgcctttgtcaaatgagtcccttcacttggcctctgctaccctggaatccagttattcccattgcatttaaatttttcaattgagtgactgcagtttccattttaaggtccggcctacagagaagggcaatcatg

SEQ ID NO: 323585 - DNA, 981 bp, Homo sapiens
tttttcctggatcaggtttcacctccacagtggtccggtctgtgtcactctcaccctttgcatcggtcactttcaggtgaaaagtgtaggttccctcaaccaggtttgaaagaaaaaggatagggtgatggtcagagtgatttaacacctcccctgctgctgggctcccctcatctcgagtccagaggtagctgactattcccttgtcatctgaggacttagagccatccagctctgctgtgctcgtgggtagggtaatcaccacattcccagttatcttggctataggtggtttgtttatttcttctttgacaatgacattcacagagctctggctttgcaggttcctctcatctttgacagtcaaggtgaacacataggtccccacttgcagcccagtcacagtagcaacactgctgttagcattctcgagctgcaccccatcaggtccctgtgttttttcccagagatatgagataattttctgatcatctgagctcttgctgccatccagggttgtgctatccacaggaagggtcagctctttatctgggcctgcatctgcctgaggaggcttattgttttcaggttgcacaataacagtcacttgagcagtggcctgctgtcctattgtgtcagtcactgtgagctggtaagtgtagtctccttcttgcatcgcagagagctgtaaggttggtgttctaacaccctgcatctccaccactttccctttgctgcttgggctgagtgaccactcatagctggtgatgccatgatcatcagtgctctggttcccaaagagggtgatggagttttggggcagggtgatcacttggttggggcctgcgttggccacaggggggtaatccacagctttgttcactgtcaggtttgcagtagtagagttggtagctccatcagagtctactacagtcaagctgaagtgtcctcggccgattcacacccagctccactagcctt

SEQ ID NO: 323586 - DNA, 531 bp, Homo sapiens
gccattctggggtcttgagagcagtggtcctcttgtcacagctccactaggcagtaccccagcagggactctgtgtgggggctccaacctcacatttgccttccgcactgctggagcagaagttttcatgagggcactgcccctgcgtttccatacatcctctgaaatctaggtggaggttcttgacttctgtgtacttgcaggctcaacaccacatggaaactgccaagacttgaggcttgcaccctctgaagccacagcctgagctctacattggcccttttcagccatggcttgagcagctgggatgcagggcaccaagtccctaggctgcacacagcactgagaacctgggcctggcccacgaaaccatttttccctcctaggcctccaggcctgcgttggccacaggggggtaatccacagctttgttcactgtcaggtttgcagtagtagagttggtagctccatcagagtctactacagtcaagctgaaagtgtagtacccagaaccgggatgcgatcctctag

SEQ ID NO: 323587 - DNA, 4010 bp, Homo sapiens
aggaggcggtgtttccggccgccgtcgctgtccagggaggctgaggcgagaggtagctgtccgggtggggagcccgcactaccttcttcctcttcctcctcctcctccgggtgaggggagcgaaggttgggggtccccgagcccatggaccaggaggaggcggaggccgccgagagccggggccccgctatgtggccctgagccccgtgtactggttctgcctgtctggagggccatggagaagaggctgggagtcaagccaaatcctgcttcctggattttatcaggatattattggcagacatctgcgaagtggttgagaagcctgtacctgttttatacttgcttttgcttcagcgttctgtggttgtcaacagatgccagtgagagcaggtgccagcaggggaagacacaatttggagttggcctgagatctgggggagaaaatcacctctggcttcttgaaggaaccccctctctccagtcatgttgggctgcctgctgccaggactctgcctgccatgtcttttggtggctagaagggatgtgcattcaggcagactgcagcaggccccagagctgccgggcttttaggacacactcctccaattccatgctggtgtttttaaaaaaattccaaactgcagatgatttgggctttctacctgaagatgatgtaccacatcttctggggctaggttggaactgggcatcttggaggcagagcccacccagagctgcactcagacctgctgtatcttccagtgaccagcagagcttaatcaggaagcttcagaagagaggtagtcccagtgacgtagttacacctatagtgacacagcattctaaagtgaatgactccaacgaattaggtggtctgactaccagtggctctgcagaggtccacaaggcgattacaatttccagtcccctaaccacagacctgactgcagagctgtctggtgggccaaagaatgtatcagtgcaacctgaaatatcagagggtcttgctactacgcccagcactcaacaagtaaaaagttctgagaaaacccagattgctgtcccccagccagtggctccctcctacagttatgctacccctaccccccaggcctctttccagagcacctcagcaccatacccagttataaaggaactggtggtatctgctggagagagtgtccagataaccctgcctaagaatgaagttcaattaaatgcatatgttctccaagaaccacctaaaggagaaacctacacctacgactggcagctgattactcatcctagagactacagtggagaaatggaagggaaacattcccagatcctcaaactatcgaagctcactccaggcctgtatgaattcaaagtgattgtagagggtcaaaatgcccatggggaaggctatgtgaacgtgacagtcaagccagagccccgtaagaatcggccccccattgctattgtgtcacctcagttccaggagatctctttgccaaccacttctacagtcattgatggcagtcaaagcactgatgatgataaaatcgttcagtaccattgggaagaacttaaggggcctctaagagaagagaagatttctgaagatacagccatattaaaactaagtaaactcgtccctgggaactacactttcagcttgactgtagtagactctgatggagctaccaactctactactgcaaacctgacagtgaacaaagctgtggattacccccctgtggccaacgcaggccccaaccaagtgatcaccctgccccaaaactccatcaccctctttgggaaccagagcactgatgatcatggcatcaccagctatgagtggtcactcagcccaagcagcaaagggaaagtggtggagatgcagggtgttagaacaccaaccttacagctctctgcgatgcaagaaggagactacacttaccagctcacagtgactgacacaataggacagcaggccactgctcaagtgactgttattgtgcaacctgaaaacaataagcctcctcaggcagatgcaggcccagataaagagctgacccttcctgtggatagcacaaccctggatggcagcaagagctcagatgatcagaaaattatctcatatctctgggaaaaaacacagggacctgatggggtgcagctcgagaatgctaacagcagtgttgctactgtgactgggctgcaagtggggacctatgtgttcaccttgactgtcaaagatgagaggaacctgcaaagccagagctctgtgaatgtcattgtcaaagaagaaataaacaaaccacctatagccaagataactgggaatgtggtgattaccctacccacgagcacagcagagctggatggctctaagtcctcagatgacaagggaatagtcagctacctctggactcgagatgaggggagcccagcagcaggggaggtgttaaatcactctgaccatcaccctatcctttttctttcaaacctggttgagggaacctacacttttcacctgaaagtgaccgatgcaaagggtgagagtgacacagaccggaccactgtggaggtgaaacctgatcccaggaaaaacaacctggtggagatcatcttggatatcaacgtcagtcagctaactgagaggctgaaggggatgttcatccgccagattggggtcctcctgggggtgctggattccgacatcattgtgcaaaagattcagccgtacacggagcagagcaccaaaatggtattttttgttcaaaacgagcctccccaccagatcttcaaaggccatgaggtggcagcgatgctcaagagtgagctgcggaagcaaaaggcagactttttgatattcagagccttggaagtcaacactgtcacatgtcagctgaactgttccgaccatggccactgtgactcgttcaccaaacgctgtatctgtgaccctttttggatggagaatttcatcaaggtgcagctgagggatggagacagcaactgtgagtggagcgtgttatatgttatcattgctacctttgtcattgttgttgccttgggaatcctgtcttggactgtgatctgttgttgtaagaggcaaaaaggaaaacccaagaggaaaagcaagtacaagatcctggatgccacggatcaggaaagcctggagctgaagccaacctcccgagcaggcatcaaacagaaaggccttttgctaagtagcagcctgatgcactccgagtcagagctggacagcgatgatgccatctttacatggccagaccgagagaagggcaaactcctgcatggtcagaatggctctgtacccaacgggcagacccctctgaaggccaggagcccgcgggaggagatcctgtagccacctggtctgtctcctcagggcagggcccagcacactgcccggccagtcctcctacctcccgagtctgcgggcagctgctgtcccagcatctgctggtcatttcgccctgacagtcccaaccagaacccctgggacttgaatccagagacgtcctccaggaacccctcaacgaagctgtgaatgaagaggtttcctctttaaacctgtctggtgggcccccagatatcctcacctcagggcctcctttttttgcaaactcctcccctcccccgagggcagacccagccagctgctaagctctgcagctccccagtggacagtgtcattgtgcccagagtgctgcaaggtgaggcctgctgtgctgcccgcacacctgagtgcaaaaccaagcactgtgggcatggtgtttccctctctggggtagagtacgccctctcgctgggcaaagaggaagtggcacccctcccctcaccacagatgctgagatggtagcatagaaatgatggccgggcgcggtggctcacgcctgtaatcccagcactttgggaggccgaggcgggcggatcatgaggtcaggagatcaagaccaccctggctaacacggtgaaaccccatctctact

SEQ ID NO: 323588 - DNA, 3920 bp, Homo sapiens
ttgaggtggattaaaccaaacccagctacgcaaaatcttagcatactcctcaattacccggggaggggggatcatgaggtcaggagccggggccccgctatgtggccctgagccccgtgtactggttctgcctgtctggagggccatggagaagaggctgggagtcaagccaaatcctgcttcctggattttatcaggatattattggcagacatctgcgaagtggttgagaagcctgtacctgttttatacttgcttttgcttcagcgttctgtggttgtcaacagatgccagtgagagcaggtgccagcaggggaagacacaatttggagttggcctgagatctgggggagaaaatcacctctggcttcttgaaggaaccccctctctccagtcatgttgggctgcctgctgccaggactctgcctgccatgtcttttggtggctagaagggatgtgcattcaggcagactgcagcaggccccagagctgccgggcttttaggacacactcctccaattccatgctggtgtttttaaaaaaattccaaactgcagatgatttgggctttctacctgaagatgatgtaccacatcttctggggctaggttggaactgggcatcttggaggcagagcccacccagagctgcactcagacctgctgtatcttccagtgaccagcagagcttaatcaggaagcttcagaagagaggtagtcccagtgacgtagttacacctatagtgacacagcattctaaagtgaatgactccaacgaattaggtggtctgactaccagtggctctgcagaggtccacaaggcgattacaatttccagtcccctaaccacagacctgactgcagagctgtctggtgggccaaagaatgtatcagtgcaacctgaaatatcagagggtcttgctactacgcccagcactcaacaagtaaaaagttctgagaaaacccagattgctgtcccccagccagtggctccctcctacagttatgctacccctaccccccaggcctctttccagagcacctcagcaccatacccagttataaaggaactggtggtatctgctggagagagtgtccagataaccctgcctaagaatgaagttcaattaaatgcatatgttctccaagaaccacctaaaggagaaacctacacctacgactggcagctgattactcatcctagagactacagtggagaaatggaagggaaacattcccagatcctcaaactatcgaagctcactccaggcctgtatgaattcaaagtgattgtagagggtcaaaatgcccatggggaaggctatgtgaacgtgacagtcaagccagagccccgtaagaatcggccccccattgctattgtgtcacctcagttccaggagatctctttgccaaccacttctacagtcattgatggcagtcaaagcactgatgatgataaaatcgttcagtaccattgggaagaacttaaggggcctctaagagaagagaagatttctgaagatacagccatattaaaactaagtaaactcgtccctgggaactacactttcagcttgactgtagtagactctgatggagctaccaactctactactgcaaacctgacagtgaacaaagctgtggattacccccctgtggccaacgcaggccccaaccaagtgatcaccctgccccaaaactccatcaccctctttgggaaccagagcactgatgatcatggcatcaccagctatgagtggtcactcagcccaagcagcaaagggaaagtggtggagatgcagggtgttagaacaccaaccttacagctctctgcgatgcaagaaggagactacacttaccagctcacagtgactgacacaataggacagcaggccactgctcaagtgactgttattgtgcaacctgaaaacaataagcctcctcaggcagatgcaggcccagataaagagctgacccttcctgtggatagcacaaccctggatggcagcaagagctcagatgatcagaaaattatctcatatctctgggaaaaaacacagggacctgatggggtgcagctcgagaatgctaacagcagtgttgctactgtgactgggctgcaagtggggacctatgtgttcaccttgactgtcaaagatgagaggaacctgcaaagccagagctctgtgaatgtcattgtcaaagaagaaataaacaaaccacctatagccaagataactgggaatgtggtgattaccctacccacgagcacagcagagctggatggctctaagtcctcagatgacaagggaatagtcagctacctctggactcgagatgaggggagcccagcagcaggggaggtgttaaatcactctgaccatcaccctatcctttttctttcaaacctggttgagggaacctacacttttcacctgaaagtgaccgatgcaaagggtgagagtgacacagaccggaccactgtggaggtgaaacctgatcccaggaaaaacaacctggtggagatcatcttggatatcaacgtcagtcagctaactgagaggctgaaggggatgttcatccgccagattggggtcctcctgggggtgctggattccgacatcattgtgcaaaagattcagccgtacacggagcagagcaccaaaatggtattttttgttcaaaacgagcctccccaccagatcttcaaaggccatgaggtggcagcgatgctcaagagtgagctgcggaagcaaaaggcagactttttgatattcagagccttggaagtcaacactgtcacatgtcagctgaactgttccgaccatggccactgtgactcgttcaccaaacgctgtatctgtgaccctttttggatggagaatttcatcaaggtgcagctgagggatggagacagcaactgtgagtggagcgtgttatatgttatcattgctacctttgtcattgttgttgccttgggaatcctgtcttggactgtgatctgttgttgtaagaggcaaaaaggaaaacccaagaggaaaagcaagtacaagatcctggatgccacggatcaggaaagcctggagctgaagccaacctcccgagcaggcatcaaacagaaaggccttttgctaagtagcagcctgatgcactccgagtcagagctggacagcgatgatgccatctttacatggccagaccgagagaagggcaaactcctgcatggtcagaatggctctgtacccaacgggcagacccctctgaaggccaggagcccgcgggaggagatcctgtagccacctggtctgtctcctcagggcagggcccagcacactgcccggccagtcctcctacctcccgagtctgcgggcagctgctgtcccagcatctgctggtcatttcgccctgacagtcccaaccagaacccctgggacttgaatccagagacgtcctccaggaacccctcaacgaagctgtgaatgaagaggtttcctctttaaacctgtctggtgggcccccagatatcctcacctcagggcctcctttttttgcaaactcctcccctcccccgagggcagacccagccagctgctaagctctgcagctccccagtggacagtgtcattgtgcccagagtgctgcaaggtgaggcctgctgtgctgcccgcacacctgagtgcaaaaccaagcactgtgggcatggtgtttccctctctggggtagagtacgccctctcgctgggcaaagaggaagtggcacccctcccctcaccacagatgctgagatggtagcatagaaatgatggccgggcgcggtggctcacgcctgtaatcccagcactttgggaggccgaggcgggcggatcatgaggtcaggagatcaagaccaccctggctaacacggtgaaaccccatctctact

SEQ ID NO: 323589 - DNA, 3486 bp, Homo sapiens
aggaggcggtgtttccggccgccgtcgctgtccagggaggctgaggcgagaggtagctgtccgggtggggagcccgcactaccttcttcctcttcctcctcctcctccgggtgaggggagcgaaggttgggggtccccgagcccatggaccaggaggaggcggaggccgccgagagccggggccccgctatgtggccctgagccccgtgtactggttctgcctgtctggagggccatggagaagaggctgggagtcaagccaaatcctgcttcctggattttatcaggatattattggcagacatctgcgaagtggttgagaagcctgtacctgttttatacttgcttttgcttcagcgttctgtggttgtcaacaggtccacaaggcgattacaatttccagtcccctaaccacagacctgactgcagagctgtctggtgggccaaagaatgtatcagtgcaacctgaaatatcagagggtcttgctactacgcccagcactcaacaagtaaaaagttctgagaaaacccagattgctgtcccccagccagtggctccctcctacagttatgctacccctaccccccaggcctctttccagagcacctcagcaccatacccagttataaaggaactggtggtatctgctggagagagtgtccagataaccctgcctaagaatgaagttcaattaaatgcatatgttctccaagaaccacctaaaggagaaacctacacctacgactggcagctgattactcatcctagagactacagtggagaaatggaagggaaacattcccagatcctcaaactatcgaagctcactccaggcctgtatgaattcaaagtgattgtagagggtcaaaatgcccatggggaaggctatgtgaacgtgacagtcaagccagagccccgtaagaatcggccccccattgctattgtgtcacctcagttccaggagatctctttgccaaccacttctacagtcattgatggcagtcaaagcactgatgatgataaaatcgttcagtaccattgggaagaacttaaggggcctctaagagaagagaagatttctgaagatacagccatattaaaactaagtaaactcgtccctgggaactacactttcagcttgactgtagtagactctgatggagctaccaactctactactgcaaacctgacagtgaacaaagctgtggattacccccctgtggccaacgcaggccccaaccaagtgatcaccctgccccaaaactccatcaccctctttgggaaccagagcactgatgatcatggcatcaccagctatgagtggtcactcagcccaagcagcaaagggaaagtggtggagatgcagggtgttagaacaccaaccttacagctctctgcgatgcaagaaggagactacacttaccagctcacagtgactgacacaataggacagcaggccactgctcaagtgactgttattgtgcaacctgaaaacaataagcctcctcaggcagatgcaggcccagataaagagctgacccttcctgtggatagcacaaccctggatggcagcaagagctcagatgatcagaaaattatctcatatctctgggaaaaaacacagggacctgatggggtgcagctcgagaatgctaacagcagtgttgctactgtgactgggctgcaagtggggacctatgtgttcaccttgactgtcaaagatgagaggaacctgcaaagccagagctctgtgaatgtcattgtcaaagaagaaataaacaaaccacctatagccaagataactgggaatgtggtgattaccctacccacgagcacagcagagctggatggctctaagtcctcagatgacaagggaatagtcagctacctctggactcgagatgaggggagcccagcagcaggggaggtgttaaatcactctgaccatcaccctatcctttttctttcaaacctggttgagggaacctacacttttcacctgaaagtgaccgatgcaaagggtgagagtgacacagaccggaccactgtggaggtgaaacctgatcccaggaaaaacaacctggtggagatcatcttggatatcaacgtcagtcagctaactgagaggctgaaggggatgttcatccgccagattggggtcctcctgggggtgctggattccgacatcattgtgcaaaagattcagccgtacacggagcagagcaccaaaatggtattttttgttcaaaacgagcctccccaccagatcttcaaaggccatgaggtggcagcgatgctcaagagtgagctgcggaagcaaaaggcagactttttgatattcagagccttggaagtcaacactgtcacatgtcagctgaactgttccgaccatggccactgtgactcgttcaccaaacgctgtatctgtgaccctttttggatggagaatttcatcaaggtgcagctgagggatggagacagcaactgtgagtggagcgtgttatatgttatcattgctacctttgtcattgttgttgccttgggaatcctgtcttggactgtgatctgttgttgtaagaggcaaaaaggaaaacccaagaggaaaagcaagtacaagatcctggatgccacggatcaggaaagcctggagctgaagccaacctcccgagcaggcatcaaacagaaaggccttttgctaagtagcagcctgatgcactccgagtcagagctggacagcgatgatgccatctttacatggccagaccgagagaagggcaaactcctgcatggtcagaatggctctgtacccaacgggcagacccctctgaaggccaggagcccgcgggaggagatcctgtagccacctggtctgtctcctcagggcagggcccagcacactgcccggccagtcctcctacctcccgagtctgcgggcagctgctgtcccagcatctgctggtcatttcgccctgacagtcccaaccagaacccctgggacttgaatccagagacgtcctccaggaacccctcaacgaagctgtgaatgaagaggtttcctctttaaacctgtctggtgggcccccagatatcctcacctcagggcctcctttttttgcaaactcctcccctcccccgagggcagacccagccagctgctaagctctgcagctccccagtggacagtgtcattgtgcccagagtgctgcaaggtgaggcctgctgtgctgcccgcacacctgagtgcaaaaccaagcactgtgggcatggtgtttccctctctggggtagagtacgccctctcgctgggcaaagaggaagtggcacccctcccctcaccacagatgctgagatggtagcatagaaatgatggccgggcgcggtggctcacgcctgtaatcccagcactttgggaggccgaggcgggcggatcatgaggtcaggagatcaagaccaccctggctaacacggtgaaaccccatctctact

SEQ ID NO: 323590 - DNA, 2220 bp, Homo sapiens
agcggggtgttgtgtcagagagggttgtttccttgaagggggaaacccttagcaaggtgcctcatgatatctgactccatattcactcacatgctgaactgggtgttagaacaccaaccttacagctctctgcgatgcaagaaggagactacacttaccagctcacagtgactgacacaataggacagcaggccactgctcaagtgactgttattgtgcaacctgaaaacaataagcctcctcaggcagatgcaggcccagataaagagctgacccttcctgtggatagcacaaccctggatggcagcaagagctcagatgatcagaaaattatctcatatctctgggaaaaaacacagggacctgatggggtgcagctcgagaatgctaacagcagtgttgctactgtgactgggctgcaagtggggacctatgtgttcaccttgactgtcaaagatgagaggaacctgcaaagccagagctctgtgaatgtcattgtcaaagaagaaataaacaaaccacctatagccaagataactgggaatgtggtgattaccctacccacgagcacagcagagctggatggctctaagtcctcagatgacaagggaatagtcagctacctctggactcgagatgaggggagcccagcagcaggggaggtgttaaatcactctgaccatcaccctatcctttttctttcaaacctggttgagggaacctacacttttcacctgaaagtgaccgatgcaaagggtgagagtgacacagaccggaccactgtggaggtgaaacctgatcccaggaaaaacaacctggtggagatcatcttggatatcaacgtcagtcagctaactgagaggctgaaggggatgttcatccgccagattggggtcctcctgggggtgctggattccgacatcattgtgcaaaagattcagccgtacacggagcagagcaccaaaatggtattttttgttcaaaacgagcctccccaccagatcttcaaaggccatgaggtggcagcgatgctcaagagtgagctgcggaagcaaaaggcagactttttgatattcagagccttggaagtcaacactgtcacatgtcagctgaactgttccgaccatggccactgtgactcgttcaccaaacgctgtatctgtgaccctttttggatggagaatttcatcaaggtgcagctgagggatggagacagcaactgtgagtggagcgtgttatatgttatcattgctacctttgtcattgttgttgccttgggaatcctgtcttggactgtgatctgttgttgtaagaggcaaaaaggaaaacccaagaggaaaagcaagtacaagatcctggatgccacggatcaggaaagcctggagctgaagccaacctcccgagcaggcatcaaacagaaaggccttttgctaagtagcagcctgatgcactccgagtcagagctggacagcgatgatgccatctttacatggccagaccgagagaagggcaaactcctgcatggtcagaatggctctgtacccaacgggcagacccctctgaaggccaggagcccgcgggaggagatcctgtagccacctggtctgtctcctcagggcagggcccagcacactgcccggccagtcctcctacctcccgagtctgcgggcagctgctgtcccagcatctgctggtcatttcgccctgacagtcccaaccagaacccctgggacttgaatccagagacgtcctccaggaacccctcaacgaagctgtgaatgaagaggtttcctctttaaacctgtctggtgggcccccagatatcctcacctcagggcctcctttttttgcaaactcctcccctcccccgagggcagacccagccagctgctaagctctgcagctccccagtggacagtgtcattgtgcccagagtgctgcaaggtgaggcctgctgtgctgcccgcacacctgagtgcaaaaccaagcactgtgggcatggtgtttccctctctggggtagagtacgccctctcgctgggcaaagaggaagtggcacccctcccctcaccacagatgctgagatggtagcatagaaatgatggccgggcgcggtggctcacgcctgtaatcccagcactttgggaggccgaggcgggcggatcatgaggtcaggagatcaagaccaccctggctaacacggtgaaaccccatctctact

SEQ ID NO: 323591 - DNA, 216 bp, Homo sapiens
aatcaaaggcccctaaagctttctcagtttgtttggaggtttctaaaaatgcagtccagcagctctacttctcttgggcaagaaaaaataggaaccattccctcctacctgcatctccaccactttccctttgctgcttgggctgagtgaccactcatagctggtgatgccatgatcatcagtgctctggttcccaaagagggtgatggagttttg

SEQ ID NO: 323592 - DNA, 405 bp, Homo sapiens
  misc_feature (109)..(109): n is a, c, g, or t
cccactgataagccattaagagcaactcaactcataatagcaaataaaaccttgctcttccaaaggtctggaggctttgcaaaaaataaggattttgtgtcaatacatnacctgtgttttttcccagagatatgagataattttctgatcatctgagctcttgctgccatccagggttgtgctatccacaggaagggtcagctctttatctgggcctgcatctgcctgaggaggcttattgttttctggaagacaaagagttagaggtcaaaagcagccagtccaggtgggaaaggagaggaaccaattgggacacatgttctggaagccatggactctgcctctcaggccacagaactgtcagatactgtgggagatgtggttaccgtcagggagcacacaata

SEQ ID NO: 323593 - DNA, 3943 bp, Homo sapiens
taaatgcagctagattcaaatgggctgataaccaaattttaacacatcagcaatttgcattcagaaatttaaaaaatactgggccagacataaccctcaggttactttacctctgagggtgcaacctcttctcctcaaaatgtactggttctgcctgtctggagggccatggagaagaggctgggagtcaagccaaatcctgcttcctggattttatcaggatattattggcagacatctgcgaagtggttgagaagcctgtacctgttttatacttgcttttgcttcagcgttctgtggttgtcaacagatgccagtgagagcaggtgccagcaggggaagacacaatttggagttggcctgagatctgggggagaaaatcacctctggcttcttgaaggaaccccctctctccagtcatgttgggctgcctgctgccaggactctgcctgccatgtcttttggtggctagaagggatgtgcattcaggcagactgcagcaggccccagagctgccgggcttttaggacacactcctccaattccatgctggtgtttttaaaaaaattccaaactgcagatgatttgggctttctacctgaagatgatgtaccacatcttctggggctaggttggaactgggcatcttggaggcagagcccacccagagctgcactcagacctgctgtatcttccagtgaccagcagagcttaatcaggaagcttcagaagagaggtagtcccagtgacgtagttacacctatagtgacacagcattctaaagtgaatgactccaacgaattaggtggtctgactaccagtggctctgcagaggtccacaaggcgattacaatttccagtcccctaaccacagacctgactgcagagctgtctggtgggccaaagaatgtatcagtgcaacctgaaatatcagagggtcttgctactacgcccagcactcaacaagtaaaaagttctgagaaaacccagattgctgtcccccagccagtggctccctcctacagttatgctacccctaccccccaggcctctttccagagcacctcagcaccatacccagttataaaggaactggtggtatctgctggagagagtgtccagataaccctgcctaagaatgaagttcaattaaatgcatatgttctccaagaaccacctaaaggagaaacctacacctacgactggcagctgattactcatcctagagactacagtggagaaatggaagggaaacattcccagatcctcaaactatcgaagctcactccaggcctgtatgaattcaaagtgattgtagagggtcaaaatgcccatggggaaggctatgtgaacgtgacagtcaagccagagccccgtaagaatcggccccccattgctattgtgtcacctcagttccaggagatctctttgccaaccacttctacagtcattgatggcagtcaaagcactgatgatgataaaatcgttcagtaccattgggaagaacttaaggggcctctaagagaagagaagatttctgaagatacagccatattaaaactaagtaaactcgtccctgggaactacactttcagcttgactgtagtagactctgatggagctaccaactctactactgcaaacctgacagtgaacaaagctgtggattacccccctgtggccaacgcaggccccaaccaagtgatcaccctgccccaaaactccatcaccctctttgggaaccagagcactgatgatcatggcatcaccagctatgagtggtcactcagcccaagcagcaaagggaaagtggtggagatgcagggtgttagaacaccaaccttacagctctctgcgatgcaagaaggagactacacttaccagctcacagtgactgacacaataggacagcaggccactgctcaagtgactgttattgtgcaacctgaaaacaataagcctcctcaggcagatgcaggcccagataaagagctgacccttcctgtggatagcacaaccctggatggcagcaagagctcagatgatcagaaaattatctcatatctctgggaaaaaacacagggacctgatggggtgcagctcgagaatgctaacagcagtgttgctactgtgactgggctgcaagtggggacctatgtgttcaccttgactgtcaaagatgagaggaacctgcaaagccagagctctgtgaatgtcattgtcaaagaagaaataaacaaaccacctatagccaagataactgggaatgtggtgattaccctacccacgagcacagcagagctggatggctctaagtcctcagatgacaagggaatagtcagctacctctggactcgagatgaggggagcccagcagcaggggaggtgttaaatcactctgaccatcaccctatcctttttctttcaaacctggttgagggaacctacacttttcacctgaaagtgaccgatgcaaagggtgagagtgacacagaccggaccactgtggaggtgaaacctgatcccaggaaaaacaacctggtggagatcatcttggatatcaacgtcagtcagctaactgagaggctgaaggggatgttcatccgccagattggggtcctcctgggggtgctggattccgacatcattgtgcaaaagattcagccgtacacggagcagagcaccaaaatggtattttttgttcaaaacgagcctccccaccagatcttcaaaggccatgaggtggcagcgatgctcaagagtgagctgcggaagcaaaaggcagactttttgatattcagagccttggaagtcaacactgtcacatgtcagctgaactgttccgaccatggccactgtgactcgttcaccaaacgctgtatctgtgaccctttttggatggagaatttcatcaaggtgcagctgagggatggagacagcaactgtgagtggagcgtgttatatgttatcattgctacctttgtcattgttgttgccttgggaatcctgtcttggactgtgatctgttgttgtaagaggcaaaaaggaaaacccaagaggaaaagcaagtacaagatcctggatgccacggatcaggaaagcctggagctgaagccaacctcccgagcaggcatcaaacagaaaggccttttgctaagtagcagcctgatgcactccgagtcagagctggacagcgatgatgccatctttacatggccagaccgagagaagggcaaactcctgcatggtcagaatggctctgtacccaacgggcagacccctctgaaggccaggagcccgcgggaggagatcctgtagccacctggtctgtctcctcagggcagggcccagcacactgcccggccagtcctcctacctcccgagtctgcgggcagctgctgtcccagcatctgctggtcatttcgccctgacagtcccaaccagaacccctgggacttgaatccagagacgtcctccaggaacccctcaacgaagctgtgaatgaagaggtttcctctttaaacctgtctggtgggcccccagatatcctcacctcagggcctcctttttttgcaaactcctcccctcccccgagggcagacccagccagctgctaagctctgcagctccccagtggacagtgtcattgtgcccagagtgctgcaaggtgaggcctgctgtgctgcccgcacacctgagtgcaaaaccaagcactgtgggcatggtgtttccctctctggggtagagtacgccctctcgctgggcaaagaggaagtggcacccctcccctcaccacagatgctgagatggtagcatagaaatgatggccgggcgcggtggctcacgcctgtaatcccagcactttgggaggccgaggcgggcggatcatgaggtcaggagatcaagaccaccctggctaacacggtgaaaccccatctctact

SEQ ID NO: 323594 - DNA, 5635 bp, Homo sapiens
taaatgcagctagattcaaatgggctgataaccaaattttaacacatcagcaatttgcattcagaaatttaaaaaatactgggccagacataaccctcaggttactttacctctgagggtgcaacctcttctcctcaaaatgtactggttctgcctgtctggagggccatggagaagaggctgggagtcaagccaaatcctgcttcctggattttatcaggatattattggcagacatctgcgaagtggttgagaagcctgtacctgttttatacttgcttttgcttcagcgttctgtggttgtcaacagatgccagtgagagcaggtgccagcaggggaagacacaatttggagttggcctgagatctgggggagaaaatcacctctggcttcttgaaggaaccccctctctccagtcatgttgggctgcctgctgccaggactctgcctgccatgtcttttggtggctagaagggatgtgcattcaggcagactgcagcaggccccagagctgccgggcttttaggacacactcctccaattccatgctggtgtttttaaaaaaattccaaactgcagatgatttgggctttctacctgaagatgatgtaccacatcttctggggctaggttggaactgggcatcttggaggcagagcccacccagagctgcactcagacctgctgtatcttccagtgaccagcagagcttaatcaggaagcttcagaagagaggtagtcccagtgacgtagttacacctatagtgacacagcattctaaagtgaatgactccaacgaattaggtggtctgactaccagtggctctgcagaggtccacaaggcgattacaatttccagtcccctaaccacagacctgactgcagagctgtctggtgggccaaagaatgtatcagtgcaacctgaaatatcagagggtcttgctactacgcccagcactcaacaagtaaaaagttctgagaaaacccagattgctgtcccccagccagtggctccctcctacagttatgctacccctaccccccaggcctctttccagagcacctcagcaccatacccagttataaaggaactggtggtatctgctggagagagtgtccagataaccctgcctaagaatgaagttcaattaaatgcatatgttctccaagaaccacctaaaggagaaacctacacctacgactggcagctgattactcatcctagagactacagtggagaaatggaagggaaacattcccagatcctcaaactatcgaagctcactccaggcctgtatgaattcaaagtgattgtagagggtcaaaatgcccatggggaaggctatgtgaacgtgacagtcaagccagagccccgtaagaatcggccccccattgctattgtgtcacctcagttccaggagatctctttgccaaccacttctacagtcattgatggcagtcaaagcactgatgatgataaaatcgttcagtaccattgggaagaacttaaggggcctctaagagaagagaagatttctgaagatacagccatattaaaactaagtaaactcgtccctgggaactacactttcagcttgactgtagtagactctgatggagctaccaactctactactgcaaacctgacagtgaacaaagctgtggattacccccctgtggccaacgcaggccccaaccaagtgatcaccctgccccaaaactccatcaccctctttgggaaccagagcactgatgatcatggcatcaccagctatgagtggtcactcagcccaagcagcaaagggaaagtggtggagatgcagggtgttagaacaccaaccttacagctctctgcgatgcaagaaggagactacacttaccagctcacagtgactgacacaataggacagcaggccactgctcaagtgactgttattgtgcaacctgaaaacaataagcctcctcaggcagatgcaggcccagataaagagctgacccttcctgtggatagcacaaccctggatggcagcaagagctcagatgatcagaaaattatctcatatctctgggaaaaaacacagggacctgatggggtgcagctcgagaatgctaacagcagtgttgctactgtgactgggctgcaagtggggacctatgtgttcaccttgactgtcaaagatgagaggaacctgcaaagccagagctctgtgaatgtcattgtcaaagaagaaataaacaaaccacctatagccaagataactgggaatgtggtgattaccctacccacgagcacagcagagctggatggctctaagtcctcagatgacaagggaatagtcagctacctctggactcgagatgaggggagcccagcagcaggggaggtgttaaatcactctgaccatcaccctatcctttttctttcaaacctggttgagggaacctacacttttcacctgaaagtgaccgatgcaaagggtgagagtgacacagaccggaccactgtggaggtgaaacctgatcccaggaaaaacaacctggtggagatcatcttggatatcaacgtcagtcagctaactgagaggctgaaggggatgttcatccgccagattggggtcctcctgggggtgctggattccgacatcattgtgcaaaagattcagccgtacacggagcagagcaccaaaatggtattttttgttcaaaacgagcctccccaccagatcttcaaaggccatgaggtggcagcgatgctcaagagtgagctgcggaagcaaaaggcagactttttgatattcagagccttggaagtcaacactgtcacatgtcagctgaactgttccgaccatggccactgtgactcgttcaccaaacgctgtatctgtgaccctttttggatggagaatttcatcaaggtgcagctgagggatggagacagcaactgtgagtggagcgtgttatatgttatcattgctacctttgtcattgttgttgccttgggaatcctgtcttggactgtgatctgttgttgtaagaggcaaaaaggaaaacccaagaggaaaagcaagtacaagatcctggatgccacggatcaggaaagcctggagctgaagccaacctcccgagcaggtaggggccctgggtgccagagcttctaggtctgtgcactctctctgtggaaggctgctgtcactagcccctcctgagtgtgtcactaacagcccactgtgcttgcaaagcattttgttcccttttgcctgatgaagactgagggtcagatttgccctgagctgcactggacaaaatgcctccaggacccacttcgcgtgctacttccgcttggcgggggtgctgggcctgttgttttcctttgcctgggcattctcctcatgtttcccacctggagttccgcttttccaactgccccaggtagtcagggtcagggaccttggacttgtctcttactgctgaccagtctgtgctttatgggcagagatgagacccaggcccgtgtctgccagctgaccacctttcagccagccttgttctcctgtcttcctatctttatcatttggcaagtcctcagcttctgtcagtgtcttagggcagataggagggcatttccttgcacaaacagtaagatgactttgagtgatggcactgggagatcagggcaggtagtaggccttccttcctccgctgggctgggtcacctggcgagggtttcactcatcatggatgccatgggacaggtatcattggtttatgagagctagactctataaagcgattcctaaacactctgcaagtagaactatttttatataaagcatttattaaacacttttcatgcttaaagctttgtgttagggagaggctatgggggtatagggagtcatcagacacaggctgtgctctcagtctagtgagggagaaaagacacacagtagcagaagagaacaggctcacagcagtctggactctgcaccaagcagctcgatccaccaacactgtcaaggtggagactggaggtggtggggcttgaaatgagcccaggaaaccagagcagtgagggcgggcggggcatttcacccaggaatattgagaatgagggcctggaggtgaaatgtgcaaaacccacccctcacactgcagccaaggtttttatcatgttactctgatcatgtttttcaccccctgacattcttcaatgacttactatttctagcacaaaaagctagaacttttggtctggtagatgtggcctttgtgagcttacatcagtttgcttttctggaatctttctctttgctgatctccctcttttctaaacaagttcttctggttcatccagtaatctctttcttttttaaaaatgtggcgacaaggtcttgctctgtcacccaggctggagtgcagtggtatagtcatagctcactgcaacctccagctcctgagctcaagtggtcctcctgcttcagcctcccaaagcagctgggactacaggcatgcaccaccatacccagccctagaaagctctttcttatccctcccttaacctcctcaagttgtgctcacctttctctcacatgcctgggtcggcatttctctcgctgtctcatgattagttatgtttgcctgtctccccacccatcagtgaaatccctgagggcaggggctgtctcattcatctgtggatatggagcgggaccactatgtgccaggccctgtgccagacactgcttatattgtggtgaatcaaacggacagacttcactcttgtgtagcttatgtcagacagacattaagcaaactcacaaatacataaaatatgctcataaaaggcctttatgaagaaaaacacttaagctgagacctggataagtgggagctagccagataaagctgcaggaaatagcattccaggcaaaggaacaaaactggtgcagacccagctgctagaaggagcagagagcatttgaggaggtagaagaaggtgacatgatggacaggttcaccttcccacagagtaaggggtgagtgacccaaggctcaatggatgagcagggtccctgctgaggacttctcttgagtacaatggggagccactgatagctttttaaggggatgaatggtgggatttggtttacatttattattatttgagacagagtctcactcttatcacccaggcaggagtgcagtggtgcgatcaaggcccactgcagtcttgacctcctgggctcaggtgatccttccacctcagcttcctaagtagctgggaccacaggcatgcgccaccatccccaggtttttttgttgttgttgttgttgttttgtatttttggtagagacggggtttcatcatgttgcctaggctgttcttgaactcctgggcttaagtgatctgcctgccttggtctcctaaagtgctgggattataggtgtgagccatggcacccggtcttggtttatattttaaaaagacaactgtgtagctgggcgtggtggtgggtgcctgtaatcccagctactcgagaggccaaggcaggagaattgctagaacctgggggtgtgaaggtttcagtgaactgagatcactccaacctgggcaataaagccagactctgtctc

SEQ ID NO: 323595 - DNA, 4152 bp, Homo sapiens
tttttcctggatcaggtttcacctccacagtggtccggtctgtgtcactctcaccctttgcatcggtcactttcaggtgaaaagtgtaggttccctcaaccaggtttgaaagaaaaaggatagggtgatggtcagagtgatttaacacctcccctgctgctgggctcccctcatctcgagtccagaggtagctgactattcccttgtcatctgaggacttagagccatccagctctgctgtgctcgtgggtagggtaatcaccacattcccagttatcttggctataggtggtttgtttatttcttctttgacaatgacattcacagagctctggctttgcaggttcctctcatctttgacagtcaaggtgaacacataggtccccacttgcagcccagtcacagtagcaacactgctgttagcattctcgagctgcaccccatcaggtccctgtgttttttcccagagatatgagataattttctgatcatctgagctcttgctgccatccagggttgtgctatccacaggaagggtcagctctttatctgggcctgcatctgcctgaggaggcttattgttttcaggttgcacaataacagtcacttgagcagtggcctgctgtcctattgtgtcagtcactgtgagctggtaagtgtagtctccttcttgcatcgcagagagctgtaaggttggtgttctaacaccctgcatctccaccactttccctttgctgcttgggctgagtgaccactcatagctggtgatgccatgatcatcagtgctctggttcccaaagagggtgatggagttttggggcagggtgatcacttggttggggcctgcgttggccacaggggggtaatccacagctttgttcactgtcaggtttgcagtagtagagttggtagctccatcagagtctactacagtcaagctgaaaggtagtcccagtgacgtagttacacctatagtgacacagcattctaaagtgaatgactccaacgaattaggtggtctgactaccagtggctctgcagaggtccacaaggcgattacaatttccagtcccctaaccacagacctgactgcagagctgtctggtgggccaaagaatgtatcagtgcaacctgaaatatcagagggtcttgctactacgcccagcactcaacaagtaaaaagttctgagaaaacccagattgctgtcccccagccagtggctccctcctacagttatgctacccctaccccccaggcctctttccagagcacctcagcaccatacccagttataaaggaactggtggtatctgctggagagagtgtccagataaccctgcctaagaatgaagttcaattaaatgcatatgttctccaagaaccacctaaaggagaaacctacacctacgactggcagctgattactcatcctagagactacagtggagaaatggaagggaaacattcccagatcctcaaactatcgaagctcactccaggcctgtatgaattcaaagtgattgtagagggtcaaaatgcccatggggaaggctatgtgaacgtgacagtcaagccagagccccgtaagaatcggccccccattgctattgtgtcacctcagttccaggagatctctttgccaaccacttctacagtcattgatggcagtcaaagcactgatgatgataaaatcgttcagtaccattgggaagaacttaaggggcctctaagagaagagaagatttctgaagatacagccatattaaaactaagtaaactcgtccctgggaactacactttcagcttgactgtagtagactctgatggagctaccaactctactactgcaaacctgacagtgaacaaagctgtggattacccccctgtggccaacgcaggccccaaccaagtgatcaccctgccccaaaactccatcaccctctttgggaaccagagcactgatgatcatggcatcaccagctatgagtggtcactcagcccaagcagcaaagggaaagtggtggagatgcagggtgttagaacaccaaccttacagctctctgcgatgcaagaaggagactacacttaccagctcacagtgactgacacaataggacagcaggccactgctcaagtgactgttattgtgcaacctgaaaacaataagcctcctcaggcagatgcaggcccagataaagagctgacccttcctgtggatagcacaaccctggatggcagcaagagctcagatgatcagaaaattatctcatatctctgggaaaaaacacagggacctgatggggtgcagctcgagaatgctaacagcagtgttgctactgtgactgggctgcaagtggggacctatgtgttcaccttgactgtcaaagatgagaggaacctgcaaagccagagctctgtgaatgtcattgtcaaagaagaaataaacaaaccacctatagccaagataactgggaatgtggtgattaccctacccacgagcacagcagagctggatggctctaagtcctcagatgacaagggaatagtcagctacctctggactcgagatgaggggagcccagcagcaggggaggtgttaaatcactctgaccatcaccctatcctttttctttcaaacctggttgagggaacctacacttttcacctgaaagtgaccgatgcaaagggtgagagtgacacagaccggaccactgtggaggtgaaacctgatcccaggaaaaacaacctggtggagatcatcttggatatcaacgtcagtcagctaactgagaggctgaaggggatgttcatccgccagattggggtcctcctgggggtgctggattccgacatcattgtgcaaaagattcagccgtacacggagcagagcaccaaaatggtattttttgttcaaaacgagcctccccaccagatcttcaaaggccatgaggtggcagcgatgctcaagagtgagctgcggaagcaaaaggcagactttttgatattcagagccttggaagtcaacactgtcacatgtcagctgaactgttccgaccatggccactgtgactcgttcaccaaacgctgtatctgtgaccctttttggatggagaatttcatcaaggtgcagctgagggatggagacagcaactgtgagtggagcgtgttatatgttatcattgctacctttgtcattgttgttgccttgggaatcctgtcttggactgtgatctgttgttgtaagaggcaaaaaggaaaacccaagaggaaaagcaagtacaagatcctggatgccacggatcaggaaagcctggagctgaagccaacctcccgagcaggcatcaaacagaaaggccttttgctaagtagcagcctgatgcactccgagtcagagctggacagcgatgatgccatctttacatggccagaccgagagaagggcaaactcctgcatggtcagaatggctctgtacccaacgggcagacccctctgaaggccaggagcccgcgggaggagatcctgtagccacctggtctgtctcctcagggcagggcccagcacactgcccggccagtcctcctacctcccgagtctgcgggcagctgctgtcccagcatctgctggtcatttcgccctgacagtcccaaccagaacccctgggacttgaatccagagacgtcctccaggaacccctcaacgaagctgtgaatgaagaggtttcctctttaaacctgtctggtgggcccccagatatcctcacctcagggcctcctttttttgcaaactcctcccctcccccgagggcagacccagccagctgctaagctctgcagctccccagtggacagtgtcattgtgcccagagtgctgcaaggtgaggcctgctgtgctgcccgcacacctgagtgcaaaaccaagcactgtgggcatggtgtttccctctctggggtagagtacgccctctcgctgggcaaagaggaagtggcacccctcccctcaccacagatgctgagatggtagcatagaaatgatggccgggcgcggtggctcacgcctgtaatcccagcactttgggaggccgaggcgggcggatcatgaggtcaggagatcaagaccaccctggctaacacggtgaaaccccatctctact

SEQ ID NO: 323596 - DNA, 1820 bp, Homo sapiens
aggaggcggtgtttccggccgccgtcgctgtccagggaggctgaggcgagaggtagctgtccgggtggggagcccgcactaccttcttcctcttcctcctcctcctccgggtgaggggagcgaaggttgggggtccccgagcccatggaccaggaggaggcggaggccgccgagagccggggccccgctatgtggccctgagccccgtgtactggttctgcctgtctggagggccatggagaagaggctgggagtcaagccaaatcctgcttcctggattttatcaggatattattggcagacatctgcgaagtggttgagaagcctgtacctgttttatacttgcttttgcttcagcgttctgtggttgtcaacagatgccagtgagagcaggtgccagcaggggaagacacaatttggagttggcctgagatctgggggagaaaatcacctctggcttcttgaaggaaccccctctctccagtcatgttgggctgcctgctgccaggactctgcctgccatgtcttttggtggctagaagggatgtgcattcaggcagactgcagcaggccccagagctgccgggcttttaggacacactcctccaattccatgctggtgtttttaaaaaaattccaaactgcagatgatttgggctttctacctgaagatgatgtaccacatcttctggggctaggttggaactgggcatcttggaggcagagcccacccagagctgcactcagacctgctgtatcttccagtgaccagcagagcttaatcaggaagcttcagaagagaggtagtcccagtgacgtagttacacctatagtgacacagcattctaaagtgaatgactccaacgaattaggtggtctgactaccagtggctctgcagaggtccacaaggcgattacaatttccagtcccctaaccacagacctgactgcagagctgtctggtgggccaaagaatgtatcagtgcaacctgaaatatcagagggtcttgctactacgcccagcactcaacaagtaaaaagttctgagaaaacccagattgctgtcccccagccagtggctccctcctacagttatgctacccctaccccccaggcctctttccagagcacctcagcaccatacccagttataaaggaactggtggtatctgctggagagagtgtccagataaccctgcctaagaatgaagttcaattaaatgcatatgttctccaagaaccacctaaaggagaaacctacacctacgactggcagctgattactcatcctagagactacagtggagaaatggaagggaaacattcccagatcctcaaactatcgaagctcactccaggcctgtatgaattcaaagtgattgtagagggtcaaaatgcccatggggaaggctatgtgaacgtgacagtcaagccaggctcaacaccacatggaaactgccaagacttgaggcttgcaccctctgaagccacagcctgagctctacattggcccttttcagccatggcttgagcagctgggatgcagggcaccaagtccctaggctgcacacagcactgagaacctgggcctggcccacgaaaccatttttccctcctaggcctccaggcctccagcccctgtgagggctgctatgaagccctctcacatgccctagagacattttccccattttcttggggattaactttcagctcctcattactaatgcagatttgtgaagccagcttgaatttctccttagaaaatgggattttgttttctattgcattgtcaggctgcaaattttctgaacttttat

SEQ ID NO: 323597 - DNA, 180 bp, Homo sapiens
taatgccaccacggatctgacagaaggtggagctcaggcggtaatgctcactcacctgctgctgacctcctgctgtgcggcccagttcctaacaggccatggactaggaattggagcccctgctttaggacacagtataagcaaataaatgcaaatataagtgactcttttttttttttt

SEQ ID NO: 323598 - DNA, 2686 bp, Homo sapiens
atcagacagtaaaacaggggcagagcctggaattgcactgaggcttgagtctgacttctctcccccacctgctgtgcccttaaactgcagagatcggggcgggggttggggggcaagcggctcagatgggttcaaaaaactccccaggctcaactctggttctgactgcctgagacatgggcagctgacacagcagaccttgaatcctgaggatgtgaggcagggtatatctgggaggccggaggacgtgtctggttattacacagatgcacagctggacgtgggatccacacagctcagaacagttggatcttgctcagtctctgtcagaggaagatcccttggacaagaggaccctgccttggtgtgagagtgagggaagaggaagctggaacgagggttaaggaaaaccttccagtctggacagtgactggagagctccaaggaaagcccctcggtaacccagccgctggcaccatgaacccagagagcagtatctttattgaggattaccttaagtatttccaggaccaagtgagcagagagaatctgctacaactgctgactgatgatgaagcctggaatggattcgtggctgctgctgaactgcccagggatgaggcagatgagctccgtaaagctctgaacaagcttgcaagtcacatggtcatgaaggacaaaaaccgccacgataaagaccagcagcacaggcagtggtttttgaaagagtttcctcggttgaaaagggagcttgaggatcacataaggaagctccgtgcccttgcagaggaggttgagcaggtccacagaggcaccaccattgccaatgtggtgtccaactctgttggcactacctctggcatcctgaccctcctcggcctgggtctggcacccttcacagaaggaatcagttttgtgctcttggacactggcatgggtctgggagcagcagctgctgtggctgggattacctgcagtgtggtagaactagtaaacaaattgcgggcacgagcccaagcccgcaacttggaccaaagcggcaccaatgtagcaaaggtgatgaaggagtttgtgggtgggaacacacccaatgttcttaccttagttgacaattggtaccaagtcacacaagggattgggaggaacatccgtgccatcagacgagccagagccaaccctcagttaggagcgtatgccccacccccgcatgtcattgggcgaatctcagctgaaggcggtgaacaggttgagagggttgttgaaggccccgcccaggcaatgagcagaggaaccatgatcgtgggtgcagccactggaggcatcttgcttctgctggatgtggtcagccttgcatatgagtcaaagcacttgcttgagggggcaaagtcagagtcagctgaggagctgaagaagcgggctcaggagctggaggggaagctcaactttctcaccaagatccatgagatgctgcagccaggccaagaccaatgaccccagagcagtgcagccaccagggcagaaatgccgggcacaggccaggacaaaatgcagacttttttttttttttttttttttttttgagatggagtctcgctctatcgcccaggatggagtgcagtggctcaatctcggctcactgcaaactccgcctcccgggttcacaccattctccggcctcagtctcccgagtagctgggactacaggcacctgccaccacgcccggctaatttttttgtattttcactggagacggggtttcactgtgttagccacgatggtctccatctcctgacctcgtgatctgcccacctcggcctcccaaagtgctgggattacaggcgtgagccaccgcgcctggccaaaatgcagacattttattagggggataaggagggcaaggtaaagcttatggaactgagtgttagtgactttggcatttgtgtagctgagcacagcaagggaggggttaatgcagatggcaagtgcaccaaggagaaggcaggaacactggagcctgcaataagggaggagaggggactggagagtgtggggaatgggaagaagtagtttactttggactaaagaatatattgggcgaagaatagagggggagcttgcaggaaccagcaatgagaaggccaggaaaagaaagagctgaaaatggagaaaaccagagttagaactgttggatacaggagaagaaacagcagctccactaccgaccccccccccaggtttgatgtccttccaagaataaagtctttccctggtgatggtctctcgctctgtctttccagcatccactctcccttgtccttctgggggtgtatcacagtcagccagtggcttcttcatgatggtggttggggtggttgtcatgtgacgggtcccctccaggttactaaagggtgcatgtcccctgcttgaaccctgagaggcaggtggtaggccatggccacaatccccagctgaggagcaggtgtccctgagaacccaaacttcccagagagtatctgagaaccaaccaatgaaaacagtcccatcgctcttagccggtaagtaaacagtcagaagattagcatgaaagcagtttagcattgggaggaagcacagatctctagagctgtcctgtcgctgcccaggattgacctgtgtgtaagtcccaataaactcacctactcacca

SEQ ID NO: 323599 - DNA, 2272 bp, Homo sapiens
atcagacagtaaaacaggggcagagcctggaattgcactgaggcttgagtctgacttctctcccccacctgctgtgcccttaaactgcagagatcggggcgggggttggggggcaagcggctcagatgggttcaaaaaactccccaggctcaactctggttctgactgcctgagacatgggcagctgacacagcagaccttgaatcctgaggatgtgaggcagggtatatctgggaggccggaggacgtgtctggttattacacagatgcacagctggacgtgggatccacacagctcagaacagttggatcttgctcagtctctgtcagaggaagatcccttggacaagaggaccctgccttggtgtgagagtgagggaagaggaagctggaacgagggttaaggaaaaccttccagtctggacagtgactggagagctccaaggaaagcccctcggtaacccagccgctggcaccatgaacccagagagcagtatctttattgaggattaccttaagtatttccaggaccaagtgagcagagagaatctgctacaactgctgactgatgatgaagcctggaatggattcgtggctgctgctgaactgcccagggatgaggcagatgagctccgtaaagctctgaacaagcttgcaagtcacatggtcatgaaggacaaaaaccgccacgataaagaccagcagcacaggcagtggtttttgaaagagtttcctcggttgaaaagggagcttgaggatcacataaggaagctccgtgcccttgcagaggaggttgagcaggtccacagaggcaccaccattgccaatgtggtgtccaactctgttggcactacctctggcatcctgaccctcctcggcctgggtctggcacccttcacagaaggaatcagttttgtgctcttggacactggcatgggtctgggagcagcagctgctgtggctgggattacctgcagtgtggtagaactagtaaacaaattgcgggcacgagcccaagcccgcaacttggaccaaagcggcaccaatgtagcaaaggtgatgaaggagtttgtgggtgggaacacacccaatgttcttaccttagttgacaattggtaccaagtcacacaagggattgggaggaacatccgtgccatcagacgagccagagccaaccctcagttaggagcgtatgccccacccccgcatgtcattgggcgaatctcagctgaaggcggtgaacaggttgagagggttgttgaaggccccgcccaggcaatgagcagaggaaccatgatcgtgggtgcagccactggaggcatcttgcttctgctggatgtggtcagccttgcatatgagtcaaagcacttgcttgagggggcaaagtcagagtcagctgaggagctgaagaagcgggctcaggagctggaggggaagctcaactttctcaccaagatccatgagatgctgcagccaggccaagaccaatgaccccagagcagtgcagccaccagggcagaaatgccgggcacaggccaggacaaaatgcagacttttttttttttttttttttttttttgagatggagtctcgctctatcgcccaggatggagtgcagtggctcaatctcggctcactgcaaactccgcctcccgggttcacaccattctccggcctcagtctcccgagtagctgggactacaggcacctgccaccacgcccggctaatttttttgtattttcactggagacggggtttcactgtgttagccacgatggtctccatctcctgacctcgtgatctgcccacctcggcctcccaaagtgctgggattacaggcgtgagccaccgcgcctggccaaaatgcagacattttattagggggataaggagggcaaggtaaagcttatggaactgagtgttagtgactttggcatttgtgtagctgagcacagcaagggaggggttaatgcagatggcaagtgcaccaaggagaaggcaggaacactggagcctgcaataagggaggagaggggactggagagtgtggggaatgggaagaagtagtttactttggactaaagaatatattgggcgaagaatagagggggagcttgcaggaaccagcaatgagaaggccaggaaaagaaagagctgaaaatggagaaaaccagagttagaactgttggatacaggagaagaaacagcagctccactaccgaccccccccccaggtttgatgtccttccaagaataaagtctttccctggt

SEQ ID NO: 323600 - DNA, 3678 bp, Homo sapiens
gttcttggaagagttctgtgagttactatttataacatcttagagcaattagtggtgcaaaatccaccaatgtttgcccacattaacattaagtgccattatacctgtaagtgccttgactatggctgtagtttgatctcaggaggggaggttgataaatgctcttctgtcttcttaaaacagtgcctaaagatgattaatatgattaacatttgctattttccctcacctcccagggtaagataatcaggagcagaatgtgaagaactttcctctatataaagatcagcatttattcaggccgggtgtcgtggctcatgtttgtaatccagcactttagagggcagggtgggaggatcccctaaggccaggattttgccagcagcctgggctgcatactaggagtgagaccttgtctcaaggaataatgttttgttttgttttgttttcctgaagaaaagactactgagagccagtaagactgaaagaatggacatcttcatatcctgttagtttgagtgtgaatttgtacagttttcatacagagtggctctaggtataaaaacttttgagatgttaatagcttttgacctagtcattctactcttaaaagtatcttaaggaaataatctcaaatgtgagcagttttacgtgagggaggatattctttgtagcataatttatatgaagaattagaaacaccctaaggtccatcagctaggggaggacagcagaggggacggggaagcatcaggagggctcggcagccacagcaggggctgggccggcatctagcaggatccaggtctttgtgggacaaagaatcttagagaagcaacggggacacaggctgtccactgcagcaccagtgagttcaccaagacgaagagttgagcacagagtgtgagacagggatttgcaatgaggagtcatttaccatgagcgtgtatacatgactcaatattgtatatttaagggagtagagcacagtaattgaagacatgggattgaagcagaagtcctggctctagcactattgtgaaaacacccataagttccctaacttttgtggattcctctgtgttcaaatgggaaagtggtacccatctcctgtcctgtgtgtgatcatcgaatgagatacatgtcagaggccatgcacatcacagacacacaatacacactggctatcatcaactagttatcatacatgttcccaggcccaggtcattgtcagaatgttccctcccatctctattcctgtgtatagactctgtagtttctgtaatgatcagatggctgcccctcctctgattatcttcttctcatacccctacaggacaagaggaccctgccttggtgtgagagtgagggaagaggaagctggaacgagggttaaggaaaaccttccagtctggacagtgactggagagctccaaggaaagcccctcggtaacccagccgctggcaccatgaacccagagagcagtatctttattgaggattaccttaagtatttccaggaccaagtgagcagagagaatctgctacaactgctgactgatgatgaagcctggaatggattcgtggctgctgctgaactgcccagggatgaggcagatgagctccgtaaagctctgaacaagcttgcaagtcacatggtcatgaaggacaaaaaccgccacgataaagaccagcagcacaggcagtggtttttgaaagagtttcctcggttgaaaagggagcttgaggatcacataaggaagctccgtgcccttgcagaggaggttgagcaggtccacagaggcaccaccattgccaatgtggtgtccaactctgttggcactacctctggcatcctgaccctcctcggcctgggtctggcacccttcacagaaggaatcagttttgtgctcttggacactggcatgggtctgggagcagcagctgctgtggctgggattacctgcagtgtggtagaactagtaaacaaattgcgggcacgagcccaagcccgcaacttggaccaaagcggcaccaatgtagcaaaggtgatgaaggagtttgtgggtgggaacacacccaatgttcttaccttagttgacaattggtaccaagtcacacaagggattgggaggaacatccgtgccatcagacgagccagagccaaccctcagttaggagcgtatgccccacccccgcatgtcattgggcgaatctcagctgaaggcggtgaacaggttgagagggttgttgaaggccccgcccaggcaatgagcagaggaaccatgatcgtgggtgcagccactggaggcatcttgcttctgctggatgtggtcagccttgcatatgagtcaaagcacttgcttgagggggcaaagtcagagtcagctgaggagctgaagaagcgggctcaggagctggaggggaagctcaactttctcaccaagatccatgagatgctgcagccaggccaagaccaatgaccccagagcagtgcagccaccagggcagaaatgccgggcacaggccaggacaaaatgcagacttttttttttttttttttttttttttgagatggagtctcgctctatcgcccaggatggagtgcagtggctcaatctcggctcactgcaaactccgcctcccgggttcacaccattctccggcctcagtctcccgagtagctgggactacaggcacctgccaccacgcccggctaatttttttgtattttcactggagacggggtttcactgtgttagccacgatggtctccatctcctgacctcgtgatctgcccacctcggcctcccaaagtgctgggattacaggcgtgagccaccgcgcctggccaaaatgcagacattttattagggggataaggagggcaaggtaaagcttatggaactgagtgttagtgactttggcatttgtgtagctgagcacagcaagggaggggttaatgcagatggcaagtgcaccaaggagaaggcaggaacactggagcctgcaataagggaggagaggggactggagagtgtggggaatgggaagaagtagtttactttggactaaagaatatattgggcgaagaatagagggggagcttgcaggaaccagcaatgagaaggccaggaaaagaaagagctgaaaatggagaaaaccagagttagaactgttggatacaggagaagaaacagcagctccactaccgaccccccccccaggtttgatgtccttccaagaataaagtctttccctggtgatggtctctcgctctgtctttccagcatccactctcccttgtccttctgggggtgtatcacagtcagccagtggcttcttcatgatggtggttggggtggttgtcatgtgacgggtcccctccaggttactaaagggtgcatgtcccctgcttgaaccctgagaggcaggtggtaggccatggccacaatccccagctgaggagcaggtgtccctgagaacccaaacttcccagagagtatctgagaaccaaccaatgaaaacagtcccatcgctcttagccggtaagtaaacagtcagaagattagcatgaaagcagtttagcattgggaggaagcacagatctctagagctgtcctgtcgctgcccaggattgacctgtgtgtaagtcccaataaactcacctactcacca

SEQ ID NO: 323601 - DNA, 2708 bp, Homo sapiens
gcctagggtgtcacagagtgaacaaagcaggaagaaggggaagggaagaccccctcccgtcaccccgtcccttacagcaagaagtgtccagatgcccctctgcatactcccctggtgaactgctgcccaggactgggtcccccttttagtcttgctgcgtaggggccccagaagacagatatctggatgcctcgaccctgaaacagaggtgggaagtggaaagagggaggcgagtggcttttgaggagggggcttttgtataagagctggaggatgcccgggaaccactgagctgttaaaataaagtctgcaaacaaagaccagctgctggaagtgggtgtgccggggagtgcgcagagacacaaggacaagaggaccctgccttggtgtgagagtgagggaagaggaagctggaacgagggttaaggaaaaccttccagtctggacagtgactggagagctccaaggaaagcccctcggtaacccagccgctggcaccatgaacccagagagcagtatctttattgaggattaccttaagtatttccaggaccaagtgagcagagagaatctgctacaactgctgactgatgatgaagcctggaatggattcgtggctgctgctgaactgcccagggatgaggcagatgagctccgtaaagctctgaacaagcttgcaagtcacatggtcatgaaggacaaaaaccgccacgataaagaccagcagcacaggcagtggtttttgaaagagtttcctcggttgaaaagggagcttgaggatcacataaggaagctccgtgcccttgcagaggaggttgagcaggtccacagaggcaccaccattgccaatgtggtgtccaactctgttggcactacctctggcatcctgaccctcctcggcctgggtctggcacccttcacagaaggaatcagttttgtgctcttggacactggcatgggtctgggagcagcagctgctgtggctgggattacctgcagtgtggtagaactagtaaacaaattgcgggcacgagcccaagcccgcaacttggaccaaagcggcaccaatgtagcaaaggtgatgaaggagtttgtgggtgggaacacacccaatgttcttaccttagttgacaattggtaccaagtcacacaagggattgggaggaacatccgtgccatcagacgagccagagccaaccctcagttaggagcgtatgccccacccccgcatgtcattgggcgaatctcagctgaaggcggtgaacaggttgagagggttgttgaaggccccgcccaggcaatgagcagaggaaccatgatcgtgggtgcagccactggaggcatcttgcttctgctggatgtggtcagccttgcatatgagtcaaagcacttgcttgagggggcaaagtcagagtcagctgaggagctgaagaagcgggctcaggagctggaggggaagctcaactttctcaccaagatccatgagatgctgcagccaggccaagaccaatgaccccagagcagtgcagccaccagggcagaaatgccgggcacaggccaggacaaaatgcagacttttttttttttttttttttttttttgagatggagtctcgctctatcgcccaggatggagtgcagtggctcaatctcggctcactgcaaactccgcctcccgggttcacaccattctccggcctcagtctcccgagtagctgggactacaggcacctgccaccacgcccggctaatttttttgtattttcactggagacggggtttcactgtgttagccacgatggtctccatctcctgacctcgtgatctgcccacctcggcctcccaaagtgctgggattacaggcgtgagccaccgcgcctggccaaaatgcagacattttattagggggataaggagggcaaggtaaagcttatggaactgagtgttagtgactttggcatttgtgtagctgagcacagcaagggaggggttaatgcagatggcaagtgcaccaaggagaaggcaggaacactggagcctgcaataagggaggagaggggactggagagtgtggggaatgggaagaagtagtttactttggactaaagaatatattgggcgaagaatagagggggagcttgcaggaaccagcaatgagaaggccaggaaaagaaagagctgaaaatggagaaaaccagagttagaactgttggatacaggagaagaaacagcagctccactaccgaccccccccccaggtttgatgtccttccaagaataaagtctttccctggtgatggtctctcgctctgtctttccagcatccactctcccttgtccttctgggggtgtatcacagtcagccagtggcttcttcatgatggtggttggggtggttgtcatgtgacgggtcccctccaggttactaaagggtgcatgtcccctgcttgaaccctgagaggcaggtggtaggccatggccacaatccccagctgaggagcaggtgtccctgagaacccaaacttcccagagagtatctgagaaccaaccaatgaaaacagtcccatcgctcttagccggtaagtaaacagtcagaagattagcatgaaagcagtttagcattgggaggaagcacagatctctagagctgtcctgtcgctgcccaggattgacctgtgtgtaagtcccaataaactcacctactcacca

SEQ ID NO: 323602 - DNA, 1676 bp, Homo sapiens
tacactaacagcgcgcttggcttgatcttttggctacatgagtcgccatgtatgacaacttcattctcaaagagtagcaggtgtgtacagttttccaagcagcagtcacccaatgtcactcttcttcaagatgaacatccgtgccatcagacgagccagagccaaccctcagttaggagcgtatgccccacccccgcatgtcattgggcgaatctcagctgaaggcggtgaacaggttgagagggttgttgaaggccccgcccaggcaatgagcagaggaaccatgatcgtgggtgcagccactggaggcatcttgcttctgctggatgtggtcagccttgcatatgagtcaaagcacttgcttgagggggcaaagtcagagtcagctgaggagctgaagaagcgggctcaggagctggaggggaagctcaactttctcaccaagatccatgagatgctgcagccaggccaagaccaatgaccccagagcagtgcagccaccagggcagaaatgccgggcacaggccaggacaaaatgcagacttttttttttttttttttttttttttgagatggagtctcgctctatcgcccaggatggagtgcagtggctcaatctcggctcactgcaaactccgcctcccgggttcacaccattctccggcctcagtctcccgagtagctgggactacaggcacctgccaccacgcccggctaatttttttgtattttcactggagacggggtttcactgtgttagccacgatggtctccatctcctgacctcgtgatctgcccacctcggcctcccaaagtgctgggattacaggcgtgagccaccgcgcctggccaaaatgcagacattttattagggggataaggagggcaaggtaaagcttatggaactgagtgttagtgactttggcatttgtgtagctgagcacagcaagggaggggttaatgcagatggcaagtgcaccaaggagaaggcaggaacactggagcctgcaataagggaggagaggggactggagagtgtggggaatgggaagaagtagtttactttggactaaagaatatattgggcgaagaatagagggggagcttgcaggaaccagcaatgagaaggccaggaaaagaaagagctgaaaatggagaaaaccagagttagaactgttggatacaggagaagaaacagcagctccactaccgaccccccccccaggtttgatgtccttccaagaataaagtctttccctggtgatggtctctcgctctgtctttccagcatccactctcccttgtccttctgggggtgtatcacagtcagccagtggcttcttcatgatggtggttggggtggttgtcatgtgacgggtcccctccaggttactaaagggtgcatgtcccctgcttgaaccctgagaggcaggtggtaggccatggccacaatccccagctgaggagcaggtgtccctgagaacccaaacttcccagagagtatctgagaaccaaccaatgaaaacagtcccatcgctcttagccggtaagtaaacagtcagaagattagcatgaaagcagtttagcattgggaggaagcacagatctctagagctgtcctgtcgctgcccaggattgacctgtgtgtaagtcccaataaactcacctactcacca

SEQ ID NO: 323603 - DNA, 1080 bp, Homo sapiens
  misc_feature (47)..(48): n is a, c, g, or t
cttagtgcggacacccgatcggcatagggcaatacagcccagaactnntggactcaagcattctccggcctcagtctcccgagtagctgggactacaggcacctgccaccacgcccggctaatttttttgtattttcactggagacggggtttcactgtgttagccacgatggtctccatctcctgacctcgtgatctgcccacctcggcctcccaaagtgctgggattacaggcgtgagccaccgcgcctggccaaaatgcagacattttattagggggataaggagggcaaggtaaagcttatggaactgagtgttagtgactttggcatttgtgtagctgagcacagcaagggaggggttaatgcagatggcaagtgcaccaaggagaaggcaggaacactggagcctgcaataagggaggagaggggactggagagtgtggggaatgggaagaagtagtttactttggactaaagaatatattgggcgaagaatagagggggagcttgcaggaaccagcaatgagaaggccaggaaaagaaagagctgaaaatggagaaaaccagagttagaactgttggatacaggagaagaaacagcagctccactaccgaccccccccccaggtttgatgtccttccaagaataaagtctttccctggtgatggtctctcgctctgtctttccagcatccactctcccttgtccttctgggggtgtatcacagtcagccagtggcttcttcatgatggtggttggggtggttgtcatgtgacgggtcccctccaggttactaaagggtgcatgtcccctgcttgaaccctgagaggcaggtggtaggccatggccacaatccccagctgaggagcaggtgtccctgagaacccaaacttcccagagagtatctgagaaccaaccaatgaaaacagtcccatcgctcttagccggtaagtaaacagtcagaagattagcatgaaagcagtttagcattgggaggaagcacagatctctagagctgtcctgtcgctgcccaggattgacctgtgtgtaagtcccaataaactcacctactcacca

SEQ ID NO: 323604 - DNA, 537 bp, Homo sapiens
agtggtacccatctcctgtcctgtgtgtgatcatcgaatgagatacatgtcagaggccatgcacatcacagacacacaatacacactggctatcatcaactagttatcatacatgttcccaggcccaggtcattgtcagaatgttccctcccatctctattcctgtgtatagactctgtagtttctgtaatgatcagatggctgcccctcctctgattatcttcttctcatacccctacaggacaagaggaccctgccttggtgtgagagtgagggaagaggaagctggaacgaggtgagtttctgtaaatactagctggcagggccccaggagataaacactctggacatttgctgctaccacagagggatctgcaaagacccagcccctccagcctccctctgtacacaggaggctcaccttcgatcccacaatttgttttctcgttctcaagggttaaggaaaaccttccagtctggacagtgactggagagctccaaggaaagcccctcggtaacccagccgctggcaccatg

SEQ ID NO: 323605 - DNA, 2545 bp, Homo sapiens
gtgctggggagcagcgtgtttactgtgcttggtcatgagctgctgggaagttgtgactttcactttccctttcgaattccagggtatatctgggaggccggaggacgtgtctggttattacacagatgcacagctggacgtgggatccacacagctcagaacagttggatcttgctcagtctctgtcagaggaagatcccttggacaagaggaccctgccttggtgtgagagtgagggaagaggaagctggaacgagggttaaggaaaaccttccagtctggacagtgactggagagctccaaggaaagcccctcggtaacccagccgctggcaccatgaacccagagagcagtatctttattgaggattaccttaagtatttccaggaccaagtgagcagagagaatctgctacaactgctgactgatgatgaagcctggaatggattcgtggctgctgctgaactgcccagggatgaggcagatgagctccgtaaagctctgaacaagcttgcaagtcacatggtcatgaaggacaaaaaccgccacgataaagaccagcagcacaggcagtggtttttgaaagagtttcctcggttgaaaagggagcttgaggatcacataaggaagctccgtgcccttgcagaggaggttgagcaggtccacagaggcaccaccattgccaatgtggtgtccaactctgttggcactacctctggcatcctgaccctcctcggcctgggtctggcacccttcacagaaggaatcagttttgtgctcttggacactggcatgggtctgggagcagcagctgctgtggctgggattacctgcagtgtggtagaactagtaaacaaattgcgggcacgagcccaagcccgcaacttggaccaaagcggcaccaatgtagcaaaggtgatgaaggagtttgtgggtgggaacacacccaatgttcttaccttagttgacaattggtaccaagtcacacaagggattgggaggaacatccgtgccatcagacgagccagagccaaccctcagttaggagcgtatgccccacccccgcatgtcattgggcgaatctcagctgaaggcggtgaacaggttgagagggttgttgaaggccccgcccaggcaatgagcagaggaaccatgatcgtgggtgcagccactggaggcatcttgcttctgctggatgtggtcagccttgcatatgagtcaaagcacttgcttgagggggcaaagtcagagtcagctgaggagctgaagaagcgggctcaggagctggaggggaagctcaactttctcaccaagatccatgagatgctgcagccaggccaagaccaatgaccccagagcagtgcagccaccagggcagaaatgccgggcacaggccaggacaaaatgcagacttttttttttttttttttttttttttgagatggagtctcgctctatcgcccaggatggagtgcagtggctcaatctcggctcactgcaaactccgcctcccgggttcacaccattctccggcctcagtctcccgagtagctgggactacaggcacctgccaccacgcccggctaatttttttgtattttcactggagacggggtttcactgtgttagccacgatggtctccatctcctgacctcgtgatctgcccacctcggcctcccaaagtgctgggattacaggcgtgagccaccgcgcctggccaaaatgcagacattttattagggggataaggagggcaaggtaaagcttatggaactgagtgttagtgactttggcatttgtgtagctgagcacagcaagggaggggttaatgcagatggcaagtgcaccaaggagaaggcaggaacactggagcctgcaataagggaggagaggggactggagagtgtggggaatgggaagaagtagtttactttggactaaagaatatattgggcgaagaatagagggggagcttgcaggaaccagcaatgagaaggccaggaaaagaaagagctgaaaatggagaaaaccagagttagaactgttggatacaggagaagaaacagcagctccactaccgaccccccccccaggtttgatgtccttccaagaataaagtctttccctggtgatggtctctcgctctgtctttccagcatccactctcccttgtccttctgggggtgtatcacagtcagccagtggcttcttcatgatggtggttggggtggttgtcatgtgacgggtcccctccaggttactaaagggtgcatgtcccctgcttgaaccctgagaggcaggtggtaggccatggccacaatccccagctgaggagcaggtgtccctgagaacccaaacttcccagagagtatctgagaaccaaccaatgaaaacagtcccatcgctcttagccggtaagtaaacagtcagaagattagcatgaaagcagtttagcattgggaggaagcacagatctctagagctgtcctgtcgctgcccaggattgacctgtgtgtaagtcccaataaactcacctactcacca

SEQ ID NO: 323606 - DNA, 2327 bp, Homo sapiens
atcagacagtaaaacaggggcagagcctggaattgcactgaggcttgagtctgacttctctcccccacctgctgtgcccttaaactgcagagatcggggcgggggttggggggcaagcggctcagatgggttcaaaaaactccccaggctcaactctggttctgactgcctgagacatgggcagctgacacagcagaccttgaatcctgaggatgtgaggcagggtatatctgggaggccggaggacgtgtctggttattacacagatgcacagctggacgtgggatccacacagctcagaacagttggatcttgctcagtctctgtcagaggaagatcccttggacaagaggaccctgccttggtgtgagagtgagggaagaggaagctggaacgagggttaaggaaaaccttccagtctggacagtgactggagagctccaaggaaagcccctcggtaacccagccgctggcaccatgaacccagagagcagtatctttattgaggattaccttaagtatttccaggaccaagtgagcagagagaatctgctacaactgctgactgatgatgaagcctggaatggattcgtggctgctgctgaactgcccagggatgaggcagatgagctccgtaaagctctgaacaagcttgcaagtcacatggtcatgaaggacaaaaaccgccacgataaagaccagcagcacaggcagtggtttttgaaagagtttcctcggttgaaaagggagcttgaggatcacataaggaagctccgtgcccttgcagaggaggttgagcaggtccacagaggcaccaccattgccaatgtggtgtccaactctgttggcactacctctggcatcctgaccctcctcggcctgggtctggcacccttcacagaaggaatcagttttgtgctcttggacactggcatgggtctgggagcagcagctgctgtggctgggattacctgcagtgtggtagaactagtaaacaaattgcgggcacgagcccaagcccgcaacttggaccaaagcggcaccaatgtagcaaaggtgatgaaggagtttgtgggtgggaacacacccaatgttcttaccttagttgacaattggtaccaagtcacacaagggattgggaggaacatccgtgccatcagacgagccagagccaaccctcagttaggagcgtatgccccacccccgcatgtcattgggcgaatctcagctgaaggcggtgaacaggttgagagggttgttgaaggccccgcccaggcaatgagcagaggaaccatgatcgtgggtgcagccactggaggcatcttgcttctgctggatgtggtcagccttgcatatgagtcaaagcacttgcttgagggggcaaagtcagagtcagctgaggagctgaagaagcgggctcaggagctggaggggaagctcaactttctcaccaagatccatgagatgctgcagccaggccaagaccaatgaccccagagcagtgcagccaccagggcagaaatgccgggcacaggccaggacaaaatgcagacttttttttttttttttttttttttttgagatggagtctcgctctatcgcccaggatggagtgcagtggctcaatctcggctcactgcaaactccgcctcccgggttcacaccattctccggcctcagtctcccgagtagctgggactacaggcacctgccaccacgcccggctaatttttttgtattttcactggagacggggtttcactgtgttagccacgatggtctccatctcctgacctcgtgatctgcccacctcggcctcccaaagtgctgggattacaggcgtgagccaccgcgcctggccaaaatgcagacattttattagggggataaggagggcaaggtaaagcttatggaactgagtgttagtgactttggcatttgtgtagctgagcacagcaagggaggggttaatgcagatggcaagtgcaccaaggagaaggcaggaacactggagcctgcaataagggaggagaggggactggagagtgtggggaatgggaagaagtagtttactttggactaaagaatatattgggcgaagaatagagggggagcttgcaggaaccagcaatgagaaggccaggaaaagaaagagctgaaaatggagaaaaccagagttagaactgttggatacaggagaagaaacagcagctccactaccgaccccccccccaggtttgatgtccttccaagaataaagtctttccctggtaaaaaaaaagtcgagctgccgcgaatttagtactagtagtcgatccccggagact

SEQ ID NO: 323607 - DNA, 1897 bp, Homo sapiens
gaaaaggctccaggcacgatgtagaggatcccccgagcagcgccgtggaagtctgttggcactacctctggcatcctgaccctcctcggcctgggtctggcacccttcacagaaggaatcagttttgtgctcttggacactggcatgggtctgggagcagcagctgctgtggctgggattacctgcagtgtggtagaactagtaaacaaattgcgggcacgagcccaagcccgcaacttggaccaaagcggcaccaatgtagcaaaggtgatgaaggagtttgtgggtgggaacacacccaatgttcttaccttagttgacaattggtaccaagtcacacaagggattgggaggaacatccgtgccatcagacgagccagagccaaccctcagttaggagcgtatgccccacccccgcatgtcattgggcgaatctcagctgaaggcggtgaacaggttgagagggttgttgaaggccccgcccaggcaatgagcagaggaaccatgatcgtgggtgcagccactggaggcatcttgcttctgctggatgtggtcagccttgcatatgagtcaaagcacttgcttgagggggcaaagtcagagtcagctgaggagctgaagaagcgggctcaggagctggaggggaagctcaactttctcaccaagatccatgagatgctgcagccaggccaagaccaatgaccccagagcagtgcagccaccagggcagaaatgccgggcacaggccaggacaaaatgcagacttttttttttttttttttttttttttgagatggagtctcgctctatcgcccaggatggagtgcagtggctcaatctcggctcactgcaaactccgcctcccgggttcacaccattctccggcctcagtctcccgagtagctgggactacaggcacctgccaccacgcccggctaatttttttgtattttcactggagacggggtttcactgtgttagccacgatggtctccatctcctgacctcgtgatctgcccacctcggcctcccaaagtgctgggattacaggcgtgagccaccgcgcctggccaaaatgcagacattttattagggggataaggagggcaaggtaaagcttatggaactgagtgttagtgactttggcatttgtgtagctgagcacagcaagggaggggttaatgcagatggcaagtgcaccaaggagaaggcaggaacactggagcctgcaataagggaggagaggggactggagagtgtggggaatgggaagaagtagtttactttggactaaagaatatattgggcgaagaatagagggggagcttgcaggaaccagcaatgagaaggccaggaaaagaaagagctgaaaatggagaaaaccagagttagaactgttggatacaggagaagaaacagcagctccactaccgaccccccccccaggtttgatgtccttccaagaataaagtctttccctggtgatggtctctcgctctgtctttccagcatccactctcccttgtccttctgggggtgtatcacagtcagccagtggcttcttcatgatggtggttggggtggttgtcatgtgacgggtcccctccaggttactaaagggtgcatgtcccctgcttgaaccctgagaggcaggtggtaggccatggccacaatccccagctgaggagcaggtgtccctgagaacccaaacttcccagagagtatctgagaaccaaccaatgaaaacagtcccatcgctcttagccggtaagtaaacagtcagaagattagcatgaaagcagtttagcattgggaggaagcacagatctctagagctgtcctgtcgctgcccaggattgacctgtgtgtaagtcccaataaactcacctactcacca

SEQ ID NO: 323608 - DNA, 432 bp, Homo sapiens
atcagacagtaaaacaggggcagagcctggaattgcactgaggcttgagtctgacttctctcccccacctgctgtgcccttaaactgcagagatcggggcgggggttggggggcaagcggctcagatgggttcaaaaaactccccaggctcaactctggttctgactgcctgagacatgggcagctgacacagcagaccttgaatcctgaggatgtgaggcagggtatatctgggaggccggaggacgtgtctggttattacacagatgcacagctggacgtgggatccacacagctcagaacagttggatcttgctcagtctctgtcagaggaagatcccttggtaagttggggatagtgtgatctacccccatgtccttattcttgcaatagctctataagggaaggatcattcagcttttgtagataag

SEQ ID NO: 323609 - DNA, 884 bp, Homo sapiens
  misc_feature (555)..(555): n is a, c, g, or t
  misc_feature (569)..(569): n is a, c, g, or t
  misc_feature (589)..(589): n is a, c, g, or t
  misc_feature (600)..(602): n is a, c, g, or t
  misc_feature (607)..(608): n is a, c, g, or t
  misc_feature (611)..(611): n is a, c, g, or t
  misc_feature (614)..(615): n is a, c, g, or t
  misc_feature (627)..(627): n is a, c, g, or t
  misc_feature (629)..(630): n is a, c, g, or t
  misc_feature (633)..(633): n is a, c, g, or t
  misc_feature (654)..(654): n is a, c, g, or t
  misc_feature (662)..(663): n is a, c, g, or t
  misc_feature (665)..(665): n is a, c, g, or t
  misc_feature (764)..(764): n is a, c, g, or t
gtatcaacgcagagtggtcattacggccgggtcagaagaagggaaggtcagcagaggctatgcatgttgtgtgatgatgagtgtttacagccaccttctcctaaaacgaaatttataccggggtggatagtattccattaggtagacttatcgactttgctaagtgctttttagacagcttaaaaaattttcaagattttaaaagatgtataaggttaagtttgcaaatataatggaaatgctgtatatcttttgaagtgatgaaatccacgttggaattttaaagaaaatatgttgtaataatgctgttgtaagtaatattttaatgtctctttgcctgttttctatttcagcacattcattgtggtgaatgttcatagcattataactgcttagccattgaatgataacatttgttagtggaaattggaaaatttatttgtgaaattctgcagaattcatttttctatttccaatatttgctgaggttaaataaaaattttcaagccattgatgtaataaaaaaaaaaaaaaaaaaaaaaattttgggggccnggcccaaaaagttnttaaaaccattctgtggggncgcggggcccnnnggtannggnccnnggccacaagcgngnnccnaggaaacccgggccagaccangggtgggnntnccccaaaaaaacccggggaccggtgttcgaacacacagaaggttcgggggcctacggtctacaacagggccagcatcatacccccccgcagcggggggnaaacaacacacaccagaagcacaacgaaaacacagaagagaaaagagaaggacacgcagagaaacacgcacagaagcaagacacgacacggaaacagagccacaaacaagacaaagaaga

SEQ ID NO: 323610 - DNA, 818 bp, Homo sapiens
gccagtgaagtgagggcggcgatgagagcgaaagttgcgctcggctcgtcgctgggggcttgaagcggctccgcgctctgcccgtttgggcctcccccgactcggactcgcgcccgtgggctcccgccgcgcccgcccggccccgcgccggccccgcgccccctcccccgtctcggcgccccctcctcaggagccgcgggtccccgccactttcgcacggccccggcccccaccgatgccggccatggtggagaagggccccgaggtctcagggaagcggagagggaggaacaacgcggccgcctccgcctccgccgccgccgcctccgccgccgcctcggccgcctgcgcctcgccagccgccactgccgcctcgggcgccgccgcctcctcagcctcggccgccgccgcctcagccgccgccgcccccaataatggccagaataaaagtttggcggcggcggcgcccaatggcaacagcagcagcaactcctgggaggaaggcagctcgggctcgtccagcgacgaggagcacggtggcggtggcatgagggtcggaccccagtaccaggcggtggtgcccgacttcgaccccgccaaactggcaagacgcagtcaagaacgggacaatcttggcatgttggtctgactatgcaatcggaccacttcttatttttggccttgcccccggatttgttcactgggtctttgtctttttggccgactttccagcgtccttcttcttcttgtcgtccttaggcggcattgcgaagctcggagaatagcagcagacaccgcagcctcgtcaagatcctcgt

SEQ ID NO: 323611 - DNA, 6108 bp, Homo sapiens
  misc_feature (5779)..(5779): n is a, c, g, or t
  misc_feature (5793)..(5793): n is a, c, g, or t
  misc_feature (5813)..(5813): n is a, c, g, or t
  misc_feature (5824)..(5826): n is a, c, g, or t
  misc_feature (5831)..(5832): n is a, c, g, or t
  misc_feature (5835)..(5835): n is a, c, g, or t
  misc_feature (5838)..(5839): n is a, c, g, or t
  misc_feature (5851)..(5851): n is a, c, g, or t
  misc_feature (5853)..(5854): n is a, c, g, or t
  misc_feature (5857)..(5857): n is a, c, g, or t
  misc_feature (5878)..(5878): n is a, c, g, or t
  misc_feature (5886)..(5887): n is a, c, g, or t
  misc_feature (5889)..(5889): n is a, c, g, or t
  misc_feature (5988)..(5988): n is a, c, g, or t
gccagtgaagtgagggcggcgatgagagcgaaagttgcgctcggctcgtcgctgggggcttgaagcggctccgcgctctgcccgtttgggcctcccccgactcggactcgcgcccgtgggctcccgccgcgcccgcccggccccgcgccggccccgcgccccctcccccgtctcggcgccccctcctcaggagccgcgggtccccgccactttcgcacggccccggcccccaccgatgccggccatggtggagaagggccccgaggtctcagggaagcggagagggaggaacaacgcggccgcctccgcctccgccgccgccgcctccgccgccgcctcggccgcctgcgcctcgccagccgccactgccgcctcgggcgccgccgcctcctcagcctcggccgccgccgcctcagccgccgccgcccccaataatggccagaataaaagtttggcggcggcggcgcccaatggcaacagcagcagcaactcctgggaggaaggcagctcgggctcgtccagcgacgaggagcacggtggcggtggcatgagggtcggaccccagtaccaggcggtggtgcccgacttcgaccccgccaaactggcaagacgcagtcaagaacgggacaatcttggcatgttggtctggtcacccaatcaaaatctgtcagaagcaaagttggatgaatacattgccattgccaaagaaaagcatgggtacaacatggaacaggctcttgggatgctcttctggcataaacataatatcgaaaagtcattggctgatttgcccaactttacccctttcccagatgagtggactgtggaagataaagtcttatttgagcaagcctttagttttcatgggaaaacttttcatagaatccaacaaatgcttccagataaatctatagcaagtctggtgaaattttactattcttggaagaagacgaggactaaaactagtgtgatggatcgccatgcccggaaacaaaaacgggagcgggaggagagcgaggatgaactggaagaggcaaatggaaacaatcccattgacattgaggttgatcaaaacaaggaaagcaaaaaggaggttccccctactgagacagttcctcaggtcaaaaaagaaaaacatagcacacaagctaaaaatagagcaaaaaggaaacctccaaaaggaatgtttctttctcaagaagatgtggaggctgtttctgccaatgccactgctgctaccacggtgctgagacaactagacatggaattggtttcagtcaaacgacagatccagaatattaaacagacaaacagtgctctcaaagaaaaacttgatggtggaatagaaccatatcgacttccagaggtcattcagaaatgtaatgcacgttggactacagaagagcagcttctcgccgtacaagccatcaggaaatatggccgagattttcaggcaatctcagacgtgattgggaacaaatcagtggtacaagtgaaaaacttttttgtaaattatcgacgccgcttcaacatagatgaagttttacaagaatgggaggcagaacatggtaaagaagagaccaatgggcccagtaaccagaagcctgtgaagtccccagataattccattaagatgcccgaagaggaagacgaggctcctgttctggatgtcagatatgcatctgcctcctgagaaactggtggctttgaacacttggtgtggactactgtgttatccgggatatcaggtattatgagacatcacctagccatctgcatcacatctctctggacaagcagctattaccaaaaaaggcatatacttccagtcctgtgctccatctgccttaattctttgctcgttcctccatgttggcgccacttcccagagagctccactgcatctcacactctgcccacgtgctggggaagtctcacggcctgcacatctcttgtgactctgggaaccgcctctcccgccggagcccccgagccccaccaatggcagctcttcccagtcagcagcttcagagcaggcagtctccttggaaggcccgactctgttcctgcatggcctgcagtttctactttgtgcatagagtcattttcagagtcaccgcgaccctgttggccttctagaaagtttcttttgttcttttctgagacaaccacctaagtgataatacgcttttttggaaactaatatatattgccagactgcatcataacctttatcatgccaagcatcctgatgcaactcacatttccctaaacatggggtacagttatgatttataaattgagttggcttaaatctccctcttctcccttcccaagtgttacaaagatcatttactgcaactgtcgttggacactgtagcttaaagggaacgtggacctcaatgctttctgccttcaacttttcagcattgtgaccccagggtggttgccaccccatcttttcctgaccccccccacccccccacctccaagaggttcggcccacatcactgtacctggtgcttgtaaatttggaattggtgccttctccttttggcaaccatggttatcaatcctttttctgttttagtgtcttatttcttctttcaagttatttgctagccaaagatgacatcactgagattaggagacaggggagagcttgctgcagattctgacagtgcagattttaaatgtcaggatattagaatagctggcgctggtttatgaaagctgcgcgttgttccgcgttctctcggtgtgcctggccttttatgtggcactctgtatgtcagtttgtgtccttcatgtgctgatgtgattacacaaacaccatgcactctcttttcatatcagagtacaggacagagaagtgatcaatgtattggtctagtgagactgagatgaaaagaaataacctacagagtggtctgtaatgccttttggttggactgggaacaagtaaaaatttctaataaacattttgagacttccagaatcacttttgttatcttatcagaccatgggcctgctgagggttgagcagacagcctgcattctaacataccctgttcccaccccacggccattcagactgcactcaatacgctgaagtcgcttttgttgttgttgttgttgtttgcatcatttggatttttttcctgctttcaataccaaaaaaatgcagatgctttaaggcctaaacagaattctgaagaatttaaaatatgcaattaaagtttgatatgttttgtctcccaagcaccttgttttttgttgttgttgttgttgttgaagtcagctgattttctctttagaaagagggtcagctagaaacctaggttttttggaattgtaaatttttttttagtatagtctggagagaaaggtcattcaaaaggaaagtacaatgggacttgctgcccttcatcatctcgttcccgtgccaggtgtgtgttggtcacgtaaaagcctgggaagcatcagaggagtcccggattgctgctgctacctggagacagggttagcaaaataacactagtgatgagggagaggcttcttttcaccataagcctgctgtgtacaccgagggcggcaggagaagcatgggaaggagtcagcctaagtttgcacattgcataaagggtacactaaggtatgagctgaagctttaggttctccgtgcttccctcaagacctccttcttgctaacagaagcagtaggcaattgctgcagtgcgtttctcaccctgccaataggtctgtctgtatctctgttaaggaaaatagcctggtccctcctggcagtgcttggaagcttgatgctaatttttatatagcgtggcaaactgaccagcagtgccaggccttgatctgtattctgcactatccctttacttggttcctggcactgaatggtctccagccctgaagaatcacgtgtgatcacagcagctgacctgggctttctccccgagaggaaggggcatgtcatttttatttgacagagggaaaatgggagctgtccttgactgcctttgttgtgctttcccgcgtaagatagcactgtgttttaaactgttgcattacactgtctttgcaatgatgtaaatgtaagaaatcacttagctttaaaagcgcagtggtttgatcttatttatatgaagactttttaacatatcaagaattaggtgcattggcaggtagggtttggggtgtgataactgcttcagatggaatgttcacttaagctttgtcttcttaaaaattatcaatgtgaatgtcataattatatatatttttgtggaaaattttctcctaagtataagttattgtgcaaaatatagtgtcattgatgcaaataatagtttaacttttagtttagaactcctaaaagatataaattgtattgcatatgcattaaaagtttgttttatttaattttatgtagatgtgtgaagtgttaggtaaaatttttttcacttatccatttaaacaccttgttacttgaatattgtgttgactggtctgcaacagtgatccattctgtaatatagctcttttaactgggaaggaaccacaccccagttgtgccgattacattagtgttggcacacagtcgggtgctagtgtaacacaaatgccgcgttgtctgggtgtacagtgtttgtggagacgccacttcctcaaaatggtttttgattgtttttaacctataagacgttctgatgctcacaaacctctattcaacacacaaaacaaacatgaaaaggtagttagttgggttgtaacagcttactggggtggactcataaaacagtggctttctgttcatctaaagtttcctcagataccacagaccactgttaagtgtgctcattgtcactttaaatttcaacgataccctatttttgtcattctaaatatcagatgtactattggtataattgcacaccaaaaataagccaaacagtgcattacgctaactggatccctgcttttatgtgagctaaggaaagatggagccaactccaacgagggcctctttttctctcttgtctagcctgtttctaaaccgaatgatccaggattcaagcttctattgtcaagtgaaactttcctcagatggactccaggtagccaggtcacctaaacctagtggtcctgtgcgatgctctttctgccagtccctgaatctctgcagcttctcttacctgtcttacctgtagtaaagcacaattgcagtggcgtcgcattcagaagaagggaaggtcagcagaggctatgcatgttgtgtgatgatgagtgtttacagccaccttctcctaaaacgaaatttataccggggtggatagtattccattaggtagacttatcgactttgctaagtgctttttagacagcttaaaaaattttcaagattttaaaagatgtataaggttaagtttgcaaatataatggaaatgctgtatatcttttgaagtgatgaaatccacgttggaattttaaagaaaatatgttgtaataatgctgttgtaagtaatattttaatgtctctttgcctgttttctatttcagcacattcattgtggtgaatgttcatagcattataactgcttagccattgaatgataacatttgttagtggaaattggaaaatttatttgtgaaattctgcagaattcatttttctatttccaatatttgctgaggttaaataaaaattttcaagccattgatgtaataaaaaaaaaaaaaaaaaaaaaaattttgggggccnggcccaaaaagttnttaaaaccattctgtggggncgcggggcccnnnggtannggnccnnggccacaagcgngnnccnaggaaacccgggccagaccangggtgggnntnccccaaaaaaacccggggaccggtgttcgaacacacagaaggttcgggggcctacggtctacaacagggccagcatcatacccccccgcagcggggggnaaacaacacacaccagaagcacaacgaaaacacagaagagaaaagagaaggacacgcagagaaacacgcacagaagcaagacacgacacggaaacagagccacaaacaagacaaagaaga

SEQ ID NO: 323612 - DNA, 5713 bp, Homo sapiens
gccagtgaagtgagggcggcgatgagagcgaaagttgcgctcggctcgtcgctgggggcttgaagcggctccgcgctctgcccgtttgggcctcccccgactcggactcgcgcccgtgggctcccgccgcgcccgcccggccccgcgccggccccgcgccccctcccccgtctcggcgccccctcctcaggagccgcgggtccccgccactttcgcacggccccggcccccaccgatgccggccatggtggagaagggccccgaggtctcagggaagcggagagggaggaacaacgcggccgcctccgcctccgccgccgccgcctccgccgccgcctcggccgcctgcgcctcgccagccgccactgccgcctcgggcgccgccgcctcctcagcctcggccgccgccgcctcagccgccgccgcccccaataatggccagaataaaagtttggcggcggcggcgcccaatggcaacagcagcagcaactcctgggaggaaggcagctcgggctcgtccagcgacgaggagcacggtggcggtggcatgagggtcggaccccagtaccaggcggtggtgcccgacttcgaccccgccaaactggcaagacgcagtcaagaacgggacaatcttggcatgttggtctggtcacccaatcaaaatctgtcagaagcaaagttggatgaatacattgccattgccaaagaaaagcatgggtacaacatggaacaggctcttgggatgctcttctggcataaacataatatcgaaaagtcattggctgatttgcccaactttacccctttcccagatgagtggactgtggaagataaagtcttatttgagcaagcctttagttttcatgggaaaacttttcatagaatccaacaaatgcttccagataaatctatagcaagtctggtgaaattttactattcttggaagaagacgaggactaaaactagtgtgatggatcgccatgcccggaaacaaaaacgggagcgggaggagagcgaggatgaactggaagaggcaaatggaaacaatcccattgacattgaggttgatcaaaacaaggaaagcaaaaaggaggttccccctactgagacagttcctcaggtcaaaaaagaaaaacatagcacacaagctaaaaatagagcaaaaaggaaacctccaaaaggaatgtttctttctcaagaagatgtggaggctgtttctgccaatgccactgctgctaccacggtgctgagacaactagacatggaattggtttcagtcaaacgacagatccagaatattaaacagacaaacagtgctctcaaagaaaaacttgatggtggaatagaaccatatcgacttccagagccatcaggaaatatggccgagattttcaggcaatctcagacgtgattgggaacaaatcagtggtacaagtgaaaaacttttttgtaaattatcgacgccgcttcaacatagatgaagttttacaagaatgggaggcagaacatggtaaagaagagaccaatgggcccagtaaccagaagcctgtgaagtccccagataattccattaagatgcccgaagaggaagacgaggctcctgttctggatgtcagatatgcatctgcctcctgagaaactggtggctttgaacacttggtgtggactactgtgttatccgggatatcaggtattatgagacatcacctagccatctgcatcacatctctctggacaagcagctattaccaaaaaaggcatatacttccagtcctgtgctccatctgccttaattctttgctcgttcctccatgttggcgccacttcccagagagctccactgcatctcacactctgcccacgtgctggggaagtctcacggcctgcacatctcttgtgactctgggaaccgcctctcccgccggagcccccgagccccaccaatggcagctcttcccagtcagcagcttcagagcaggcagtctccttggaaggcccgactctgttcctgcatggcctgcagtttctactttgtgcatagagtcattttcagagtcaccgcgaccctgttggccttctagaaagtttcttttgttcttttctgagacaaccacctaagtgataatacgcttttttggaaactaatatatattgccagactgcatcataacctttatcatgccaagcatcctgatgcaactcacatttccctaaacatggggtacagttatgatttataaattgagttggcttaaatctccctcttctcccttcccaagtgttacaaagatcatttactgcaactgtcgttggacactgtagcttaaagggaacgtggacctcaatgctttctgccttcaacttttcagcattgtgaccccagggtggttgccaccccatcttttcctgaccccccccacccccccacctccaagaggttcggcccacatcactgtacctggtgcttgtaaatttggaattggtgccttctccttttggcaaccatggttatcaatcctttttctgttttagtgtcttatttcttctttcaagttatttgctagccaaagatgacatcactgagattaggagacaggggagagcttgctgcagattctgacagtgcagattttaaatgtcaggatattagaatagctggcgctggtttatgaaagctgcgcgttgttccgcgttctctcggtgtgcctggccttttatgtggcactctgtatgtcagtttgtgtccttcatgtgctgatgtgattacacaaacaccatgcactctcttttcatatcagagtacaggacagagaagtgatcaatgtattggtctagtgagactgagatgaaaagaaataacctacagagtggtctgtaatgccttttggttggactgggaacaagtaaaaatttctaataaacattttgagacttccagaatcacttttgttatcttatcagaccatgggcctgctgagggttgagcagacagcctgcattctaacataccctgttcccaccccacggccattcagactgcactcaatacgctgaagtcgcttttgttgttgttgttgttgtttgcatcatttggatttttttcctgctttcaataccaaaaaaatgcagatgctttaaggcctaaacagaattctgaagaatttaaaatatgcaattaaagtttgatatgttttgtctcccaagcaccttgttttttgttgttgttgttgttgttgaagtcagctgattttctctttagaaagagggtcagctagaaacctaggttttttggaattgtaaatttttttttagtatagtctggagagaaaggtcattcaaaaggaaagtacaatgggacttgctgcccttcatcatctcgttcccgtgccaggtgtgtgttggtcacgtaaaagcctgggaagcatcagaggagtcccggattgctgctgctacctggagacagggttagcaaaataacactagtgatgagggagaggcttcttttcaccataagcctgctgtgtacaccgagggcggcaggagaagcatgggaaggagtcagcctaagtttgcacattgcataaagggtacactaaggtatgagctgaagctttaggttctccgtgcttccctcaagacctccttcttgctaacagaagcagtaggcaattgctgcagtgcgtttctcaccctgccaataggtctgtctgtatctctgttaaggaaaatagcctggtccctcctggcagtgcttggaagcttgatgctaatttttatatagcgtggcaaactgaccagcagtgccaggccttgatctgtattctgcactatccctttacttggttcctggcactgaatggtctccagccctgaagaatcacgtgtgatcacagcagctgacctgggctttctccccgagaggaaggggcatgtcatttttatttgacagagggaaaatgggagctgtccttgactgcctttgttgtgctttcccgcgtaagatagcactgtgttttaaactgttgcattacactgtctttgcaatgatgtaaatgtaagaaatcacttagctttaaaagcgcagtggtttgatcttatttatatgaagactttttaacatatcaagaattaggtgcattggcaggtagggtttggggtgtgataactgcttcagatggaatgttcacttaagctttgtcttcttaaaaattatcaatgtgaatgtcataattatatatatttttgtggaaaattttctcctaagtataagttattgtgcaaaatatagtgtcattgatgcaaataatagtttaacttttagtttagaactcctaaaagatataaattgtattgcatatgcattaaaagtttgttttatttaattttatgtagatgtgtgaagtgttaggtaaaatttttttcacttatccatttaaacaccttgttacttgaatattgtgttgactggtctgcaacagtgatccattctgtaatatagctcttttaactgggaaggaaccacaccccagttgtgccgattacattagtgttggcacacagtcgggtgctagtgtaacacaaatgccgcgttgtctgggtgtacagtgtttgtggagacgccacttcctcaaaatggtttttgattgtttttaacctataagacgttctgatgctcacaaacctctattcaacacacaaaacaaacatgaaaaggtagttagttgggttgtaacagcttactggggtggactcataaaacagtggctttctgttcatctaaagtttcctcagataccacagaccactgttaagtgtgctcattgtcactttaaatttcaacgataccctatttttgtcattctaaatatcagatgtactattggtataattgcacaccaaaaataagccaaacagtgcattacgctaactggatccctgcttttatgtgagctaaggaaagatggagccaactccaacgagggcctctttttctctcttgtctagcctgtttctaaaccgaatgatccaggattcaagcttctattgtcaagtgaaactttcctcagatggactccaggtagccaggtcacctaaacctagtggtcctgtgcgatgctctttctgccagtccctgaatctctgcagcttctcttacctgtcttacctgtagtaaagcacaattgcagtggcgtcgcattcagaagaagggaaggtcagcagaggctatgcatgttgtgtgatgatgagtgtttacagccaccttctcctaaaacgaaatttataccggggtggatagtattccattaggtagacttatcgactttgctaagtgctttttagacagcttaaaaaattttcaagattttaaaagatgtataaggttaagtttgcaaatataatggaaatgctgtatatcttttgaagtgatgaaatccacgttggaattttaaagaaaatatgttgtaataatgctgttgtaagtaatattttaatgtctctttgcctgttttctatttcagcacattcattgtggtgaatgttcatagcattataactgcttagccattgaatgataacatttgttagtggaaattggaaaatttatttgtgaaattctgcagaattcatttttctatttccaatatttgctgaggttaaataaaaattttcaagccattgatgtaataaaatatgaaatgaaagcaaaaaaaaa

SEQ ID NO: 323613 - DNA, 4539 bp, Homo sapiens
acagggtcggtcatctccagaatgtgtctagaattggctggtactttttcctactctaataatacacgaaattattgcctgctgttaaaagcctgtatgttttcttatctggataaagaggtaagtgtcacttgtggttttaaaaaaatgtttttctcttgtattttaaaaaatgctttcttacatccttagccatcaggaaatatggccgagattttcaggcaatctcagacgtgattgggaacaaatcagtggtacaagtgaaaaacttttttgtaaattatcgacgccgcttcaacatagatgaagttttacaagaatgggaggcagaacatggtaaagaagagaccaatgggcccagtaaccagaagcctgtgaagtccccagataattccattaagatgcccgaagaggaagacgaggctcctgttctggatgtcagatatgcatctgcctcctgagaaactggtggctttgaacacttggtgtggactactgtgttatccgggatatcaggtattatgagacatcacctagccatctgcatcacatctctctggacaagcagctattaccaaaaaaggcatatacttccagtcctgtgctccatctgccttaattctttgctcgttcctccatgttggcgccacttcccagagagctccactgcatctcacactctgcccacgtgctggggaagtctcacggcctgcacatctcttgtgactctgggaaccgcctctcccgccggagcccccgagccccaccaatggcagctcttcccagtcagcagcttcagagcaggcagtctccttggaaggcccgactctgttcctgcatggcctgcagtttctactttgtgcatagagtcattttcagagtcaccgcgaccctgttggccttctagaaagtttcttttgttcttttctgagacaaccacctaagtgataatacgcttttttggaaactaatatatattgccagactgcatcataacctttatcatgccaagcatcctgatgcaactcacatttccctaaacatggggtacagttatgatttataaattgagttggcttaaatctccctcttctcccttcccaagtgttacaaagatcatttactgcaactgtcgttggacactgtagcttaaagggaacgtggacctcaatgctttctgccttcaacttttcagcattgtgaccccagggtggttgccaccccatcttttcctgaccccccccacccccccacctccaagaggttcggcccacatcactgtacctggtgcttgtaaatttggaattggtgccttctccttttggcaaccatggttatcaatcctttttctgttttagtgtcttatttcttctttcaagttatttgctagccaaagatgacatcactgagattaggagacaggggagagcttgctgcagattctgacagtgcagattttaaatgtcaggatattagaatagctggcgctggtttatgaaagctgcgcgttgttccgcgttctctcggtgtgcctggccttttatgtggcactctgtatgtcagtttgtgtccttcatgtgctgatgtgattacacaaacaccatgcactctcttttcatatcagagtacaggacagagaagtgatcaatgtattggtctagtgagactgagatgaaaagaaataacctacagagtggtctgtaatgccttttggttggactgggaacaagtaaaaatttctaataaacattttgagacttccagaatcacttttgttatcttatcagaccatgggcctgctgagggttgagcagacagcctgcattctaacataccctgttcccaccccacggccattcagactgcactcaatacgctgaagtcgcttttgttgttgttgttgttgtttgcatcatttggatttttttcctgctttcaataccaaaaaaatgcagatgctttaaggcctaaacagaattctgaagaatttaaaatatgcaattaaagtttgatatgttttgtctcccaagcaccttgttttttgttgttgttgttgttgttgaagtcagctgattttctctttagaaagagggtcagctagaaacctaggttttttggaattgtaaatttttttttagtatagtctggagagaaaggtcattcaaaaggaaagtacaatgggacttgctgcccttcatcatctcgttcccgtgccaggtgtgtgttggtcacgtaaaagcctgggaagcatcagaggagtcccggattgctgctgctacctggagacagggttagcaaaataacactagtgatgagggagaggcttcttttcaccataagcctgctgtgtacaccgagggcggcaggagaagcatgggaaggagtcagcctaagtttgcacattgcataaagggtacactaaggtatgagctgaagctttaggttctccgtgcttccctcaagacctccttcttgctaacagaagcagtaggcaattgctgcagtgcgtttctcaccctgccaataggtctgtctgtatctctgttaaggaaaatagcctggtccctcctggcagtgcttggaagcttgatgctaatttttatatagcgtggcaaactgaccagcagtgccaggccttgatctgtattctgcactatccctttacttggttcctggcactgaatggtctccagccctgaagaatcacgtgtgatcacagcagctgacctgggctttctccccgagaggaaggggcatgtcatttttatttgacagagggaaaatgggagctgtccttgactgcctttgttgtgctttcccgcgtaagatagcactgtgttttaaactgttgcattacactgtctttgcaatgatgtaaatgtaagaaatcacttagctttaaaagcgcagtggtttgatcttatttatatgaagactttttaacatatcaagaattaggtgcattggcaggtagggtttggggtgtgataactgcttcagatggaatgttcacttaagctttgtcttcttaaaaattatcaatgtgaatgtcataattatatatatttttgtggaaaattttctcctaagtataagttattgtgcaaaatatagtgtcattgatgcaaataatagtttaacttttagtttagaactcctaaaagatataaattgtattgcatatgcattaaaagtttgttttatttaattttatgtagatgtgtgaagtgttaggtaaaatttttttcacttatccatttaaacaccttgttacttgaatattgtgttgactggtctgcaacagtgatccattctgtaatatagctcttttaactgggaaggaaccacaccccagttgtgccgattacattagtgttggcacacagtcgggtgctagtgtaacacaaatgccgcgttgtctgggtgtacagtgtttgtggagacgccacttcctcaaaatggtttttgattgtttttaacctataagacgttctgatgctcacaaacctctattcaacacacaaaacaaacatgaaaaggtagttagttgggttgtaacagcttactggggtggactcataaaacagtggctttctgttcatctaaagtttcctcagataccacagaccactgttaagtgtgctcattgtcactttaaatttcaacgataccctatttttgtcattctaaatatcagatgtactattggtataattgcacaccaaaaataagccaaacagtgcattacgctaactggatccctgcttttatgtgagctaaggaaagatggagccaactccaacgagggcctctttttctctcttgtctagcctgtttctaaaccgaatgatccaggattcaagcttctattgtcaagtgaaactttcctcagatggactccaggtagccaggtcacctaaacctagtggtcctgtgcgatgctctttctgccagtccctgaatctctgcagcttctcttacctgtcttacctgtagtaaagcacaattgcagtggcgtcgcattcagaagaagggaaggtcagcagaggctatgcatgttgtgtgatgatgagtgtttacagccaccttctcctaaaacgaaatttataccggggtggatagtattccattaggtagacttatcgactttgctaagtgctttttagacagcttaaaaaattttcaagattttaaaagatgtataaggttaagtttgcaaatataatggaaatgctgtatatcttttgaagtgatgaaatccacgttggaattttaaagaaaatatgttgtaataatgctgttgtaagtaatattttaatgtctctttgcctgttttctatttcagcacattcattgtggtgaatgttcatagcattataactgcttagccattgaatgataacatttgttagtggaaattggaaaatttatttgtgaaattctgcagaattcatttttctatttccaatatttgctgaggttaaataaaaattttcaagccattgatgtaataaaatatgaaatgaaagcaaaaaaaaa

SEQ ID NO: 323614 - DNA, 4442 bp, Homo sapiens
aacacaaaagcggcacccattccaagagaagtactttgcatccattaaccccaagctcctgatccctcccactctctccctttccccctgggcagccatcaggaaatatggccgagattttcaggcaatctcagacgtgattgggaacaaatcagtggtacaagtgaaaaacttttttgtaaattatcgacgccgcttcaacatagatgaagttttacaagaatgggaggcagaacatggtaaagaagagaccaatgggcccagtaaccagaagcctgtgaagtccccagataattccattaagatgcccgaagaggaagacgaggctcctgttctggatgtcagatatgcatctgcctcctgagaaactggtggctttgaacacttggtgtggactactgtgttatccgggatatcaggtattatgagacatcacctagccatctgcatcacatctctctggacaagcagctattaccaaaaaaggcatatacttccagtcctgtgctccatctgccttaattctttgctcgttcctccatgttggcgccacttcccagagagctccactgcatctcacactctgcccacgtgctggggaagtctcacggcctgcacatctcttgtgactctgggaaccgcctctcccgccggagcccccgagccccaccaatggcagctcttcccagtcagcagcttcagagcaggcagtctccttggaaggcccgactctgttcctgcatggcctgcagtttctactttgtgcatagagtcattttcagagtcaccgcgaccctgttggccttctagaaagtttcttttgttcttttctgagacaaccacctaagtgataatacgcttttttggaaactaatatatattgccagactgcatcataacctttatcatgccaagcatcctgatgcaactcacatttccctaaacatggggtacagttatgatttataaattgagttggcttaaatctccctcttctcccttcccaagtgttacaaagatcatttactgcaactgtcgttggacactgtagcttaaagggaacgtggacctcaatgctttctgccttcaacttttcagcattgtgaccccagggtggttgccaccccatcttttcctgaccccccccacccccccacctccaagaggttcggcccacatcactgtacctggtgcttgtaaatttggaattggtgccttctccttttggcaaccatggttatcaatcctttttctgttttagtgtcttatttcttctttcaagttatttgctagccaaagatgacatcactgagattaggagacaggggagagcttgctgcagattctgacagtgcagattttaaatgtcaggatattagaatagctggcgctggtttatgaaagctgcgcgttgttccgcgttctctcggtgtgcctggccttttatgtggcactctgtatgtcagtttgtgtccttcatgtgctgatgtgattacacaaacaccatgcactctcttttcatatcagagtacaggacagagaagtgatcaatgtattggtctagtgagactgagatgaaaagaaataacctacagagtggtctgtaatgccttttggttggactgggaacaagtaaaaatttctaataaacattttgagacttccagaatcacttttgttatcttatcagaccatgggcctgctgagggttgagcagacagcctgcattctaacataccctgttcccaccccacggccattcagactgcactcaatacgctgaagtcgcttttgttgttgttgttgttgtttgcatcatttggatttttttcctgctttcaataccaaaaaaatgcagatgctttaaggcctaaacagaattctgaagaatttaaaatatgcaattaaagtttgatatgttttgtctcccaagcaccttgttttttgttgttgttgttgttgttgaagtcagctgattttctctttagaaagagggtcagctagaaacctaggttttttggaattgtaaatttttttttagtatagtctggagagaaaggtcattcaaaaggaaagtacaatgggacttgctgcccttcatcatctcgttcccgtgccaggtgtgtgttggtcacgtaaaagcctgggaagcatcagaggagtcccggattgctgctgctacctggagacagggttagcaaaataacactagtgatgagggagaggcttcttttcaccataagcctgctgtgtacaccgagggcggcaggagaagcatgggaaggagtcagcctaagtttgcacattgcataaagggtacactaaggtatgagctgaagctttaggttctccgtgcttccctcaagacctccttcttgctaacagaagcagtaggcaattgctgcagtgcgtttctcaccctgccaataggtctgtctgtatctctgttaaggaaaatagcctggtccctcctggcagtgcttggaagcttgatgctaatttttatatagcgtggcaaactgaccagcagtgccaggccttgatctgtattctgcactatccctttacttggttcctggcactgaatggtctccagccctgaagaatcacgtgtgatcacagcagctgacctgggctttctccccgagaggaaggggcatgtcatttttatttgacagagggaaaatgggagctgtccttgactgcctttgttgtgctttcccgcgtaagatagcactgtgttttaaactgttgcattacactgtctttgcaatgatgtaaatgtaagaaatcacttagctttaaaagcgcagtggtttgatcttatttatatgaagactttttaacatatcaagaattaggtgcattggcaggtagggtttggggtgtgataactgcttcagatggaatgttcacttaagctttgtcttcttaaaaattatcaatgtgaatgtcataattatatatatttttgtggaaaattttctcctaagtataagttattgtgcaaaatatagtgtcattgatgcaaataatagtttaacttttagtttagaactcctaaaagatataaattgtattgcatatgcattaaaagtttgttttatttaattttatgtagatgtgtgaagtgttaggtaaaatttttttcacttatccatttaaacaccttgttacttgaatattgtgttgactggtctgcaacagtgatccattctgtaatatagctcttttaactgggaaggaaccacaccccagttgtgccgattacattagtgttggcacacagtcgggtgctagtgtaacacaaatgccgcgttgtctgggtgtacagtgtttgtggagacgccacttcctcaaaatggtttttgattgtttttaacctataagacgttctgatgctcacaaacctctattcaacacacaaaacaaacatgaaaaggtagttagttgggttgtaacagcttactggggtggactcataaaacagtggctttctgttcatctaaagtttcctcagataccacagaccactgttaagtgtgctcattgtcactttaaatttcaacgataccctatttttgtcattctaaatatcagatgtactattggtataattgcacaccaaaaataagccaaacagtgcattacgctaactggatccctgcttttatgtgagctaaggaaagatggagccaactccaacgagggcctctttttctctcttgtctagcctgtttctaaaccgaatgatccaggattcaagcttctattgtcaagtgaaactttcctcagatggactccaggtagccaggtcacctaaacctagtggtcctgtgcgatgctctttctgccagtccctgaatctctgcagcttctcttacctgtcttacctgtagtaaagcacaattgcagtggcgtcgcattcagaagaagggaaggtcagcagaggctatgcatgttgtgtgatgatgagtgtttacagccaccttctcctaaaacgaaatttataccggggtggatagtattccattaggtagacttatcgactttgctaagtgctttttagacagcttaaaaaattttcaagattttaaaagatgtataaggttaagtttgcaaatataatggaaatgctgtatatcttttgaagtgatgaaatccacgttggaattttaaagaaaatatgttgtaataatgctgttgtaagtaatattttaatgtctctttgcctgttttctatttcagcacattcattgtggtgaatgttcatagcattataactgcttagccattgaatgataacatttgttagtggaaattggaaaatttatttgtgaaattctgcagaattcatttttctatttccaatatttgctgaggttaaataaaaattttcaagccattgatgtaataaaatatgaaatgaaagcaaaaaaaaa

SEQ ID NO: 323615 - DNA, 1598 bp, Homo sapiens
gccagtgaagtgagggcggcgatgagagcgaaagttgcgctcggctcgtcgctgggggcttgaagcggctccgcgctctgcccgtttgggcctcccccgactcggactcgcgcccgtgggctcccgccgcgcccgcccggccccgcgccggccccgcgccccctcccccgtctcggcgccccctcctcaggagccgcgggtccccgccactttcgcacggccccggcccccaccgatgccggccatggtggagaagggccccgaggtctcagggaagcggagagggaggaacaacgcggccgcctccgcctccgccgccgccgcctccgccgccgcctcggccgcctgcgcctcgccagccgccactgccgcctcgggcgccgccgcctcctcagcctcggccgccgccgcctcagccgccgccgcccccaataatggccagaataaaagtttggcggcggcggcgcccaatggcaacagcagcagcaactcctgggaggaaggcagctcgggctcgtccagcgacgaggagcacggtggcggtggcatgagggtcggaccccagtaccaggcggtggtgcccgacttcgaccccgccaaactggcaagacgcagtcaagaacgggacaatcttggcatgttggtctggtcacccaatcaaaatctgtcagaagcaaagttggatgaatacattgccattgccaaagaaaagcatgggtacaacatggaacaggctcttgggatgctcttctggcataaacataatatcgaaaagtcattggctgatttgcccaactttacccctttcccagatgagtggactgtggaagataaagtcttatttgagcaagcctttagttttcatgggaaaacttttcatagaatccaacaaatgcttccagataaatctatagcaagtctggtgaaattttactattcttggaagaagacgaggactaaaactagtgtgatggatcgccatgcccggaaacaaaaacgggagcgggaggagagcgaggatgaactggaagaggcaaatggaaacaatcccattgacattgaggttgatcaaaacaaggaaagcaaaaaggaggttccccctactgagacagttcctcaggtcaaaaaagaaaaacatagcacacaagctaaaaatagagcaaaaaggaaacctccaaaaggaatgtttctttctcaagaagatgtggaggctgtttctgccaatgccactgctgctaccacggtgctgagacaactagacatggaattggtttcagtcaaacgacagatccagaatattaaacagacaaacagtgctctcaaagaaaaacttgatggtggaatagaaccatatcgacttccagaggtcattcagaaatgtaatgcacgttggactacagaagagcagcttctcgccgtacaaggtagggggaagttcttctaaagagtttaggaggccggctgtggtggctcacacctgtaatcccaacattttggaaggttgacgcatttgcttgagcccaggagctcaaggctgcattgatccatgatcacaccactgcattccagcctggacaacagagggagaccctgacttt

SEQ ID NO: 323616 - DNA, 319 bp, Homo sapiens
aattttactgatatcatttttgtaggctcttgggatgctcttctggcataaacataatatcgaaaagtcattggctgatttgcccaactttacccctttcccagatgagtggactgtggaagataaagtcttatttgagcaagcctttagttttcatgggaaaacttttcatagaatccaacaaatggtaagtagatgagaccactgagttctattttttttctcctatctaactctcttttgcagcatacttgagatagggatatcatactcaaacataaatattcccatttttgataaagttcccctttagattcag

SEQ ID NO: 323617 - DNA, 5771 bp, Homo sapiens
gccagtgaagtgagggcggcgatgagagcgaaagttgcgctcggctcgtcgctgggggcttgaagcggctccgcgctctgcccgtttgggcctcccccgactcggactcgcgcccgtgggctcccgccgcgcccgcccggccccgcgccggccccgcgccccctcccccgtctcggcgccccctcctcaggagccgcgggtccccgccactttcgcacggccccggcccccaccgatgccggccatggtggagaagggccccgaggtctcagggaagcggagagggaggaacaacgcggccgcctccgcctccgccgccgccgcctccgccgccgcctcggccgcctgcgcctcgccagccgccactgccgcctcgggcgccgccgcctcctcagcctcggccgccgccgcctcagccgccgccgcccccaataatggccagaataaaagtttggcggcggcggcgcccaatggcaacagcagcagcaactcctgggaggaaggcagctcgggctcgtccagcgacgaggagcacggtggcggtggcatgagggtcggaccccagtaccaggcggtggtgcccgacttcgaccccgccaaactggcaagacgcagtcaagaacgggacaatcttggcatgttggtctggtcacccaatcaaaatctgtcagaagcaaagttggatgaatacattgccattgccaaagaaaagcatgggtacaacatggaacaggctcttgggatgctcttctggcataaacataatatcgaaaagtcattggctgatttgcccaactttacccctttcccagatgagtggactgtggaagataaagtcttatttgagcaagcctttagttttcatgggaaaacttttcatagaatccaacaaatgcttccagataaatctatagcaagtctggtgaaattttactattcttggaagaagacgaggactaaaactagtgtgatggatcgccatgcccggaaacaaaaacgggagcgggaggagagcgaggatgaactggaagaggcaaatggaaacaatcccattgacattgaggttgatcaaaacaaggaaagcaaaaaggaggttccccctactgagacagttcctcaggtcaaaaaagaaaaacatagcacacaagctaaaaatagagcaaaaaggaaacctccaaaaggaatgtttctttctcaagaagatgtggaggctgtttctgccaatgccactgctgctaccacggtgctgagacaactagacatggaattggtttcagtcaaacgacagatccagaatattaaacagacaaacagtgctctcaaagaaaaacttgatggtggaatagaaccatatcgacttccagaggtcattcagaaatgtaatgcacgttggactacagaagagcagcttctcgccgtacaagccatcaggaaatatggccgagattttcaggcaatctcagacgtgattgggaacaaatcagtggtacaagtgaaaaacttttttgtaaattatcgacgccgcttcaacatagatgaagttttacaagaatgggaggcagaacatggtaaagaagagaccaatgggcccagtaaccagaagcctgtgaagtccccagataattccattaagatgcccgaagaggaagacgaggctcctgttctggatgtcagatatgcatctgcctcctgagaaactggtggctttgaacacttggtgtggactactgtgttatccgggatatcaggtattatgagacatcacctagccatctgcatcacatctctctggacaagcagctattaccaaaaaaggcatatacttccagtcctgtgctccatctgccttaattctttgctcgttcctccatgttggcgccacttcccagagagctccactgcatctcacactctgcccacgtgctggggaagtctcacggcctgcacatctcttgtgactctgggaaccgcctctcccgccggagcccccgagccccaccaatggcagctcttcccagtcagcagcttcagagcaggcagtctccttggaaggcccgactctgttcctgcatggcctgcagtttctactttgtgcatagagtcattttcagagtcaccgcgaccctgttggccttctagaaagtttcttttgttcttttctgagacaaccacctaagtgataatacgcttttttggaaactaatatatattgccagactgcatcataacctttatcatgccaagcatcctgatgcaactcacatttccctaaacatggggtacagttatgatttataaattgagttggcttaaatctccctcttctcccttcccaagtgttacaaagatcatttactgcaactgtcgttggacactgtagcttaaagggaacgtggacctcaatgctttctgccttcaacttttcagcattgtgaccccagggtggttgccaccccatcttttcctgaccccccccacccccccacctccaagaggttcggcccacatcactgtacctggtgcttgtaaatttggaattggtgccttctccttttggcaaccatggttatcaatcctttttctgttttagtgtcttatttcttctttcaagttatttgctagccaaagatgacatcactgagattaggagacaggggagagcttgctgcagattctgacagtgcagattttaaatgtcaggatattagaatagctggcgctggtttatgaaagctgcgcgttgttccgcgttctctcggtgtgcctggccttttatgtggcactctgtatgtcagtttgtgtccttcatgtgctgatgtgattacacaaacaccatgcactctcttttcatatcagagtacaggacagagaagtgatcaatgtattggtctagtgagactgagatgaaaagaaataacctacagagtggtctgtaatgccttttggttggactgggaacaagtaaaaatttctaataaacattttgagacttccagaatcacttttgttatcttatcagaccatgggcctgctgagggttgagcagacagcctgcattctaacataccctgttcccaccccacggccattcagactgcactcaatacgctgaagtcgcttttgttgttgttgttgttgtttgcatcatttggatttttttcctgctttcaataccaaaaaaatgcagatgctttaaggcctaaacagaattctgaagaatttaaaatatgcaattaaagtttgatatgttttgtctcccaagcaccttgttttttgttgttgttgttgttgttgaagtcagctgattttctctttagaaagagggtcagctagaaacctaggttttttggaattgtaaatttttttttagtatagtctggagagaaaggtcattcaaaaggaaagtacaatgggacttgctgcccttcatcatctcgttcccgtgccaggtgtgtgttggtcacgtaaaagcctgggaagcatcagaggagtcccggattgctgctgctacctggagacagggttagcaaaataacactagtgatgagggagaggcttcttttcaccataagcctgctgtgtacaccgagggcggcaggagaagcatgggaaggagtcagcctaagtttgcacattgcataaagggtacactaaggtatgagctgaagctttaggttctccgtgcttccctcaagacctccttcttgctaacagaagcagtaggcaattgctgcagtgcgtttctcaccctgccaataggtctgtctgtatctctgttaaggaaaatagcctggtccctcctggcagtgcttggaagcttgatgctaatttttatatagcgtggcaaactgaccagcagtgccaggccttgatctgtattctgcactatccctttacttggttcctggcactgaatggtctccagccctgaagaatcacgtgtgatcacagcagctgacctgggctttctccccgagaggaaggggcatgtcatttttatttgacagagggaaaatgggagctgtccttgactgcctttgttgtgctttcccgcgtaagatagcactgtgttttaaactgttgcattacactgtctttgcaatgatgtaaatgtaagaaatcacttagctttaaaagcgcagtggtttgatcttatttatatgaagactttttaacatatcaagaattaggtgcattggcaggtagggtttggggtgtgataactgcttcagatggaatgttcacttaagctttgtcttcttaaaaattatcaatgtgaatgtcataattatatatatttttgtggaaaattttctcctaagtataagttattgtgcaaaatatagtgtcattgatgcaaataatagtttaacttttagtttagaactcctaaaagatataaattgtattgcatatgcattaaaagtttgttttatttaattttatgtagatgtgtgaagtgttaggtaaaatttttttcacttatccatttaaacaccttgttacttgaatattgtgttgactggtctgcaacagtgatccattctgtaatatagctcttttaactgggaaggaaccacaccccagttgtgccgattacattagtgttggcacacagtcgggtgctagtgtaacacaaatgccgcgttgtctgggtgtacagtgtttgtggagacgccacttcctcaaaatggtttttgattgtttttaacctataagacgttctgatgctcacaaacctctattcaacacacaaaacaaacatgaaaaggtagttagttgggttgtaacagcttactggggtggactcataaaacagtggctttctgttcatctaaagtttcctcagataccacagaccactgttaagtgtgctcattgtcactttaaatttcaacgataccctatttttgtcattctaaatatcagatgtactattggtataattgcacaccaaaaataagccaaacagtgcattacgctaactggatccctgcttttatgtgagctaaggaaagatggagccaactccaacgagggcctctttttctctcttgtctagcctgtttctaaaccgaatgatccaggattcaagcttctattgtcaagtgaaactttcctcagatggactccaggtagccaggtcacctaaacctagtggtcctgtgcgatgctctttctgccagtccctgaatctctgcagcttctcttacctgtcttacctgtagtaaagcacaattgcagtggcgtcgcattcagaagaagggaaggtcagcagaggctatgcatgttgtgtgatgatgagtgtttacagccaccttctcctaaaacgaaatttataccggggtggatagtattccattaggtagacttatcgactttgctaagtgctttttagacagcttaaaaaattttcaagattttaaaagatgtataaggttaagtttgcaaatataatggaaatgctgtatatcttttgaagtgatgaaatccacgttggaattttaaagaaaatatgttgtaataatgctgttgtaagtaatattttaatgtctctttgcctgttttctatttcagcacattcattgtggtgaatgttcatagcattataactgcttagccattgaatgataacatttgttagtggaaattggaaaatttatttgtgaaattctgcagaattcatttttctatttccaatatttgctgaggttaaataaaaattttcaagccattgatgtaataaaatatgaaatgaaagcaaaaaaaaa

SEQ ID NO: 323618 - DNA, 5118 bp, Homo sapiens
aatcatatcctagtcctcaatagataattatgagaaaataacatgtaaatgcattttcattttgatattttcagtttacagatatagagcaatagtgttttagatctggattgggaagttaggaatctattttagtagtttctcatcacttagactgaaagaactatggagttggtattctgtttgaattacaaagatgtttttatctcagcagcctgaaaacatactaattttatattaaatcagtttattatttatatttggtaaaattagtacaaaattttcagttaaatcaatttatcgtttgtattcggaaaattagtacaaaataatcattcagtaacttgttcttgtcttccagcgaggatgaactggaagaggcaaatggaaacaatcccattgacattgaggttgatcaaaacaaggaaagcaaaaaggaggttccccctactgagacagttcctcaggtcaaaaaagaaaaacatagcacacaagctaaaaatagagcaaaaaggaaacctccaaaaggaatgtttctttctcaagaagatgtggaggctgtttctgccaatgccactgctgctaccacggtgctgagacaactagacatggaattggtttcagtcaaacgacagatccagaatattaaacagacaaacagtgctctcaaagaaaaacttgatggtggaatagaaccatatcgacttccagaggtcattcagaaatgtaatgcacgttggactacagaagagcagcttctcgccgtacaagccatcaggaaatatggccgagattttcaggcaatctcagacgtgattgggaacaaatcagtggtacaagtgaaaaacttttttgtaaattatcgacgccgcttcaacatagatgaagttttacaagaatgggaggcagaacatggtaaagaagagaccaatgggcccagtaaccagaagcctgtgaagtccccagataattccattaagatgcccgaagaggaagacgaggctcctgttctggatgtcagatatgcatctgcctcctgagaaactggtggctttgaacacttggtgtggactactgtgttatccgggatatcaggtattatgagacatcacctagccatctgcatcacatctctctggacaagcagctattaccaaaaaaggcatatacttccagtcctgtgctccatctgccttaattctttgctcgttcctccatgttggcgccacttcccagagagctccactgcatctcacactctgcccacgtgctggggaagtctcacggcctgcacatctcttgtgactctgggaaccgcctctcccgccggagcccccgagccccaccaatggcagctcttcccagtcagcagcttcagagcaggcagtctccttggaaggcccgactctgttcctgcatggcctgcagtttctactttgtgcatagagtcattttcagagtcaccgcgaccctgttggccttctagaaagtttcttttgttcttttctgagacaaccacctaagtgataatacgcttttttggaaactaatatatattgccagactgcatcataacctttatcatgccaagcatcctgatgcaactcacatttccctaaacatggggtacagttatgatttataaattgagttggcttaaatctccctcttctcccttcccaagtgttacaaagatcatttactgcaactgtcgttggacactgtagcttaaagggaacgtggacctcaatgctttctgccttcaacttttcagcattgtgaccccagggtggttgccaccccatcttttcctgaccccccccacccccccacctccaagaggttcggcccacatcactgtacctggtgcttgtaaatttggaattggtgccttctccttttggcaaccatggttatcaatcctttttctgttttagtgtcttatttcttctttcaagttatttgctagccaaagatgacatcactgagattaggagacaggggagagcttgctgcagattctgacagtgcagattttaaatgtcaggatattagaatagctggcgctggtttatgaaagctgcgcgttgttccgcgttctctcggtgtgcctggccttttatgtggcactctgtatgtcagtttgtgtccttcatgtgctgatgtgattacacaaacaccatgcactctcttttcatatcagagtacaggacagagaagtgatcaatgtattggtctagtgagactgagatgaaaagaaataacctacagagtggtctgtaatgccttttggttggactgggaacaagtaaaaatttctaataaacattttgagacttccagaatcacttttgttatcttatcagaccatgggcctgctgagggttgagcagacagcctgcattctaacataccctgttcccaccccacggccattcagactgcactcaatacgctgaagtcgcttttgttgttgttgttgttgtttgcatcatttggatttttttcctgctttcaataccaaaaaaatgcagatgctttaaggcctaaacagaattctgaagaatttaaaatatgcaattaaagtttgatatgttttgtctcccaagcaccttgttttttgttgttgttgttgttgttgaagtcagctgattttctctttagaaagagggtcagctagaaacctaggttttttggaattgtaaatttttttttagtatagtctggagagaaaggtcattcaaaaggaaagtacaatgggacttgctgcccttcatcatctcgttcccgtgccaggtgtgtgttggtcacgtaaaagcctgggaagcatcagaggagtcccggattgctgctgctacctggagacagggttagcaaaataacactagtgatgagggagaggcttcttttcaccataagcctgctgtgtacaccgagggcggcaggagaagcatgggaaggagtcagcctaagtttgcacattgcataaagggtacactaaggtatgagctgaagctttaggttctccgtgcttccctcaagacctccttcttgctaacagaagcagtaggcaattgctgcagtgcgtttctcaccctgccaataggtctgtctgtatctctgttaaggaaaatagcctggtccctcctggcagtgcttggaagcttgatgctaatttttatatagcgtggcaaactgaccagcagtgccaggccttgatctgtattctgcactatccctttacttggttcctggcactgaatggtctccagccctgaagaatcacgtgtgatcacagcagctgacctgggctttctccccgagaggaaggggcatgtcatttttatttgacagagggaaaatgggagctgtccttgactgcctttgttgtgctttcccgcgtaagatagcactgtgttttaaactgttgcattacactgtctttgcaatgatgtaaatgtaagaaatcacttagctttaaaagcgcagtggtttgatcttatttatatgaagactttttaacatatcaagaattaggtgcattggcaggtagggtttggggtgtgataactgcttcagatggaatgttcacttaagctttgtcttcttaaaaattatcaatgtgaatgtcataattatatatatttttgtggaaaattttctcctaagtataagttattgtgcaaaatatagtgtcattgatgcaaataatagtttaacttttagtttagaactcctaaaagatataaattgtattgcatatgcattaaaagtttgttttatttaattttatgtagatgtgtgaagtgttaggtaaaatttttttcacttatccatttaaacaccttgttacttgaatattgtgttgactggtctgcaacagtgatccattctgtaatatagctcttttaactgggaaggaaccacaccccagttgtgccgattacattagtgttggcacacagtcgggtgctagtgtaacacaaatgccgcgttgtctgggtgtacagtgtttgtggagacgccacttcctcaaaatggtttttgattgtttttaacctataagacgttctgatgctcacaaacctctattcaacacacaaaacaaacatgaaaaggtagttagttgggttgtaacagcttactggggtggactcataaaacagtggctttctgttcatctaaagtttcctcagataccacagaccactgttaagtgtgctcattgtcactttaaatttcaacgataccctatttttgtcattctaaatatcagatgtactattggtataattgcacaccaaaaataagccaaacagtgcattacgctaactggatccctgcttttatgtgagctaaggaaagatggagccaactccaacgagggcctctttttctctcttgtctagcctgtttctaaaccgaatgatccaggattcaagcttctattgtcaagtgaaactttcctcagatggactccaggtagccaggtcacctaaacctagtggtcctgtgcgatgctctttctgccagtccctgaatctctgcagcttctcttacctgtcttacctgtagtaaagcacaattgcagtggcgtcgcattcagaagaagggaaggtcagcagaggctatgcatgttgtgtgatgatgagtgtttacagccaccttctcctaaaacgaaatttataccggggtggatagtattccattaggtagacttatcgactttgctaagtgctttttagacagcttaaaaaattttcaagattttaaaagatgtataaggttaagtttgcaaatataatggaaatgctgtatatcttttgaagtgatgaaatccacgttggaattttaaagaaaatatgttgtaataatgctgttgtaagtaatattttaatgtctctttgcctgttttctatttcagcacattcattgtggtgaatgttcatagcattataactgcttagccattgaatgataacatttgttagtggaaattggaaaatttatttgtgaaattctgcagaattcatttttctatttccaatatttgctgaggttaaataaaaattttcaagccattgatgtaataaaatatgaaatgaaagcaaaaaaaaa

SEQ ID NO: 323619 - DNA, 2996 bp, Homo sapiens
gccagtgaagtgagggcggcgatgagagcgaaagttgcgctcggctcgtcgctgggggcttgaagcggctccgcgctctgcccgtttgggcctcccccgactcggactcgcgcccgtgggctcccgccgcgcccgcccggccccgcgccggccccgcgccccctcccccgtctcggcgccccctcctcaggagccgcgggtccccgccactttcgcacggccccggcccccaccgatgccggccatggtggagaagggccccgaggtctcagggaagcggagagggaggaacaacgcggccgcctccgcctccgccgccgccgcctccgccgccgcctcggccgcctgcgcctcgccagccgccactgccgcctcgggcgccgccgcctcctcagcctcggccgccgccgcctcagccgccgccgcccccaataatggccagaataaaagtttggcggcggcggcgcccaatggcaacagcagcagcaactcctgggaggaaggcagctcgggctcgtccagcgacgaggagcacggtggcggtggcatgagggtcggaccccagtaccaggcggtggtgcccgacttcgaccccgccaaactggcaagacgcagtcaagaacgggacaatcttggcatgttggtctggtcacccaatcaaaatctgtcagaagcaaagttggatgaatacattgccattgccaaagaaaagcatgggtacaacatggaacaggctcttgggatgctcttctggcataaacataatatcgaaaagtcattggctgatttgcccaactttacccctttcccagatgagtggactgtggaagataaagtcttatttgagcaagcctttagttttcatgggaaaacttttcatagaatccaacaaatgcttccagataaatctatagcaagtctggtgaaattttactattcttggaagaagacgaggactaaaactagtgtgatggatcgccatgcccggaaacaaaaacgggagcgggaggagagcgaggatgaactggaagaggcaaatggaaacaatcccattgacattgaggttgatcaaaacaaggaaagcaaaaaggaggttccccctactgagacagttcctcaggtcaaaaaagaaaaacatagcacacaagctaaaaatagagcaaaaaggaaacctccaaaaggaatgtttctttctcaagaagatgtggaggctgtttctgccaatgccactgctgctaccacggtgctgagacaactagacatggaattggtttcagtcaaacgacagatccagaatattaaacagacaaacagtgctctcaaagaaaaacttgatggtggaatagaaccatatcgacttccagaggtcattcagaaatgtaatgcacgttggactacagaagagcagcttctcgccgtacaagccatcaggaaatatggccgagattttcaggcaatctcagacgtgattgggaacaaatcagtggtacaagtgaaaaacttttttgtaaattatcgacgccgcttcaacatagatgaagttttacaagaatgggaggcagaacatggtaaagaagagaccaatgggcccagtaaccagaagcctgtgaagtccccagataattccattaagatgcccgaagaggaagacgaggctcctgttctggatgtcagatatgcatctgcctcctgagaaactggtggctttgaacacttggtgtggactactgtgttatccgggatatcaggtattatgagacatcacctagccatctgcatcacatctctctggacaagcagctattaccaaaaaaggcatatacttccagtcctgtgctccatctgccttaattctttgctcgttcctccatgttggcgccacttcccagagagctccactgcatctcacactctgcccacgtgctggggaagtctcacggcctgcacatctcttgtgactctgggaaccgcctctcccgccggagcccccgagccccaccaatggcagctcttcccagtcagcagcttcagagcaggcagtctccttggaaggcccgactctgttcctgcatggcctgcagtttctactttgtgcatagagtcattttcagagtcaccgcgaccctgttggccttctagaaagtttcttttgttcttttctgagacaaccacctaagtgataatacgcttttttggaaactaatatatattgccagactgcatcataacctttatcatgccaagcatcctgatgcaactcacatttccctaaacatggggtacagttatgatttataaattgagttggcttaaatctccctcttctcccttcccaagtgttacaaagatcatttactgcaactgtcgttggacactgtagcttaaagggaacgtggacctcaatgctttctgccttcaacttttcagcattgtgaccccagggtggttgccaccccatcttttcctgaccccccccacccccccacctccaagaggttcggcccacatcactgtacctggtgcttgtaaatttggaattggtgccttctccttttggcaaccatggttatcaatcctttttctgttttagtgtcttatttcttctttcaagttatttgctagccaaagatgacatcactgagattaggagacaggggagagcttgctgcagattctgacagtgcagattttaaatgtcaggatattagaatagctggcgctggtttatgaaagctgcgcgttgttccgcgttctctcggtgtgcctggccttttatgtggcactctgtatgtcagtttgtgtccttcatgtgctgatgtgattacacaaacaccatgcactctcttttcatatcagagtacaggacagagaagtgatcaatgtattggtctagtgagactgagatgaaaagaaataacctacagagtggtctgtaatgccttttggttggactgggaacaagtaaaaatttctaataaacattttgagacttccag

SEQ ID NO: 323620 - DNA, 1833 bp, Homo sapiens
gccagtgaagtgagggcggcgatgagagcgaaagttgcgctcggctcgtcgctgggggcttgaagcggctccgcgctctgcccgtttgggcctcccccgactcggactcgcgcccgtgggctcccgccgcgcccgcccggccccgcgccggccccgcgccccctcccccgtctcggcgccccctcctcaggagccgcgggtccccgccactttcgcacggccccggcccccaccgatgccggccatggtggagaagggccccgaggtctcagggaagcggagagggaggaacaacgcggccgcctccgcctccgccgccgccgcctccgccgccgcctcggccgcctgcgcctcgccagccgccactgccgcctcgggcgccgccgcctcctcagcctcggccgccgccgcctcagccgccgccgcccccaataatggccagaataaaagtttggcggcggcggcgcccaatggcaacagcagcagcaactcctgggaggaaggcagctcgggctcgtccagcgacgaggagcacggtggcggtggcatgagggtcggaccccagtaccaggcggtggtgcccgacttcgaccccgccaaactggcaagacgcagtcaagaacgggacaatcttggcatgttggtctggtcacccaatcaaaatctgtcagaagcaaagttggatgaatacattgccattgccaaagaaaagcatgggtacaacatggaacaggctcttgggatgctcttctggcataaacataatatcgaaaagtcattggctgatttgcccaactttacccctttcccagatgagtggactgtggaagataaagtcttatttgagcaagcctttagttttcatgggaaaacttttcatagaatccaacaaatgcttccagataaatctatagcaagtctggtgaaattttactattcttggaagaagacgaggactaaaactagtgtgatggatcgccatgcccggaaacaaaaacgggagcgggaggagagcgaggatgaactggaagaggcaaatggaaacaatcccattgacattgaggttgatcaaaacaaggaaagcaaaaaggaggttccccctactgagacagttcctcaggtcaaaaaagaaaaacatagcacacaagctaaaaatagagcaaaaaggaaacctccaaaaggaatgtttctttctcaagaagatgtggaggctgtttctgccaatgccactgctgctaccacggtgctgagacaactagacatggaattggtttcagtcaaacgacagatccagaatattaaacagacaaacagtgctctcaaagaaaaacttgatggtggaatagaaccatatcgacttccagaggtaggattatgttaacatcatcttagaagtcatattcaagttttacatgtttaagaatttaatatcggtgtgatacatccccagtatacatctcttggaagagtatatggacataattttatgaacccagttgatgttaaaattccgataagagaaaatgaaaggttcgttaagctcataaggacatactcatctctaaatgtaatgtgctaaaatgactcatttggatatccaggtcattcagaaatgtaatgcacgttggactacagaagagcagcttctcgccgtacaaggtagggggaagttcttctaaagagtttaggaggccggctgtggtggctcacacctgtaatcccaacattttggaaggttgacgcatttgcttgagcccaggagctcaaggctgcattgatccatgatcacaccactgcattccagcctggacaacagagggagaccctgacttt

SEQ ID NO: 323621 - DNA, 293 bp, Homo sapiens
gcggccgcctactactactactactgctcgaattcaagcttctaacgatgtacggggagctcatggacatcaagtcgcggctggagcaggagattgccacctaccgcagcctgctcgagggacaggaagatcactacaacaatttgtctgcctccaaggtcctctgaggcagcaggctctggggcttctgctgtcctttggagggtgtcttctgggtagagggatgggaaggaagggacccttacccccggctcttctcctgacctgccaataaaaatttatggtccaaggga

SEQ ID NO: 323622 - DNA, 188 bp, Homo sapiens
cggaaattaattgttagggattacgccgaggggggtccccccatgaccccccccaaaaagtaggcagcaggctctggggcttctgctgtcctttggagggtgtcttctgggtagagggatgggaaggaagggacccttacccccggctcttctcctgacctgccaataaaaatttatggtccaaggga

SEQ ID NO: 323623 - DNA, 891 bp, Homo sapiens
gaggggcacgcttcctgacgaaccaccggctttgcctcccggtgcgcccgctggctacccaggcccttcagcaccattggaacttccatgacttcctacagctatcgccagtcgtcggccacgtcgtccttcggaggcctgggcggcggctccgtgcgttttgggccgggggtcgcttttcgcgcgcccagcattcacgggggctccggcggccgcggcgtatccgtgtcctccgcccgctttgtgtcctcgtcctcctcggggggctacggcggcggctacggcggcgtcctgaccgcgtccgacgggctgctggcgggcaacgagaagctaaccatgcagaacctcaacgaccgcctggcctcctacctggacaaggtgcgcgccctggaggcggccaacggcgagctagaggtgaagatccgcgactggtaccagaagcaggggcctgggccctcccgcgactacagccactactacacgaccatccaggacctgcgggacaagattcttggtgccaccattgagaactccaggattgtcctgcagatcgacaacgcccgtctggctgcagatgacttccgaaccaagtttgagacggaacaggctctgcgcatgagcgtggaggccgacatcaacggcctgcgcagggtgctggatgagctgaccctggccaggaccgacctggagatgcagatcgaaggcctgaaggaagagctggcctacctgaagaagaaccatgaggagaaatcagcacactgaggggccaagtggcaggccacgtcagcgcgcaaggcggcaacccgccccgggcacgaacgcccaaaaccgagtgaacatgcgaaccccaagcaggctggccgcaccaaccgcaaggagcacacccggccc

SEQ ID NO: 323624 - DNA, 1052 bp, Homo sapiens
  misc_feature (869)..(869): n is a, c, g, or t
gggctcagatatccgcccctgacaccattcctcccttcccccctccaccggccgcgggcataaaaggcgccaggtgagggcctcgccgctcctcccgcgagcgaatcgcagcttctgagaccaggttgctccgtccgtgctccgcctcgccatgacttcctacagctatcgccagtcgtcggccacgtcgtccttcggaggcctgggcggcggctccgtgcgttttgggccgggggtcgcttttcgcgcgcccagcattcacgggggctccggcggccgcggcgtatccgtgtcctccgcccgctttgtgtcctcgtcctcctcggggggctacggcggcggctacggcggcgtcctgaccgcgtccgacgggctgctggcgggcaacgagaagctaaccatgcagaacctcaacgaccgcctggcctcctacctggacaaggtgcgcgccctggaggcggccaacggcgagctagaggtgaagatccgcgactggtaccagaagcaggggcctgggccctcccgcgactacagccactactacacgaccatccaggacctgcgggacaagattcttggtgccaccattgagaactccaggattgtcctgcagatcgacaacgcccgtctggctgcagatgacttccgaaccaagtttgagacggaacaggctctgcgcatgagcgtggaggccgacatcaacggcctgcgcagggtgctggatgagctgaccctggccaggaccgacctggagatgcagatcgaaggcctgaaggaagagctggcctacctgaagaagaaccatgaggagacctggggggaatcgcgcggggccagggagccgccggggggggaccgccgggccgatncccaaatcggggtggaacccattaggttggcggcgaccgaggggtggcgcgggcaccggtgggaaagaacgggggtgggccgagacctagaagcggtaggcggccaggtggtgaggcaaaaatggccagaagggggccgtcagaaaagaggggacggttagcctaggacccgttagccacgcg

SEQ ID NO: 323625 - DNA, 961 bp, Homo sapiens
gggctcagatatccgcccctgacaccattcctcccttcccccctccaccggccgcgggcataaaaggcgccaggtgagggcctcgccgctcctcccgcgagcgaatcgcagcttctgagaccaggttgctccgtccgtgctccgcctcgccatgacttcctacagctatcgccagtcgtcggccacgtcgtccttcggaggcctgggcggcggctccgtgcgttttgggccgggggtcgcttttcgcgcgcccagcattcacgggggctccggcggccgcggcgtatccgtgtcctccgcccgctttgtgtcctcgtcctcctcggggggctacggcggcggctacggcggcgtcctgaccgcgtccgacgggctgctggcgggcaacgagaagctaaccatgcagaacctcaacgaccgcctggcctcctacctggacaaggtgcgcgccctggaggcggccaacggcgagctagaggtgaagatccgcgactggtaccagaagcaggggcctgggccctcccgcgactacagccactactacacgaccatccaggacctgcgggacaagattcttggtgccaccattgagaactccaggattgtcctgcagatcgacaacgcccgtctggctgcagatgacttccgaaccaagtttgagacggaacaggctctgcgcatgagcgtggaggccgacatcaacggcctgcgcagggtgctggatgagctgaccctggccaggaccgacctggagatgcagatcgaaggcctgaaggaagagctggcctacctgaagaagaaccatgaggagggaatcagtacgtgagggcagtggagccagtcaggggggggggtccgttcgggagattgcagattttgtgattggagcattagttggggaaaggagtgtgaaggttcagggaaaaaaggggtgtggaggaccaaaagggttggggctagt

SEQ ID NO: 323626 - DNA, 1737 bp, Homo sapiens
  misc_feature (17)..(18): n is a, c, g, or t
  misc_feature (1444)..(1444): n is a, c, g, or t
  misc_feature (1454)..(1456): n is a, c, g, or t
  misc_feature (1636)..(1636): n is a, c, g, or t
ttaggtacgaggccggnngttaatcggcacgagggcgaatcgcagcttctgagaccaggttgctccgtccgtgctccgcctcgccatgacttcctacagctatcgccagtcgtcggccacgtcgtccttcggaggcctgggcggcggctccgtgcgttttgggccgggggtcgcttttcgcgcgcccagcattcacgggggctccggcggccgcggcgtatccgtgtcctccgcccgctttgtgtcctcgtcctcctcggggggctacggcggcggctacggcggcgtcctgaccgcgtccgacgggctgctggcgggcaacgagaagctaaccatgcagaacctcaacgaccgcctggcctcctacctggacaaggtgcgcgccctggaggcggccaacggcgagctagaggtgaagatccgcgactggtaccagaagcaggggcctgggccctcccgcgactacagccactactacacgaccatccaggacctgcgggacaagattcttggtgccaccattgagaactccaggattgtcctgcagatcgacaacgcccgtctggctgcagatgacttccgaaccaagtttgagacggaacaggctctgcgcatgagcgtggaggccgacatcaacggcctgcgcagggtgctggatgagctgaccctggccaggaccgacctggagatgcagatcgaaggcctgaaggaagagctggcctacctgaagaagaaccatgaggaggaaatcagtacgctgaggggccaagtgggaggccaggtcagtgtggaggtggattccgctccgggcaccgatctcgccaagatcctgagtgacatgcgaagccaatatgaggtcatggccgagcagaaccggaaggatgctgaagcctggttcaccagccggactgaagaattgaaccgggaggtcgctggccacacggagcagctccagatgagcaggtccgaggttactgacctgcggcgcacccttcagggtcttgagattgagctgcagtcacagctgagcatgaaagctgccttggaagacacactggcagaaacggaggcgcgctttggagcccagctggcgcatatccaggcgctgatcagcggtattgaagcccagctgggcgatgtgcgagctgatagtgagcggcagaatcaggagtaccagcggctcatggacatcaagtcgcggctggagcaggagattgccacctaccgcagcctgctcgagggacaggaagatcactacaacaatttgtctgcctccaaggtcctctgaggcagcaggctctggggcttctgctgtcctttggagggtgtcttctgggtagagggatgggaaggaagggacccttacccccggctcttctcctgacctgccaataaaaatttatggtccaagggaaaaaaaaaaaaaaaaaaaaaaaaaaaaaanccggggtttnnntggggggggggggaaaagggggtatggaaggggccaggggccataagtggttccggggcgcccaggttttcttgtgtccaaccgggcgcgaaactgcggggggcccccaatagggggagggggaataaaatacgagaaaccgcagggtaaccgctggttatgagcttcgcggcgagaaanaaatcacaaacccgaccgcacatacacagcccagccacacaccagaacataacacaacacaacataaaccaatattaccgagagctaccctagacaaagaa

SEQ ID NO: 323627 - DNA, 1647 bp, Homo sapiens
  misc_feature (17)..(18): n is a, c, g, or t
ttaggtacgaggccggnngttaatcggcacgagggcgaatcgcagcttctgagaccaggttgctccgtccgtgctccgcctcgccatgacttcctacagctatcgccagtcgtcggccacgtcgtccttcggaggcctgggcggcggctccgtgcgttttgggccgggggtcgcttttcgcgcgcccagcattcacgggggctccggcggccgcggcgtatccgtgtcctccgcccgctttgtgtcctcgtcctcctcggggggctacggcggcggctacggcggcgtcctgaccgcgtccgacgggctgctggcgggcaacgagaagctaaccatgcagaacctcaacgaccgcctggcctcctacctggacaaggtgcgcgccctggaggcggccaacggcgagctagaggtgaagatccgcgactggtaccagaagcaggggcctgggccctcccgcgactacagccactactacacgaccatccaggacctgcgggacaagattcttggtgccaccattgagaactccaggattgtcctgcagatcgacaacgcccgtctggctgcagatgacttccgaaccaagtttgagacggaacaggctctgcgcatgagcgtggaggccgacatcaacggcctgcgcagggtgctggatgagctgaccctggccaggaccgacctggagatgcagatcgaaggcctgaaggaagagctggcctacctgaagaagaaccatgaggaggaaatcagtacgctgaggggccaagtgggaggccaggtcagtgtggaggtggattccgctccgggcaccgatctcgccaagatcctgagtgacatgcgaagccaatatgaggtcatggccgagcagaaccggaaggatgctgaagcctggttcaccagccggactgaagaattgaaccgggaggtcgctggccacacggagcagctccagatgagcaggtccgaggttactgacctgcggcgcacccttcagggtcttgagattgagctgcagtcacagctgagcatgaaagctgccttggaagacacactggcagaaacggaggcgcgctttggagcccagctggcgcatatccaggcgctgatcagcggtattgaagcccagctgggcgatgtgcgagctgatagtgagcggcagaatcaggagtaccagcggctcatggacatcaagtcgcggctggagcaggagattgccacctaccgcagcctgctcgagggacaggaagatcactacaacaatttgtctgcctccaaggtcctctgaggcagcaggctctggggcttctgctgtcctttggagggtgtcttctgggtagagggatgggaaggaagggacccttacccccggctcttctcctgacctgccaataaaaatttatggtccaagggaaggaaggacgtttggtttattatttcagcccatggagagaataggtcgttcggtttgttatttgagcccatggagagatgggtcctgccttggccctgtttaggttttatttgaaccaaagttcactctgtcccaggaaagggaggggagggtactcacatactttgcctgtaatggtaattcctgtttacagaagtcttcatttatttaacccgttccttaaaataacctca

SEQ ID NO: 323628 - DNA, 1514 bp, Homo sapiens
  misc_feature (17)..(18): n is a, c, g, or t
ttaggtacgaggccggnngttaatcggcacgagggcgaatcgcagcttctgagaccaggttgctccgtccgtgctccgcctcgccatgacttcctacagctatcgccagtcgtcggccacgtcgtccttcggaggcctgggcggcggctccgtgcgttttgggccgggggtcgcttttcgcgcgcccagcattcacgggggctccggcggccgcggcgtatccgtgtcctccgcccgctttgtgtcctcgtcctcctcggggggctacggcggcggctacggcggcgtcctgaccgcgtccgacgggctgctggcgggcaacgagaagctaaccatgcagaacctcaacgaccgcctggcctcctacctggacaaggtgcgcgccctggaggcggccaacggcgagctagaggtgaagatccgcgactggtaccagaagcaggggcctgggccctcccgcgactacagccactactacacgaccatccaggacctgcgggacaagattcttggtgccaccattgagaactccaggattgtcctgcagatcgacaacgcccgtctggctgcagatgacttccgaaccaagtttgagacggaacaggctctgcgcatgagcgtggaggccgacatcaacggcctgcgcagggtgctggatgagctgaccctggccaggaccgacctggagatgcagatcgaaggcctgaaggaagagctggcctacctgaagaagaaccatgaggaggaaatcagtacgctgaggggccaagtgggaggccaggtcagtgtggaggtggattccgctccgggcaccgatctcgccaagatcctgagtgacatgcgaagccaatatgaggtcatggccgagcagaaccggaaggatgctgaagcctggttcaccagccggactgaagaattgaaccgggaggtcgctggccacacggagcagctccagatgagcaggtccgaggttactgacctgcggcgcacccttcagggtcttgagattgagctgcagtcacagctgagcatgaaagctgccttggaagacacactggcagaaacggaggcgcgctttggagcccagctggcgcatatccaggcgctgatcagcggtattgaagcccagctgggcgatgtgcgagctgatagtgagcggcagaatcaggagtaccagcggctcatggacatcaagtcgcggctggagcaggagattgccacctaccgcagcctgctcgagggacaggaagatcactacaacaatttgtctgcctccaaggtcctctgaggcagcaggctctggggcttctgctgtcctttggagggtgtcttctgggtagagggatgggaaggaagcgaggacttaccggttttctgactgcataaatttgtccggaaaaaaaaaaaaaaaacagcggcttgggggcaaagaaggcaggtaggtcgcatttaaggggggctgagtatagtcattagaagaagataagacgaaaaaaaaagaaaagaaaccacca

SEQ ID NO: 323629 - DNA, 1440 bp, Homo sapiens
  misc_feature (17)..(18): n is a, c, g, or t
ttaggtacgaggccggnngttaatcggcacgagggcgaatcgcagcttctgagaccaggttgctccgtccgtgctccgcctcgccatgacttcctacagctatcgccagtcgtcggccacgtcgtccttcggaggcctgggcggcggctccgtgcgttttgggccgggggtcgcttttcgcgcgcccagcattcacgggggctccggcggccgcggcgtatccgtgtcctccgcccgctttgtgtcctcgtcctcctcggggggctacggcggcggctacggcggcgtcctgaccgcgtccgacgggctgctggcgggcaacgagaagctaaccatgcagaacctcaacgaccgcctggcctcctacctggacaaggtgcgcgccctggaggcggccaacggcgagctagaggtgaagatccgcgactggtaccagaagcaggggcctgggccctcccgcgactacagccactactacacgaccatccaggacctgcgggacaagattcttggtgccaccattgagaactccaggattgtcctgcagatcgacaacgcccgtctggctgcagatgacttccgaaccaagtttgagacggaacaggctctgcgcatgagcgtggaggccgacatcaacggcctgcgcagggtgctggatgagctgaccctggccaggaccgacctggagatgcagatcgaaggcctgaaggaagagctggcctacctgaagaagaaccatgaggaggaaatcagtacgctgaggggccaagtgggaggccaggtcagtgtggaggtggattccgctccgggcaccgatctcgccaagatcctgagtgacatgcgaagccaatatgaggtcatggccgagcagaaccggaaggatgctgaagcctggttcaccagccggactgaagaattgaaccgggaggtcgctggccacacggagcagctccagatgagcaggtccgaggttactgacctgcggcgcacccttcagggtcttgagattgagctgcagtcacagctgagcatgaaagctgccttggaagacacactggcagaaacggaggcgcgctttggagcccagctggcgcatatccaggcgctgatcagcggtattgaagcccagcgctcatggacatcaagtcgcggctggagcaggagattgccacctaccgcagcctgctcgagggacaggaagatcactacaacaatttgtctgcctccaaggtcctctgaggcagcaggctctggggcttctgctgtcctttggagggtgtctcgaggacttaccggttttctgactgcataaatttgtccggaaaaaaaaaaaaaaaacagcggcttgggggcaaagaaggcaggtaggtcgcatttaaggggggctgagtatagtcattagaagaagataagacgaaaaaaaaagaaaagaaaccacca

SEQ ID NO: 323630 - DNA, 1271 bp, Homo sapiens
  misc_feature (17)..(18): n is a, c, g, or t
ttaggtacgaggccggnngttaatcggcacgagggcgaatcgcagcttctgagaccaggttgctccgtccgtgctccgcctcgccatgacttcctacagctatcgccagtcgtcggccacgtcgtccttcggaggcctgggcggcggctccgtgcgttttgggccgggggtcgcttttcgcgcgcccagcattcacgggggctccggcggccgcggcgtatccgtgtcctccgcccgctttgtgtcctcgtcctcctcggggggctacggcggcggctacggcggcgtcctgaccgcgtccgacgggctgctggcgggcaacgagaagctaaccatgcagaacctcaacgaccgcctggcctcctacctggacaaggtgcgcgccctggaggcggccaacggcgagctagaggtgaagatccgcgactggtaccagaagcaggggcctgggccctcccgcgactacagccactactacacgaccatccaggacctgcgggacaagattcttggtgccaccattgagaactccaggattgtcctgcagatcgacaacgcccgtctggctgcagatgacttccgaaccaagtttgagacggaacaggctctgcgcatgagcgtggaggccgacatcaacggcctgcgcagggtgctggatgagctgaccctggccaggaccgacctggagatgcagatcgaaggcctgaaggaagagctggcctacctgaagaagaaccatgaggaggaaatcagtacgctgaggggccaagtgggaggccaggtcagtgtggaggtggattccgctccgggcaccgatctcgccaagatcctgagtgacatgcgaagccaatatgaggtcatggccgagcagaaccggaaggatgctgaagcctggttcaccagccggactgaagaattgaaccgggaggtcgctggccacacggagcagctccagatgagcaggtccgaggttactgacctgcggcgcacccttcagggtcttgagattgagctgcagtcacagctgagcatgaaagctgccttggaagacacactggcagaaacggaggattgccacctaccgcagcctgctcgagggacaggaagatcactacaacaatttgtctgcctccaaggtcctctgaggcagcaggctctggggcttctgctgtcctttggagggtgtcttctgggtagagggatgggaaggaagggacccttacccccggctcttctcctgacctgccaataaaaatttatggtccaaggga

SEQ ID NO: 323631 - DNA, 1106 bp, Homo sapiens
  misc_feature (17)..(18): n is a, c, g, or t
  misc_feature (1070)..(1070): n is a, c, g, or t
ttaggtacgaggccggnngttaatcggcacgagggcgaatcgcagcttctgagaccaggttgctccgtccgtgctccgcctcgccatgacttcctacagctatcgccagtcgtcggccacgtcgtccttcggaggcctgggcggcggctccgtgcgttttgggccgggggtcgcttttcgcgcgcccagcattcacgggggctccggcggccgcggcgtatccgtgtcctccgcccgctttgtgtcctcgtcctcctcggggggctacggcggcggctacggcggcgtcctgaccgcgtccgacgggctgctggcgggcaacgagaagctaaccatgcagaacctcaacgaccgcctggcctcctacctggacaaggtgcgcgccctggaggcggccaacggcgagctagaggtgaagatccgcgactggtaccagaagcaggggcctgggccctcccgcgactacagccactactacacgaccatccaggacctgcgggacaagattcttggtgccaccattgagaactccaggattgtcctgcagatcgacaacgcccgtctggctgcagatgacttccgaaccaagtttgagacggaacaggctctgcgcatgagcgtggaggccgacatcaacggcctgcgcagggtgctggatgagctgaccctggccaggaccgacctggagatgcagatcgaaggcctgaaggaagagctggcctacctgaagaagaaccatgaggaggaaatcagtacgctgaggggccaagtgggaggccaggtcagtgtggaggtggattccgctccgggcaccgatctcgccaagatcctgagtgacatgcgaagccaatatgaggtcatggccgagcagaaccggaaggatgctgaagcctggttcaccagccggactgaagaattgaaccgggaggtcgctggccacacggagcagctccagatgagcaggtccgaggttactgacctgcggcgcacccttcagggtcttgagattgagctgcagtcacagctgagcatgaaagctgccttggaagacacactggcagatccgcttntccgtcgacggatagcggatctgcatcgctttcatc

SEQ ID NO: 323632 - DNA, 1526 bp, Homo sapiens
  misc_feature (17)..(18): n is a, c, g, or t
ttaggtacgaggccggnngttaatcggcacgagggcgaatcgcagcttctgagaccaggttgctccgtccgtgctccgcctcgccatgacttcctacagctatcgccagtcgtcggccacgtcgtccttcggaggcctgggcggcggctccgtgcgttttgggccgggggtcgcttttcgcgcgcccagcattcacgggggctccggcggccgcggcgtatccgtgtcctccgcccgctttgtgtcctcgtcctcctcggggggctacggcggcggctacggcggcgtcctgaccgcgtccgacgggctgctggcgggcaacgagaagctaaccatgcagaacctcaacgaccgcctggcctcctacctggacaaggtgcgcgccctggaggcggccaacggcgagctagaggtgaagatccgcgactggtaccagaagcaggggcctgggccctcccgcgactacagccactactacacgaccatccaggacctgcgggacaagattcttggtgccaccattgagaactccaggattgtcctgcagatcgacaacgcccgtctggctgcagatgacttccgaaccaagtttgagacggaacaggctctgcgcatgagcgtggaggccgacatcaacggcctgcgcagggtgctggatgagctgaccctggccaggaccgacctggagatgcagatcgaaggcctgaaggaagagctggcctacctgaagaagaaccatgaggaggaaatcagtacgctgaggggccaagtgggaggccaggtcagtgtggaggtggattccgctccgggcaccgatctcgccaagatcctgagtgacatgcgaagccaatatgaggtcatggccgagcagaaccggaaggatgctgaagcctggttcaccagccgggggtaggtagagggaagcaggcaccctttgggggttaggaaggggagggcttggtgttccctacgcgaaggtctgactcaatgcttattccctcttcttcctctctctgcagactgaagaattgaaccgggaggtcgctggccacacggagcagctccagatgagcaggtccgaggttactgacctgcggcgcacccttcagggtcttgagattgagctgcagtcacagctgagcatgaaagctgccttggaagacacactggcagaaacggaggcgcgctttggagcccagctggcgcatatccaggcgctgatcagcggtattgaagcccagctgggcgatgtgcgagctgatagtgagcggcagaatcaggagtaccagcggctcatggacatcaagtcgcggctggagcaggagattgccacctaccgcagcctgctcgagggacaggaagatcactacaacaatttgtctgcctccaaggtcctctgaggcagcaggctctggggcttctgctgtcctttggagggtgtcttctgggtagagggatgggaaggaagggacccttacccccggctcttctcctgacctgccaataaaaatttatggtccaaggga

SEQ ID NO: 323633 - DNA, 997 bp, Homo sapiens
  misc_feature (17)..(18): n is a, c, g, or t
ttaggtacgaggccggnngttaatcggcacgagggcgaatcgcagcttctgagaccaggttgctccgtccgtgctccgcctcgccatgacttcctacagctatcgccagtcgtcggccacgtcgtccttcggaggcctgggcggcggctccgtgcgttttgggccgggggtcgcttttcgcgcgcccagcattcacgggggctccggcggccgcggcgtatccgtgtcctccgcccgctttgtgtcctcgtcctcctcggggggctacggcggcggctacggcggcgtcctgaccgcgtccgacgggctgctggcgggcaacgagaagctaaccatgcagaacctcaacgaccgcctggcctcctacctggacaaggtgcgcgccctggaggcggccaacggcgagctagaggtgaagatccgcgactggtaccagaagcaggggcctgggccctcccgcgactacagccactactacacgaccatccaggacctgcgggacaagattcttggtgccaccattgagaactccaggattgtcctgcagatcgacaacgcccgtctggctgcagatgacttccgaaccaagtttgagacggaacaggctctgcgcatgagcgtggaggccgacatcaacggcctgcgcagggtgctggatgagctgaccctggccaggaccgacctggagatgcagatcgaaggcctgaaggaagagctggcctacctgaagaagaaccatgaggaggaaatcagtacgctgaggggccaagtgggaggccaggtcagtgtggaggtggattccgctccgggcaccgatctcgccaagatcctgagtgacatgcgaagccaatatgaggtcatggccgagcagaaccggaaggatgctgaagcctggttcaccagccggagcggatggaaaatgaccgggggtgcgtgggcccggaggaccgaataagcgccgggttggcgggggcccccggtgtgaagggggccgtgc

SEQ ID NO: 323634 - DNA, 1306 bp, Homo sapiens
  misc_feature (17)..(18): n is a, c, g, or t
ttaggtacgaggccggnngttaatcggcacgagggcgaatcgcagcttctgagaccaggttgctccgtccgtgctccgcctcgccatgacttcctacagctatcgccagtcgtcggccacgtcgtccttcggaggcctgggcggcggctccgtgcgttttgggccgggggtcgcttttcgcgcgcccagcattcacgggggctccggcggccgcggcgtatccgtgtcctccgcccgctttgtgtcctcgtcctcctacctggacaaggtgcgcgccctggaggcggccaacggcgagctagaggtgaagatccgcgactggtaccagaagcaggggcctgggccctcccgcgactacagccactactacacgaccatccaggacctgcgggacaagattcttggtgccaccattgagaactccaggattgtcctgcagatcgacaacgcccgtctggctgcagatgacttccgaaccaagtttgagacggaacaggctctgcgcatgagcgtggaggccgacatcaacggcctgcgcagggtgctggatgagctgaccctggccaggaccgacctggagatgcagatcgaaggcctgaaggaagagctggcctacctgaagaagaaccatgaggaggaaatcagtacgctgaggggccaagtgggaggccaggtcagtgtggaggtggattccgctccgggcaccgatctcgccaagatcctgagtgacatgcgaagccaatatgaggtcatggccgagcagaaccggaaggatgctgaagcctggttcaccagccggactgaagaattgaaccgggaggtcgctggccacacggagcagctccagatgagcaggtccgaggttactgacctgcggcgcacccttcagggtcttgagattgagctgcagtcacagctgagcatgaaagctgccttggaagacacactggcagaaacggaggcgcgctttggagcccagctggcgcatatccaggcgctgatcagcggtattgaagcccagctgggcgatgtgcgagctgatagtgagcggcagaatcaggagtaccagcggctcatggacatcaagtcgcggctggagcaggagattgccacctaccgcagcctgctcgagggacaggaagatcactacaacaatttgtctgcctccaaggtcctctgaggcagcaggctctggggcttctgctgtcctttggagggtgtcttctgggtagagggatgggaaggaagggacccttacccccggctcttctcctgacctgccaataaaaatttatggtccaaggga

SEQ ID NO: 323635 - DNA, 1098 bp, Homo sapiens
  misc_feature (17)..(18): n is a, c, g, or t
ttaggtacgaggccggnngttaatcggcacgagggcgaatcgcagcttctgagaccaggttgctccgtccgtgctccgcctcgcggcgagctagaggtgaagatccgcgactggtaccagaagcaggggcctgggccctcccgcgactacagccactactacacgaccatccaggacctgcgggacaagattcttggtgccaccattgagaactccaggattgtcctgcagatcgacaacgcccgtctggctgcagatgacttccgaaccaagtttgagacggaacaggctctgcgcatgagcgtggaggccgacatcaacggcctgcgcagggtgctggatgagctgaccctggccaggaccgacctggagatgcagatcgaaggcctgaaggaagagctggcctacctgaagaagaaccatgaggaggaaatcagtacgctgaggggccaagtgggaggccaggtcagtgtggaggtggattccgctccgggcaccgatctcgccaagatcctgagtgacatgcgaagccaatatgaggtcatggccgagcagaaccggaaggatgctgaagcctggttcaccagccggactgaagaattgaaccgggaggtcgctggccacacggagcagctccagatgagcaggtccgaggttactgacctgcggcgcacccttcagggtcttgagattgagctgcagtcacagctgagcatgaaagctgccttggaagacacactggcagaaacggaggcgcgctttggagcccagctggcgcatatccaggcgctgatcagcggtattgaagcccagctgggcgatgtgcgagctgatagtgagcggcagaatcaggagtaccagcggctcatggacatcaagtcgcggctggagcaggagattgccacctaccgcagcctgctcgagggacaggaagatcactacaacaatttgtctgcctccaaggtcctctgaggcagcaggctctggggcttctgctgtcctttggagggtgtcttctgggtagagggatgggaaggaagggacccttacccccggctcttctcctgacctgccaataaaaatttatggtccaaggga

SEQ ID NO: 323636 - DNA, 1720 bp, Homo sapiens
  misc_feature (17)..(18): n is a, c, g, or t
ttaggtacgaggccggnngttaatcggcacgagggcgaatcgcagcttctgagaccaggttgctccgtccgtgctccgcctcgccatgacttcctacagctatcgccagtcgtcggccacgtcgtccttcggaggcctgggcggcggctccgtgcgttttgggccgggggtcgcttttcgcgcgcccagcattcacgggggctccggcggccgcggcgtatccgtgtcctccgcccgctttgtgtcctcgtcctcctcggggggctacggcggcggctacggcggcgtcctgaccgcgtccgacgggctgctggcgggcaacgagaagctaaccatgcagaacctcaacgaccgcctggcctcctacctggacaaggtgcgcgccctggaggcggccaacggcgagctagaggtgaagatccgcgactggtaccagaagcaggggcctgggccctcccgcgactacagccactactacacgaccatccaggacctgcgggacaagattcttggtgccaccattgagaactccaggattgtcctgcagatcgacaacgcccgtctggctgcagatgacttccgaaccaagtttgagacggaacaggctctgcgcatgagcgtggaggccgacatcaacggcctgcgcagggtgctggatgagctgaccctggccaggaccgacctggagatgcagatcgaaggcctgaaggaagagctggcctacctgaagaagaaccatgaggagggaggtgggtttgaagctgggcctttcttccatccttccctaacctcccagggctgaagactcttttattctgtattctctgaccgtggtaacacttggtgcaccctcaccatggccctgggtgtgggatcatggatcccagggttccaagaggaatcagtgacgacccagtctgtcccccagtgctagttactaggcctgcacctgaaaactaagcccctttagcctgaagggtggggaagtgacctgggccaggcccagtggggtctgggccctgacatgcccatctctgctgtatcttttcaggaaatcagtacgctgaggggccaagtgggaggccaggtcagtgtggaggtggattccgctccgggcaccgatctcgccaagatcctgagtgacatgcgaagccaatatgaggtcatggccgagcagaaccggaaggatgctgaagcctggttcaccagccggactgaagaattgaaccgggaggtcgctggccacacggagcagctccagatgagcaggtccgaggttactgacctgcggcgcacccttcagggtcttgagattgagctgcagtcacagctgagcatgaaagctgccttggaagacacactggcagaaacggaggcgcgctttggagcccagctggcgcatatccaggcgctgatcagcggtattgaagcccagctgggcgatgtgcgagctgatagtgagcggcagaatcaggagtaccagcggctcatggacatcaagtcgcggctggagcaggagattgccacctaccgcagcctgctcgagggacaggaagatcactacaacaatttgtctgcctccaaggtcctctgaggcagcaggctctggggcttctgctgtcctttggagggtgtcttctgggtagagggatgggaaggaagggacccttacccccggctcttctcctgacctgccaataaaaatttatggtccaaggga

SEQ ID NO: 323637 - DNA, 1605 bp, Homo sapiens
  misc_feature (17)..(18): n is a, c, g, or t
ttaggtacgaggccggnngttaatcggcacgagggcgaatcgcagcttctgagaccaggttgctccgtccgtgctccgcctcgccatgacttcctacagctatcgccagtcgtcggccacgtcgtccttcggaggcctgggcggcggctccgtgcgttttgggccgggggtcgcttttcgcgcgcccagcattcacgggggctccggcggccgcggcgtatccgtgtcctccgcccgctttgtgtcctcgtcctcctcggggggctacggcggcggctacggcggcgtcctgaccgcgtccgacgggctgctggcgggcaacgagaagctaaccatgcagaacctcaacgaccgcctggcctcctacctggacaaggtgcgcgccctggaggcggccaacggcgagctagaggtgaagatccgcgactggtaccagaagcaggggcctgggccctcccgcgactacagccactactacacgaccatccaggacctgcgggacaagattcttggtgccaccattgagaactccaggattgtcctgcagatcgacaacgcccgtctggctgcagatgacttccgaaccaagtgagtgtctctgtcctgggggctgcagaagccaggactggggtaggggttggggggtttagaatctgccctcacctagcctagatggcctgaagctaacccccctatggactcctgaactctggggaggtagggaagtcttcagagatgctgaggaagctctgcctggctgcaactatttcctttgaaaggtttgagacggaacaggctctgcgcatgagcgtggaggccgacatcaacggcctgcgcagggtgctggatgagctgaccctggccaggaccgacctggagatgcagatcgaaggcctgaaggaagagctggcctacctgaagaagaaccatgaggaggaaatcagtacgctgaggggccaagtgggaggccaggtcagtgtggaggtggattccgctccgggcaccgatctcgccaagatcctgagtgacatgcgaagccaatatgaggtcatggccgagcagaaccggaaggatgctgaagcctggttcaccagccggactgaagaattgaaccgggaggtcgctggccacacggagcagctccagatgagcaggtccgaggttactgacctgcggcgcacccttcagggtcttgagattgagctgcagtcacagctgagcatgaaagctgccttggaagacacactggcagaaacggaggcgcgctttggagcccagctggcgcatatccaggcgctgatcagcggtattgaagcccagctgggcgatgtgcgagctgatagtgagcggcagaatcaggagtaccagcggctcatggacatcaagtcgcggctggagcaggagattgccacctaccgcagcctgctcgagggacaggaagatcactacaacaatttgtctgcctccaaggtcctctgaggcagcaggctctggggcttctgctgtcctttggagggtgtcttctgggtagagggatgggaaggaagggacccttacccccggctcttctcctgacctgccaataaaaatttatggtccaaggga

SEQ ID NO: 323638 - DNA, 1865 bp, Homo sapiens
  misc_feature (17)..(18): n is a, c, g, or t
ttaggtacgaggccggnngttaatcggcacgagggcgaatcgcagcttctgagaccaggttgctccgtccgtgctccgcctcgccatgacttcctacagctatcgccagtcgtcggccacgtcgtccttcggaggcctgggcggcggctccgtgcgttttgggccgggggtcgcttttcgcgcgcccagcattcacgggggctccggcggccgcggcgtatccgtgtcctccgcccgctttgtgtcctcgtcctcctcggggggctacggcggcggctacggcggcgtcctgaccgcgtccgacgggctgctggcgggcaacgagaagctaaccatgcagaacctcaacgaccgcctggcctcctacctggacaaggtgcgcgccctggaggcggccaacggcgagctagaggtgaagatccgcgactggtaccagaagcaggggcctgggccctcccgcgactacagccactactacacgaccatccaggacctgcgggacaagattcttggtgccaccattgagaactccaggattgtcctgcagatcgacaacgcccgtctggctgcagatgacttccgaaccaagtttgagacggaacaggctctgcgcatgagcgtggaggccgacatcaacggcctgcgcagggtgctggatgagctgaccctggccaggaccgacctggagatgcagatcgaaggcctgaaggaagagctggcctacctgaagaagaaccatgaggagggaggtgggtttgaagctgggcctttcttccatccttccctaacctcccagggctgaagactcttttattctgtattctctgaccgtggtaacacttggtgcaccctcaccatggccctgggtgtgggatcatggatcccagggttccaagaggaatcagtgacgacccagtctgtcccccagtgctagttactaggcctgcacctgaaaactaagcccctttagcctgaagggtggggaagtgacctgggccaggcccagtggggtctgggccctgacatgcccatctctgctgtatcttttcaggaaatcagtacgctgaggggccaagtgggaggccaggtcagtgtggaggtggattccgctccgggcaccgatctcgccaagatcctgagtgacatgcgaagccaatatgaggtcatggccgagcagaaccggaaggatgctgaagcctggttcaccagccggactgaagaattgaaccgggaggtcgctggccacacggagcagctccagatgagcaggtccgaggttactgacctgcggcgcacccttcagggtcttgagattgagctgcagtcacagctgagcatggtatgtgtccccccaccgccgccgcttccctgtgcaattcacacttatacccttgcagcctagggcagcctggccggtggctgtgcccatgccctctccgggaaccaggctctgctgagtcacaaccccctctccctatcctcagaaagctgccttggaagacacactggcagaaacggaggcgcgctttggagcccagctggcgcatatccaggcgctgatcagcggtattgaagcccagctgggcgatgtgcgagctgatagtgagcggcagaatcaggagtaccagcggctcatggacatcaagtcgcggctggagcaggagattgccacctaccgcagcctgctcgagggacaggaagatcactacaacaatttgtctgcctccaaggtcctctgaggcagcaggctctggggcttctgctgtcctttggagggtgtcttctgggtagagggatgggaaggaagggacccttacccccggctcttctcctgacctgccaataaaaatttatggtccaaggga

SEQ ID NO: 323639 - DNA, 1054 bp, Homo sapiens
  misc_feature (17)..(18): n is a, c, g, or t
ttaggtacgaggccggnngttaatcggcacgagggcgaatcgcagcttctgagaccaggttgctccgtccgtgctccgcctcgccatgacttcctacagctatcgccagtcgtcggccacgtcgtccttcggaggcctgggcggcggctccgtgcgttttgggccgggggtcgcttttcgcgcgcccagcattcacgggggctccggcggccgcggcgtatccgtgtcctccgcccgctttgtgtcctcgtcctcctcggggggctacggcggcggctacggcggcgtcctgaccgcgtccgacgggctgctggcgggcaacgagaagctaaccatgcagaacctcaacgaccgcctggcctcctacctggacaaggtgcgcgccctggaggcggccaacggcgagctagaggtgaagatccgcgactggtaccagaagcaggggcctgggccctcccgcgactacagccactactacacgaccatccaggacctgcgggacaagattcttggtgccaccattgagaactccaggattgtcctgcagatcgacaacgcccgtctggctgcagatgacttccgaaccaagtttgagacggaacaggctctgcgcatgagcgtggaggccgacatcaacggcctgcgcagggtgctggatgagctgaccctggccaggaccgacctggagatgcagatcgaaggcctgaaggaagagctggcctacctgaagaagaaccatgaggagggaggtgggtttgaagctgggcctttcttccatccttccctaacctcccagggctgaagactcttttattctgtattctctgaccgtggtaacacttggtgcaccctcaccatggccctgggtgtgggatcatggatcccagggttccaagaggaatcagtgacgacccagtctgtcccccagtgctagttactaggcctgcacctgaaaactaagcccctttagcctgaagggtggggaagtgacctgggccaggcccagtggggtctggacctgtcctgcgacctatagagatccgctagagtcgcc

SEQ ID NO: 323640 - DNA, 785 bp, Homo sapiens
  misc_feature (17)..(18): n is a, c, g, or t
  misc_feature (754)..(754): n is a, c, g, or t
  misc_feature (758)..(758): n is a, c, g, or t
  misc_feature (761)..(761): n is a, c, g, or t
  misc_feature (768)..(768): n is a, c, g, or t
ttaggtacgaggccggnngttaatcggcacgagggcgaatcgcagcttctgagaccaggttgctccgtccgtgctccgcctcgccatgacttcctacagctatcgccagtcgtcggccacgtcgtccttcggaggcctgggcggcggctccgtgcgttttgggccgggggtcgcttttcgcgcgcccagcattcacgggggctccggcggccgcggcgtatccgtgtcctccgcccgctttgtgtcctcgtcctcctcggggggctacggcggcggctacggcggcgtcctgaccgcgtccgacgggctgctggcgggcaacgagaagctaaccatgcagaacctcaacgaccgcctggcctcctacctggacaaggtgcgcgccctggaggcggccaacggcgagctagaggtgaagatccgcgactggtaccagaagcaggggcctgggccctcccgcgactacagccactactacacgaccatccaggacctgcgggacaagattcttggtgccaccattgagaactccaggattgtcctgcagatcgacaacgcccgtctggctgcagatgacttccgaaccaagtttgagacggaacaggctctgcgcatgagcgtggaggccgacatcaacggcctgcgcagggtgctggatgagctgaccctggccaggaccgacctggagatgcagatcgaaggcctgaaggaagagctggcctacctgaagaagaaccatgaggagagaatagtnccgnggncaggggngccggcaggagggacga

SEQ ID NO: 323641 - DNA, 717 bp, Homo sapiens
  misc_feature (17)..(18): n is a, c, g, or t
  misc_feature (688)..(689): n is a, c, g, or t
  misc_feature (691)..(692): n is a, c, g, or t
  misc_feature (695)..(696): n is a, c, g, or t
  misc_feature (698)..(698): n is a, c, g, or t
ttaggtacgaggccggnngttaatcggcacgagggcgaatcgcagcttctgagaccaggttgctccgtccgtgctccgcctcgccatgacttcctacagctatcgccagtcgtcggccacgtcgtccttcggaggcctgggcggcggctccgtgcgttttgggccgggggtcgcttttcgcgcgcccagcattcacgggggctccggcggccgcggcgtatccgtgtcctccgcccgctttgtgtcctcgtcctcctcggggggctacggcggcggctacggcggcgtcctgaccgcgtccgacgggctgctggcgggcaacgagaagctaaccatgcagaacctcaacgaccgcctggcctcctacctggacaaggtgcgcgccctggaggcggccaacggcgagctagaggtgaagatccgcgactggtaccagaagcaggggcctgggccctcccgcgactacagccactactacacgaccatccaggacctgcgggacaagattcttggtgccaccattgagaactccaggattgtcctgcagatcgacaacgcccgtctggctgcagatgacttccgaaccaagtttgagacggaacaggctctgcgcatgagcgtggaggccgacatcaacggcctgcgcagggtgctggatgagctgaccctggccaggaccgacctggtnnannagnnanggggatcgctctagagtcg

SEQ ID NO: 323642 - DNA, 927 bp, Homo sapiens
  misc_feature (17)..(18): n is a, c, g, or t
ttaggtacgaggccggnngttaatcggcacgagggcgaatcgcagcttctgagaccaggttgctccgtccgtgctccgcctcgccatgacttcctacagctatcgccagtcgtcggccacgtcgtccttcggaggcctgggcggcggctccgtgcgttttgggccgggggtcgcttttcgcgcgcccagcattcacgggggctccggcggccgcggcgtatccgtgtcctccgcccgctttgtgtcctcgtcctcctcggggggctacggcggcggctacggcggcgtcctgaccgcgtccgacgggctgctggcgggcaacgagaagctaaccatgcagaacctcaacgaccgcctggcctcctacctggacaaggtgcgcgccctggaggcggccaaatcctgagtgacatgcgaagccaatatgaggtcatggccgagcagaaccggaaggatgctgaagcctggttcaccagccggactgaagaattgaaccgggaggtcgctggccacacggagcagctccagatgagcaggtccgaggttactgacctgcggcgcacccttcagggtcttgagattgagctgcagtcacagctgagcatgaaagctgccttggaagacacactggcagaaacggaggtgggcgatgtgcgagctgatagtgagcggcagaatcaggagtaccagcggctcatggacatcaagtcgcggctggagcaggagattgccacctaccgcagcctgctcgagggacaggaagatcactacaacaatttgtctgcctccaaggtcctctgaggcagcaggctctggggcttctgctgtcctttggagggtgtcttctgggtagagggatgggaaggaagggacccttacccccggctcttctcctgacctgccaataaaaatttatggtccaaggga

SEQ ID NO: 323643 - DNA, 1414 bp, Homo sapiens
  misc_feature (17)..(18): n is a, c, g, or t
ttaggtacgaggccggnngttaatcggcacgagggcgaatcgcagcttctgagaccaggttgctccgtccgtgctccgcctcgccatgacttcctacagctatcgccagtcgtcggccacgtcgtccttcggaggcctgggcggcggctccgtgcgttttgggccgggggtcgcttttcgcgcgcccagcattcacgggggctccggcggccgcggcgtatccgtgtcctccgcccgctttgtgtcctcgtcctcctcggggggctacggcggcggctacggcggcgtcctgaccgcgtccgacgggctgctggcgggcaacgagaagctaaccatgcagaacctcaacgaccgcctggcctcctacctggacaaggtgcgcgccctggaggcggccaacggcgagctagaggtgaagatccgcgactggtaccagaagcaggggcctgggccctcccgcgactacagccactactacacgaccatccaggacctgcgggacaagattcttggtgccaccattgagaactccaggattgtcctgcagatcgacaacgcccgtctggctgcagatgacttccgaaccaagtttgagacggaacaggctctgcgcatgagcgtggaggccgacatcaacggcctgcgcagggtgctggatgagctgaccctggccaggaccgacctggagatgcagatcgaaggcctgaaggaagagctggcctacctgaagaagaaccatgaggaggaaatcagtacgctgaggggccaagtgggaggccaggtcagtgtggaggtggattccgctccgggcaccgatctcgccaagatcctgagtgacatgcgaagccaatatgaggtcatggccgagcagaaccggaaggatgctgaagcctggttcaccagccggactgaagaattgaaccgggaggtcgctggccacacggagcagctccagatgagcaggtccgaggttactgacctgcggcgcacccttcagggtcttgagattgagctgcagtcacagctgagcatgaaagctgccttggaagacacactggcagaaacggaggcgcgctttggagcccagctggcgcatatccaggcgctgatcagcggtattgaagcccagctgggcgatgtgcgagctgatagtgagcggcagaatcaggagtaccagcggctcatggacatcaagtcgcggctggagcaggagattgccacctaccgcagcctgctcgagggacaggaagatcactacaacaatttgtctgcctccaaggtcctctgaggcagcaggctctggggcttctgctgtcctttggagggtgtcttctgggtagagggatgggaaggaagggacccttacccccggctcttctcctgacctgccaataaaaatttatggtccaaggga

SEQ ID NO: 323644 - DNA, 858 bp, Homo sapiens
  misc_feature (8)..(8): n is a, c, g, or t
  misc_feature (27)..(27): n is a, c, g, or t
  misc_feature (30)..(30): n is a, c, g, or t
  misc_feature (416)..(416): n is a, c, g, or t
  misc_feature (449)..(449): n is a, c, g, or t
  misc_feature (452)..(452): n is a, c, g, or t
  misc_feature (845)..(845): n is a, c, g, or t
tggatcgnttattactttactacctantgnagcactcgactctttggatccccaacccatgtgccgctccgggcaccgatctcgccaagatcctgagtgatttgcgaagccaatatgaggtcatggccgagcagaaccggaaggatgctgaagcctggttcaccagccggactgaagaattgaaccgggaggtcgctggccacacggagcagctccagatgagcaggtccgaggttactgacctgcggcgcacccttcagggtcttgagattgagctgcagtcacagctgagcatgaaagctgccttggaagacacactggcagaaacggaggcgcgctttggagcccagctggcgcatatccaggcgctgatcagcggtattgaagcccagctgggcgatgtgcgagctgatagngagcggcagaatcaggagtaccagcgcctgganatngtggattccgctccgggcaccgatctcgccaagatcctgagtgacatgcgaagccaatatgaggtcatggccgagcagaaccggaaggatgctgaagcctggttcaccagccggactgaagaattgaaccgggaggtcgctggccacacggagcagctccagatgagcaggtccgaggttactgacctgcggcgcacccttcagggtcttgagattgagctgcagtcacagctgagcatgaaagctgccttggaagacacactggcagaaacggaggcgcgctttggagcccagctggcgcatatccaggcgctgatcagcggtattgaagcccagcaacgggtatcctcaagagtcgaggagcatactaatgtcatcagtggagagaaagcnaaatatagtgccc

SEQ ID NO: 323645 - DNA, 760 bp, Homo sapiens
  misc_feature (729)..(729): n is a, c, g, or t
  misc_feature (733)..(733): n is a, c, g, or t
  misc_feature (736)..(736): n is a, c, g, or t
  misc_feature (743)..(743): n is a, c, g, or t
taatgtgcaatcgacgggacgagatcaggattacatcagtggtcgactcggccgtcaaccatgacttcctacagctatcgccagtcgtcggccacgtcgtccttcggaggcctgggcggcggctccgtgcgttttgggccgggggtcgcttttcgcgcgcccagcattcacgggggctccggcggccgcggcgtatccgtgtcctccgcccgctttgtgtcctcgtcctcctcggggggctacggcggcggctacggcggcgtcctgaccgcgtccgacgggctgctggcgggcaacgagaagctaaccatgcagaacctcaacgaccgcctggcctcctacctggacaaggtgcgcgccctggaggcggccaacggcgagctagaggtgaagatccgcgactggtaccagaagcaggggcctgggccctcccgcgactacagccactactacacgaccatccaggacctgcgggacaagattcttggtgccaccattgagaactccaggattgtcctgcagatcgacaacgcccgtctggctgcagatgacttccgaaccaagtttgagacggaacaggctctgcgcatgagcgtggaggccgacatcaacggcctgcgcagggtgctggatgagctgaccctggccaggaccgacctggagatgcagatcgaaggcctgaaggaagagctggcctacctgaagaagaaccatgaggagagaatagtnccgnggncaggggngccggcaggagggacga

SEQ ID NO: 323646 - DNA, 252 bp, Homo sapiens
ctctagaggatctcccctgtcgacactccaggactgcgggacaagattcttggtgccaccattgagaactccaggattgtcctgcagatcgacaacgcccgtctggctgcagatgacttccgaaccaagtttgagacggaacaggctctgcgcatgagcgtggaggccgacatcaacggcctgcgcagggtgctggatgagctgaccctggccaggaccgacctggtgtcgaacaggtagcgagctcgattc

SEQ ID NO: 323647 - DNA, 1409 bp, Homo sapiens
  misc_feature (17)..(18): n is a, c, g, or t
  misc_feature (1386)..(1386): n is a, c, g, or t
ttaggtacgaggccggnngttaatcggcacgagggcgaatcgcagcttctgagaccaggttgctccgtccgtgctccgcctcgccatgacttcctacagctatcgccagtcgtcggccacgtcgtccttcggaggcctgggcggcggctccgtgcgttttgggccgggggtcgcttttcgcgcgcccagcattcacgggggctccggcggccgcggcgtatccgtgtcctccgcccgctttgtgtcctcgtcctcctcggggggctacggcggcggctacggcggcgtcctgaccgcgtccgacgggctgctggcgggcaacgagaagctaaccatgcagaacctcaacgaccgcctggcctcctacctggacaaggtgcgcgccctggaggcggccaacggcgagctagaggtgaagatccgcgactggtaccagaagcaggggcctgggccctcccgcgactacagccactactacacgaccatccaggacctgcgggacaagattcttggtgccaccattgagaactccaggattgtcctgcagatcgacaacgcccgtctggctgcagatgacttccgaaccaagtttgagacggaacaggctctgcgcatgagcgtggaggccgacatcaacggcctgcgcagggtgctggatgagctgaccctggccaggaccgacctggagatgcagatcgaaggcctgaaggaagagctggcctacctgaagaagaaccatgaggaggaaatcagtacgctgaggggccaagtgggaggccaggtcagtgtggaggtggattccgctccgggcaccgatctcgccaagatcctgagtgacatgcgaagccaatatgaggtcatggccgagcagaaccggaaggatgctgaagcctggttcaccagccggactgaagaattgaaccgggaggtcgctggccacacggagcagctccagatgagcaggtccgaggttactgacctgcggcgcacccttcagggtcttgagattgagctgcagtcacagctgagcatgaaagctgccttggaagacacactggcagaaacggaggcgcgctttggagcccagctggcgcatatccaggcgctgatcagcggtattgaagcccagctgggcgatgtgcgagctgatagtgagcggcagaatcaggagtaccagcggctcatggacatcaagtcgcggctggagcaggagattgccacctaccgcagcctgctcgagggacaggaagatcactacaacaatttgtctgcctccaaggtcctctgaggcagcaggctctggggcttctgctgtcctttggagggtgtcttctgggtagagggatgggaaggaagagcgcccccggtataacttcctgcgggggncccatgccaatagttataggtgt

SEQ ID NO: 323648 - DNA, 1365 bp, Homo sapiens
  misc_feature (17)..(18): n is a, c, g, or t
ttaggtacgaggccggnngttaatcggcacgagggcgaatcgcagcttctgagaccaggttgctccgtccgtgctccgcctcgccatgacttcctacagctatcgccagtcgtcggccacgtcgtccttcggaggcctgggcggcggctccgtgcgttttgggccgggggtcgcttttcgcgcgcccagcattcacgggggctccggcggccgcggcgtatccgtgtcctccgcccgctttgtgtcctcgtcctcctcggggggctacggcggcggctacggcggcgtcctgaccgcgtccgacgggctgctggcgggcaacgagaagctaaccatgcagaacctcaacgaccgcctggcctcctacctggacaaggtgcgcgccctggaggcggccaacggcgagctagaggtgaagatccgcgactggtaccagaagcaggggcctgggccctcccgcgactacagccactactacacgaccatccaggacctgcgggacaagattcttggtgccaccattgagaactccaggattgtcctgcagatcgacaacgcccgtctggctgcagatgacttccgaaccaagtttgagacggaacaggctctgcgcatgagcgtggaggccgacatcaacggcctgcgcagggtgctggatgagctgaccctggccaggaccgacctggagatgcagatcgaaggcctgaaggaagagctggcctacctgaagaagaaccatgaggaggaaatcagtacgctgaggggccaagtgggaggccaggtcagtgtggaggtggattccgctccgggcaccgatctcgccaagatcctgagtgacatgcgaagccaatatgaggtcatggccgagcagaaccggaaggatgctgaagcctggttcaccagccggactgaagaattgaaccgggaggtcgctggccacacggagcagctccagatgagcaggtccgaggttactgacctgcggcgcacccttcagggtcttgagattgagctgcagtcacagctgagcatgaaagctgccttggaagacacactggcagaaacggaggcgcgctttggagcccagctggcgcatatccaggcgctgatcagcggtattgaagcccagcgctcatggacatcaagtcgcggctggagcaggagattgccacctaccgcagcctgctcgagggacaggaagatcactacaacaatttgtctgcctccaaggtcctctgaggcagcaggctctggggcttctgctgtcctttggagggtgtcttctgggtagagggatgggaaggaagggacccttacccccggctcttctcctgacctgccaataaaaatttatggtccaaggga

SEQ ID NO: 323649 - DNA, 1170 bp, Homo sapiens
  misc_feature (17)..(18): n is a, c, g, or t
ttaggtacgaggccggnngttaatcggcacgagggcgaatcgcagcttctgagaccaggttgctccgtccgtgctccgcctcgccatgacttcctacagctatcgccagtcgtcggccacgtcgtccttcggaggcctgggcggcggctccgtgcgttttgggccgggggtcgcttttcgcgcgcccagcattcacgggggctccggcggccgcggcgtatccgtgtcctccgcccgctttgtgtcctcgtcctcctcggggggctacggcggcggctacggcggcgtcctgaccgcgtccgacgggctgctggcgggcaacgagaagctaaccatgcagaacctcaacgaccgcctggcctcctacctggacaaggtgcgcgccctggaggcggccaacggcgagctagaggtgaagatccgcgactggtaccagaagcaggggcctgggccctcccgcgactacagccactactacacgaccatccaggacctgcgggacaagattcttggtgccaccattgagaactccaggattgtcctgcagatcgacaacgcccgtctggctgcagatgacttccgaaccaagtttgagacggaacaggctctgcgcatgagcgtggaggccgacatcaacggcctgcgcagggtgctggatgagctgaccctggccaggaccgacctggagatgcagatcgaaggcctgaaggaagagctggcctacctgaagaagaaccatgaggaggaaatcagtacgctgaggggccaagtgggaggccaggtcagtgtggaggtggattccgctccgggcaccgatctcgccaagatcctgagtgacatgcgaagccaatatgaggtcatggccgagcagaaccggaaggatgctgaagcctggttcaccagccggactgaagaattgaaccgggaggtcgctggccacacggagcagctccagatgagcaggtccgaggttactgacctgcggcgcacccttcagggtcttgagattgagctgcagtcacagctgagcatgaaagctgccttggaagacacactggcagaaacggaggcgcgctttggagcccagctggcgcatatccaggcgctgatcagcggtattgaagcccagctcatacacgcggatcatgctcactcaagtcagaggcccca

SEQ ID NO: 323650 - DNA, 1559 bp, Homo sapiens
  misc_feature (17)..(18): n is a, c, g, or t
ttaggtacgaggccggnngttaatcggcacgagggcgaatcgcagcttctgagaccaggttgctccgtccgtgctccgcctcgccatgacttcctacagctatcgccagtcgtcggccacgtcgtccttcggaggcctgggcggcggctccgtgcgttttgggccgggggtcgcttttcgcgcgcccagcattcacgggggctccggcggccgcggcgtatccgtgtcctccgcccgctttgtgtcctcgtcctcctcggggggctacggcggcggctacggcggcgtcctgaccgcgtccgacgggctgctggcgggcaacgagaagctaaccatgcagaacctcaacgaccgcctggcctcctacctggacaaggtgcgcgccctggaggcggccaacggcgagctagaggtgaagatccgcgactggtaccagaagcaggggcctgggccctcccgcgactacagccactactacacgaccatccaggacctgcgggacaagattcttggtgccaccattgagaactccaggattgtcctgcagatcgacaacgcccgtctggctgcagatgacttccgaaccaagtttgagacggaacaggctctgcgcatgagcgtggaggccgacatcaacggcctgcgcagggtgctggatgagctgaccctggccaggaccgacctggagatgcagatcgaaggcctgaaggaagagctggcctacctgaagaagaaccatgaggaggaaatcagtacgctgaggggccaagtgggaggccaggtcagtgtggaggtggattccgctccgggcaccgatctcgccaagatcctgagtgacatgcgaagccaatatgaggtcatggccgagcagaaccggaaggatgctgaagcctggttcaccagccggactgaagaattgaaccgggaggtcgctggccacacggagcagctccagatgagcaggtccgaggttactgacctgcggcgcacccttcagggtcttgagattgagctgcagtcacagctgagcatggtatgtgtccccccaccgccgccgcttccctgtgcaattcacacttatacccttgcagcctagggcagcctggccggtggctgtgcccatgccctctccgggaaccaggctctgctgagtcacaaccccctctccctatcctcagaaagctgccttggaagacacactggcagaaacggaggcgcgctttggagcccagctggcgcatatccaggcgctgatcagcggtattgaagcccagctgggcgatgtgcgagctgatagtgagcggcagaatcaggagtaccagcggctcatggacatcaagtcgcggctggagcaggagattgccacctaccgcagcctgctcgagggacaggaagatcactacaacaatttgtctgcctccaaggtcctctgaggcagcaggctctggggcttctgctgtcctttggagggtgtcttctgggtagagggatgggaaggaagggacccttacccccggctcttctcctgacctgccaataaaaatttatggtccaaggga

SEQ ID NO: 323651 - DNA, 1792 bp, Homo sapiens
  misc_feature (17)..(18): n is a, c, g, or t
ttaggtacgaggccggnngttaatcggcacgagggcgaatcgcagcttctgagaccaggttgctccgtccgtgctccgcctcgccatgacttcctacagctatcgccagtcgtcggccacgtcgtccttcggaggcctgggcggcggctccgtgcgttttgggccgggggtcgcttttcgcgcgcccagcattcacgggggctccggcggccgcggcgtatccgtgtcctccgcccgctttgtgtcctcgtcctcctcggggggctacggcggcggctacggcggcgtcctgaccgcgtccgacgggctgctggcgggcaacgagaagctaaccatgcagaacctcaacgaccgcctggcctcctacctggacaaggtgcgcgccctggaggcggccaacggcgagctagaggtgaagatccgcgactggtaccagaagcaggggcctgggccctcccgcgactacagccactactacacgaccatccaggacctgcgggacaagattcttggtgccaccattgagaactccaggattgtcctgcagatcgacaacgcccgtctggctgcagatgacttccgaaccaagtttgagacggaacaggctctgcgcatgagcgtggaggccgacatcaacggcctgcgcagggtgctggatgagctgaccctggccaggaccgacctggagatgcagatcgaaggcctgaaggaagagctggcctacctgaagaagaaccatgaggaggaaatcagtacgctgaggggccaagtgggaggccaggtcagtgtggaggtggattccgctccgggcaccgatctcgccaagatcctgagtgacatgcgaagccaatatgaggtcatggccgagcagaaccggaaggatgctgaagcctggttcaccagccggactgaagaattgaaccgggaggtcgctggccacacggagcagctccagatgagcaggtccgaggttactgacctgcggcgcacccttcagggtcttgagattgagctgcagtcacagctgagcatggtatgtgtccccccaccgccgccgcttccctgtgcaattcacacttatacccttgcagcctagggcagcctggccggtggctgtgcccatgccctctccgggaaccaggctctgctgagtcacaaccccctctccctatcctcagaaagctgccttggaagacacactggcagaaacggaggcgcgctttggagcccagctggcgcatatccaggcgctgatcagcggtattgaagcccagctgggcgatgtgcgagctgatagtgagcggcagaatcaggagtaccagcggctcatggacatcaagtcgcggctggagcaggagattgccacctaccgcagcctgctcgagggacaggaagatcactacaacaatttgtctgcctccaaggtcctctgaggcagcaggctctggggcttctgctgtcctttggagggtgtcttctgggtagagggatgggaaggaagggacccttacccccggctcttctcctgacctgccaataaaaatttatggtccaagggaaggaaggacgtttggtttattatttcagcccatggagagaataggtcgttcggtttgttatttgagcccatggagagatgggtcctgccttggccctgtttaggttttatttgaaccaaagttcactctgtcccaggaaagggaggggagggtactcacatactttgcctgtaatggtaattcctgtttacagaagtcttcatttatttaacccgttccttaaaataacctca

SEQ ID NO: 323652 - DNA, 1296 bp, Homo sapiens
  misc_feature (17)..(18): n is a, c, g, or t
ttaggtacgaggccggnngttaatcggcacgagggcgaatcgcagcttctgagaccaggttgctccgtccgtgctccgcctcgccatgacttcctacagctatcgccagtcgtcggccacgtcgtccttcggaggcctgggcggcggctccgtgcgttttgggccgggggtcgcttttcgcgcgcccagcattcacgggggctccggcggccgcggcgtatccgtgtcctccgcccgctttgtgtcctcgtcctcctcggggggctacggcggcggctacggcggcgtcctgaccgcgtccgacgggctgctggcgggcaacgagaagctaaccatgcagaacctcaacgaccgcctggcctcctacctggacaaggtgcgcgccctggaggcggccaacggcgagctagaggtgaagatccgcgactggtaccagaagcaggggcctgggccctcccgcgactacagccactactacacgaccatccaggacctgcgggacaagattcttggtgccaccattgagaactccaggattgtcctgcagatcgacaacgcccgtctggctgcagatgacttccgaaccaagtttgagacggaacaggctctgcgcatgagcgtggaggccgacatcaacggcctgcgcagggtgctggatgagctgaccctggccaggaccgacctggagatgcagatcgaaggcctgaaggaagagctggcctacctgaagaagaaccatgaggaggaaatcagtacgctgaggggccaagtgggaggccaggtcagtgtggaggtggattccgctccgggcaccgatctcgccaagatcctgagtgacatgcgaagccaatatgaggtcatggccgagcagaaccggaaggatgctgaagcctggttcaccagccggactgaagaattgaaccgggaggtcgctggccacacggagcagctccagatgagcaggtccgaggttactgacctgcggcgcacccttcagggtcttgagattgagtgggcgatgtgcgagctgatagtgagcggcagaatcaggagtaccagcggctcatggacatcaagtcgcggctggagcaggagattgccacctaccgcagcctgctcgagggacaggaagatcactacaacaatttgtctgcctccaaggtcctctgaggcagcaggctctggggcttctgctgtcctttggagggtgtcttctgggtagagggatgggaaggaagggacccttacccccggctcttctcctgacctgccaataaaaatttatggtccaaggga

SEQ ID NO: 323653 - DNA, 1095 bp, Homo sapiens
  misc_feature (17)..(18): n is a, c, g, or t
ttaggtacgaggccggnngttaatcggcacgagggcgaatcgcagcttctgagaccaggttgctccgtccgtgctccgcctcgccatgacttcctacagctatcgccagtcgtcggccacgtcgtccttcggaggcctgggcggcggctccgtgcgttttgggccgggggtcgcttttcgcgcgcccagcattcacgggggctccggcggccgcggcgtatccgtgtcctccgcccgctttgtgtcctcgtcctcctcggggggctacggcggcggctacggcggcgtcctgaccgcgtccgacgggctgctggcgggcaacgagaagctaaccatgcagaacctcaacgaccgcctggcctcctacctggacaaggtgcgcgccctggaggcggccaacggcgagctagaggtgaagatccgcgactggtaccagaagcaggggcctgggccctcccgcgactacagccactactacacgaccatccaggacctgcgggacaagattcttggtgccaccattgagaactccaggattgtcctgcagatcgacaacgcccgtctggctgcagatgacttccgaaccaagtttgagacggaacaggctctgcgcatgagcgtggaggccgacatcaacggcctgcgcagggtgctggatgagctgaccctggccaggaccgacctggagatgcagatcgaaggcctgaaggaagagctggcctacctgaagaagaaccatgaggaggaaatcagtacgctgaggggccaagtgggaggccaggtcagtgtggaggtggattccgctccgggcaccgatctcgccaagatcctgagtgacatgcgaagccaatatgaggtcatggccgagcagaaccggaaggatgctgaagcctggttcaccagccggactgaagaattgaaccgggaggtcgctggccacacggagcagctccagatgagcaggtccgaggttactgacctgcggcgcacccttcagggtcttgagattgagctgcagtcacagctgagcatgaaagctgccttggaagacacactggcagaagcaggaagcagccagcagaagcgaaggcgggg

SEQ ID NO: 323654 - DNA, 1113 bp, Homo sapiens
  misc_feature (17)..(18): n is a, c, g, or t
ttaggtacgaggccggnngttaatcggcacgagggcgaatcgcagcttctgagaccaggttgctccgtccgtgctccgcctcgccatgacttcctacagctatcgccagtcgtcggccacgtcgtccttcggaggcctgggcggcggctccgtgcgttttgggccgggggtcgcttttcgcgcgcccagcattcacgggggctccggcggccgcggcgtatccgtgtcctccgcccgctttgtgtcctcgtcctcctcggggggctacggcggcggctacggcggcgtcctgaccgcgtccgacgggctgctggcgggcaacgagaagctaaccatgcagaacctcaacgaccgcctggcctcctacctggacaaggtgcgcgccctggaggcggccaacggcgagctagaggtgaagatccgcgactggtaccagaagcaggggcctgggccctcccgcgactacagccactactacacgaccatccaggacctgcgggacaagattcttggtgccaccattgagaactccaggattgtcctgcagatcgacaacgcccgtctggctgcagatgacttccgaaccaagtttgagacggaacaggctctgcgcatgagcgtggaggccgacatcaacggcctgcgcagggtgctggatgagctgaccctggccaggaccgacctggagatgcagatcgaaggcctgaaggaagagctggcctacctgaagaagaaccatgaggaggaaatcagtacgctgaggggccaagtgggaggccaggtcagtgtggaggtggattccgctccgggcaccgatctcgccaagatcctgagtgacatgcgaagccaatatgaggtcatggccgagcagaaccggaaggatgctgaagcctggttcaccagccggactgaagaattgaaccgggaggtcgctggccacacggagcagctccagatgagcaggtccgaggttactgacctgcggcgcacccttcagggtcttgagattgagctgcagtcacagctgagcatgaaagctgcttggaatccacctccacactgacctggcctcccacttggcccctcagcgtactgatttcctcctcatggttc

SEQ ID NO: 323655 - DNA, 1160 bp, Homo sapiens
  misc_feature (17)..(18): n is a, c, g, or t
ttaggtacgaggccggnngttaatcggcacgagggcgaatcgcagcttctgagaccaggttgctccgtccgtgctccgcctcgccatgacttcctacagctatcgccagtcgtcggccacgtcgtccttcggaggcctgggcggcggctccgtgcgttttgggccgggggtcgcttttcgcgcgcccagcattcacgggggctccggcggccgcggcgtatccgtgtcctccgcccgctttgtgtcctcgtcctcctcggggggctacggcggcggctacggcggcgtcctgaccgcgtccgacgggctgctggcgggcaacgagaagctaaccatgcagaacctcaacgaccgcctggcctcctacctggacaaggtgcgcgccctggaggcggccaacggcgagctagaggtgaagatccgcgactggtaccagaagcaggggcctgggccctcccgcgactacagccactactacacgaccatccaggacctgcgggacaagattcttggtgccaccattgagaactccaggattgtcctgcagatcgacaacgcccgtctggctgcagatgacttccgaaccaagtttgagacggaacaggctctgcgcatgagcgtggaggccgacatcaacggcctgcgcagggtgctggatgagctgaccctggccaggaccgacctggagatgcagatcgaaggcctgaaggaagagctggcctacctgaagaagaaccatgaggaggaaatcagtacgctgaggggccaagtgggaggccaggtcagtgtggaggtggattccgctccgggcaccgatctcgccaagatcctgagtgacatgcgaagccaatatgaggtcatggccgagcagaaccggaaggatgctgaagcctggttcaccagccggactgaagaattgaaccgggaggtcgctggccacacggagcagctccagatgagcaggtccgaggttactgacctgcggcgcacccttcagggtcttgagattgagctgcagtcacagctgagcatgaggcagcaggctctggggcttctgctgtcctttggagggtgtcttctgggtagagggatgggaaggaagggacccttacccccggctcttctcctgacctgccaataaaaatttatggtccaaggga

SEQ ID NO: 323656 - DNA, 1393 bp, Homo sapiens
  misc_feature (17)..(18): n is a, c, g, or t
ttaggtacgaggccggnngttaatcggcacgagggcgaatcgcagcttctgagaccaggttgctccgtccgtgctccgcctcgccatgacttcctacagctatcgccagtcgtcggccacgtcgtccttcggaggcctgggcggcggctccgtgcgttttgggccgggggtcgcttttcgcgcgcccagcattcacgggggctccggcggccgcggcgtatccgtgtcctccgcccgctttgtgtcctcgtcctcctcggggggctacggcggcggctacggcggcgtcctgaccgcgtccgacgggctgctggcgggcaacgagaagctaaccatgcagaacctcaacgaccgcctggcctcctacctggacaaggtgcgcgccctggaggcggccaacggcgagctagaggtgaagatccgcgactggtaccagaagcaggggcctgggccctcccgcgactacagccactactacacgaccatccaggacctgcgggacaagattcttggtgccaccattgagaactccaggattgtcctgcagatcgacaacgcccgtctggctgcagatgacttccgaaccaagtttgagacggaacaggctctgcgcatgagcgtggaggccgacatcaacggcctgcgcagggtgctggatgagctgaccctggccaggaccgacctggagatgcagatcgaaggcctgaaggaagagctggcctacctgaagaagaaccatgaggaggaaatcagtacgctgaggggccaagtgggaggccaggtcagtgtggaggtggattccgctccgggcaccgatctcgccaagatcctgagtgacatgcgaagccaatatgaggtcatggccgagcagaaccggaaggatgctgaagcctggttcaccagccgggtcgctggccacacggagcagctccagatgagcaggtccgaggttactgacctgcggcgcacccttcagggtcttgagattgagctgcagtcacagctgagcatgaaagctgccttggaagacacactggcagaaacggaggcgcgctttggagcccagctggcgcatatccaggcgctgatcagcggtattgaagcccagctgggcgatgtgcgagctgatagtgagcggcagaatcaggagtaccagcggctcatggacatcaagtcgcggctggagcaggagattgccacctaccgcagcctgctcgagggacaggaagatcactacaacaatttgtctgcctccaaggtcctctgaggcagcaggctctggggcttctgctgtcctttggagggtgtcttctgggtagagggatgggaaggaagggacccttacccccggctcttctcctgacctgccaataaaaatttatggtccaaggga

SEQ ID NO: 323657 - DNA, 1671 bp, Homo sapiens
  misc_feature (17)..(18): n is a, c, g, or t
ttaggtacgaggccggnngttaatcggcacgagggcgaatcgcagcttctgagaccaggttgctccgtccgtgctccgcctcgccatgacttcctacagctatcgccagtcgtcggccacgtcgtccttcggaggcctgggcggcggctccgtgcgttttgggccgggggtcgcttttcgcgcgcccagcattcacgggggctccggcggccgcggcgtatccgtgtcctccgcccgctttgtgtcctcgtcctcctcggggggctacggcggcggctacggcggcgtcctgaccgcgtccgacgggctgctggcgggcaacgagaagctaaccatgcagaacctcaacgaccgcctggcctcctacctggacaaggtgcgcgccctggaggcggccaacggcgagctagaggtgaagatccgcgactggtaccagaagcaggggcctgggccctcccgcgactacagccactactacacgaccatccaggacctgcgggacaagattcttggtgccaccattgagaactccaggattgtcctgcagatcgacaacgcccgtctggctgcagatgacttccgaaccaagtttgagacggaacaggctctgcgcatgagcgtggaggccgacatcaacggcctgcgcagggtgctggatgagctgaccctggccaggaccgacctggagatgcagatcgaaggcctgaaggaagagctggcctacctgaagaagaaccatgaggaggaaatcagtacgctgaggggccaagtgggaggccaggtcagtgtggaggtggattccgctccgggcaccgatctcgccaagatcctgagtgacatgcgaagccaatatgaggtcatggccgagcagaaccggaaggatgctgaagcctggttcaccagccgggggtaggtagagggaagcaggcaccctttgggggttaggaaggggagggcttggtgttccctacgcgaaggtctgactcaatgcttattccctcttcttcctctctctgcagactgaagaattgaaccgggaggtcgctggccacacggagcagctccagatgagcaggtccgaggttactgacctgcggcgcacccttcagggtcttgagattgagctgcagtcacagctgagcatggtatgtgtccccccaccgccgccgcttccctgtgcaattcacacttatacccttgcagcctagggcagcctggccggtggctgtgcccatgccctctccgggaaccaggctctgctgagtcacaaccccctctccctatcctcagaaagctgccttggaagacacactggcagaaacggaggcgcgctttggagcccagctggcgcatatccaggcgctgatcagcggtattgaagcccagctgggcgatgtgcgagctgatagtgagcggcagaatcaggagtaccagcggctcatggacatcaagtcgcggctggagcaggagattgccacctaccgcagcctgctcgagggacaggaagatcactacaacaatttgtctgcctccaaggtcctctgaggcagcaggctctggggcttctgctgtcctttggagggtgtcttctgggtagagggatgggaaggaagggacccttacccccggctcttctcctgacctgccaataaaaatttatggtccaaggga

SEQ ID NO: 323658 - DNA, 1029 bp, Homo sapiens
  misc_feature (17)..(18): n is a, c, g, or t
ttaggtacgaggccggnngttaatcggcacgagggcgaatcgcagcttctgagaccaggttgctccgtccgtgctccgcctcgccactactacacgaccatccaggacctgcgggacaagattcttggtgccaccattgagaactccaggattgtcctgcagatcgacaacgcccgtctggctgcagatgacttccgaaccaagtttgagacggaacaggctctgcgcatgagcgtggaggccgacatcaacggcctgcgcagggtgctggatgagctgaccctggccaggaccgacctggagatgcagatcgaaggcctgaaggaagagctggcctacctgaagaagaaccatgaggaggaaatcagtacgctgaggggccaagtgggaggccaggtcagtgtggaggtggattccgctccgggcaccgatctcgccaagatcctgagtgacatgcgaagccaatatgaggtcatggccgagcagaaccggaaggatgctgaagcctggttcaccagccggactgaagaattgaaccgggaggtcgctggccacacggagcagctccagatgagcaggtccgaggttactgacctgcggcgcacccttcagggtcttgagattgagctgcagtcacagctgagcatgaaagctgccttggaagacacactggcagaaacggaggcgcgctttggagcccagctggcgcatatccaggcgctgatcagcggtattgaagcccagctgggcgatgtgcgagctgatagtgagcggcagaatcaggagtaccagcggctcatggacatcaagtcgcggctggagcaggagattgccacctaccgcagcctgctcgagggacaggaagatcactacaacaatttgtctgcctccaaggtcctctgaggcagcaggctctggggcttctgctgtcctttggagggtgtcttctgggtagagggatgggaaggaagggacccttacccccggctcttctcctgacctgccaataaaaatttatggtccaaggga

SEQ ID NO: 323659 - DNA, 1431 bp, Homo sapiens
  misc_feature (17)..(18): n is a, c, g, or t
ttaggtacgaggccggnngttaatcggcacgagggcgaatcgcagcttctgagaccaggttgctccgtccgtgctccgcctcgccatgacttcctacagctatcgccagtcgtcggccacgtcgtccttcggaggcctgggcggcggctccgtgcgttttgggccgggggtcgcttttcgcgcgcccagcattcacgggggctccggcggccgcggcgtatccgtgtcctccgcccgctttgtgtcctcgtcctcctcggggggctacggcggcggctacggcggcgtcctgaccgcgtccgacgggctgctggcgggcaacgagaagctaaccatgcagaacctcaacgaccgcctggcctcctacctggacaaggtgcgcgccctggaggcggccaacggcgagctagaggtgaagatccgcgactggtaccagaagcaggggcctgggccctcccgcgactacagccactactacacgaccatccaggacctgcgggacaagattcttggtgccaccattgagaactccaggattgtcctgcagatcgacaacgcccgtctggctgcagatgacttccgaaccaagtttgagacggaacaggctctgcgcatgagcgtggaggccgacatcaacggcctgcgcagggtgctggatgagctgaccctggccaggaccgacctggagatgcagatcgaaggcctgaaggaagagctggcctacctgaagaagaaccatgaggagaaatcagtacgctgaggtgggggccacaaagggtgggggggaacgggggcccaagggttccaagggtggattccgctccgggcaccgatctcgccaagatcctgagtgacatgcgaagccaatatgaggtcatggccgagcagaaccggaaggatgctgaagcctggttcaccagccggactgaagaattgaaccgggaggtcgctggccacacggagcagctccagatgagcaggtccgaggttactgacctgcggcgcacccttcagggtcttgagattgagctgcagtcacagctgagcatgaaagctgccttggaagacacactggcagaaacggaggcgcgctttggagcccagctggcgcatatccaggcgctgatcagcggtattgaagcccagctgggcgatgtgcgagctgatagtgagcggcagaatcaggagtaccagcggctcatggacatcaagtcgcggctggagcaggagattgccacctaccgcagcctgctcgagggacaggaagatcactacaacaatttgtctgcctccaaggtcctctgaggcagcaggctctggggcttctgctgtcctttggagggtgtcttctgggtagagggatgggaaggaagggacccttacccccggctcttctcctgacctgccaataaaaatttatggtccaaggga

SEQ ID NO: 323660 - DNA, 1832 bp, Homo sapiens
  misc_feature (17)..(18): n is a, c, g, or t
ttaggtacgaggccggnngttaatcggcacgagggcgaatcgcagcttctgagaccaggttgctccgtccgtgctccgcctcgccatgacttcctacagctatcgccagtcgtcggccacgtcgtccttcggaggcctgggcggcggctccgtgcgttttgggccgggggtcgcttttcgcgcgcccagcattcacgggggctccggcggccgcggcgtatccgtgtcctccgcccgctttgtgtcctcgtcctcctcggggggctacggcggcggctacggcggcgtcctgaccgcgtccgacgggctgctggcgggcaacgagaagctaaccatgcagaacctcaacgaccgcctggcctcctacctggacaaggtgcgcgccctggaggcggccaacggcgagctagaggtgaagatccgcgactggtaccagaagcaggggcctgggccctcccgcgactacagccactactacacgaccatccaggacctgcgggacaagattcttggtgccaccattgagaactccaggattgtcctgcagatcgacaacgcccgtctggctgcagatgacttccgaaccaagtttgagacggaacaggctctgcgcatgagcgtggaggccgacatcaacggcctgcgcagggtgctggatgagctgaccctggccaggaccgacctggagatgcagatcgaaggcctgaaggaagagctggcctacctgaagaagaaccatgaggagggaggtgggtttgaagctgggcctttcttccatccttccctaacctcccagggctgaagactcttttattctgtattctctgaccgtggtaacacttggtgcaccctcaccatggccctgggtgtgggatcatggatcccagggttccaagaggaatcagtgacgacccagtctgtcccccagtgctagttactaggcctgcacctgaaaactaagcccctttagcctgaagggtggggaagtgacctgggccaggcccagtggggtctgggccctgacatgcccatctctgctgtatcttttcaggaaatcagtacgctgaggggccaagtgggaggccaggtcagtgtggaggtggattccgctccgggcaccgatctcgccaagatcctgagtgacatgcgaagccaatatgaggtcatggccgagcagaaccggaaggatgctgaagcctggttcaccagccgggggtaggtagagggaagcaggcaccctttgggggttaggaaggggagggcttggtgttccctacgcgaaggtctgactcaatgcttattccctcttcttcctctctctgcagactgaagaattgaaccgggaggtcgctggccacacggagcagctccagatgagcaggtccgaggttactgacctgcggcgcacccttcagggtcttgagattgagctgcagtcacagctgagcatgaaagctgccttggaagacacactggcagaaacggaggcgcgctttggagcccagctggcgcatatccaggcgctgatcagcggtattgaagcccagctgggcgatgtgcgagctgatagtgagcggcagaatcaggagtaccagcggctcatggacatcaagtcgcggctggagcaggagattgccacctaccgcagcctgctcgagggacaggaagatcactacaacaatttgtctgcctccaaggtcctctgaggcagcaggctctggggcttctgctgtcctttggagggtgtcttctgggtagagggatgggaaggaagggacccttacccccggctcttctcctgacctgccaataaaaatttatggtccaaggga

SEQ ID NO: 323661 - DNA, 1233 bp, Homo sapiens
  misc_feature (17)..(18): n is a, c, g, or t
ttaggtacgaggccggnngttaatcggcacgagggcgaatcgcagcttctgagaccaggttgctccgtccgtgctccgcctcgccatgacttcctacagctatcgccagtcgtcggccacgtcgtccttcggaggcctgggcggcggctccgtgcgttttgggccgggggtcgcttttcgcgcgcccagcattcacgggggctccggcggccgcggcgtatccgtgtcctccgcccgctttgtgtcctcgtcctcctcggggggctacggcggcggctacggcggcgtcctgaccgcgtccgacgggctgctggcgggcaacgagaagctaaccatgcagaacctcaacgaccgcctggcctcctacctggacaaggtgcgcgccctggaggcggccaacggcgagctagaggtgaagatccgcgactggtaccagaagcaggggcctgggccctcccgcgactacagccactactacacgaccatccaggacctgcgggacaagagatgcagatcgaaggcctgaaggaagagctggcctacctgaagaagaaccatgaggaggaaatcagtacgctgaggggccaagtgggaggccaggtcagtgtggaggtggattccgctccgggcaccgatctcgccaagatcctgagtgacatgcgaagccaatatgaggtcatggccgagcagaaccggaaggatgctgaagcctggttcaccagccggactgaagaattgaaccgggaggtcgctggccacacggagcagctccagatgagcaggtccgaggttactgacctgcggcgcacccttcagggtcttgagattgagctgcagtcacagctgagcatgaaagctgccttggaagacacactggcagaaacggaggcgcgctttggagcccagctggcgcatatccaggcgctgatcagcggtattgaagcccagctgggcgatgtgcgagctgatagtgagcggcagaatcaggagtaccagcggctcatggacatcaagtcgcggctggagcaggagattgccacctaccgcagcctgctcgagggacaggaagatcactacaacaatttgtctgcctccaaggtcctctgaggcagcaggctctggggcttctgctgtcctttggagggtgtcttctgggtagagggatgggaaggaagggacccttacccccggctcttctcctgacctgccaataaaaatttatggtccaaggga

SEQ ID NO: 323662 - DNA, 986 bp, Homo sapiens
  misc_feature (17)..(18): n is a, c, g, or t
  misc_feature (803)..(803): n is a, c, g, or t
ttaggtacgaggccggnngttaatcggcacgagggcgaatcgcagcttctgagaccaggttgctccgtccgtgctccgcctcgccatgacttcctacagctatcgccagtcgtcggccacgtcgtccttcggaggcctgggcggcggctccgtgcgttttgggccgggggtcgcttttcgcgcgcccagcattcacgggggctccggcggccgcggcgtatccgtgtcctccgcccgctttgtgtcctcgtcctcctcggggggctacggcggcggctacggcggcgtcctgaccgcgtccgacgggctgctggcgggcaacgagaagctaaccatgcagaacctcaacgaccgcctggcctcctacctggacaaggtgcgcgccctggaggcggccaacggcgagctagaggtgaagatccgcgactggtaccagaagcaggggcctgggccctcccgcgactacagccactactacacgaccatccaggacctgcgggacaagattcttggtgccaccattgagaactccaggattgtcctgcagatcgacaacgcccgtctggctgcagatgacttccgaaccaagtttgagacggaacaggctctgcgcatgagcgtggaggccgacatcaacggcctgcgcagggtgctggatgagctgaccctggccaggaccgacctggagatgcagatcgaaggcctgaaggaagagctggcctacctgaagaagaaccatgaggagacctggggggaatcgcgcggggccagggagccgccggggggggaccgccgggccgatncccaaatcggggtggaacccattaggttggcggcgaccgaggggtggcgcgggcaccggtgggaaagaacgggggtgggccgagacctagaagcggtaggcggccaggtggtgaggcaaaaatggccagaagggggccgtcagaaaagaggggacggttagcctaggacccgttagccacgcg

SEQ ID NO: 323663 - DNA, 895 bp, Homo sapiens
  misc_feature (17)..(18): n is a, c, g, or t
ttaggtacgaggccggnngttaatcggcacgagggcgaatcgcagcttctgagaccaggttgctccgtccgtgctccgcctcgccatgacttcctacagctatcgccagtcgtcggccacgtcgtccttcggaggcctgggcggcggctccgtgcgttttgggccgggggtcgcttttcgcgcgcccagcattcacgggggctccggcggccgcggcgtatccgtgtcctccgcccgctttgtgtcctcgtcctcctcggggggctacggcggcggctacggcggcgtcctgaccgcgtccgacgggctgctggcgggcaacgagaagctaaccatgcagaacctcaacgaccgcctggcctcctacctggacaaggtgcgcgccctggaggcggccaacggcgagctagaggtgaagatccgcgactggtaccagaagcaggggcctgggccctcccgcgactacagccactactacacgaccatccaggacctgcgggacaagattcttggtgccaccattgagaactccaggattgtcctgcagatcgacaacgcccgtctggctgcagatgacttccgaaccaagtttgagacggaacaggctctgcgcatgagcgtggaggccgacatcaacggcctgcgcagggtgctggatgagctgaccctggccaggaccgacctggagatgcagatcgaaggcctgaaggaagagctggcctacctgaagaagaaccatgaggagggaatcagtacgtgagggcagtggagccagtcaggggggggggtccgttcgggagattgcagattttgtgattggagcattagttggggaaaggagtgtgaaggttcagggaaaaaaggggtgtggaggaccaaaagggttggggctagt

SEQ ID NO: 323664 - DNA, 810 bp, Homo sapiens
  misc_feature (17)..(18): n is a, c, g, or t
  misc_feature (755)..(755): n is a, c, g, or t
  misc_feature (757)..(757): n is a, c, g, or t
ttaggtacgaggccggnngttaatcggcacgagggcgaatcgcagcttctgagaccaggttgctccgtccgtgctccgcctcgccatgacttcctacagctatcgccagtcgtcggccacgtcgtccttcggaggcctgggcggcggctccgtgcgttttgggccgggggtcgcttttcgcgcgcccagcattcacgggggctccggcggccgcggcgtatccgtgtcctccgcccgctttgtgtcctcgtcctcctcggggggctacggcggcggctacggcggcgtcctgaccgcgtccgacgggctgctggcgggcaacgagaagctaaccatgcagaacctcaacgaccgcctggcctcctacctggacaaggtgcgcgccctggaggcggccaacggcgagctagaggtgaagatccgcgactggtaccagaagcaggggcctgggccctcccgcgactacagccactactacacgaccatccaggacctgcgggacaagattcttggtgccaccattgagaactccaggattgtcctgcagatcgacaacgcccgtctggctgcagatgacttccgaaccaagtttgagacggaacaggctctgcgcatgagcgtggaggccgacatcaacggcctgcgcagggtgctggatgagctgaccctggccaggaccgacctggagatgcagatcgaaggcctgaaggaagagctggcctacctgaagaagaaccatgaggagtgctactgananaactgaggggaatcgcacgagggcatggagccagccggggggaacgccggccg

SEQ ID NO: 323665 - DNA, 1049 bp, Homo sapiens
  misc_feature (17)..(18): n is a, c, g, or t
  misc_feature (1013)..(1013): n is a, c, g, or t
ttaggtacgaggccggnngttaatcggcacgagggcgaatcgcagcttctgagaccaggttgctccgtccgtgctccgcctcgccatgacttcctacagctatcgccagtcgtcggccacgtcgtccttcggaggcctgggcggcggctccgtgcgttttgggccgggggtcgcttttcgcgcgcccagcattcacgggggctccggcggccgcggcgtatccgtgtcctccgcccgctttgtgtcctcgtcctcctcggggggctacggcggcggctacggcggcgtcctgaccgcgtccgtccgtgctccgcctcgccatgacttcctacagctatcgccagtcgtcggccacgtcgtccttcggaggcctgggcggcggctccgtcctgggccctcccgcgactacagccactactacacgaccatccaggacctgcgggacaagattcttggtgccaccattgagaactccaggattgtcctgcagatcgacaacgcccgtctggctgcagatgacttccgaaccaagtttgagacggaacaggctctgcgcatgagcgtggaggccgacatcaacggcctgcgcagggtgctggatgagctgaccctggccaggaccgacctggagatgcagatcgaaggcctgaaggaagagctggcctacctgaagaagaaccatgaggaggaaatcagtacgctgaggggccaagtgggaggccaggtcagtgtggaggtggattccgctccgggcaccgatctcgccaagatcctgagtgacatgcgaagccaatatgaggtcatggccgagcagaaccggaaggatgctgaagcctggttcaccagccggactgaagaattgaaccgggaggtcgctggccacacggagcagctccagatgagcaggtccgaggttactgacctgcggcgcacccttcagggtcttgagattgagctgcagtcacagctgagcatgaaagctgccttggaagacacactggcagatccgcttntccgtcgacggatagcggatctgcatcgctttcatc

SEQ ID NO: 323666 - DNA, 706 bp, Homo sapiens
  misc_feature (17)..(18): n is a, c, g, or t
ttaggtacgaggccggnngttaatcggcacgagggcgaatcgcagcttctgagaccaggttgctccgtccgtgctccgcctcgccatgacttcctacagctatcgccagtcgtcggccacgtcgtccttcggaggcctgggcggcggctccgtgcgttttgggccgggggtcgcttttcgcgcgcccagcattcacgggggctccggcggccgcggcgtatccgtgtcctccgcccgctttgtgtcctcgtcctcctcggggggctacggcggcggctacggcggcgtcctgaccgcgtccgacgggctgctggcgggcaacgagaagctaaccatgcagaacctcaacgaccgcctggcctcctacctggacaaggtgcgcgccctggaggcggccaacggcgagctagaggtgaagatccgcgactggtaccagaagcaggggcctgggccctcccgcgactacagccactactacacgaccatccaggacctgcgggacaagggtgggcggaggcccggccgcgggaagtgcagtgcacctgccgcggaaacccagccccgcgggccgggcgaggttccaggcggggcggcgggcaggagcccgttaggacgtgggaaggtccacaggtggggccgagtaaagggggacaggagacgtgcggggcaggacctcggggctggatgcagaggccggggtggtgga

SEQ ID NO: 323667 - DNA, 875 bp, Homo sapiens
ctgatgaagtaccctgtgagatagagtctgcaacacccccatttcacagcgtaggagactgaggcacagtgaggttaaactcacctaaagtctcagccagagttgttgaataaatgagaccctgaccaagctcagatacgccccagagacgtacccagggctcgctccctcacgtcttcctagcctgggctcaaatgtcacctgctggtgaccagaccaccttccctgagtagcacccttcacccccactctcacacctgtctctgtttcatttgctcctcggcagttagcagcgtctggcatcctctgttttactctctgtctgctgctttggaatgtaagctctcagagatcagaggcattgtctgtttccatcatgctgatacctacctcctaaaaaagtgcctgggacagggttggtgctcagtaaatatccgtcgactaaacaaatgaaggcatgactcaaagcactggctttcagcaccagacgaggttttcctgggctgctgtcaccgggcccagcaggggcaccctggcactttctcctgccatgacaaactcccactgaattggactgtattcccaccacacatggatgacattctccaacacatgtgccccatgtgccattacctctttccagccctgccccccagagcccagcgccctctcctgaggggacctcgacgagcccggccccagtgaccccagctgccgctgtccccgaagcaccctctgtgacccccaccgccccaccagaggatgaggatccagccctgtccccacacctcctgctccccgacagcctcagccagctggaggagtttggccggcagaggaagtggcacaagaggcagagcacacaccagcggccg

SEQ ID NO: 323668 - DNA, 1268 bp, Homo sapiens
ctggtacgccccggacgtacgggatcccggacggaggacagtgccggccgccggatcgcagagggacttgaactccttcctgtggacgattcggcgtgatcctccggcctacctgtttggcactattcacgtcccctacacccgcgtctgggacttcatcccggacaactccaaggcagccttccaggctagcacccgtgtctactttgagctggaccttacagacccctacaccatctcggccctggccagctgccagctgctgccgcacggggaaaacctgcaggacgtgctgccccacgagctttactggcgcttgaagcgccacctggactacgtgaagttgatgatgccctcctggatgacgcccgctcagcggggcaaggggctctatgctgactacctattcaatgccatcgcgggcaactgggagcgcaagaggcccgtctgggtgatgctcatggtaaactcgctcacagagagggacgtgcgcttccgtggtgtgcccgtgctcgacctctacctggcccagcaggctgagaagatgaagaagaccacaggggctgtggagcaggtggaggagcagtgccatcccctcaacaacgggctcaacttctcccaggtgctgtttgccctgaaccaaaccctgctgcagcaggaggagtgtgcgggccgggagcctgcaggcctcctacaccacggaggacctcatcaagcactacaactgcggagacctcagcgcagtcatcttcaaccacgacacatcccagctgcccaactttatcaacaccaccctcccgccacacgagcaggtgacggcccaggagattgacagctacttccgccaggagctcatctacaagaggaatgagcgcatggggaagagggtcatggcgcttctacgggagaacgaggacaagatctgcttctttgccttcggagcaggtcactttctggggaacaacacagtcatcgacatcctgcggcaggcagggctggaggtggaccacacacccgccgggcaggccatacacagccctgccccccagagcccagcgccctctcctgaggggacctcgacgagcccggccccagtgaccccagctgccgctgtccccgaagcaccctctgtgacccccaccgccccaccagaggatgaggatccagccctgtccccacacctcctgctccccgacagcctcagccagctggaggagtttggccggcagaggaagtggcacaagaggcagagcacacaccagcggccg

SEQ ID NO: 323669 - DNA, 1238 bp, Homo sapiens
ccccgtgctccagaggaaactccgtgcccaactgggggctccccgccccgctgaggggcgccgcccaggagggtcccccgcgccccgcgggccctggcaggatgcacgccgccctggcggggccgctgctcgccgccctcctcgccaccgctcgcgcccgcccgcagcccccggacggaggacagtgccggccgcccggatcgcagagggacttgaactccttcctgtggacgattcggcgtgatcctccggcctacctgtttggcactattcacgtcccctacacccgcgtctgggacttcatcccggacaactccaaggcagccttccaggctagcacccgtgtctactttgagctggaccttacagacccctacaccatctcggccctggccagctgccagctgctgccgcacggggaaaacctgcaggacgtgctgccccacgagctttactggcgcttgaagcgccacctggactacgtgaagttgatgatgccctcctggatgacgcccgctcagcggggcaaggggctctatgctgactacctattcaatgccatcgcgggcaactgggagcgcaagaggcccgtctgggtgatgctcatggtaaactcgctcacagagagggacgtgcgcttccgtggtgtgcccgtgctcgacctctacctggcccagcaggctgagaagatgaagaagaccacaggggctgtggagcaggtggaggagcagtgccatcccctcaacaacgggctcaacttctcccaggtgctgtttgccctgaaccaaaccctgctgcagcaggaggagtgtgcgggccgggagcctgcaggcctcctacaccacggaggacctcatcaagcactacaactgcggagacctcagcgcagtcatcttcaaccacgacacatcccaggtcactttctggggaacaacacagtcatcgacatcctgcggcaggcagggctggaggtggaccacacacccgccgggcaggccatacacagccctgccccccagagcccagcgccctctcctgaggggacctcgacgagcccggccccagtgaccccagctgccgctgtccccgaagcaccctctgtgacccccaccgccccaccagaggatgaggatccagccctgtccccacacctcctgctccccgacagcctcagccagctggaggagtttggccggcagaggaagtggcacaagaggcagagcacacaccagcggccg

SEQ ID NO: 323670 - DNA, 1413 bp, Homo sapiens
ccccgtgctccagaggaaactccgtgcccaactgggggctccccgccccgctgaggggcgccgcccaggagggtcccccgcgccccgcgggccctggcaggatgcacgccgccctggcggggccgctgctcgccgccctcctcgccaccgctcgcgcccgcccgcagcccccggacggaggacagtgccggccgcccggatcgcagagggacttgaactccttcctgtggacgattcggcgtgatcctccggcctacctgtttggcactattcacgtcccctacacccgcgtctgggacttcatcccggacaactccaaggcagccttccaggctagcacccgtgtctactttgagctggaccttacagacccctacaccatctcggccctggccagctgccagctgctgccgcacggggaaaacctgcaggacgtgctgccccacgagctttactggcgcttgaagcgccacctggactacgtgaagttgatgatgccctcctggatgacgcccgctcagcggggcaaggggctctatgctgactacctattcaatgccatcgcgggcaactgggagcgcaagaggcccgtctgggtgatgctcatggtaaactcgctcacagagagggacgtgcgcttccgtggtgtgcccgtgctcgacctctacctggcccagcaggctgagaagatgaagaagaccacaggggctgtggagcaggtggaggagcagtgccatcccctcaacaacgggctcaacttctcccaggtgctgtttgccctgaaccaaaccctgctgcagcaggaggagtgtgcgggccgggagcctgcaggcctcctacaccacggaggacctcatcaagcactacaactgcggagacctcagcgcagtcatcttcaaccacgacacatcccagctgcccaactttatcaacaccaccctcccgccacacgagcaggtgacggcccaggagattgacagctacttccgccaggagctcatctacaagaggaatgagcgcatggggaagagggtcatggcgcttctacgggagaacgaggacaagatctgcttctttgccttcggagcaggtcactttctggggaacaacacagtcatcgacatcctgcggcaggcagggctggaggtggaccacacacccgccgggcaggccatacacagccctgccccccagagcccagcgccctctcctgaggggacctcgacgagcccggccccagtgaccccagctgccgctgtccccgaagcaccctctgtgacccccaccgccccaccagaggatgaggatccagccctgtccccacacctcctgctccccgacagcctcagccagctggaggagtttggccggcagaggaagtggcacaagaggcagagcacacaccagcggccg

SEQ ID NO: 323671 - DNA, 1110 bp, Homo sapiens
ccccgtgctccagaggaaactccgtgcccaactgggggctccccgccccgctgaggggcgccgcccaggagggtcccccgcgccccgcgggccctggcaggatgcacgccgccctggcggggccgctgctcgccgccctcctcgccaccgctcgcgcccgcccgcagcccccggacggaggacagtgccggccgcccggatcgcagagggacttgaactccttcctgtggacgattcggcgtgatcctccggcctacctgtttggcactattcacgtcccctacacccgcgtctgggacttcatcccggacaactccaaggcagccttccaggctagcacccgtgtctactttgagctggaccttacagacccctacaccatctcggccctggccagctgccagctgctgccgcacggggaaaacctgcaggacgtgctgccccacgagctttactggcgcttgaagcgccacctggactacgtgaagttgatgatgccctcctggatgacgcccgctcagcggggcaaggggctctatgctgactacctattcaatgccatcgcgggcaactgggagcgcaagaggcccgtctgggtgatgctcatggtaaactcgctcacagagagggacgtgcgcttccgtggtgtgcccgtgctcgacctctacctggcccagcaggctgagaagatgaagaagaccacaggggctgtggagcaggtggaggagcagtgccatcccctcaacaacgggctcaacttctcccaggtaggcatgcagtgccccagcccggagctgacagccctgggtacctgggtcctcttctctgattgtctttcttctccgagggggagggggaggcagccagagtcaggtcctttttctggaaggagaggttctgctgggcagcgaggcagcacctggctgctctggtggtatcagttgagagtggcgtatactggaatttggggtaagagtctgcgtgtttgcttctatttcagcagtattacatgttggggatgtacactcctcacctgctgtgcttgcctgggcagaaagaatttccctcagagcatcagagagagcctgcaggtaccgagctcgattctaa

SEQ ID NO: 323672 - DNA, 336 bp, Homo sapiens
cagtcccgggactgccttcgagagtggtgcgacgccttcttgtgatgctctctgggaagctctcaatccccagccctcatccagagtttgcagccgagtagggactcctcccctgtcctctacgaaggaaaagattgctattgtcgtactcacctccgacgtactccggggtcttttgggagttttctcccctaaccatttcaacttttttttggattctcgctcttgcatgcctcccccgtcctttttcccttgccagttccctggtgacagttaccagctttcctgaatggattcccggccccatccctcacccccaccctcactttcaatccg

SEQ ID NO: 323673 - DNA, 2371 bp, Homo sapiens
ccagcagctgcgactcccgagacccccccaccagaaggccatggtctccccacggatgtccgggctcctctcccagactgtgatcctagcgctcattttcctcccccagacacggcccgctggcgtcttcgagctgcagatccactctttcgggccgggtccaggccctggggccccgcggtccccctgcagcgcccggctcccctgccgcctcttcttcagagtctgcctgaagcctgggctctcagaggaggccgccgagtccccgtgcgccctgggcgcggcgctgagtgcgcgcggaccggtctacaccgagcagcccggagcgcccgcgcctgatctcccactgcccgacggcctcttgcaggtgcccttccgggacgcctggcctggcaccttctctttcatcatcgaaacctggagagaggagttaggagaccagattggagggcccgcctggagcctgctggcgcgcgtggctggcaggcggcgcttggcagccggaggcccgtgggcccgggacattcagcgcgcaggcgcctgggagctgcgcttctcgtaccgcgcgcgctgcgagccgcctgccgtcgggaccgcgtgcacgcgcctctgccgtccgcgcagcgccccctcgcggtgcggtccgggactgcgcccctgcgcaccgctcgaggacgaatgtgaggcgccgctggtgtgccgagcaggctgcagccctgagcatggcttctgtgaacagcccggtgaatgccgatgcctagagggctggactggacccctctgcacggtccctgtctccaccagcagctgcctcagccccaggggcccgtcctctgctaccaccggatgccttgtccctgggcctgggccctgtgacgggaacccgtgtgccaatggaggcagctgtagtgagacacccaggtcctttgaatgcacctgcccgcgtgggttctacgggctgcggtgtgaggtgagcggggtgacatgtgcagatggaccctgcttcaacggcggcttgtgtgtcgggggtgcagaccctgactctgcctacatctgccactgcccacctggtttccaaggctccaactgtgagaagagggtggaccggtgcagcctgcagccatgccgcaatggcggactctgcctggacctgggccacgccctgcgctgccgctgccgcgccggcttcgcgggtcctcgctgcgagcacgacctggacgactgcgcgggccgcgcctgcgctaacggcggcacgtgtgtggagggcggcggcgcgcaccgctgctcctgcgcgctgggcttcggcggccgcgactgccgcgagcgcgcggacccgtgcgccgcgcgcccctgtgctcacggcggccgctgctacgcccacttctccggcctcgtctgcgcttgcgctcccggctacatgggagcgcggtgtgagttcccagtgcaccccgacggcgcaagcgccttgcccgcggccccgccgggcctcaggcccggggaccctcagcgctaccttttgcctccggctctgggactgctcgtggccgcgggcgtggccggcgctgcgctcttgctggtccacgtgcgccgccgtggccactcccaggatgctgggtctcgcttgctggctgggaccccggagccgtcagtccacgcactcccggatgcactcaacaacctaaggacgcaggagggttccggggatggtccgagctcgtccgtagattggaatcgccctgaagatgtagaccctcaagggatttatgtcatatctgctccttccatctacgctcgggaggtagcgacgccccttttccccccgctacacactgggcgcgctgggcagaggcagcacctgctttttccctacccttcctcgattctgtccgtgaaatgaattgggtagagtctctggaaggttttaagcccattttcagttctaacttactttcatcctattttgcatccctcttatcgttttgagctacctgccatcttctctttgaaaaacctatgggcttgaggaggtcacgatgccgactccgccagagcttttccactgattgtactcagcggggaggcaggggaggcagaggggcagcctctctaatgcttcctactcattttgtttctaggcctgacgcgtctcctccatccgcacctggagtcagagcgtggatttttgtatttgctcggtggtgcccagtctctgccccagaggctttggagttcaatcttgaaggggtgtctgggggaactttactgttgcaagttgtaaataatggttatttatatcctattttttctcaccccatctctctagaaacacctataaaggctattattgtgatcagttttgactaacgaggct

SEQ ID NO: 323674 - DNA, 2034 bp, Homo sapiens
ccagcagctgcgactcccgagacccccccaccagaaggccatggtctccccacggatgtccgggctcctctcccagactgtgatcctagcgctcattttcctcccccagacacggcccgctggcgtcttcgagctgcagatccactctttcgggccgggtccaggccctggggccccgcggtccccctgcagcgcccggctcccctgccgcctcttcttcagagtctgcctgaagcctgggctctcagaggaggccgccgagtccccgtgcgccctgggcgcggcgctgagtgcgcgcggaccggtctacaccgagcagcccggagcgcccgcgcctgatctcccactgcccgacggcctcttgcaggtgcccttccgggacgcctggcctggcaccttctctttcatcatcgaaacctggagagaggagttaggagaccagattggagggcccgcctggagcctgctggcgcgcgtggctggcaggcggcgcttggcagccggaggcccgtgggcccgggacattcagcgcgcaggcgcctgggagctgcgcttctcgtaccgcgcgcgctgcgagccgcctgccgtcgggaccgcgtgcacgcgcctctgccgtccgcgcagcgccccctcgcggtgcggtccgggactgcgcccctgcgcaccgctcgaggacgaatgtgaggcgccgctggtgtgccgagcaggctgcagccctgagcatggcttctgtgaacagcccggtgaatgccgatgcctagagggctggactggacccctctgcacggtccctgtctccaccagcagctgcctcagccccaggggcccgtcctctgctaccaccggatgccttgtccctgggcctgggccctgtgacgggaacccgtgtgccaatggaggcagctgtagtgagacacccaggtcctttgaatgcacctgcccgcgtgggttctacgggctgcggtgtgaggtgagcggggtgacatgtgcagatggaccctgcttcaacggcggcttgtgtgtcgggggtgcagaccctgactctgcctacatctgccactgcccacctggtttccaaggctccaactgtgagaagagggtggaccggtgcagcctgcagccatgccgcaatggcggactctgcctggacctgggccacgccctgcgctgccgctgccgcgccggcttcgcgggtcctcgctgcgagcacgacctggacgactgcgcgggccgcgcctgcgctaacggcggcacgtgtgtggagggcggcggcgcgcaccgctgctcctgcgcgctgggcttcggcggccgcgactgccgcgagcgcgcggacccgtgcgccgcgcgcccctgtgctcacggcggccgctgctacgcccacttctccggcctcgtctgcgcttgcgctcccggctacatgggagcgcggtgtgagttcccagtgcaccccgacggcgcaagcgccttgcccgcggccccgccgggcctcaggcccggggaccctcagcgctaccttttgcctccggctctgggactgctcgtggccgcgggcgtggccggcgctgcgctcttgctggtccacgtgcgccgccgtggccactcccaggatgctgggtctcgcttgctggctgggaccccggagccgtcagtccacgcactcccggatgcactcaacaacctaaggacgcaggagggttccggggatggtccgagctcgtccgtagattggaatcgccctgaagatgtagaccctcaagggatttatgtcatatctgctccttccatctacgctcgggaggcctgacgcgtctcctccatccgcacctggagtcagagcgtggatttttgtatttgctcggtggtgcccagtctctgccccagaggctttggagttcaatcttgaaggggtgtctgggggaactttactgttgcaagttgtaaataatggttatttatatcctattttttctcaccccatctctctagaaacacctataaaggctattattgtgatcagttttgactaacgaggct

SEQ ID NO: 323675 - DNA, 1350 bp, Homo sapiens
ccagcagctgcgactcccgagacccccccaccagaaggccatggtctccccacggatgtccgggctcctctcccagactgtgatcctagcgctcattttcctcccccagacacggcccgctggcgtcttcgagctgcagatccactctttcgggccgggtccaggccctggggccccgcggtccccctgcagcgcccggctcccctgccgcctcttcttcagagtctgcctgaagcctgggctctcagaggaggccgccgagtccccgtgcgccctgggcgcggcgctgagtgcgcgcggaccggtctacaccgagcagcccggagcgcccgcgcctgatctcccactgcccgacggcctcttgcaggtgcccttccgggacgcctggcctggcaccttctctttcatcatcgaaacctggagagaggagttaggagaccagattggaggcggactctgcctggacctgggccacgccctgcgctgccgctgccgcgccggcttcgcgggtcctcgctgcgagcacgacctggacgactgcgcgggccgcgcctgcgctaacggcggcacgtgtgtggagggcggcggcgcgcaccgctgctcctgcgcgctgggcttcggcggccgcgactgccgcgagcgcgcggacccgtgcgccgcgcgcccctgtgctcacggcggccgctgctacgcccacttctccggcctcgtctgcgcttgcgctcccggctacatgggagcgcggtgtgagttcccagtgcaccccgacggcgcaagcgccttgcccgcggccccgccgggcctcaggcccggggaccctcagcgctaccttttgcctccggctctgggactgctcgtggccgcgggcgtggccggcgctgcgctcttgctggtccacgtgcgccgccgtggccactcccaggatgctgggtctcgcttgctggctgggaccccggagccgtcagtccacgcactcccggatgcactcaacaacctaaggacgcaggagggttccggggatggtccgagctcgtccgtagattggaatcgccctgaagatgtagaccctcaagggatttatgtcatatctgctccttccatctacgctcgggaggcctgacgcgtctcctccatccgcacctggagtcagagcgtggatttttgtatttgctcggtggtgcccagtctctgccccagaggctttggagttcaatcttgaaggggtgtctgggggaactttactgttgcaagttgtaaataatggttatttatatcctattttttctcaccccatctctctagaaacacctataaaggctattattgtgatcagttttgactaacgaggct

SEQ ID NO: 323676 - DNA, 1889 bp, Homo sapiens
ccagcagctgcgactcccgagacccccccaccagaaggccatggtctccccacggatgtccgggctcctctcccagactgtgatcctagcgctcattttcctcccccagacacggcccgctggcgtcttcgagctgcagatccactctttcgggccgggtccaggccctggggccccgcggtccccctgcagcgcccggctcccctgccgcctcttcttcagagtctgcctgaagcctgggctctcagaggaggccgccgagtccccgtgcgccctgggcgcggcgctgagtgcgcgcggaccggtctacaccgagcagcccggagcgcccgcgcctgatctcccactgcccgacggcctcttgcaggtgcccttccgggacgcctggcctggcaccttctctttcatcatcgaaacctggagagaggagttaggagaccagattggagggcccgcctggagcctgctggcgcgcgtggctggcaggcggcgcttggcagccggaggcccgtgggcccgggacattcagcgcgcaggcgcctgggagctgcgcttctcgtaccgcgcgcgctgcgagccgcctgccgtcgggaccgcgtgcacgcgcctctgccgtccgcgcagcgccccctcgcggtgcggtccgggactgcgcccctgcgcaccgctcgaggacgaatgtgaggcgccgctggtgtgccgagcaggctgcagccctgagcatggcttctgtgaacagcccggtgaatgccgatgcctagagggctggactggacccctctgcacggtccctgtctccaccagcagctgcctcagccccaggggcccgtcctctgctaccaccggatgccttgtccctgggcctgggccctgtgacgggaacccgtgtgccaatggaggcagctgtagtgagacacccaggtcctttgaatgcacctgcccgcgtgggttctacgggctgcggtgtgaggtgagcggggtgacatgtgcagatggaccctgcttcaacggcggcttgtgtgtcgggggtgcagaccctgactctgcctacatctgccactgcccacctggtttccaaggctccaactgtgagaagagggtggaccggtgcagcctgcagccatgccgcaatggcggactctgcctggacctgggccacgccctgcgctgccgctgccgcgccggcttcgcgggtcctcgctgcgagcacgacctggacgactgcgcgggccgcgcctgcgctaacggcggcacgtgtgtggagggcggcggcgcgcaccgctgctcctgcgcgctgggcttcggcggccgcgactgccgcgagcgcgcggacccgtgcgccgcgcgcccctgtgctcacggcggccgctgctacgcccacttctccggcctcgtctgcgcttgcgctcccggctacatgggagcgcggtgtgagttcccagtgcaccccgacggcgcaagcgccttgcccgcggccccgccgggcctcaggcccggggaccctcagcgctaccttttgcctccggctctgggactgctcgtggccgcgggcgtggccggcgctgcgctcttgctggtccacgtgcgccgccgtggccactcccaggatgctgggtctcgcttgctggctgggaccccggagccgtcagtccacgcactcccggatgcactcaacaacctaaggacgcaggagggttccggggatggtccgaggtgaggggctgcgccacagacgaacgccttgcgctgctggctgcttttacccatctccgtggtgcagttggcccgattccttgatgcatttccctggtcggtctctcttaccccggtagctggttttgggttcccctttgtgatgggtaggggaaaacaagatctgagaatttaaa

SEQ ID NO: 323677 - DNA, 721 bp, Homo sapiens
ccagcagctgcgactcccgagacccccccaccagaaggccatggtctccccacggatgtccgggctcctctcccagactgtgatcctagcgctcattttcctcccccagacacggcccgctggcgtcttcgagctgcagatccactctttcgggccgggtccaggccctggggccccgcggtccccctgcagcgcccggctcccctgccgcctcttcttcagagtctgcctgaagcctgggctctcagaggaggccgccgagtccccgtgcgccctgggcgcggcgctgagtgcgcgcggaccggtctacaccgagcagcccggagcgcccgcgcctgatctcccactgcccgacggcctcttgcaggtgcccttccgggacgcctggcctggcaccttctctttcatcatcgaaacctggagagaggagttaggagaccagattggagggcccgcctggagcctgctggcgcgcgtggctggcaggcggcgcttggcagccggaggcccgtgggcccgggacattcagcgcgcaggcgcctgggagctgcgcttctcgtaccgcgcgcgctgcgagccgcctgccgtcgggaccgcgtgcacgcgcctctgccgtccgcgcagcgccccctcgcggtgcggtccgggactgcgcccctgcgcaccgctcgaggacgaatgtgaggcgccgcgtgagtcctgcgttcgaccccaccccgtc

SEQ ID NO: 323678 - DNA, 2006 bp, Homo sapiens
ccagcagctgcgactcccgagacccccccaccagaaggccatggtctccccacggatgtccgggctcctctcccagactgtgatcctagcgctcattttcctcccccagacacggcccgctggcgtcttcgagctgcagatccactctttcgggccgggtccaggccccggctcccctgccgcctcttcttcagagtctgcctgaagcctgggctctcagaggaggccgccgagtccccgtgcgccctgggcgcggcgctgagtgcgcgcggaccggtctacaccgagcagcccggagcgcccgcgcctgatctcccactgcccgacggcctcttgcaggtgcccttccgggacgcctggcctggcaccttctctttcatcatcgaaacctggagagaggagttaggagaccagattggagggcccgcctggagcctgctggcgcgcgtggctggcaggcggcgcttggcagccggaggcccgtgggcccgggacattcagcgcgcaggcgcctgggagctgcgcttctcgtaccgcgcgcgctgcgagccgcctgccgtcgggaccgcgtgcacgcgcctctgccgtccgcgcagcgccccctcgcggtgcggtccgggactgcgcccctgcgcaccgctcgaggacgaatgtgaggcgccgctggtgtgccgagcaggctgcagccctgagcatggcttctgtgaacagcccggtgaatgccgatgcctagagggctggactggacccctctgcacggtccctgtctccaccagcagctgcctcagccccaggggcccgtcctctgctaccaccggatgccttgtccctgggcctgggccctgtgacgggaacccgtgtgccaatggaggcagctgtagtgagacacccaggtcctttgaatgcacctgcccgcgtgggttctacgggctgcggtgtgaggtgagcggggtgacatgtgcagatggaccctgcttcaacggcggcttgtgtgtcgggggtgcagaccctgactctgcctacatctgccactgcccacctggtttccaaggctccaactgtgagaagagggtggaccggtgcagcctgcagccatgccgcaatggcggactctgcctggacctgggccacgccctgcgctgccgctgccgcgccggcttcgcgggtcctcgctgcgagcacgacctggacgactgcgcgggccgcgcctgcgctaacggcggcacgtgtgtggagggcggcggcgcgcaccgctgctcctgcgcgctgggcttcggcggccgcgactgccgcgagcgcgcggacccgtgcgccgcgcgcccctgtgctcacggcggccgctgctacgcccacttctccggcctcgtctgcgcttgcgctcccggctacatgggagcgcggtgtgagttcccagtgcaccccgacggcgcaagcgccttgcccgcggccccgccgggcctcaggcccggggaccctcagcgctaccttttgcctccggctctgggactgctcgtggccgcgggcgtggccggcgctgcgctcttgctggtccacgtgcgccgccgtggccactcccaggatgctgggtctcgcttgctggctgggaccccggagccgtcagtccacgcactcccggatgcactcaacaacctaaggacgcaggagggttccggggatggtccgagctcgtccgtagattggaatcgccctgaagatgtagaccctcaagggatttatgtcatatctgctccttccatctacgctcgggaggcctgacgcgtctcctccatccgcacctggagtcagagcgtggatttttgtatttgctcggtggtgcccagtctctgccccagaggctttggagttcaatcttgaaggggtgtctgggggaactttactgttgcaagttgtaaataatggttatttatatcctattttttctcaccccatctctctagaaacacctataaaggctattattgtgatcagttttgactaacgaggct

SEQ ID NO: 323679 - DNA, 806 bp, Homo sapiens
  misc_feature (700)..(700): n is a, c, g, or t
  misc_feature (706)..(706): n is a, c, g, or t
  misc_feature (708)..(708): n is a, c, g, or t
  misc_feature (723)..(723): n is a, c, g, or t
  misc_feature (730)..(730): n is a, c, g, or t
  misc_feature (756)..(756): n is a, c, g, or t
ccagcagctgcgactcccgagacccccccaccagaaggccatggtctccccacggatgtccgggctcctctcccagactgtgatcctagcgctcattttcctcccccagacacggcccgctggcgtcttcgagctgcagatccactctttcgggccgggtccaggccctggggccccgcggtccccctgcagcgcccggctcccctgccgcctcttcttcagagtctgcctgaagcctgggctctcagaggaggccgccgagtccccgtgcgccctgggcgcggcgctgagtgcgcgcggaccggtctacaccgagcagcccggagcgcccgcgcctgatctcccactgcccgacggcctcttgcaggtgcccttccgggacgcctggcctggcaccttctctttcatcatcgaaacctggagagaggagttaggagaccagattggagggcccgcctggagcctgctggcgcgcgtggctggcaggcggcgcttggcagccggaggcccgtgggcccgggacattcagcgcgcaggcgcctgggagctgcgcttctcgtaccgcgcgcgctgcgagccgcctgccgtcgggaccgcgtgcacgcgcctctgccgtccgcgcagcgccccctcgcggtgcggtccgggactgcgcccctgcgcaccgctcgaggacgaatgtgaggcgccgcggtgtgcnagaggntnagcctgacatgctcntgtgacngccgggatgcgatctaagggtgatgnccctctgccggcctgtttcacagggttgctcgccgggcgtcttggtcccg

SEQ ID NO: 323680 - DNA, 87 bp, Homo sapiens
agatgtgcagcgagtggccgggggacatgagggaggcaaacctgaaaaccttcaaagaaacctgtagacagttctagagttaaaggt

SEQ ID NO: 323681 - DNA, 6229 bp, Homo sapiens
gagagacacgaatatgtttcagccgcaacaggctgcgtttcagccggaagagtgaaagggcaccttgaaaacgcaagtttatgaatatgtttctgtactttcagaccatcatcaaagaggggatgctgaccaaacagaacaattcattccagcgatcaaaaaggagatactttaagcttcgagggcgaacgctttactatgccaaaacggcaaagtcaatcatatttgatgaggtggatctgacagatgccagcgtagctgaatccagtaccaaaaacgtcaacaacagttttacggtcataactccatgcaggaagctcatcttgtgtgctgataacagaaaagaaatggaagattggattgcagcattaaagactgtgcagaacagggagcactttgagcccacccagtacagcatggaccacttctcagggatgcacaattggtacgcctgttcccacgcgaggccgacctactgcaatgtgtgccgtgaggctctgtctggggtcacgtcgcacgggctgtcctgcgaggtgtgcaaatttaaggcccacaagcgctgtgctgtgcgtgcaaccaataactgcaagtggaccacactggcctcgatcgggaaggacatcattgaagatgcagatgggattgcaatgccccaccagtggttggaaggaaacctacctgtgagcgccaagtgcactgtgtgcgacaagacctgtggcagtgtgctgcgcctgcaggactggcgctgcctctggtgcaaggccatggttcacacatcgtgtaaagaatccttgctgaccaagtgcccacttggcctgtgcaaagtgtcagtcatcccacccacggctctcaacagcatcgactccgatgggttctggaaggccagctgtcctccttcttgcacaagcccactgttggtcttcgtcaattcaaaaagtggggacaaccagggtgtgaagttcctcagaagattcaaacagctactaaaccccgcccaggtcttcgacctcatgaacggaggcccacacctcggcttacggttattccagaagtttgacacattccggattctggtttgtggcggggatggaagtgttggctgggtcctctccgaaatcgacagcctcaaccttcataaacagtgtcagctgggagtgctgccgctcggcacagggaacgacttggcccgagtactgggctggggctcagcctgcgatgacgacacccagctcccccagatcttggagaagttggagagagccagcaccaagatgctggacaggtggagcgtcatggcatacgaggccaagctcccccggcaggcctcctcctctaccgtcaccgaagacttcagcgaggattccgaggtacagcagattctcttctatgaagactcggttgcagcccacctttctaaaatcctcacctcggaccagcactcggtggtcatctcctcggccaaagtgctctgtgagacggtgaaggacttcgtggcacgggtggggaaggcctatgagaagacgaccgagagctcggaggagtcagaggtcatggccaagaagtgctctgtcctgaaagagaagctggattcccttctcaagaccttggacgatgagtcccaggcctcgtcctctctgcccaacccgccccccaccattgccgaggaggctgaagatggagatgggtcgggcagcatctgcggttccaccggagaccgcttggtggcatcagcttgcccggcccggccgcagatattccggcctcgagaacagctcatgctgagagccaacagcctgaagaaagcaattcgtcagatcatagaacacacagaaaaagctgtcgatgagcagaatgcccagacccaggagcaggagggcttcgtcctgggcctctctgagtcagaggagaagatggaccacagagtgtgcccaccactgtcccacagcgagagcttcggggtccccaaggggaggagccagcgcaaagtgtcgaaatctccgtgtgaaaagctgatcagcaaagggagtctgtccctaggcagttctgcttcccttccgccccagccgggaagccgggacggcctgcctgcgctcaacaccaagatcctgtacccaaatgtccgggctggaatgtctggttccttacccggtggctcagtcatcagtcgcctgttaattaatgctgatcccttcaactctgaaccagaaaccctagagtattacacggagaaatgtgtcatgaacaactattttggcattggcctggatgcgaagatatccctggactttaacaacaagcgcgatgagcacccagagaagtgcaggagccgaaccaagaacatgatgtggtatggagttcttggaaccaaagagttgctgcacagaacctacaagaacctggagcaaaaggtcttgctggagtgtgacgggcgacccatcccactccccagtcttcagggaattgctgtccttaacattcccagctatgccggaggaaccaacttctgggggggtaccaaggaagatgatactttcgcagctccatcattcgatgacaagattctggaggtggtcgccgtgttcggcagcatgcagatggccgtctctcgagtcatcaggctacagcatcatcggatcgcccagtgtcgcacggtgaagatctccatccttggggatgagggcgtgcctgtgcaggtggacggagaggcctgggtccagccgccagggtacattcggattgtccacaagaaccgggcacagacactgaccagagacagggcatttgagagcaccctgaagtcctgggaagacaagcagaagtgcgagctgccccgccctccatcctgttccctgcacccggagatgctgtccgaggaggaggccacccagatggaccagtttgggcaggcagcaggggtcctcattcacagtatccgagaaatagctcagtctcaccgggacatggagcaggaactggcccacgccgtcaatgccagctccaagtccatggaccgtgtgtatggcaagcccagaaccacagaggggctcaactgcagcttcgtcctggaaatggtgaataacttcagagctctgcgcagtgagacggagctgctgctgtctgggaagatggccctgcagctggatccgcctcagaaggagcagctggggagtgctcttgccgagatggaccgacagctcaggaggctggcagacaccccgtggctctgccagtccgcagagcccggcgacgaagagagtgtgatgctggatcttgccaagcgcagtcgcagtggtaaattccgcctcgtgaccaagtttaaaaaggagaaaaacaacaagaacaaagaagctcacagtagcctgggagccccggttcacctctgggggacagaggaggttgctgcctggctggagcacctcagtctctgtgagtataaggacatcttcacacggcacgacatccggggctctgagctcctgcacctggagcggagggacctcaaggacctgggcgtgaccaaggtgggccacatgaagaggatcctgtgtggcatcaaggagctgagccgcagcgcccccgccgtcgaggcctagcctctgtcctctcagcctgtggcctccacatccccgccgccgaggcctagcctccgccctctcagcctgtggcctctgcgcctcctgccactgaggccctgggcagatgctgcagcccgcccccttctcatggtgctacttcctctgtcagctacagaaagcctccgtgacaccgtccaccagagctctggggtctcgaacataacaacacagctacctttgaaacaacactttctccagctcagagtcacctggggcacatgtgtcacggccactcagctctcgcccgcctgtgctgtgggccagggaatccagcggcgtctggcctcctgggcactgcttgcctggcctcgtgcttggattgtcccgggggctcctctccgtgtgtccttctgtggccgcaccgtgtggctccgcctcctggcccccagccagttctcagaaacgtggctggggcccagcacagcagcctgcaagggcccctgtttgttgatgcagcttttgttgaacaaaaatcgtgctctttcctggtttgaaagtagcatggatgtttccagtcttgttgattgtaatttgacgtgaagagaaaaaaaaattcctcctgcgtgagccaaggcagcgggtgctgtttcccaggcggggagcccctccctgggtgtcacagggcctgtgctcctccctcctccatcctctctcctcccgctcctccctccccccactgtgggctggggacgcctgcccttctgtctccggacgctctaggcgagttcagcttggggtgtgagtgagacagctcgccagctgcatccctgcagacagaggatgtgtgtccacatgagtgtttctgtgtgggaaatgcttcctggctctgggaaactttttctgcccattctgtggttcccagggagcgtggccctggtgggccaggggtggtttgacctcttcagcccgtccggtggcctggaggccggaggctctcctgagtgtctgcccctgcagtggcttcttgtcgcctgctgctgggcgtgatgtcgctggaggtgctggcagggactctgatttggtggtccgcgctgcccctgccctgcctctgtcctggctctgaactagtagatgatggtgccagagggcagggagctcgcctggggagagggctgtgccccgtagggacagtgcccaggtgaaggatgcccctggtcctccagggcactgactttgcccttttttcccgttgatagtcatggctcagaggtgcttgtaaatgtcttgggaagaggtttctgtaacccctgccctggtgtgaggaggaaatggctctggcctggctgcctggccgtggcttctctttggctcccaaagagaaggacagtgttgggagtatctgccgtggcttctctttggctcccaaagagaaggacagtgttgggagtatctgccggcgctgtccaggtcctttagtcagcgtcactccatctgatgtgcagaagctgggctgcacctgcgggggtgggcatagaccgggctgggtctgcagcagcccctggtcctgagcaggcggcagtgaacagcactggcccacctcccactcacagcccctctgtcccctctgcagtgcacccaggtgggcccctctgcgtgcctttgggtgctcccctctcgtggtcgttctggcccgaggcccttagagtatggaggctgagccaggccttgggtttccccagcacagcctcctgtcgctgcatgcgacgtgttgggatttttggatgaaagactctcccacgctctgttggtggacttagctgcctcactggaagtgatgtgggtggaaggtggttgtatgttaccttttccacctctcattgttttccccagaacattgtagatgggggttggcagagggagaaataagccagccacggcagtcgcttggtttcccaggtggaatgggctaacacaggagatgatgggaacctgtcccgcagtccctgcatgaccattggccctgctggcctggcgatgtgggcatcctggggttcttagggtcccagaacaagccccaggcaagctggaacttgggtggggaggggacatgaggaggataaacagctgactgtggcttcaaggacatcagggccaccccaagtcctcagtgtcctactcctggcaaggagttgggtttggatcaaaagtgtttaaaattaatatgttgtcagtgattagaacaacactgtttacataaaaaccatttttctaattctaacaagttagaatgtgaggaaggaatgaacatgagtgtttaggaacctgccctttggtgctgggctggcgtcccgcactggggtgtcctcgctgtctgggggctgctctgctgccccggcccaggtccccttgtggtgttgccagacgggcctcatggtctgctgtgcagagagaggcaggaaggatccctgaagagtcttggagaaaaggttctgtgccctcaggtggggcttaccccctcgtatttataatcttaatttatatagtgaccaccgtggaaacaaacgcctcttgtattgtcatgtacatagtccatacctgagtgctgtacataagttgttctgtgtataaataaaacaagcctgtttttgatcttc

SEQ ID NO: 323682 - DNA, 756 bp, Homo sapiens
agatgctgtagtggatggagggacgggtggcgaggcatcagagtgattccttggggctgtggtcacggtggtgaaaatgggaagcagagggatttgggagacagatcagagagggtgtgaggggctgaccatcaagatgtgatgacagctgagagatggacctgtggctcatccatttctcccagaagcagcatcttatctcaagggcagtcatgtttctgtctcattgccaaggaaaatgccatctgtcccctccagtgggctctgcctgtaatgtgtaagctgcgtggttttaggtcacgtccacacattgctaacgtaaccctcacggtgggggacaaggagggctgcgggctgggaagtggcccctgcccccaggtgtttgcctgcgcatcgtcccccatgtttccttagtgtcagctgggagtgctgccgctcggcacagggaacgacttggcccgagtactgggctggggctcagcctgcgatgacgacacccagctcccccagatcttggagaagttggagagagccagcaccaagatgctggacaggtgagtggggatgtgctccggtgccgtatgaggagactttgagagacaggtccctttgaccaggtgttcttaacctggggtctgtggaaaacatgggccctctgaaattatttgtaaagatttgacctgagtatatattcggatagtctttgatatttggtcagattatgacaaggataaaaacaaaacaggttaagaacca

SEQ ID NO: 323683 - DNA, 6820 bp, Homo sapiens
agcggggcccggcagcatggcggcggcggcgggcgcccctccgccgggtcccccgcaaccgcctccgccgccgccgcccgaggagtcgtccgacagcgagcccgaggcggagcccggctccccacagaagctcatccgcaaggtgtccacgtcgggtcagatccgacagaagaccatcatcaaagaggggatgctgaccaaacagaacaattcattccagcgatcaaaaaggagatactttaagcttcgagggcgaacgctttactatgccaaaacggcaaagtcaatcatatttgatgaggtggatctgacagatgccagcgtagctgaatccagtaccaaaaacgtcaacaacagttttacggtcataactccatgcaggaagctcatcttgtgtgctgataacagaaaagaaatggaagattggattgcagcattaaagactgtgcagaacagggagcactttgagcccacccagtacagcatggaccacttctcagggatgcacaattggtacgcctgttcccacgcgaggccgacctactgcaatgtgtgccgtgaggctctgtctggggtcacgtcgcacgggctgtcctgcgaggtgtgcaaatttaaggcccacaagcgctgtgctgtgcgtgcaaccaataactgcaagtggaccacactggcctcgatcgggaaggacatcattgaagatgcagatgggattgcaatgccccaccagtggttggaaggaaacctacctgtgagcgccaagtgcactgtgtgcgacaagacctgtggcagtgtgctgcgcctgcaggactggcgctgcctctggtgcaaggccatggttcacacatcgtgtaaagaatccttgctgaccaagtgcccacttggcctgtgcaaagtgtcagtcatcccacccacggctctcaacagcatcgactccgatgggttctggaaggccagctgtcctccttcttgcacaagcccactgttggtcttcgtcaattcaaaaagtggggacaaccagggtgtgaagttcctcagaagattcaaacagctactaaaccccgcccaggtcttcgacctcatgaacggaggcccacacctcggcttacggttattccagaagtttgacacattccggattctggtttgtggcggggatggaagtgttggctgggtcctctccgaaatcgacagcctcaaccttcataaacagtgtcagctgggagtgctgccgctcggcacagggaacgacttggcccgagtactgggctggggctcagcctgcgatgacgacacccagctcccccagatcttggagaagttggagagagccagcaccaagatgctggacaggtggagcgtcatggcatacgaggccaagctcccccggcaggcctcctcctctaccgtcaccgaagacttcagcgaggattccgaggtacagcagattctcttctatgaagactcggttgcagcccacctttctaaaatcctcacctcggaccagcactcggtggtcatctcctcggccaaagtgctctgtgagacggtgaaggacttcgtggcacgggtggggaaggcctatgagaagacgaccgagagctcggaggagtcagaggtcatggccaagaagtgctctgtcctgaaagagaagctggattcccttctcaagaccttggacgatgagtcccaggcctcgtcctctctgcccaacccgccccccaccattgccgaggaggctgaagatggagatgggtcgggcagcatctgcggttccaccggagaccgcttggtggcatcagcttgcccggcccggccgcagatattccggcctcgagaacagctcatgctgagagccaacagcctgaagaaagcaattcgtcagatcatagaacacacagaaaaagctgtcgatgagcagaatgcccagacccaggagcaggagggcttcgtcctgggcctctctgagtcagaggagaagatggaccacagagtgtgcccaccactgtcccacagcgagagcttcggggtccccaaggggaggagccagcgcaaagtgtcgaaatctccgtgtgaaaagctgatcagcaaagggagtctgtccctaggcagttctgcttcccttccgccccagccgggaagccgggacggcctgcctgcgctcaacaccaagatcctgtacccaaatgtccgggctggaatgtctggttccttacccggtggctcagtcatcagtcgcctgttaattaatgctgatcccttcaactctgaaccagaaaccctagagtattacacggagaaatgtgtcatgaacaactattttggcattggcctggatgcgaagatatccctggactttaacaacaagcgcgatgagcacccagagaagtgcaggagccgaaccaagaacatgatgtggtatggagttcttggaaccaaagagttgctgcacagaacctacaagaacctggagcaaaaggtcttgctggagtgtgacgggcgacccatcccactccccagtcttcagggaattgctgtccttaacattcccagctatgccggaggaaccaacttctgggggggtaccaaggaagatgatactttcgcagctccatcattcgatgacaagattctggaggtggtcgccgtgttcggcagcatgcagatggccgtctctcgagtcatcaggctacagcatcatcggatcgcccagtgtcgcacggtgaagatctccatccttggggatgagggcgtgcctgtgcaggtggacggagaggcctgggtccagccgccagggtacattcggattgtccacaagaaccgggcacagacactgaccagagacagggcatttgagagcaccctgaagtcctgggaagacaagcagaagtgcgagctgccccgccctccatcctgttccctgcacccggagatgctgtccgaggaggaggccacccagatggaccagtttgggcaggcagcaggggtcctcattcacagtatccgagaaatagctcagtctcaccgggacatggagcaggaactggcccacgccgtcaatgccagctccaagtccatggaccgtgtgtatggcaagcccagaaccacagaggggctcaactgcagcttcgtcctggaaatggtgaataacttcagagctctgcgcagtgagacggagctgctgctgtctgggaagatggccctgcagctggatccgcctcagaaggagcagctggggagtgctcttgccgagatggaccgacagctcaggaggctggcagacaccccgtggctctgccagtccgcagagcccggcgacgaagagagtgtgatgctggatcttgccaagcgcagtcgcagtggtaaattccgcctcgtgaccaagtttaaaaaggagaaaaacaacaagaacaaagaagctcacagtagcctgggagccccggttcacctctgggggacagaggaggttgctgcctggctggagcacctcagtctctgtgagtataaggacatcttcacacggcacgacatccggggctctgagctcctgcacctggagcggagggacctcaaggacctgggcgtgaccaaggtgggccacatgaagaggatcctgtgtggcatcaaggagctgagccgcagcgcccccgccgtcgaggcctagcctctgtcctctcagcctgtggcctccacatccccgccgccgaggcctagcctccgccctctcagcctgtggcctctgcgcctcctgccactgaggccctgggcagatgctgcagcccgcccccttctcatggtgctacttcctctgtcagctacagaaagcctccgtgacaccgtccaccagagctctggggtctcgaacataacaacacagctacctttgaaacaacactttctccagctcagagtcacctggggcacatgtgtcacggccactcagctctcgcccgcctgtgctgtgggccagggaatccagcggcgtctggcctcctgggcactgcttgcctggcctcgtgcttggattgtcccgggggctcctctccgtgtgtccttctgtggccgcaccgtgtggctccgcctcctggcccccagccagttctcagaaacgtggctggggcccagcacagcagcctgcaagggcccctgtttgttgatgcagcttttgttgaacaaaaatcgtgctctttcctggtttgaaagtagcatggatgtttccagtcttgttgattgtaatttgacgtgaagagaaaaaaaaattcctcctgcgtgagccaaggcagcgggtgctgtttcccaggcggggagcccctccctgggtgtcacagggcctgtgctcctccctcctccatcctctctcctcccgctcctccctccccccactgtgggctggggacgcctgcccttctgtctccggacgctctaggcgagttcagcttggggtgtgagtgagacagctcgccagctgcatccctgcagacagaggatgtgtgtccacatgagtgtttctgtgtgggaaatgcttcctggctctgggaaactttttctgcccattctgtggttcccagggagcgtggccctggtgggccaggggtggtttgacctcttcagcccgtccggtggcctggaggccggaggctctcctgagtgtctgcccctgcagtggcttcttgtcgcctgctgctgggcgtgatgtcgctggaggtgctggcagggactctgatttggtggtccgcgctgcccctgccctgcctctgtcctggctctgaactagtagatgatggtgccagagggcagggagctcgcctggggagagggctgtgccccgtagggacagtgcccaggtgaaggatgcccctggtcctccagggcactgactttgcccttttttcccgttgatagtcatggctcagaggtgcttgtaaatgtcttgggaagaggtttctgtaacccctgccctggtgtgaggaggaaatggctctggcctggctgcctggccgtggcttctctttggctcccaaagagaaggacagtgttgggagtatctgccgtggcttctctttggctcccaaagagaaggacagtgttgggagtatctgccggcgctgtccaggtcctttagtcagcgtcactccatctgatgtgcagaagctgggctgcacctgcgggggtgggcatagaccgggctgggtctgcagcagcccctggtcctgagcaggcggcagtgaacagcactggcccacctcccactcacagcccctctgtcccctctgcagtgcacccaggtgggcccctctgcgtgcctttgggtgctcccctctcgtggtcgttctggcccgaggcccttagagtatggaggctgagccaggccttgggtttccccagcacagcctcctgtcgctgcatgcgacgtgttgggatttttggatgaaagactctcccacgctctgttggtggacttagctgcctcactggaagtgatgtgggtggaaggtggttgtatgttaccttttccacctctcattgttttccccagaacattgtagatgggggttggcagagggagaaataagccagccacggcagtcgcttggtttcccaggtggaatgggctaacacaggagatgatgggaacctgtcccgcagtccctgcatgaccattggccctgctggcctggcgatgtgggcatcctggggttcttagggtcccagaacaagccccaggcaagctggaacttgggtggggaggggacatgaggaggataaacagctgactgtggcttcaaggacatcagggccaccccaagtcctcagtgtcctactcctggcaaggagttgggtttggatcaaaagtgtttaaaattaatatgttgtcagtgattagaacaacactgtttacataaaaaccatttttctaattctaacaagttagaatgtgaggaaggaatgaacatgagtgtttaggaacctgccctttggtgctgggctggcgtcccgcactggggtgtcctcgctgtctgggggctgctctgctgccccggcccaggtccccttgtggtgttgccagacgggcctcatggtctgctgtgcagagagaggcaggaaggatccctgaagagtcttggagaaaaggttctgtgccctcaggtggggcttaccccctcgtatttataatcttaatttatatagtgaccaccgtggaaacaaacgcctcttgtattgtcatgtacatagtccatacctgagtgctgtacataagttgttctgtgtataaataaaacaagcctgtttttgatcttcaaaaaaaaaaaaaaaaaaaaaaaaaaaaaaaaaaaaaaaaaaaaaaaaaaaaaaaaaaaaaaaaaaaaaaaaggggggggggggcgaaaaaccccggaggggggacaccatagatacgatagcacaacccaccatgttgttgttgtgagaacaaggggtggcccccaaagaggagggctgcattaatataaaagcagatgagagagggagagggggcggcgggattgttataaaaaagcggtgtggggaggtgggagaaacaagtgcggttattggtgcggacttgtgtggaggaggaggagagaacccccatttgtgggggggggtgagaacacaatagtggggggacacacactcctacaagaagagatattatacaggcctggagggcggaagaaatatcaaaacttggaagggggtgttatttgaggtggtgtaaaccacatgactggatgatgtttgtggcgtgcgtggaaagagattcgggtcacgggcgatagtgttctaggaaaaacattagagg

SEQ ID NO: 323684 - DNA, 6700 bp, Homo sapiens
agcggggcccggcagcatggcggcggcggcgggcgcccctccgccgggtcccccgcaaccgcctccgccgccgccgcccgaggagtcgtccgacagcgagcccgaggcggagcccggctccccacagaagctcatccgcaaggtgtccacgtcgggtcagatccgacagaagaccatcatcaaagaggggatgctgaccaaacagaacaattcattccagcgatcaaaaaggagatactttaagcttcgagggcgaacgctttactatgccaaaacggcaaagtcaatcatatttgatgaggtggatctgacagatgccagcgtagctgaatccagtaccaaaaacgtcaacaacagttttacggtcataactccatgcaggaagctcatcttgtgtgctgataacagaaaagaaatggaagattggattgcagcattaaagactgtgcagaacagggagcactttgagcccacccagtacagcatggaccacttctcagggatgcacaattggtacgcctgttcccacgcgaggccgacctactgcaatgtgtgccgtgaggctctgtctggggtcacgtcgcacgggctgtcctgcgaggtgtgcaaatttaaggcccacaagcgctgtgctgtgcgtgcaaccaataactgcaagtggaccacactggcctcgatcgggaaggacatcattgaagatgcagatgggattgcaatgccccaccagtggttggaaggaaacctacctgtgagcgccaagtgcactgtgtgcgacaagacctgtggcagtgtgctgcgcctgcaggactggcgctgcctctggtgcaaggccatggttcacacatcgtgtaaagaatccttgctgaccaagtgcccacttggcctgtgcaaagtgtcagtcatcccacccacggctctcaacagcatcgactccgatgggttctggaaggccagctgtcctccttcttgcacaagcccactgttggtcttcgtcaattcaaaaagtggggacaaccagggtgtgaagttcctcagaagattcaaacagctactaaaccccgcccaggtcttcgacctcatgaacggaggcccacacctcggcttacggttattccagaagtttgacacattccggattctggtttgtggcggggatggaagtgttggctgggtcctctccgaaatcgacagcctcaaccttcataaacagtgtcagctgggagtgctgccgctcggcacagggaacgacttggcccgagtactgggctggggctcagcctgcgatgacgacacccagctcccccagatcttggagaagttggagagagccagcaccaagatgctggacaggtggagcgtcatggcatacgaggccaagctcccccggcaggcctcctcctctaccgtcaccgaagacttcagcgaggattccgaggtacagcagattctcttctatgaagactcggttgcagcccacctttctaaaatcctcacctcggaccagcactcggtggtcatctcctcggccaaagtgctctgtgagacggtgaaggacttcgtggcacgggtggggaaggcctatgagaagacgaccgagagctcggaggagtcagaggtcatggccaagaagtgctctgtcctgaaagagaagctggattcccttctcaagaccttggacgatgagtcccaggcctcgtcctctctgcccaacccgccccccaccattgccgaggaggctgaagatggagatgggtcgggcagcatctgcggttccaccggagaccgcttggtggcatcagcttgcccggcccggccgcagatattccggcctcgagaacagctcatgctgagagccaacagcctgaagaaagcaattcgtcagatcatagaacacacagaaaaagctgtcgatgagcagaatgcccagacccaggagcaggagggcttcgtcctgggcctctctgagtcagaggagaagatggaccacagagtgtgcccaccactgtcccacagcgagagcttcggggtccccaaggggaggagccagcgcaaagtgtcgaaatctccgtgtgaaaagctgatcagcaaagggagtctgtccctaggcagttctgcttcccttccgccccagccgggaagccgggacggcctgcctgcgctcaacaccaagatcctgtacccaaatgtccgggctggaatgtctggttccttacccggtggctcagtcatcagtcgcctgttaattaatgctgatcccttcaactctgaaccagaaaccctagagtattacacggagaaatgtgtcatgaacaactattttggcattggcctggatgcgaagatatccctggactttaacaacaagcgcgatgagcacccagagaagtgcaggagccgaaccaagaacatgatgtggtatggagttcttggaaccaaagagttgctgcacagaacctacaagaacctggagcaaaaggtcttgctggagtgtgacgggcgacccatcccactccccagtcttcagggaattgctgtccttaacattcccagctatgccggaggaaccaacttctgggggggtaccaaggaagatgatactttcgcagctccatcattcgatgacaagattctggaggtggtcgccgtgttcggcagcatgcagatggccgtctctcgagtcatcaggctacagcatcatcggatcgcccagtgtcgcacggtgaagatctccatccttggggatgagggcgtgcctgtgcaggtggacggagaggcctgggtccagccgccagggtacattcggattgtccacaagaaccgggcacagacactgaccagagacaggtttgggcaggcagcaggggtcctcattcacagtatccgagaaatagctcagtctcaccgggacatggagcaggaactggcccacgccgtcaatgccagctccaagtccatggaccgtgtgtatggcaagcccagaaccacagaggggctcaactgcagcttcgtcctggaaatggtgaataacttcagagctctgcgcagtgagacggagctgctgctgtctgggaagatggccctgcagctggatccgcctcagaaggagcagctggggagtgctcttgccgagatggaccgacagctcaggaggctggcagacaccccgtggctctgccagtccgcagagcccggcgacgaagagagtgtgatgctggatcttgccaagcgcagtcgcagtggtaaattccgcctcgtgaccaagtttaaaaaggagaaaaacaacaagaacaaagaagctcacagtagcctgggagccccggttcacctctgggggacagaggaggttgctgcctggctggagcacctcagtctctgtgagtataaggacatcttcacacggcacgacatccggggctctgagctcctgcacctggagcggagggacctcaaggacctgggcgtgaccaaggtgggccacatgaagaggatcctgtgtggcatcaaggagctgagccgcagcgcccccgccgtcgaggcctagcctctgtcctctcagcctgtggcctccacatccccgccgccgaggcctagcctccgccctctcagcctgtggcctctgcgcctcctgccactgaggccctgggcagatgctgcagcccgcccccttctcatggtgctacttcctctgtcagctacagaaagcctccgtgacaccgtccaccagagctctggggtctcgaacataacaacacagctacctttgaaacaacactttctccagctcagagtcacctggggcacatgtgtcacggccactcagctctcgcccgcctgtgctgtgggccagggaatccagcggcgtctggcctcctgggcactgcttgcctggcctcgtgcttggattgtcccgggggctcctctccgtgtgtccttctgtggccgcaccgtgtggctccgcctcctggcccccagccagttctcagaaacgtggctggggcccagcacagcagcctgcaagggcccctgtttgttgatgcagcttttgttgaacaaaaatcgtgctctttcctggtttgaaagtagcatggatgtttccagtcttgttgattgtaatttgacgtgaagagaaaaaaaaattcctcctgcgtgagccaaggcagcgggtgctgtttcccaggcggggagcccctccctgggtgtcacagggcctgtgctcctccctcctccatcctctctcctcccgctcctccctccccccactgtgggctggggacgcctgcccttctgtctccggacgctctaggcgagttcagcttggggtgtgagtgagacagctcgccagctgcatccctgcagacagaggatgtgtgtccacatgagtgtttctgtgtgggaaatgcttcctggctctgggaaactttttctgcccattctgtggttcccagggagcgtggccctggtgggccaggggtggtttgacctcttcagcccgtccggtggcctggaggccggaggctctcctgagtgtctgcccctgcagtggcttcttgtcgcctgctgctgggcgtgatgtcgctggaggtgctggcagggactctgatttggtggtccgcgctgcccctgccctgcctctgtcctggctctgaactagtagatgatggtgccagagggcagggagctcgcctggggagagggctgtgccccgtagggacagtgcccaggtgaaggatgcccctggtcctccagggcactgactttgcccttttttcccgttgatagtcatggctcagaggtgcttgtaaatgtcttgggaagaggtttctgtaacccctgccctggtgtgaggaggaaatggctctggcctggctgcctggccgtggcttctctttggctcccaaagagaaggacagtgttgggagtatctgccgtggcttctctttggctcccaaagagaaggacagtgttgggagtatctgccggcgctgtccaggtcctttagtcagcgtcactccatctgatgtgcagaagctgggctgcacctgcgggggtgggcatagaccgggctgggtctgcagcagcccctggtcctgagcaggcggcagtgaacagcactggcccacctcccactcacagcccctctgtcccctctgcagtgcacccaggtgggcccctctgcgtgcctttgggtgctcccctctcgtggtcgttctggcccgaggcccttagagtatggaggctgagccaggccttgggtttccccagcacagcctcctgtcgctgcatgcgacgtgttgggatttttggatgaaagactctcccacgctctgttggtggacttagctgcctcactggaagtgatgtgggtggaaggtggttgtatgttaccttttccacctctcattgttttccccagaacattgtagatgggggttggcagagggagaaataagccagccacggcagtcgcttggtttcccaggtggaatgggctaacacaggagatgatgggaacctgtcccgcagtccctgcatgaccattggccctgctggcctggcgatgtgggcatcctggggttcttagggtcccagaacaagccccaggcaagctggaacttgggtggggaggggacatgaggaggataaacagctgactgtggcttcaaggacatcagggccaccccaagtcctcagtgtcctactcctggcaaggagttgggtttggatcaaaagtgtttaaaattaatatgttgtcagtgattagaacaacactgtttacataaaaaccatttttctaattctaacaagttagaatgtgaggaaggaatgaacatgagtgtttaggaacctgccctttggtgctgggctggcgtcccgcactggggtgtcctcgctgtctgggggctgctctgctgccccggcccaggtccccttgtggtgttgccagacgggcctcatggtctgctgtgcagagagaggcaggaaggatccctgaagagtcttggagaaaaggttctgtgccctcaggtggggcttaccccctcgtatttataatcttaatttatatagtgaccaccgtggaaacaaacgcctcttgtattgtcatgtacatagtccatacctgagtgctgtacataagttgttctgtgtataaataaaacaagcctgtttttgatcttcaaaaaaaaaaaaaaaaaaaaaaaaaaaaaaaaaaaaaaaaaaaaaaaaaaaaaaaaaaaaaaaaaaaaaaaaggggggggggggcgaaaaaccccggaggggggacaccatagatacgatagcacaacccaccatgttgttgttgtgagaacaaggggtggcccccaaagaggagggctgcattaatataaaagcagatgagagagggagagggggcggcgggattgttataaaaaagcggtgtggggaggtgggagaaacaagtgcggttattggtgcggacttgtgtggaggaggaggagagaacccccatttgtgggggggggtgagaacacaatagtggggggacacacactcctacaagaagagatattatacaggcctggagggcggaagaaatatcaaaacttggaagggggtgttatttgaggtggtgtaaaccacatgactggatgatgtttgtggcgtgcgtggaaagagattcgggtcacgggcgatagtgttctaggaaaaacattagagg

SEQ ID NO: 323685 - DNA, 6024 bp, Homo sapiens
agatgctgtagtggatggagggacgggtggcgaggcatcagagtgattccttggggctgtggtcacggtggtgaaaatgggaagcagagggatttgggagacagatcagagagggtgtgaggggctgaccatcaagatgtgatgacagctgagagatggacctgtggctcatccatttctcccagaagcagcatcttatctcaagggcagtcatgtttctgtctcattgccaaggaaaatgccatctgtcccctccagtgggctctgcctgtaatgtgtaagctgcgtggttttaggtcacgtccacacattgctaacgtaaccctcacggtgggggacaaggagggctgcgggctgggaagtggcccctgcccccaggtgtttgcctgcgcatcgtcccccatgtttccttagtgtcagctgggagtgctgccgctcggcacagggaacgacttggcccgagtactgggctggggctcagcctgcgatgacgacacccagctcccccagatcttggagaagttggagagagccagcaccaagatgctggacaggtggagcgtcatggcatacgaggccaagctcccccggcaggcctcctcctctaccgtcaccgaagacttcagcgaggattccgaggtacagcagattctcttctatgaagactcggttgcagcccacctttctaaaatcctcacctcggaccagcactcggtggtcatctcctcggccaaagtgctctgtgagacggtgaaggacttcgtggcacgggtggggaaggcctatgagaagacgaccgagagctcggaggagtcagaggtcatggccaagaagtgctctgtcctgaaagagaagctggattcccttctcaagaccttggacgatgagtcccaggcctcgtcctctctgcccaacccgccccccaccattgccgaggaggctgaagatggagatgggtcgggcagcatctgcggttccaccggagaccgcttggtggcatcagcttgcccggcccggccgcagatattccggcctcgagaacagctcatgctgagagccaacagcctgaagaaagcaattcgtcagatcatagaacacacagaaaaagctgtcgatgagcagaatgcccagacccaggagcaggagggcttcgtcctgggcctctctgagtcagaggagaagatggaccacagagtgtgcccaccactgtcccacagcgagagcttcggggtccccaaggggaggagccagcgcaaagtgtcgaaatctccgtgtgaaaagctgatcagcaaagggagtctgtccctaggcagttctgcttcccttccgccccagccgggaagccgggacggcctgcctgcgctcaacaccaagatcctgtacccaaatgtccgggctggaatgtctggttccttacccggtggctcagtcatcagtcgcctgttaattaatgctgatcccttcaactctgaaccagaaaccctagagtattacacggagaaatgtgtcatgaacaactattttggcattggcctggatgcgaagatatccctggactttaacaacaagcgcgatgagcacccagagaagtgcaggagccgaaccaagaacatgatgtggtatggagttcttggaaccaaagagttgctgcacagaacctacaagaacctggagcaaaaggtcttgctggagtgtgacgggcgacccatcccactccccagtcttcagggaattgctgtccttaacattcccagctatgccggaggaaccaacttctgggggggtaccaaggaagatgatactttcgcagctccatcattcgatgacaagattctggaggtggtcgccgtgttcggcagcatgcagatggccgtctctcgagtcatcaggctacagcatcatcggatcgcccagtgtcgcacggtgaagatctccatccttggggatgagggcgtgcctgtgcaggtggacggagaggcctgggtccagccgccagggtacattcggattgtccacaagaaccgggcacagacactgaccagagacagggcatttgagagcaccctgaagtcctgggaagacaagcagaagtgcgagctgccccgccctccatcctgttccctgcacccggagatgctgtccgaggaggaggccacccagatggaccagtttgggcaggcagcaggggtcctcattcacagtatccgagaaatagctcagtctcaccgggacatggagcaggaactggcccacgccgtcaatgccagctccaagtccatggaccgtgtgtatggcaagcccagaaccacagaggggctcaactgcagcttcgtcctggaaatggtgaataacttcagagctctgcgcagtgagacggagctgctgctgtctgggaagatggccctgcagctggatccgcctcagaaggagcagctggggagtgctcttgccgagatggaccgacagctcaggaggctggcagacaccccgtggctctgccagtccgcagagcccggcgacgaagagagtgtgatgctggatcttgccaagcgcagtcgcagtggtaaattccgcctcgtgaccaagtttaaaaaggagaaaaacaacaagaacaaagaagctcacagtagcctgggagccccggttcacctctgggggacagaggaggttgctgcctggctggagcacctcagtctctgtgagtataaggacatcttcacacggcacgacatccggggctctgagctcctgcacctggagcggagggacctcaaggacctgggcgtgaccaaggtgggccacatgaagaggatcctgtgtggcatcaaggagctgagccgcagcgcccccgccgtcgaggcctagcctctgtcctctcagcctgtggcctccacatccccgccgccgaggcctagcctccgccctctcagcctgtggcctctgcgcctcctgccactgaggccctgggcagatgctgcagcccgcccccttctcatggtgctacttcctctgtcagctacagaaagcctccgtgacaccgtccaccagagctctggggtctcgaacataacaacacagctacctttgaaacaacactttctccagctcagagtcacctggggcacatgtgtcacggccactcagctctcgcccgcctgtgctgtgggccagggaatccagcggcgtctggcctcctgggcactgcttgcctggcctcgtgcttggattgtcccgggggctcctctccgtgtgtccttctgtggccgcaccgtgtggctccgcctcctggcccccagccagttctcagaaacgtggctggggcccagcacagcagcctgcaagggcccctgtttgttgatgcagcttttgttgaacaaaaatcgtgctctttcctggtttgaaagtagcatggatgtttccagtcttgttgattgtaatttgacgtgaagagaaaaaaaaattcctcctgcgtgagccaaggcagcgggtgctgtttcccaggcggggagcccctccctgggtgtcacagggcctgtgctcctccctcctccatcctctctcctcccgctcctccctccccccactgtgggctggggacgcctgcccttctgtctccggacgctctaggcgagttcagcttggggtgtgagtgagacagctcgccagctgcatccctgcagacagaggatgtgtgtccacatgagtgtttctgtgtgggaaatgcttcctggctctgggaaactttttctgcccattctgtggttcccagggagcgtggccctggtgggccaggggtggtttgacctcttcagcccgtccggtggcctggaggccggaggctctcctgagtgtctgcccctgcagtggcttcttgtcgcctgctgctgggcgtgatgtcgctggaggtgctggcagggactctgatttggtggtccgcgctgcccctgccctgcctctgtcctggctctgaactagtagatgatggtgccagagggcagggagctcgcctggggagagggctgtgccccgtagggacagtgcccaggtgaaggatgcccctggtcctccagggcactgactttgcccttttttcccgttgatagtcatggctcagaggtgcttgtaaatgtcttgggaagaggtttctgtaacccctgccctggtgtgaggaggaaatggctctggcctggctgcctggccgtggcttctctttggctcccaaagagaaggacagtgttgggagtatctgccgtggcttctctttggctcccaaagagaaggacagtgttgggagtatctgccggcgctgtccaggtcctttagtcagcgtcactccatctgatgtgcagaagctgggctgcacctgcgggggtgggcatagaccgggctgggtctgcagcagcccctggtcctgagcaggcggcagtgaacagcactggcccacctcccactcacagcccctctgtcccctctgcagtgcacccaggtgggcccctctgcgtgcctttgggtgctcccctctcgtggtcgttctggcccgaggcccttagagtatggaggctgagccaggccttgggtttccccagcacagcctcctgtcgctgcatgcgacgtgttgggatttttggatgaaagactctcccacgctctgttggtggacttagctgcctcactggaagtgatgtgggtggaaggtggttgtatgttaccttttccacctctcattgttttccccagaacattgtagatgggggttggcagagggagaaataagccagccacggcagtcgcttggtttcccaggtggaatgggctaacacaggagatgatgggaacctgtcccgcagtccctgcatgaccattggccctgctggcctggcgatgtgggcatcctggggttcttagggtcccagaacaagccccaggcaagctggaacttgggtggggaggggacatgaggaggataaacagctgactgtggcttcaaggacatcagggccaccccaagtcctcagtgtcctactcctggcaaggagttgggtttggatcaaaagtgtttaaaattaatatgttgtcagtgattagaacaacactgtttacataaaaaccatttttctaattctaacaagttagaatgtgaggaaggaatgaacatgagtgtttaggaacctgccctttggtgctgggctggcgtcccgcactggggtgtcctcgctgtctgggggctgctctgctgccccggcccaggtccccttgtggtgttgccagacgggcctcatggtctgctgtgcagagagaggcaggaaggatccctgaagagtcttggagaaaaggttctgtgccctcaggtggggcttaccccctcgtatttataatcttaatttatatagtgaccaccgtggaaacaaacgcctcttgtattgtcatgtacatagtccatacctgagtgctgtacataagttgttctgtgtataaataaaacaagcctgtttttgatcttcaaaaaaaaaaaaaaaaaaaaaaaaaaaaaaaaaaaaaaaaaaaaaaaaaaaaaaaaaaaaaaaaaaaaaaaaggggggggggggcgaaaaaccccggaggggggacaccatagatacgatagcacaacccaccatgttgttgttgtgagaacaaggggtggcccccaaagaggagggctgcattaatataaaagcagatgagagagggagagggggcggcgggattgttataaaaaagcggtgtggggaggtgggagaaacaagtgcggttattggtgcggacttgtgtggaggaggaggagagaacccccatttgtgggggggggtgagaacacaatagtggggggacacacactcctacaagaagagatattatacaggcctggagggcggaagaaatatcaaaacttggaagggggtgttatttgaggtggtgtaaaccacatgactggatgatgtttgtggcgtgcgtggaaagagattcgggtcacgggcgatagtgttctaggaaaaacattagagg

SEQ ID NO: 323686 - DNA, 5596 bp, Homo sapiens
ccagatggggctcacagccaggtggaaacagcctctgctgcaaacggacccaaacctggagccgacccgccagcatgccgctgtcaggatgagtaggggtcaggacggaagctcctagcacaggccgtgctgggatcgcagactgaaggagattcatttgcagtttgcctgcagcttgacgaagcttttaaaatctctcacctagcactaggtacagcagattctcttctatgaagactcggttgcagcccacctttctaaaatcctcacctcggaccagcactcggtggtcatctcctcggccaaagtgctctgtgagacggtgaaggacttcgtggcacgggtggggaaggcctatgagaagacgaccgagagctcggaggagtcagaggtcatggccaagaagtgctctgtcctgaaagagaagctggattcccttctcaagaccttggacgatgagtcccaggcctcgtcctctctgcccaacccgccccccaccattgccgaggaggctgaagatggagatgggtcgggcagcatctgcggttccaccggagaccgcttggtggcatcagcttgcccggcccggccgcagatattccggcctcgagaacagctcatgctgagagccaacagcctgaagaaagcaattcgtcagatcatagaacacacagaaaaagctgtcgatgagcagaatgcccagacccaggagcaggagggcttcgtcctgggcctctctgagtcagaggagaagatggaccacagagtgtgcccaccactgtcccacagcgagagcttcggggtccccaaggggaggagccagcgcaaagtgtcgaaatctccgtgtgaaaagctgatcagcaaagggagtctgtccctaggcagttctgcttcccttccgccccagccgggaagccgggacggcctgcctgcgctcaacaccaagatcctgtacccaaatgtccgggctggaatgtctggttccttacccggtggctcagtcatcagtcgcctgttaattaatgctgatcccttcaactctgaaccagaaaccctagagtattacacggagaaatgtgtcatgaacaactattttggcattggcctggatgcgaagatatccctggactttaacaacaagcgcgatgagcacccagagaagtgcaggagccgaaccaagaacatgatgtggtatggagttcttggaaccaaagagttgctgcacagaacctacaagaacctggagcaaaaggtcttgctggagtgtgacgggcgacccatcccactccccagtcttcagggaattgctgtccttaacattcccagctatgccggaggaaccaacttctgggggggtaccaaggaagatgatactttcgcagctccatcattcgatgacaagattctggaggtggtcgccgtgttcggcagcatgcagatggccgtctctcgagtcatcaggctacagcatcatcggatcgcccagtgtcgcacggtgaagatctccatccttggggatgagggcgtgcctgtgcaggtggacggagaggcctgggtccagccgccagggtacattcggattgtccacaagaaccgggcacagacactgaccagagacagggcatttgagagcaccctgaagtcctgggaagacaagcagaagtgcgagctgccccgccctccatcctgttccctgcacccggagatgctgtccgaggaggaggccacccagatggaccagtttgggcaggcagcaggggtcctcattcacagtatccgagaaatagctcagtctcaccgggacatggagcaggaactggcccacgccgtcaatgccagctccaagtccatggaccgtgtgtatggcaagcccagaaccacagaggggctcaactgcagcttcgtcctggaaatggtgaataacttcagagctctgcgcagtgagacggagctgctgctgtctgggaagatggccctgcagctggatccgcctcagaaggagcagctggggagtgctcttgccgagatggaccgacagctcaggaggctggcagacaccccgtggctctgccagtccgcagagcccggcgacgaagagagtgtgatgctggatcttgccaagcgcagtcgcagtggtaaattccgcctcgtgaccaagtttaaaaaggagaaaaacaacaagaacaaagaagctcacagtagcctgggagccccggttcacctctgggggacagaggaggttgctgcctggctggagcacctcagtctctgtgagtataaggacatcttcacacggcacgacatccggggctctgagctcctgcacctggagcggagggacctcaaggacctgggcgtgaccaaggtgggccacatgaagaggatcctgtgtggcatcaaggagctgagccgcagcgcccccgccgtcgaggcctagcctctgtcctctcagcctgtggcctccacatccccgccgccgaggcctagcctccgccctctcagcctgtggcctctgcgcctcctgccactgaggccctgggcagatgctgcagcccgcccccttctcatggtgctacttcctctgtcagctacagaaagcctccgtgacaccgtccaccagagctctggggtctcgaacataacaacacagctacctttgaaacaacactttctccagctcagagtcacctggggcacatgtgtcacggccactcagctctcgcccgcctgtgctgtgggccagggaatccagcggcgtctggcctcctgggcactgcttgcctggcctcgtgcttggattgtcccgggggctcctctccgtgtgtccttctgtggccgcaccgtgtggctccgcctcctggcccccagccagttctcagaaacgtggctggggcccagcacagcagcctgcaagggcccctgtttgttgatgcagcttttgttgaacaaaaatcgtgctctttcctggtttgaaagtagcatggatgtttccagtcttgttgattgtaatttgacgtgaagagaaaaaaaaattcctcctgcgtgagccaaggcagcgggtgctgtttcccaggcggggagcccctccctgggtgtcacagggcctgtgctcctccctcctccatcctctctcctcccgctcctccctccccccactgtgggctggggacgcctgcccttctgtctccggacgctctaggcgagttcagcttggggtgtgagtgagacagctcgccagctgcatccctgcagacagaggatgtgtgtccacatgagtgtttctgtgtgggaaatgcttcctggctctgggaaactttttctgcccattctgtggttcccagggagcgtggccctggtgggccaggggtggtttgacctcttcagcccgtccggtggcctggaggccggaggctctcctgagtgtctgcccctgcagtggcttcttgtcgcctgctgctgggcgtgatgtcgctggaggtgctggcagggactctgatttggtggtccgcgctgcccctgccctgcctctgtcctggctctgaactagtagatgatggtgccagagggcagggagctcgcctggggagagggctgtgccccgtagggacagtgcccaggtgaaggatgcccctggtcctccagggcactgactttgcccttttttcccgttgatagtcatggctcagaggtgcttgtaaatgtcttgggaagaggtttctgtaacccctgccctggtgtgaggaggaaatggctctggcctggctgcctggccgtggcttctctttggctcccaaagagaaggacagtgttgggagtatctgccgtggcttctctttggctcccaaagagaaggacagtgttgggagtatctgccggcgctgtccaggtcctttagtcagcgtcactccatctgatgtgcagaagctgggctgcacctgcgggggtgggcatagaccgggctgggtctgcagcagcccctggtcctgagcaggcggcagtgaacagcactggcccacctcccactcacagcccctctgtcccctctgcagtgcacccaggtgggcccctctgcgtgcctttgggtgctcccctctcgtggtcgttctggcccgaggcccttagagtatggaggctgagccaggccttgggtttccccagcacagcctcctgtcgctgcatgcgacgtgttgggatttttggatgaaagactctcccacgctctgttggtggacttagctgcctcactggaagtgatgtgggtggaaggtggttgtatgttaccttttccacctctcattgttttccccagaacattgtagatgggggttggcagagggagaaataagccagccacggcagtcgcttggtttcccaggtggaatgggctaacacaggagatgatgggaacctgtcccgcagtccctgcatgaccattggccctgctggcctggcgatgtgggcatcctggggttcttagggtcccagaacaagccccaggcaagctggaacttgggtggggaggggacatgaggaggataaacagctgactgtggcttcaaggacatcagggccaccccaagtcctcagtgtcctactcctggcaaggagttgggtttggatcaaaagtgtttaaaattaatatgttgtcagtgattagaacaacactgtttacataaaaaccatttttctaattctaacaagttagaatgtgaggaaggaatgaacatgagtgtttaggaacctgccctttggtgctgggctggcgtcccgcactggggtgtcctcgctgtctgggggctgctctgctgccccggcccaggtccccttgtggtgttgccagacgggcctcatggtctgctgtgcagagagaggcaggaaggatccctgaagagtcttggagaaaaggttctgtgccctcaggtggggcttaccccctcgtatttataatcttaatttatatagtgaccaccgtggaaacaaacgcctcttgtattgtcatgtacatagtccatacctgagtgctgtacataagttgttctgtgtataaataaaacaagcctgtttttgatcttcaaaaaaaaaaaaaaaaaaaaaaaaaaaaaaaaaaaaaaaaaaaaaaaaaaaaaaaaaaaaaaaaaaaaaaaaggggggggggggcgaaaaaccccggaggggggacaccatagatacgatagcacaacccaccatgttgttgttgtgagaacaaggggtggcccccaaagaggagggctgcattaatataaaagcagatgagagagggagagggggcggcgggattgttataaaaaagcggtgtggggaggtgggagaaacaagtgcggttattggtgcggacttgtgtggaggaggaggagagaacccccatttgtgggggggggtgagaacacaatagtggggggacacacactcctacaagaagagatattatacaggcctggagggcggaagaaatatcaaaacttggaagggggtgttatttgaggtggtgtaaaccacatgactggatgatgtttgtggcgtgcgtggaaagagattcgggtcacgggcgatagtgttctaggaaaaacattagagg

SEQ ID NO: 323687 - DNA, 4269 bp, Homo sapiens
cggggatgtgtggagtggtggtcagctctaacgtgtcccttgcagactttcgcagctccatcattcgatgacaagattctggaggtggtcgccgtgttcggcagcatgcagatggccgtctctcgagtcatcaggctacagcatcatcggatcgcccagtgtcgcacggtgaagatctccatccttggggatgagggcgtgcctgtgcaggtggacggagaggcctgggtccagccgccagggtacattcggattgtccacaagaaccgggcacagacactgaccagagacagggcatttgagagcaccctgaagtcctgggaagacaagcagaagtgcgagctgccccgccctccatcctgttccctgcacccggagatgctgtccgaggaggaggccacccagatggaccagtttgggcaggcagcaggggtcctcattcacagtatccgagaaatagctcagtctcaccgggacatggagcaggaactggcccacgccgtcaatgccagctccaagtccatggaccgtgtgtatggcaagcccagaaccacagaggggctcaactgcagcttcgtcctggaaatggtgaataacttcagagctctgcgcagtgagacggagctgctgctgtctgggaagatggccctgcagctggatccgcctcagaaggagcagctggggagtgctcttgccgagatggaccgacagctcaggaggctggcagacaccccgtggctctgccagtccgcagagcccggcgacgaagagagtgtgatgctggatcttgccaagcgcagtcgcagtggtaaattccgcctcgtgaccaagtttaaaaaggagaaaaacaacaagaacaaagaagctcacagtagcctgggagccccggttcacctctgggggacagaggaggttgctgcctggctggagcacctcagtctctgtgagtataaggacatcttcacacggcacgacatccggggctctgagctcctgcacctggagcggagggacctcaaggacctgggcgtgaccaaggtgggccacatgaagaggatcctgtgtggcatcaaggagctgagccgcagcgcccccgccgtcgaggcctagcctctgtcctctcagcctgtggcctccacatccccgccgccgaggcctagcctccgccctctcagcctgtggcctctgcgcctcctgccactgaggccctgggcagatgctgcagcccgcccccttctcatggtgctacttcctctgtcagctacagaaagcctccgtgacaccgtccaccagagctctggggtctcgaacataacaacacagctacctttgaaacaacactttctccagctcagagtcacctggggcacatgtgtcacggccactcagctctcgcccgcctgtgctgtgggccagggaatccagcggcgtctggcctcctgggcactgcttgcctggcctcgtgcttggattgtcccgggggctcctctccgtgtgtccttctgtggccgcaccgtgtggctccgcctcctggcccccagccagttctcagaaacgtggctggggcccagcacagcagcctgcaagggcccctgtttgttgatgcagcttttgttgaacaaaaatcgtgctctttcctggtttgaaagtagcatggatgtttccagtcttgttgattgtaatttgacgtgaagagaaaaaaaaattcctcctgcgtgagccaaggcagcgggtgctgtttcccaggcggggagcccctccctgggtgtcacagggcctgtgctcctccctcctccatcctctctcctcccgctcctccctccccccactgtgggctggggacgcctgcccttctgtctccggacgctctaggcgagttcagcttggggtgtgagtgagacagctcgccagctgcatccctgcagacagaggatgtgtgtccacatgagtgtttctgtgtgggaaatgcttcctggctctgggaaactttttctgcccattctgtggttcccagggagcgtggccctggtgggccaggggtggtttgacctcttcagcccgtccggtggcctggaggccggaggctctcctgagtgtctgcccctgcagtggcttcttgtcgcctgctgctgggcgtgatgtcgctggaggtgctggcagggactctgatttggtggtccgcgctgcccctgccctgcctctgtcctggctctgaactagtagatgatggtgccagagggcagggagctcgcctggggagagggctgtgccccgtagggacagtgcccaggtgaaggatgcccctggtcctccagggcactgactttgcccttttttcccgttgatagtcatggctcagaggtgcttgtaaatgtcttgggaagaggtttctgtaacccctgccctggtgtgaggaggaaatggctctggcctggctgcctggccgtggcttctctttggctcccaaagagaaggacagtgttgggagtatctgccgtggcttctctttggctcccaaagagaaggacagtgttgggagtatctgccggcgctgtccaggtcctttagtcagcgtcactccatctgatgtgcagaagctgggctgcacctgcgggggtgggcatagaccgggctgggtctgcagcagcccctggtcctgagcaggcggcagtgaacagcactggcccacctcccactcacagcccctctgtcccctctgcagtgcacccaggtgggcccctctgcgtgcctttgggtgctcccctctcgtggtcgttctggcccgaggcccttagagtatggaggctgagccaggccttgggtttccccagcacagcctcctgtcgctgcatgcgacgtgttgggatttttggatgaaagactctcccacgctctgttggtggacttagctgcctcactggaagtgatgtgggtggaaggtggttgtatgttaccttttccacctctcattgttttccccagaacattgtagatgggggttggcagagggagaaataagccagccacggcagtcgcttggtttcccaggtggaatgggctaacacaggagatgatgggaacctgtcccgcagtccctgcatgaccattggccctgctggcctggcgatgtgggcatcctggggttcttagggtcccagaacaagccccaggcaagctggaacttgggtggggaggggacatgaggaggataaacagctgactgtggcttcaaggacatcagggccaccccaagtcctcagtgtcctactcctggcaaggagttgggtttggatcaaaagtgtttaaaattaatatgttgtcagtgattagaacaacactgtttacataaaaaccatttttctaattctaacaagttagaatgtgaggaaggaatgaacatgagtgtttaggaacctgccctttggtgctgggctggcgtcccgcactggggtgtcctcgctgtctgggggctgctctgctgccccggcccaggtccccttgtggtgttgccagacgggcctcatggtctgctgtgcagagagaggcaggaaggatccctgaagagtcttggagaaaaggttctgtgccctcaggtggggcttaccccctcgtatttataatcttaatttatatagtgaccaccgtggaaacaaacgcctcttgtattgtcatgtacatagtccatacctgagtgctgtacataagttgttctgtgtataaataaaacaagcctgtttttgatcttcaaaaaaaaaaaaaaaaaaaaaaaaaaaaaaaaaaaaaaaaaaaaaaaaaaaaaaaaaaaaaaaaaaaaaaaaggggggggggggcgaaaaaccccggaggggggacaccatagatacgatagcacaacccaccatgttgttgttgtgagaacaaggggtggcccccaaagaggagggctgcattaatataaaagcagatgagagagggagagggggcggcgggattgttataaaaaagcggtgtggggaggtgggagaaacaagtgcggttattggtgcggacttgtgtggaggaggaggagagaacccccatttgtgggggggggtgagaacacaatagtggggggacacacactcctacaagaagagatattatacaggcctggagggcggaagaaatatcaaaacttggaagggggtgttatttgaggtggtgtaaaccacatgactggatgatgtttgtggcgtgcgtggaaagagattcgggtcacgggcgatagtgttctaggaaaaacattagagg

SEQ ID NO: 323688 - DNA, 1552 bp, Homo sapiens
agcggggcccggcagcatggcggcggcggcgggcgcccctccgccgggtcccccgcaaccgcctccgccgccgccgcccgaggagtcgtccgacagcgagcccgaggcggagcccggctccccacagaagctcatccgcaaggtgtccacgtcgggtcagatccgacagaagaccatcatcaaagaggggatgctgaccaaacagaacaattcattccagcgatcaaaaaggagatactttaagcttcgagggcgaacgctttactatgccaaaacggcaaagtcaatcatatttgatgaggtggatctgacagatgccagcgtagctgaatccagtaccaaaaacgtcaacaacagttttacggtcataactccatgcaggaagctcatcttgtgtgctgataacagaaaagaaatggaagattggattgcagcattaaagactgtgcagaacagggagcactttgagcccacccagtacagcatggaccacttctcagggatgcacaattggtacgcctgttcccacgcgaggccgacctactgcaatgtgtgccgtgaggctctgtctggggtcacgtcgcacgggctgtcctgcgaggtgtgcaaatttaaggcccacaagcgctgtgctgtgcgtgcaaccaataactgcaagtggaccacactggcctcgatcgggaaggacatcattgaagatgcagatgggattgcaatgccccaccagtggttggaaggaaacctacctgtgagcgccaagtgcactgtgtgcgacaagacctgtggcagtgtgctgcgcctgcaggactggcgctgcctctggtgcaaggccatggttcacacatcgtgtaaagaatccttgctgaccaagtgcccacttggcctgtgcaaagtgtcagtcatcccacccacggctctcaacagcatcgactccgatgggttctggaaggccagctgtcctccttcttgcacaagcccactgttggtcttcgtcaattcaaaaagtggggacaaccagggtgtgaagttcctcagaagattcaaacagctactaaaccccgcccaggtcttcgacctcatgaacggaggcccacacctcggcttacggttattccagaagtttgacacattccggattctggtttgtggcggggatggaagtgttggctgggtcctctccgaaatcgacagcctcaaccttcataaacagtgtcagctgggagtgctgccgctcggcacagggaacgacttggcccgagtactgggctggggctcagcctgcgatgacgacacccagctcccccagatcttggagaagttggagagagccagcaccaagatgctggacaggtgagtggggatgtgctccggtgccgtatgaggagactttgagagacaggtccctttgaccaggtgttcttaacctggggtctgtggaaaacatgggccctctgaaattatttgtaaagatttgacctgagtatatattcggatagtctttgatatttggtcagattatgacaaggataaaaacaaaacaggttaagaacca

SEQ ID NO: 323689 - DNA, 441 bp, Homo sapiens
agccctccaggtggtacctgggccgtgttcagatgcgtattgtgaaaggctgcccttccatttggcctgacatctgcccgtgcttctcttcctctctagtatccgagaaatagctcagtctcaccgggacatggagcaggaactggcccacgccgtcaatgccagctccaagtccatggaccgtgtgtatggcaagcccagaaccacagaggtagctattctggccttttcagtcctggcttcttctcagtgtctgccgccctcggccctccccgtgcgtgttcattcccccgcctccccggtgcatgttcggccctcccagtgcttgttccctgcccctaaccgtgcatgttcggccccccgcccccatgcatatttgcctggtttcttctaggggctcaactgcagcttcgtcctggaaatggtgaataacttcagagc

SEQ ID NO: 323690 - DNA, 204 bp, Homo sapiens
ggatcttgccaagcgcagtcgcagtggtaaattccgcctcgtgaccaagtttaaaaaggagaaaaacaacaagaacaaagaagctcacagtagcctgggagccccgggtacctgcctctctcccgcgtgtgtttctggccgtccacgcctgctggatcggccccgttcccctggtctctgctttctcccttggccttgcagctc

SEQ ID NO: 323691 - DNA, 497 bp, Homo sapiens
acttgcctagcacatctggctgccaggaggaagccaagacacaggggacacatagaggcacatggccccaggagccctcaccctcgtcctgaaagtttgaggtagctgtggtcgaagggccagaaggttgggtacaggactgtagctcacacggtgtgaagcatgactggctcctgccgggtatttccgtgttatgccttctcaagtgcaaagccagggcccagggcccccgatgatagcaggccggcccagggcccctgatggtagcaggccagcccagctctgaaatcacctgcctcccccgaggccagctcatcagctacagggcaggaggatttctggtgtgtgtgaaggatgccagtgacccttggtgacgcggggactcttgtttcaggttcacacatcgtgtaaagaatccttgctgaccaagtgcccacttggcctgtgcaaagtgtcagtcatcccacccacggctctcaacagcatcgactccgatg

SEQ ID NO: 323692 - DNA, 6297 bp, Homo sapiens
agcggggcccggcagcatggcggcggcggcgggcgcccctccgccgggtcccccgcaaccgcctccgccgccgccgcccgaggagtcgtccgacagcgagcccgaggcggagcccggctccccacagaagctcatccgcaaggtgtccacgtcgggtcagatccgacagaagaccatcatcaaagaggggatgctgaccaaacagaacaattcattccagcgatcaaaaaggagatactttaagcttcgagggcgaacgctttactatgccaaaacggcaaagtcaatcatatttgatgaggtggatctgacagatgccagcgtagctgaatccagtaccaaaaacgtcaacaacagttttacggtcataactccatgcaggaagctcatcttgtgtgctgataacagaaaagaaatggaagattggattgcagcattaaagactgtgcagaacagggagcactttgagcccacccagtacagcatggaccacttctcagggatgcacaattggtacgcctgttcccacgcgaggccgacctactgcaatgtgtgccgtgaggctctgtctggggtcacgtcgcacgggctgtcctgcgaggtgtgcaaatttaaggcccacaagcgctgtgctgtgcgtgcaaccaataactgcaagtggaccacactggcctcgatcgggaaggacatcattgaagatgcagatgggattgcaatgccccaccagtggttggaaggaaacctacctgtgagcgccaagtgcactgtgtgcgacaagacctgtggcagtgtgctgcgcctgcaggactggcgctgcctctggtgcaaggccatggttcacacatcgtgtaaagaatccttgctgaccaagtgcccacttggcctgtgcaaagtgtcagtcatcccacccacggctctcaacagcatcgactccgatgggttctggaaggccagctgtcctccttcttgcacaagcccactgttggtcttcgtcaattcaaaaagtggggacaaccagggtgtgaagttcctcagaagattcaaacagctactaaaccccgcccaggtcttcgacctcatgaacggaggcccacacctcggcttacggttattccagaagtttgacacattccggattctggtttgtggcggggatggaagtgttggctgggtcctctccgaaatcgacagcctcaaccttcataaacagtgtcagctgggagtgctgccgctcggcacagggaacgacttggcccgagtactgggctggggctcagcctgcgatgacgacacccagctcccccagatcttggagaagttggagagagccagcaccaagatgctggacaggtggagcgtcatggcatacgaggccaagctcccccggcaggcctcctcctctaccgtcaccgaagacttcagcgaggattccgaggtacagcagattctcttctatgaagactcggttgcagcccacctttctaaaatcctcacctcggaccagcactcggtggtcatctcctcggccaaagtgctctgtgagacggtgaaggacttcgtggcacgggtggggaaggcctatgagaagacgaccgagagctcggaggagtcagaggtcatggccaagaagtgctctgtcctgaaagagaagctggattcccttctcaagaccttggacgatgagtcccaggcctcgtcctctctgcccaacccgccccccaccattgccgaggaggctgaagatggagatgggtcgggcagcatctgcggttccaccggagaccgcttggtggcatcagcttgcccggcccggccgcagatattccggcctcgagaacagctcatgctgagagccaacagcctgaagaaagcaattcgtcagatcatagaacacacagaaaaagctgtcgatgagcagaatgcccagacccaggagcaggagggcttcgtcctgggcctctctgagtcagaggagaagatggaccacagagtgtgcccaccactgtcccacagcgagagcttcggggtccccaaggggaggagccagcgcaaagtgtcgaaatctccgtgtgaaaagctgatcagcaaagggagtctgtccctaggcagttctgcttcccttccgccccagccgggaagccgggacggcctgcctgcgctcaacaccaagatcctgtacccaaatgtccgggctggaatgtctggttccttacccggtggctcagtcatcagtcgcctgttaattaatgctgatcccttcaactctgaaccagaaaccctagagtattacacggagaaatgtgtcatgaacaactattttggcattggcctggatgcgaagatatccctggactttaacaacaagcgcgatgagcacccagagaagtgcaggagccgaaccaagaacatgatgtggtatggagttcttggaaccaaagagttgctgcacagaacctacaagaacctggagcaaaaggtcttgctggagtgtgacgggcgacccatcccactccccagtcttcagggaattgctgtccttaacattcccagctatgccggaggaaccaacttctgggggggtaccaaggaagatgatactttcgcagctccatcattcgatgacaagattctggaggtggtcgccgtgttcggcagcatgcagatggccgtctctcgagtcatcaggctacagcatcatcggatcgcccagtgtcgcacggtgaagatctccatccttggggatgagggcgtgcctgtgcaggtggacggagaggcctgggtccagccgccagggtacattcggattgtccacaagaaccgggcacagacactgaccagagacagggcatttgagagcaccctgaagtcctgggaagacaagcagaagtgcgagctgccccgccctccatcctgttccctgcacccggagatgctgtccgaggaggaggccacccagatggaccagtttgggcaggcagcaggggtcctcattcacagtatccgagaaatagctcagtctcaccgggacatggagcaggaactggcccacgccgtcaatgccagctccaagtccatggaccgtgtgtatggcaagcccagaaccacagaggggctcaactgcagcttcgtcctggaaatggtgaataacttcagagctctgcgcagtgagacggagctgctgctgtctgggaagatggccctgcagctggatccgcctcagaaggagcagctggggagtgctcttgccgagatggaccgacagctcaggaggctggcagacaccccgtggctctgccagtccgcagagcccggcgacgaagagagtgtgatgctggatcttgccaagcgcagtcgcagtggtaaattccgcctcgtgaccaagtttaaaaaggagaaaaacaacaagaacaaagaagctcacagtagcctgggagccccggttcacctctgggggacagaggaggttgctgcctggctggagcacctcagtctctgtgagtataaggacatcttcacacggcacgacatccggggctctgagctcctgcacctggagcggagggacctcaaggacctgggcgtgaccaaggtgggccacatgaagaggatcctgtgtggcatcaaggagctgagccgcagcgcccccgccgtcgaggcctagcctctgtcctctcagcctgtggcctccacatccccgccgccgaggcctagcctccgccctctcagcctgtggcctctgcgcctcctgccactgaggccctgggcagatgctgcagcccgcccccttctcatggtgctacttcctctgtcagctacagaaagcctccgtgacaccgtccaccagagctctggggtctcgaacataacaacacagctacctttgaaacaacactttctccagctcagagtcacctggggcacatgtgtcacggccactcagctctcgcccgcctgtgctgtgggccagggaatccagcggcgtctggcctcctgggcactgcttgcctggcctcgtgcttggattgtcccgggggctcctctccgtgtgtccttctgtggccgcaccgtgtggctccgcctcctggcccccagccagttctcagaaacgtggctggggcccagcacagcagcctgcaagggcccctgtttgttgatgcagcttttgttgaacaaaaatcgtgctctttcctggtttgaaagtagcatggatgtttccagtcttgttgattgtaatttgacgtgaagagaaaaaaaaattcctcctgcgtgagccaaggcagcgggtgctgtttcccaggcggggagcccctccctgggtgtcacagggcctgtgctcctccctcctccatcctctctcctcccgctcctccctccccccactgtgggctggggacgcctgcccttctgtctccggacgctctaggcgagttcagcttggggtgtgagtgagacagctcgccagctgcatccctgcagacagaggatgtgtgtccacatgagtgtttctgtgtgggaaatgcttcctggctctgggaaactttttctgcccattctgtggttcccagggagcgtggccctggtgggccaggggtggtttgacctcttcagcccgtccggtggcctggaggccggaggctctcctgagtgtctgcccctgcagtggcttcttgtcgcctgctgctgggcgtgatgtcgctggaggtgctggcagggactctgatttggtggtccgcgctgcccctgccctgcctctgtcctggctctgaactagtagatgatggtgccagagggcagggagctcgcctggggagagggctgtgccccgtagggacagtgcccaggtgaaggatgcccctggtcctccagggcactgactttgcccttttttcccgttgatagtcatggctcagaggtgcttgtaaatgtcttgggaagaggtttctgtaacccctgccctggtgtgaggaggaaatggctctggcctggctgcctggccgtggcttctctttggctcccaaagagaaggacagtgttgggagtatctgccgtggcttctctttggctcccaaagagaaggacagtgttgggagtatctgccggcgctgtccaggtcctttagtcagcgtcactccatctgatgtgcagaagctgggctgcacctgcgggggtgggcatagaccgggctgggtctgcagcagcccctggtcctgagcaggcggcagtgaacagcactggcccacctcccactcacagcccctctgtcccctctgcagtgcacccaggtgggcccctctgcgtgcctttgggtgctcccctctcgtggtcgttctggcccgaggcccttagagtatggaggctgagccaggccttgggtttccccagcacagcctcctgtcgctgcatgcgacgtgttgggatttttggatgaaagactctcccacgctctgttggtggacttagctgcctcactggaagtgatgtgggtggaaggtggttgtatgttaccttttccacctctcattgttttccccagaacattgtagatgggggttggcagagggagaaataagccagccacggcagtcgcttggtttcccaggtggaatgggctaacacaggagatgatgggaacctgtcccgcagtccctgcatgaccattggccctgctggcctggcgatgtgggcatcctggggttcttagggtcccagaacaagccccaggcaagctggaacttgggtggggaggggacatgaggaggataaacagctgactgtggcttcaaggacatcagggccaccccaagtcctcagtgtcctactcctggcaaggagttgggtttggatcaaaagtgtttaaaattaatatgttgtcagtgattagaacaacactgtttacataaaaaccatttttctaattctaacaagttagaatgtgaggaaggaatgaacatgagtgtttaggaacctgccctttggtgctgggctggcgtcccgcactggggtgtcctcgctgtctgggggctgctctgctgccccggcccaggtccccttgtggtgttgccagacgggcctcatggtctgctgtgcagagagaggcaggaaggatccctgaagagtcttggagaaaaggttctgtgccctcaggtggggcttaccccctcgtatttataatcttaatttatatagtgaccaccgtggaaacaaacgcctcttgtattgtcatgtacatagtccatacctgagtgctgtacataagttgttctgtgtataaataaaacaagcctgtttttgatcttc

SEQ ID NO: 323693 - DNA, 567 bp, Homo sapiens
agcggggcccggcagcatggcggcggcggcgggcgcccctccgccgggtcccccgcaaccgcctccgccgccgccgcccgaggagtcgtccgacagcgagcccgaggcggagcccggctccccacagaagctcatccgcaaggtgtccacgtcgggtcagatccgacagaaggtcataactccatgcaggaagctcatcttgtgtgctgataacagaaaagaaatggaagattggattgcagcattaaagactgtgcagaacagggagcactttgagcccacccagtacagcatggaccacttctcagggatgcacaattggtacgcctgttcccacgcgaggccgacctactgcaatgtgtgccgtgaggctctgtctggggtcacgtcgcacgggctgtcctgcgaggtgtgcaaatttaaggcccacaagcgctgtgctgtgcgtgcaaccaataactgcaagtggaccacactggcctcgaaaggggatggacacacgtagggggatggacacacgaaaggggatggacgcccgaaaggggatggacacagggggccgagctc

SEQ ID NO: 323694 - DNA, 6628 bp, Homo sapiens
agcggggcccggcagcatggcggcggcggcgggcgcccctccgccgggtcccccgcaaccgcctccgccgccgccgcccgaggagtcgtccgacagcgagcccgaggcggagcccggctccccacagaagctcatccgcaaggtgtccacgtcgggtcagatccgacagaaggtcataactccatgcaggaagctcatcttgtgtgctgataacagaaaagaaatggaagattggattgcagcattaaagactgtgcagaacagggagcactttgagcccacccagtacagcatggaccacttctcagggatgcacaattggtacgcctgttcccacgcgaggccgacctactgcaatgtgtgccgtgaggctctgtctggggtcacgtcgcacgggctgtcctgcgaggtgtgcaaatttaaggcccacaagcgctgtgctgtgcgtgcaaccaataactgcaagtggaccacactggcctcgatcgggaaggacatcattgaagatgcagatgggattgcaatgccccaccagtggttggaaggaaacctacctgtgagcgccaagtgcactgtgtgcgacaagacctgtggcagtgtgctgcgcctgcaggactggcgctgcctctggtgcaaggccatggttcacacatcgtgtaaagaatccttgctgaccaagtgcccacttggcctgtgcaaagtgtcagtcatcccacccacggctctcaacagcatcgactccgatgggttctggaaggccagctgtcctccttcttgcacaagcccactgttggtcttcgtcaattcaaaaagtggggacaaccagggtgtgaagttcctcagaagattcaaacagctactaaaccccgcccaggtcttcgacctcatgaacggaggcccacacctcggcttacggttattccagaagtttgacacattccggattctggtttgtggcggggatggaagtgttggctgggtcctctccgaaatcgacagcctcaaccttcataaacagtgtcagctgggagtgctgccgctcggcacagggaacgacttggcccgagtactgggctggggctcagcctgcgatgacgacacccagctcccccagatcttggagaagttggagagagccagcaccaagatgctggacaggtggagcgtcatggcatacgaggccaagctcccccggcaggcctcctcctctaccgtcaccgaagacttcagcgaggattccgaggtacagcagattctcttctatgaagactcggttgcagcccacctttctaaaatcctcacctcggaccagcactcggtggtcatctcctcggccaaagtgctctgtgagacggtgaaggacttcgtggcacgggtggggaaggcctatgagaagacgaccgagagctcggaggagtcagaggtcatggccaagaagtgctctgtcctgaaagagaagctggattcccttctcaagaccttggacgatgagtcccaggcctcgtcctctctgcccaacccgccccccaccattgccgaggaggctgaagatggagatgggtcgggcagcatctgcggttccaccggagaccgcttggtggcatcagcttgcccggcccggccgcagatattccggcctcgagaacagctcatgctgagagccaacagcctgaagaaagcaattcgtcagatcatagaacacacagaaaaagctgtcgatgagcagaatgcccagacccaggagcaggagggcttcgtcctgggcctctctgagtcagaggagaagatggaccacagagtgtgcccaccactgtcccacagcgagagcttcggggtccccaaggggaggagccagcgcaaagtgtcgaaatctccgtgtgaaaagctgatcagcaaagggagtctgtccctaggcagttctgcttcccttccgccccagccgggaagccgggacggcctgcctgcgctcaacaccaagatcctgtacccaaatgtccgggctggaatgtctggttccttacccggtggctcagtcatcagtcgcctgttaattaatgctgatcccttcaactctgaaccagaaaccctagagtattacacggagaaatgtgtcatgaacaactattttggcattggcctggatgcgaagatatccctggactttaacaacaagcgcgatgagcacccagagaagtgcaggagccgaaccaagaacatgatgtggtatggagttcttggaaccaaagagttgctgcacagaacctacaagaacctggagcaaaaggtcttgctggagtgtgacgggcgacccatcccactccccagtcttcagggaattgctgtccttaacattcccagctatgccggaggaaccaacttctgggggggtaccaaggaagatgatactttcgcagctccatcattcgatgacaagattctggaggtggtcgccgtgttcggcagcatgcagatggccgtctctcgagtcatcaggctacagcatcatcggatcgcccagtgtcgcacggtgaagatctccatccttggggatgagggcgtgcctgtgcaggtggacggagaggcctgggtccagccgccagggtacattcggattgtccacaagaaccgggcacagacactgaccagagacagggcatttgagagcaccctgaagtcctgggaagacaagcagaagtgcgagctgccccgccctccatcctgttccctgcacccggagatgctgtccgaggaggaggccacccagatggaccagtttgggcaggcagcaggggtcctcattcacagtatccgagaaatagctcagtctcaccgggacatggagcaggaactggcccacgccgtcaatgccagctccaagtccatggaccgtgtgtatggcaagcccagaaccacagaggggctcaactgcagcttcgtcctggaaatggtgaataacttcagagctctgcgcagtgagacggagctgctgctgtctgggaagatggccctgcagctggatccgcctcagaaggagcagctggggagtgctcttgccgagatggaccgacagctcaggaggctggcagacaccccgtggctctgccagtccgcagagcccggcgacgaagagagtgtgatgctggatcttgccaagcgcagtcgcagtggtaaattccgcctcgtgaccaagtttaaaaaggagaaaaacaacaagaacaaagaagctcacagtagcctgggagccccggttcacctctgggggacagaggaggttgctgcctggctggagcacctcagtctctgtgagtataaggacatcttcacacggcacgacatccggggctctgagctcctgcacctggagcggagggacctcaaggacctgggcgtgaccaaggtgggccacatgaagaggatcctgtgtggcatcaaggagctgagccgcagcgcccccgccgtcgaggcctagcctctgtcctctcagcctgtggcctccacatccccgccgccgaggcctagcctccgccctctcagcctgtggcctctgcgcctcctgccactgaggccctgggcagatgctgcagcccgcccccttctcatggtgctacttcctctgtcagctacagaaagcctccgtgacaccgtccaccagagctctggggtctcgaacataacaacacagctacctttgaaacaacactttctccagctcagagtcacctggggcacatgtgtcacggccactcagctctcgcccgcctgtgctgtgggccagggaatccagcggcgtctggcctcctgggcactgcttgcctggcctcgtgcttggattgtcccgggggctcctctccgtgtgtccttctgtggccgcaccgtgtggctccgcctcctggcccccagccagttctcagaaacgtggctggggcccagcacagcagcctgcaagggcccctgtttgttgatgcagcttttgttgaacaaaaatcgtgctctttcctggtttgaaagtagcatggatgtttccagtcttgttgattgtaatttgacgtgaagagaaaaaaaaattcctcctgcgtgagccaaggcagcgggtgctgtttcccaggcggggagcccctccctgggtgtcacagggcctgtgctcctccctcctccatcctctctcctcccgctcctccctccccccactgtgggctggggacgcctgcccttctgtctccggacgctctaggcgagttcagcttggggtgtgagtgagacagctcgccagctgcatccctgcagacagaggatgtgtgtccacatgagtgtttctgtgtgggaaatgcttcctggctctgggaaactttttctgcccattctgtggttcccagggagcgtggccctggtgggccaggggtggtttgacctcttcagcccgtccggtggcctggaggccggaggctctcctgagtgtctgcccctgcagtggcttcttgtcgcctgctgctgggcgtgatgtcgctggaggtgctggcagggactctgatttggtggtccgcgctgcccctgccctgcctctgtcctggctctgaactagtagatgatggtgccagagggcagggagctcgcctggggagagggctgtgccccgtagggacagtgcccaggtgaaggatgcccctggtcctccagggcactgactttgcccttttttcccgttgatagtcatggctcagaggtgcttgtaaatgtcttgggaagaggtttctgtaacccctgccctggtgtgaggaggaaatggctctggcctggctgcctggccgtggcttctctttggctcccaaagagaaggacagtgttgggagtatctgccgtggcttctctttggctcccaaagagaaggacagtgttgggagtatctgccggcgctgtccaggtcctttagtcagcgtcactccatctgatgtgcagaagctgggctgcacctgcgggggtgggcatagaccgggctgggtctgcagcagcccctggtcctgagcaggcggcagtgaacagcactggcccacctcccactcacagcccctctgtcccctctgcagtgcacccaggtgggcccctctgcgtgcctttgggtgctcccctctcgtggtcgttctggcccgaggcccttagagtatggaggctgagccaggccttgggtttccccagcacagcctcctgtcgctgcatgcgacgtgttgggatttttggatgaaagactctcccacgctctgttggtggacttagctgcctcactggaagtgatgtgggtggaaggtggttgtatgttaccttttccacctctcattgttttccccagaacattgtagatgggggttggcagagggagaaataagccagccacggcagtcgcttggtttcccaggtggaatgggctaacacaggagatgatgggaacctgtcccgcagtccctgcatgaccattggccctgctggcctggcgatgtgggcatcctggggttcttagggtcccagaacaagccccaggcaagctggaacttgggtggggaggggacatgaggaggataaacagctgactgtggcttcaaggacatcagggccaccccaagtcctcagtgtcctactcctggcaaggagttgggtttggatcaaaagtgtttaaaattaatatgttgtcagtgattagaacaacactgtttacataaaaaccatttttctaattctaacaagttagaatgtgaggaaggaatgaacatgagtgtttaggaacctgccctttggtgctgggctggcgtcccgcactggggtgtcctcgctgtctgggggctgctctgctgccccggcccaggtccccttgtggtgttgccagacgggcctcatggtctgctgtgcagagagaggcaggaaggatccctgaagagtcttggagaaaaggttctgtgccctcaggtggggcttaccccctcgtatttataatcttaatttatatagtgaccaccgtggaaacaaacgcctcttgtattgtcatgtacatagtccatacctgagtgctgtacataagttgttctgtgtataaataaaacaagcctgtttttgatcttcaaaaaaaaaaaaaaaaaaaaaaaaaaaaaaaaaaaaaaaaaaaaaaaaaaaaaaaaaaaaaaaaaaaaaaaaggggggggggggcgaaaaaccccggaggggggacaccatagatacgatagcacaacccaccatgttgttgttgtgagaacaaggggtggcccccaaagaggagggctgcattaatataaaagcagatgagagagggagagggggcggcgggattgttataaaaaagcggtgtggggaggtgggagaaacaagtgcggttattggtgcggacttgtgtggaggaggaggagagaacccccatttgtgggggggggtgagaacacaatagtggggggacacacactcctacaagaagagatattatacaggcctggagggcggaagaaatatcaaaacttggaagggggtgttatttgaggtggtgtaaaccacatgactggatgatgtttgtggcgtgcgtggaaagagattcgggtcacgggcgatagtgttctaggaaaaacattagagg

SEQ ID NO: 323695 - DNA, 5442 bp, Homo sapiens
gtcatggagcttgctgtcacagagaccaacagtcctggccatttggggtgattgcaggtacagcagattctcttctatgaagactcggttgcagcccacctttctaaaatcctcacctcggaccagcactcggtggtcatctcctcggccaaagtgctctgtgagacggtgaaggacttcgtggcacgggtggggaaggcctatgagaagacgaccgagagctcggaggagtcagaggtcatggccaagaagtgctctgtcctgaaagagaagctggattcccttctcaagaccttggacgatgagtcccaggcctcgtcctctctgcccaacccgccccccaccattgccgaggaggctgaagatggagatgggtcgggcagcatctgcggttccaccggagaccgcttggtggcatcagcttgcccggcccggccgcagatattccggcctcgagaacagctcatgctgagagccaacagcctgaagaaagcaattcgtcagatcatagaacacacagaaaaagctgtcgatgagcagaatgcccagacccaggagcaggagggcttcgtcctgggcctctctgagtcagaggagaagatggaccacagagtgtgcccaccactgtcccacagcgagagcttcggggtccccaaggggaggagccagcgcaaagtgtcgaaatctccgtgtgaaaagctgatcagcaaagggagtctgtccctaggcagttctgcttcccttccgccccagccgggaagccgggacggcctgcctgcgctcaacaccaagatcctgtacccaaatgtccgggctggaatgtctggttccttacccggtggctcagtcatcagtcgcctgttaattaatgctgatcccttcaactctgaaccagaaaccctagagtattacacggagaaatgtgtcatgaacaactattttggcattggcctggatgcgaagatatccctggactttaacaacaagcgcgatgagcacccagagaagtgcaggagccgaaccaagaacatgatgtggtatggagttcttggaaccaaagagttgctgcacagaacctacaagaacctggagcaaaaggtcttgctggagtgtgacgggcgacccatcccactccccagtcttcagggaattgctgtccttaacattcccagctatgccggaggaaccaacttctgggggggtaccaaggaagatgatactttcgcagctccatcattcgatgacaagattctggaggtggtcgccgtgttcggcagcatgcagatggccgtctctcgagtcatcaggctacagcatcatcggatcgcccagtgtcgcacggtgaagatctccatccttggggatgagggcgtgcctgtgcaggtggacggagaggcctgggtccagccgccagggtacattcggattgtccacaagaaccgggcacagacactgaccagagacagggcatttgagagcaccctgaagtcctgggaagacaagcagaagtgcgagctgccccgccctccatcctgttccctgcacccggagatgctgtccgaggaggaggccacccagatggaccagtttgggcaggcagcaggggtcctcattcacagtatccgagaaatagctcagtctcaccgggacatggagcaggaactggcccacgccgtcaatgccagctccaagtccatggaccgtgtgtatggcaagcccagaaccacagaggggctcaactgcagcttcgtcctggaaatggtgaataacttcagagctctgcgcagtgagacggagctgctgctgtctgggaagatggccctgcagctggatccgcctcagaaggagcagctggggagtgctcttgccgagatggaccgacagctcaggaggctggcagacaccccgtggctctgccagtccgcagagcccggcgacgaagagagtgtgatgctggatcttgccaagcgcagtcgcagtggtaaattccgcctcgtgaccaagtttaaaaaggagaaaaacaacaagaacaaagaagctcacagtagcctgggagccccggttcacctctgggggacagaggaggttgctgcctggctggagcacctcagtctctgtgagtataaggacatcttcacacggcacgacatccggggctctgagctcctgcacctggagcggagggacctcaaggacctgggcgtgaccaaggtgggccacatgaagaggatcctgtgtggcatcaaggagctgagccgcagcgcccccgccgtcgaggcctagcctctgtcctctcagcctgtggcctccacatccccgccgccgaggcctagcctccgccctctcagcctgtggcctctgcgcctcctgccactgaggccctgggcagatgctgcagcccgcccccttctcatggtgctacttcctctgtcagctacagaaagcctccgtgacaccgtccaccagagctctggggtctcgaacataacaacacagctacctttgaaacaacactttctccagctcagagtcacctggggcacatgtgtcacggccactcagctctcgcccgcctgtgctgtgggccagggaatccagcggcgtctggcctcctgggcactgcttgcctggcctcgtgcttggattgtcccgggggctcctctccgtgtgtccttctgtggccgcaccgtgtggctccgcctcctggcccccagccagttctcagaaacgtggctggggcccagcacagcagcctgcaagggcccctgtttgttgatgcagcttttgttgaacaaaaatcgtgctctttcctggtttgaaagtagcatggatgtttccagtcttgttgattgtaatttgacgtgaagagaaaaaaaaattcctcctgcgtgagccaaggcagcgggtgctgtttcccaggcggggagcccctccctgggtgtcacagggcctgtgctcctccctcctccatcctctctcctcccgctcctccctccccccactgtgggctggggacgcctgcccttctgtctccggacgctctaggcgagttcagcttggggtgtgagtgagacagctcgccagctgcatccctgcagacagaggatgtgtgtccacatgagtgtttctgtgtgggaaatgcttcctggctctgggaaactttttctgcccattctgtggttcccagggagcgtggccctggtgggccaggggtggtttgacctcttcagcccgtccggtggcctggaggccggaggctctcctgagtgtctgcccctgcagtggcttcttgtcgcctgctgctgggcgtgatgtcgctggaggtgctggcagggactctgatttggtggtccgcgctgcccctgccctgcctctgtcctggctctgaactagtagatgatggtgccagagggcagggagctcgcctggggagagggctgtgccccgtagggacagtgcccaggtgaaggatgcccctggtcctccagggcactgactttgcccttttttcccgttgatagtcatggctcagaggtgcttgtaaatgtcttgggaagaggtttctgtaacccctgccctggtgtgaggaggaaatggctctggcctggctgcctggccgtggcttctctttggctcccaaagagaaggacagtgttgggagtatctgccgtggcttctctttggctcccaaagagaaggacagtgttgggagtatctgccggcgctgtccaggtcctttagtcagcgtcactccatctgatgtgcagaagctgggctgcacctgcgggggtgggcatagaccgggctgggtctgcagcagcccctggtcctgagcaggcggcagtgaacagcactggcccacctcccactcacagcccctctgtcccctctgcagtgcacccaggtgggcccctctgcgtgcctttgggtgctcccctctcgtggtcgttctggcccgaggcccttagagtatggaggctgagccaggccttgggtttccccagcacagcctcctgtcgctgcatgcgacgtgttgggatttttggatgaaagactctcccacgctctgttggtggacttagctgcctcactggaagtgatgtgggtggaaggtggttgtatgttaccttttccacctctcattgttttccccagaacattgtagatgggggttggcagagggagaaataagccagccacggcagtcgcttggtttcccaggtggaatgggctaacacaggagatgatgggaacctgtcccgcagtccctgcatgaccattggccctgctggcctggcgatgtgggcatcctggggttcttagggtcccagaacaagccccaggcaagctggaacttgggtggggaggggacatgaggaggataaacagctgactgtggcttcaaggacatcagggccaccccaagtcctcagtgtcctactcctggcaaggagttgggtttggatcaaaagtgtttaaaattaatatgttgtcagtgattagaacaacactgtttacataaaaaccatttttctaattctaacaagttagaatgtgaggaaggaatgaacatgagtgtttaggaacctgccctttggtgctgggctggcgtcccgcactggggtgtcctcgctgtctgggggctgctctgctgccccggcccaggtccccttgtggtgttgccagacgggcctcatggtctgctgtgcagagagaggcaggaaggatccctgaagagtcttggagaaaaggttctgtgccctcaggtggggcttaccccctcgtatttataatcttaatttatatagtgaccaccgtggaaacaaacgcctcttgtattgtcatgtacatagtccatacctgagtgctgtacataagttgttctgtgtataaataaaacaagcctgtttttgatcttcaaaaaaaaaaaaaaaaaaaaaaaaaaaaaaaaaaaaaaaaaaaaaaaaaaaaaaaaaaaaaaaaaaaaaaaaggggggggggggcgaaaaaccccggaggggggacaccatagatacgatagcacaacccaccatgttgttgttgtgagaacaaggggtggcccccaaagaggagggctgcattaatataaaagcagatgagagagggagagggggcggcgggattgttataaaaaagcggtgtggggaggtgggagaaacaagtgcggttattggtgcggacttgtgtggaggaggaggagagaacccccatttgtgggggggggtgagaacacaatagtggggggacacacactcctacaagaagagatattatacaggcctggagggcggaagaaatatcaaaacttggaagggggtgttatttgaggtggtgtaaaccacatgactggatgatgtttgtggcgtgcgtggaaagagattcgggtcacgggcgatagtgttctaggaaaaacattagagg

SEQ ID NO: 323696 - DNA, 3968 bp, Homo sapiens
tgcaaggttcgactgctgactttgcttcccacagcatttccactgcttgacacaggtgaatggctccgaccccatttctgacagagggacacaagcaggtcagttgtcagccttgctctatgtgaattcatcgttgactgatggacagttttattctctcaccagcactacttagaaagtgaggttctgggtttggttccttttctggtgctctgggacttcgtttctggaaagtgagctccctgatcagagcagagcagagccctggagcggacctcacccccctgggcctcgcgctgatcagcagtgcacactctccatttctctctccctccctccgcctggagcagcagctggatccgcctcagaaggagcagctggggagtgctcttgccgagatggaccgacagctcaggaggctggcagacaccccgtggctctgccagtccgcagagcccggcgacgaagagagtgtgatgctggatcttgccaagcgcagtcgcagtggtaaattccgcctcgtgaccaagtttaaaaaggagaaaaacaacaagaacaaagaagctcacagtagcctgggagccccggttcacctctgggggacagaggaggttgctgcctggctggagcacctcagtctctgtgagtataaggacatcttcacacggcacgacatccggggctctgagctcctgcacctggagcggagggacctcaaggacctgggcgtgaccaaggtgggccacatgaagaggatcctgtgtggcatcaaggagctgagccgcagcgcccccgccgtcgaggcctagcctctgtcctctcagcctgtggcctccacatccccgccgccgaggcctagcctccgccctctcagcctgtggcctctgcgcctcctgccactgaggccctgggcagatgctgcagcccgcccccttctcatggtgctacttcctctgtcagctacagaaagcctccgtgacaccgtccaccagagctctggggtctcgaacataacaacacagctacctttgaaacaacactttctccagctcagagtcacctggggcacatgtgtcacggccactcagctctcgcccgcctgtgctgtgggccagggaatccagcggcgtctggcctcctgggcactgcttgcctggcctcgtgcttggattgtcccgggggctcctctccgtgtgtccttctgtggccgcaccgtgtggctccgcctcctggcccccagccagttctcagaaacgtggctggggcccagcacagcagcctgcaagggcccctgtttgttgatgcagcttttgttgaacaaaaatcgtgctctttcctggtttgaaagtagcatggatgtttccagtcttgttgattgtaatttgacgtgaagagaaaaaaaaattcctcctgcgtgagccaaggcagcgggtgctgtttcccaggcggggagcccctccctgggtgtcacagggcctgtgctcctccctcctccatcctctctcctcccgctcctccctccccccactgtgggctggggacgcctgcccttctgtctccggacgctctaggcgagttcagcttggggtgtgagtgagacagctcgccagctgcatccctgcagacagaggatgtgtgtccacatgagtgtttctgtgtgggaaatgcttcctggctctgggaaactttttctgcccattctgtggttcccagggagcgtggccctggtgggccaggggtggtttgacctcttcagcccgtccggtggcctggaggccggaggctctcctgagtgtctgcccctgcagtggcttcttgtcgcctgctgctgggcgtgatgtcgctggaggtgctggcagggactctgatttggtggtccgcgctgcccctgccctgcctctgtcctggctctgaactagtagatgatggtgccagagggcagggagctcgcctggggagagggctgtgccccgtagggacagtgcccaggtgaaggatgcccctggtcctccagggcactgactttgcccttttttcccgttgatagtcatggctcagaggtgcttgtaaatgtcttgggaagaggtttctgtaacccctgccctggtgtgaggaggaaatggctctggcctggctgcctggccgtggcttctctttggctcccaaagagaaggacagtgttgggagtatctgccgtggcttctctttggctcccaaagagaaggacagtgttgggagtatctgccggcgctgtccaggtcctttagtcagcgtcactccatctgatgtgcagaagctgggctgcacctgcgggggtgggcatagaccgggctgggtctgcagcagcccctggtcctgagcaggcggcagtgaacagcactggcccacctcccactcacagcccctctgtcccctctgcagtgcacccaggtgggcccctctgcgtgcctttgggtgctcccctctcgtggtcgttctggcccgaggcccttagagtatggaggctgagccaggccttgggtttccccagcacagcctcctgtcgctgcatgcgacgtgttgggatttttggatgaaagactctcccacgctctgttggtggacttagctgcctcactggaagtgatgtgggtggaaggtggttgtatgttaccttttccacctctcattgttttccccagaacattgtagatgggggttggcagagggagaaataagccagccacggcagtcgcttggtttcccaggtggaatgggctaacacaggagatgatgggaacctgtcccgcagtccctgcatgaccattggccctgctggcctggcgatgtgggcatcctggggttcttagggtcccagaacaagccccaggcaagctggaacttgggtggggaggggacatgaggaggataaacagctgactgtggcttcaaggacatcagggccaccccaagtcctcagtgtcctactcctggcaaggagttgggtttggatcaaaagtgtttaaaattaatatgttgtcagtgattagaacaacactgtttacataaaaaccatttttctaattctaacaagttagaatgtgaggaaggaatgaacatgagtgtttaggaacctgccctttggtgctgggctggcgtcccgcactggggtgtcctcgctgtctgggggctgctctgctgccccggcccaggtccccttgtggtgttgccagacgggcctcatggtctgctgtgcagagagaggcaggaaggatccctgaagagtcttggagaaaaggttctgtgccctcaggtggggcttaccccctcgtatttataatcttaatttatatagtgaccaccgtggaaacaaacgcctcttgtattgtcatgtacatagtccatacctgagtgctgtacataagttgttctgtgtataaataaaacaagcctgtttttgatcttcaaaaaaaaaaaaaaaaaaaaaaaaaaaaaaaaaaaaaaaaaaaaaaaaaaaaaaaaaaaaaaaaaaaaaaaaggggggggggggcgaaaaaccccggaggggggacaccatagatacgatagcacaacccaccatgttgttgttgtgagaacaaggggtggcccccaaagaggagggctgcattaatataaaagcagatgagagagggagagggggcggcgggattgttataaaaaagcggtgtggggaggtgggagaaacaagtgcggttattggtgcggacttgtgtggaggaggaggagagaacccccatttgtgggggggggtgagaacacaatagtggggggacacacactcctacaagaagagatattatacaggcctggagggcggaagaaatatcaaaacttggaagggggtgttatttgaggtggtgtaaaccacatgactggatgatgtttgtggcgtgcgtggaaagagattcgggtcacgggcgatagtgttctaggaaaaacattagagg

SEQ ID NO: 323697 - DNA, 5399 bp, Homo sapiens
agcggggcccggcagcatggcggcggcggcgggcgcccctccgccgggtcccccgcaaccgcctccgccgccgccgcccgaggagtcgtccgacagcgagcccgaggcggagcccggctccccacagaagctcatccgcaaggtgtccacgtcgggtcagatccgacagaagaccatcatcaaagaggggatgctgaccaaacagaacaattcattccagcgatcaaaaaggagatactttaagcttcgagggcgaacgctttactatgccaaaacggcaaagtcaatcatatttgatgaggtggatctgacagatgccagcgtagctgaatccagtaccaaaaacgtcaacaacagttttacggtcataactccatgcaggaagctcatcttgtgtgctgataacagaaaagaaatggaagattggattgcagcattaaagactgtgcagaacagggagcactttgagcccacccagtacagcatggaccacttctcagggatgcacaattggtacgcctgttcccacgcgaggccgacctactgcaatgtgtgccgtgaggctctgtctggggtcacgtcgcacgggctgtcctgcgaggtgtgcaaatttaaggcccacaagcgctgtgctgtgcgtgcaaccaataactgcaagtggaccacactggcctcgatcgggaaggacatcattgaagatgcagatgggattgcaatgccccaccagtggttggaaggaaacctacctgtgagcgccaagtgcactgtgtgcgacaagacctgtggcagtgtgctgcgcctgcaggactggcgctgcctctggtgcaaggccatggttcacacatcgtgtaaagaatccttgctgaccaagtgcccacttggcctgtgcaaagtgtcagtcatcccacccacggctctcaacagcatcgactccgatgggttctggaaggccagctgtcctccttcttgcacaagcccactgttggtcttcgtcaattcaaaaagtggggacaaccagggtgtgaagttcctcagaagattcaaacagctactaaaccccgcccaggtcttcgacctcatgaacggaggcccacacctcggcttacggttattccagaagtttgacacattccggattctggtttgtggcggggatggaagtgttggctgggtcctctccgaaatcgacagcctcaaccttcataaacagtgtcagctgggagtgctgccgctcggcacagggaacgacttggcccgagtactgggctggggctcagcctgcgatgacgacacccagctcccccagatcttggagaagttggagagagccagcaccaagatgctggacaggtggagcgtcatggcatacgaggccaagctcccccggcaggcctcctcctctaccgtcaccgaagacttcagcgaggattccgaggtacagcagattctcttctatgaagactcggttgcagcccacctttctaaaatcctcacctcggaccagcactcggtggtcatctcctcggccaaagtgctctgtgagacggtgaaggacttcgtggcacgggtggggaaggcctatgagaagacgaccgagagctcggaggagtcagaggtcatggccaagaagtgctctgtcctgaaagagaagctggattcccttctcaagaccttggacgatgagtcccaggcctcgtcctctctgcccaacccgccccccaccattgccgaggaggctgaagatggagatgggtcgggcagcatctgcggttccaccggagaccgcttggtggcatcagcttgcccggcccggccgcagatattccggcctcgagaacagctcatgctgagagccaacagcctgaagaaagcaattcgtcagatcatagaacacacagaaaaagctgtcgatgagcagaatgcccagacccaggagcaggagggcttcgtcctgggcctctctgagtcagaggagaagatggaccacagagtgtgcccaccactgtcccacagcgagagcttcggggtccccaaggggaggagccagcgcaaagtgtcgaaatctccgtgtgaaaagctgatcagcaaagggagtctgtccctaggcagttctgcttcccttccgccccagccgggaagccgggacggcctgcctgcgctcaacaccaagatcctgtacccaaatgtccgggctggaatgtctggttccttacccggtggctcagtcatcagtcgcctgttaattaatgctgatcccttcaactctgaaccagaaaccctagagtattacacggagaaatgtgtcatgaacaactattttggcattggcctggatgcgaagatatccctggactttaacaacaagcgcgatgagcacccagagaagtgcaggagccgaaccaagaacatgatgtggtatggagttcttggaaccaaagagttgctgcacagaacctacaagaacctggagcaaaaggtcttgctggagtgtgacgggcgacccatcccactccccagtcttcagggaattgctgtccttaacattcccagctatgccggaggaaccaacttctgggggggtaccaaggaagatgatactttcgcagctccatcattcgatgacaagattctggaggtggtcgccgtgttcggcagcatgcagatggccgtctctcgagtcatcaggctacagcatcatcggatcgcccagtgtcgcacggtgaagatctccatccttggggatgagggcgtgcctgtgcaggtggacggagaggcctgggtccagccgccagggtacattcggattgtccacaagaaccgggcacagacactgaccagagacagggcatttgagagcaccctgaagtcctgggaagacaagcagaagtgcgagctgccccgccctccatcctgttccctgcacccggagatgctgtccgaggaggaggccacccagatggaccagtttgggcaggcagcaggggtcctcattcacagtatccgagaaatagctcagtctcaccgggacatggagcaggaactggcccacgccgtcaatgccagctccaagtccatggaccgtgtgtatggcaagcccagaaccacagaggggctcaactgcagcttcgtcctggaaatggtgaataacttcagagctctgcgcagtgagacggagctgctgctgtctgggaagatggccctgcagctggatccgcctcagaaggagcagctggggagtgctcttgccgagatggaccgacagctcaggaggctggcagacaccccgtggctctgccagtccgcagagcccggcgacgaagagagtgtgatgctggatcttgccaagcgcagtcgcagtggtaaattccgcctcgtgaccaagtttaaaaaggagaaaaacaacaagaacaaagaagctcacagtagcctgggagccccggttcacctctgggggacagaggaggttgctgcctggctggagcacctcagtctctgtgagtataaggacatcttcacacggcacgacatccggggctctgagctcctgcacctggagcggagggacctcaaggacctgggcgtgaccaaggtgggccacatgaagaggatcctgtgtggcatcaaggagctgagccgcagcgcccccgccgtcgaggcctagcctctgtcctctcagcctgtggcctccacatccccgccgccgaggcctagcctccgccctctcagcctgtggcctctgcgcctcctgccactgaggccctgggcagatgctgcagcccgcccccttctcatggtgctacttcctctgtcagctacagaaagcctccgtgacaccgtccaccagagctctggggtctcgaacataacaacacagctacctttgaaacaacactttctccagctcagagtcacctggggcacatgtgtcacggccactcagctctcgcccgcctgtgctgtgggccagggaatccagcggcgtctggcctcctgggcactgcttgcctggcctcgtgcttggattgtcccgggggctcctctccgtgtgtccttctgtggccgcaccgtgtggctccgcctcctggcccccagccagttctcagaaacgtggctggggcccagcacagcagcctgcaagggcccctgtttgttgatgcagcttttgttgaacaaaaatcgtgctctttcctggtttgaaagtagcatggatgtttccagtcttgttgattgtaatttgacgtgaagagaaaaaaaaattcctcctgcgtgagccaaggcagcgggtgctgtttcccaggcggggagcccctccctgggtgtcacagggcctgtgctcctccctcctccatcctctctcctcccgctcctccctccccccactgtgggctggggacgcctgcccttctgtctccggacgctctaggcgagttcagcttggggtgtgagtgagacagctcgccagctgcatccctgcagacagaggatgtgtgtccacatgagtgtttctgtgtgggaaatgcttcctggctctgggaaactttttctgcccattctgtggttcccagggagcgtggccctggtgggccaggggtggtttgacctcttcagcccgtccggtggcctggaggccggaggctctcctgagtgtctgcccctgcagtggcttcttgtcgcctgctgctgggcgtgatgtcgctggaggtgctggcagggactctgatttggtggtccgcgctgcccctgccctgcctctgtcctggctctgaactagtagatgatggtgccagagggcagggagctcgcctggggagagggctgtgccccgtagggacagtgcccaggtgaaggatgcccctggtcctccagggcactgactttgcccttttttcccgttgatagtcatggctcagaggtgcttgtaaatgtcttgggaagaggtttctgtaacccctgccctggtgtgaggaggaaatggctctggcctggctgcctggccgtggcttctctttggctcccaaagagaaggacagtgttgggagtatctgccgtggcttctctttggctcccaaagagaaggacagtgttgggagtatctgccggcgctgtccaggtcctttagtagaggtacttcatatgagtgcgccttgctgtaacttgcggggttgcctataaccgctctgggtgtgccctgtggctcgaacaggcgggagtacaccactgtggcacatttccactcagagcctctggccctctgggaggccacacaggggccctttttgggcctttggggggctcctttctgggggctttgtgcccagggctataagatgtggttgtcaccactttggtttccccacaacatcttgtgtcgatacgccacttggagaattgggggtgtt

SEQ ID NO: 323698 - DNA, 1278 bp, Homo sapiens
agcggggcccggcagcatggcggcggcggcgggcgcccctccgccgggtcccccgcaaccgcctccgccgccgccgcccgaggagtcgtccgacagcgagcccgaggcggagcccggctccccacagaagctcatccgcaaggtgtccacgtcgggtcagatccgacagaagaccatcatcaaagaggggatgctgaccaaacagaacaattcattccagcgatcaaaaaggagatactttaagcttcgagggcgaacgctttactatgccaaaacggcaaagtcaatcatatttgatgaggtggatctgacagatgccagcgtagctgaatccagtaccaaaaacgtcaacaacagttttacggtcataactccatgcaggaagctcatcttgtgtgctgataacagaaaagaaatggaagattggattgcagcattaaagactgtgcagaacagggagcactttgagcccacccagtacagcatggaccacttctcagggatgcacaattggtacgcctgttcccacgcgaggccgacctactgcaatgtgtgccgtgaggctctgtctggggtcacgtcgcacgggctgtcctgcgaggtgtgcaaatttaaggcccacaagcgctgtgctgtgcgtgcaaccaataactgcaagtggaccacactggcctcgatcgggaaggacatcattgaagatgcagatgggattgcaatgccccaccagtggttggaaggaaacctacctgtgagcgccaagtgcactgtgtgcgacaagacctgtggcagtgtgctgcgcctgcaggactggcgctgcctctggtgcaaggccatggttcacacatcgtgtaaagaatccttgctgaccaagtgcccacttggcctgtgcaaagtgtcagtcatcccacccacggctctcaacagcatcgactccgatgggttctggaaggccagctgtcctccttcttgcacaagcccactgttggtcttcgtcaattcaaaaagtggggacaaccagggtgtgaagttcctcagaagattcaaacagctactaaaccccgcccaggtcttcgacctcatgaacggaggcccacacctcggcttacggttattccagaagtttgacacattccggattctggtttgtggcggggatggaagtgttggctgggtcctctccgaaatcgacagcctcaaccttcataaacaggtaccaggacaggagggagcccagccaggagcagagagggtgcggaggttagagggaaatcatgcagt

SEQ ID NO: 323699 - DNA, 266 bp, Homo sapiens
cgtggcctatatattttcttctgttcgttcttgcgtccagggttctggaaggccagctgtcctccttcttgcacaagcccactgttggtcttcgtcaattcaaaaagtggggacaaccagggtgtgaagttcctcagaagattcaaacagctactaaaccccgcccaggtcttcgacctcatgaacggaggcccacacctcgggtaggaagcttgtaaaatatatctttcttggagttttaaaaattgtgtagatagtgtgtgctt

SEQ ID NO: 323700 - DNA, 531 bp, Homo sapiens
tgaaagccctgtgaggggcggctgtgggcggaggccacgcaggaagagtgcttaggagtaacttgtttctaacacctgtgtgctgagtgccaatgctgggtgtggtgttatgatatatattggttttcatccagcattcctgactcgtaactctcatagtccttgttccagtctttgttagaatactgggtatgttagggcttgggacaggcctctgacctctgggtatcctttcactaatgttcgcccacctttttcacagtgggtcctaaagaccttcccatgagagggtctcaatcctaggggaaggaatgttgatgtcatgaaccttccataaaaacccaagaggacagggttcagagagcttctggatagctgaacacctggcacttcctggagtgtggcgtgcccagggagggcacggaagctctgcactccttccccttccctcattccttgctctatgtgcatctcttcatctgtatcctttgcgatatcctttataataaaccggtaaacataaaaaaaaaa

SEQ ID NO: 323701 - DNA, 2601 bp, Homo sapiens
agccaatcgggctcgatgaggaagacgtgagtcagagcttgcgcctctcgcttccagctgtgggtggcgctaggcagcttcagccggaccgggtaggggtcctcgctcgctagcttgctgtttctcggagaagctcccgagtgtccggcctagaggccatgagaaggcagtgggggtctgccatgagggcggccgagcaggcgggctgcatggtgagcgcctcccgggccggacagcccgaggcgggcccgtggagctgcagcggggtaatcctgagccgtagcccgggcctggtgctttgccacgggggcatcttcgtccccttcctgcgagctggcagcgaagtcctggccgcggccggcgccgtcttcctgcctggcgacagttgcagggacgacctgcgcctgcacgtgcagtgggccccaacggccgcgggtcccgggggcggcgcggagcggggccgcccagggctgtgcacgccccagtgcgcgagcctcgagcccggcccacctgccccgtcccgcgggcgtcccctgcagccccggcttcctgctgagctgctgctgctgctgagctgcccggccttctgggcccacttcgcgcgcctcttcggggacgaggcagcggaacagtggcgcttctcgagcgcggcgcgggatgacgaagtgtcggaggacgaggaggcggatcaactgagagcgctgggctggtttgcgctgctgggcgtgcggctaggccaggaggaggtggaggaggagcgcgggccagccatggcggtgtcgcctctcgggggccgtgccaaaggtgcgccattgctggtctgcggctcccctttcggcgccttctgccccgacatctttctcaacacgctgagctgcggggtgctcagcaacgtggccggcccactgctgcttaccgacgcacgctgccttcccggcaccgagggcggcggcgtgttcaccgcgcggcccgcgggggcgctggtggcgctggtggtggcgccgctctgttggaaggccggcgaatgggtgggcttcacgctgctctgcgccgccgccccccttttccgcgccgcccgcgacgcgcttcaccgcctgccgcacagcaccgctgccctggccgcccttctgccgccagaggtgggcgtcccgtggggtctgcccctccgagactccgggcccctgtgggcagccgcggcagtgttggtggagtgcggcaccgtatggggctccggagtggctgtggcaccccgccttgtagtgacctggtcggcacgtgtcccctcgggaagcagccagggtcctggtgcgctccaccacccccaagagtgtggccatctggggccgtgtggtatttgccactcaggagacatgtccctatgacatagcagtggtgagcctggaggaggacctggatgatgtccccatccctgtgcccgctgagcacttccatgaaggcgaggctgtgagtgtggtgggctttggcgtctttggccagtcttgcgggccctcggtgacctcaggcatcctttcggctgtggtgcaggtgaatggcacgcccgtaatgctgcagaccacgtgtgctgtgcacagcggctccagtgggggacccctcttctccaaccactcaggaaacctccttggcataatcaccagcaacacccgggacaataatacgggggccacctacccccacctgaacttcagcattcccatcacggtgctccagccggccctgcagcagtacagccagacccaagacctaggtggcctccgtgagctggaccgcgctgctgagccagtcagggtggtgtggcggttgcagcggcccctggcagaggccccgcggagcaagctctgaggctgtgttaccacctttggaaagaagagtgacctttttctgctgtaggaagtgatgttgaggtgacggtggcctcaggattcagggcccagcccctgcaggggcccaggctgcctctcatctccacccactgactgcagactgggctttgggctctggggcaaacttctcttcagccccatggatccttaacctggcagcccgttttggggtgctttcttgagcccccagttctctgtcccctagcactagactcagctgtattgtttttccttctggggagcccactccaactgcacagaagttctgggcctgacaggtagattccagctggaaggcaggcccgtgcctggttttgcgtctgttcccctgagggccatcgtcatcctggagcttcaatggggccttggctcctgtctgcctctcagtcagagtcagggctgacaaaggactcagcttccttagcatctcagcagaaaccttgctctgaagaccagagacagaagggacagaaacaggagtgcctcctgctgtgccaggcccatgggcagtgcaggcagatccctgaaggtcagcactcctgggtcttcatatgccaacaggggcgctcttgacactgtgccttcattttccagcccacagcctgggtctcagggatcttgaggggtagaacatgtctggttggggcttgggaataaacatgatctattgaaaaacctctgtatttatatatcaaattgt

SEQ ID NO: 323702 - DNA, 1939 bp, Homo sapiens
ttggaagctacccctgcagagtgtgtagtaggacgcccctgtctgatcccgggcaagtcacttaacctgtctaagctgcctccccgggagttgacgctgaatgtcgtggaacggagcctgtcacgtcgtgtgctacagaagtgttagcgtgtacgtaaatagggacccagaggagtgaaaccatgtcatatctgacccaccaactgacgggattgttgtgggtatcaacgaggcagtgaaggaaagtgttgtgtttgccttggctcctcccactttgtttggtgttgggaatgttactgagcgtctctgggcctcagttataccacctaaaatggagataatgccagtgcctagtttatagggtcgtgaagactaaataaagtgatgtccacaaagcactaacaccaaacctggcccacagtgctcactaagtgtcaggttgattattcaggtacaggaagctttagagaagtagcacagtttgtcaaccacctcttggagataccacagaatggttacatgacttgcccagagttgcctgctggtcgattcagggctgatacccagatcttctgacttttactgtcactctcagctccttgatttctcccaagtactgaggagtcagaaagctagcctgtcatttgtttcccttgctcccaggagtgtggccatctggggccgtgtggtatttgccactcaggagacatgtccctatgacatagcagtggtgagcctggaggaggacctggatgatgtccccatccctgtgcccgctgagcacttccatgaaggcgaggctgtgagtgtggtgggctttggcgtctttggccagtcttgcgggccctcggtgacctcaggcatcctttcggctgtggtgcaggtgaatggcacgcccgtaatgctgcagaccacgtgtgctgtgcacagcggctccagtgggggacccctcttctccaaccactcaggaaacctccttggcataatcaccagcaacacccgggacaataatacgggggccacctacccccacctgaacttcagcattcccatcacggtgctccagccggccctgcagcagtacagccagacccaagacctaggtggcctccgtgagctggaccgcgctgctgagccagtcagggtggtgtggcggttgcagcggcccctggcagaggccccgcggagcaagctctgaggctgtgttaccacctttggaaagaagagtgacctttttctgctgtaggaagtgatgttgaggtgacggtggcctcaggattcagggcccagcccctgcaggggcccaggctgcctctcatctccacccactgactgcagactgggctttgggctctggggcaaacttctcttcagccccatggatccttaacctggcagcccgttttggggtgctttcttgagcccccagttctctgtcccctagcactagactcagctgtattgtttttccttctggggagcccactccaactgcacagaagttctgggcctgacaggtagattccagctggaaggcaggcccgtgcctggttttgcgtctgttcccctgagggccatcgtcatcctggagcttcaatggggccttggctcctgtctgcctctcagtcagagtcagggctgacaaaggactcagcttccttagcatctcagcagaaaccttgctctgaagaccagagacagaagggacagaaacaggagtgcctcctgctgtgccaggcccatgggcagtgcaggcagatccctgaaggtcagcactcctgggtcttcatatgccaacaggggcgctcttgacactgtgccttcattttccagcccacagcctgggtctcagggatcttgaggggtagaacatgtctggttggggcttgggaataaacatgatctattgaaaaacctctgtatttatatatcaaattgt

SEQ ID NO: 323703 - DNA, 1330 bp, Homo sapiens
acaggctgtactggtctggaattttaggatgcgctaggcagcacagccggacgggagtgtggccatctggggccgtgtggtatttgccactcaggagacatgtccctatgacatagcagtggtgagcctggaggaggacctggatgatgtccccatccctgtgcccgctgagcacttccatgaaggcgaggctgtgagtgtggtgggctttggcgtctttggccagtcttgcgggccctcggtgacctcaggcatcctttcggctgtggtgcaggtgaatggcacgcccgtaatgctgcagaccacgtgtgctgtgcacagcggctccagtgggggacccctcttctccaaccactcaggaaacctccttggcataatcaccagcaacacccgggacaataatacgggggccacctacccccacctgaacttcagcattcccatcacggtgctccagccggccctgcagcagtacagccagacccaagacctaggtggcctccgtgagctggaccgcgctgctgagccagtcagggtggtgtggcggttgcagcggcccctggcagaggccccgcggagcaagctctgaggctgtgttaccacctttggaaagaagagtgacctttttctgctgtaggaagtgatgttgaggtgacggtggcctcaggattcagggcccagcccctgcaggggcccaggctgcctctcatctccacccactgactgcagactgggctttgggctctggggcaaacttctcttcagccccatggatccttaacctggcagcccgttttggggtgctttcttgagcccccagttctctgtcccctagcactagactcagctgtattgtttttccttctggggagcccactccaactgcacagaagttctgggcctgacaggtagattccagctggaaggcaggcccgtgcctggttttgcgtctgttcccctgagggccatcgtcatcctggagcttcaatggggccttggctcctgtctgcctctcagtcagagtcagggctgacaaaggactcagcttccttagcatctcagcagaaaccttgctctgaagaccagagacagaagggacagaaacaggagtgcctcctgctgtgccaggcccatgggcagtgcaggcagatccctgaaggtcagcactcctgggtcttcatatgccaacaggggcgctcttgacactgtgccttcattttccagcccacagcctgggtctcagggatcttgaggggtagaacatgtctggttggggcttgggaataaacatgatctattgaaaaacctctgtatttatatatcaaattgt

SEQ ID NO: 323704 - DNA, 1279 bp, Homo sapiens
agccaatcgggctcgatgaggaagacgtgagtcagagcttgcgcctctcgcttccagctgtgggtggcgctaggcagcttcagccggaccgggagtgtggccatctggggccgtgtggtatttgccactcaggagacatgtccctatgacatagcagtggtgagcctggaggaggacctggatgatgtccccatccctgtgcccgctgagcacttccatgaaggtgaatggcacgcccgtaatgctgcagaccacgtgtgctgtgcacagcggctccagtgggggacccctcttctccaaccactcaggaaacctccttggcataatcaccagcaacacccgggacaataatacgggggccacctacccccacctgaacttcagcattcccatcacggtgctccagccggccctgcagcagtacagccagacccaagacctaggtggcctccgtgagctggaccgcgctgctgagccagtcagggtggtgtggcggttgcagcggcccctggcagaggccccgcggagcaagctctgaggctgtgttaccacctttggaaagaagagtgacctttttctgctgtaggaagtgatgttgaggtgacggtggcctcaggattcagggcccagcccctgcaggggcccaggctgcctctcatctccacccactgactgcagactgggctttgggctctggggcaaacttctcttcagccccatggatccttaacctggcagcccgttttggggtgctttcttgagcccccagttctctgtcccctagcactagactcagctgtattgtttttccttctggggagcccactccaactgcacagaagttctgggcctgacaggtagattccagctggaaggcaggcccgtgcctggttttgcgtctgttcccctgagggccatcgtcatcctggagcttcaatggggccttggctcctgtctgcctctcagtcagagtcagggctgacaaaggactcagcttccttagcatctcagcagaaaccttgctctgaagaccagagacagaagggacagaaacaggagtgcctcctgctgtgccaggcccatgggcagtgcaggcagatccctgaaggtcagcactcctgggtcttcatatgccaacaggggcgctcttgacactgtgccttcattttccagcccacagcctgggtctcagggatcttgaggggtagaacatgtctggttggggcttgggaataaacatgatctattgaaaaacctctgtatttatatatcaaattgt

SEQ ID NO: 323705 - DNA, 1051 bp, Homo sapiens
agccaatcgggctcgatgaggaagacgtgagtcagagcttgcgcctctcgcttccagctgtgggtggcgctaggcagcttcagccggaccgggcataatcaccagcaacacccgggacaataatacgggggccacctacccccacctgaacttcagcattcccatcacggtgctccagccggccctgcagcagtacagccagacccaagacctaggtggcctccgtgagctggaccgcgctgctgagccagtcagggtggtgtggcggttgcagcggcccctggcagaggccccgcggagcaagctctgaggctgtgttaccacctttggaaagaagagtgacctttttctgctgtaggaagtgatgttgaggtgacggtggcctcaggattcagggcccagcccctgcaggggcccaggctgcctctcatctccacccactgactgcagactgggctttgggctctggggcaaacttctcttcagccccatggatccttaacctggcagcccgttttggggtgctttcttgagcccccagttctctgtcccctagcactagactcagctgtattgtttttccttctggggagcccactccaactgcacagaagttctgggcctgacaggtagattccagctggaaggcaggcccgtgcctggttttgcgtctgttcccctgagggccatcgtcatcctggagcttcaatggggccttggctcctgtctgcctctcagtcagagtcagggctgacaaaggactcagcttccttagcatctcagcagaaaccttgctctgaagaccagagacagaagggacagaaacaggagtgcctcctgctgtgccaggcccatgggcagtgcaggcagatccctgaaggtcagcactcctgggtcttcatatgccaacaggggcgctcttgacactgtgccttcattttccagcccacagcctgggtctcagggatcttgaggggtagaacatgtctggttggggcttgggaataaacatgatctattgaaaaacctctgtatttatatatcaaattgt

SEQ ID NO: 323706 - DNA, 283 bp, Homo sapiens
acaaggactagggaacagcctgttgctcagaagtggtcatgcagatacagtgctaggagctcagtggagttctcagcctcttccagccaggggacatggggaaggctctctggaggcaggagtatctgagcagaaacttgaagggtggagaggtttggaatgtttggagagggtagggatgggagttagggagtgtgagtcctgctgtaacacaggtgtccccagcttcaccctccttccttccctggcagcgaggctgtgagtgtggtgggctttggcgtct

SEQ ID NO: 323707 - DNA, 375 bp, Homo sapiens
ggccctcggtgacctcaggcatcctttcggctgtggtgcaggtgaatggcacgcccgtaatgctgcagaccacgtgtgctgtgcacagcggctccagtgggggacccctcttctccaaccactcaggaaacctccttggtaaccagctctttggccccctcccgccctcccacttgccagaacctcagtcccaccccatgagtgcttgtggccagccccagtgcaccctctgtctgggaaaatggtgggcattatgagtgagctagcgaaggtttgcaggctgttctcctgatggtggagagggacggatgctggactgggaggaaagagatctgggctctggtcccttctctgctactaatctaatctggtttg

SEQ ID NO: 323708 - DNA, 2284 bp, Homo sapiens
agccaatcgggctcgatgaggaagacgtgagtcagagcttgcgcctctcgcttccagctgtgggtggcgctaggcagcttcagccggaccgggtaggggtcctcgctcgctagcttgctgtttctcggagaagctcccgagtgtccggcctagaggccatgagaaggcagtgggggtctgccatgagggcggccgagcaggcgggctgcatggtgagcgcctcccgggccggacagcccgaggcgggcccgtggagctgcagcggggtaatcctgagccgtagcccgggcctggtgctttgccacgggggcatcttcgtccccttcctgcgagctggcagcgaagtcctggccgcggccggcgccgtcttcctgcctggcgacagttgcagggacgacctgcgcctgcacgtgcagtgggccccaacggccgcgggtcccgggggcggcgcggagcggggccgcccagggctgtgcacgccccagtgcgcgagcctcgagcccggcccacctgccccgtcccgcgggcgtcccctgcagccccggcttcctgctgagctgctgctgctgctgagctgcccggccttctgggcccacttcgcgcgcctcttcggggacgaggcagcggaacagtggcgcttctcgagcgcggcgcgggatgacgaagtgtcggaggacgaggaggcggatcaactgagagcgctgggctggtttgcgctgctgggcgtgcggctaggccaggaggaggtggaggaggagcgcgggccagccatggcggtgtcgcctctcgggggccgtgccaaaggtgcgccattgctggtctgcggctcccctttcggcgccttctgccccgacatctttctcaacacgctgagctgcggggtgctcagcaacgtggccggcccactgctgcttaccgacgcacgctgccttcccggcaccgagggcggcggcgtgttcaccgcgcggcccgcgggggcgctggtggcgctggtggtggcgccgctctgttggaaggccggcgaatgggtgggcttcacgctgctctgcgccgccgccccccttttccgcgccgcccgcgacgcgcttcaccgcctgccgcacagcaccgctgccctggccgcccttctgccgccagaggtgggcgtcccgtggggtctgcccctccgagactccgggcccctgtgggcagccgcggcagtgttggtggagtgcggcaccgtatggggctccggagtggctgtggcaccccgccttgtagtgacctggtcggcacgtgtcccctcgggaagcagccagggtcctggtgcgctccaccacccccaagcataatcaccagcaacacccgggacaataatacgggggccacctacccccacctgaacttcagcattcccatcacggtgctccagccggccctgcagcagtacagccagacccaagacctaggtggcctccgtgagctggaccgcgctgctgagccagtcagggtggtgtggcggttgcagcggcccctggcagaggccccgcggagcaagctctgaggctgtgttaccacctttggaaagaagagtgacctttttctgctgtaggaagtgatgttgaggtgacggtggcctcaggattcagggcccagcccctgcaggggcccaggctgcctctcatctccacccactgactgcagactgggctttgggctctggggcaaacttctcttcagccccatggatccttaacctggcagcccgttttggggtgctttcttgagcccccagttctctgtcccctagcactagactcagctgtattgtttttccttctggggagcccactccaactgcacagaagttctgggcctgacaggtagattccagctggaaggcaggcccgtgcctggttttgcgtctgttcccctgagggccatcgtcatcctggagcttcaatggggccttggctcctgtctgcctctcagtcagagtcagggctgacaaaggactcagcttccttagcatctcagcagaaaccttgctctgaagaccagagacagaagggacagaaacaggagtgcctcctgctgtgccaggcccatgggcagtgcaggcagatccctgaaggtcagcactcctgggtcttcatatgccaacaggggcgctcttgacactgtgccttcattttccagcccacagcctgggtctcagggatcttgaggggtagaacatgtctggttggggcttgggaataaacatgatctattgaaaaacctctgtatttatatatcaaattgt

SEQ ID NO: 323709 - DNA, 1368 bp, Homo sapiens
agccaatcgggctcgatgaggaagacgtgagtcagagcttgcgcctctcgcttccagctgtgggtggcgctaggcagcttcagccggaccgggagtgtggccatctggggccgtgtggtatttgccactcaggagacatgtccctatgacatagcagtggtgagcctggaggaggacctggatgatgtccccatccctgtgcccgctgagcacttccatgaaggcgaggctgtgagtgtggtgggctttggcgtctttggccagtcttgcgggccctcggtgacctcaggcatcctttcggctgtggtgcaggtgaatggcacgcccgtaatgctgcagaccacgtgtgctgtgcacagcggctccagtgggggacccctcttctccaaccactcaggaaacctccttggcataatcaccagcaacacccgggacaataatacgggggccacctacccccacctgaacttcagcattcccatcacggtgctccagccggccctgcagcagtacagccagacccaagacctaggtggcctccgtgagctggaccgcgctgctgagccagtcagggtggtgtggcggttgcagcggcccctggcagaggccccgcggagcaagctctgaggctgtgttaccacctttggaaagaagagtgacctttttctgctgtaggaagtgatgttgaggtgacggtggcctcaggattcagggcccagcccctgcaggggcccaggctgcctctcatctccacccactgactgcagactgggctttgggctctggggcaaacttctcttcagccccatggatccttaacctggcagcccgttttggggtgctttcttgagcccccagttctctgtcccctagcactagactcagctgtattgtttttccttctggggagcccactccaactgcacagaagttctgggcctgacaggtagattccagctggaaggcaggcccgtgcctggttttgcgtctgttcccctgagggccatcgtcatcctggagcttcaatggggccttggctcctgtctgcctctcagtcagagtcagggctgacaaaggactcagcttccttagcatctcagcagaaaccttgctctgaagaccagagacagaagggacagaaacaggagtgcctcctgctgtgccaggcccatgggcagtgcaggcagatccctgaaggtcagcactcctgggtcttcatatgccaacaggggcgctcttgacactgtgccttcattttccagcccacagcctgggtctcagggatcttgaggggtagaacatgtctggttggggcttgggaataaacatgatctattgaaaaacctctgtatttatatatcaaattgt

SEQ ID NO: 323710 - DNA, 2696 bp, Homo sapiens
agccaatcgggctcgatgaggaagacgtgagtcagagcttgcgcctctcgcttccagctgtgggtggcgctaggcagcttcagccggaccgggtaggggtcctcgctcgctagcttgctgtttctcggagaagctcccgagtgtccggcctagaggccatgagaaggcagtgggggtctgccatgagggcggccgagcaggcgggctgcatggtgagcgcctcccgggccggacagcccgaggcgggcccgtggagctgcagcggggtaatcctgagccgtagcccgggcctggtgctttgccacgggggcatcttcgtccccttcctgcgagctggcagcgaagtcctggccgcggccggcgccgtcttcctgcctggcgacagttgcagggacgacctgcgcctgcacgtgcagtgggccccaacggccgcgggtcccgggggcggcgcggagcggggccgcccagggctgtgcacgccccagtgcgcgagcctcgagcccggcccacctgccccgtcccgcgggcgtcccctgcagccccggcttcctgctgagctgctgctgctgctgagctgcccggccttctgggcccacttcgcgcgcctcttcggggacgaggcagcggaacagtggcgcttctcgagcgcggcgcgggatgacgaagtgtcggaggacgaggaggcggatcaactgagagcgctgggctggtttgcgctgctgggcgtgcggctaggccaggaggaggtggaggaggagcgcgggccagccatggcggtgtcgcctctcgggggccgtgccaaaggtgcgccattgctggtctgcggctcccctttcggcgccttctgccccgacatctttctcaacacgctgagctgcggggtgctcagcaacgtggccggcccactgctgcttaccgacgcacgctgccttcccggcaccgagggcggcggcgtgttcaccgcgcggcccgcgggggcgctggtggcgctggtggtggcgccgctctgttggaaggccggcgaatgggtgggcttcacgctgctctgcgccgccgccccccttttccgcgccgcccgcgacgcgcttcaccgcctgccgcacagcaccgctgccctggccgcccttctgccgccagaggtgggcgtcccgtggggtctgcccctccgagactccgggcccctgtgggcagccgcggcagtgttggtggagtgcggcaccgtatggggctccggagtggctgtggcaccccgccttgtagtgacctggtcggcacgtgtcccctcgggaagcagccagggtcctggtgcgctccaccacccccaagagtgtggccatctggggccgtgtggtatttgccactcaggagacatgtccctatgacatagcagtggtgagcctggaggaggacctggatgatgtccccatccctgtgcccgctgagcacttccatgaaggcgaggctgtgagtgtggtgggctttggcgtctttggccagtcttgcgggccctcggtgacctcaggcatcctttcggctgtggtgcaggtgaatggcacgcccgtaatgctgcagaccacgtgtgctgtgcacagcggctccagtgggggacccctcttctccaaccactcaggaaacctccttggcataatcaccagcaacacccgggacaataatacgggggccacctacccccacctgaacttcagcattcccatcacggtgctccagccggccctgcagcagtacagccagacccaagacctaggtggcctccgtgagctggaccgcgctgctgagccagtcagggtggtgtggcggttgcagcggcccctggcagaggccccgcggagcaagctctgaggctgtgttaccacctttggaaagaagagtgacctttttctgctgtaggaagtgatgttgaggtgacggtggcctcaggattcagggcccagcccctgcaggggcccaggctgcctctcatctccacccactgactgcagactgggctttgggctctggggcaaacttctcttcagccccatggatccttaacctggcagcccgttttggggtgctttcttgagcccccagttctctgtcccctagcactagactcagctgtattgtttttccttctggggagcccactccaactgcacagaagttctgggcctgacaggtagattccagctggaaggcaggcccgtgcctggttttgcgtctgttcccctgagggccatcgtcatcctggagcttcaatggggccttggctcctgtctgcctctcagtcagagtcagggctgacaaaggactcagcttccttagcatctcagcagaaaccttgctctgaagaccagagacagaagggacagaaacaggagtgcctcctgctgtgccaggcccatgggcagtgcaggcagatccctgaagtgggtcctaaagaccttcccatgagagggtctcaatcctaggggaaggaatgttgatgtcatgaaccttccataaaaacccaagaggacagggtttaaaaaactttttgaaaagttaaccccttgccctttcttgaatttggggttcccaaggaaggcacggaaagtttgccctcctttccctttccttcatccctggtttaaggggatttttttatttggatcccttgggaaattcttttttattaaaccggtaaccttaaaaaa

SEQ ID NO: 323711 - DNA, 2450 bp, Homo sapiens
ctgcgcgctgcggactgtggggcttctcggcccgaggcagaggaacagggaagatggcggctgtggtggagaatgtagtgaagctccttggggagcagtactacaaagatgccatggagcagtgccacaattacaatgctcgcctctgtgctgagcgcagcgtgcgcctgcctttcttggactcacagaccggagtagcccagagcaattgttacatctggatggaaaagcgacaccggggtccaggattggcctccggacagctgtactcctaccctgcccggcgctggcggaaaaagcggcgagcccatccccctgaggatccacgactttccttcccatctattaagccagacacagaccagaccctgaagaaggaggggctgatctctcaggatggcagtagtttagaggctctgttgcgcactgaccccctggagaagcgaggtgccccggatccccgagttgatgatgacagcctgggcgagtttcctgtgaccaacagtcgagcgcgaaagcggatcctagaaccagatgacttcctggatgacctcgatgatgaagactatgaagaagatactcccaagcgtcggggaaaggggaaatccaagggtaagggtgtgggcagtgcccgtaagaagctggatgcttccatcctggaggaccgggataagccctatgcctgtgacatttgtggaaaacgttacaagaaccgaccaggcctcagttaccactatgcccactcccacttggctgaggaggagggcgaggacaaggaagactctcaaccacccactcctgtttcccagaggtctgaggagcagaaatccaaaaagggtcctgatggattggccttgcccaacaactactgtgacttctgcctgggggactcaaagattaacaagaagacgggacaacccgaggagctggtgtcctgttctgactgtggccgctcagggcatccatcttgcctccaatttacccccgtgatgatggcggcagtgaagacataccgctggcagtgcatcgagtgcaaatgttgcaatatctgcggcacctccgagaatgacgaccagttgctcttctgtgatgactgcgatcgtggctaccacatgtactgtctcaccccgtccatgtctgagccccctgaaggaagttggagctgccacctgtgtctggacctgttgaaagagaaagcttccatctaccagaaccagaactcctcttgatgtggccacccacctgctccccgacatatctaaggctgtttctctcctccacttcatatttcatacccatctttcccttcttcctcctctccttcacaaatccagagaaccttggggtggttgtgccagcctgcctttggcagctgcaagctgaggtggcagctctgaccacctctggccccaggccctcagggagaaaggagcaacacactgcccctaggcgtgcgtgtggcccagtttctctctgctctccattaagtgcattcactctgcttgccttgggcccagcccctggtgatcacagggttcaaacagtgtcctcctagaaagagtgggagagcagctcacttctctgtgttctgcctcccctctggtctccagagttttcctgtcctctagaggcaagccaggccagggagctgggagcgagcaagctgaggccacgtccacaaggagcttttcatgcccctgtgccgcatagcctcacctctttcctccagagtggctctctgcggccctgtgttcctgctacagagtgttcttttctggagtcaggatgttctcggtcaccctcctggttctgccctgtcccattccaccccaccccagggggaacagtagcttcaccttgttattcccattgctctcctggctcactcttacggtcggtctccagtgactgaagcattccccacccttggaatttctcatcttctgcctcccttcctactccttttggttttgtggggagaggggaaggatcagggggccaggccagcagctcgggggccacaaggagatggataatgtgcctgttttttaacacaacaaaaaagcctacctccaaaatcccctttttgttcttcctggacctgggcattcagcctcctgctcttaactgaattgggagcctctgccacctgccccgtgtatcctggctctcagctcatggggaagccacatagacatccctttcttcccttgcacgctcgctagcagctggtaaggtcttcacaccctgattcctcaagttttctgcttagtggcactgacattaagtagtggggggacagtccatgccaggacaccctggagtagccttcccccttggccgtgggcaggccctaactcactgtcgctttggagttgaggtgtcttttctttttctttctttagttcctgtattctaaacattagtaaaaataaatgtttttacacaga

SEQ ID NO: 323712 - DNA, 846 bp, Homo sapiens
ctgcgcgctgcggactgtggggcttctcggcccgaggcagaggaacagggaagatggcggctgtggtggagaatgtagtgaagctccttggggagcagtactacaaagatgccatggagcagtgccacaattacaatgctcgcctctgtgctgagcgcagcgtgcgcctgcctttcttggactcacagaccggagtagcccagagcaattgttacatctggatggaaaagcgacaccggggtccaggattggcctccggacagctgtactcctaccctgcccggcgctggcggaaaaagcggcgagcccatccccctgaggatccacgactttccttcccatctattaagccagacacagaccagaccctgaagaaggaggggctgatctctcaggatggcagtagtttagaggctctgttgcgcactgaccccctggagaagcgaggtgccccggatccccgagttgatgatgacagcctgggcgagtttcctgtgaccaacagtcgagcgcgaaaggtacaggattatccctgtggctaagggagctttgatggaaatcagcctcctcttcactgggggccacctagtttctagaactgaaacagaagctggagtccaggaagcaggcccctgcagttctgttcttacttcagtccctgattattgtcaggtactgactggcttctctgttgcttctaactatagactctcattccttcacttttatcacagaaggttattattatacacatatataattttcattaaaaaaattaaaataggccagatgcagtggctcatgcctgtaatcccagcactttgggaggccaaggcaggaggattg

SEQ ID NO: 323713 - DNA, 877 bp, Homo sapiens
tggtggggaaagcatttcaggctaaggaaataacgtgaagcacaggggaaagatatcccaaagtatggaagggagcaggagcaggattatagcatgcttgaaaggcgttggtgaggaatgaggctggtgtgggtgggaccacgtcacagaggaggttctgggtggccttggccagtctcatcataggggagcttttggatgcacatatttctacccatgctaaccctcctgtccactcagcggatcctagaaccagatgacttcctggatgacctcgatgatgaagactatgaagaagatactcccaagcgtcggggaaaggggaaatccaagggtaagggtgtgggcagtgcccgtaagaagctggatgcttccatcctggaggaccgggataagccctatgcctgtgacagtgagtgcctcacaagtgggtgggtagaccttgccttggacccagctcctgctctggatatgagaggagggagggttgtgtttttgcccagagtattaaaacaaacctgggctcttgtcctgcctgctgactgcttccgtctgagacccctgggaggcctgggtccctgctatatgacgggtgggacctgcatgctctgggaaagatttctgccatcctctggggtagggttgcttgtgggggccacagcaggcagggttggcctctcaacagatggcctgcaggtctcctggcctcagttaagccagggccccaggggtctgacactgagtttttcaacgtctgttctctttttctttctgtctgccttgccccacttctgtccctccaccctgggagcaccatcgccgctggggtttctctctcgtttgctctgctttcctgctgctgctgctcctgtctcaa

SEQ ID NO: 323714 - DNA, 764 bp, Homo sapiens
ttatgggccccctgaagtatccttttttctagaacattctgaaagtcatccttgcctatgggaagcctaggccggcctgcactgttatgttcaataaataagcagggtgctctgggctggggattgtgtgaggagcagagcgcagcccgtcctcatgcttttccactgaagtaggccaggcagagagggagtacagcaatggatgcgctttggcagctgagtagtccgagagccagaaaagaaatgtggaaaataagaacgctgtagcaggcctaggtgaggaaatttaggaagggtttgcgggaggtaggatttgagatgggtcttggagagttggacagtgtcagccggtaggacgggggtgcggacggaagcctgtgaggaaggcagaggatgcggagctgtgaggaagggaacgatgccagatcttgagtttaagaacttgaatcttgtaaagtaccaaatctaataaaatactcgtcctaaatcattactggcccaagcatgcagtgtttccgtggccgacagactcgagccagcgctgtccatggtaaccagcttttgtgtggcttaaagcttgcatccattttctcctttcatcgttttcccaaaacaattccgtgagggctgttagccctgcttggtagacgaagaagccgatgcggtctagggtcacggccagggaggctttgggacgccaagtcagctcggcggtcaccacaccacctacagggctcgtcgggccctcggggtcggcggctgct

SEQ ID NO: 323715 - DNA, 3256 bp, Homo sapiens
ctgcgcgctgcggactgtggggcttctcggcccgaggcagaggaacagggaagatggcggctgtggtggagaatgtagtgaagctccttggggagcagtactacaaagatgccatggagcagtgccacaattacaatgctcgcctctgtgctgagcgcagcgtgcgcctgcctttcttggactcacagaccggagtagcccagagcaattgttacatctggatggaaaagcgacaccggggtccaggattggcctccggacagctgtactcctaccctgcccggcgctggcggaaaaagcggcgagcccatccccctgaggatccacgactttccttcccatctattaagccagacacagaccagaccctgaagaaggaggggctgatctctcaggatggcagtagtttagaggctctgttgcgcactgaccccctggagaagcgaggtgccccggatccccgagttgatgatgacagcctgggcgagtttcctgtgaccaacagtcgagcgcgaaagcggatcctagaaccagatgacttcctggatgacctcgatgatgaagactatgaagaagatactcccaagcgtcggggaaaggggaaatccaagggtaagggtgtgggcagtgcccgtaagaagctggatgcttccatcctggaggaccgggataagccctatgcctgtgacatttgtggaaaacgttacaagaaccgaccaggcctcagttaccactatgcccactcccacttggctgaggaggagggcgaggacaaggaagactctcaaccacccactcctgtttcccagaggtctgaggagcagaaatccaaaaagggtcctgatggattggccttgcccaacaactactgtgacttctgcctgggggactcaaagattaacaagaagacgggacaacccgaggagctggtgtcctgttctgactgtggccgctcagggcatccatcttgcctccaatttacccccgtgatgatggcggcagtgaagacataccgctggcagtgcatcgagtgcaaatgttgcaatatctgcggcacctccgagaatgacgaccagttgctcttctgtgatgactgcgatcgtggctaccacatgtactgtctcaccccgtccatgtctgagccccctgaaggaagttggagctgccacctgtgtctggacctgttgaaagagaaagcttccatctaccagaaccagaactcctcttgatgtggccacccacctgctccccgacatatctaaggctgtttctctcctccacttcatatttcatacccatctttcccttcttcctcctctccttcacaaatccagagaaccttggggtggttgtgccagcctgcctttggcagctgcaagctgaggtggcagctctgaccacctctggccccaggccctcagggagaaaggagcaacacactgcccctaggcgtgcgtgtggcccagtttctctctgctctccattaagtgcattcactctgcttgccttgggcccagcccctggtgatcacagggttcaaacagtgtcctcctagaaagagtgggagagcagctcacttctctgtgttctgcctcccctctggtctccagagttttcctgtcctctagaggcaagccaggccagggagctgggagcgagcaagctgaggccacgtccacaaggagcttttcatgcccctgtgccgcatagcctcacctctttcctccagagtggctctctgcggccctgtgttcctgctacagagtgttcttttctggagtcaggatgttctcggtcaccctcctggttctgccctgtcccattccaccccaccccagggggaacagtagcttcaccttgttattcccattgctctcctggctcactcttacggtcggtctccagtgactgaagcattccccacccttggaatttctcatcttctgcctcccttcctactccttttggttttgtggggagaggggaaggatcagggggccaggccagcagctcgggggccacaaggagatggataatgtgcctgttttttaacacaacaaaaaagcctacctccaaaatcccctttttgttcttcctggacctgggcattcagcctcctgctcttaactgaattgggagcctctgccacctgccccgtgtatcctggctctcagctcatggggaagccacatagacatccctttcttcccttgcacgctcgctagcagctggtaaggtcttcacaccctgattcctcaagttttctgcttagtggcactgacattaagtagtggggggacagtccatgccaggacaccctggagtagccttcccccttggccgtgggcaggccctaactcactgtcgctttggagttgaggtgtcttttctttttctttctttagttcctgtattctaaacattagtaaaaataaatgtttttacacagaaaaaaaaaaaaaaaaaaaaaaaaaaaaaaaaaaaaaaaaaaaaaaaaaaaaaaaaaaaaaaaaaaaaaaaaaaaaaaaaaagggggggggggcgccaaaaaatcccccgagcggggggggacacacataggagaccactccccagattgttgtgaaaaagagagggcccccataggaggggagatataatataaacaagaaggagcgggcgggcgccgcgaataaaaccagcgacgagagcgggggaaacaagctgtcacagggggaacactcgggaggcgagaacgcccccctacggcggggggggggggacacactaaggcgggcaacacacctcctccgaggaatatactagaccgcccgcggaggggaaaaaccaaacctctcgcaggggagacgaagcgggttaaaacacacgcgacatacaatcgacgcgcgggatgagaaagatgatggcaccagagggagagtagtgctatgaaagcaaattataccgcggggggggtctcgtgctacacccggacaaacaccaagaaagggccgaaaacgacgaaagaaaacgaaaaacacaacaagaaaaaaagagaaaaaaaaaaggaagaaaaaaaaggagagagcaaaagaaacaagagaaaacagaagaaaaaaacaaaacgaaaaaaaaaaaaaaagagaaaaaaacacaaaaacgaaaaaagaaaaggaacaaaaacacacagaagaaaaaaaaagaaaaataaagagaccaaaagaaaaaaacgaaaaaaaaagacagaaagcagacaaaaagaaaacaaaaaaagaag

SEQ ID NO: 323716 - DNA, 3343 bp, Homo sapiens
ctgcgcgctgcggactgtggggcttctcggcccgaggcagaggaacagggaagatggcggctgtggtggagaatgtagtgaagctccttggggagcagtactacaaagatgccatggagcagtgccacaattacaatgctcgcctctgtgctgagcgcagcgtgcgcctgcctttcttggactcacagaccggagtagcccagagcaattgttacatctggatggaaaagcgacaccggggtccaggattggcctccggacagctgtactcctaccctgcccggcgctggcggaaaaagcggcgagcccatccccctgaggatccacgactttccttcccatctattaagccagacacagaccagaccctgaagaaggaggggctgatctctcaggatggcagtagtttagaggctctgttgcgcactgaccccctggagaagcgaggtgccccggatccccgagttgatgatgacagcctgggcgagtttcctgtgaccaacagtcgagcgcgaaagcggatcctagaaccagatgacttcctggatgacctcgatgatgaagactatgaagaagatactcccaagcgtcggggaaaggggaaatccaagggtaagggtgtgggcagtgcccgtaagaagctggatgcttccatcctggaggaccgggataagccctatgcctgtgacatttgtggaaaacgttacaagaaccgaccaggcctcagttaccactatgcccactcccacttggctgaggaggagggcgaggacaaggaagactctcaaccacccactcctgtttcccagaggtctgaggagcagaaatccaaaaagggtcctgatggattggccttgcccaacaactactgtgacttctgcctgggggactcaaagattaacaagaagacgggacaacccgaggagctggtgtcctgttctgactgtggccgctcagggcatccatcttgcctccaatttacccccgtgatgatggcggcagtgaagacataccgctggcagtgcatcgagtgcaaatgttgcaatatctgcggcacctccgagaatgacgaccagttgctcttctgtgatgactgcgatcgtggctaccacatgtactgtctcaccccgtccatgtctgagccccctgaaggaagttggagctgccacctgtgtctggacctgttgaaagagaaagcttccatctaccagaaccagaactcctcttgatgtggccacccacctgctccccgacatatctaaggctgtttctctcctccacttcatatttcatacccatctttcccttcttcctcctctccttcacaaatccagagaaccttggggtggttgtgccagcctgcctttggcagctgcaagctgaggtggcagctctgaccacctctggccccaggccctcagggagaaaggagcaacacactgcccctaggcgtgcgtgtggcccagtttctctctgctctccattaagtgcattcactctgcttgccttgggcccagcccctggtgatcacagggttcaaacagtgtcctcctagaaagagtgggagagcagctcacttctctgtgttctgcctcccctctggtctccagagttttcctgtcctctagaggcaagccaggccagggagctgggagcgagcaagctgaggccacgtccacaaggagcttttcatgcccctgtgccgcatagcctcacctctttcctccagagtggctctctgcggccctgtgttcctgctacagagtgttcttttctggagtcaggatgttctcggtcaccctcctggttctgccctgtcccattccaccccaccccagggggaacagtagcttcaccttgttattcccattgctctcctggctcactcttacggtcggtctccagtgactgaagcattccccacccttggaatttctcatcttctgcctcccttcctactccttttggttttgtggggagaggggaaggatcagggggccaggccagcagctcgggggccacaaggagatggataatgtgcctgttttttaacacaacaaaaaagcctacctccaaaatcccctttttgttcttcctggacctgggcattcagcctcctgctcttaactgaattgggagcctctgccacctgccccgtgtatcctggctctcagctcatggggaagccacatagacatccctttcttcccttgcacgctcgctagcagctggtaaggtcttcacaccctgattcctcaagttttctgcttagtggcactgacattaagtagtggggggacagtccatgccaggacaccctggagtagccttcccccttggccgtgggcaggccctaactcactgtcgctttggagttgaggtgtcttttctttttctttctttagttcctgtattctaaacattagtaaaaataaatgtttttacacagagccctctgctggatggtttatctcctgcctttctccattaagaaggccatttcatcctaagatttccatgatggtggtttttttttttaatgttttgaaatacagcttttttccccccaaattaaaatttttttgtggaaccccaataaaaaaaaaaaaaaaaaaaaagggggggggggcgccaaaaaatcccccgagcggggggggacacacataggagaccactccccagattgttgtgaaaaagagagggcccccataggaggggagatataatataaacaagaaggagcgggcgggcgccgcgaataaaaccagcgacgagagcgggggaaacaagctgtcacagggggaacactcgggaggcgagaacgcccccctacggcggggggggggggacacactaaggcgggcaacacacctcctccgaggaatatactagaccgcccgcggaggggaaaaaccaaacctctcgcaggggagacgaagcgggttaaaacacacgcgacatacaatcgacgcgcgggatgagaaagatgatggcaccagagggagagtagtgctatgaaagcaaattataccgcggggggggtctcgtgctacacccggacaaacaccaagaaagggccgaaaacgacgaaagaaaacgaaaaacacaacaagaaaaaaagagaaaaaaaaaaggaagaaaaaaaaggagagagcaaaagaaacaagagaaaacagaagaaaaaaacaaaacgaaaaaaaaaaaaaaagagaaaaaaacacaaaaacgaaaaaagaaaaggaacaaaaacacacagaagaaaaaaaaagaaaaataaagagaccaaaagaaaaaaacgaaaaaaaaagacagaaagcagacaaaaagaaaacaaaaaaagaag

SEQ ID NO: 323717 - DNA, 2492 bp, Homo sapiens
ctgcgcgctgcggactgtggggcttctcggcccgaggcagaggaacagggaagatggcggctgtggtggagaatgtagtgaagctccttggggagcagtactacaaagatgccatggagcagtgccacaattacaatgctcgcctctgtgctgagcgcagcgtgcgcctgcctttcttggactcacagaccggagtagcccagagcaattgttacatctggatggaaaagcgacaccggggtccaggattggcctccggacagctgtactcctaccctgcccggcgctggcggaaaaagcggcgagcccatccccctgaggatccacgactttccttcccatctattaagccagacacagaccagaccctgaagaaggaggggctgatctctcaggatggcagtagtttagaggctctgttgcgcactgaccccctggagaagcgaggtgccccggatccccgagttgatgatgacagcctgggcgagtttcctgtgaccaacagtcgagcgcgaaagcggatcctagaaccagatgacttcctggatgacctcgatgatgaagactatgaagaagatactcccaagcgtcggggaaaggggaaatccaagggtaagggtgtgggcagtgcccgtaagaagctggatgcttccatcctggaggaccgggataagccctatgcctgtgacaatagtttcaaacaaaagcatacctcgaaagcgccccagagagtttgtggaaaacgttacaagaaccgaccaggcctcagttaccactatgcccactcccacttggctgaggaggagggcgaggacaaggaagactctcaaccacccactcctgtttcccagaggtctgaggagcagaaatccaaaaagggtcctgatggattggccttgcccaacaactactgtgacttctgcctgggggactcaaagattaacaagaagacgggacaacccgaggagctggtgtcctgttctgactgtggccgctcagggcatccatcttgcctccaatttacccccgtgatgatggcggcagtgaagacataccgctggcagtgcatcgagtgcaaatgttgcaatatctgcggcacctccgagaatgacgaccagttgctcttctgtgatgactgcgatcgtggctaccacatgtactgtctcaccccgtccatgtctgagccccctgaaggaagttggagctgccacctgtgtctggacctgttgaaagagaaagcttccatctaccagaaccagaactcctcttgatgtggccacccacctgctccccgacatatctaaggctgtttctctcctccacttcatatttcatacccatctttcccttcttcctcctctccttcacaaatccagagaaccttggggtggttgtgccagcctgcctttggcagctgcaagctgaggtggcagctctgaccacctctggccccaggccctcagggagaaaggagcaacacactgcccctaggcgtgcgtgtggcccagtttctctctgctctccattaagtgcattcactctgcttgccttgggcccagcccctggtgatcacagggttcaaacagtgtcctcctagaaagagtgggagagcagctcacttctctgtgttctgcctcccctctggtctccagagttttcctgtcctctagaggcaagccaggccagggagctgggagcgagcaagctgaggccacgtccacaaggagcttttcatgcccctgtgccgcatagcctcacctctttcctccagagtggctctctgcggccctgtgttcctgctacagagtgttcttttctggagtcaggatgttctcggtcaccctcctggttctgccctgtcccattccaccccaccccagggggaacagtagcttcaccttgttattcccattgctctcctggctcactcttacggtcggtctccagtgactgaagcattccccacccttggaatttctcatcttctgcctcccttcctactccttttggttttgtggggagaggggaaggatcagggggccaggccagcagctcgggggccacaaggagatggataatgtgcctgttttttaacacaacaaaaaagcctacctccaaaatcccctttttgttcttcctggacctgggcattcagcctcctgctcttaactgaattgggagcctctgccacctgccccgtgtatcctggctctcagctcatggggaagccacatagacatccctttcttcccttgcacgctcgctagcagctggtaaggtcttcacaccctgattcctcaagttttctgcttagtggcactgacattaagtagtggggggacagtccatgccaggacaccctggagtagccttcccccttggccgtgggcaggccctaactcactgtcgctttggagttgaggtgtcttttctttttctttctttagttcctgtattctaaacattagtaaaaataaatgtttttacacaga

SEQ ID NO: 323718 - DNA, 2282 bp, Homo sapiens
acaacaacgaatgacaatctgtagcaagactaaaaaaaatgagaagagtccaaataaataaaaccagagttgaaaaaggagacattacttctgatactacagaaattcaaaggatcattagtagctactataagcaacaatataccaatacattggaaaatctaaaagaaacggacacattcctagacacagaccagaccctgaagaaggaggggctgatctctcaggatggcagtagtttagaggctctgttgcgcactgaccccctggagaagcgaggtgccccggatccccgagttgatgatgacagcctgggcgagtttcctgtgaccaacagtcgagcgcgaaagcggatcctagaaccagatgacttcctggatgacctcgatgatgaagactatgaagaagatactcccaagcgtcggggaaaggggaaatccaagggtaagggtgtgggcagtgcccgtaagaagctggatgcttccatcctggaggaccgggataagccctatgcctgtgacatttgtggaaaacgttacaagaaccgaccaggcctcagttaccactatgcccactcccacttggctgaggaggagggcgaggacaaggaagactctcaaccacccactcctgtttcccagaggtctgaggagcagaaatccaaaaagggtcctgatggattggccttgcccaacaactactgtgacttctgcctgggggactcaaagattaacaagaagacgggacaacccgaggagctggtgtcctgttctgactgtggccgctcagggcatccatcttgcctccaatttacccccgtgatgatggcggcagtgaagacataccgctggcagtgcatcgagtgcaaatgttgcaatatctgcggcacctccgagaatgacgaccagttgctcttctgtgatgactgcgatcgtggctaccacatgtactgtctcaccccgtccatgtctgagccccctgaaggaagttggagctgccacctgtgtctggacctgttgaaagagaaagcttccatctaccagaaccagaactcctcttgatgtggccacccacctgctccccgacatatctaaggctgtttctctcctccacttcatatttcatacccatctttcccttcttcctcctctccttcacaaatccagagaaccttggggtggttgtgccagcctgcctttggcagctgcaagctgaggtggcagctctgaccacctctggccccaggccctcagggagaaaggagcaacacactgcccctaggcgtgcgtgtggcccagtttctctctgctctccattaagtgcattcactctgcttgccttgggcccagcccctggtgatcacagggttcaaacagtgtcctcctagaaagagtgggagagcagctcacttctctgtgttctgcctcccctctggtctccagagttttcctgtcctctagaggcaagccaggccagggagctgggagcgagcaagctgaggccacgtccacaaggagcttttcatgcccctgtgccgcatagcctcacctctttcctccagagtggctctctgcggccctgtgttcctgctacagagtgttcttttctggagtcaggatgttctcggtcaccctcctggttctgccctgtcccattccaccccaccccagggggaacagtagcttcaccttgttattcccattgctctcctggctcactcttacggtcggtctccagtgactgaagcattccccacccttggaatttctcatcttctgcctcccttcctactccttttggttttgtggggagaggggaaggatcagggggccaggccagcagctcgggggccacaaggagatggataatgtgcctgttttttaacacaacaaaaaagcctacctccaaaatcccctttttgttcttcctggacctgggcattcagcctcctgctcttaactgaattgggagcctctgccacctgccccgtgtatcctggctctcagctcatggggaagccacatagacatccctttcttcccttgcacgctcgctagcagctggtaaggtcttcacaccctgattcctcaagttttctgcttagtggcactgacattaagtagtggggggacagtccatgccaggacaccctggagtagccttcccccttggccgtgggcaggccctaactcactgtcgctttggagttgaggtgtcttttctttttctttctttagttcctgtattctaaacattagtaaaaataaatgtttttacacaga

SEQ ID NO: 323719 - DNA, 1592 bp, Homo sapiens
gtgatttgatcaattaggagctctgaaaggacccaagtgagaaatgacagtgactggatctgcggtggagaggggcagcatggtttcccacataagattctcacatctgttcttacctgctacctacccctcttggaaatagcagtgtcctgtagtggcctgaggcacatcagttattcagtccccatcctcttccctcttgcctacttcaggaccagttgctcttctgtgatgactgcgatcgtggctaccacatgtactgtctcaccccgtccatgtctgagccccctgaaggaagttggagctgccacctgtgtctggacctgttgaaagagaaagcttccatctaccagaaccagaactcctcttgatgtggccacccacctgctccccgacatatctaaggctgtttctctcctccacttcatatttcatacccatctttcccttcttcctcctctccttcacaaatccagagaaccttggggtggttgtgccagcctgcctttggcagctgcaagctgaggtggcagctctgaccacctctggccccaggccctcagggagaaaggagcaacacactgcccctaggcgtgcgtgtggcccagtttctctctgctctccattaagtgcattcactctgcttgccttgggcccagcccctggtgatcacagggttcaaacagtgtcctcctagaaagagtgggagagcagctcacttctctgtgttctgcctcccctctggtctccagagttttcctgtcctctagaggcaagccaggccagggagctgggagcgagcaagctgaggccacgtccacaaggagcttttcatgcccctgtgccgcatagcctcacctctttcctccagagtggctctctgcggccctgtgttcctgctacagagtgttcttttctggagtcaggatgttctcggtcaccctcctggttctgccctgtcccattccaccccaccccagggggaacagtagcttcaccttgttattcccattgctctcctggctcactcttacggtcggtctccagtgactgaagcattccccacccttggaatttctcatcttctgcctcccttcctactccttttggttttgtggggagaggggaaggatcagggggccaggccagcagctcgggggccacaaggagatggataatgtgcctgttttttaacacaacaaaaaagcctacctccaaaatcccctttttgttcttcctggacctgggcattcagcctcctgctcttaactgaattgggagcctctgccacctgccccgtgtatcctggctctcagctcatggggaagccacatagacatccctttcttcccttgcacgctcgctagcagctggtaaggtcttcacaccctgattcctcaagttttctgcttagtggcactgacattaagtagtggggggacagtccatgccaggacaccctggagtagccttcccccttggccgtgggcaggccctaactcactgtcgctttggagttgaggtgtcttttctttttctttctttagttcctgtattctaaacattagtaaaaataaatgtttttacacaga

SEQ ID NO: 323720 - DNA, 1155 bp, Homo sapiens
ctgcgcgctgcggactgtggggcttctcggcccgaggcagaggaacagggaagatggcggctgtggtggagaatgtagtgaagctccttggggagcagtactacaaagatgccatggagcagtgccacaattacaatgctcgcctctgtgctgagcgcagcgtgcgcctgcctttcttggactcacagaccggagtagcccagagcaattgttacatctggatggaaaagcgacaccggggtccaggattggcctccggacagctgtactcctaccctgcccggcgctggcggaaaaagcggcgagcccatccccctgaggatccacgactttccttcccatctattaagccagacacagaccagaccctgaagaaggaggggctgatctctcaggatggcagtagtttagaggctctgttgcgcactgaccccctggagaagcgaggtgccccggatccccgagttgatgatgacagcctgggcgagtttcctgtgaccaacagtcgagcgcgaaagcggatcctagaaccagatgacttcctggatgacctcgatgatgaagactatgaagaagatactcccaagcgtcggggaaaggggaaatccaagggtaagggtgtgggcagtgcccgtaagaagctggatgcttccatcctggaggaccgggataagccctatgcctgtgacagtgagtgcctcacaagtgggtgggtagaccttgccttggacccagctcctgctctggatatgagaggagggagggttgtgtttttgcccagagtattaaaacaaacctgggctcttgtcctgcctgctgactgcttccgtctgagacccctgggaggcctgggtccctgctatatgacgggtgggacctgcatgctctgggaaagatttctgccatcctctggggtagggttgcttgtgggggccacagcaggcagggttggcctctcaacagatggcctgcaggtctcctggcctcagttaagccagggccccaggggtctgacactgagtttttcaacgtctgttctctttttctttctgtctgccttgccccacttctgtccctccaccctgggagcaccatcgccgctggggtttctctctcgtttgctctgctttcctgctgctgctgctcctgtctcaa

SEQ ID NO: 323721 - DNA, 390 bp, Homo sapiens
cccctcttggaaatagcagtgtcctgtagtggcctgaggcacatcagttattcagtccccatcctcttccctcttgcctacttcaggaccagttgctcttctgtgatgactgcgatcgtggctaccacatgtactgtctcaccccgtccatgtctgagccccctgaaggtaagttgcccagatcttttactcagaacaattactttattagttacttggaaaatactgagttctatgttctttatgttatcacttacatattcttccaaattagggagtaaagcaccttgccttggctcagtttagaatgccttcctaacatttcaacttaaagggtttagtgtttgcacattatcagctacatttacaacagaaaatcaacagcccaga

SEQ ID NO: 323722 - DNA, 266 bp, Homo sapiens
caaaaagggtcctgatggattggccttgcccaacaactactgtgacttctgcctgggggactcaaagattaacaagaagacgggacaacccgaggagctggtgtcctgttctgactgtggccgctcaggtactgcttcccgtgaaggctgctgctttgcccagtccccaaggggctcttggcttgctggcctctagggctgtcataaccagcccacctcgcttttcctaaccaagagaagatgtagccacaggcaggagctcctct

SEQ ID NO: 323723 - DNA, 950 bp, Homo sapiens
ctgcgcgctgcggactgtggggcttctcggcccgaggcagaggaacagggaagatggcggctgtggtggagaatgtagtgaagctccttggggagcagtactacaaagatgccatggagcagtgccacaattacaatgctcgcctctgtgctgagcgcagcgtgcgcctgcctttcttggactcacagaccggagtagcccagagcaattgttacatctggatggaaaagcgacaccggggtccaggattggcctccggacagctgtactcctaccctgcccggcgctggcggaaaaagcggcgagcccatccccctgaggatccacgactttccttcccatctattaagccagacacagaccagaccctgaagaaggaggggctgatctctcaggatggcagtagtttagaggctctgttgcgcactgaccccctggagaagcgaggtgccccggatccccgagttgatgatgacagcctgggcgagtttcctgtgaccaacagtcgagcgcgaaagcggatcctagaaccagatgacttcctggatgacctcgatgatgaagactatgaagaagatactcccaagcgtcggggaaaggggaaatccaagggtaagggtgtgggcagtgcccgtaagaagctggatgcttccatcctggaggaccgggataagccctatgcctgtgacatttgtggaaagttacaagaacgacaggctcagtacatatgccatccattggtgagagaggggagacagagatttaacaccatctgttccaaagttgagggcgaatcaaaaggtctgatgatggtgccaaatatggattgggggataaagtaaaaaggaacgggatggttgttgagggcgaaggacaatggtcataccgagagggtaaatggggaggaggattggcaaaaagttggaaaggaaatgaacatcaaaaataga

SEQ ID NO: 323724 - DNA, 845 bp, Homo sapiens
ttatgggccccctgaagtatccttttttctagaacattctgaaagtcatccttgcctatgggaagcctaggccggcctgcactgttatgttcaataaataagcagggtgctctgggctggggattgtgtgaggagcagagcgcagcccgtcctcatgcttttccactgaagtaggccaggcagagagggagtacagcaatggatgcgctttggcagctgagtagtccgagagccagaaaagaaatgtggaaaataagaacgctgtagcaggcctaggtgaggaaatttaggaagggtttgcgggaggtaggatttgagatgggtcttggagagttggacagtgtcagccggtaggacgggggtgcggacggaagcctgtgaggaaggcagaggatgcggagctgtgagcggagggagcagcgaggctggagagcagctgggctgcgggtcaagacgtctgcgtttaattcgggactgaaggttagcagggaagggaacgatgccagatcttgagtttaagaacttgaatcttgtaaagtaccaaatctaataaaatactcgtcctaaatcattactggcccaagcatgcagtgtttccgtggccgacagactcgagccagcgctgtccatggtaaccagcttttgtgtggcttaaagcttgcatccattttctcctttcatcgttttcccaaaacaattccgtgagggctgttagccctgcttggtagacgaagaagccgatgcggtctagggtcacggccagggaggctttgggacgccaagtcagctcggcggtcaccacaccacctacagggctcgtcgggccctcggggtcggcggctgct

SEQ ID NO: 323725 - DNA, 3148 bp, Homo sapiens
ctgcgcgctgcggactgtggggcttctcggcccgaggcagaggaacagggaagatggcggctgtggtggagaatgtagtgaagctccttggggagcagtactacaaagatgccatggagcagtgccacaattacaatgctcgcctctgtgctgagcgcagcgtgcgcctgcctttcttggactcacagaccggagtagcccagagcaattgttacatctggatggaaaagcgacaccggggtccaggattggcctccggacagctgtactcctaccctgcccggcgctggcggaaaaagcggcgagcccatccccctgaggatccacgactttccttcccatctattaagccagacacagaccagaccctgaagaaggaggggctgatctctcaggatggcagtagtttagaggctctgttgcgcactgaccccctggagaagcgaggtgccccggatccccgagttgatgatgacagcctgggcgagtttcctgtgaccaacagtcgagcgcgaaagcggatcctagaaccagatgacttcctggatgacctcgatgatgaagactatgaagaagatactcccaagcgtcggggaaaggggaaatccaagggtaagggtgtgggcagtgcccgtaagaagctggatgcttccatcctggaggaccgggataagccctatgcctgtgacatttgtggaaaacgttacaagaaccgaccaggcctcagttaccactatgcccactcccacttggctgaggaggagggcgaggacaaggaagactctcaaccacccactcctgtttcccagaggtctgaggagcagaaatccaaaaagggtcctgatggattggccttgcccaacaactactgtgacttctgcctgggggactcaaagattaacaagaagacgggacaacccgaggagctggtgtcctgttctgactgtggccgctcagggcatccatcttgcctccaatttacccccgtgatgatggcggcagtgaagacataccgctggcagtgcatcgagtgcaaatgttgcaatatctgcggcacctccgagaatgacgaccagttgctcttctgtgatgactgcgatcgtggctaccacatgtactgtctcaccccgtccatgtctgagccccctgaaggaagttggagctgccacctgtgtctggacctgttgaaagagaaagcttccatctaccagaaccagaactcctcttgatgtggccacccacctgctccccgacatatctaaggctgtttctctcctccacttcatatttcatacccatctttcccttcttcctcctctccttcacaaatccagagaaccttggggtggttgtgccagcctgcctttggcagctgcaagctgaggtggcagctctgaccacctctggccccaggccctcagggagaaaggagcaacacactgcccctaggcgtgcgtgtggcccagtttctctctgctctccattaagtgcattcactctgcttgccttgggcccagcccctggtgatcacagggttcaaacagtgtcctcctagaaagagtgggagagcagctcacttctctgtgttctgcctcccctctggtctccagagttttcctgtcctctagaggcaagccaggccagggagctgggagcgagcaagctgaggccacgtccacaaggagcttttcatgcccctgtgccgcatagcctcacctctttcctccagagtggctctctgcggccctgtgttcctgctacagagtgttcttttctggagtcaggatgttctcggtcaccctcctggttctgccctgtcccattccaccccaccccagggggaacagtagcttcaccttgttattcccattgctctcctggctcactcttacggtcggtctccagtgactgaagcattccccacccttggaatttctcatcttctgcctcccttcctactccttttggttttgtggggagaggggaaggatcagggggccaggccagcagctcgggggccacaaggagatggataatgtgcctgttttttaacacaacaaaaaagcctacctccaaaatcccctttttgttcttcctggacctgggcattcagcctcctgctcttaactgaattgggagcctctgccacctgccccgtgtatcctggctctcagctcatggggaagccacatagacatccctttcttcccttgcacgctcgctagcagctggtaaggtcttcacaccctgattcctcaagttttctgcttagtggcactgacattaagtagtggggggacagtccatgccaggacaccctggagtagccttcccccttggccgtgggcaggccctaactcactgtcgctttggagttgaggtgtcttttctttttctttctttagttcctgtattctaaacattagtaaaaataaatgtttttacacagagccctctgctggatggtttatctcctgcctttctccattaagaaggccatttcatcctaagatttccatgatggtggtttttttttttaatgttttgaaatacagcttttttccccccaaattaaaatttttttgtggaaccccaatatgtaaagcgaatataaaattggttattttgttttgttacataaattcaagtttataacaattctttgttataaagaacaatgaagctgttttgatcaatacaaaatttgggttaaaatcaactttaacatctatttttatgtttcagttgatttggagaattctcctagtcttggatacatagatggaagtgatgacaggtttataacagttgaccttgcaatctcagacatttaaaacaggaccagaagtttatataaatataattaataagcaaactaatgacatcaccatgggacacacacaaaagttcttgcaggagcagggtctgtgtggcttcagttgcctgcagcgctcccaggccagagcaagtgctctaggatctgaactgcccgcagtgcagccctgcagcctttcccagggcacgttgatgtgcacacagtttccctgaaggcaaagtgaacatgtggagagcttacgtggcagcgcgtatgtcttcagtgtgtgttttagaagtccaactgttgtttttatgtttttaaaggaaagat

SEQ ID NO: 323726 - DNA, 2337 bp, Homo sapiens
ctgcgcgctgcggactgtggggcttctcggcccgaggcagaggaacagggaagatggcggctgtggtggagaatgtagtgaagctccttggggagcagtactacaaagatgccatggagcagtgccacaattacaatgctcgcctctgtgctgagcgcagcgtgcgcctgcctttcttggactcacagaccggagtagcccagagcaattgttacatctggatggaaaagcgacaccggggtccaggattggcctccggacagctgtactcctaccctgcccggcgctggcggaaaaagcggcgagcccatccccctgaggatccacgactttccttcccatctattaagccagacacagaccagaccctgaagaaggaggggctgatctctcaggatggcagtagtttagaggctctgttgcgcactgaccccctggagaagcgaggtgccccggatccccgagttgatgatgacagcctgggcgagtttcctgtgaccaacagtcgagcgcgaaagcggatcctagaaccagatgacttcctggatgacctcgatgatgaagactatgaagaagatactcccaagcgtcggggaaaggggaaatccaagggtaagggtgtgggcagtgcccgtaagaagctggatgcttccatcctggaggaccgggataagccctatgcctgtgacatttgtggaaaacgttacaagaaccgaccaggcctcagttaccactatgcccactcccacttggctgaggaggagggcgaggacaaggaagactctcaaccacccactcctgtttcccagaggtctgaggagcagaaatccaaaaagggtcctgatggattggccttgcccaacaactactgtgacttctgcctgggggactcaaagattaacaagaagacgggacaacccgaggagctggtgtcctgttctgactgtggccgctcaggaccagttgctcttctgtgatgactgcgatcgtggctaccacatgtactgtctcaccccgtccatgtctgagccccctgaaggaagttggagctgccacctgtgtctggacctgttgaaagagaaagcttccatctaccagaaccagaactcctcttgatgtggccacccacctgctccccgacatatctaaggctgtttctctcctccacttcatatttcatacccatctttcccttcttcctcctctccttcacaaatccagagaaccttggggtggttgtgccagcctgcctttggcagctgcaagctgaggtggcagctctgaccacctctggccccaggccctcagggagaaaggagcaacacactgcccctaggcgtgcgtgtggcccagtttctctctgctctccattaagtgcattcactctgcttgccttgggcccagcccctggtgatcacagggttcaaacagtgtcctcctagaaagagtgggagagcagctcacttctctgtgttctgcctcccctctggtctccagagttttcctgtcctctagaggcaagccaggccagggagctgggagcgagcaagctgaggccacgtccacaaggagcttttcatgcccctgtgccgcatagcctcacctctttcctccagagtggctctctgcggccctgtgttcctgctacagagtgttcttttctggagtcaggatgttctcggtcaccctcctggttctgccctgtcccattccaccccaccccagggggaacagtagcttcaccttgttattcccattgctctcctggctcactcttacggtcggtctccagtgactgaagcattccccacccttggaatttctcatcttctgcctcccttcctactccttttggttttgtggggagaggggaaggatcagggggccaggccagcagctcgggggccacaaggagatggataatgtgcctgttttttaacacaacaaaaaagcctacctccaaaatcccctttttgttcttcctggacctgggcattcagcctcctgctcttaactgaattgggagcctctgccacctgccccgtgtatcctggctctcagctcatggggaagccacatagacatccctttcttcccttgcacgctcgctagcagctggtaaggtcttcacaccctgattcctcaagttttctgcttagtggcactgacattaagtagtggggggacagtccatgccaggacaccctggagtagccttcccccttggccgtgggcaggccctaactcactgtcgctttggagttgaggtgtcttttctttttctttctttagttcctgtattctaaacattagtaaaaataaatgtttttacacaga

SEQ ID NO: 323727 - DNA, 3094 bp, Homo sapiens
ctgcgcgctgcggactgtggggcttctcggcccgaggcagaggaacagggaagatggcggctgtggtggagaatgtagtgaagctccttggggagcagtactacaaagatgccatggagcagtgccacaattacaatgctcgcctctgtgctgagcgcagcgtgcgcctgcctttcttggactcacagaccggagtagcccagagcaattgttacatctggatggaaaagcgacaccggggtccaggattggcctccggacagctgtactcctaccctgcccggcgctggcggaaaaagcggcgagcccatccccctgaggatccacgactttccttcccatctattaagccagacacagaccagaccctgaagaaggaggggctgatctctcaggatggcagtagtttagaggctctgttgcgcactgaccccctggagaagcgaggtgccccggatccccgagttgatgatgacagcctgggcgagtttcctgtgaccaacagtcgagcgcgaaagcggatcctagaaccagatgacttcctggatgacctcgatgatgaagactatgaagaagatactcccaagcgtcggggaaaggggaaatccaagggtaagggtgtgggcagtgcccgtaagaagctggatgcttccatcctggaggaccgggataagccctatgcctgtgacatttgtggaaaacgttacaagaaccgaccaggcctcagttaccactatgcccactcccacttggctgaggaggagggcgaggacaaggaagactctcaaccacccactcctgtttcccagaggtctgaggagcagaaatccaaaaagggtcctgatggattggccttgcccaacaactactgtgacttctgcctgggggactcaaagattaacaagaagacgggacaacccgaggagctggtgtcctgttctgactgtggccgctcagggcatccatcttgcctccaatttacccccgtgatgatggcggcagtgaagacataccgctggcagtgcatcgagtgcaaatgttgcaatatctgcggcacctccgagaatgacgaccagttgctcttctgtgatgactgcgatcgtggctaccacatgtactgtctcaccccgtccatgtctgagccccctgaaggaagttggagctgccacctgtgtctggacctgttgaaagagaaagcttccatctaccagaaccagaactcctcttgatgtggccacccacctgctccccgacatatctaaggctgtttctctcctccacttcatatttcatacccatctttcccttcttcctcctctccttcacaaatccagagaaccttggggtggttgtgccagcctgcctttggcagctgcaagctgaggtggcagctctgaccacctctggccccaggccctcagggagaaaggagcaacacactgcccctaggcgtgcgtgtggcccagtttctctctgctctccattaagtgcattcactctgcttgccttgggcccagcccctggtgatcacagggttcaaacagtgtcctcctagaaagagtgggagagcagctcacttctctgtgttctgcctcccctctggtctccagagttttcctgtcctctagaggcaagccaggccagggagctgggagcgagcaagctgaggccacgtccacaaggagcttttcatgcccctgtgccgcatagcctcacctctttcctccagagtggctctctgcggccctgtgttcctgctacagagtgttcttttctggagtcaggatgttctcggtcaccctcctggttctgccctgtcccattccaccccaccccagggggaacagtagcttcaccttgttattcccattgctctcctggctcactcttacggtcggtctccagtgactgaagcattccccacccttggaatttctcatcttctgcctcccttcctactccttttggttttgtggggagaggggaaggatcagggggccaggccagcagctcgggggccacaaggagatggataatgtgcctgttttttaacacaacaaaaaagcctacctcctgaattgggagcctctgccacctgccccgtgtatcctggctctcagctcatggggaagccacatagacatccctttcttcccttgcacgctcgctagcagctggtaaggtcttcacaccctgattcctcaagttttctgcttagtggcactgacattaagtagtggggggacagtccatgccaggacaccctggagtagccttcccccttggccgtgggcaggccctaactcactgtcgctttggagttgaggtgtcttttctttttctttctttagttcctgtattctaaacattagtaaaaataaatgtttttacacagagccctctgctggatggtttatctcctgcctttctccattaagaaggccatttcatcctaagatttccatgatggtggtttttttttttaatgttttgaaatacagcttttttccccccaaattaaaatttttttgtggaaccccaatatgtaaagcgaatataaaattggttattttgttttgttacataaattcaagtttataacaattctttgttataaagaacaatgaagctgttttgatcaatacaaaatttgggttaaaatcaactttaacatctatttttatgtttcagttgatttggagaattctcctagtcttggatacatagatggaagtgatgacaggtttataacagttgaccttgcaatctcagacatttaaaacaggaccagaagtttatataaatataattaataagcaaactaatgacatcaccatgggacacacacaaaagttcttgcaggagcagggtctgtgtggcttcagttgcctgcagcgctcccaggccagagcaagtgctctaggatctgaactgcccgcagtgcagccctgcagcctttcccagggcacgttgatgtgcacacagtttccctgaaggcaaagtgaacatgtggagagcttacgtggcagcgcgtatgtcttcagtgtgtgttttagaagtccaactgttgtttttatgtttttaaaggaaagat

SEQ ID NO: 323728 - DNA, 1382 bp, Homo sapiens
gaaaacctccccgcaacccaaggagccatgggtacaaaaggcccccacattttctgtttcaccccccccacccctgagcccggggaagttggagctgccacctgtgtctggacctgttgaaagagaaagcttccatctaccagaaccagaactcctcttgatgtggccacccacctgctccccgacatatctaaggctgtttctctcctccacttcatatttcatacccatctttcccttcttcctcctctccttcacaaatccagagaaccttggggtggttgtgccagcctgcctttggcagctgcaagctgaggtggcagctctgaccacctctggccccaggccctcagggagaaaggagcaacacactgcccctaggcgtgcgtgtggcccagtttctctctgctctccattaagtgcattcactctgcttgccttgggcccagcccctggtgatcacagggttcaaacagtgtcctcctagaaagagtgggagagcagctcacttctctgtgttctgcctcccctctggtctccagagttttcctgtcctctagaggcaagccaggccagggagctgggagcgagcaagctgaggccacgtccacaaggagcttttcatgcccctgtgccgcatagcctcacctctttcctccagagtggctctctgcggccctgtgttcctgctacagagtgttcttttctggagtcaggatgttctcggtcaccctcctggttctgccctgtcccattccaccccaccccagggggaacagtagcttcaccttgttattcccattgctctcctggctcactcttacggtcggtctccagtgactgaagcattccccacccttggaatttctcatcttctgcctcccttcctactccttttggttttgtggggagaggggaaggatcagggggccaggccagcagctcgggggccacaaggagatggataatgtgcctgttttttaacacaacaaaaaagcctacctccaaaatcccctttttgttcttcctggacctgggcattcagcctcctgctcttaactgaattgggagcctctgccacctgccccgtgtatcctggctctcagctcatggggaagccacatagacatccctttcttcccttgcacgctcgctagcagctggtaaggtcttcacaccctgattcctcaagttttctgcttagtggcactgacattaagtagtggggggacagtccatgccaggacaccctggagtagccttcccccttggccgtgggcaggccctaactcactgtcgctttggagttgaggtgtcttttctttttctttctttagttcctgtattctaaacattagtaaaaataaatgtttttacacaga

SEQ ID NO: 323729 - DNA, 143 bp, Homo sapiens
aacatacacgcctgatttctatcttccctgcagccttggggagcagtactacaaagatgccatggagcagtgccacaattacaatgctcgcctctgtgctgagcgcagcgtgcgcctgcctttcttggactcacagaccggag

SEQ ID NO: 323730 - DNA, 1882 bp, Homo sapiens
taggctagtagaggcggggttaatcggcgaggcgtcgggaggaaaggcgaactagtgttgggatggccaccaactgggggagcctcttgcaggataaacagcagctagaggagctggcacggcaggccgtggaccgggccctggctgagggagtattgctgaggacctcacaggagcccacttcctcggaggtggtgagctatgccccattcacgctcttcccctcactggtccccagtgccctgctggagcaagcctatgctgtgcagatggacttcaacctgctagtggatgctgtcagccagaacgctgccttcctggagcaaactctttccagcaccatcaaacaggatgactttaccgctcgtctctttgacatccacaagcaagtcctaaaagagggcattgcccagactgtgttcctgggcctgaatcgctcagactacatgttccagcgcagcgcagatggctccccagccctgaaacagatcgaaatcaacaccatctctgccagctttgggggcctggcctcccggaccccagctgtgcaccgacatgttctcagtgtcctgagtaagaccaaagaagctggcaagatcctctctaataatcccagcaagggactggccctgggaattgccaaagcctgggagctctacggctcacccaatgctctggtgctactgattgctcaagagaaggaaagaaacatatttgaccagcgtgccatagagaatgagctactggccaggaacatccatgtgatccgacgaacatttgaagatatctctgaaaaggggtctctggaccaagaccgaaggctgtttgtggatggccaggaaattgctgtggtttacttccgggatggctacatgcctcgtcagtacagtctacagaattgggaagcacgtctactgctggagaggtcacatgctgccaagtgcccagacattgccacccagctggctgggactaagaaggtgcagcaggagctaagcaggccgggcatgctggagatgttgctccctggccagcctgaggctgtggcccgcctccgcgccacctttgctggcctctactcactggatgtgggtgaagaaggggaccaggccatcgccgaggcccttgctgcccctagccggtttgtgctaaagccccagagagagggtggaggtaacaacctatatggggaggaaatggtacaggccctgaaacagctgaaggacagtgaggagagggcctcctacatcctcatggagaagatcgaacctgagccttttgagaattgcctgctacggcctggcagccctgcccgagtggtccagtgcatttcagagctgggcatctttggggtctatgtcaggcaggaaaagacactcgtgatgaacaagcacgtggggcatctacttcgaaccaaagccatcgagcatgcagatggtggtgtggcagcgggagtggcagtcctggacaacccataccctgtgtgagggcacaaccaggccacgggaccttctatcctctgtatttgtcattcctctcctagccctcctgaggggtatcctcctaaagacctccaaagtttttatggaagggtaaatactggtaccttcccccagctttccatctgaggaccagaaaagttgtgtctcccttagatgagatctagacgcccccaaatccttgagatgtgggtatagctcagggtaagctgctctgaggtaaaggtccatgaaccctgccccactcctgtcagcccctcatcagccttttcagcaggttccagtgcctgacttgggataggactgagtggtaggaggagggggagtggaggggcatagcctttccctaattctgccttaaataaaactgcattgctgattca

SEQ ID NO: 323731 - DNA, 1872 bp, Homo sapiens
aagcgcagctgggtcgcatcgaggccccgccccctgagcctgggtagcggcgcgagggccgggagaaccgttcgcggaggaaaggcgaactagtgttgggatggccaccaactgggggagcctcttgcaggataaacagcagctagaggagctggcacggcaggccgtggaccgggccctggctgagggagtattgctgaggacctcacaggagcccacttcctcggaggtggtgagctatgccccattcacgctcttcccctcactggtccccagtgccctgctggagcaagcctatgctgtgcagatggacttcaacctgctagtggatgctgtcagccagaacgctgccttcctggagcaaactctttccagcaccatcaaacaggatgactttaccgctcgtctctttgacatccacaagcaagtcctaaaagagggcattgcccagactgtgttcctgggcctgaatcgctcagactacatgttccagcgcagcgcagatggctccccagccctgaaacagatcgaaatcaacaccatctctgccagctttgggggcctggcctcccggaccccagctgtgcaccgacatgttctcagtgtcctgagtaagaccaaagaagctggcaagatcctctctaataatcccagcaagggactggccctgggaattgccaaagcctgggagctctacggctcacccaatgctctggtgctactgattgctcaagagaaggaaagaaacatatttgaccagcgtgccatagagaatgagctactggccaggaacatccatgtgatccgacgaacatttgaagatatctctgaaaaggggtctctggaccaagaccgaaggctgtttgtggatggccaggaaattgctgtggtttacttccgggatggctacatgcctcgtcagtacagtctacagaattgggaagcacgtctactgctggagaggtcacatgctgccaagtgcccagacattgccacccagctggctgggactaagaaggtgcagcaggagctaagcaggccgggcatgctggagatgttgctccctggccagcctgaggctgtggcccgcctccgcgccacctttgctggcctctactcactggatgtgggtgaagaaggggaccaggccatcgccgaggcccttgctgcccctagccggtttgtgctaaagccccagagagagggtggaggtaacaacctatatggggaggaaatggtacaggccctgaaacagctgaaggacagtgaggagagggcctcctacatcctcatggagaagatcgaacctgagccttttgagaattgcctgctacggcctggcagccctgcccgagtggtccagtgcatttcagagctgggcatctttggggtctatgtcaggcaggaaaagacactcgtgatgaacaagcacgtggggcatctacttcgaaccaaagccatcgagcatgcagatggtggtgtggcagcgggagtggcagtcctggacaacccataccctgtgtgagggcacaaccaggccacgggaccttctatcctctgtatttgtcattcctctcctagccctcctgaggggtatcctcctaaagacctccaaagtttttatggaagggtaaatactggtaccttcccccagctttccatctgaggaccagaaaagttgtgtctcccttagatgagatctagacgcccccaaatccttgagatgtgggtatagctcagggtaagctgctaaaccatttacccaaataaagtataggcgatagaaattgaaacctggcgcaatagatatagtaccgcaagggaaagatgaaaaattataaccaagcataatatagcaaggactaacccctg

SEQ ID NO: 323732 - DNA, 2110 bp, Homo sapiens
aagcgcagctgggtcgcatcgaggccccgccccctgagcctgggtagcggcgcgagggccgggagaaccgttcgcggaggaaaggcgaactagtgttgggatggccaccaactgggggagcctcttgcaggataaacagcagctagaggagctggcacggcaggccgtggaccgggccctggctgagggagtattgctgaggacctcacaggagcccacttcctcggaggtggtgagctatgccccattcacgctcttcccctcactggtccccagtgccctgctggagcaagcctatgctgtgcagatggacttcaacctgctagtggatgctgtcagccagaacgctgccttcctggagcaaactctttccagcaccatcaaacaggatgactttaccgctcgtctctttgacatccacaagcaagtcctaaaagagggcattgcccagactgtgttcctgggcctgaatcgctcagactacatgttccagcgcagcgcagatggctccccagccctgaaacagatcgaaatcaacaccatctctgccagctttgggggcctggcctcccggaccccagctgtgcaccgacatgttctcagtgtcctgagtaagaccaaagaagctggcaagatcctctctaataatcccagcaagggactggccctgggaattgccaaagcctgggagctctacggctcacccaatgctctggtgctactgattgctcaagagaaggaaagaaacatatttgaccagcgtgccatagagaatgagctactggccaggaacatccatgtgatccgacgaacatttgaagatatctctgaaaaggggtctctggaccaagaccgaaggctgtttgtggatggccaggaaattgctgtggtttacttccgggatggctacatgcctcgtcagtacagtctacagaattgggaagcacgtctactgctggagaggtcacatgctgccaagtgcccagacattgccacccagctggctgggactaagaaggtgcagcaggagctaagcaggccgggcatgctggagatgttgctccctggccagcctgaggctgtggcccgcctccgcgccacctttgctggcctctactcactggatgtgggtgaagaaggggaccaggccatcgccgaggcccttgctgcccctagccggtttgtgctaaagccccagagagagggtggaggtaacaacctatatggggaggaaatggtacaggccctgaaacagctgaaggacagtgaggagagggcctcctacatcctcatggagaagatcgaacctgagccttttgagaattgcctgctacggcctggcagccctgcccgagtggtccagtgcatttcagagctgggcatctttggggtctatgtcaggcaggaaaagacactcgtgatgaacaagcacgtggggcatctacttcgaaccaaagccatcgagcatgcagatggtggtgtggcagcgggagtggcagtcctggacaacccataccctgtgtgagggcacaaccaggccacgggaccttctatcctctgtatttgtcattcctctcctagccctcctgaggggtatcctcctaaagacctccaaagtttttatggaagggtaaatactggtaccttcccccagctttccatctgaggaccagaaaagttgtgtctcccttagatgagatctagacgcccccaaatccttgagatgtgggtatagctcagggtaagctgctctgaggtaaaggtccatgaaccctgccccactcctgtcagcccctcatcagccttttcagcaggttccagtgcctgacttgggataggactgagtggtaggaggagggggagtggaggggcatagcctttccctaattctgccttaaataaaactgcattgctgattcaaacaccaaccacactaaaaaaaattggtggcggcccgcccccggaaaaattttaaccactttgttgggcggggggcccacttggtacgaactggcctacgcgggcaaggaacccggccgaaagggggttccccaaaaacggggaccggtgtaccccaggtcggctcgggccccggcactacccgcccgcg

SEQ ID NO: 323733 - DNA, 1997 bp, Homo sapiens
  misc_feature (1870)..(1870): n is a, c, g, or t
aagcgcagctgggtcgcatcgaggccccgccccctgagcctgggtagcggcgcgagggccgggagaaccgttcgcggaggaaaggcgaactagtgttgggatggccaccaactgggggagcctcttgcaggataaacagcagctagaggagctggcacggcaggccgtggaccgggccctggctgagggagtattgctgaggacctcacaggagcccacttcctcggaggtggtgagctatgccccattcacgctcttcccctcactggtccccagtgccctgctggagcaagcctatgctgtgcagatggacttcaacctgctagtggatgctgtcagccagaacgctgccttcctggagcaaactctttccagcaccatcaaacaggatgactttaccgctcgtctctttgacatccacaagcaagtcctaaaagagggcattgcccagactgtgttcctgggcctgaatcgctcagactacatgttccagcgcagcgcagatggctccccagccctgaaacagatcgaaatcaacaccatctctgccagctttgggggcctggcctcccggaccccagctgtgcaccgacatgttctcagtgtcctgagtaagaccaaagaagctggcaagatcctctctaataatcccagcaagggactggccctgggaattgccaaagcctgggagctctacggctcacccaatgctctggtgctactgattgctcaagagaaggaaagaaacatatttgaccagcgtgccatagagaatgagctactggccaggaacatccatgtgatccgacgaacatttgaagatatctctgaaaaggggtctctggaccaagaccgaaggctgtttgtggatggccaggaaattgctgtggtttacttccgggatggctacatgcctcgtcagtacagtctacagaattgggaagcacgtctactgctggagaggtcacatgctgccaagtgcccagacattgccacccagctggctgggactaagaaggtgcagcaggagctaagcaggccgggcatgctggagatgttgctccctggccagcctgaggctgtggcccgcctccgcgccacctttgctggcctctactcactggatgtgggtgaagaaggggaccaggccatcgccgaggcccttgctgcccctagccggtttgtgctaaagccccagagagagggtggaggtaacaacctatatggggaggaaatggtacaggccctgaaacagctgaaggacagtgaggagagggcctcctacatcctcatggagaagatcgaacctgagccttttgagaattgcctgctacggcctggcagccctgcccgagtggtccagtgcatttcagagctgggcatctttggggtctatgtcaggcaggaaaagacactcgtgatgaacaagcacgtggggcatctacttcgaaccaaagccatcgagcatgcagatggtggtgtggcagcgggagtggcagtcctggacaacccataccctgtgtgagggcacaaccaggccacgggaccttctatcctctgtatttgtcattcctctcctagccctcctgaggggtatcctcctaaagacctccaaagtttttatggaagggtaaatactggtaccttcccccagctttccatctgaggaccagaaaagttgtgtctcccttagatgagatctagacgcccccaaatccttgagatgtgggtatagctcagggtaagctgctctgaggtaaaggtccatgaaccctgccccactcctgtcagcccctcatcagccttttcagcaggttccagtgcctgacttgggataggactgagtggtaggaggagggggagtgcattnttttctccttaactctttggggtgtatgctctaccttttcactttatatatagtttcttttagttgtttattgtcttattttaaaaattatttatttgagtgaagtatttatctctttatcatctct

SEQ ID NO: 323734 - DNA, 2369 bp, Homo sapiens
aagcgcagctgggtcgcatcgaggccccgccccctgagcctgggtagcggcgcgagggccgggagaaccgttcgcggaggaaaggcgaactagtgttgggatggccaccaactgggggagcctcttgcaggataaacagcagctagaggagctggcacggcaggccgtggaccgggccctggctgagggagtattgctgaggacctcacaggagcccacttcctcggaggtggtgagctatgccccattcacgctcttcccctcactggtccccagtgccctgctggagcaagcctatgctgtgcagatggacttcaacctgctagtggatgctgtcagccagaacgctgccttcctggagcaaactctttccagcaccatcaaacaggatgactttaccgctcgtctctttgacatccacaagcaagtcctaaaagagggcattgcccagactgtgttcctgggcctgaatcgctcagactacatgttccagcgcagcgcagatggctccccagccctgaaacagatcgaaatcaacaccatctctgccagctttgggggcctggcctcccggaccccagctgtgcaccgacatgttctcagtgtcctgagtaagaccaaagaagctggcaagatcctctctaataatcccagcaagggactggccctgggaattgccaaagcctgggagctctacggctcacccaatgctctggtgctactgattgctcaagagaaggaaagaaacatatttgaccagcgtgccatagagaatgagctactggccaggaacatccatgtgatccgacgaacatttgaagatatctctgaaaaggggtctctggaccaagaccgaaggctgtttgtggatggccaggaaattgctgtggtttacttccgggatggctacatgcctcgtcagtacagtctacagaattgggaagcacgtctactgctggagaggtcacatgctgccaagtgcccagacattgccacccagctggctgggactaagaaggtgcagcaggagctaagcaggccgggcatgctggagatgttgctccctggccagcctgaggctgtggcccgcctccgcgccacctttgctggcctctactcactggatgtgggtgaagaaggggaccaggccatcgccgaggcccttgctgcccctagccggtttgtgctaaagccccagagagagggtggaggtaacaacctatatggggaggaaatggtacaggccctgaaacagctgaaggacagtgaggagagggcctcctacatcctcatggagaagatcgaacctgagccttttgagaattgcctgctacggcctggcagccctgcccgagtggtccagtgcatttcagagctgggcatctttggggtctatgtcaggtgagccaatcaggagaagctctttccactacctgcttgcaagagtgccagccaagtgagccagcctagaggggaacactggaaagagtcaggaatcctgggcttcggtgccagctctgccaatcactagctttattacctgtttctttatctattaaatgaggccaaggacccaagacctgcccacctcaccagggtatcagatgaagccctgatgagaagtcctttgcaaccgtgaaggaaactccaaatagcaccaagaggactcagaacacatggtttgacaacctaggactagaaggagactccagagaggcatagagactctaaaatcctagcactttcttggtatagacagttacccaggtactgctcagctgggtccagggaaggtcctgggtttggggctgagtccaggtgatgtgtgtcccctgcctccatttctataggcaggaaaagacactcgtgatgaacaagcacgtggggcatctacttcgaaccaaagccatcgagcatgcagatggtggtgtggcagcgggagtggcagtcctggacaacccataccctgtgtgagggcacaaccaggccacgggaccttctatcctctgtatttgtcattcctctcctagccctcctgaggggtatcctcctaaagacctccaaagtttttatggaagggtaaatactggtaccttcccccagctttccatctgaggaccagaaaagttgtgtctcccttagatgagatctagacgcccccaaatccttgagatgtgggtatagctcagggtaagctgctctgaggtaaaggtccatgaaccctgccccactcctgtcagcccctcatcagccttttcagcaggttccagtgcctgacttgggataggactgagtggtaggaggagggggagtggaggggcatagcctttccctaattctgccttaaataaaactgcattgctgattca

SEQ ID NO: 323735 - DNA, 1730 bp, Homo sapiens
aagcgcagctgggtcgcatcgaggccccgccccctgagcctgggtagcggcgcgagggccgggagaaccgttcgcggaggaaaggcgaactagtgttgggatggccaccaactgggggagcctcttgcaggataaacagcagctagaggagctggcacggcaggccgtggaccgggccctggctgagggagtattgctgaggacctcacaggagcccacttcctcggaggtggtgagctatgccccattcacgctcttcccctcactggtccccagtgccctgctggagcaagcctatgctgtgcagatggacttcaacctgctagtggatgctgtcagccagaacgctgccttcctggagcaaactctttccagcaccatcaaacaggatgactttaccgctcgtctctttgacatccacaagcaagtcctaaaagagggcattgcccagactgtgttcctgggcctgaatcgctcagactacatgttccagcgcagcgcagatggctccccagccctgaaacagatcgaaatcaacaccatctctgccagctttgggggcctggcctcccggaccccagctgtgcaccgacatgttctcagtgtcctgagtaagaccaaagaagctggcaagatcctctctaataatcccagcaagggactggccctgggaattgccaaagcctgggagctctacggctcacccaatgctctggtgctactgattgctcaagagaaggaaagaaacatatttgaccagcgtgccatagagaatgagctactggccaggaacatccatgtgatccgacgaacatttgaagatatctctgaaaaggggtctctggaccaagaccgaaggctgtttgtggatggccaggaaattgctgtggtttacttccgggatggctacatgcctcgtcagtacagtctacagaattgggaagcacgtctactgctggagaggtcacatgctgccaagtgcccagacattgccacccagctggctgggactaagaaggtgcagcaggagctaagcaggccgggcatgctggagatgttgctccctggccagcctgaggctgtggcccgcctccgcgccacctttgctggcctctactcactggatgtgggtgaagaaggggaccaggccatcgccgaggcccttgctgcccctagccggtttgtgctaaagccccagagagagggtggaggcaggaaaagacactcgtgatgaacaagcacgtggggcatctacttcgaaccaaagccatcgagcatgcagatggtggtgtggcagcgggagtggcagtcctggacaacccataccctgtgtgagggcacaaccaggccacgggaccttctatcctctgtatttgtcattcctctcctagccctcctgaggggtatcctcctaaagacctccaaagtttttatggaagggtaaatactggtaccttcccccagctttccatctgaggaccagaaaagttgtgtctcccttagatgagatctagacgcccccaaatccttgagatgtgggtatagctcagggtaagctgctctgaggtaaaggtccatgaaccctgccccactcctgtcagcccctcatcagccttttcagcaggttccagtgcctgacttgggataggactgagtggtaggaggagggggagtggaggggcatagcctttccctaattctgccttaaataaaactgcattgctgattca

SEQ ID NO: 323736 - DNA, 2223 bp, Homo sapiens
aagcgcagctgggtcgcatcgaggccccgccccctgagcctgggtagcggcgcgagggccgggagaaccgttcgcggaggaaaggcgaactagtgttgggatggccaccaactgggggagcctcttgcaggataaacagcagctagaggagctggcacggcaggccgtggaccgggccctggctgagggagtattgctgaggacctcacaggagcccacttcctcggaggtggtgagctatgccccattcacgctcttcccctcactggtccccagtgccctgctggagcaagcctatgctgtgcagatggacttcaacctgctagtggatgctgtcagccagaacgctgccttcctggagcaaactctttccagcaccatcaaacaggatgactttaccgctcgtctctttgacatccacaagcaagtcctaaaagagggcattgcccaggtaaccattcccagccctactccagtctgtaacctgtccctcccatctctgtttgttttctgttttgcttgaagaatttggtccaggccctcagctcatgggaatctgcctctcactggtcctcactgggtttatcccagtgaccaattctaggatgaccagaagaatgattccactgggcttgggagtgtttgctggtacctctaatctctgtgtagagttcatggtacctgtgtgctctgtggctaggtcctcagagtcagtccctgggcaggtactgtcagccttcagttttccccacagactgtgttcctgggcctgaatcgctcagactacatgttccagcgcagcgcagatggctccccagccctgaaacagatcgaaatcaacaccatctctgccagctttgggggcctggcctcccggaccccagctgtgcaccgacatgttctcagtgtcctgagtaagaccaaagaagctggcaagatcctctctaataatcccagcaagggactggccctgggaattgccaaagcctgggagctctacggctcacccaatgctctggtgctactgattgctcaagagaaggaaagaaacatatttgaccagcgtgccatagagaatgagctactggccaggaacatccatgtgatccgacgaacatttgaagatatctctgaaaaggggtctctggaccaagaccgaaggctgtttgtggatggccaggaaattgctgtggtttacttccgggatggctacatgcctcgtcagtacagtctacagaattgggaagcacgtctactgctggagaggtcacatgctgccaagtgcccagacattgccacccagctggctgggactaagaaggtgcagcaggagctaagcaggccgggcatgctggagatgttgctccctggccagcctgaggctgtggcccgcctccgcgccacctttgctggcctctactcactggatgtgggtgaagaaggggaccaggccatcgccgaggcccttgctgcccctagccggtttgtgctaaagccccagagagagggtggaggtaacaacctatatggggaggaaatggtacaggccctgaaacagctgaaggacagtgaggagagggcctcctacatcctcatggagaagatcgaacctgagccttttgagaattgcctgctacggcctggcagccctgcccgagtggtccagtgcatttcagagctgggcatctttggggtctatgtcaggcaggaaaagacactcgtgatgaacaagcacgtggggcatctacttcgaaccaaagccatcgagcatgcagatggtggtgtggcagcgggagtggcagtcctggacaacccataccctgtgtgagggcacaaccaggccacgggaccttctatcctctgtatttgtcattcctctcctagccctcctgaggggtatcctcctaaagacctccaaagtttttatggaagggtaaatactggtaccttcccccagctttccatctgaggaccagaaaagttgtgtctcccttagatgagatctagacgcccccaaatccttgagatgtgggtatagctcagggtaagctgctctgaggtaaaggtccatgaaccctgccccactcctgtcagcccctcatcagccttttcagcaggttccagtgcctgacttgggataggactgagtggtaggaggagggggagtggaggggcatagcctttccctaattctgccttaaataaaactgcattgctgattca

SEQ ID NO: 323737 - DNA, 1767 bp, Homo sapiens
ggaaactggagtgtgagctcctgatgcatggaagggcctgggcttgaacatcaaccagcaaggagcaggcttccatgtggtgagctatgccccattcacgctcttcccctcactggtccccagtgccctgctggagcaagcctatgctgtgcagatggacttcaacctgctagtggatgctgtcagccagaacgctgccttcctggagcaaactctttccagcaccatcaaacaggatgactttaccgctcgtctctttgacatccacaagcaagtcctaaaagagggcattgcccagactgtgttcctgggcctgaatcgctcagactacatgttccagcgcagcgcagatggctccccagccctgaaacagatcgaaatcaacaccatctctgccagctttgggggcctggcctcccggaccccagctgtgcaccgacatgttctcagtgtcctgagtaagaccaaagaagctggcaagatcctctctaataatcccagcaagggactggccctgggaattgccaaagcctgggagctctacggctcacccaatgctctggtgctactgattgctcaagagaaggaaagaaacatatttgaccagcgtgccatagagaatgagctactggccaggaacatccatgtgatccgacgaacatttgaagatatctctgaaaaggggtctctggaccaagaccgaaggctgtttgtggatggccaggaaattgctgtggtttacttccgggatggctacatgcctcgtcagtacagtctacagaattgggaagcacgtctactgctggagaggtcacatgctgccaagtgcccagacattgccacccagctggctgggactaagaaggtgcagcaggagctaagcaggccgggcatgctggagatgttgctccctggccagcctgaggctgtggcccgcctccgcgccacctttgctggcctctactcactggatgtgggtgaagaaggggaccaggccatcgccgaggcccttgctgcccctagccggtttgtgctaaagccccagagagagggtggaggtaacaacctatatggggaggaaatggtacaggccctgaaacagctgaaggacagtgaggagagggcctcctacatcctcatggagaagatcgaacctgagccttttgagaattgcctgctacggcctggcagccctgcccgagtggtccagtgcatttcagagctgggcatctttggggtctatgtcaggcaggaaaagacactcgtgatgaacaagcacgtggggcatctacttcgaaccaaagccatcgagcatgcagatggtggtgtggcagcgggagtggcagtcctggacaacccataccctgtgtgagggcacaaccaggccacgggaccttctatcctctgtatttgtcattcctctcctagccctcctgaggggtatcctcctaaagacctccaaagtttttatggaagggtaaatactggtaccttcccccagctttccatctgaggaccagaaaagttgtgtctcccttagatgagatctagacgcccccaaatccttgagatgtgggtatagctcagggtaagctgctctgaggtaaaggtccatgaaccctgccccactcctgtcagcccctcatcagccttttcagcaggttccagtgcctgacttgggataggactgagtggtaggaggagggggagtggaggggcatagcctttccctaattctgccttaaataaaactgcattgctgattca

SEQ ID NO: 323738 - DNA, 1888 bp, Homo sapiens
tcccatgagctgagggcctggaccaaattcttcaagccaaacagtaaacatacagagatgggagggacaggttacagactggagtagggctgggaatggttaccttggcaatgccctcttttaggacttgcttgaggttgcctactagtgagtggtagagctaggatttgaacccaggtctagagttggattcttagccactgttctctaccacattggggcggacattcaagttttggccagtagactcagagaggattcaggagtcaatgactgaggatgggactccttgaaattttaggtccaattaagcctgcaaaatgttctctgtttcttcctccagcaccatcaaacaggatgactttaccgctcgtctctttgacatccacaagcaagtcctaaaagagggcattgcccagactgtgttcctgggcctgaatcgctcagactacatgttccagcgcagcgcagatggctccccagccctgaaacagatcgaaatcaacaccatctctgccagctttgggggcctggcctcccggaccccagctgtgcaccgacatgttctcagtgtcctgagtaagaccaaagaagctggcaagatcctctctaataatcccagcaagggactggccctgggaattgccaaagcctgggagctctacggctcacccaatgctctggtgctactgattgctcaagagaaggaaagaaacatatttgaccagcgtgccatagagaatgagctactggccaggaacatccatgtgatccgacgaacatttgaagatatctctgaaaaggggtctctggaccaagaccgaaggctgtttgtggatggccaggaaattgctgtggtttacttccgggatggctacatgcctcgtcagtacagtctacagaattgggaagcacgtctactgctggagaggtcacatgctgccaagtgcccagacattgccacccagctggctgggactaagaaggtgcagcaggagctaagcaggccgggcatgctggagatgttgctccctggccagcctgaggctgtggcccgcctccgcgccacctttgctggcctctactcactggatgtgggtgaagaaggggaccaggccatcgccgaggcccttgctgcccctagccggtttgtgctaaagccccagagagagggtggaggtaacaacctatatggggaggaaatggtacaggccctgaaacagctgaaggacagtgaggagagggcctcctacatcctcatggagaagatcgaacctgagccttttgagaattgcctgctacggcctggcagccctgcccgagtggtccagtgcatttcagagctgggcatctttggggtctatgtcaggcaggaaaagacactcgtgatgaacaagcacgtggggcatctacttcgaaccaaagccatcgagcatgcagatggtggtgtggcagcgggagtggcagtcctggacaacccataccctgtgtgagggcacaaccaggccacgggaccttctatcctctgtatttgtcattcctctcctagccctcctgaggggtatcctcctaaagacctccaaagtttttatggaagggtaaatactggtaccttcccccagctttccatctgaggaccagaaaagttgtgtctcccttagatgagatctagacgcccccaaatccttgagatgtgggtatagctcagggtaagctgctctgaggtaaaggtccatgaaccctgccccactcctgtcagcccctcatcagccttttcagcaggttccagtgcctgacttgggataggactgagtggtaggaggagggggagtggaggggcatagcctttccctaattctgccttaaataaaactgcattgctgattca

SEQ ID NO: 323739 - DNA, 1010 bp, Homo sapiens
tgccctctccagcagtagacgtgcttcccaattctgtagactgtactgacgaggtcacatgctgccaagtgcccagacattgccacccagctggctgggactaagaaggtgcagcaggagctaagcaggccgggcatgctggagatgttgctccctggccagcctgaggctgtggcccgcctccgcgccacctttgctggcctctactcactggatgtgggtgaagaaggggaccaggccatcgccgaggcccttgctgcccctagccggtttgtgctaaagccccagagagagggtggaggtaacaacctatatggggaggaaatggtacaggccctgaaacagctgaaggacagtgaggagagggcctcctacatcctcatggagaagatcgaacctgagccttttgagaattgcctgctacggcctggcagccctgcccgagtggtccagtgcatttcagagctgggcatctttggggtctatgtcaggcaggaaaagacactcgtgatgaacaagcacgtggggcatctacttcgaaccaaagccatcgagcatgcagatggtggtgtggcagcgggagtggcagtcctggacaacccataccctgtgtgagggcacaaccaggccacgggaccttctatcctctgtatttgtcattcctctcctagccctcctgaggggtatcctcctaaagacctccaaagtttttatggaagggtaaatactggtaccttcccccagctttccatctgaggaccagaaaagttgtgtctcccttagatgagatctagacgcccccaaatccttgagatgtgggtatagctcagggtaagctgctctgaggtaaaggtccatgaaccctgccccactcctgtcagcccctcatcagccttttcagcaggttccagtgcctgacttgggataggactgagtggtaggaggagggggagtggaggggcatagcctttccctaattctgccttaaataaaactgcattgctgattca

SEQ ID NO: 323740 - DNA, 1804 bp, Homo sapiens
aagcgcagctgggtcgcatcgaggccccgccccctgagcctgggtagcggcgcgagggccgggagaaccgttcgcggaggaaaggcgaactagtgttgggatggccaccaactgggggagcctcttgcaggataaacagcagctagaggagctggcacggcaggccgtggaccgggccctggctgagggagtattgctgaggacctcacaggagcccacttcctcggaggtggtgagctatgccccattcacgctcttcccctcactggtccccagtgccctgctggagcaagcctatgctgtgcagatggacttcaacctgctagtggatgctgtcagccagaacgctgccttcctggagcaaactctttccagcaccatcaaacaggatgactttaccgctcgtctctttgacatccacaagcaagtcctaaaagagggcattgcccagactgtgttcctgggcctgaatcgctcagactacatgttccagcgcagcgcagatggctccccagccctgaaacagatcgaaatcaacaccatctctgccagctttgggggcctggcctcccggaccccagctgtgcaccgacatgttctcagtgtcctgagtaagaccaaagaagctggcaagatcctctctaataatcccagcaagggactggccctgggaattgccaaagcctgggagctctacggctcacccaatgctctggtgctactgattgctcaagagaaggaaagaaacatatttgaccagcgtgccatagagaatgagctactggccaggaacatccatgtgatccgacgaacatttgaagatatctctgaaaaggggtctctggaccaagaccgaaggctgtttgtggatggccaggaaattgctgtggtttacttccgggatggctacatgcctcgtcagtacagtctacagaattgggaagcacgtctactgctggagaggtcacatgctgccaagtgcccagacattgccacccagctggctgggactaagaaggtgcagcaggagctaagcaggccgggcatgctggagatgttgctccctggccagcctgaggctgtggcccgcctccgcgccacctttgctggcctctactcactggatgtgggtgaagaaggggaccaggccatcgccgaggcccttgctgcccctagccggtttgtgctaaagccccagagagagggtggaggtaacaacctatatggggaggaaatggtacaggccctgaaacagctgaaggacagtgaggagagggcctcctacatcctcatggagaagatcgaacctgagccttttgagaattgcctgctacggcctggcagccctgcccgagtggtccagtgcatttcagagctgggcatctttggggtctatgtcaggcaggaaaagacactcgtgatgaacaagcacgtggggcatctacttcgaaccaaagccatcgagcatgcagatggtggtgtggcagcgggagtggcagtcctggacaacccataccctgtgtgagggcacaaccaggccacgggaccttctatcctctgtatttgtcattcctctcctagccctcctgaggggtatcctcctaaagacctccaaagtttttatggaagggtaaatactggtaccttcccccagctttccatctgaggaccagaaaagttgtgtctcccttagatgagatctagacgcccccaaatccttgagatgtgggtatagctcagggtaagctgctctgaggtacatggtgccggagtaaccgggatactctagaatcagccagggaca

SEQ ID NO: 323741 - DNA, 757 bp, Homo sapiens
ggaggaggtaggcagagggtccagggtgactggccagtttcattgcaggtaacaacctatatggggaggaaatggtacaggccctgaaacagctgaaggacagtgaggagagggcctcctacatcctcatggagaagatcgaacctgagccttttgagaattgcctgctacggcctggcagccctgcccgagtggtccagtgcatttcagagctgggcatctttggggtctatgtcaggcaggaaaagacactcgtgatgaacaagcacgtggggcatctacttcgaaccaaagccatcgagcatgcagatggtggtgtggcagcgggagtggcagtcctggacaacccataccctgtgtgagggcacaaccaggccacgggaccttctatcctctgtatttgtcattcctctcctagccctcctgaggggtatcctcctaaagacctccaaagtttttatggaagggtaaatactggtaccttcccccagctttccatctgaggaccagaaaagttgtgtctcccttagatgagatctagacgcccccaaatccttgagatgtgggtatagctcagggtaagctgctctgaggtaaaggtccatgaaccctgccccactcctgtcagcccctcatcagccttttcagcaggttccagtgcctgacttgggataggactgagtggtaggaggagggggagtggaggggcatagcctttccctaattctgccttaaataaaactgcattgctgattca

SEQ ID NO: 323742 - DNA, 1406 bp, Homo sapiens
ggtttgttgggagtgtcatccagatagtagcatcctgcctgaaggaatttgtggctgttctccctcctgctcttcctctgatgctgctctgcataaccagctggacctaagcttcttgcctctttagcctttaaacttttgataactgctttctgcctcctgccagggtgaagaaggggaccaggccatcgccgaggcccttgctgcccctagccggtttgtgctaaagccccagagagagggtggaggtaacaacctatatggggaggaaatggtacaggccctgaaacagctgaaggacagtgaggagagggcctcctacatcctcatggagaagatcgaacctgagccttttgagaattgcctgctacggcctggcagccctgcccgagtggtccagtgcatttcagagctgggcatctttggggtctatgtcaggtgagccaatcaggagaagctctttccactacctgcttgcaagagtgccagccaagtgagccagcctagaggggaacactggaaagagtcaggaatcctgggcttcggtgccagctctgccaatcactagctttattacctgtttctttatctattaaatgaggccaaggacccaagacctgcccacctcaccagggtatcagatgaagccctgatgagaagtcctttgcaaccgtgaaggaaactccaaatagcaccaagaggactcagaacacatggtttgacaacctaggactagaaggagactccagagaggcatagagactctaaaatcctagcactttcttggtatagacagttacccaggtactgctcagctgggtccagggaaggtcctgggtttggggctgagtccaggtgatgtgtgtcccctgcctccatttctataggcaggaaaagacactcgtgatgaacaagcacgtggggcatctacttcgaaccaaagccatcgagcatgcagatggtggtgtggcagcgggagtggcagtcctggacaacccataccctgtgtgagggcacaaccaggccacgggaccttctatcctctgtatttgtcattcctctcctagccctcctgaggggtatcctcctaaagacctccaaagtttttatggaagggtaaatactggtaccttcccccagctttccatctgaggaccagaaaagttgtgtctcccttagatgagatctagacgcccccaaatccttgagatgtgggtatagctcagggtaagctgctctgaggtaaaggtccatgaaccctgccccactcctgtcagcccctcatcagccttttcagcaggttccagtgcctgacttgggataggactgagtggtaggaggagggggagtggaggggcatagcctttccctaattctgccttaaataaaactgcattgctgattca

SEQ ID NO: 323743 - DNA, 493 bp, Homo sapiens
aagcgcagctgggtcgcatcgaggccccgccccctgagcctgggtagcggcgcgagggccgggagaaccgttcgcggaggaaaggcgaactagtgttgggatggccaccaactgggggagcctcttgcaggataaacagcagctagaggagctggcacggcaggccgtggaccgggccctggctgagggagtattgctgaggacctcacaggagcccacttcctcggaggtggtgagctatgccccattcacgctcttcccctcactggtccccagtgccctgctggagcaagcctatgctgtgcagatggacttcaacctgctagtggatgctgtcagccagaacgctgccttcctggagcaaactctttccagcaccaaatcaaaatctctccactttcagctgtcttttggaggacgtacgtaataaggttttaatttagtaaaccaatcctatgcatggttttacactagcgcctgtttgtggagtagc

SEQ ID NO: 323744 - DNA, 1920 bp, Homo sapiens
aagcgcagctgggtcgcatcgaggccccgccccctgagcctgggtagcggcgcgagggccgggagaaccgttcgcggaggaaaggcgaactagtgttgggatggccaccaactgggggagcctcttgcaggataaacagcagctagaggagctggcacggcaggccgtggaccgggccctggctgagggagtattgctgaggacctcacaggagcccacttcctcggaggtggtgagctatgccccattcacgctcttcccctcactggtccccagtgccctgctggagcaagcctatgctgtgcagatggacttcaacctgctagtggatgctgtcagccagaacgctgccttcctggagcaaactctttccagcaccatcaaacaggatgactttaccgctcgtctctttgacatccacaagcaagtcctaaaagagggcattgcccagactgtgttcctgggcctgaatcgctcagactacatgttccagcgcagcgcagatggctccccagccctgaaacagatcgaaatcaacaccatctctgccagctttgggggcctggcctcccggaccccagctgtgcaccgacatgttctcagtgtcctgagtaagaccaaagaagctggcaagatcctctctaataatcccagcaagggactggccctgggaattgccaaagcctgggagctctacggctcacccaatgctctggtgctactgattgctcaagagaaggaaagaaacatatttgaccagcgtgccatagagaatgagctactggccaggaacatccatgtgatccgacgaacatttgaagatatctctgaaaaggggtctctggaccaagaccgaaggctgtttgtggatggccaggaaattgctgtggtttacttccgggatggctacatgcctcgtcagtacagtctacagaattgggaagcacgtctactgctggagaggtcacatgctgccaagtgcccagacattgccacccagctggctgggactaagaaggtgcagcaggagctaagcaggccgggcatgctggagatgttgctccctggccagcctgaggctgtggcccgcctccgcgccacctttgctggcctctactcactggatgtgggtgaagaaggggaccaggccatcgccgaggcccttgctgcccctagccggtttgtgctaaagccccagagagagggtggaggtaacaacctatatggggaggaaatggtacaggccctgaaacagctgaaggacagtgaggagagggcctcctacatcctcatggagaagatcgaacctgagccttttgagaattgcctgctacggcctggcagccctgcccgagtggtccagtgcatttcagagctgggcatctttggggtctatgtcaggcaggaaaagacactcgtgatgaacaagcacgtggggcatctacttcgaaccaaagccatcgagcatgcagatggtggtgtggcagcgggagtggcagtcctggacaacccataccctgtgtgagggcacaaccaggccacgggaccttctatcctctgtatttgtcattcctctcctagccctcctgaggggtatcctcctaaagacctccaaagtttttatggaagggtaaatactggtaccttcccccagctttccatctgaggaccagaaaagttgtgtctcccttagatgagatctagacgcccccaaatccttgagatgtgggtatagctcagggtaagctgctctgaggtaaaggtccatgaaccctgccccactcctgtcagcccctcatcagccttttcagcaggttccagtgcctgacttgggataggactgagtggtaggaggagggggagtggaggggcatagcctttccctaattctgccttaaataaaactgcattgctgattca

SEQ ID NO: 323745 - DNA, 1853 bp, Homo sapiens
aagcgcagctgggtcgcatcgaggccccgccccctgagcctgggtagcggcgcgagggccgggagaaccgttcgcggaggaaaggcgaactagtgttgggatggccaccaactgggggagcctcttgcaggataaacagcagctagaggagctggcacggcaggccgtggaccgggccctggctgagggagtattgctgaggacctcacaggagcccacttcctcggaggtggtgagctatgccccattcacgctcttcccctcactggtccccagtgccctgctggagcaagcctatgctgtgcagatggacttcaacctgctagtggatgctgtcagccagaacgctgccttcctggagcaaactctttccagcaccatcaaacaggatgactttaccgctcgtctctttgacatccacaagcaagtcctaaaagagggcattgcccagactgtgttcctgggcctgaatcgctcagactacatgttccagcgcagcgcagatggctccccagccctgaaacagatcgaaatcaacaccatctctgccagctttgggggcctggcctcccggaccccagctgtgcaccgacatgttctcagtgtcctgagtaagaccaaagaagctggcaagatcctctctaataatcccagcaagggactggccctgggaattgccaaagcctgggagctctacggctcacccaatgctctggtgctactgattgctcaagagaaggaaagaaacatatttgaccagcgtgccatagagaatgagctactggccaggaacatccatgtgatccgacgaacatttgaagatatctctgaaaaggggtctctggaccaagaccgaaggctgtttgtaattgggaagcacgtctactgctggagaggtcacatgctgccaagtgcccagacattgccacccagctggctgggactaagaaggtgcagcaggagctaagcaggccgggcatgctggagatgttgctccctggccagcctgaggctgtggcccgcctccgcgccacctttgctggcctctactcactggatgtgggtgaagaaggggaccaggccatcgccgaggcccttgctgcccctagccggtttgtgctaaagccccagagagagggtggaggtaacaacctatatggggaggaaatggtacaggccctgaaacagctgaaggacagtgaggagagggcctcctacatcctcatggagaagatcgaacctgagccttttgagaattgcctgctacggcctggcagccctgcccgagtggtccagtgcatttcagagctgggcatctttggggtctatgtcaggcaggaaaagacactcgtgatgaacaagcacgtggggcatctacttcgaaccaaagccatcgagcatgcagatggtggtgtggcagcgggagtggcagtcctggacaacccataccctgtgtgagggcacaaccaggccacgggaccttctatcctctgtatttgtcattcctctcctagccctcctgaggggtatcctcctaaagacctccaaagtttttatggaagggtaaatactggtaccttcccccagctttccatctgaggaccagaaaagttgtgtctcccttagatgagatctagacgcccccaaatccttgagatgtgggtatagctcagggtaagctgctctgaggtaaaggtccatgaaccctgccccactcctgtcagcccctcatcagccttttcagcaggttccagtgcctgacttgggataggactgagtggtaggaggagggggagtggaggggcatagcctttccctaattctgccttaaataaaactgcattgctgattca

SEQ ID NO: 323746 - DNA, 1956 bp, Homo sapiens
ccgccgaccccgatggtcccctcccctccttcccaaggtccatccgccagggtgcagccgacgcactcctaatgctaaggccgccctctcatcgaccgccccttcctggcctcgactcagcgccaaaggtgttgggatggccaccaactgggggagcctcttgcaggataaacagcagctagaggagctggcacggcaggccgtggaccgggccctggctgagggagtattgctgaggacctcacaggagcccacttcctcggaggtggtgagctatgccccattcacgctcttcccctcactggtccccagtgccctgctggagcaagcctatgctgtgcagatggacttcaacctgctagtggatgctgtcagccagaacgctgccttcctggagcaaactctttccagcaccatcaaacaggatgactttaccgctcgtctctttgacatccacaagcaagtcctaaaagagggcattgcccagactgtgttcctgggcctgaatcgctcagactacatgttccagcgcagcgcagatggctccccagccctgaaacagatcgaaatcaacaccatctctgccagctttgggggcctggcctcccggaccccagctgtgcaccgacatgttctcagtgtcctgagtaagaccaaagaagctggcaagatcctctctaataatcccagcaagggactggccctgggaattgccaaagcctgggagctctacggctcacccaatgctctggtgctactgattgctcaagagaaggaaagaaacatatttgaccagcgtgccatagagaatgagctactggccaggaacatccatgtgatccgacgaacatttgaagatatctctgaaaaggggtctctggaccaagaccgaaggctgtttgtggatggccaggaaattgctgtggtttacttccgggatggctacatgcctcgtcagtacagtctacagaattgggaagcacgtctactgctggagaggtcacatgctgccaagtgcccagacattgccacccagctggctgggactaagaaggtgcagcaggagctaagcaggccgggcatgctggagatgttgctccctggccagcctgaggctgtggcccgcctccgcgccacctttgctggcctctactcactggatgtgggtgaagaaggggaccaggccatcgccgaggcccttgctgcccctagccggtttgtgctaaagccccagagagagggtggaggtaacaacctatatggggaggaaatggtacaggccctgaaacagctgaaggacagtgaggagagggcctcctacatcctcatggagaagatcgaacctgagccttttgagaattgcctgctacggcctggcagccctgcccgagtggtccagtgcatttcagagctgggcatctttggggtctatgtcaggcaggaaaagacactcgtgatgaacaagcacgtggggcatctacttcgaaccaaagccatcgagcatgcagatggtggtgtggcagcgggagtggcagtcctggacaacccataccctgtgtgagggcacaaccaggccacgggaccttctatcctctgtatttgtcattcctctcctagccctcctgaggggtatcctcctaaagacctccaaagtttttatggaagggtaaatactggtaccttcccccagctttccatctgaggaccagaaaagttgtgtctcccttagatgagatctagacgcccccaaatccttgagatgtgggtatagctcagggtaagctgctctgaggtaaaggtccatgaaccctgccccactcctgtcagcccctcatcagccttttcagcaggttccagtgcctgacttgggataggactgagtggtaggaggagggggagtggaggggcatagcctttccctaattctgccttaaataaaactgcattgctgattca

SEQ ID NO: 323747 - DNA, 1880 bp, Homo sapiens
aagcgcagctgggtcgcatcgaggccccgccccctgagcctgggtagcggcgcgagggccgggagaaccgttcgcggaggaaaggcgaactagtgttgggatggccaccaactgggggagcctcttgcaggataaacagcagctagaggagctggcacggcaggccgtggaccgggccctggctgagggagtattgctgaggacctcacaggagcccacttcctcggaggtggtgagctatgccccattcacgctcttcccctcactggtccccagtgccctgctggagcaagcctatgctgtgcagatggacttcaacctgctagtggatgctgtcagccagaacgctgccttcctggagcaaactctttccagcaccatcaaacaggatgactttaccgctcgtctctttgacatccacaagcaagtcctaaaagagggcattgcccagactgtgttcctgggcctgaatcgctcagactacatgttccagcgcagcgcagatggctccccagccctgaaacagatcgaaatcaacaccatctctgccagctttgggggcctggcctcccggaccccagctgtgcaccgacatgttctcagtgtcctgagtaagaccaaagaagctggcaagatcctctctaataatcccagcaagggactggccctgggaattgccaaagcctgggagctctacggctcacccaatgctctggtgctactgattgctcaagagaaggaaagaaacatatttgaccagcgtgccatagagaatgagctactggccaggaacatccatgtgatccgacgaacatttgaagatatctggatggccaggaaattgctgtggtttacttccgggatggctacatgcctcgtcagtacagtctacagaattgggaagcacgtctactgctggagaggtcacatgctgccaagtgcccagacattgccacccagctggctgggactaagaaggtgcagcaggagctaagcaggccgggcatgctggagatgttgctccctggccagcctgaggctgtggcccgcctccgcgccacctttgctggcctctactcactggatgtgggtgaagaaggggaccaggccatcgccgaggcccttgctgcccctagccggtttgtgctaaagccccagagagagggtggaggtaacaacctatatggggaggaaatggtacaggccctgaaacagctgaaggacagtgaggagagggcctcctacatcctcatggagaagatcgaacctgagccttttgagaattgcctgctacggcctggcagccctgcccgagtggtccagtgcatttcagagctgggcatctttggggtctatgtcaggcaggaaaagacactcgtgatgaacaagcacgtggggcatctacttcgaaccaaagccatcgagcatgcagatggtggtgtggcagcgggagtggcagtcctggacaacccataccctgtgtgagggcacaaccaggccacgggaccttctatcctctgtatttgtcattcctctcctagccctcctgaggggtatcctcctaaagacctccaaagtttttatggaagggtaaatactggtaccttcccccagctttccatctgaggaccagaaaagttgtgtctcccttagatgagatctagacgcccccaaatccttgagatgtgggtatagctcagggtaagctgctctgaggtaaaggtccatgaaccctgccccactcctgtcagcccctcatcagccttttcagcaggttccagtgcctgacttgggataggactgagtggtaggaggagggggagtggaggggcatagcctttccctaattctgccttaaataaaactgcattgctgattca

SEQ ID NO: 323748 - DNA, 1866 bp, Homo sapiens
aagcgcagctgggtcgcatcgaggccccgccccctgagcctgggtagcggcgcgagggccgggagaaccgttcgcggaggaaaggcgaactagtgttgggatggccaccaactgggggagcctcttgcaggataaacagcagctagaggagctggcacggcaggccgtggaccgggccctggctgagggagtattgctgaggacctcacaggagcccacttcctcggaggtggtgagctatgccccattcacgctcttcccctcactggtccccagtgccctgctggagcaagcctatgctgtgcagatggacttcaacctgctagtggatgctgtcagccagaacgctgccttcctggagcaaactctttccagcaccatcaaacaggatgactttaccgctcgtctctttgacatccacaagcaagtcatgttccagcgcagcgcagatggctccccagccctgaaacagatcgaaatcaacaccatctctgccagctttgggggcctggcctcccggaccccagctgtgcaccgacatgttctcagtgtcctgagtaagaccaaagaagctggcaagatcctctctaataatcccagcaagggactggccctgggaattgccaaagcctgggagctctacggctcacccaatgctctggtgctactgattgctcaagagaaggaaagaaacatatttgaccagcgtgccatagagaatgagctactggccaggaacatccatgtgatccgacgaacatttgaagatatctctgaaaaggggtctctggaccaagaccgaaggctgtttgtggatggccaggaaattgctgtggtttacttccgggatggctacatgcctcgtcagtacagtctacagaattgggaagcacgtctactgctggagaggtcacatgctgccaagtgcccagacattgccacccagctggctgggactaagaaggtgcagcaggagctaagcaggccgggcatgctggagatgttgctccctggccagcctgaggctgtggcccgcctccgcgccacctttgctggcctctactcactggatgtgggtgaagaaggggaccaggccatcgccgaggcccttgctgcccctagccggtttgtgctaaagccccagagagagggtggaggtaacaacctatatggggaggaaatggtacaggccctgaaacagctgaaggacagtgaggagagggcctcctacatcctcatggagaagatcgaacctgagccttttgagaattgcctgctacggcctggcagccctgcccgagtggtccagtgcatttcagagctgggcatctttggggtctatgtcaggcaggaaaagacactcgtgatgaacaagcacgtggggcatctacttcgaaccaaagccatcgagcatgcagatggtggtgtggcagcgggagtggcagtcctggacaacccataccctgtgtgagggcacaaccaggccacgggaccttctatcctctgtatttgtcattcctctcctagccctcctgaggggtatcctcctaaagacctccaaagtttttatggaagggtaaatactggtaccttcccccagctttccatctgaggaccagaaaagttgtgtctcccttagatgagatctagacgcccccaaatccttgagatgtgggtatagctcagggtaagctgctctgaggtaaaggtccatgaaccctgccccactcctgtcagcccctcatcagccttttcagcaggttccagtgcctgacttgggataggactgagtggtaggaggagggggagtggaggggcatagcctttccctaattctgccttaaataaaactgcattgctgattca

SEQ ID NO: 323749 - DNA, 1382 bp, Homo sapiens
cggacgcgtgggtccggacgcgtgggtcgctcccggaccccagctgtgcaccgacatgttctcagtgtcctgagtaagaccaaagaagctggcaagatcctctctaataatcccagcaagggactggccctgggaattgccaaagcctgggagctctacggctcacccaatgctctggtgctactgattgctcaagagaaggaaagaaacatatttgaccagcgtgccatagagaatgagctactggccaggaacatccatgtgatccgacgaacatttgaagatatctctgaaaaggggtctctggaccaagaccgaaggctgtttgtggatggccaggaaattgctgtggtttacttccgggatggctacatgcctcgtcagtacagtctacagaattgggaagcacgtctactgctggagaggtcacatgctgccaagtgcccagacattgccacccagctggctgggactaagaaggtgcagcaggagctaagcaggccgggcatgctggagatgttgctccctggccagcctgaggctgtggcccgcctccgcgccacctttgctggcctctactcactggatgtgggtgaagaaggggaccaggccatcgccgaggcccttgctgcccctagccggtttgtgctaaagccccagagagagggtggaggtaacaacctatatggggaggaaatggtacaggccctgaaacagctgaaggacagtgaggagagggcctcctacatcctcatggagaagatcgaacctgagccttttgagaattgcctgctacggcctggcagccctgcccgagtggtccagtgcatttcagagctgggcatctttggggtctatgtcaggcaggaaaagacactcgtgatgaacaagcacgtggggcatctacttcgaaccaaagccatcgagcatgcagatggtggtgtggcagcgggagtggcagtcctggacaacccataccctgtgtgagggcacaaccaggccacgggaccttctatcctctgtatttgtcattcctctcctagccctcctgaggggtatcctcctaaagacctccaaagtttttatggaagggtaaatactggtaccttcccccagctttccatctgaggaccagaaaagttgtgtctcccttagatgagatctagacgcccccaaatccttgagatgtgggtatagctcagggtaagctgctctgaggtaaaggtccatgaaccctgccccactcctgtcagcccctcatcagccttttcagcaggttccagtgcctgacttgggataggactgagtggtaggaggagggggagtggaggggcatagcctttccctaattctgccttaaataaaactgcattgctgattca

SEQ ID NO: 323750 - DNA, 1834 bp, Homo sapiens
aagcgcagctgggtcgcatcgaggccccgccccctgagcctgggtagcggcgcgagggccgggagaaccgttcgcggaggaaaggcgaactagtgttgggatggccaccaactgggggagcctcttgcaggataaacagcagctagaggagctggcacggcaggccgtggaccgggccctggctgagggagtattgctgaggacctcacaggagcccacttcctcggaggtggtgagctatgccccattcacgctcttcccctcactggtccccagtgccctgctggagcaagcctatgctgtgcagatggacttcaacctgctagtggatgctgtcagccagaacgctgccttcctggagcaaactctttccagcaccatcaaacaggatgactttaccgctcgtctctttgacatccacaagcaagtcctaaaagagggcattgcccagactgtgttcctgggcctgaatcgctcagactacatgttccagcgcagcgcagatggctccccagccctgaaacagatcgaaatcaacaccatctctgccagctttgggggcctggcctcccggaccccagctgtgcaccgacatgttctcagtgtcctgagtaagaccaaagaagctggcaagatcctctctaataatcccagcaagggactggccctgggaattgccaaagcctgggagctctacggctcacccaatgctctggtgctactgattgctcaagagaaggaaagaaacatatttgaccagcgtgccatagagaatgagctactggccaggaacatccatgtgatccgacgaacatttgaagatatctctgaaaaggggtctctggaccaagaccgaaggctgtttgtggatggccaggaaattgctgtggtttacttccgggatggctacatgcctcgtcagtacagtctacagaattgggaagcacgtctactgctggagaggtcacatgctgccaagtgcccagacattgccacccagctggctgggactaagaaggtgcagcaggagctaagcaggccgggcatgctggagatgttgctccctggccagcctgaggctgtggcccgcctccgcgccacctttgctggcctctactcactggatgtgggtgaagaaggggaccaggccatcgccgaggcccttgctgcccctagccggtttgtgctaaagccccagagagagggtggaggtaacaacctatatggggaggaaatggtacaggccctgaaacagctgaaggacagtgaggagagggcctcctacatcctcatggagaagatcgaacctgagccttttgagaattgcctgctacggcctggcagccctgcccgagtggtccagtgcatttcagagctgggcatctttggggtctatgtcaggcaggaaaagacactcgtgatgaacaagcacgtggggcatctacttcgaaccaaagccatcgagcatgcagatggtggtgtggcagcgggagtggcagtcctggacaacccataccctgtgtgagggcacaaccaggccacgggaccttctatcctctgtatttgtcattcctctcctagccctcctgaggggtatcctcctaaagacctccaaagtttttatggaagggtaaatactggtaccttcccccagctttccctgctctgaggtaaaggtccatgaaccctgccccactcctgtcagcccctcatcagccttttcagcaggttccagtgcctgacttgggataggactgagtggtaggaggagggggagtggaggggcatagcctttccctaattctgccttaaataaaactgcattgctgattca

SEQ ID NO: 323751 - DNA, 1598 bp, Homo sapiens
  misc_feature (1536)..(1536): n is a, c, g, or t
  misc_feature (1552)..(1553): n is a, c, g, or t
  misc_feature (1558)..(1559): n is a, c, g, or t
aagcgcagctgggtcgcatcgaggccccgccccctgagcctgggtagcggcgcgagggccgggagaaccgttcgcggaggaaaggcgaactagtgttgggatggccaccaactgggggagcctcttgcaggataaacagcagctagaggagctggcacggcaggccgtggaccgggccctggctgagggagtattgctgaggacctcacaggagcccacttcctcggaggtggtgagctatgccccattcacgctcttcccctcactggtccccagtgccctgctggagcaagcctatgctgtgcagatggacttcaacctgctagtggatgctgtcagccagaacgctgccttcctggagcaaactctttccagcaccatcaaacaggatgactttaccgctcgtctctttgacatccacaagcaagtcctaaaagagggcattgcccagactgtgttcctgggcctgaatcgctcagactacatgttccagcgcagcgcagatggctccccagccctgaaacagatcgaaatcaacaccatctctgccagctttgggggcctggcctcccggaccccagctgtgcaccgacatgttctcagtgtcctgagtaagaccaaagaagctggcaagatcctctctaataatcccagcaagggactggccctgggaattgccaaagcctgggagctctacggctcacccaatgctctggtgctactgattgctcaagagaaggaaagaaacatatttgaccagcgtgccatagagaatgagctactggccaggaacatccatgtgatccgacgaacatttgaagatatctctgaaaaggggtctctggaccaagaccgaaggctgtttgtggatggccaggaaattgctgtggtttacttccgggatggctacatgcctcgtcagtacagtctacagaattgggaagcacgtctactgctggagaggtcacatgctgccaagtgcccagacattgccacccagctggctgggactaagaaggtgcagcaggagctaagcaggccgggcatgctggagatgttgctccctggccagcctgaggctgtggcccgcctccgcgccacctttgctggcctctactcactggatgtgggtgaagaaggggaccaggccatcgccgaggcccttgctgcccctagccggtttgtgctaaagccccagagagagggtggaggtaacaacctatatggggaggaaatggtacaggccctgaaacagctgaaggacagtgaggagagggcctcctacatcctcatggagaagatcgaacctgagccttttgagaattgcctgctacggcctggcagccctgcccgagtggtccagtgcatttcagagctgggcatctttggggtctatgtcaggcaggaaaagacactcgtgatgaacaagcacgtggggcatctacttcgaaccaaagccatcgagcatgcagatggtggtgtggcagcgggagtggcagtcctggacaacccataccctgtgtgagggcacaaccnccggcccgggcctctnncccgnnttggctccctcctgcctctggggttccctagccccagtt

SEQ ID NO: 323752 - DNA, 2130 bp, Homo sapiens
tctcttcctgacctccatcattaccaacctggtcccagccaaaatgtcccttctctggatgaccgaggatttcttttttccttgccactgcggtacagattttttttactcactgccactaaactaaagcaaggcatagtttatatgtgaagtgttcagagtttactgctataaggaaacttccaaatactgacatttaccttttagctgtagttattgggaccatgtgctctggttttctggagactgccaaattgctcccatttttctgcatcccacctggtttctttctgcatgtcccctttcactttcaaacctcttcatttggatgttaaattatatggtcacctagttataggtaagccttgttcgagttgatatcttgattgtgaggaaggatctgtgtcattggagcttgtttctgctgcaacgtgctgtagactatgaataatgaaatcacaccacattaccatcagatttcttgttttagttgtcaaattaatatttatgattgttatcttgggcgaaaagttcagagcagagatgacaaatcattagaacaacgatgaatttcagtattacggctaaaaagttcttctgtctgaatattaactcactctccttccagtgtacttcacagtaattggtatgcttttttatttaatgcttaaatcaaactttataaaaatcttagaccagatctttaatatggtatgccatttccccagtctaccaatggaatagtatgggtttctaatcctaggcttgtacaatggattggagttgagccatgccagcctccacactgccactaacttctgtaatgtaagattgagtcactgccaagcatttgaaatatgcagttgtgttttaattataatttatgtatagttagatgtatgtagtgcattgtgtggtattatttggtttgtaagaatttatttttaagggtcaaggtcatttgtaacattttgtgtgtgtcaattcaatgcaatgttggctgccttttgaagtctttgatatattggtgaatattcttctgatctataatacaaagctatgtaatgttacctcttgactcgcttttgaaaggaagacaattgttaactagatatttgagttttttcccctcagaattatgtgaatttctgatatatggctttagatactgtgaatctgttttccatttagtcagttatctgcttaaattgttcagaactatatcctaacgagcaattagttctgatggttctcccagtcatgagtgtgcatgtgtgcaagcatgttttgatcctgatgctacctttgctaaaaatggccatagattaggaactagctatgtttttagaatcaaagatgaaccggtaagctgtctcatgtaccaaacgtgaaatttacagtgtttacaaatgtctggaattttgcactgccatagggaatgttaaggttacttggctggaatttatcagacttgtgagtaaacaagttgaagtttagcagatgagggggaatattgaggcccctaaggctaaacaaaataatcagtatctgagatagtggctaatgtggctccccaggcctaatttgggaacagtttttcctgattgctttgagaagtactttcttttgacagaaattttcattctgcttgccattgctatattctccctttataggagccattggatttctttccttttgtgggaaatgtcccattagcattttcagatcttttgatgtgcactaatgccattattggtaatgccgttattggtgaatacagcatagttaaataaactgttacagtaaatctacacttggatttgctgcacctctaccaatagccttttgaatgactgaaagtgttaacagagaaagaggcatgtctgcagaaagagatagctaatattttttggtactttatctgaaatccaagatgctgcttcccctgcaggttgttttccttcttacgatcctcattgaatcccctctgggagcacaggacagttagtagaactctccatttctttttttttttttttagacggagtctctctctgtcgccccggctggagtgcagtggcgcgatctcggctcactgcaacctccgcctcccgggttcaccccatt

SEQ ID NO: 323753 - DNA, 596 bp, Homo sapiens
  misc_feature (135)..(135): n is a, c, g, or t
  misc_feature (152)..(152): n is a, c, g, or t
taaaaacaaaagtcatctagaaatatactttcaaaaagcagctacacctctagggttgaggaacaaaaggaaaaatatgaagtaaccagaacttagaagcccagaattgcaccacaatctttgtggaaggtaganccatctggcctcgtgcngaattcggcacgagaggcgatctgcccgccttggcctcccaaagtactgggattacaggcgtgagcaactgctcctggcccaaaacatctctttctacatacaccaaatatttccgatcagagaatcacaagagcagcaaatgtggtttcatcaagtgggaagaaagcagcaatttaaaataactttttgggagactgaattgagtaataataaaacttcagtctttcgctaataataataataataataataataataacaacttattgaatgtggccagctcactagatgaggaaagaggaaggcattttctgcattcttgcctagttttccttataagcaccactaagttaatagctctgtctttttggtgtttgcactatgtaatgcttttaatactttttaattgtgcttttttatgtattaaatgtttttccttttgc

SEQ ID NO: 323754 - DNA, 2807 bp, Homo sapiens
gcctggctaatttttgtatttttattggagacggtgtttcaccgtcttagccaggatggtcttgatctcctgacctcgtgatctgcccacctcagcctcccaaagtactgggattacaggcgtgagccaccgcgcccggccggaactctccatttcttaaggtaaagagggtcaaggatacctaaaaagggtcaaataatgctagaagagcaattcctctttcagagcagttgctgtaatttggcaaatgctttatcgaagattgatattaggctaggggcggtggcttacgcctgtaatcccagcactttgggaggccgaggtgggtggattgcctgagctcaggagttcgagaccagtctgaccagtatggtgaaaccctgtctctactaaaaatacaaaaattagccggtcgtggtggcgtgcacctgtagtcccagctacttggcaggttgagacaggagaatcgcttgaacctgggaggtggaggttgcagtgagccgagactgcaccactgcgctcccacctgggtgacagagactctgtctcaaaaaaaaggacatttatcattataacatcttattagagcccctaatttcttatctgaaggcactgtttttttttttaaacagttaagtactgatgtcaacagacaaatatttctgatcagatagtcccctgtcaacagtagcaaatgtggtttcataaagtgggaagaaaacagcattttaaagtaactttttgggagactgatttgagtaataataaaactctggtctcccttaagaaaaaaaaacccttccacctttactgtgtcatttatatccccttagttccaaagttaattatcttatttctggatattgcttttataccaaagacccttatcagcccttgtaactacagtatctttagataagattcctctttccagtcagtcctgggaaatgtttctgttgcagagttaggcggtagatgggaagctgtgatggcagagctactatctaataaagtaacaactcgtagttgaggcttcctttctgtgtgtgatgggggatagggagttagctcccctgttgtctcagcactaagaaattgaggtcaggccaggcgcggtggttcactccttttattccagcactggggtggccaaagtgggcagattgcttgcgctctggagctcgagaccagcctgggcaacatggtgagaccctgtctctaccaaaaatacaaaaaaaaagctgggcatggtgggtgcatgcttgtcccagctactgaggaggctgaggtgggaggatcgcttgagcctgggaggtggaggttgcagtgagctgagatggcaccactgcaatccaaggtgggtgacagagacgctgtctcaaagaaattgaggtcaggcttccttcttacagaattatttttttctctgtagtttgcctcattttttcactttcttttcaatgagaatcgaagtgtttcttttgggtttttttttcccccttttaaaatcaacaggaaatgtttcaaaggagggatgaaatgcttcttggcttcctcagcacttggcaaggtagacctcatagcaaccttgaatatgactttctttagtctctagctatgcactattaagtgcctcttgggtagaggtagagttaagtattgagtgccagtcttgacgtccgtatgcctcagtttttctcatatataaaaagcagtatacatacctacccttttctacctcatcatttgttgtagggattaaatccgggagagcaattctgaagcctataaatttccttgaagagatctaagaacctattatgctcttggtgtaccaagctctggggtatatattcagaatacctcatgttctggaagctgagcactagctcccctttattgcctgcctggcagagcctgtttgattactgcaggcccttttacccatgcttctagtttaggtattctttctttgatatgaggctcttgaccagaaaagagttctttctctaggtgttctgagagaagtttgtaaatttggatagtacattctatcctgataaaaccaccttgctgtggtcttgatgtacaaaaaaaaattttttttttgagacagagtcttactctgtcacccaggctggaatgcagtggcgcaatcttggttcactgcaacccccgcctcctgggttcaagcgatcctcctgcctcaacctctcaagtggctgggactacaggcgtgcaccaccacacctggctaattttgtatttttggtagagacagggtttcaccatgttggccaggctggtcttgaactcctgacctcaggcgatctgcccgccttggcctcccaaagtactgggattacaggcgtgagcaactgctcctggcccaaaacatctctttctacatacacttgagtaggtggcataaaatgcactgtcaatatatagaaaacatgaaattttccaaatatttccgatcagagaatcacaagagcagcaaatgtggtttcatcaagtgggaagaaagcagcaatttaaaataactttttgggagactgaattgagtaataataaaacttcagtctttcgctaataataataataataataataataataacaacttattgaatgtggccagctcactagatgaggaaagaggaaggcattttctgcattcttgcctagttttccttataagcaccactaagttaatagctctgtctttttggtgtttgcactatgtaatgcttttaatactttttaattgtgcttttttatgtattaaatgtttttccttttgc

SEQ ID NO: 323755 - DNA, 2382 bp, Homo sapiens
gcctggctaatttttgtatttttattggagacggtgtttcaccgtcttagccaggatggtcttgatctcctgacctcgtgatctgcccactgcgctcccacctgggtgacagagactctgtctcaaaaaaaaggacatttatcattataacatcttattagagcccctaatttcttatctgaaggcactgtttttttttttaaacagttaagtactgatgtcaacagacaaatatttctgatcagatagtcccctgtcaacagtagcaaatgtggtttcataaagtgggaagaaaacagcattttaaagtaactttttgggagactgatttgagtaataataaaactctggtctcccttaagaaaaaaaaacccttccacctttactgtgtcatttatatccccttagttccaaagttaattatcttatttctggatattgcttttataccaaagacccttatcagcccttgtaactacagtatctttagataagattcctctttccagtcagtcctgggaaatgtttctgttgcagagttaggcggtagatgggaagctgtgatggcagagctactatctaataaagtaacaactcgtagttgaggcttcctttctgtgtgtgatgggggatagggagttagctcccctgttgtctcagcactaagaaattgaggtcaggccaggcgcggtggttcactccttttattccagcactggggtggccaaagtgggcagattgcttgcgctctggagctcgagaccagcctgggcaacatggtgagaccctgtctctaccaaaaatacaaaaaaaaagctgggcatggtgggtgcatgcttgtcccagctactgaggaggctgaggtgggaggatcgcttgagcctgggaggtggaggttgcagtgagctgagatggcaccactgcaatccaaggtgggtgacagagacgctgtctcaaagaaattgaggtcaggcttccttcttacagaattatttttttctctgtagtttgcctcattttttcactttcttttcaatgagaatcgaagtgtttcttttgggtttttttttcccccttttaaaatcaacaggaaatgtttcaaaggagggatgaaatgcttcttggcttcctcagcacttggcaaggtagacctcatagcaaccttgaatatgactttctttagtctctagctatgcactattaagtgcctcttgggtagaggtagagttaagtattgagtgccagtcttgacgtccgtatgcctcagtttttctcatatataaaaagcagtatacatacctacccttttctacctcatcatttgttgtagggattaaatccgggagagcaattctgaagcctataaatttccttgaagagatctaagaacctattatgctcttggtgtaccaagctctggggtatatattcagaatacctcatgttctggaagctgagcactagctcccctttattgcctgcctggcagagcctgtttgattactgcaggcccttttacccatgcttctagtttaggtattctttctttgatatgaggctcttgaccagaaaagagttctttctctaggtgttctgagagaagtttgtaaatttggatagtacattctatcctgataaaaccaccttgctgtggtcttgatgtacaaaaaaaaattttttttttgagacagagtcttactctgtcacccaggctggaatgcagtggcgcaatcttggttcactgcaacccccgcctcctgggttcaagcgatcctcctgcctcaacctctcaagtggctgggactacaggcgtgcaccaccacacctggctaattttgtatttttggtagagacagggtttcaccatgttggccaggctggtcttgaactcctgacctcaggcgatctgcccgccttggcctcccaaagtactgggattacaggcgtgagcaactgctcctggcccaaaacatctctttctacatacacttgagtaggtggcataaaatgcactgtcaatatatagaaaacatgaaattttccaaatatttccgatcagagaatcacaagagcagcaaatgtggtttcatcaagtgggaagaaagcagcaatttaaaataactttttgggagactgaattgagtaataataaaacttcagtctttcgctaataataataataataataataataataacaacttattgaatgtggccagctcactagatgaggaaagaggaaggcattttctgcattcttgcctagttttccttataagcaccactaagttaatagctctgtctttttggtgtttgcactatgtaatgcttttaatactttttaattgtgcttttttatgtattaaatgtttttccttttgc

SEQ ID NO: 323756 - DNA, 2519 bp, Homo sapiens
gcctggctaatttttgtatttttattggagacggtgtttcaccgtcttagccaggatggtcttgatctcctgacctcgtgatctgcccacctcagcctcccaaagtactgggattacaggcgtgagccaccgcgcccggccggaactctccatttcttaaggtaaagagggtcaaggatacctaaaaagggtcaaataatgctagaagagcaattcctctttcagagcagttgctgtaatttggcaaatgctttatcgaagattgattacaggcgtgacaactgctcctggcccaaaacatctctttctacatacacttgagtaggtggcataaaatgcactgtcaatatatagaaaacatgaaattttccaaatatttccgatcagagaatcacaagagtagcaaatgtggtttcataaagtgggaagaaaacagcattttaaagtaactttttgggagactgatttgagtaataataaaactctggtctcccttaagaaaaaaaaacccttccacctttactgtgtcatttatatccccttagttccaaagttaattatcttatttctggatattgcttttataccaaagacccttatcagcccttgtaactacagtatctttagataagattcctctttccagtcagtcctgggaaatgtttctgttgcagagttaggcggtagatgggaagctgtgatggcagagctactatctaataaagtaacaactcgtagttgaggcttcctttctgtgtgtgatgggggatagggagttagctcccctgttgtctcagcactaagaaattgaggtcaggccaggcgcggtggttcactccttttattccagcactggggtggccaaagtgggcagattgcttgcgctctggagctcgagaccagcctgggcaacatggtgagaccctgtctctaccaaaaatacaaaaaaaaagctgggcatggtgggtgcatgcttgtcccagctactgaggaggctgaggtgggaggatcgcttgagcctgggaggtggaggttgcagtgagctgagatggcaccactgcaatccaaggtgggtgacagagacgctgtctcaaagaaattgaggtcaggcttccttcttacagaattatttttttctctgtagtttgcctcattttttcactttcttttcaatgagaatcgaagtgtttcttttgggtttttttttcccccttttaaaatcaacaggaaatgtttcaaaggagggatgaaatgcttcttggcttcctcagcacttggcaaggtagacctcatagcaaccttgaatatgactttctttagtctctagctatgcactattaagtgcctcttgggtagaggtagagttaagtattgagtgccagtcttgacgtccgtatgcctcagtttttctcatatataaaaagcagtatacatacctacccttttctacctcatcatttgttgtagggattaaatccgggagagcaattctgaagcctataaatttccttgaagagatctaagaacctattatgctcttggtgtaccaagctctggggtatatattcagaatacctcatgttctggaagctgagcactagctcccctttattgcctgcctggcagagcctgtttgattactgcaggcccttttacccatgcttctagtttaggtattctttctttgatatgaggctcttgaccagaaaagagttctttctctaggtgttctgagagaagtttgtaaatttggatagtacattctatcctgataaaaccaccttgctgtggtcttgatgtacaaaaaaaaattttttttttgagacagagtcttactctgtcacccaggctggaatgcagtggcgcaatcttggttcactgcaacccccgcctcctgggttcaagcgatcctcctgcctcaacctctcaagtggctgggactacaggcgtgcaccaccacacctggctaattttgtatttttggtagagacagggtttcaccatgttggccaggctggtcttgaactcctgacctcaggcgatctgcccgccttggcctcccaaagtactgggattacaggcgtgagcaactgctcctggcccaaaacatctctttctacatacacttgagtaggtggcataaaatgcactgtcaatatatagaaaacatgaaattttccaaatatttccgatcagagaatcacaagagcagcaaatgtggtttcatcaagtgggaagaaagcagcaatttaaaataactttttgggagactgaattgagtaataataaaacttcagtctttcgctaataataataataataataataataataacaacttattgaatgtggccagctcactagatgaggaaagaggaaggcattttctgcattcttgcctagttttccttataagcaccactaagttaatagctctgtctttttggtgtttgcactatgtaatgcttttaatactttttaattgtgcttttttatgtattaaatgtttttccttttgc

SEQ ID NO: 323757 - DNA, 2934 bp, Homo sapiens
gcctggctaatttttgtatttttattggagacggtgtttcaccgtcttagccaggatggtcttgatctcctgacctcgtgatctgcccacctcagcctcccaaagtactgggattacaggcgtgagccaccgcgcccggccggaactctccatttcttaaggtaaagagggtcaaggatacctaaaaagggtcaaataatgctagaagagcaattcctctttcagagcagttgctgtaatttggcaaatgctttatcgaagattgatattaggctaggggcggtggcttacgcctgtaatcccagcactttgggaggccgaggtgggtggattgcctgagctcaggagttcgagaccagtctgaccagtatggtgaaaccctgtctctactaaaaatacaaaaattagccggtcgtggtggcgtgcacctgtagtcccagctacttggcaggttgagacaggagaatcgcttgaacctgggaggtggaggttgcagtgagccgagactgcaccactgcgctcccacctgggtgacagagactctgtctcaaaaaaaaggacatttatcattataacatcttattagagcccctaatttcttatctgaaggcactgtttttttttttaaacagttaagtactgatgtcaacagacaaatatttctgatcagatagtcccctgtcaacagtagcaaatgtggtttcataaagtgggaagaaaacagcattttaaagtaactttttgggagactgatttgagtaataataaaactctggtctcccttaagaaaaaaaaacccttccacctttactgtgtcatttatatccccttagttccaaagttaattatcttatttctggatattgcttttataccaaagacccttatcagcccttgtaactacagtatctttagataagattcctctttccagtcagtcctgggaaatgtttctgttgcagagttaggcggtagatgggaagctgtgatggcagagctactatctaataaagtaacaactcgtagttgaggcttcctttctgtgtgtgatgggggatagggagttagctcccctgttgtctcagcactaagaaattgaggtcaggccaggcgcggtggttcactccttttattccagcactggggtggccaaagtgggcagattgcttgcgctctggagctcgagaccagcctgggcaacatggtgagaccctgtctctaccaaaaatacaaaaaaaaagctgggcatggtgggtgcatgcttgtcccagctactgaggaggctgaggtgggaggatcgcttgagcctgggaggtggaggttgcagtgagctgagatggcaccactgcaatccaaggtgggtgacagagacgctgtctcaaagaaattgaggtcaggcttccttcttacagaattatttttttctctgtagtttgcctcattttttcactttcttttcaatgagaatcgaagtgtttcttttgggtttttttttcccccttttaaaatcaacaggaaatgtttcaaaggagggatgaaatgcttcttggcttcctcagcacttggcaaggtagacctcatagcaaccttgaatatgactttctttagtctctagctatgcactattaagtgcctcttgggtagaggtagagttaagtattgagtgccagtcttgacgtccgtatgcctcagtttttctcatatataaaaagcagtatacatacctacccttttctacctcatcatttgttgtagggattaaatccgggagagcaattctgaagcctataaatttccttgaagagatctaagaacctattatgctcttggtgtaccaagctctggggtatatattcagaatacctcatgttctggaagctgagcactagctcccctttattgcctgcctggcagagcctgtttgattactgcaggcccttttacccatgcttctagtttaggtattctttctttgatatgaggctcttgaccagaaaagagttctttctctaggtgttctgagagaagtttgtaaatttggatagtacattctatcctgataaaaccaccttgctgtggtcttgatgtacaaaaaaaaattttttttttgagacagagtcttactctgtcacccaggctggaatgcagtggcgcaatcttggttcactgcaacccccgcctcctgggttcaagcgatcctcctgcctcaacctctcaagtggctgggactacaggcgtgcaccaccacacctggctaattttgtatttttggtagagacagggtttcaccatgttggccaggctggtcttgaactcctgacctcaggcgatctgcccgccttggcctcccaaagtactgggattacaggcgtgagcaactgctcctggcccaaaacatctctttctacatacacttgagtaggtggcataaaatgcactgtcaatatatagaaaacatgaaattttccaaatatttccgatcagagaatcacaagagcagcaaatgtggtttcatcaagtgggaagaaagcagcaatttaaaataactttttgggagactgaattgagtaataataaaacttcagtctttcgctaataataataataataataataataataacaacttattgaatgtggccagctcactagatgaggaaagaggaaggcattttctgcattcttgcctagttttccttataagcaccactaagttaatagctctgtctttttggtgtttgcactatgtaatgcttttaatactttttaattgtgcttttttatgtattaaatgtttttccttttgcaaaaaaaaaaaagacaacaaaaaccacaaagaagaaaaacaagaacacaagaaacacaaaaaaacgcgggtgttttctggctgggggcgcaaggggatagcaggcacgcgcacgggccacacccttg

SEQ ID NO: 323758 - DNA, 2157 bp, Homo sapiens
gcctggctaatttttgtatttttattggagacggtgtttcaccgtcttagccaggatggtcttgatctcctgacctcgtgatctgcccacctcagcctcccaaagtactgggattacaggcgtgagccaccgcgcccggccggaactctccatttcttaaggtaaagagggtcaaggatacctaaaaagggtcaaataatgctagaagagcaattcctctttcagagcagttgctgtaatttggcaaatgctttatcgaagattgatattaggctaggggcggtggcttacgcctgtaatcccagcactttgggaggccgaggtgggtggattgcctgagctcaggagttcgagaccagtctgaccagtatggtgaaaccctgtctctactaaaaatacaaaaattagccggtcgtggtggcgtgcacctgtagtcccagctacttggcaggttgagacaggagaatcgcttgaacctgggaggtggaggttgcagtgagccgagactgcaccactgcgctcccacctgggtgacagagactctgtctcaaaaaaaaggacatttatcattataacatcttattagagcccctaatttcttatctgaaggcactgtttttttttttaaacagttaagtactgatgtcaacagacaaatatttctgatcagatagtcccctgtcaacagtagcaaatgtggtttcataaagtgggaagaaaacagcattttaaagtaactttttgggagactgatttgagtaataataaaactctggtctcccttaagaaaaaaaaacccttccacctttactgtgtcatttatatccccttagttccaaagttaattatcttatttctggatattgcttttataccaaagacccttatcagcccttgtaactacagtatctttagataagattcctctttccagtcagtcctgggaaatgtttctgttgcagagttaggcggtagatgggaagctgtgatggcagagctactatctaataaagtaacaactcgtagttgaggcttcctttctgtgtgtgatgggggatagggagttagctcccctgttgtctcagcactaagaaattgaggtcaggccaggcgcggtggttcactccttttattccagcactggggtggccaaagtgggcagattgcttgcgctctggagctcgagaccagcctgggcaacatggtgagaccctgtctctaccaaaaatacaaaaaaaaagctgggcatggtgggtgcatgcttgtcccagctactgaggaggctgaggtgggaggatcgcttgagcctgggaggtggaggttgcagtgagctgagatggcaccactgcaatccaaggtgggtgacagagacgctgtctcaaagaaattgaggtcaggcttccttcttacagaattatttttttctctgtagtttgcctcattttttcactttcttttcaatgagaatcgaagtgtttcttttgggtttttttttcccccttttaaaatcaacaggaaatgtttcaaaggagggatgaaatgcttcttggcttcctcagcacttggcaaggtagacctcatagcaaccttgaatatgactttctttagtctctagctatgcactattaagtgcctcttgggtagaggtagagttaagtattgagtgccagtcttgacgtccgtatgcctcagtttttctcatatataaaaagcagtatacatacctacccttttctacctcatcatttgttgtagggattaaatccgggagagcaattctgaagcctataaatttccttgaagagatctaagaacctattatgctcttggtgtaccaagctctggggtatatattcagaatacctcatgttctggaagctgagcactagctcccctttattgcctgcctggcagagcctgtttgattactgcaggcccttttacccatgcttctagtttaggtattctttctttgatatgaggctcttgaccagaaaagagttctttctctaggtgttctgagagaagtttgtaaatttggatagtacattctatcctgataaaaccaccttgctgtggtcttgatgtacataatataccatactcatacctaaaaaagtgggtacgtgtgggtgacctgatatcgatctgcaggcc

SEQ ID NO: 323759 - DNA, 1680 bp, Homo sapiens
gcctggctaatttttgtatttttattggagacggtgtttcaccgtcttagccaggatggtcttgatctcctgacctcgtgatctgcccacctcagcctcccaaagtactgggattacaggcgtgagccaccgcgcccggccggaactctccatttcttaaggtaaagagggtcaaggatacctaaaaagggtcaaataatgctagaagagcaattcctctttcagagcagttgctgtaatttggcaaatgctttatcgaagattgatattaggctaggggcggtggcttacgcctgtaatcccagcactttgggaggccgaggtgggtggattgcctgagctcaggagttcgagaccagtctgaccagtatggtgaaaccctgtctctactaaaaatacaaaaattagccggtcgtggtggcgtgcacctgtagtcccagctacttggcaggttgagacaggagaatcgcttgaacctgggaggtggaggttgcagtgagccgagactgcaccactgcgctcccacctgggtgacagagactctgtctcaaaaaaaaggacatttatcattataacatcttattagagcccctaatttcttatctgaaggcactgtttttttttttaaacagttaagtactgatgtcaacagacaaatatttctgatcagatagtcccctgtcaacagtagcaaatgtggtttcataaagtgggaagaaaacagcattttaaagtaactttttgggagactgatttgagtaataataaaactctggtctcccttaagaaaaaaaaacccttccacctttactgtgtcatttatatccccttagttccaaagttaattatcttatttctggatattgcttttataccaaagacccttatcagcccttgtaactacagtatctttagataagattcctctttccagtcagtcctgggaaatgtttctgttgcagagttaggcggtagatgggaagctgtgatggcagagctactatctaataaagtaacaactcgtagttgaggcttcctttctgtgtgtgatgggggatagggagttagctcccctgttgtctcagcactaagaaattgaggtcaggccaggcgcggtggttcactccttttattccagcactggggtggccaaagtgggcagattgcttgcgctgctggtcttgaactcctgacctcaggcgatctgcccgccttggcctcccaaagtactgggattacaggcgtgagcaactgctcctggcccaaaacatctctttctacatacacttgagtaggtggcataaaatgcactgtcaatatatagaaaacatgaaattttccaaatatttccgatcagagaatcacaagagcagcaaatgtggtttcatcaagtgggaagaaagcagcaatttaaaataactttttgggagactgaattgagtaataataaaacttcagtctttcgctaataataataataataataataataataacaacttattgaatgtggccagctcactagatgaggaaagaggaaggcattttctgcattcttgcctagttttccttataagcaccactaagttaatagctctgtctttttggtgtttgcactatgtaatgcttttaatactttttaattgtgcttttttatgtattaaatgtttttccttttgc

SEQ ID NO: 323760 - DNA, 760 bp, Homo sapiens
gcctggctaatttttgtatttttattggagacggtgtttcaccgtcttagccaggatggtcttgatctcctgacctcgtgatctgcccacctcagcctcccaaagtactgggattacaggcgtgagccaccgcgcccggccggaactctccatttcttaaggtaaagagggtcaaggatacctaaaaagggtcaaataatgctagaagagcaattcctctttcagagcagttgctgtaatttggcaaatgctttatcgaagattgatattaggctaggggcggtggcttacgcctgtaatcccaaagtactgggattacaggcgtgagcaactgctcctggcccaaaacatctctttctacatacacttgagtaggtggcataaaatgcactgtcaatatatagaaaacatgaaattttccaaatatttccgatcagagaatcacaagagcagcaaatgtggtttcatcaagtgggaagaaagcagcaatttaaaataactttttgggagactgaattgagtaataataaaacttcagtctttcgctaataataataataataataataataataacaacttattgaatgtggccagctcactagatgaggaaagaggaaggcattttctgcattcttgcctagttttccttataagcaccactaagttaatagctctgtctttttggtgtttgcactatgtaatgcttttaatactttttaattgtgcttttttatgtattaaatgtttttccttttgc

SEQ ID NO: 323761 - DNA, 2984 bp, Homo sapiens
actgggaatagaagagaaaggagcttcctttccctttccttctttcattcattcattcattttgagaagaagtcctgctctgttgcccaggctggagtgcaatggcatgatctctgctcaccgcaacctctgcctcccgggttcaggtgattctcctgcctcagcctcccagatagctgggactacaggcacataccaccatgcctggctaatttttgtatttttagtagagatgggggtttcactgtgttggccaggctggtctcgaactcctgacctcatgatccacacacctcggcctcccaaggtcctgcgattacaggcgtgagctaccgcacccagccaagttgtaatttttaataaaacttaagaagtaaacattttacttatgtttataggtatttgatcctaaatttgacacatcattgcccatgaaagaatcctcttaggctgctcagcttcactcttcctgcttgcccaccggggtttttcactgcttctgttagcactaagtacttagacgatcctaagatatgtgcttgagccgaatttcatctttacttgtaggaaactttaaactatttcttttcttttcttttttttttttttttacttgagatggagttttgctcttgtcgcccaggctggagtgcagtggagtgatctcggctcactgcaacctctgcctcccgggttcaaatgattctcctgcctcagcctcccaagtagctgggattacaggtgtgcaccaccatgtctggctaattttgtatttttagtagagatggtttcaccatgttggtcaggctggtctcgaactcctgacctcaggtcatccacccacctcagcctcgcaaagtgctgagattacaggcatgagccacagcgcccagcttaaactattttcttggtctgtttttgattttcttttttccttgccactgcggtacagattttttttactcactgccactaaactaaagcaaggcatagtttatatgtgaagtgttcagagtttactgctataaggaaacttccaaatactgacatttaccttttagctgtagttattgggaccatgtgctctggttttctggagactgccaaattgctcccatttttctgcatcccacctggtttctttctgcatgtcccctttcactttcaaacctcttcatttggatgttaaattatatggtcacctagttataggtaagccttgttcgagttgatatcttgattgtgaggaaggatctgtgtcattggagcttgtttctgctgcaacgtgctgtagactatgaataatgaaatcacaccacattaccatcagatttcttgttttagttgtcaaattaatatttatgattgttatcttgggcgaaaagttcagagcagagatgacaaatcattagaacaacgatgaatttcagtattacggctaaaaagttcttctgtctgaatattaactcactctccttccagtgtacttcacagtaattggtatgcttttttatttaatgcttaaatcaaactttataaaaatcttagaccagatctttaatatggtatgccatttccccagtctaccaatggaatagtatgggtttctaatcctaggcttgtacaatggattggagttgagccatgccagcctccacactgccactaacttctgtaatgtaagattgagtcactgccaagcatttgaaatatgcagttgtgttttaattataatttatgtatagttagatgtatgtagtgcattgtgtggtattatttggtttgtaagaatttatttttaagggtcaaggtcatttgtaacattttgtgtgtgtcaattcaatgcaatgttggctgccttttgaagtctttgatatattggtgaatattcttctgatctataatacaaagctatgtaatgttacctcttgactcgcttttgaaaggaagacaattgttaactagatatttgagttttttcccctcagaattatgtgaatttctgatatatggctttagatactgtgaatctgttttccatttagtcagttatctgcttaaattgttcagaactatatcctaacgagcaattagttctgatggttctcccagtcatgagtgtgcatgtgtgcaagcatgttttgatcctgatgctacctttgctaaaaatggccatagattaggaactagctatgtttttagaatcaaagatgaaccggtaagctgtctcatgtaccaaacgtgaaatttacagtgtttacaaatgtctggaattttgcactgccatagggaatgttaaggttacttggctggaatttatcagacttgtgagtaaacaagttgaagtttagcagatgagggggaatattgaggcccctaaggctaaacaaaataatcagtatctgagatagtggctaatgtggctccccaggcctaatttgggaacagtttttcctgattgctttgagaagtactttcttttgacagaaattttcattctgcttgccattgctatattctccctttataggagccattggatttctttccttttgtgggaaatgtcccattagcattttcagatcttttgatgtgcactaatgccattattggtaatgccgttattggtgaatacagcatagttaaataaactgttacagtaaatctacacttggatttgctgcacctctaccaatagccttttgaatgactgaaagtgttaacagagaaagaggcatgtctgcagaaagagatagctaatattttttggtactttatctgaaatccaagatgctgcttcccctgcaggttgttttccttcttacgatcctcattgaatcccctctgggagcacaggacagttagtagaactctccatttctttttttttttttttagacggagtctctctctgtcgccccggctggagtgcagtggcgcgatctcggctcactgcaacctccgcctcccgggttcaccccatt

SEQ ID NO: 323762 - DNA, 850 bp, Homo sapiens
ggggggcgggggtggtggggcttctggactgagccgctgagggtgcgggctgaccctgtaagtggctgcggcgggaagatggcggagctgcgcgtgctcgtagctgtcaagagggtcatcgactacgccgtgaagatccgagtgaagcctgacaggaccggtgtggtcacggatggtgtgaagcactccatgaaccccttctgtgagatcgcggtggaggaggctgtgcggctcaaggagaagaagctggtgaaggaggtcatcgccgtcagctgtgggcctgcacagtgccaggagacgattcgtaccgccctggccatgggtgcagaccgaggtatccacgtggaggtgcccccagcagaagcagaacgcttgggtcccctgcaggtggctcgggtcctggccaagctggcagagaaggagaaggtggacctggtgctgctgggcaaacaggccatcgatgatgactgtaaccagacagggcagatgacagctggatttcttgactggccacagggcacattcgcctcccaggtgacgctggagggggacaagttgaaagtggagcgggagatcgatgggggcctggagaccctgcgcctgaagctgccagctgtggtgacagctgacctgaggctcaacgagccccgctacgccacgctgcccaacatcatgaaagccaagaagaagaagatcgaggtgatcaagcctggggacctgggtgtggacctgacctccaagctctctgtgatcagtgtggaggaccgccagggcaggcgggtcagtggaacactgagactgtggcagtgaaggatgggggttgaggctccaagatgcaaaatgttcattt

SEQ ID NO: 323763 - DNA, 984 bp, Homo sapiens
cccccgtctctctgggctctgtgtctaaggagccctagggcactgggtgtgagtcacttaggtgggcctgtgtggaggggtgtctggggaggacattgaacaggctgggctgaaagggcgttcggctgtcgggggaggtctctgggaagacaggttcctcacagcaaagcctgtggtgaaggtctcagaggcctctcaggggaagtctcaaggtctccagtaaggggaacgaggtctggagggaggaggttgtggatcctcaggcagggttgttgagggaggggggtctccaggtccccagaagcagggacctcaggcaggagtaccaggggaggagtgtggaggaagcgggctcctcagctgggggcctcggggtaggaaaggcctgggcccatcctgcccttgtggcccccggctgcagcctcagtggcatgggggtgaagcggagcctccagagtgggggcattctgctcagcctcgtggccaacgtcctcatggtgctctccacggccaccaactactggacccgccaacaagagggccacagtggcctgtggcaggaatgcaaccacggcatctgctccagcatcccctgccagaccacgctggcggtgactgtggcgtgcatggtgctggcggtgggtgtcggcgtggtgggcatggtgatgggactgcggattcggtgcgacgagggcgagtcgctgcggggccagaccacgagcgccttcctcttcctcggcggactgctgctgctgaccgccttgataggctacaccgtgaagaatgcgtggaagaacaacgtcttcttctcttggtcctatttttctgggtggctggccttacccttctcaattctcgcgggcttctgctttctgctggcagacatgatcatgcagagcaccgacgccatcagtggattccccgtgtgtctgtgactgcagcctgcctggggcagaataaaggaacggctttttttaaaaatgc

SEQ ID NO: 323764 - DNA, 1498 bp, Homo sapiens
cccccgtctctctgggctctgtgtctaaggagccctagggcactgggtgtgagtcacttaggtgggcctgtgtggaggggtgtctggggaggacattgaacaggctgggctgaaagggcgttcggctgtcgggggaggtctctgggaagacaggttcctcacagcaaagcctgtggtgaaggtctcagaggcctctcaggggaagtctcaaggtctccagtaaggggaacgaggtctggagggaggaggttgtggatcctcaggcagggttgttgagggaggggggtctccaggtccccagaagcagggacctcaggcaggagtaccaggggaggagtgtggaggaagcgggctcctcagctgggggcctcggggtaggaaaggcctgggcccatcctgcccttgtggcccccggctgcagcctcagtggcatgggggtgaagcggagcctccagagtgggggcattctgctcagcctcgtggccaacgtcctcatggtgctctccacggccaccaactactggacccgccaacaagagggccacagtggcctgtggcaggaatgcaaccacggcatctgctccagcatcccctgccagaccacgctggcggtgactgtggcgtgcatggtgctggcggtgggtgtcggcgtggtgggcatggtgatgggactgcggattcggtgcgacgagggcgagtcgctgcggggccagaccacgagcgccttcctcttcctcggcgatccgagtgaagcctgacaggaccggtgtggtcacggatggtgtgaagcactccatgaaccccttctgtgagatcgcggtggaggaggctgtgcggctcaaggagaagaagctggtgaaggaggtcatcgccgtcagctgtgggcctgcacagtgccaggagacgattcgtaccgccctggccatgggtgcagaccgaggtatccacgtggaggtgcccccagcagaagcagaacgcttgggtcccctgcaggtggctcgggtcctggccaagctggcagagaaggagaaggtggacctggtgctgctgggcaaacaggccatcgatgatgactgtaaccagacagggcagatgacagctggatttcttgactggccacagggcacattcgcctcccaggtgacgctggagggggacaagttgaaagtggagcgggagatcgatgggggcctggagaccctgcgcctgaagctgccagctgtggtgacagctgacctgaggctcaacgagccccgctacgccacgctgcccaacatcatgaaagccaagaagaagaagatcgaggtgatcaagcctggggacctgggtgtggacctgacctccaagctctctgtgatcagtgtggaggacccgccccagcgcacggccggcgtcaaggtggagaccactgaggacctggtggccaagctgaaggagattgggcggatttgagcccctcccagagatggcaataaaactgactctcaacatctatctc

SEQ ID NO: 323765 - DNA, 1186 bp, Homo sapiens
ccttaactgtctacctaactggtttttccttttcttctcctcatttgtatttatgtatcagtgtattatgtatttatatacacttggagatacagtaaaatgtacctctcactgtgggttaccataaatactgtaaatttgagaaacactctttcaggcctgagaggagcagtgacaacagtagggatgatcaagtcagatgtccctggtacccaggaatggctggatgagagaaggagacagggtgacctgcccctgcctacaaactctaacccagttctgtccctggagctgtgtgaccccggacaaggccctgcccctttccaggctgtcgttgtcctcatccagcctgggagagggttggcgctgaggcccccaccttcttgcctgtttcctcctgaccccaccccttcccctcctgctgggcagatccgagtgaagcctgacaggaccggtgtggtcacggatggtgtgaagcactccatgaaccccttctgtgagatcgcggtggaggaggctgtgcggctcaaggagaagaagctggtgaaggaggtcatcgccgtcagctgtgggcctgcacagtgccaggagacgattcgtaccgccctggccatgggtgcagaccgaggtatccacgtggaggtgcccccagcagaagcagaacgcttgggtcccctgcaggtggctcgggtcctggccaagctggcagagaaggagaaggtggacctggtgctgctgggcaaacaggccatcgatgatgactgtaaccagacagggcagatgacagctggatttcttgactggccacagggcacattcgcctcccaggtgacgctggagggggacaagttgaaagtggagcgggagatcgatgggggcctggagaccctgcgcctgaagctgccagctgtggtgacagctgacctgaggctcaacgagccccgctacgccacgctgcccaacatcatgaaagccaagaagaagaagatcgaggtgatcaagcctggggacctgggtgtggacctgacctccaagctctctgtgatcagtgtggaggacccgccccagcgcacggccggcgtcaaggtggagaccactgaggacctggtggccaagctgaaggagattgggcggatttgagcccctcccagagatggcaataaaactgactctcaacatctatctc

SEQ ID NO: 323766 - DNA, 677 bp, Homo sapiens
ggggggcgggggtggtggggcttctggactgagccgctgagggtgcgggctgaccctgtaagtggctgcggcgggaagatggcggagctgcgcgtgctcgtagctgtcaagagggtcatcgactacgccgtgaagatccgagtgaagcctgacaggaccggtgtggtcacggatggtgtgaagcactccatgaaccccttctgtgagatcgcggtggaggaggctgtgcggctcaaggagaagaagctggtgaaggaggtcatcgccgtcagctgtgggcctgcacagtgccaggagacgattcgtaccgccctggccatgggtgcagaccgaggtatccacgtggaggtgcccccagcagaagcagaacgcttgggtcccctgcaggtggctcgggtctgtggtgacagctgacctgaggctcaacgagccccgctacgccacgctgcccaacatcatgaaagccaagaagaagaagatcgaggtgatcaagcctggggacctgggtgtggacctgacctccaagctctctgtgatcagtgtggaggacccgccccagcgcacggccggcgtcaaggtggagaccactgaggacctggtggccaagctgaaggagattgggcggatttgagcccctcccagagatggcaataaaactgactctcaacatctatctc

SEQ ID NO: 323767 - DNA, 666 bp, Homo sapiens
ggggggcgggggtggtggggcttctggactgagccgctgagggtgcgggctgaccctgtaagtggctgcggcgggaagatggcggagctgcgcgtgctcgtagctgtcaagagggtcatcgactacgccgtgaagatccgagtgaagcctgacaggaccggtgtggtcacggatggtgtgaagcactccatgaaccccttctgtgagatcgcggtggaggaggctgtgcggctcaaggagaagaagctggtgaaggaggtcatcgccgtcagctgtgggcctgcacagtgccaggagacgattcgtaccgccctggccatgggtgcagaccgaggtatccacgtggaggtgcccccagcagaagcagaacgcttgggtcccctgcaggtggctcgggtcctggccaagctggcagagaaggagaaggtggacctggtgctgctgggcaaacaggccatcgatgatgactgtaaccagacagggcagatgacagctggatttcttgactggccacagggcatctcccagtgactagggacagtgaatggcggtatggctggcgcgcgggaggggcggacagtaggcgagactgcatagacaaaagatgggtaactacggggcgctccagttggtagggaccggacggcgtagtggcatggtgtacac

SEQ ID NO: 323768 - DNA, 1225 bp, Homo sapiens
cccccgtctctctgggctctgtgtctaaggagccctagggcactgggtgtgagtcacttaggtgggcctgtgtggaggggtgtctggggaggacattgaacaggctgggctgaaagggcgttcggctgtcgggggaggtctctgggaagacaggttcctcacagcaaagcctgtggtgaaggtctcagaggcctctcaggggaagtctcaaggtctccagtaaggggaacgaggtctggagggaggaggttgtggatcctcaggcagggttgttgagggaggggggtctccaggtccccagaagcagggacctcaggcaggagtaccaggggaggagtgtggaggaagcgggctcctcagctgggggcctcggggtaggaaaggcctgggcccatcctgcccttgtggcccccggctgcagcctcagtggcatgggggtgaagcggagcctccagagtgggggcattctgctcagcctcgtggccaacgtcctcatggtgctctccacggccaccaactactggacccgccaacaagagggccacagtggcctgtggcaggaatgcaaccacggcatctgctccagcatcccctgccagaccacgctggcggtgactgtggcgtgcatggtgctggcggtgggtgtcggcgtggtgggcatggtgatgggactgcggattcggtgcgacgagggcgagtcgctgcggggccagaccacgagcgccttcctcttcctcggcggactgctgctgctgaccgccttgataggctacaccgtgaagaatgcgtggaagaacaacgtcttcttctcttggtcctatttttctgggtggctggccttacccttctcaattctcgcgggtaaactggacagcgggaagagggtggaggagactgcccagaagaccctcaccccagaggctccccagctgccctcccaggaaaccccggggacctctcggggactccccaacacactaacgactcccgcagacccggcagagacccccttggagccccaaaccccagtccccggggccctcccggccatccgccccagggcccaccttcctctccctgctccgcacccccgtccccccaggcttctgctttctgctggcagacatgatcatgcagagcaccgacgccatcagtggattccccgtgtgtctgtgactgcagcctgcctggggcagaataaaggaacggctttttttaaaaatgc

SEQ ID NO: 323769 - DNA, 350 bp, Homo sapiens
ggggggcgggggtggtggggcttctggactgagccgctgagggtgcgggctgaccctgtaagtggctgcggcgggaagatggcggagctgcgcgtgctcgtagctgtcaagagggtcatcgactacgccgtgaagatccgagtgaagcctgacaggaccggtgtggtcacggatggtgtgaagcactccatgaaccccttctgtgagatcgcgtgtggaggacccgccccagcgcacggccggcgtcaaggtggagaccactgaggacctggtggccaagctgaaggagattgggcggatttgagcccctcccagagatggcaataaaactgactctcaacatctatctc

SEQ ID NO: 323770 - DNA, 892 bp, Homo sapiens
ggggggcgggggtggtggggcttctggactgagccgctgagggtgcgggctgaccctgtaagtggctgcggcgggaagatggcggagctgcgcgtgctcgtagctgtcaagagggtcatcgactacgccgtgaagatccgagtgaagcctgacaggaccggtgtggtcacggatggtgtgaagcactccatgaaccccttctgtgagatcgcggtggaggaggctgtgcggctcaaggagaagaagctggtgaaggaggtcatcgccgtcagctgtgggcctgcacagtgccaggagacgattcgtaccgccctggccatgggtgcagaccgaggtatccacgtggaggtgcccccagcagaagcagaacgcttgggtcccctgcaggtggctcgggtcctggccaagctggcagagaaggagaaggtggacctggtgctgctgggcaaacaggccatcgatgatgactgtaaccagacagggcagatgacagctggatttcttgactggccacagggcacattcgcctcccaggtgacgctggagggggacaagttgaaagtggagcgggagatcgatgggggcctggagaccctgcgcctgaagctgccagctgtggtgacagctgacctgaggctcaacgagccccgctacgccacgctgcccaacatcatgaaagccaagaagaagaagatcgaggtgatcaagcctggggacctgggtgtggacctgacctccaagctctctgtgatcagtgtggaggacccgccccagcgcacggccggcgtcaaggtggagaccactgaggacctggtggccaagctgaaggagattgggcggatttgagcccctcccagagatggcaataaaactgactctcaacatctatctc

SEQ ID NO: 323771 - DNA, 956 bp, Homo sapiens
ggggggcgggggtggtggggcttctggactgagccgctgagggtgcgggctgaccctgtaagtggctgcggcgggaagatggcggagctgcgcgtgctcgtagctgtcaagagggtcatcgactacgccgtgaagatccgagtgaagcctgacaggaccggtgtggtcacggatggtgtgaagcactccatgaaccccttctgtgagatcgcggtggaggaggctgtgcggctcaaggagaagaagctggtgaaggaggtcatcgccgtcagctgtgggcctgcacagtgccaggagacgattcgtaccgccctggccatgggtgcagaccgaggtatccacgtggaggtgcccccagcagaagcagaacgcttgggtcccctgcaggtggctcgggtcctggccaagctggcagagaaggagaaggtggacctggtgctgctgggcaaacaggccatcgatgatgactgtaaccagacagggcagatgacagctggatttcttgactggccacagggcacattcgcctcccaggtgacgctggagggggacaagttgaaagtggagcgggagatcgatgggggcctggagaccctgcgcctgaagctgccagctgtggtgacagctgacctgaggctcaacgagccccgctacgccacgctgcccaacatcatgaaagccaagaagaagaagatcgaggtgatcaagcctggggacctgggtgtggacctgacctccaagctctctgtgatcagtgtggaggacccgccccagcgcacggccggcgtcaaggtggagaccactgaggacctggtggccaagctgaaggagattgggcggatttgagcccctcccagagatggcaataaaactgactctcaacatctatctccgttacaaaaaaaacaacaaaaaacaccgggactacaattcgggggcgaaaaaacggtaggaca

SEQ ID NO: 323772 - DNA, 835 bp, Homo sapiens
ggggggcgggggtggtggggcttctggactgagccgctgagggtgcgggctgaccctgtaagtggctgcggcgggaagatccgagtgaagcctgacaggaccggtgtggtcacggatggtgtgaagcactccatgaaccccttctgtgagatcgcggtggaggaggctgtgcggctcaaggagaagaagctggtgaaggaggtcatcgccgtcagctgtgggcctgcacagtgccaggagacgattcgtaccgccctggccatgggtgcagaccgaggtatccacgtggaggtgcccccagcagaagcagaacgcttgggtcccctgcaggtggctcgggtcctggccaagctggcagagaaggagaaggtggacctggtgctgctgggcaaacaggccatcgatgatgactgtaaccagacagggcagatgacagctggatttcttgactggccacagggcacattcgcctcccaggtgacgctggagggggacaagttgaaagtggagcgggagatcgatgggggcctggagaccctgcgcctgaagctgccagctgtggtgacagctgacctgaggctcaacgagccccgctacgccacgctgcccaacatcatgaaagccaagaagaagaagatcgaggtgatcaagcctggggacctgggtgtggacctgacctccaagctctctgtgatcagtgtggaggacccgccccagcgcacggccggcgtcaaggtggagaccactgaggacctggtggccaagctgaaggagattgggcggatttgagcccctcccagagatggcaataaaactgactctcaacatctatctc

SEQ ID NO: 323773 - DNA, 815 bp, Homo sapiens
ggggggcgggggtggtggggcttctggactgagccgctgagggtgcgggctgaccctgtaagtggctgcggcgggaagatggcggagctgcgcgtgctcgtagctgtcaagagggtcatcgactacgccgtgaagatccgagtgaagcctgacaggaccggtgtggtcacggatggtgtgaagcactccatgaaccccttctgtgagatcgcggtggaggaggctgtgcggctcaaggagaagaagctggtgaaggaggtcatcgccgtcagctgtgggcctgcacagtgccaggagacgattcgtaccgccctggccatgggtgcagaccgaggtatccacgtggaggtgcccccagcagaagcagaacgcttgggccatcgatgatgactgtaaccagacagggcagatgacagctggatttcttgactggccacagggcacattcgcctcccaggtgacgctggagggggacaagttgaaagtggagcgggagatcgatgggggcctggagaccctgcgcctgaagctgccagctgtggtgacagctgacctgaggctcaacgagccccgctacgccacgctgcccaacatcatgaaagccaagaagaagaagatcgaggtgatcaagcctggggacctgggtgtggacctgacctccaagctctctgtgatcagtgtggaggacccgccccagcgcacggccggcgtcaaggtggagaccactgaggacctggtggccaagctgaaggagattgggcggatttgagcccctcccagagatggcaataaaactgactctcaacatctatctc

SEQ ID NO: 323774 - DNA, 514 bp, Homo sapiens
ggggggcgggggtggtggggcttctggactgagccgctgagggtgcgggctgaccctgtaagtggctgcggcgggaagatggcggagctgcgcgtgctcgtagctgtcaagagggtcatcgactacgccgtgaagatccgagtgaagcctgacaggaccggtgtggtcacggatggtgtgaagcactccatgaaccccttctgtgagatcgcggtggaggaggctgtgcggctcaaggagaagaagctggtgaaggaggtcatcgccgtcagctgtgggcctgcacagtgccaggagacgattcgtaccgccctggccatgggtgcagaccgaggtatccacgtggaggtgcccccagcagaagcagaacgcttgggtcccctgcaggtggctcgggtcctggccaagctggcagagaaggagaaggtggacctggtggccaagctgaaggagattgggcggatttgagcccctcccagagatggcaataaaactgactctcaacatctatctc

SEQ ID NO: 323775 - DNA, 1070 bp, Homo sapiens
cccccgtctctctgggctctgtgtctaaggagccctagggcactgggtgtgagtcacttaggtgggcctgtgtggaggggtgtctggggaggacattgaacaggctgggctgaaagggcgttcggctgtcgggggaggtctctgggaagacaggttcctcacagcaaagcctgtggtgaaggtctcagaggcctctcaggggaagtctcaaggtctccagtaaggggaacgaggtctggagggaggaggttgtggatcctcaggcagggttgttgagggaggggggtctccaggtccccagaagcagggacctcaggcaggagtaccaggggaggagtgtggaggaagcgggctcctcagctgggggcctcggggtaggaaaggcctgggcccatcctgcccttgtggcccccggctgcagcctcagtggcatgggggtgaagcggagcctccagagtgggggcattctgctcagcctcgtggccaacgtcctcatggtgctctccacggccaccaactactggacccgccaacaagagggccacagtggcctgtggcaggaatgcaaccacggcatctgctccagcatcccctgccagaccacgctggcggtgactgtggcgtgcatggtgctggcggtgggtgtcggcgtggtgggcatggtgatgggactgcggattcggtgcgacgagggcgagtcgctgcggggccagaccacgagcgccttcctcttcctcggcggtgagactgcagaccgccccagaggctccccagctgccctcccaggaaaccccggggacctctcggggactccccaacacactaacgactcccgcagacccggcagagacccccttggagccccaaaccccagtccccggggccctcccggccatccgccccagggcccaccttcctctccctgctccgcacccccgtccccccaggcttctgctttctgctggcagacatgatcatgcagagcaccgacgccatcagtggattccccgtgtgtctgtgactgcagcctgcctggggcagaataaaggaacggctttttttaaaaatgc

SEQ ID NO: 323776 - DNA, 704 bp, Homo sapiens
cgctggcggtgactgtggcgtgcatggtgctggcggtgggtgtcggcgtggtgggcatggtgatgggactgcggattcggtgcgacgagggcgagtcgctgcggggccagaccacgagcgccttcctcttcctcggcggtgagactgcagaccgccccaggcgggcaggcaggggcgggccctgggtgatggaggggcctggtcgccaggggaggggcttgaggtactcggccaggatccgaggggcagggctggaagaagccgagagaggtgggcggggctcgagacagagttcagagcgggaggagcaggaaggggcctgggccaggggcgggctgagaggcgataggcgtggtctgatagaagggggcgggtctgaaggggcgtggcctgggtgcagcccccaccaggcccagctagctcatcttgcggctgggcggggcccaggactgctgctgctgaccgccttgataggctacaccgtgaagaatgcgtggaagaacaacgtcttcttctcttggtcctatttttctgggtggctggccttacccttctcaattctcgcgggtaaactggacagcgggaagagggtggaggagactgcccagaagaccctcaccccagaggctccccagctgccctcccaggaaaccccggggacctctcggggactccccaacacactaacgactcccgcagacccg

SEQ ID NO: 323777 - DNA, 451 bp, Homo sapiens
caataagaaaaagacatcacccacaagcaaaatggcagtgctagaccattcacagcaaatcactgaccaaactgcaaatgtccaacaaaatgagtggagtacaaacctgaacctgcacgccacttcagagggcacatgtccatatccagaaaggcgaaaatgaccggcaattctattcctaacttgttccctagagaaatccttagcataaagacaaaaggatattatttacaacattgtttatagtattgcattattgaaaatgacccaaatcctcaccaacagaagaatgaataactaagttatagtatattcatggaatataattctataccccttgaaaatacatgaactagagctgtatcagcaaggaaaaatatctcaagaacaatgctaagaaaaaaaaacatgctggctgggcatggtggctcacacctgtaatcccagcact

SEQ ID NO: 323778 - DNA, 1419 bp, Homo sapiens
gggcggagcgagcgatttgaacgcgagcggcgcggacttctgccaagcaccggctcatgtgaggctcgcggcacagcgttctctgggctccccagaagccagcctttcgctcccggacccggcagcccgagcaggagccgtgggaccgggcgccagcaccctctgcggcgtgtcatgggcccgcgccgccggagccgaaagcccgaggccccgaggaggcgcagcccgagcccgaccccgacccccggcccctcccggcggggcccctccttaggcgcttcctcccatcaacacagtcggcggagacaaggttggctaaaggagatccgaaagcttcagaagagcacacacctcttgataaggaagctgcccttcagccgcctggcaagagaaatatgtgttaaattcactcgtggtgtggacttcaattggcaagcccaggccctattggccctacaagaggcagcagaagcatttctagttcatctctttgaggacgcctatctcctcaccttacatgcaggccgagttactctcttcccaaaggatgtgcaactggcccggaggatccggggccttgaggagggactcggctgagctcctgcacccagtgtttctgtcagtctttcctgctcagccaggggggatgataccggggactctccagagccatgactagatccaatggattctgcgatgctgtctggactttgctgtctctgaacagtatgtgtgtgttgctttaaatatttttcttttttttgagaaggagaagactgcatgactttcctctgtaacagaggtaatatatgagacaatcaacaccgttccaaaggcctgaaaataattttcagataaagagactccaaggttgactttagtttgtgagttactcatgtgactatttgaggattttgaaaacatcagatttgctgtggtatgggagaaaaggttatgtacttattattttagctctttctgtaatatttacattttttaccatatgtacatttgtacttttattttacacataagggaaaaaataagaccactttgagcagttgcctggaaggctgggcatttccatcatatagacctctgcccttcagagtagcctcaccattagtggcagcatcatgtaactgagtggactgtgcttgtcaacggatgtgtagcttttcagaaacttaattggggatgaatagaaaacctgtaagctttgatgttctggttacttctagtaaattcctgtcaaaatcaattcagaaattctaacttggagaatttaacattttactcttgtaaatcatagaagatgtatcataacagttcagaattttaaagtacattttcgatgcttttatgggtatttttgtagtttctttgtagagagataataaaaatcaaaatatttaatga

SEQ ID NO: 323779 - DNA, 1225 bp, Homo sapiens
ggcccggaagcgctcgcgcaggagaccccgggtgacggggcccggcgccgctaactggagcgaaccccagcgtccgccgacatggcctggaccaagtaccagctgttcctggccgggctcatgcttgttaccggctccatcaacacgctctcggcaaagcgcttcctcccatcaacacagtcggcggagacaaggttggctaaaggagatccgaaagcttcagaagagcacacacctcttgataaggaagctgcccttcagccgcctggcagcagaagcatttctagttcatctctttgaggacgcctatctcctcaccttacatgcaggccgagttactctcttcccaaaggatgtgcaactggcccggaggatccggggccttgaggagggactcggctgagctcctgcacccagtgtttctgtcagtctttcctgctcagccaggggggatgataccggggactctccagagccatgactagatccaatggattctgcgatgctgtctggactttgctgtctctgaacagtatgtgtgtgttgctttaaatatttttcttttttttgagaaggagaagactgcatgactttcctctgtaacagaggtaatatatgagacaatcaacaccgttccaaaggcctgaaaataattttcagataaagagactccaaggttgactttagtttgtgagttactcatgtgactatttgaggattttgaaaacatcagatttgctgtggtatgggagaaaaggttatgtacttattattttagctctttctgtaatatttacattttttaccatatgtacatttgtacttttattttacacataagggaaaaaataagaccactttgagcagttgcctggaaggctgggcatttccatcatatagacctctgcccttcagagtagcctcaccattagtggcagcatcatgtaactgagtggactgtgcttgtcaacggatgtgtagcttttcagaaacttaattggggatgaatagaaaacctgtaagctttgatgttctggttacttctagtaaattcctgtcaaaatcaattcagaaattctaacttggagaatttaacattttactcttgtaaatcatagaagatgtatcataacagttcagaattttaaagtacattttcgatgcttttatgggtatttttgtagtttctttgtagagagataataaaaatcaaaatatttaatga

SEQ ID NO: 323780 - DNA, 1534 bp, Homo sapiens
ggcccggaagcgctcgcgcaggagaccccgggtgacggggcccggcgccgctaactggagcgaaccccagcgtccgccgacatggcctggaccaagtaccagctgttcctggccgggctcatgcttgttaccggctccatcaacacgctctcggcaaaatgggcggacaatttcatggccgagggctgtggagggagcaaggagcacagcttccagcatcccttcctccaggcagtgggcatgttcctgggagaattctcctgcctggctgccttctacctcctccgatgcagagctgcagggcaatcagactccagcgtagacccccagcagcccttcaaccctcttcttttcctgcccccagcgctctgtgacatgacagggaccagcctcatgtatgtggctctgaacatgaccagtgcctccagcttccagatgctgcggggtgcagtgatcatattcactggcctgttctcggtggccttcctgggccggaggctggtgctgagccagtggctgggcatcctagccaccatcgcggggctggtggtcgtgggcctggctgacctcctgagcaagcacgacagtcagcacaagctcagcgaagtgatcacaggggacctgttgatcatcatggcccagatcatcgttgccatccagatggtgctagaggagaagttcgtctacaaacacaatgtgcacccactgcgggcagttggcactgagggcctctttggctttgtgatcctctccctgctgctggtgcccatgtactacatccccgccggctccttcagcggaaaccctcgtgggacactggaggatgcattggacgccttctgccaggtgggccagcagccgctcattgccgtggcactgctgggcaacatcagcagcattgccttcttcaacttcgcaggcatcagcgtcaccaaggaactgagcgccaccacccgcatggtgttggacagcttgcgcaccgttgtcatctgggcactgagcctggcactgggctgggaggccttccatgcactgcagatccttggcttcctcatactccttataggcactgccctctacaatgggctacaccgtccgctgctgggccgcctgtccaggggccggcccctggcagaggagagcgagcaggagagactgctgggtggcacccgcactcccatcaatgatgccagctgaggttccctggaggcttctactgccacccgggtgctccttctccctgagactgaggccacacaggctggtgggccccgaatgccctatccccaaggcctcaccctgtcccctccctgcagaacccccagggcagctgctgccacagaagataacaacacccaagtcctctttttctcactaccacctgcagggtggtgttacccagcccccacaagcctgagtgcagtggcagacctcagctctctggacccctcctacagcactagagctaaatcatgaagttgaattgtaggaatttaccaccgtagtgtatctgaatcataaactagattatcat

SEQ ID NO: 323781 - DNA, 549 bp, Homo sapiens
ggcatcaggaaccgcagggaaccaagcagcctttggtccagtgctgctccttggaacagttgagtgtggcctcaaaccattctcctgggtagctcagtcataaaacccgaatgccctatccccaaggcctcaccctgtcccctccctgcagaacccccagggcagctgctgccacagaagataacaacacccaagtcctctttttctcactaccacctgcagggtggtgttacccagcccccacaagcctgagtgcagtggcagacctcagctctctggacccctcctacagcactagagctaaatcatgaagttgaattgtaggaatttaccaccgtagtgtatctgaatcataaactagattatcatagttatctagtttatgagtcataagctagatttgattcttcaaagaagaaaagtcagtgagcaaatttaaaccagaactaagcattatattttcttttttttttttggagacagaaggttgcagtgagtggtggtcgcaccactgcactccagcctggtgacaaagtaagactccatctc

SEQ ID NO: 323782 - DNA, 409 bp, Homo sapiens
cagttctttgtaaagtttttataaatgttctgaatgtgtgaaggaaattaatttccaatgcacaaatatatatatatatttgtgtatatatttaaatatatatatttaaaaattccgactgagcacctgtaatcctagcactttggaaggctgaggcaggaggattgcttgaggccaggattttgtgacaagaccagcctgggcagcagtaagcccctgtctctgtttgttgttgttgttgttgttgttgttttgagacagagtctcactctctcacccaggctggagtgcagcagcacgatctcggctcactgcaacctccaactcccaagttcaagcgattctcctgcctcagcctctcggaccctgtctctatttttttttaaataaagaaataaaaattctgtgt

SEQ ID NO: 323783 - DNA, 3920 bp, Homo sapiens
ggcccggaagcgctcgcgcaggagaccccgggtgacggggcccggcgccgctaactggagcgaaccccagcgtccgccgacatggcctggaccaagtaccagctgttcctggccgggctcatgcttgttaccggctccatcaacacgctctcggcaaaatgggcggacaatttcatggccgagggctgtggagggagcaaggagcacagcttccagcatcccttcctccaggcagtgggcatgttcctgggagaattctcctgcctggctgccttctacctcctccgatgcagagctgcagggcaatcagactccagcgtagacccccagcagcccttcaaccctcttcttttcctgcccccagcgctctgtgacatgacagggaccagcctcatgtatgtggctctgaacatgaccagtgcctccagcttccagatgctgcggggtgcagtgatcatattcactggcctgttctcggtggccttcctgggccggaggctggtgctgagccagtggctgggcatcctagccaccatcgcggggctggtggtcgtgggcctggctgacctcctgagcaagcacgacagtcagcacaagctcagcgaagtgatcacaggggacctgttgatcatcatggcccagatcatcgttgccatccagatggtgctagaggagaagttcgtctacaaacacaatgtgcacccactgcgggcagttggcactgagggcctctttggctttgtgatcctctccctgctgctggtgcccatgtactacatccccgccggctccttcagcggaaaccctcgtgggacactggaggatgcattggacgccttctgccaggtgggccagcagccgctcattgccgtggcactgctgggcaacatcagcagcattgccttcttcaacttcgcaggcatcagcgtcaccaaggaactgagcgccaccacccgcatggtgttggacagcttgcgcaccgttgtcatctgggcactgagcctggcactgggctgggaggccttccatgcactgcagatccttggcttcctcatactccttataggcactgccctctacaatgggctacaccgtccgctgctgggccgcctgtccaggggccggcccctggcagaggagagcgagcaggagagactgctgggtggcacccgcactcccatcaatgatgccagctgaggttccctggaggcttctactgccacccgggtgctccttctccctgagactgaggccacacaggctggtgggccccgaatgccctatccccaaggcctcaccctgtcccctccctgcagaacccccagggcagctgctgccacagaagataacaacacccaagtcctctttttctcactaccacctgcagggtggtgttacccagcccccacaagcctgagtgcagtggcagacctcagctctctggacccctcctacagcactagagctaaatcatgaagttgaattgtaggaatttaccaccgtagtgtatctgaatcataaactagattatcatagttatctagtttatgagtcataagctagatttgattcttcaaagaagaaaagtcagtgagcaaatttaaaccagaactaagcattatattttcttttttttttttggagacagagtctcgctctgtcgcccaggctggagtgcagtggcacgatctcggcggctcactacaacctctgcctcccaggttcaaatgattctcctgcctcagcctcccgagtagctgggattacaggtgcataacacacctgggtaacttttatagagatggggtttcaccatgttggccaggctggtctcaaactcctgacctcaggtgatctgcctgcctcggcctcccaaagtgctgggattacaggcgtgagacaccacacccagccataactaagcattatgttttctaaaacttctaagatcctccctaaacccgtctggagacatgggttttagcccagactctgcctcaaactcattgtagctcccagcacattacccagttgctctgggccttggtgttatgctctgggaagtagatgttgatgctgtggccttagtgccttctggccccagcattccatgggcctgtgatcttgaccaacctgagaaaacagtaacagcccatccactggaaatacccctctgcccacagcaccacccttctgtgctgttttttttgttgtttgtttgtttcttctttttgagacagagtcttgctctgttgccacgctggagtgcagtggtgtgatctcggctcactgcaacctcccgctcccaggttcaagcaagtcccctgagtagctgggactacaggcgtgtgccaccacatccggctaattttttgcattctttaatagagacggggttttgccatgttggccaggatggtctcaatctcctgacctcatgatccacctgcctcagcctcccaaagtgctggggttacaggcatgagccaccacgcccagccttttttttttttttttttttttcttgagagacagggtcttgctctgtcacccaggcacagcttactgcagccttgaactcctgggatcaatcagtcctcctgcctcagcctcccgagtagctaagactaacaggtatgtaccaccatgcctggtttattgttttatttttttggcagagatgggtctcactgtgttgcccaggctgatctcaaactcctggcctcaagcgatcctcccatctcagcctcccaaagtgctgggattacagacctgagccaccacacctgggcaacagagtgaaacctgtccctgttttcctgctcttactctcacctctgaggcctcctctgcctggaagagattacagggaaattccaggcagcccttgtcaattgtttttatgaattctttacctgttccttttaaagacaaggaaactgaggcccaaagttctaagttgtttggcaaatggagtctcctaccctcagctcctgcaaggacctgggggacccccaggtccagcagccacatgattctgcagcagacagggacctagagcacatctggatctcagccccacccctggcaacctgcctgcctagagaactcccaagatgacagactaagtaggattctgccatttagaataattctggtatcctgggcgttgcgttaagttgcttaactttcattctgtcttacgatagtcttcagaggtgggaacagatgaagaaaccatgccccagagaaggttaagtgacttcctctttatggagccagtgttccaacctaggtttgcctgataccagacctgtggccccacctcccatgcaggtctctgtggggtctttgggatggatctcctagggctgggctggaagcctcatgtactgttgtcttctaggtaaccaccctgaagagaaggggtggcatcaggaaccgcagggaaccaagcagcctttggtccagtgctgctccttggaacagttgagtgtggcctcaaaccattctcctgggtagctcagtcataaaacaccgaatgcctgcctcaaaatagcctctgagggaagggagctgttgacaagtgaagccctcaggttgtgtgggattccagcaggttattacagcttgtggggggagggagggtccattccaccagctttgaatcccagggtcccctcagcttcactgggccacagtgtctgtcccaggaagaagcaaatggacagtgaggatgatggagagactacagctgccttgtctaaaacctgggatcttaaaagtgttattttggcttttattttttaaaaaaagaaaaggaaaattggcaattgtattaatccattctcgaattgctgtaaagaaatacctgagactgggtaatttaatttataaagaaaagaggtttaattggctca

SEQ ID NO: 323784 - DNA, 3920 bp, Homo sapiens
  misc_feature (3894)..(3894): n is a, c, g, or t
ggcccggaagcgctcgcgcaggagaccccgggtgacggggcccggcgccgctaactggagcgaaccccagcgtccgccgacatggcctggaccaagtaccagctgttcctggccgggctcatgcttgttaccggctccatcaacacgctctcggcaaaatgggcggacaatttcatggccgagggctgtggagggagcaaggagcacagcttccagcatcccttcctccaggcagtgggcatgttcctgggagaattctcctgcctggctgccttctacctcctccgatgcagagctgcagggcaatcagactccagcgtagacccccagcagcccttcaaccctcttcttttcctgcccccagcgctctgtgacatgacagggaccagcctcatgtatgtggctctgaacatgaccagtgcctccagcttccagatgctgcggggtgcagtgatcatattcactggcctgttctcggtggccttcctgggccggaggctggtgctgagccagtggctgggcatcctagccaccatcgcggggctggtggtcgtgggcctggctgacctcctgagcaagcacgacagtcagcacaagctcagcgaagtgatcacaggggacctgttgatcatcatggcccagatcatcgttgccatccagatggtgctagaggagaagttcgtctacaaacacaatgtgcacccactgcgggcagttggcactgagggcctctttggctttgtgatcctctccctgctgctggtgcccatgtactacatccccgccggctccttcagcggaaaccctcgtgggacactggaggatgcattggacgccttctgccaggtgggccagcagccgctcattgccgtggcactgctgggcaacatcagcagcattgccttcttcaacttcgcaggcatcagcgtcaccaaggaactgagcgccaccacccgcatggtgttggacagcttgcgcaccgttgtcatctgggcactgagcctggcactgggctgggaggccttccatgcactgcagatccttggcttcctcatactccttataggcactgccctctacaatgggctacaccgtccgctgctgggccgcctgtccaggggccggcccctggcagaggagagcgagcaggagagactgctgggtggcacccgcactcccatcaatgatgccagctgaggttccctggaggcttctactgccacccgggtgctccttctccctgagactgaggccacacaggctggtgggccccgaatgccctatccccaaggcctcaccctgtcccctccctgcagaacccccagggcagctgctgccacagaagataacaacacccaagtcctctttttctcactaccacctgcagggtggtgttacccagcccccacaagcctgagtgcagtggcagacctcagctctctggacccctcctacagcactagagctaaatcatgaagttgaattgtaggaatttaccaccgtagtgtatctgaatcataaactagattatcatagttatctagtttatgagtcataagctagatttgattcttcaaagaagaaaagtcagtgagcaaatttaaaccagaactaagcattatattttcttttttttttttggagacagagtctcgctctgtcgcccaggctggagtgcagtggcacgatctcggcggctcactacaacctctgcctcccaggttcaaatgattctcctgcctcagcctcccgagtagctgggattacaggtgcataacacacctgggtaacttttatagagatggggtttcaccatgttggccaggctggtctcaaactcctgacctcaggtgatctgcctgcctcggcctcccaaagtgctgggattacaggcgtgagacaccacacccagccataactaagcattatgttttctaaaacttctaagatcctccctaaacccgtctggagacatgggttttagcccagactctgcctcaaactcattgtagctcccagcacattacccagttgctctgggccttggtgttatgctctgggaagtagatgttgatgctgtggccttagtgccttctggccccagcattccatgggcctgtgatcttgaccaacctgagaaaacagtaacagcccatccactggaaatacccctctgcccacagcaccacccttctgtgctgttttttttgttgtttgtttgtttcttctttttgagacagagtcttgctctgttgccacgctggagtgcagtggtgtgatctcggctcactgcaacctcccgctcccaggttcaagcaagtcccctgagtagctgggactacaggcgtgtgccaccacatccggctaattttttgcattctttaatagagacggggttttgccatgttggccaggatggtctcaatctcctgacctcatgatccacctgcctcagcctcccaaagtgctggggttacaggcatgagccaccacgcccagccttttttttttttttttttttttcttgagagacagggtcttgctctgtcacccaggcacagcttactgcagccttgaactcctgggatcaatcagtcctcctgcctcagcctcccgagtagctaagactaacaggtatgtaccaccatgcctggtttattgttttatttttttggcagagatgggtctcactgtgttgcccaggctgatctcaaactcctggcctcaagcgatcctcccatctcagcctcccaaagtgctgggattacagacctgagccaccacacctgggcaacagagtgaaacctgtccctgttttcctgctcttactctcacctctgaggcctcctctgcctggaagagattacagggaaattccaggcagcccttgtcaattgtttttatgaattctttacctgttccttttaaagacaaggaaactgaggcccaaagttctaagttgtttggcaaatggagtctcctaccctcagctcctgcaaggacctgggggacccccaggtccagcagccacatgattctgcagcagacagggacctagagcacatctggatctcagccccacccctggcaacctgcctgcctagagaactcccaagatgacagactaagtaggattctgccatttagaataattctggtatcctgggcgttgcgttaagttgcttaactttcattctgtcttacgatagtcttcagaggtgggaacagatgaagaaaccatgccccagagaaggttaagtgacttcctctttatggagccagtgttccaacctaggtttgcctgataccagacctgtggccccacctcccatgcaggtctctgtggggtctttgggatggatctcctagggctgggctggaagcctcatgtactgttgtcttctaggtaaccaccctgaagagaaggggtggcatcaggaaccgcagggaaccaagcagcctttggtccagtgctgctccttggaacagttgagtgtggcctcaaaccattctcctgggtagctcagtcataaaacaccgaatgcctgcctcaaaatagcctctgagggaagggagctgttgacaagtgaagccctcaggttgtgtgggattccagcaggttattacagcttgtggggggagggagggtccattccaccagctttgaatcccagggtcccctcagcttcactgggccacagtgtctgtcccaggaagaagcaaatggacagtgaggatgatggagagactacagctgccttgtctaaaacctgggatcttaaaagtgttattttggcttttattttttaaaaaaagaaaaggaaaattggcaattgtattaatccattctcgaattgctgtaaagaaatacctgagactgggtaatttaataanaaaaaaaaaaaaaaaaaatttttggg

SEQ ID NO: 323785 - DNA, 1800 bp, Homo sapiens
gggcggagcgagcgatttgaacgcgagcggcgcggacttctgccaagcaccggctcatgtgaggctcgcggcacagcgttctctgggctccccagaagccagcctttcgctcccggacccggcagcccgagcaggagccgtgggaccgggcgccagcaccctctgcggcgtgtcatgggcccgcgccgccggagccgaaagcccgaggccccgaggaggcgcagcccgagcccgaccccgacccccggcccctcccggcggggcccctccttaggcgcttcctcccatcaacacagtcggcggagacaaggttggctaaaggagatccgaaagcttcagaagagcacacacctcttgataaggaagctgcccttcagccgcctggcaagagaaatatgtgttaaattcactcgtggtgtggacttcaattggcaagcccaggccctattggccctacaagaggcagcagaagcatttctagttcatctctttgaggacgcctatctcctcaccttacatgcaggccgagttactctcttcccaaaggatgtgcaactggcccggaggatccggggccttgaggagggactcggctgagctcctgcacccagtgtttctgtcagtctttcctgctcagccaggggggatgataccggggactctccagagccatgactagatccaatggattctgcgatgctgtctggactttgctgtctctgaacagtatgtgtgtgttgctttaaatatttttcttttttttgagaaggagaagactgcatgactttcctctgtaacagaggtaatatatgagacaatcaacaccgttccaaaggcctgaaaataattttcagataaagagactccaaggttgactttagtttgtgagttactcatgtgactatttgaggattttgaaaacatcagatttgctgtggtatgggagaaaaggttatgtacttattattttagctctttctgtaatatttacattttttaccatatgtacatttgtacttttattttacacataagggaaaaaataagaccactttgagcagttgcctggaaggctgggcatttccatcatatagacctctgcccttcagagtagcctcaccattagtggcagcatcatgtaactgagtggactgtgcttgtcaacggatgtgtagcttttcagaaacttaattggggatgaatagaaaacctgtaagctttgatgttctggttacttctagtaaattcctgtcaaaatcaattcagaaattctaacttggagaatttaacattttactcttgtaaatcatagaagatgtatcataacagttcagaattttaaagtacattttcgatgcttttatgggtatttttgtagtttctttgtagagagataataaaaatcaaaatatttaatgaaaaaaaaaatgttacagcatagagattatactgtactttttgtgtgttaaaaataagttctttatttgtttgcaaacagccacaatttttttttcttttttttttttttgagatggagtctttttttttattgatcattcttgggtgtttctcgcagagggggatttggcagggtcataggacaatagtggagggaaggtcagcagataaacaagtgaacaaaggtctctggttttccgaggcagaggaccctgcggccttccgcagtgtttgtgtccctgggtacttgagattagggagtggtgatgactcttaatgagcatgctgccttcaagcatctgtttaacaaagcacatcttgcaccgcccttaatccatttaa

SEQ ID NO: 323786 - DNA, 3284 bp, Homo sapiens
ggcccggaagcgctcgcgcaggagaccccgggtgacggggcccggcgccgctaactggagcgaaccccagcgtccgccgacatggcctggaccaagtaccagctgttcctggccgggctcatgcttgttaccggctccatcaacacgctctcggcaaaatgggcggacaatttcatggccgagggctgtggagggagcaaggagcacagcttccagcatcccttcctccaggcagtgggcatgttcctgggagaattctcctgcctggctgccttctacctcctccgatgcagagctgcagggcaatcagactccagcgtagacccccagcagcccttcaaccctcttcttttcctgcccccagcgctctgtgacatgacagggaccagcctcatgtatgtggctctgaacatgaccagtgcctccagcttccagatgctgcggggtgcagtgatcatattcactggcctgttctcggtggccttcctgggccggaggctggtgctgagccagtggctgggcatcctagccaccatcgcggggctggtggtcgtgggcctggctgacctcctgagcaagcacgacagtcagcacaagctcagcgaagtgatcacaggggacctgttgatcatcatggcccagatcatcgttgccatccagatggtgctagaggagaagttcgtctacaaacacaatgtgcacccactgcgggcagttggcactgagggcctctttggctttgtgatcctctccctgctgctggtgcccatgtactacatccccgccggctccttcagcggaaaccctcgtgggacactggaggatgcattggacgccttctgccaggtgggccagcagccgctcattgccgtggcactgctgggcaacatcagcagcattgccttcttcaacttcgcaggcatcagcgtcaccaaggaactgagcgccaccacccgcatggtgttggacagcttgcgcaccgttgtcatctgggcactgagcctggcactgggctgggaggccttccatgcactgcagatccttggcttcctcatactccttataggcactgccctctacaatgggctacaccgtccgctgctgggccgcctgtccaggggccggcccctggcagaggagagcgagcaggagagactgctgggtggcacccgcactcccatcaatgatgccagctgaggttccctggaggcttctactgccacccgggtgctccttctccctgagactgaggccacacaggctggtgggccccgaatgccctatccccaaggcctcaccctgtcccctccctgcagaacccccagggcagctgctgccacagaagataacaacacccaagtcctctttttctcactaccacctgcagggtggtgttacccagcccccacaagcctgagtgcagtggcagacctcagctctctggacccctcctacagcactagagctaaatcatgaagttgaattgtaggaatttaccaccgtagtgtatctgaatcataaactagattatcatagttatctagtttatgagtcataagctagatttgattcttcaaagaagaaaagtcagtgagcaaatttaaaccagaactaagcattatattttcttttttttttttggagacagagtctcgctctgtcgcccaggctggagtgcagtggcacgatctcggcggctcactacaacctctgcctcccaggttcaaatgattctcctgcctcagcctcccgagtagctgggattacaggtgcataacacacctgggtaacttttatagagatggggtttcaccatgttggccaggctggtctcaaactcctgacctcaggtgatctgcctgcctcggcctcccaaagtgctgggattacaggcgtgagacaccacacccagccataactaagcattatgttttctaaaacttctaagatcctccctaaacccgtctggagacatgggttttagcccagactctgcctcaaactcattgtagctcccagcacattacccagttgctctgggccttggtgttatgctctgggaagtagatgttgatgctgtggccttagtgccttctggccccagcattccatgggcctgtgatcttgaccaacctgagaaaacagtaacagcccatccactggaaatacccctctgcccacagcaccacccttctgtgctgttttttttgttgtttgtttgtttcttctttttgagacagagtcttgctctgttgccacgctggagtgcagtggtgtgatctcggctcactgcaacctcccgctcccaggttcaagcaagtcccctgagtagctgggactacaggcgtgtgccaccacatccggctaattttttgcattctttaatagagacggggttttgccatgttggccaggatggtctcaatctcctgacctcatgatccacctgcctcagcctcccaaagtgctggggttacaggcatgagccaccacgcccagccttttttttttttttttttttttcttgagagacagggtcttgctctgtcacccaggcacagcttactgcagccttgaactcctgggatcaatcagtcctcctgctcttactctcacctctgaggcctcctctgcctggaagagattacagggaaattccaggcagcccttgtcaattgtttttatgaattctttacctgttccttttaaagacaaggaaactgaggcccaaagttctaagttgtttggcaaatggagtctcctaccctcagctcctgcaaggacctgggggacccccaggtccagcagccacatgattctcagcctttggtccagtgctgctccttggaacagttgagtgtggcctcaaaccattctcctgggtagctcagtcataaaacaccgaatgcctgcctcaaaatagcctctgagggaagggagctgttgacaagtgaagccctcaggttgtgtgggattccagcaggttattacagcttgtggggggagggagggtccattccaccagctttgaatcccagggtcccctcagcttcactgggccacagtgtctgtcccaggaagaagcaaatggacagtgaggatgatggagagactacagctgccttgtctaaaacctgggatcttaaaagtgttattttggcttttattttttaaaaaaagaaaaggaaaattggcaattgtattaatccattctcgaattgctgtaaagaaatacctgagactgggtaatttaatttataaagaaaagaggtttaattggctca

SEQ ID NO: 323787 - DNA, 947 bp, Homo sapiens
  misc_feature (39)..(39): n is a, c, g, or t
  misc_feature (66)..(66): n is a, c, g, or t
  misc_feature (68)..(68): n is a, c, g, or t
  misc_feature (70)..(70): n is a, c, g, or t
  misc_feature (73)..(74): n is a, c, g, or t
  misc_feature (76)..(76): n is a, c, g, or t
  misc_feature (78)..(79): n is a, c, g, or t
  misc_feature (83)..(85): n is a, c, g, or t
  misc_feature (87)..(87): n is a, c, g, or t
  misc_feature (92)..(93): n is a, c, g, or t
  misc_feature (98)..(98): n is a, c, g, or t
  misc_feature (101)..(101): n is a, c, g, or t
  misc_feature (116)..(117): n is a, c, g, or t
  misc_feature (123)..(123): n is a, c, g, or t
  misc_feature (125)..(125): n is a, c, g, or t
  misc_feature (139)..(139): n is a, c, g, or t
  misc_feature (147)..(147): n is a, c, g, or t
  misc_feature (151)..(151): n is a, c, g, or t
  misc_feature (175)..(175): n is a, c, g, or t
  misc_feature (177)..(177): n is a, c, g, or t
  misc_feature (180)..(180): n is a, c, g, or t
  misc_feature (182)..(182): n is a, c, g, or t
  misc_feature (192)..(192): n is a, c, g, or t
  misc_feature (199)..(199): n is a, c, g, or t
  misc_feature (202)..(202): n is a, c, g, or t
  misc_feature (204)..(204): n is a, c, g, or t
  misc_feature (207)..(208): n is a, c, g, or t
  misc_feature (210)..(210): n is a, c, g, or t
  misc_feature (212)..(213): n is a, c, g, or t
  misc_feature (215)..(215): n is a, c, g, or t
  misc_feature (217)..(217): n is a, c, g, or t
  misc_feature (225)..(226): n is a, c, g, or t
  misc_feature (236)..(236): n is a, c, g, or t
  misc_feature (241)..(241): n is a, c, g, or t
  misc_feature (243)..(244): n is a, c, g, or t
  misc_feature (262)..(262): n is a, c, g, or t
gggccaaggtactgggcggtgacggtaaacaagcgtgangagtcgacgcgtagggtgcgaatcatnantntgnngngnngatnnnanttatnnggtgnganggtaggatggggatnngagtgngngaattagggaaagnggggaaangagnttaagtgcgaagggtagggtaaananaangnaaaaaattcnccctacnttntncanntntnntngnaggagggnnatttaaatanttgananngaggaaaggaagtggagnataaaaatgagtggcagcatcatgtaactgagtggactgtgcttgtcaacggatgtgtagcttttcagaaacttaattggggatgaatagaaaacctgtaagctttgatgttctggttacttctagtaaattcctgtcaaaatcaattcagaaattctaacttggagaatttaacattttactcttgtaaatcatagaagatgtatcataacagttcagaattttaaagtacattttcgatgcttttatgggtatttttgtagtttctttgtagagagataataaaaatcaaaatatttaatgaaaaaaaaaatgttacagcatagagattatactgtactttttgtgtgttaaaaataagttctttatttgtttgcaaacagccacaatttttttttcttttttttttttttgagatggagtctttttttttattgatcattcttgggtgtttctcgcagagggggatttggcagggtcataggacaatagtggagggaaggtcagcagataaacaagtgaacaaaggtctctggttttccgaggcagaggaccctgcggccttccgcagtgtttgtgtccctgggtacttgagattagggagtggtgatgactcttaatgagcatgctgccttcaagcatctgtttaacaaagcacatcttgcaccgcccttaatccatttaa

SEQ ID NO: 323788 - DNA, 453 bp, Homo sapiens
tggcactgctggcatgcccctcaggaaccagggaatcagggacaggcagtggtgactgtgcctatgaactatagggggccctgcagaggtcaggggctggcatgtttggtcgctgtggccatgctctcctggcccccagccccagtgcagccctgttctcatctgggtccctccttccccacaggggacctgttgatcatcatggcccagatcatcgttgccatccagatggtgctagaggagaagttcgtctacaaacacaatgtgcacccactgcgggcagttggcactgagggtgtgtgtgggcacaggggcctggaaggagtggggtagaagggagcctggggagctgagcacaggacaaggtgccagggttcacttgtggggggtgaacttcctgccccgccttgccttccagatgtgttttgacaagtcttctgacacctgctgtgt

SEQ ID NO: 323789 - DNA, 1341 bp, Homo sapiens
gggcggagcgagcgatttgaacgcgagcggcgcggacttctgccaagcaccggctcatgtgaggctcgcggcacagcgttctctgggctccccagaagccagcctttcgctcccggacccggcagcccgagcaggagccgtgggaccgggcgccagcaccctctgcggcgtgtcatgggcccgcgccgccggagccgaaagcccgaggccccgaggaggcgcagcccgagcccgaccccgacccccggcccctcccggcggggcccctccttaggcgcttcctcccatcaacacagtcggcggagacaaggttggctaaaggagatccgaaagcttcagaagagcacacacctcttgataaggaagctgcccttcagccgcctggcagcagaagcatttctagttcatctctttgaggacgcctatctcctcaccttacatgcaggccgagttactctcttcccaaaggatgtgcaactggcccggaggatccggggccttgaggagggactcggctgagctcctgcacccagtgtttctgtcagtctttcctgctcagccaggggggatgataccggggactctccagagccatgactagatccaatggattctgcgatgctgtctggactttgctgtctctgaacagtatgtgtgtgttgctttaaatatttttcttttttttgagaaggagaagactgcatgactttcctctgtaacagaggtaatatatgagacaatcaacaccgttccaaaggcctgaaaataattttcagataaagagactccaaggttgactttagtttgtgagttactcatgtgactatttgaggattttgaaaacatcagatttgctgtggtatgggagaaaaggttatgtacttattattttagctctttctgtaatatttacattttttaccatatgtacatttgtacttttattttacacataagggaaaaaataagaccactttgagcagttgcctggaaggctgggcatttccatcatatagacctctgcccttcagagtagcctcaccattagtggcagcatcatgtaactgagtggactgtgcttgtcaacggatgtgtagcttttcagaaacttaattggggatgaatagaaaacctgtaagctttgatgttctggttacttctagtaaattcctgtcaaaatcaattcagaaattctaacttggagaatttaacattttactcttgtaaatcatagaagatgtatcataacagttcagaattttaaagtacattttcgatgcttttatgggtatttttgtagtttctttgtagagagataataaaaatcaaaatatttaatga

SEQ ID NO: 323790 - DNA, 854 bp, Homo sapiens
gggcggagcgagcgatttgaacgcgagcggcgcggacttctgccaagcaccggctcatgtgaggctcgcggcacagcgttctctgggctccccagaagccagcctttcgctcccggacccggcagcccgagcaggagccgtgggaccgggcgccagcaccctctgcggcgtgtcatgggcccgcgccgccggagccgaaagcccgaggccccgaggaggcgcagcccgagcccgaccccgacccccggcccctcccggcggggcccctccttaggcgcttcctcccatcaacacagtcggcggagacaaggttggctaaaggagatccgaaagcttcagaagagcacacacctcttgataaggaagctgcccttcagccgcctggcaagagaaatatgtgttaaattcactcgtggtgtggacttcaattggcaagcccaggccctattggccctacaagaggcagcagaagcatttctagttcatctctttgaggacgcctatctcctcaccttacatgcaggccgagttactctcttcccaaaggatgtgcaactggcccggaggatccggggccttgaggagggactcggctgagctcctgcacccagtgtttctgtcagtctttcctgctcagccaggggggatgataccggggactctccagagccatgactagatccaatggattctgcgatgctgtctggactttgctgtctctgaacagctggagtgcagcagcacgatctcggctcactgcaacctccaactcccaagttcaagcgattctcctgcctcagcctctcggaccctgtctctatttttttttaaataaagaaataaaaattctgtgt

SEQ ID NO: 323791 - DNA, 3748 bp, Homo sapiens
ggcccggaagcgctcgcgcaggagaccccgggtgacggggcccggcgccgctaactggagcgaaccccagcgtccgccgacatggcctggaccaagtaccagctgttcctggccgggctcatgcttgttaccggctccatcaacacgctctcggcaaaatgggcggacaatttcatggccgagggctgtggagggagcaaggagcacagcttccagcatcccttcctccagctctgaacatgaccagtgcctccagcttccagatgctgcggggtgcagtgatcatattcactggcctgttctcggtggccttcctgggccggaggctggtgctgagccagtggctgggcatcctagccaccatcgcggggctggtggtcgtgggcctggctgacctcctgagcaagcacgacagtcagcacaagctcagcgaagtgatcacaggggacctgttgatcatcatggcccagatcatcgttgccatccagatggtgctagaggagaagttcgtctacaaacacaatgtgcacccactgcgggcagttggcactgagggcctctttggctttgtgatcctctccctgctgctggtgcccatgtactacatccccgccggctccttcagcggaaaccctcgtgggacactggaggatgcattggacgccttctgccaggtgggccagcagccgctcattgccgtggcactgctgggcaacatcagcagcattgccttcttcaacttcgcaggcatcagcgtcaccaaggaactgagcgccaccacccgcatggtgttggacagcttgcgcaccgttgtcatctgggcactgagcctggcactgggctgggaggccttccatgcactgcagatccttggcttcctcatactccttataggcactgccctctacaatgggctacaccgtccgctgctgggccgcctgtccaggggccggcccctggcagaggagagcgagcaggagagactgctgggtggcacccgcactcccatcaatgatgccagctgaggttccctggaggcttctactgccacccgggtgctccttctccctgagactgaggccacacaggctggtgggccccgaatgccctatccccaaggcctcaccctgtcccctccctgcagaacccccagggcagctgctgccacagaagataacaacacccaagtcctctttttctcactaccacctgcagggtggtgttacccagcccccacaagcctgagtgcagtggcagacctcagctctctggacccctcctacagcactagagctaaatcatgaagttgaattgtaggaatttaccaccgtagtgtatctgaatcataaactagattatcatagttatctagtttatgagtcataagctagatttgattcttcaaagaagaaaagtcagtgagcaaatttaaaccagaactaagcattatattttcttttttttttttggagacagagtctcgctctgtcgcccaggctggagtgcagtggcacgatctcggcggctcactacaacctctgcctcccaggttcaaatgattctcctgcctcagcctcccgagtagctgggattacaggtgcataacacacctgggtaacttttatagagatggggtttcaccatgttggccaggctggtctcaaactcctgacctcaggtgatctgcctgcctcggcctcccaaagtgctgggattacaggcgtgagacaccacacccagccataactaagcattatgttttctaaaacttctaagatcctccctaaacccgtctggagacatgggttttagcccagactctgcctcaaactcattgtagctcccagcacattacccagttgctctgggccttggtgttatgctctgggaagtagatgttgatgctgtggccttagtgccttctggccccagcattccatgggcctgtgatcttgaccaacctgagaaaacagtaacagcccatccactggaaatacccctctgcccacagcaccacccttctgtgctgttttttttgttgtttgtttgtttcttctttttgagacagagtcttgctctgttgccacgctggagtgcagtggtgtgatctcggctcactgcaacctcccgctcccaggttcaagcaagtcccctgagtagctgggactacaggcgtgtgccaccacatccggctaattttttgcattctttaatagagacggggttttgccatgttggccaggatggtctcaatctcctgacctcatgatccacctgcctcagcctcccaaagtgctggggttacaggcatgagccaccacgcccagccttttttttttttttttttttttcttgagagacagggtcttgctctgtcacccaggcacagcttactgcagccttgaactcctgggatcaatcagtcctcctgcctcagcctcccgagtagctaagactaacaggtatgtaccaccatgcctggtttattgttttatttttttggcagagatgggtctcactgtgttgcccaggctgatctcaaactcctggcctcaagcgatcctcccatctcagcctcccaaagtgctgggattacagacctgagccaccacacctgggcaacagagtgaaacctgtccctgttttcctgctcttactctcacctctgaggcctcctctgcctggaagagattacagggaaattccaggcagcccttgtcaattgtttttatgaattctttacctgttccttttaaagacaaggaaactgaggcccaaagttctaagttgtttggcaaatggagtctcctaccctcagctcctgcaaggacctgggggacccccaggtccagcagccacatgattctgcagcagacagggacctagagcacatctggatctcagccccacccctggcaacctgcctgcctagagaactcccaagatgacagactaagtaggattctgccatttagaataattctggtatcctgggcgttgcgttaagttgcttaactttcattctgtcttacgatagtcttcagaggtgggaacagatgaagaaaccatgccccagagaaggttaagtgacttcctctttatggagccagtgttccaacctaggtttgcctgataccagacctgtggccccacctcccatgcaggtctctgtggggtctttgggatggatctcctagggctgggctggaagcctcatgtactgttgtcttctaggtaaccaccctgaagagaaggggtggcatcaggaaccgcagggaaccaagcagcctttggtccagtgctgctccttggaacagttgagtgtggcctcaaaccattctcctgggtagctcagtcataaaacaccgaatgcctgcctcaaaatagcctctgagggaagggagctgttgacaagtgaagccctcaggttgtgtgggattccagcaggttattacagcttgtggggggagggagggtccattccaccagctttgaatcccagggtcccctcagcttcactgggccacagtgtctgtcccaggaagaagcaaatggacagtgaggatgatggagagactacagctgccttgtctaaaacctgggatcttaaaagtgttattttggcttttattttttaaaaaaagaaaaggaaaattggcaattgtattaatccattctcgaattgctgtaaagaaatacctgagactgggtaatttaatttataaagaaaagaggtttaattggctca

SEQ ID NO: 323792 - DNA, 3849 bp, Homo sapiens
  misc_feature (3823)..(3823): n is a, c, g, or t
ggcccggaagcgctcgcgcaggagaccccgggtgacggggcccggcgccgctaactggagcgaaccccagcgtccgccgacatggcctggaccaagtaccagctgttcctggccgggctcatgcttgttaccggctccatcaacacgctctcggcaaaatgggcggacaatttcatggccgagggctgtggagggagcaaggagcacagcttccagcatcccttcctccaggcagtgggcatgttcctgggagaattctcctgcctggctgccttctacctcctccgatgcagagctgcagggcaatcagactccagcgtagacccccagcagcccttcaaccctcttcttttcctgcccccagcgctctgtgacatgacagggaccagcctcatgtatgtggctctgaacatgaccagtgcctccagcttccagatgctgcggggtgcagtgatcatattcactggcctgttctcggtggccttcctgggccggaggctggtgctgagccagtggctgggcatcctagccaccatcgcggggctggtggtcgtgggcctggctgacctcctgagcaagcacgacagtcagcacaagctcagcgaagtgatcacaggggacctgttgatcatcatggcccagatcatcgttgccatccagatggtgctagaggagaagttcgtctacaaacacaatgtgcacccactgcgggcagttggcactgagggcctctttggctttgtgatcctctccctgctgctggtgcccatgtactacatccccgccggctccttcagcggaaaccctcgtgggacactggaggatgcattggacgccttctgccaggtgggccagcagccgctcattgccgtggcactgctgggcaacatcagcagcattgccttcttcaacttcgcaggcatcagcgtcaccaaggaactgagcgccaccacccgcatggtgttggacagcttgcgcaccgttgtcatctgggcactgagcctggcactgggctgggaggccttccatgcactgcagatccttggcttcctcatactccttataggcactgccctctacaatgggctacaccgtccgctgctgggccgcctgtccaggggccggcccctggcagaggagagcgagcaggagagactgctgggtggcacccgcactcccatcaatgatgccagctgaggttccctggaggcttctactgccacccgggtgctccttctccctgagactgaggccacacaggctggtgggccccgaatgccctatccccaaggcctcaccctgtcccctccctgcagaacccccagggcagctgctgccacagaagataacaacacccaagtcctctttttctcactaccacctgcagggtggtgttacccagcccccacaagcctgagtgcagtggcagacctcagctctctggacccctcctacagcactagagctaaatcatgaagttgaattgtaggaatttaccaccgtagtgtatctgaatcataaactagattatcatagttatctagtttatgagtcataagctagatttgattcttcaaagaagaaaagtcagtgagcaaatttaaaccagaactaagcattatattttcttttttttttttggagacagagtctcgctctgtcgcccaggctggagtgcagtggcacgatctcggcggctcactacaacctctgcctcccaggttcaaatgattctcctgcctcagcctcccgagtagctgggattacaggtgcataacacacctgggtaacttttatagagatggggtttcaccatgttggccaggctggtctcaaactcctgacctcaggtgatctgcctgcctcggcctcccaaagtgctgggattacaggcgtgagacaccacacccagccataactaagcattatgttttctaaaacttctaagatcctccctaaacccgtctggagacatgggttttagcccagactctgcctcaaactcattgtagctcccagcacattacccagttgctctgggccttggtgttatgctctgggaagtagatgttgatgctgtggccttagtgccttctggccccagcattccatgggcctgtgatcttgaccaacctgagaaaacagtaacagcccatccactggaaatacccctctgcccacagcaccacccttctgtgctgttttttttgttgtttgtttgtttcttctttttgagacagagtcttgctctgttgccacgctggagtgcagtggtgtgatctcggctcactgcaacctcccgctcccaggttcaagcaagtcccctgagtagctgggactacaggcgtgtgccaccacatccggctaattttttgcattctttaatagagacggggttttgccatgttggccaggatggtctcaatctcctgacctcatgatccacctgcctcagcctcccaaagtgctggggttacaggcatgagccaccacgcccagccttttttttttttttttttttttcttgagagacagggtcttgctctgtcacccaggcacagcttactgcagccttgaactcctgggatcaatcagtcctcctgcctcagcctcccgagtagctaagactaacaggtatgtaccaccatgcctggtttattgttttatttttttggcagagatgggtctcactgtgttgcccaggctgatctcaaactcctggcctcaagcgatcctcccatctcagcctcccaaagtgctgggattacagacctgagccaccacacctgggcaacagagtgaaacctgtccctgttttcctgctcttactctcacctctgaggcctcctctgcctggaagagattacagggaaattccaggcagcccttgtcaattgtttttatgaattctttacctgttccttttaaagacaaggaaactgaggcccaaagttctaagttgtttggcaaatggagtctcctaccctcagctcctgcaaggacctgggggacccccaggtccagcagccacatgattctgcagcagacagggacctagagcacatctggatctcagccccacccctggcaacctgcctgcctagagaactcccaagatgacagactaagtaggattctgccatttagaataattctggtatcctgggcgttgcgttaagttgcttaactttcattctgtcttacgatagtcttcagaggtgggaacagatgaagaaaccatgccccagagaaggttaagtgacttcctctttatggagccagtgttccaacctaggtttgcctgataccagacctgtggccccacctcccatgcaggtctctgtggggtctttgggatggatctcctagggctgggctggaagcctcatgtactgttgtcttctaggtaaccaccctgaagagaaggggtggcatcaggaaccgcagggaaccaagcagcctttggtccagtgctgctccttggaacagttgagtgtggcctcaaaccattctcctgggtagctcagtcataaaacaccgaatgcctgcctcaaaatagcctctgagggaagggagctgttgacaagtgaagccctcaggttgtgtgggattccagcaggttattacagcttgtggggggagggagggtccattccaccagctttgaatcccagggtcccctcagcttcactgggccacagtgtctgtcccaggaagaagcaaatggacagtgaggatgatggagagactacagctgccttgtctaaaacctgggatcttaaaagtgttattttggcttttattttttaaaaaaagaaaaaanaaaaaaaaaaaaaaaaaatttttggg

SEQ ID NO: 323793 - DNA, 425 bp, Homo sapiens
  misc_feature (399)..(399): n is a, c, g, or t
tcgatacccagctgagtccatctcaatattcaatcctcgactgcgctaccactaaaatagctactaaggaaaaggaagactataaacaagataaagaccctcaggttgtgtgggattccagcaggttattacagcttgtggggggagggagggtccattccaccagctttgaatcccagggtcccctcagcttcactgggccacagtgtctgtcccaggaagaagcaaatggacagtgaggatgatggagagactacagctgccttgtctaaaacctgggatcttaaaagtgttattttggcttttattttttaaaaaaagaaaaggaaaattggcaattgtattaatccattctcgaattgctgtaaagaaatacctgagactgggtaatttaataanaaaaaaaaaaaaaaaaaatttttggg

SEQ ID NO: 323794 - DNA, 227 bp, Homo sapiens
ccctgagccctcgagcagggcggatcggccgctgcctgcttaaagctggggccgccaggagtgcgatcgcctgcggatctgcagctgggcaccggccgcaacgcccgccccgcgacggcagggactgaagggactcctgaatgtccgcgggacgtgtcgcggcggcgcccagcacggaggaggcaggcagggagggattcccacccagtgccacgtgagaacacagg

SEQ ID NO: 323795 - DNA, 1482 bp, Homo sapiens
ggagggctcccgggacagccctcggagaaactgcatcatcctcactaatgatccacttcctcctcagggaataaaggctcagggaccggcagttctactctggagcccaccagcctctcagagcctccggtgactggcctgtgtctccccctggatggacatgtggacggcgctgctcatcctgcaagccttgttgctaccctccctggctgatggtgccacccctgccctgcgctttgtagccgtgggtgactggggaggggtccccaatgccccattccacacggcccgggaaatggccaatgccaaggagatcgctcggactgtgcagatcctgggtgcagacttcatcctgtctctaggggacaatttttacttcactggtgtgcaagacatcaatgacaagaggttccaggagacctttgaggacgtattctctgaccgctcccttcgcaaagtgccctggtacgtgctagccggaaaccatgaccaccttggcaatgtctctgcccagattgcatactctaagatctccaagcgctggaacttccccagccctttctaccgcctgcacttcaagatcccacagaccaatgtgtctgtggccatttttatgctggacacagtgacactatgtggcaactcagatgacttcctcagccagcagcctgagaggccccgagacgtgaagctggcccgcacacagctgtcctggctcaagaaacagctggcggcggccagggaggactacgtgctggtggctggccactaccccgtgtggtccatagccgagcacgggcctacccactgcctggtcaagcagctacggccactgctggccacatacggggtcactgcctacctgtgcggccacgatcacaatctgcagtacctgcaagatgagaatggcgtgggctacgtgctgagtggggctgggaatttcatggacccctcaaagcggcaccagcgcaaggtccccaacggctatctgcgcttccactatgggactgaagactcactgggtggctttgcctatgtggagatcagctccaaagagatgactgtcacttacatcgaggcctcgggcaagtccctctttaagaccaggctgccgaggcgagccaggccctgaactcccatgactgcccagctctgaggcccgatctccactgttgggtgggtgggccctgccgggaccctgctcacaggcaggcttttcctccaacctgtggcgctgcagcagggcaggaaggggaaacacagctgatgaactgtggtgccacatgacccttgtggcacagatgcccacgtatgtgaaacacacatggacatgtgtcccagccacagtgttatgctctgtggctggctcacctttgctgagttccggggtgcaatgggggagggagggagggaaagcttcctcctaaatcaagcatctttctgttactgatgttcaataaaagaatagttgccaaggctgaa

SEQ ID NO: 323796 - DNA, 1609 bp, Homo sapiens
ccctgagccctcgagcagggcggatcggccgctgcctgcttaaagctggggccgccaggagtgcgatcgcctgcggatctgcagctgggcaccggccgcaacgcccgccccgcgacggcagggactgaagggactcctgaatgtccgcgggacgtgtcgcggcggcgcccagcacggaggaggcaggcagggagggaataaaggctcagggaccggcagttctactctggagcccaccagcctctcagagcctccggtgactggcctgtgtctccccctggatggacatgtggacggcgctgctcatcctgcaagccttgttgctaccctccctggctgatggtgccacccctgccctgcgctttgtagccgtgggtgactggggaggggtccccaatgccccattccacacggcccgggaaatggccaatgccaaggagatcgctcggactgtgcagatcctgggtgcagacttcatcctgtctctaggggacaatttttacttcactggtgtgcaagacatcaatgacaagaggttccaggagacctttgaggacgtattctctgaccgctcccttcgcaaagtgccctggtacgtgctagccggaaaccatgaccaccttggcaatgtctctgcccagattgcatactctaagatctccaagcgctggaacttccccagccctttctaccgcctgcacttcaagatcccacagaccaatgtgtctgtggccatttttatgctggacacagtgacactatgtggcaactcagatgacttcctcagccagcagcctgagaggccccgagacgtgaagctggcccgcacacagctgtcctggctcaagaaacagctggcggcggccagggaggactacgtgctggtggctggccactaccccgtgtggtccatagccgagcacgggcctacccactgcctggtcaagcagctacggccactgctggccacatacggggtcactgcctacctgtgcggccacgatcacaatctgcagtacctgcaagatgagaatggcgtgggctacgtgctgagtggggctgggaatttcatggacccctcaaagcggcaccagcgcaaggtccccaacggctatctgcgcttccactatgggactgaagactcactgggtggctttgcctatgtggagatcagctccaaagagatgactgtcacttacatcgaggcctcgggcaagtccctctttaagaccaggctgccgaggcgagccaggccctgaactcccatgactgcccagctctgaggcccgatctccactgttgggtgggtgggccctgccgggaccctgctcacaggcaggcttttcctccaacctgtggcgctgcagcagggcaggaaggggaaacacagctgatgaactgtggtgccacatgacccttgtggcacagatgcccacgtatgtgaaacacacatggacatgtgtcccagccacagtgttatgctctgtggctggctcacctttgctgagttccggggtgcaatgggggagggagggagggaaagcttcctcctaaatcaagcatctttctgttactgatgttcaataaaagaatagttgccaaggctgaa

SEQ ID NO: 323797 - DNA, 1476 bp, Homo sapiens
gcctcgcaggctcagcatacatgtctgcagcaacaccatcaggtacagagccgaggcccagggaataaaggctcagggaccggcagttctactctggagcccaccagcctctcagagcctccggtgactggcctgtgtctccccctggatggacatgtggacggcgctgctcatcctgcaagccttgttgctaccctccctggctgatggtgccacccctgccctgcgctttgtagccgtgggtgactggggaggggtccccaatgccccattccacacggcccgggaaatggccaatgccaaggagatcgctcggactgtgcagatcctgggtgcagacttcatcctgtctctaggggacaatttttacttcactggtgtgcaagacatcaatgacaagaggttccaggagacctttgaggacgtattctctgaccgctcccttcgcaaagtgccctggtacgtgctagccggaaaccatgaccaccttggcaatgtctctgcccagattgcatactctaagatctccaagcgctggaacttccccagccctttctaccgcctgcacttcaagatcccacagaccaatgtgtctgtggccatttttatgctggacacagtgacactatgtggcaactcagatgacttcctcagccagcagcctgagaggccccgagacgtgaagctggcccgcacacagctgtcctggctcaagaaacagctggcggcggccagggaggactacgtgctggtggctggccactaccccgtgtggtccatagccgagcacgggcctacccactgcctggtcaagcagctacggccactgctggccacatacggggtcactgcctacctgtgcggccacgatcacaatctgcagtacctgcaagatgagaatggcgtgggctacgtgctgagtggggctgggaatttcatggacccctcaaagcggcaccagcgcaaggtccccaacggctatctgcgcttccactatgggactgaagactcactgggtggctttgcctatgtggagatcagctccaaagagatgactgtcacttacatcgaggcctcgggcaagtccctctttaagaccaggctgccgaggcgagccaggccctgaactcccatgactgcccagctctgaggcccgatctccactgttgggtgggtgggccctgccgggaccctgctcacaggcaggcttttcctccaacctgtggcgctgcagcagggcaggaaggggaaacacagctgatgaactgtggtgccacatgacccttgtggcacagatgcccacgtatgtgaaacacacatggacatgtgtcccagccacagtgttatgctctgtggctggctcacctttgctgagttccggggtgcaatgggggagggagggagggaaagcttcctcctaaatcaagcatctttctgttactgatgttcaataaaagaatagttgccaaggctgaa

SEQ ID NO: 323798 - DNA, 1576 bp, Homo sapiens
acctccagaagcacctagcagagctgaatcaccagaagcagctggagtccaataagatcccagagctggacatgactgaggtggtggcccccttcatggccaacatccctctcctcctctaccctcaggacggcccccgcagcaagccccagccaaaggataatggggacgtttgccaggactgcattcagatggtgactgacatccagactgctgtacggaccaactccacctttgtccaggccttgatggacatgtggacggcgctgctcatcctgcaagccttgttgctaccctccctggctgatggtgccacccctgccctgcgctttgtagccgtgggtgactggggaggggtccccaatgccccattccacacggcccgggaaatggccaatgccaaggagatcgctcggactgtgcagatcctgggtgcagacttcatcctgtctctaggggacaatttttacttcactggtgtgcaagacatcaatgacaagaggttccaggagacctttgaggacgtattctctgaccgctcccttcgcaaagtgccctggtacgtgctagccggaaaccatgaccaccttggcaatgtctctgcccagattgcatactctaagatctccaagcgctggaacttccccagccctttctaccgcctgcacttcaagatcccacagaccaatgtgtctgtggccatttttatgctggacacagtgacactatgtggcaactcagatgacttcctcagccagcagcctgagaggccccgagacgtgaagctggcccgcacacagctgtcctggctcaagaaacagctggcggcggccagggaggactacgtgctggtggctggccactaccccgtgtggtccatagccgagcacgggcctacccactgcctggtcaagcagctacggccactgctggccacatacggggtcactgcctacctgtgcggccacgatcacaatctgcagtacctgcaagatgagaatggcgtgggctacgtgctgagtggggctgggaatttcatggacccctcaaagcggcaccagcgcaaggtccccaacggctatctgcgcttccactatgggactgaagactcactgggtggctttgcctatgtggagatcagctccaaagagatgactgtcacttacatcgaggcctcgggcaagtccctctttaagaccaggctgccgaggcgagccaggccctgaactcccatgactgcccagctctgaggcccgatctccactgttgggtgggtgggccctgccgggaccctgctcacaggcaggcttttcctccaacctgtggcgctgcagcagggcaggaaggggaaacacagctgatgaactgtggtgccacatgacccttgtggcacagatgcccacgtatgtgaaacacacatggacatgtgtcccagccacagtgttatgctctgtggctggctcacctttgctgagttccggggtgcaatgggggagggagggagggaaagcttcctcctaaatcaagcatctttctgttactgatgttcaataaaagaatagttgccaaggctgaa

SEQ ID NO: 323799 - DNA, 1167 bp, Homo sapiens
gcgccgggagcattcagtgtctcccttatcctgacttggtgggaggatcggcatagccactgaccccagggaagaggcctgccctatctgtttgctacaggagacctttgaggacgtattctctgaccgctcccttcgcaaagtgccctggtacgtgctagccggaaaccatgaccaccttggcaatgtctctgcccagattgcatactctaagatctccaagcgctggaacttccccagccctttctaccgcctgcacttcaagatcccacagaccaatgtgtctgtggccatttttatgctggacacagtgacactatgtggcaactcagatgacttcctcagccagcagcctgagaggccccgagacgtgaagctggcccgcacacagctgtcctggctcaagaaacagctggcggcggccagggaggactacgtgctggtggctggccactaccccgtgtggtccatagccgagcacgggcctacccactgcctggtcaagcagctacggccactgctggccacatacggggtcactgcctacctgtgcggccacgatcacaatctgcagtacctgcaagatgagaatggcgtgggctacgtgctgagtggggctgggaatttcatggacccctcaaagcggcaccagcgcaaggtccccaacggctatctgcgcttccactatgggactgaagactcactgggtggctttgcctatgtggagatcagctccaaagagatgactgtcacttacatcgaggcctcgggcaagtccctctttaagaccaggctgccgaggcgagccaggccctgaactcccatgactgcccagctctgaggcccgatctccactgttgggtgggtgggccctgccgggaccctgctcacaggcaggcttttcctccaacctgtggcgctgcagcagggcaggaaggggaaacacagctgatgaactgtggtgccacatgacccttgtggcacagatgcccacgtatgtgaaacacacatggacatgtgtcccagccacagtgttatgctctgtggctggctcacctttgctgagttccggggtgcaatgggggagggagggagggaaagcttcctcctaaatcaagcatctttctgttactgatgttcaataaaagaatagttgccaaggctgaa

SEQ ID NO: 323800 - DNA, 988 bp, Homo sapiens
ccctgagccctcgagcagggcggatcggccgctgcctgcttaaagctggggccgccaggagtgcgatcgcctgcggatctgcagctgggcaccggccgcaacgcccgccccgcgacggcagggctgggaatgggggggaccaagcacttcgcagggtgacccggggagatctgtgagccagtggcctcagcgttgaatgagagctctctcccgggtccgcgctcgcagggactgaagggactcctgaatgtccgcgggacgtgtcgcggcggcgcccagcacggaggaggcaggcagggagggaataaaggctcagggaccggcagttctactctggagcccaccagcctctcagagcctccggtgactggcctgtgtctccccctggatggacatgtggacggcgctgctcatcctgcaagccttgttgctaccctcctgggaatttcatggacccctcaaagcggcaccagcgcaaggtccccaacggctatctgcgcttccactatgggactgaagactcactgggtggctttgcctatgtggagatcagctccaaagagatgactgtcacttacatcgaggcctcgggcaagtccctctttaagaccaggctgccgaggcgagccaggccctgaactcccatgactgcccagctctgaggcccgatctccactgttgggtgggtgggccctgccgggaccctgctcacaggcaggcttttcctccaacctgtggcgctgcagcagggcaggaaggggaaacacagctgatgaactgtggtgccacatgacccttgtggcacagatgcccacgtatgtgaaacacacatggacatgtgtcccagccacagtgttatgctctgtggctggctcacctttgctgagttccggggtgcaatgggggagggagggagggaaagcttcctcctaaatcaagcatctttctgttactgatgttcaataaaagaatagttgccaaggctgaa

SEQ ID NO: 323801 - DNA, 818 bp, Homo sapiens
ccctgagccctcgagcagggcggatcggccgctgcctgcttaaagctggggccgccaggagtgcgatcgcctgcggatctgcagctgggcaccggccgcaacgcccgccccgcgacggcagggactgaagggactcctgaatgtccgcgggacgtgtcgcggcggcgcccagcacggaggaggcaggcagggagggaataaaggctcagggaccggcagttctactctggagcccaccagcctctcagagcctccggtgactggcctgtgtctccccctggatggacatgtggacggcgctgctcatcctgcaagccttgttgctaccctccctggctgatggtgccacccctgccctgcgctttgtagccgtgggtgactggggaggggtccccaatgccccattccacacggcccgggaaatggccaatgccaaggagatcgctcggactgtgcagatcctgggtgcagacttcatcctgtctctaggggacaatttttacttcactggtgtgcaagacatcaatgacaagaggttccaggagacctttgaggacgtattctctgaccgctcccttcggcaggaaggggaaacacagctgatgaactgtggtgccacatgacccttgtggcacagatgcccacgtatgtgaaacacacatggacatgtgtcccagccacagtgttatgctctgtggctggctcacctttgctgagttccggggtgcaatgggggagggagggagggaaagcttcctcctaaatcaagcatctttctgttactgatgttcaataaaagaatagttgccaaggctgaa

SEQ ID NO: 323802 - DNA, 1536 bp, Homo sapiens
ccctgagccctcgagcagggcggatcggccgctgcctgcttaaagctggggccgccaggagtgcgatcgcctgcggatctgcagctgggcaccggccgcaacgcccgccccgcgacggcagggaataaaggctcagggaccggcagttctactctggagcccaccagcctctcagagcctccggtgactggcctgtgtctccccctggatggacatgtggacggcgctgctcatcctgcaagccttgttgctaccctccctggctgatggtgccacccctgccctgcgctttgtagccgtgggtgactggggaggggtccccaatgccccattccacacggcccgggaaatggccaatgccaaggagatcgctcggactgtgcagatcctgggtgcagacttcatcctgtctctaggggacaatttttacttcactggtgtgcaagacatcaatgacaagaggttccaggagacctttgaggacgtattctctgaccgctcccttcgcaaagtgccctggtacgtgctagccggaaaccatgaccaccttggcaatgtctctgcccagattgcatactctaagatctccaagcgctggaacttccccagccctttctaccgcctgcacttcaagatcccacagaccaatgtgtctgtggccatttttatgctggacacagtgacactatgtggcaactcagatgacttcctcagccagcagcctgagaggccccgagacgtgaagctggcccgcacacagctgtcctggctcaagaaacagctggcggcggccagggaggactacgtgctggtggctggccactaccccgtgtggtccatagccgagcacgggcctacccactgcctggtcaagcagctacggccactgctggccacatacggggtcactgcctacctgtgcggccacgatcacaatctgcagtacctgcaagatgagaatggcgtgggctacgtgctgagtggggctgggaatttcatggacccctcaaagcggcaccagcgcaaggtccccaacggctatctgcgcttccactatgggactgaagactcactgggtggctttgcctatgtggagatcagctccaaagagatgactgtcacttacatcgaggcctcgggcaagtccctctttaagaccaggctgccgaggcgagccaggccctgaactcccatgactgcccagctctgaggcccgatctccactgttgggtgggtgggccctgccgggaccctgctcacaggcaggcttttcctccaacctgtggcgctgcagcagggcaggaaggggaaacacagctgatgaactgtggtgccacatgacccttgtggcacagatgcccacgtatgtgaaacacacatggacatgtgtcccagccacagtgttatgctctgtggctggctcacctttgctgagttccggggtgcaatgggggagggagggagggaaagcttcctcctaaatcaagcatctttctgttactgatgttcaataaaagaatagttgccaaggctgaa

SEQ ID NO: 323803 - DNA, 1716 bp, Homo sapiens
ccctgagccctcgagcagggcggatcggccgctgcctgcttaaagctggggccgccaggagtgcgatcgcctgcggatctgcagctgggcaccggccgcaacgcccgccccgcgacggcagggctgggaatgggggggaccaagcacttcgcagggtgacccggggagatctgtgagccagtggcctcagcgttgaatgagagctctctcccgggtccgcgctcgcagggactgaagggactcctgaatgtccgcgggacgtgtcgcggcggcgcccagcacggaggaggcaggcagggagggaataaaggctcagggaccggcagttctactctggagcccaccagcctctcagagcctccggtgactggcctgtgtctccccctggatggacatgtggacggcgctgctcatcctgcaagccttgttgctaccctccctggctgatggtgccacccctgccctgcgctttgtagccgtgggtgactggggaggggtccccaatgccccattccacacggcccgggaaatggccaatgccaaggagatcgctcggactgtgcagatcctgggtgcagacttcatcctgtctctaggggacaatttttacttcactggtgtgcaagacatcaatgacaagaggttccaggagacctttgaggacgtattctctgaccgctcccttcgcaaagtgccctggtacgtgctagccggaaaccatgaccaccttggcaatgtctctgcccagattgcatactctaagatctccaagcgctggaacttccccagccctttctaccgcctgcacttcaagatcccacagaccaatgtgtctgtggccatttttatgctggacacagtgacactatgtggcaactcagatgacttcctcagccagcagcctgagaggccccgagacgtgaagctggcccgcacacagctgtcctggctcaagaaacagctggcggcggccagggaggactacgtgctggtggctggccactaccccgtgtggtccatagccgagcacgggcctacccactgcctggtcaagcagctacggccactgctggccacatacggggtcactgcctacctgtgcggccacgatcacaatctgcagtacctgcaagatgagaatggcgtgggctacgtgctgagtggggctgggaatttcatggacccctcaaagcggcaccagcgcaaggtccccaacggctatctgcgcttccactatgggactgaagactcactgggtggctttgcctatgtggagatcagctccaaagagatgactgtcacttacatcgaggcctcgggcaagtccctctttaagaccaggctgccgaggcgagccaggccctgaactcccatgactgcccagctctgaggcccgatctccactgttgggtgggtgggccctgccgggaccctgctcacaggcaggcttttcctccaacctgtggcgctgcagcagggcaggaaggggaaacacagctgatgaactgtggtgccacatgacccttgtggcacagatgcccacgtatgtgaaacacacatggacatgtgtcccagccacagtgttatgctctgtggctggctcacctttgctgagttccggggtgcaatgggggagggagggagggaaagcttcctcctaaatcaagcatctttctgttactgatgttcaataaaagaatagttgccaaggctgaa

SEQ ID NO: 323804 - DNA, 1702 bp, Homo sapiens
ccctgagccctcgagcagggcggatcggccgctgcctgcttaaagctggggccgccaggagtgcgatcgcctgcggatctgcagctgggcaccggccgcaacgcccgccccgcgacggcagggaataaaggctcagggaccggcagttctactctggagcccaccagcctctcagagcctccggtgactggcctgtgtctccccctggatggacatgtggacggcgctgctcatcctgcaagccttgttgctaccctccctggctgatggtgccacccctgccctgcgctttgtagccgtgggtgactggggaggggtccccaatgccccattccacacggcccgggaaatggccaatgccaaggagatcgctcggactgtgcagatcctgggtgcagacttcatcctgtctctaggggacaatttttacttcactggtgtgcaagacatcaatgacaagaggttccaggagacctttgaggacgtattctctgaccgctcccttcgcaaagtgccctggtacgtgctagccggaaaccatgaccaccttggcaatgtctctgcccagattgcatactctaagatctccaagcgctggaacttccccagccctttctaccgcctgcacttcaagatcccacagaccaatgtgtctgtggccatttttatgctggacacagtgacactatgtggcaactcagatgacttcctcagccagcagcctgagaggccccgagacgtgaagctggcccgcacacagctgtcctggctcaagaaacagctggcggcggccagggaggactacgtgctggtggctggccactaccccgtgtggtccatagccgagcacgggcctacccactgcctggtcaagcagctacggccactgctggccacatacggggtcactgcctacctgtgcggccacgatcacaatctgcagtacctgcaagatgagaatggcgtgggctacgtgctgagtggggctgggaatttcatggacccctcaaagcggcaccagcgcaaggtccccaacggctatctgcgcttccactatgggactgaagactcactgggtggctttgcctatgtggagatcagctccaaagagatgactgtcacttacatcgaggcctcgggcaagtccctctttaagaccaggctgccgaggcgagccaggccctgaactcccatgactgcccagctctgaggcccgatctccactgttgggtgggtgggccctgccgggaccctgctcacaggcaggcttttcctccaacctgtggcgctgcagcagggcaggaaggggaaacacagctgatgaactgtggtgccacatgacccttgtggcacagatgcccacgtatgtgaaacacacatggacatgtgtcccagccacagtgttatgctctgtggctggctcacctttgctgagttccggggtgcaatgggggagggagggagggaaagcttcctcctaaatcaagcatctttctgttactgatgttcaataaaagaatagttgccaaggctgaaaaaaaaaaccccaacaacagcaaaaataaaacaacccagaaaaatagacacaggcgggggcggcaggaacccggaatgacatcgcgcgcgagagagggccggcacagcgccctcccatgtggcgccagcggggcggacgatgtgcgagccaggatcgcccgccggg

SEQ ID NO: 323805 - DNA, 1473 bp, Homo sapiens
  misc_feature (14)..(14): n is a, c, g, or t
  misc_feature (26)..(26): n is a, c, g, or t
  misc_feature (28)..(28): n is a, c, g, or t
  misc_feature (38)..(38): n is a, c, g, or t
  misc_feature (40)..(40): n is a, c, g, or t
  misc_feature (45)..(45): n is a, c, g, or t
  misc_feature (57)..(57): n is a, c, g, or t
  misc_feature (59)..(59): n is a, c, g, or t
aggaccaattttantagtgtaacacnanatgaaaccangncgtgngttttaaaaaananagccggtgtcgtcgaatctggataagtcaggacgcagtctactctgagccacagctctcagactcggtgactgctgtgtctccctgatggacatgtggacggcgctgctcatcctgcaagccttgttgctaccctccctggctgatggtgccacccctgccctgcgctttgtagccgtgggtgactggggaggggtccccaatgccccattccacacggcccgggaaatggccaatgccaaggagatcgctcggactgtgcagatcctgggtgcagacttcatcctgtctctaggggacaatttttacttcactggtgtgcaagacatcaatgacaagaggttccaggagacctttgaggacgtattctctgaccgctcccttcgcaaagtgccctggtacgtgctagccggaaaccatgaccaccttggcaatgtctctgcccagattgcatactctaagatctccaagcgctggaacttccccagccctttctaccgcctgcacttcaagatcccacagaccaatgtgtctgtggccatttttatgctggacacagtgacactatgtggcaactcagatgacttcctcagccagcagcctgagaggccccgagacgtgaagctggcccgcacacagctgtcctggctcaagaaacagctggcggcggccagggaggactacgtgctggtggctggccactaccccgtgtggtccatagccgagcacgggcctacccactgcctggtcaagcagctacggccactgctggccacatacggggtcactgcctacctgtgcggccacgatcacaatctgcagtacctgcaagatgagaatggcgtgggctacgtgctgagtggggctgggaatttcatggacccctcaaagcggcaccagcgcaaggtccccaacggctatctgcgcttccactatgggactgaagactcactgggtggctttgcctatgtggagatcagctccaaagagatgactgtcacttacatcgaggcctcgggcaagtccctctttaagaccaggctgccgaggcgagccaggccctgaactcccatgactgcccagctctgaggcccgatctccactgttgggtgggtgggccctgccgggaccctgctcacaggcaggcttttcctccaacctgtggcgctgcagcagggcaggaaggggaaacacagctgatgaactgtggtgccacatgacccttgtggcacagatgcccacgtatgtgaaacacacatggacatgtgtcccagccacagtgttatgctctgtggctggctcacctttgctgagttccggggtgcaatgggggagggagggagggaaagcttcctcctaaatcaagcatctttctgttactgatgttcaataaaagaatagttgccaaggctgaa

SEQ ID NO: 323806 - DNA, 148 bp, Homo sapiens
tttgtacatgtgatattttattcatagaatccataaatggaagggaaatttctgagttcagagcaatacatatgatacaaaacttgatatatagactagagtttcttagccgaactggaggggctggcttaggtaatccatggattcc

SEQ ID NO: 323807 - DNA, 894 bp, Homo sapiens
ggagacgagatagagaactactctggacatactgtcataagtttgtggacgcagcttgtcttgagcagcgatacatatgcgaagtcacgtgaaacatgcggggacatcagtccctgtgcggtggagcgagcaagtacatgttcgacttcctggatgagcaggccgacaagcaccagatccacgatgctgacgtgcgccacacctggaagagcaactgcctgcccctgcgcttctgggtgaacgtgatcaagaacccacagtttgtgttcgacattcacaagaacagcatcacggacgcctgcttgtcggtggtggcccagaccttcatggactcctgctccacctctgagcacaagctgggcaaggactcaccctccaacaagctgctctacgccaaggacatccccaactacaagagctgggtggagaggtactatgcagacatcgccaagatgccagccatcagcgaccaggacatgagtgcgtatctggctgagcagtcccgcctgcacctgagccagttcaacagcatgagcgccttgcacgagatctactcctacatcaccaagtacaaggatgagatccctggcagccctggagaaggatgaaggaaggcgctggaggcagcaggattgcagacgcaaagctggagcagggtcggaggaaacgaaaggacctaaaacaagtagaaccccagaatgtgatcaatccaagcaatgaagacagcgataagggaacagtggagcaacagaccaggggacaaaccataaacccatgcatggtgaaatgcacggaggtagcacagagcagccgaaacaacacaagcaagacccctccacgacataaccggacaaaaccgacatcagagtagaagctagactagcaacaagaaac

SEQ ID NO: 323808 - DNA, 440 bp, Homo sapiens
  misc_feature (13)..(13): n is a, c, g, or t
  misc_feature (43)..(43): n is a, c, g, or t
  misc_feature (48)..(48): n is a, c, g, or t
  misc_feature (53)..(53): n is a, c, g, or t
  misc_feature (55)..(55): n is a, c, g, or t
ccatcacagagcnctagccgcccccgggcctttacacatttcnccaantgccncncattgctctctcactgttgttaggggtccactaattcctcctcttcctcttcctcctcctcaggatctccggattcggtaagcatcttttgctcgtcctccagtcccatgtctggctacggttctagattcaacacgagcagcaacagcggcccacaattagctgtcctttaacaccgcagaaccccctcccagaagaagagcgatccctcggacggtccgggcgggcaccctcagccgggctctttgcagaagcagcaccgctgactgtgggcccggccctcagatgtgtacatatacggctatttcctattttactgttcttcagatttagtacttgtaaataaacacacacattaaggagagattaaacatttttgctaaaa

SEQ ID NO: 323809 - DNA, 9205 bp, Homo sapiens
  misc_feature (72)..(72): n is a, c, g, or t
  misc_feature (98)..(98): n is a, c, g, or t
  misc_feature (264)..(264): n is a, c, g, or t
  misc_feature (354)..(354): n is a, c, g, or t
  misc_feature (847)..(847): n is a, c, g, or t
  misc_feature (952)..(952): n is a, c, g, or t
  misc_feature (958)..(958): n is a, c, g, or t
  misc_feature (1154)..(1154): n is a, c, g, or t
  misc_feature (1315)..(1315): n is a, c, g, or t
  misc_feature (1444)..(1444): n is a, c, g, or t
  misc_feature (3727)..(3727): n is a, c, g, or t
gggcatgtgggctgaggcaggcttgcccagggcaggcgggggttcacagccccccttccgcaccttctcggncagcgactggggcctcacccacctantggtgcatgagcagacaggcgaggtgtatgtgggcgcagtgaaccgcatctataagctgtcggggaacctgacactgctgcgggcccacgtcacgggccctgtggaggacaacgagaagtgctacccgccgcccagcgtgcagtcctgcccccacggcctgggcantactgacaacgtcaacaagctgctgctgctggactatgccgctaaccgcctgctggcctgtggcagcgcctcccagggcatctgccagtncctgcgtctggacgatctcttcaaactgggtgagccacaccaccgtaaggagcactacctgtccagcgtgcaggaggcaggcagcatggcgggcgtgctcattgccgggccaccgggccagggccaggccaagctcttcgtgggcacacccatcgatggcaagtccgagtacttccccacactgtccagccgtcggctcatggccaacgaggaggatgccgacatgttcggcttcgtgtaccaggatgagtttgtgtcatcacagctcaagatcccttcggacacgctgtccaagttcccggcctttgacatctactatgtgtacagcttccgcagcgagcagtttgtctactacctcacgctgcagctagacacacagctgacctcgcctgatgccgccggcgagcacttcttcacgtccaagatcgtgcggctctgtgtggacgaccccaaattctactcgtacgttgagttccccattggctgcgagcangcgggtgtggagtaccgcctggtgcaggatgcctacctgagccggcccggccgtgccctggcccaccagctgggcctggctgaggacgaggacgtgctgttcacngtgttngcccagggccagaagaaccgcgtgaagccaccaaaggagtcagcactgtgcctgttcacgctcagggccatcaaggagaagattaaggagcgcatccagtcctgctaccgtggtgagggcaagctctccctgccgtggctgctcaacaaggagctgggctgcatcaactcgcccctgcagatcgatgacgacttcngcgggcaggacttcaaccagcccctggggggcacagtcaccattgaggggacgcccctgttcgtggacaaggatgatggcctgaccgccgtggctgcctatgactatcggggccgcactgtggtattcgccggcacgcgaagtggccgcatccgcaagatnctggtggacctctcaaaccccggtggccggcctgccctggcctacgagagcgtcgtggcccaggagggcagccccatcctgcgagacctcgtcctcagccccaaccaccagtacctctacgccatgacngagaagcaggtgacgcgggtgcctgtggagagctgtgtgcagtacacgtcctgtgagctgtgtctggggtcacgggacccccactgtggctggtgtgtcctgcacagcatctgctcgcggcgggacgcctgtgagcgagcagacgagccccagcgctttgctgcggacctgctgcagtgtgtgcagctgactgtgcagccccgcaatgtgtctgtcaccatgtcccaggtcccacttgtgctgcaggcctggaacgtgcctgacctctcagctggcgtcaactgctccttcgaggacttcacggaatctgagagcgtcctggaggatggccggatccactgccgctcaccctccgcccgggaggtggcgcccatcacgcggggccagggagaccagcgggtggtgaaactctacctaaagtccaaggagacagggaagaagtttgcgtctgtggacttcgtcttctacaactgcagcgtccaccagtcctgcctgtcctgtgtcaacggctcctttccctgccactggtgcaaataccgccacgtgtgcacacacaacgtggctgactgcgccttcctggagggccgtgtcaacgtgtctgaggactgcccacagatcctgccctccacgcagatctacgtgccagtgggagtggtaaaacccatcaccctggccgcacggaacctgccacagccacagtcaggccagcgtggatatgagtgcctcttccacatcccgggcagcccggcccgtgtcaccgccctgcgcttcaacagctccagcctgcagtgccagaattcctcgtactcctacgaggggaacgatgtcagcgacctgccagtgaacctgtcagtcgtgtggaacggcaactttgtcattgacaacccacagaacatccaggcgcacctctacaagtgcccggccctgcgcgagagctgcggcctctgcctcaaggccgacccgcgcttcgagtgcggatggtgcgtggccgagcgccgctgctccctgcgacaccactgcgctgccgacacacctgcatcgtggatgcacgcgcgtcacggcagcagtcgctgcaccgaccccaagatcctcaagctgtcccccgagacgggcccgaggcagggcggcacgcggctcactatcacaggcgagaacctgggcctgcgattcgaagacgtgcgtctgggcgtgcgcgtgggcaaggtgctgtgcagccctgtggagagcgagtacatcagtgcggagcagatcgtctgtgagatcggggacgccagctccgtgcgtgcccatgacgccctggtggaggtgtgtgtgcgggactgctcaccacactaccgcgccctgtcacccaagcgcttcaccttcgtgacaccaaccttctaccgtgtgagcccctcccgtgggcctctgtcagggggcacctggattggcatcgagggaagccacctgaacgcaggcagtgatgtggctgtgtcggtcggtggccggccctgctccttctcctggaggaactcccgtgagatccggtgcctgacaccccccgggcagagccctggcagcgctcccatcatcatcaacatcaaccgcgcccagctcaccaaccctgaggtgaagtacaactacaccgaggaccccaccatcctgaggatcgaccccgagtggagcatcaacagcggtgggaccctcctgacggtcacaggcaccaacctggccactgtccgtgaaccccgaatccgggccaagtatggaggcattgagagggagaacggctgcctggtgtacaatgacaccaccatggtatgccgcgccccgtctgtggccaaccctgtgcgcagcccaccagagctgggggagcggccggatgagctgggcttcgtcatggacaacgtgcgctccctgcttgtgctcaactccacctccttcctctactaccctgaccccgtactggagccactcagccccactggcctgctggagctgaagcccagctccccactcatcctcaagggccggaacctcttgccacctgcacccggcaactcccgactcaactacacggtgctcatcggctccacaccctgtaccctcaccgtgtcggagacgcaactgctgtgcgaggcgcccaacctcactgggcagcacaaggtcacggtgcgggcaggtggcttcgagttctcgccagggacactgcaggtgtactcggacagcctgctgacgctgcctgccattgtgggcattggcggaggcgggggtctcctgctgctggtcatcgtggctgtgctnatcgcctacaagcgcaagtcacgagatgctgaccgcacactcaagcggctgcagctccagatggacaacctggagtcccgcgtggccctcgaatgcaaggaagcctttgcagagctgcagacagacatccacgagctgaccaatgacctggacggtgccggcatccccttccttgactaccggacatatgccatgcgggtgctctttcctgggatcgaggaccaccctgtgctcaaggagatggaggtgcaggccaatgtggagaagtcgctgacactgttcgggcagctgctgaccaagaagcacttcctgctgaccttcatccgcacgctggaggcacagcgcagcttctccatgcgcgaccgcgggaatgtggcctcgctcatcatgacggccctgcagggcgagatggaatacgccacaggcgtgctcaagcagctgctttccgacctcatcgagaagaacctggagagcaagaaccaccccaagctgctactgcgccggactgagtcggtggcagagaagatgctaactaactggttcaccttcctcttgtataagttcctcaaggagtgcgctggggagccgctgttcatgctgtactgcgccatcaagcagcagatggagaagggccccattgacgccatcacgggtgaggcacgctactccctgagtgaggacaagctcatccggcagcagattgactacaagacactgaccctgaactgtgtgaaccctgagaatgagaatgcacctgaggtgccggtgaaggggctggactgtgacacggtcacccaggccaaggagaagctgctggacgctgcctacaagggcgtgccctactcccagcggcccaaggccgcggacatggacctggagtggcgccagggccgcatggcgcgcatcatcctgcaggacgaggacgtcaccaccaagattgacaacgattggaagaggctgaacacactggctcactaccaggtgacagacgggtcctcggtggcactggtgcccaagcagacgtccgcctacaacatctccaactcctccaccttcaccaagtccctcagcagatacgagagcatgctgcgcacggccagcagccccgacagcctgcgctcgcgcacgcccatgatcacgcccgacctggagagcggcaccaagctgtggcacctggtgaagaaccacgaccacctggaccagcgtgagggtgaccgcggcagcaagatggtctcggagatctacttgacacggctactggccaccaagggcacactgcagaagtttgtggacgacctgtttgagaccatcttcagcacggcacaccggggctcagccctgccgctggccatcaagtacatgttcgacttcctggatgagcaggccgacaagcaccagatccacgatgctgacgtgcgccacacctggaagagcaactgcctgcccctgcgcttctgggtgaacgtgatcaagaacccacagtttgtgttcgacattcacaagaacagcatcacggacgcctgcttgtcggtggtggcccagaccttcatggactcctgctccacctctgagcacaagctgggcaaggactcaccctccaacaagctgctctacgccaaggacatccccaactacaagagctgggtggagaggtactatgcagacatcgccaagatgccagccatcagcgaccaggacatgagtgcgtatctggctgagcagtcccgcctgcacctgagccagttcaacagcatgagcgccttgcacgagatctactcctacatcaccaagtacaaggatgagatcctggcagccctggagaaggatgagcaggcgcggcggcagcggctgcggagcaagctggagcaggtggtggacacgatggccctgagcagctgagccccagctgtgatcatccagcatgatgcagcgtgaggacagctgagcagggaccgggacagccctcaccgcatgcgtgtggagtgtccggtggtgctcgggccgccgcagtgcagcgactgcccggccctccctcccctgcctcacccggtcgggtcccggctcttcctgtgtggaggtgatggtacctgccacaccacagctgcgcacacagctgcttgctcaggggccgggacagcactgggtgctcaggctggccaaggaccttcattgcctggcaagagctgcccagtggccttcatgggagaagggctgacctctgaggggctgaggggtgaggccagggccctccagggggaggggtagccagcttgggctgtccccttgagaccaggacaagaggctgggggtgtcagcattcccagctttccaagctgcccccaggcggcagagtctgagggtcccggggcccggttggcagctggagaaagaggcaaaaagcccgtagccgggcaagaggagctcaagtcggtctgggcccgttgccaccgactcccacctccagcacccatgcccgctgcaccgctgccatcctcagattcaccgcgtgctctgcgcggccgaggccggagcaccacatccacctcgccccagagaggctctgctccctcctatggaggggctgtgggccaggctgctcagactcctgggtggcttccagacggaccgggcagcccctctccgtcctcagggctgtgcctctgggagccactgggccaggggccccgggtcgcagagagcacgttcccgttatttattcccctccgcgtctacacaggctgccctggcagctgtcttcaagggtaggctgagctccccaccctggagcccctgagggcggcccctgagcactcctctctctccactctctctgtccctgccccagcggcttccagtgtggcatctcagcagtgtcctggcccctccagagcagtgggacatctggggactgtttttgtgtttaggggaaaaaattctgctgcactctgcttgggccttgaggtctgtggcagggctcctctggcccgcagtggcctggatctatctgggccatgagtgacgggcagtgaccagagggactggaggccagcggtgtccacccttgccctcagcaagagagaatgcattcttaaaagaaagctgtacatgtatatatatgcatatatatatatgtggctctagcctcaggctccagccccagtggggtactgtacagttaactgaagaagaattttaaagacgatttgaacaagaaaatgaaggcagtgggaaagcaatgccaaatggttgtggagaaagtggccggagcctccctggagtggagcagccctgaagcctgtgccccccgacctgcgggccgctgttttggtttgacatgacaaggaaaggacttcctgctgaccctgagagcctctggggtgccgcggcaccacggggcatgcatgattgtgctagcgtttagtctgagttgatctttttaaaactgcaagtgttgaatactagaggttgttagacccttttttatgttttttaattaatcagtcacttgtaaaagcaaacaagcggtccatccccttttcaaggtcacttttttgatggtaccgaagatcccatggacattaagggacagctaactgtggccagactcagccccatgtccttggccaggcccaaggagaggactcggccccatggggtgtgccagtcttgcagtccgccccagctgagtagcgtgagccagatgacgccacagagacccgcctcttccctgaacgcgggtcggtgtggagtcagtgactgctgactcagggagctccttggccccgtgggcactgtgccagggctggggccttctgctgctgccacacccagctcaggcctgggccagcccctgcccccagcccactgagggggtgggcttactccctgggcagtcttgggggccagagctgaggccagtccatattacagtggctgggctgtttttttcagtagcccctagcattggctgggattcctgttcctgggtgcgcctccacctcccttctgatgtttcctggctatggtggggtgggaacctcagtttcccccaaagtcttccctggatgctggcttcaggttgaagtccctggttcttccagttcctcacgggttaggtaggggctcctgcatcaccttcagaatccagttccaacccccactctccttaggccttgtgctctgctctgccctgccaggctgcccttgtccatgtgagtagcatgggcgggtggtggggacggcagtggtgatgaagggggtgcaccacaggcctcatgaagcagttcccacatgggcgtgtggctggggcgtggccaccacagagcacatggctgtgtctaggcgcaagcactttagcagtatctgtttacatgcgcaaggatcaagccgactacctgtgctgtctactgggacagcagtctccgagctactccgtacctccctctgccaggtcgtggagttaggccccagtccctacttgtcactggttcccactgtgctcctaactgtgcagcacctgggagctctggcctggggctggaggccctggtaggagctgcagttggaggccgttctgtgcccagcagcggtgagcggctcccatgggccctgtgtctgcagggagccagggctgcggcacatgtgctgtgaaactggcacccacctggcgtgctgctgccgccacttgcttcctgcagcacctcctaccctgctccgtgtcctccctctccccgcgcctggctcaggagtgctggaaaagctcacgcctcggcctgggagcctggcctcttgatatacctcgagcttcccctgtgctccccagccccaggaccactggccccttggcctgaggggctgggggccccacgacctgcagcgtcgagtccgggagagagcccggagcggcgtgccatctcggctcggccttgctgagagcctccgccctggctttctccctgtctggattcagtggctcacgttggtgctacacagctagaatagatatatttagagagagagatatttttaagacaaagcccacaattagctgtcctttaacaccgcagaaccccctcccagaagaagagcgatccctcggacggtccgggcgggcaccctcagccgggctctttgcagaagcagcaccgctgactgtgggcccggccctcagatgtgtacatatacggctatttcctattttactgttcttcagatttagtacttgtaaataaacacacacattaaggagagattaaacatttttgctaaaaaaaaaaaacaaatagaagaaaaaaaccttggttgcgggcgcgcatagagccctcggaaagaggccttcagagaaacaacatccggtggagcgcacgcggggccccaggggaggtaaaggagacacaggggcacaaagaaggggtgacccaagagagaaaacccggggaaccggaaaaagggcacgggagtcccccacacgaataaaca

SEQ ID NO: 323810 - DNA, 6483 bp, Homo sapiens
  misc_feature (1213)..(1213): n is a, c, g, or t
gtaccccagcctctgcctccctcagctgtcccccgagacgggcccgaggcagggcggcacgcggctcactatcacaggcgagaacctgggcctgcgattcgaagacgtgcgtctgggcgtgcgcgtgggcaaggtgctgtgcagccctgtggagagcgagtacatcagtgcggagcagatcgtctgtgagatcggggacgccagctccgtgcgtgcccatgacgccctggtggaggtgtgtgtgcgggactgctcaccacactaccgcgccctgtcacccaagcgcttcaccttcgtgacaccaaccttctaccgtgtgagcccctcccgtgggcctctgtcagggggcacctggattggcatcgagggaagccacctgaacgcaggcagtgatgtggctgtgtcggtcggtggccggccctgctccttctcctggaggaactcccgtgagatccggtgcctgacaccccccgggcagagccctggcagcgctcccatcatcatcaacatcaaccgcgcccagctcaccaaccctgaggtgaagtacaactacaccgaggaccccaccatcctgaggatcgaccccgagtggagcatcaacagcggtgggaccctcctgacggtcacaggcaccaacctggccactgtccgtgaaccccgaatccgggccaagtatggaggcattgagagggagaacggctgcctggtgtacaatgacaccaccatggtatgccgcgccccgtctgtggccaaccctgtgcgcagcccaccagagctgggggagcggccggatgagctgggcttcgtcatggacaacgtgcgctccctgcttgtgctcaactccacctccttcctctactaccctgaccccgtactggagccactcagccccactggcctgctggagctgaagcccagctccccactcatcctcaagggccggaacctcttgccacctgcacccggcaactcccgactcaactacacggtgctcatcggctccacaccctgtaccctcaccgtgtcggagacgcaactgctgtgcgaggcgcccaacctcactgggcagcacaaggtcacggtgcgggcaggtggcttcgagttctcgccagggacactgcaggtgtactcggacagcctgctgacgctgcctgccattgtgggcattggcggaggcgggggtctcctgctgctggtcatcgtggctgtgctnatcgcctacaagcgcaagtcacgagatgctgaccgcacactcaagcggctgcagctccagatggacaacctggagtcccgcgtggccctcgaatgcaaggaagcctttgcagagctgcagacagacatccacgagctgaccaatgacctggacggtgccggcatccccttccttgactaccggacatatgccatgcgggtgctctttcctgggatcgaggaccaccctgtgctcaaggagatggaggtgcaggccaatgtggagaagtcgctgacactgttcgggcagctgctgaccaagaagcacttcctgctgaccttcatccgcacgctggaggcacagcgcagcttctccatgcgcgaccgcgggaatgtggcctcgctcatcatgacggccctgcagggcgagatggaatacgccacaggcgtgctcaagcagctgctttccgacctcatcgagaagaacctggagagcaagaaccaccccaagctgctactgcgccggactgagtcggtggcagagaagatgctaactaactggttcaccttcctcttgtataagttcctcaaggagtgcgctggggagccgctgttcatgctgtactgcgccatcaagcagcagatggagaagggccccattgacgccatcacgggtgaggcacgctactccctgagtgaggacaagctcatccggcagcagattgactacaagacactgaccctgaactgtgtgaaccctgagaatgagaatgcacctgaggtgccggtgaaggggctggactgtgacacggtcacccaggccaaggagaagctgctggacgctgcctacaagggcgtgccctactcccagcggcccaaggccgcggacatggacctggagtggcgccagggccgcatggcgcgcatcatcctgcaggacgaggacgtcaccaccaagattgacaacgattggaagaggctgaacacactggctcactaccaggtgacagacgggtcctcggtggcactggtgcccaagcagacgtccgcctacaacatctccaactcctccaccttcaccaagtccctcagcagatacgagagcatgctgcgcacggccagcagccccgacagcctgcgctcgcgcacgcccatgatcacgcccgacctggagagcggcaccaagctgtggcacctggtgaagaaccacgaccacctggaccagcgtgagggtgaccgcggcagcaagatggtctcggagatctacttgacacggctactggccaccaagggcacactgcagaagtttgtggacgacctgtttgagaccatcttcagcacggcacaccggggctcagccctgccgctggccatcaagtacatgttcgacttcctggatgagcaggccgacaagcaccagatccacgatgctgacgtgcgccacacctggaagagcaactgcctgcccctgcgcttctgggtgaacgtgatcaagaacccacagtttgtgttcgacattcacaagaacagcatcacggacgcctgcttgtcggtggtggcccagaccttcatggactcctgctccacctctgagcacaagctgggcaaggactcaccctccaacaagctgctctacgccaaggacatccccaactacaagagctgggtggagaggtactatgcagacatcgccaagatgccagccatcagcgaccaggacatgagtgcgtatctggctgagcagtcccgcctgcacctgagccagttcaacagcatgagcgccttgcacgagatctactcctacatcaccaagtacaaggatgagatcctggcagccctggagaaggatgagcaggcgcggcggcagcggctgcggagcaagctggagcaggtggtggacacgatggccctgagcagctgagccccagctgtgatcatccagcatgatgcagcgtgaggacagctgagcagggaccgggacagccctcaccgcatgcgtgtggagtgtccggtggtgctcgggccgccgcagtgcagcgactgcccggccctccctcccctgcctcacccggtcgggtcccggctcttcctgtgtggaggtgatggtacctgccacaccacagctgcgcacacagctgcttgctcaggggccgggacagcactgggtgctcaggctggccaaggaccttcattgcctggcaagagctgcccagtggccttcatgggagaagggctgacctctgaggggctgaggggtgaggccagggccctccagggggaggggtagccagcttgggctgtccccttgagaccaggacaagaggctgggggtgtcagcattcccagctttccaagctgcccccaggcggcagagtctgagggtcccggggcccggttggcagctggagaaagaggcaaaaagcccgtagccgggcaagaggagctcaagtcggtctgggcccgttgccaccgactcccacctccagcacccatgcccgctgcaccgctgccatcctcagattcaccgcgtgctctgcgcggccgaggccggagcaccacatccacctcgccccagagaggctctgctccctcctatggaggggctgtgggccaggctgctcagactcctgggtggcttccagacggaccgggcagcccctctccgtcctcagggctgtgcctctgggagccactgggccaggggccccgggtcgcagagagcacgttcccgttatttattcccctccgcgtctacacaggctgccctggcagctgtcttcaagggtaggctgagctccccaccctggagcccctgagggcggcccctgagcactcctctctctccactctctctgtccctgccccagcggcttccagtgtggcatctcagcagtgtcctggcccctccagagcagtgggacatctggggactgtttttgtgtttaggggaaaaaattctgctgcactctgcttgggccttgaggtctgtggcagggctcctctggcccgcagtggcctggatctatctgggccatgagtgacgggcagtgaccagagggactggaggccagcggtgtccacccttgccctcagcaagagagaatgcattcttaaaagaaagctgtacatgtatatatatgcatatatatatatgtggctctagcctcaggctccagccccagtggggtactgtacagttaactgaagaagaattttaaagacgatttgaacaagaaaatgaaggcagtgggaaagcaatgccaaatggttgtggagaaagtggccggagcctccctggagtggagcagccctgaagcctgtgccccccgacctgcgggccgctgttttggtttgacatgacaaggaaaggacttcctgctgaccctgagagcctctggggtgccgcggcaccacggggcatgcatgattgtgctagcgtttagtctgagttgatctttttaaaactgcaagtgttgaatactagaggttgttagacccttttttatgttttttaattaatcagtcacttgtaaaagcaaacaagcggtccatccccttttcaaggtcacttttttgatggtaccgaagatcccatggacattaagggacagctaactgtggccagactcagccccatgtccttggccaggcccaaggagaggactcggccccatggggtgtgccagtcttgcagtccgccccagctgagtagcgtgagccagatgacgccacagagacccgcctcttccctgaacgcgggtcggtgtggagtcagtgactgctgactcagggagctccttggccccgtgggcactgtgccagggctggggccttctgctgctgccacacccagctcaggcctgggccagcccctgcccccagcccactgagggggtgggcttactccctgggcagtcttgggggccagagctgaggccagtccatattacagtggctgggctgtttttttcagtagcccctagcattggctgggattcctgttcctgggtgcgcctccacctcccttctgatgtttcctggctatggtggggtgggaacctcagtttcccccaaagtcttccctggatgctggcttcaggttgaagtccctggttcttccagttcctcacgggttaggtaggggctcctgcatcaccttcagaatccagttccaacccccactctccttaggccttgtgctctgctctgccctgccaggctgcccttgtccatgtgagtagcatgggcgggtggtggggacggcagtggtgatgaagggggtgcaccacaggcctcatgaagcagttcccacatgggcgtgtggctggggcgtggccaccacagagcacatggctgtgtctaggcgcaagcactttagcagtatctgtttacatgcgcaaggatcaagccgactacctgtgctgtctactgggacagcagtctccgagctactccgtacctccctctgccaggtcgtggagttaggccccagtccctacttgtcactggttcccactgtgctcctaactgtgcagcacctgggagctctggcctggggctggaggccctggtaggagctgcagttggaggccgttctgtgcccagcagcggtgagcggctcccatgggccctgtgtctgcagggagccagggctgcggcacatgtgctgtgaaactggcacccacctggcgtgctgctgccgccacttgcttcctgcagcacctcctaccctgctccgtgtcctccctctccccgcgcctggctcaggagtgctggaaaagctcacgcctcggcctgggagcctggcctcttgatatacctcgagcttcccctgtgctccccagccccaggaccactggccccttggcctgaggggctgggggccccacgacctgcagcgtcgagtccgggagagagcccggagcggcgtgccatctcggctcggccttgctgagagcctccgccctggctttctccctgtctggattcagtggctcacgttggtgctacacagctagaatagatatatttagagagagagatatttttaagacaaagcccacaattagctgtcctttaacaccgcagaaccccctcccagaagaagagcgatccctcggacggtccgggcgggcaccctcagccgggctctttgcagaagcagcaccgctgactgtgggcccggccctcagatgtgtacatatacggctatttcctattttactgttcttcagatttagtacttgtaaataaacacacacattaaggagagattaaacatttttgctaaaa

SEQ ID NO: 323811 - DNA, 3878 bp, Homo sapiens
tcgagctcggtccgtatttatgtgcgccagacctggaagagcagctgcctgcccctgcgcttctgggtgaacgtgatcaagaacccacagtttgtgttcgacattcacaagaacagcatcacggacgcctgcttgtcggtggtggcccagaccttcatggactcctgctccacctctgagcacaagctgggcaaggactcaccctccaacaagctgctctacgccaaggacatccccaactacaagagctgggtggagaggtactatgcagacatcgccaagatgccagccatcagcgaccaggacatgagtgcgtatctggctgagcagtcccgcctgcacctgagccagttcaacagcatgagcgccttgcacgagatctactcctacatcaccaagtacaaggatgagatcctggcagccctggagaaggatgagcaggcgcggcggcagcggctgcggagcaagctggagcaggtggtggacacgatggccctgagcagctgagccccagctgtgatcatccagcatgatgcagcgtgaggacagctgagcagggaccgggacagccctcaccgcatgcgtgtggagtgtccggtggtgctcgggccgccgcagtgcagcgactgcccggccctccctcccctgcctcacccggtcgggtcccggctcttcctgtgtggaggtgatggtacctgccacaccacagctgcgcacacagctgcttgctcaggggccgggacagcactgggtgctcaggctggccaaggaccttcattgcctggcaagagctgcccagtggccttcatgggagaagggctgacctctgaggggctgaggggtgaggccagggccctccagggggaggggtagccagcttgggctgtccccttgagaccaggacaagaggctgggggtgtcagcattcccagctttccaagctgcccccaggcggcagagtctgagggtcccggggcccggttggcagctggagaaagaggcaaaaagcccgtagccgggcaagaggagctcaagtcggtctgggcccgttgccaccgactcccacctccagcacccatgcccgctgcaccgctgccatcctcagattcaccgcgtgctctgcgcggccgaggccggagcaccacatccacctcgccccagagaggctctgctccctcctatggaggggctgtgggccaggctgctcagactcctgggtggcttccagacggaccgggcagcccctctccgtcctcagggctgtgcctctgggagccactgggccaggggccccgggtcgcagagagcacgttcccgttatttattcccctccgcgtctacacaggctgccctggcagctgtcttcaagggtaggctgagctccccaccctggagcccctgagggcggcccctgagcactcctctctctccactctctctgtccctgccccagcggcttccagtgtggcatctcagcagtgtcctggcccctccagagcagtgggacatctggggactgtttttgtgtttaggggaaaaaattctgctgcactctgcttgggccttgaggtctgtggcagggctcctctggcccgcagtggcctggatctatctgggccatgagtgacgggcagtgaccagagggactggaggccagcggtgtccacccttgccctcagcaagagagaatgcattcttaaaagaaagctgtacatgtatatatatgcatatatatatatgtggctctagcctcaggctccagccccagtggggtactgtacagttaactgaagaagaattttaaagacgatttgaacaagaaaatgaaggcagtgggaaagcaatgccaaatggttgtggagaaagtggccggagcctccctggagtggagcagccctgaagcctgtgccccccgacctgcgggccgctgttttggtttgacatgacaaggaaaggacttcctgctgaccctgagagcctctggggtgccgcggcaccacggggcatgcatgattgtgctagcgtttagtctgagttgatctttttaaaactgcaagtgttgaatactagaggttgttagacccttttttatgttttttaattaatcagtcacttgtaaaagcaaacaagcggtccatccccttttcaaggtcacttttttgatggtaccgaagatcccatggacattaagggacagctaactgtggccagactcagccccatgtccttggccaggcccaaggagaggactcggccccatggggtgtgccagtcttgcagtccgccccagctgagtagcgtgagccagatgacgccacagagacccgcctcttccctgaacgcgggtcggtgtggagtcagtgactgctgactcagggagctccttggccccgtgggcactgtgccagggctggggccttctgctgctgccacacccagctcaggcctgggccagcccctgcccccagcccactgagggggtgggcttactccctgggcagtcttgggggccagagctgaggccagtccatattacagtggctgggctgtttttttcagtagcccctagcattggctgggattcctgttcctgggtgcgcctccacctcccttctgatgtttcctggctatggtggggtgggaacctcagtttcccccaaagtcttccctggatgctggcttcaggttgaagtccctggttcttccagttcctcacgggttaggtaggggctcctgcatcaccttcagaatccagttccaacccccactctccttaggccttgtgctctgctctgccctgccaggctgcccttgtccatgtgagtagcatgggcgggtggtggggacggcagtggtgatgaagggggtgcaccacaggcctcatgaagcagttcccacatgggcgtgtggctggggcgtggccaccacagagcacatggctgtgtctaggcgcaagcactttagcagtatctgtttacatgcgcaaggatcaagccgactacctgtgctgtctactgggacagcagtctccgagctactccgtacctccctctgccaggtcgtggagttaggccccagtccctacttgtcactggttcccactgtgctcctaactgtgcagcacctgggagctctggcctggggctggaggccctggtaggagctgcagttggaggccgttctgtgcccagcagcggtgagcggctcccatgggccctgtgtctgcagggagccagggctgcggcacatgtgctgtgaaactggcacccacctggcgtgctgctgccgccacttgcttcctgcagcacctcctaccctgctccgtgtcctccctctccccgcgcctggctcaggagtgctggaaaagctcacgcctcggcctgggagcctggcctcttgatatacctcgagcttcccctgtgctccccagccccaggaccactggccccttggcctgaggggctgggggccccacgacctgcagcgtcgagtccgggagagagcccggagcggcgtgccatctcggctcggccttgctgagagcctccgccctggctttctccctgtctggattcagtggctcacgttggtgctacacagctagaatagatatatttagagagagagatatttttaagacaaagcccacaattagctgtcctttaacaccgcagaaccccctcccagaagaagagcgatccctcggacggtccgggcgggcaccctcagccgggctctttgcagaagcagcaccgctgactgtgggcccggccctcagatgtgtacatatacggctatttcctattttactgttcttcagatttagtacttgtaaataaacacacacattaaggagagattaaacatttttgctaaaa

SEQ ID NO: 323812 - DNA, 6830 bp, Homo sapiens
  misc_feature (72)..(72): n is a, c, g, or t
  misc_feature (98)..(98): n is a, c, g, or t
  misc_feature (264)..(264): n is a, c, g, or t
  misc_feature (354)..(354): n is a, c, g, or t
  misc_feature (847)..(847): n is a, c, g, or t
  misc_feature (952)..(952): n is a, c, g, or t
  misc_feature (958)..(958): n is a, c, g, or t
  misc_feature (1154)..(1154): n is a, c, g, or t
  misc_feature (1315)..(1315): n is a, c, g, or t
  misc_feature (1444)..(1444): n is a, c, g, or t
  misc_feature (3727)..(3727): n is a, c, g, or t
gggcatgtgggctgaggcaggcttgcccagggcaggcgggggttcacagccccccttccgcaccttctcggncagcgactggggcctcacccacctantggtgcatgagcagacaggcgaggtgtatgtgggcgcagtgaaccgcatctataagctgtcggggaacctgacactgctgcgggcccacgtcacgggccctgtggaggacaacgagaagtgctacccgccgcccagcgtgcagtcctgcccccacggcctgggcantactgacaacgtcaacaagctgctgctgctggactatgccgctaaccgcctgctggcctgtggcagcgcctcccagggcatctgccagtncctgcgtctggacgatctcttcaaactgggtgagccacaccaccgtaaggagcactacctgtccagcgtgcaggaggcaggcagcatggcgggcgtgctcattgccgggccaccgggccagggccaggccaagctcttcgtgggcacacccatcgatggcaagtccgagtacttccccacactgtccagccgtcggctcatggccaacgaggaggatgccgacatgttcggcttcgtgtaccaggatgagtttgtgtcatcacagctcaagatcccttcggacacgctgtccaagttcccggcctttgacatctactatgtgtacagcttccgcagcgagcagtttgtctactacctcacgctgcagctagacacacagctgacctcgcctgatgccgccggcgagcacttcttcacgtccaagatcgtgcggctctgtgtggacgaccccaaattctactcgtacgttgagttccccattggctgcgagcangcgggtgtggagtaccgcctggtgcaggatgcctacctgagccggcccggccgtgccctggcccaccagctgggcctggctgaggacgaggacgtgctgttcacngtgttngcccagggccagaagaaccgcgtgaagccaccaaaggagtcagcactgtgcctgttcacgctcagggccatcaaggagaagattaaggagcgcatccagtcctgctaccgtggtgagggcaagctctccctgccgtggctgctcaacaaggagctgggctgcatcaactcgcccctgcagatcgatgacgacttcngcgggcaggacttcaaccagcccctggggggcacagtcaccattgaggggacgcccctgttcgtggacaaggatgatggcctgaccgccgtggctgcctatgactatcggggccgcactgtggtattcgccggcacgcgaagtggccgcatccgcaagatnctggtggacctctcaaaccccggtggccggcctgccctggcctacgagagcgtcgtggcccaggagggcagccccatcctgcgagacctcgtcctcagccccaaccaccagtacctctacgccatgacngagaagcaggtgacgcgggtgcctgtggagagctgtgtgcagtacacgtcctgtgagctgtgtctggggtcacgggacccccactgtggctggtgtgtcctgcacagcatctgctcgcggcgggacgcctgtgagcgagcagacgagccccagcgctttgctgcggacctgctgcagtgtgtgcagctgactgtgcagccccgcaatgtgtctgtcaccatgtcccaggtcccacttgtgctgcaggcctggaacgtgcctgacctctcagctggcgtcaactgctccttcgaggacttcacggaatctgagagcgtcctggaggatggccggatccactgccgctcaccctccgcccgggaggtggcgcccatcacgcggggccagggagaccagcgggtggtgaaactctacctaaagtccaaggagacagggaagaagtttgcgtctgtggacttcgtcttctacaactgcagcgtccaccagtcctgcctgtcctgtgtcaacggctcctttccctgccactggtgcaaataccgccacgtgtgcacacacaacgtggctgactgcgccttcctggagggccgtgtcaacgtgtctgaggactgcccacagatcctgccctccacgcagatctacgtgccagtgggagtggtaaaacccatcaccctggccgcacggaacctgccacagccacagtcaggccagcgtggatatgagtgcctcttccacatcccgggcagcccggcccgtgtcaccgccctgcgcttcaacagctccagcctgcagtgccagaattcctcgtactcctacgaggggaacgatgtcagcgacctgccagtgaacctgtcagtcgtgtggaacggcaactttgtcattgacaacccacagaacatccaggcgcacctctacaagtgcccggccctgcgcgagagctgcggcctctgcctcaaggccgacccgcgcttcgagtgcggatggtgcgtggccgagcgccgctgctccctgcgacaccactgcgctgccgacacacctgcatcgtggatgcacgcgcgtcacggcagcagtcgctgcaccgaccccaagatcctcaagctgtcccccgagacgggcccgaggcagggcggcacgcggctcactatcacaggcgagaacctgggcctgcgattcgaagacgtgcgtctgggcgtgcgcgtgggcaaggtgctgtgcagccctgtggagagcgagtacatcagtgcggagcagatcgtctgtgagatcggggacgccagctccgtgcgtgcccatgacgccctggtggaggtgtgtgtgcgggactgctcaccacactaccgcgccctgtcacccaagcgcttcaccttcgtgacaccaaccttctaccgtgtgagcccctcccgtgggcctctgtcagggggcacctggattggcatcgagggaagccacctgaacgcaggcagtgatgtggctgtgtcggtcggtggccggccctgctccttctcctggaggaactcccgtgagatccggtgcctgacaccccccgggcagagccctggcagcgctcccatcatcatcaacatcaaccgcgcccagctcaccaaccctgaggtgaagtacaactacaccgaggaccccaccatcctgaggatcgaccccgagtggagcatcaacagcggtgggaccctcctgacggtcacaggcaccaacctggccactgtccgtgaaccccgaatccgggccaagtatggaggcattgagagggagaacggctgcctggtgtacaatgacaccaccatggtatgccgcgccccgtctgtggccaaccctgtgcgcagcccaccagagctgggggagcggccggatgagctgggcttcgtcatggacaacgtgcgctccctgcttgtgctcaactccacctccttcctctactaccctgaccccgtactggagccactcagccccactggcctgctggagctgaagcccagctccccactcatcctcaagggccggaacctcttgccacctgcacccggcaactcccgactcaactacacggtgctcatcggctccacaccctgtaccctcaccgtgtcggagacgcaactgctgtgcgaggcgcccaacctcactgggcagcacaaggtcacggtgcgggcaggtggcttcgagttctcgccagggacactgcaggtgtactcggacagcctgctgacgctgcctgccattgtgggcattggcggaggcgggggtctcctgctgctggtcatcgtggctgtgctnatcgcctacaagcgcaagtcacgagatgctgaccgcacactcaagcggctgcagctccagatggacaacctggagtcccgcgtggccctcgaatgcaaggaagcctttgcagagctgcagacagacatccacgagctgaccaatgacctggacggtgccggcatccccttccttgactaccggacatatgccatgcgggtgctctttcctgggatcgaggaccaccctgtgctcaaggagatggaggtgcaggccaatgtggagaagtcgctgacactgttcgggcagctgctgaccaagaagcacttcctgctgaccttcatccgcacgctggaggcacagcgcagcttctccatgcgcgaccgcgggaatgtggcctcgctcatcatgacggccctgcagggcgagatggaatacgccacaggcgtgctcaagcagctgctttccgacctcatcgagaagaacctggagagcaagaaccaccccaagctgctactgcgccggactgagtcggtggcagagaagatgctaactaactggttcaccttcctcttgtataagttcctcaaggagtgcgctggggagccgctgttcatgctgtactgcgccatcaagcagcagatggagaagggccccattgacgccatcacgggtgaggcacgctactccctgagtgaggacaagctcatccggcagcagattgactacaagacactgaccctgaactgtgtgaaccctgagaatgagaatgcacctgaggtgccggtgaaggggctggactgtgacacggtcacccaggccaaggagaagctgctggacgctgcctacaagggcgtgccctactcccagcggcccaaggccgcggacatggacctggagtggcgccagggccgcatggcgcgcatcatcctgcaggacgaggacgtcaccaccaagattgacaacgattggaagaggctgaacacactggctcactaccaggtgacagacgggtcctcggtggcactggtgcccaagcagacgtccgcctacaacatctccaactcctccaccttcaccaagtccctcagcagatacgagagcatgctgcgcacggccagcagccccgacagcctgcgctcgcgcacgcccatgatcacgcccgacctggagagcggcaccaagctgtggcacctggtgaagaaccacgaccacctggaccagcgtgagggtgaccgcggcagcaagatggtctcggagatctacttgacacggctactggccaccaagggcacactgcagaagtttgtggacgacctgtttgagaccatcttcagcacggcacaccggggctcagccctgccgctggccatcaagtacatgttcgacttcctggatgagcaggccgacaagcaccagatccacgatgctgacgtgcgccacacctggaagagcaactgcctgcccctgcgcttctgggtgaacgtgatcaagaacccacagtttgtgttcgacattcacaagaacagcatcacggacgcctgcttgtcggtggtggcccagaccttcatggactcctgctccacctctgagcacaagctgggcaaggactcaccctccaacaagctgctctacgccaaggacatccccaactacaagagctgggtggagaggtactatgcagacatcgccaagatgccagccatcagcgaccaggacatgagtgcgtatctggctgagcagtcccgcctgcacctgagccagttcaacagcatgagcgccttgcacgagatctactcctacatcaccaagtacaaggatgagatcctggcagccctggagaaggatgagcaggcgcggcggcagcggctgcggagcaagctggagcaggtggtggacacgatggccctgagcagctgagccccagctgtgatcatccagcatgatgcagcgtgaggacagctgagcagggaccgggacagccctcaccgcatgcgtgtggagtgtccggtggtgctcgggccgccgcagtgcagcgactgcccggccctccctcccctgcctcacccggtcgggtcccggctcttcctgtgtggaggtgatggtacctgccacaccacagctgcgcacacagctgcttgctcaggggccgggacagcactgggtgctcaggctggccaaggaccttcattgcctggcaagagctgcccagtggccttcatgggagaagggctgacctctgaggggctgaggggtgaggccagggccctccagggggaggggtagccagcttgggctgtccccttgagaccaggacaagaggctgggggtgtcagcattcccagctttccaagctgcccccaggcggcagagtctgagggtcccggggcccggttggcagctggagaaagaggcaaaaagcccgtagccgggcaagaggagctcaagtcggtctgggcccgttgccaccgactcccacctccagcacccatgcccgctgcaccgctgccatcctcagattcaccgcgtgctctgcgcggccgaggccggagcaccacatccacctcgccccagagaggctctgctccctcctatggaggggctgtgggccaggctgctcagactcctgggtggggagtggggagggaccgaatgcggggacagcgcggggtggagaggagagaaaaagcaaaaagaggaacaataacaaaagaagaaaatataaaaaacagaaaaaaaaaacacaaaacccctagaacacacaaaaaaatccagaaaaaaaacctgaaataaaagcccgagaattgtcttccaagggggggtgggaggggaagaggaggggggcggatgaggacgtctgattctcgctgagacagggctcggcacgcgttgaaagccccggtgcccaggtcttccctttcgcgggcttcagttcatccctcaagggattgggacccaggcgtccacgtacagggactggaggaagattagggacgcgggattataacatgggggttcattcctaccccccatcacctcccttcccctgactccccaccaagattttgcagagagaaatggcttttgtaccaggtcattctttataattaaactcacagtatct

SEQ ID NO: 323813 - DNA, 1260 bp, Homo sapiens
gtaccccagcctctgcctccctcagctgtcccccgagacgggcccgaggcagggcggcacgcggctcactatcacaggcgagaacctgggcctgcgattcgaagacgtgcgtctgggcgtgcgcgtgggcaaggtgctgtgcagccctgtggagagcgagtacatcagtgcggagcagatcgtctgtgagatcggggacgccagctccgtgcgtgcccatgacgccctggtggaggtgtgtgtgcgggactgctcaccacactaccgcgccctgtcacccaagcgcttcaccttcgtgacaccaaccttctaccgtgtgagcccctcccgtgggcctctgtcagggggcacctggattggcatcgagggaagccacctgaacgcaggcagtgatgtggctgtgtcggtcggtggccggccctgctccttctcctggaggaactcccgtgagatccggtgcctgacaccccccgggcagagccctggcagcgctcccatcatcatcaacatcaaccgcgcccagctcaccaaccctgaggtgaagtacaactacaccgaggaccccaccatcctgaggatcgaccccgagtggagcatcaacagcggtgggaccctcctgacggtcacaggcaccaacctggccactgtccgtgaaccccgaatccgggccaagtatggaggcattgagagggagaacggctgcctggtgtacaatgacaccaccatggtatgccgcgccccgtctgtggccaaccctgtgcgcagcccaccagagctgggggagcggccggatgagctgggcttcgtcatggacaacgtgcgctccctgcttgtgctcaactccacctccttcctctactaccctgaccccgtactggagccactcagccccactggcctgctggagctgaagcccagctccccactcatcctcaagggccggaacctcttgccacctgcacccggcaactcccgactcaactacacggtgctcatcggctccacaccctgtaccctcaccgtgtcggagacgcaactgctgtgcgaggcgcccaacctcactgggcagcacaaggtcacggtgcgtctgtccaccgggggtgcagagctgggagagccatgccccacctgtggaccctgccccactagcacagccccagctctgaccttgcccgagactcacccctagctcagagggcgcccggctccagtgcaggccctgccgtagccttcagcctgccacctccttgagccccccga

SEQ ID NO: 323814 - DNA, 2358 bp, Homo sapiens
  misc_feature (72)..(72): n is a, c, g, or t
  misc_feature (98)..(98): n is a, c, g, or t
  misc_feature (264)..(264): n is a, c, g, or t
  misc_feature (354)..(354): n is a, c, g, or t
  misc_feature (847)..(847): n is a, c, g, or t
  misc_feature (952)..(952): n is a, c, g, or t
  misc_feature (958)..(958): n is a, c, g, or t
  misc_feature (1154)..(1154): n is a, c, g, or t
  misc_feature (1315)..(1315): n is a, c, g, or t
  misc_feature (1444)..(1444): n is a, c, g, or t
gggcatgtgggctgaggcaggcttgcccagggcaggcgggggttcacagccccccttccgcaccttctcggncagcgactggggcctcacccacctantggtgcatgagcagacaggcgaggtgtatgtgggcgcagtgaaccgcatctataagctgtcggggaacctgacactgctgcgggcccacgtcacgggccctgtggaggacaacgagaagtgctacccgccgcccagcgtgcagtcctgcccccacggcctgggcantactgacaacgtcaacaagctgctgctgctggactatgccgctaaccgcctgctggcctgtggcagcgcctcccagggcatctgccagtncctgcgtctggacgatctcttcaaactgggtgagccacaccaccgtaaggagcactacctgtccagcgtgcaggaggcaggcagcatggcgggcgtgctcattgccgggccaccgggccagggccaggccaagctcttcgtgggcacacccatcgatggcaagtccgagtacttccccacactgtccagccgtcggctcatggccaacgaggaggatgccgacatgttcggcttcgtgtaccaggatgagtttgtgtcatcacagctcaagatcccttcggacacgctgtccaagttcccggcctttgacatctactatgtgtacagcttccgcagcgagcagtttgtctactacctcacgctgcagctagacacacagctgacctcgcctgatgccgccggcgagcacttcttcacgtccaagatcgtgcggctctgtgtggacgaccccaaattctactcgtacgttgagttccccattggctgcgagcangcgggtgtggagtaccgcctggtgcaggatgcctacctgagccggcccggccgtgccctggcccaccagctgggcctggctgaggacgaggacgtgctgttcacngtgttngcccagggccagaagaaccgcgtgaagccaccaaaggagtcagcactgtgcctgttcacgctcagggccatcaaggagaagattaaggagcgcatccagtcctgctaccgtggtgagggcaagctctccctgccgtggctgctcaacaaggagctgggctgcatcaactcgcccctgcagatcgatgacgacttcngcgggcaggacttcaaccagcccctggggggcacagtcaccattgaggggacgcccctgttcgtggacaaggatgatggcctgaccgccgtggctgcctatgactatcggggccgcactgtggtattcgccggcacgcgaagtggccgcatccgcaagatnctggtggacctctcaaaccccggtggccggcctgccctggcctacgagagcgtcgtggcccaggagggcagccccatcctgcgagacctcgtcctcagccccaaccaccagtacctctacgccatgacngagaagcaggtgacgcgggtgcctgtggagagctgtgtgcagtacacgtcctgtgagctgtgtctggggtcacgggacccccactgtggctggtgtgtcctgcacagcatctgctcgcggcgggacgcctgtgagcgagcagacgagccccagcgctttgctgcggacctgctgcagtgtgtgcagctgactgtgcagccccgcaatgtgtctgtcaccatgtcccaggtcccacttgtgctgcaggcctggaacgtgcctgacctctcagctggcgtcaactgctccttcgaggacttcacggaatctgagagcgtcctggaggatggccggatccactgccgctcaccctccgcccgggaggtggcgcccatcacgcggggccagggagaccagcgggtggtgaaactctacctaaagtccaaggagacagggaagaagtttgcgtctgtggacttcgtcttctacaactgcagcgtccaccagtcctgcctgtcctgtgtcaacggctcctttccctgccactggtgcaaataccgccacgtgtgcacacacaacgtggctgactgcgccttcctggagggccgtgtcaacgtgtctgaggactgcccacagatcctgccctccacgcagatctacgtgccagtgggagtggtaaaacccatcaccctggccgcacggaacctgccacagccacagtcaggccagcgtggatatgagtgcctcttccacatcccgggcagcccggcccgtgtcaccgccctgcgcttcaacagctccagcctgcagtgccagaattcctcggtgaggtggccagggcaggggctgggggccgtgagccggaatgggccggttatcctcacggccctgggtcctggcgtgtgcttgttcataaagggcagtgcacgtgctca

SEQ ID NO: 323815 - DNA, 274 bp, Homo sapiens
aaggaagtcctgtgtaggatgagggtggagagggagcggttgtggctgcagaaacttccccctaagctggcgccctggtggctttgtgggcgtgaggcttgggaggcctggaggccgcttagctgggaagcctgacggtgccatcacctaacagtactcctacgaggggaacgatgtcagcgacctgccagtgaacctgtcagtcgtgtggaacggcaactttgtcattgacaacccacagaacatccagggtgagtgggcgccccggcggggt

SEQ ID NO: 323816 - DNA, 8997 bp, Homo sapiens
  misc_feature (72)..(72): n is a, c, g, or t
  misc_feature (98)..(98): n is a, c, g, or t
  misc_feature (264)..(264): n is a, c, g, or t
  misc_feature (354)..(354): n is a, c, g, or t
  misc_feature (847)..(847): n is a, c, g, or t
  misc_feature (952)..(952): n is a, c, g, or t
  misc_feature (958)..(958): n is a, c, g, or t
  misc_feature (1154)..(1154): n is a, c, g, or t
  misc_feature (1315)..(1315): n is a, c, g, or t
  misc_feature (1444)..(1444): n is a, c, g, or t
  misc_feature (3727)..(3727): n is a, c, g, or t
gggcatgtgggctgaggcaggcttgcccagggcaggcgggggttcacagccccccttccgcaccttctcggncagcgactggggcctcacccacctantggtgcatgagcagacaggcgaggtgtatgtgggcgcagtgaaccgcatctataagctgtcggggaacctgacactgctgcgggcccacgtcacgggccctgtggaggacaacgagaagtgctacccgccgcccagcgtgcagtcctgcccccacggcctgggcantactgacaacgtcaacaagctgctgctgctggactatgccgctaaccgcctgctggcctgtggcagcgcctcccagggcatctgccagtncctgcgtctggacgatctcttcaaactgggtgagccacaccaccgtaaggagcactacctgtccagcgtgcaggaggcaggcagcatggcgggcgtgctcattgccgggccaccgggccagggccaggccaagctcttcgtgggcacacccatcgatggcaagtccgagtacttccccacactgtccagccgtcggctcatggccaacgaggaggatgccgacatgttcggcttcgtgtaccaggatgagtttgtgtcatcacagctcaagatcccttcggacacgctgtccaagttcccggcctttgacatctactatgtgtacagcttccgcagcgagcagtttgtctactacctcacgctgcagctagacacacagctgacctcgcctgatgccgccggcgagcacttcttcacgtccaagatcgtgcggctctgtgtggacgaccccaaattctactcgtacgttgagttccccattggctgcgagcangcgggtgtggagtaccgcctggtgcaggatgcctacctgagccggcccggccgtgccctggcccaccagctgggcctggctgaggacgaggacgtgctgttcacngtgttngcccagggccagaagaaccgcgtgaagccaccaaaggagtcagcactgtgcctgttcacgctcagggccatcaaggagaagattaaggagcgcatccagtcctgctaccgtggtgagggcaagctctccctgccgtggctgctcaacaaggagctgggctgcatcaactcgcccctgcagatcgatgacgacttcngcgggcaggacttcaaccagcccctggggggcacagtcaccattgaggggacgcccctgttcgtggacaaggatgatggcctgaccgccgtggctgcctatgactatcggggccgcactgtggtattcgccggcacgcgaagtggccgcatccgcaagatnctggtggacctctcaaaccccggtggccggcctgccctggcctacgagagcgtcgtggcccaggagggcagccccatcctgcgagacctcgtcctcagccccaaccaccagtacctctacgccatgacngagaagcaggtgacgcgggtgcctgtggagagctgtgtgcagtacacgtcctgtgagctgtgtctggggtcacgggacccccactgtggctggtgtgtcctgcacagcatctgctcgcggcgggacgcctgtgagcgagcagacgagccccagcgctttgctgcggacctgctgcagtgtgtgcagctgactgtgcagccccgcaatgtgtctgtcaccatgtcccaggtcccacttgtgctgcaggcctggaacgtgcctgacctctcagctggcgtcaactgctccttcgaggacttcacggaatctgagagcgtcctggaggatggccggatccactgccgctcaccctccgcccgggaggtggcgcccatcacgcggggccagggagaccagcgggtggtgaaactctacctaaagtccaaggagacagggaagaagtttgcgtctgtggacttcgtcttctacaactgcagcgtccaccagtcctgcctgtcctgtgtcaacggctcctttccctgccactggtgcaaataccgccacgtgtgcacacacaacgtggctgactgcgccttcctggagggccgtgtcaacgtgtctgaggactgcccacagatcctgccctccacgcagatctacgtgccagtgggagtggtaaaacccatcaccctggccgcacggaacctgccacagccacagtcaggccagcgtggatatgagtgcctcttccacatcccgggcagcccggcccgtgtcaccgccctgcgcttcaacagctccagcctgcagtgccagaattcctcgtactcctacgaggggaacgatgtcagcgacctgccagtgaacctgtcagtcgtgtggaacggcaactttgtcattgacaacccacagaacatccaggcgcacctctacaagtgcccggccctgcgcgagagctgcggcctctgcctcaaggccgacccgcgcttcgagtgcggatggtgcgtggccgagcgccgctgctccctgcgacaccactgcgctgccgacacacctgcatcgtggatgcacgcgcgtcacggcagcagtcgctgcaccgaccccaagatcctcaagctgtcccccgagacgggcccgaggcagggcggcacgcggctcactatcacaggcgagaacctgggcctgcgattcgaagacgtgcgtctgggcgtgcgcgtgggcaaggtgctgtgcagccctgtggagagcgagtacatcagtgcggagcagatcgtctgtgagatcggggacgccagctccgtgcgtgcccatgacgccctggtggaggtgtgtgtgcgggactgctcaccacactaccgcgccctgtcacccaagcgcttcaccttcgtgacaccaaccttctaccgtgtgagcccctcccgtgggcctctgtcagggggcacctggattggcatcgagggaagccacctgaacgcaggcagtgatgtggctgtgtcggtcggtggccggccctgctccttctcctggaggaactcccgtgagatccggtgcctgacaccccccgggcagagccctggcagcgctcccatcatcatcaacatcaaccgcgcccagctcaccaaccctgaggtgaagtacaactacaccgaggaccccaccatcctgaggatcgaccccgagtggagcatcaacagcggtgggaccctcctgacggtcacaggcaccaacctggccactgtccgtgaaccccgaatccgggccaagtatggaggcattgagagggagaacggctgcctggtgtacaatgacaccaccatggtatgccgcgccccgtctgtggccaaccctgtgcgcagcccaccagagctgggggagcggccggatgagctgggcttcgtcatggacaacgtgcgctccctgcttgtgctcaactccacctccttcctctactaccctgaccccgtactggagccactcagccccactggcctgctggagctgaagcccagctccccactcatcctcaagggccggaacctcttgccacctgcacccggcaactcccgactcaactacacggtgctcatcggctccacaccctgtaccctcaccgtgtcggagacgcaactgctgtgcgaggcgcccaacctcactgggcagcacaaggtcacggtgcgggcaggtggcttcgagttctcgccagggacactgcaggtgtactcggacagcctgctgacgctgcctgccattgtgggcattggcggaggcgggggtctcctgctgctggtcatcgtggctgtgctnatcgcctacaagcgcaagtcacgagatgctgaccgcacactcaagcggctgcagctccagatggacaacctggagtcccgcgtggccctcgaatgcaaggaagcctttgcagagctgcagacagacatccacgagctgaccaatgacctggacggtgccggcatccccttccttgactaccggacatatgccatgcgggtgctctttcctgggatcgaggaccaccctgtgctcaaggagatggaggtgcaggccaatgtggagaagtcgctgacactgttcgggcagctgctgaccaagaagcacttcctgctgaccttcatccgcacgctggaggcacagcgcagcttctccatgcgcgaccgcgggaatgtggcctcgctcatcatgacggccctgcagggcgagatggaatacgccacaggcgtgctcaagcagctgctttccgacctcatcgagaagaacctggagagcaagaaccaccccaagctgctactgcgccggactgagtcggtggcagagaagatgctaactaactggttcaccttcctcttgtataagttcctcaaggagtgcgctggggagccgctgttcatgctgtactgcgccatcaagcagcagatggagaagggccccattgacgccatcacgggtgaggcacgctactccctgagtgaggacaagctcatccggcagcagattgactacaagacactgaccctgaactgtgtgaaccctgagaatgagaatgcacctgaggtgccggtgaaggggctggactgtgacacggtcacccaggccaaggagaagctgctggacgctgcctacaagggcgtgccctactcccagcggcccaaggccgcggacatggacctggagtggcgccagggccgcatggcgcgcatcatcctgcaggacgaggacgtcaccaccaagattgacaacgattggaagaggctgaacacactggctcactaccaggtgacagacgggtcctcggtggcactggtgcccaagcagacgtccgcctacaacatctccaactcctccaccttcaccaagtccctcagcagatacgagagcatgctgcgcacggccagcagccccgacagcctgcgctcgcgcacgcccatgatcacgcccgacctggagagcggcaccaagctgtggcacctggtgaagaaccacgaccacctggaccagcgtgagggtgaccgcggcagcaagatggtctcggagatctacttgacacggctactggccaccaagggcacactgcagaagtttgtggacgacctgtttgagaccatcttcagcacggcacaccggggctcagccctgccgctggccatcaagtacatgttcgacttcctggatgagcaggccgacaagcaccagatccacgatgctgacgtgcgccacacctggaagagcaactgcctgcccctgcgcttctgggtgaacgtgatcaagaacccacagtttgtgttcgacattcacaagaacagcatcacggacgcctgcttgtcggtggtggcccagaccttcatggactcctgctccacctctgagcacaagctgggcaaggactcaccctccaacaagctgctctacgccaaggacatccccaactacaagagctgggtggagaggtactatgcagacatcgccaagatgccagccatcagcgaccaggacatgagtgcgtatctggctgagcagtcccgcctgcacctgagccagttcaacagcatgagcgccttgcacgagatctactcctacatcaccaagtacaaggatgagatcctggcagccctggagaaggatgagcaggcgcggcggcagcggctgcggagcaagctggagcaggtggtggacacgatggccctgagcagctgagccccagctgtgatcatccagcatgatgcagcgtgaggacagctgagcagggaccgggacagccctcaccgcatgcgtgtggagtgtccggtggtgctcgggccgccgcagtgcagcgactgcccggccctccctcccctgcctcacccggtcgggtcccggctcttcctgtgtggaggtgatggtacctgccacaccacagctgcgcacacagctgcttgctcaggggccgggacagcactgggtgctcaggctggccaaggaccttcattgcctggcaagagctgcccagtggccttcatgggagaagggctgacctctgaggggctgaggggtgaggccagggccctccagggggaggggtagccagcttgggctgtccccttgagaccaggacaagaggctgggggtgtcagcattcccagctttccaagctgcccccaggcggcagagtctgagggtcccggggcccggttggcagctggagaaagaggcaaaaagcccgtagccgggcaagaggagctcaagtcggtctgggcccgttgccaccgactcccacctccagcacccatgcccgctgcaccgctgccatcctcagattcaccgcgtgctctgcgcggccgaggccggagcaccacatccacctcgccccagagaggctctgctccctcctatggaggggctgtgggccaggctgctcagactcctgggtggcttccagacggaccgggcagcccctctccgtcctcagggctgtgcctctgggagccactgggccaggggccccgggtcgcagagagcacgttcccgttatttattcccctccgcgtctacacaggctgccctggcagctgtcttcaagggtaggctgagctccccaccctggagcccctgagggcggcccctgagcactcctctctctccactctctctgtccctgccccagcggcttccagtgtggcatctcagcagtgtcctggcccctccagagcagtgggacatctggggactgtttttgtgtttaggggaaaaaattctgctgcactctgcttgggccttgaggtctgtggcagggctcctctggcccgcagtggcctggatctatctgggccatgagtgacgggcagtgaccagagggactggaggccagcggtgtccacccttgccctcagcaagagagaatgcattcttaaaagaaagctgtacatgtatatatatgcatatatatatatgtggctctagcctcaggctccagccccagtggggtactgtacagttaactgaagaagaattttaaagacgatttgaacaagaaaatgaaggcagtgggaaagcaatgccaaatggttgtggagaaagtggccggagcctccctggagtggagcagccctgaagcctgtgccccccgacctgcgggccgctgttttggtttgacatgacaaggaaaggacttcctgctgaccctgagagcctctggggtgccgcggcaccacggggcatgcatgattgtgctagcgtttagtctgagttgatctttttaaaactgcaagtgttgaatactagaggttgttagacccttttttatgttttttaattaatcagtcacttgtaaaagcaaacaagcggtccatccccttttcaaggtcacttttttgatggtaccgaagatcccatggacattaagggacagctaactgtggccagactcagccccatgtccttggccaggcccaaggagaggactcggccccatggggtgtgccagtcttgcagtccgccccagctgagtagcgtgagccagatgacgccacagagacccgcctcttccctgaacgcgggtcggtgtggagtcagtgactgctgactcagggagctccttggccccgtgggcactgtgccagggctggggccttctgctgctgccacacccagctcaggcctgggccagcccctgcccccagcccactgagggggtgggcttactccctgggcagtcttgggggccagagctgaggccagtccatattacagtggctgggctgtttttttcagtagcccctagcattggctgggattcctgttcctgggtgcgcctccacctcccttctgatgtttcctggctatggtggggtgggaacctcagtttcccccaaagtcttccctggatgctggcttcaggttgaagtccctggttcttccagttcctcacgggttaggtaggggctcctgcatcaccttcagaatccagttccaacccccactctccttaggccttgtgctctgctctgccctgccaggctgcccttgtccatgtgagtagcatgggcgggtggtggggacggcagtggtgatgaagggggtgcaccacaggcctcatgaagcagttcccacatgggcgtgtggctggggcgtggccaccacagagcacatggctgtgtctaggcgcaagcactttagcagtatctgtttacatgcgcaaggatcaagccgactacctgtgctgtctactgggacagcagtctccgagctactccgtacctccctctgccaggtcgtggagttaggccccagtccctacttgtcactggttcccactgtgctcctaactgtgcagcacctgggagctctggcctggggctggaggccctggtaggagctgcagttggaggccgttctgtgcccagcagcggtgagcggctcccatgggccctgtgtctgcagggagccagggctgcggcacatgtgctgtgaaactggcacccacctggcgtgctgctgccgccacttgcttcctgcagcacctcctaccctgctccgtgtcctccctctccccgcgcctggctcaggagtgctggaaaagctcacgcctcggcctgggagcctggcctcttgatatacctcgagcttcccctgtgctccccagccccaggaccactggccccttggcctgaggggctgggggccccacgacctgcagcgtcgagtccgggagagagcccggagcggcgtgccatctcggctcggccttgctgagagcctccgccctggctttctccctgtctggattcagtggctcacgttggtgctacacagctagaatagatatatttagagagagagatatttttaagacaaagcccacaattagctgtcctttaacaccgcagaaccccctcccagaagaagagcgatccctcggacggtccgggcgggcaccctcagccgggctctttgcagaagcagcaccgctgactgtgggcccggccctcagatgtgtacatatacggctatttcctattttactgttcttcagatttagtacttgtaaataaacacacacattaaggagagattaaacatttttgctaaaa

SEQ ID NO: 323817 - DNA, 4625 bp, Homo sapiens
cggaaggcagggcagacccccttaggctggggctgctgtggcagattgggagggctgtggcacattgcaggggactatggcaggttaagtgtgctgcagcaggggcggaggtatgtccctgccctgtgctggtgctgagagctgcaggcaggccccgtcccactacactgctgtgatggaggagggaaagagggccccagcggccccaccctccagctccctcctcccccagagtggcgccagggccgcatggcgcgcatcatcctgcaggacgaggacgtcaccaccaagattgacaacgattggaagaggctgaacacactggctcactaccaggtgacagacgggtcctcggtggcactggtgcccaagcagacgtccgcctacaacatctccaactcctccaccttcaccaagtccctcagcagatacgagagcatgctgcgcacggccagcagccccgacagcctgcgctcgcgcacgcccatgatcacgcccgacctggagagcggcaccaagctgtggcacctggtgaagaaccacgaccacctggaccagcgtgagggtgaccgcggcagcaagatggtctcggagatctacttgacacggctactggccaccaagggcacactgcagaagtttgtggacgacctgtttgagaccatcttcagcacggcacaccggggctcagccctgccgctggccatcaagtacatgttcgacttcctggatgagcaggccgacaagcaccagatccacgatgctgacgtgcgccacacctggaagagcaactgcctgcccctgcgcttctgggtgaacgtgatcaagaacccacagtttgtgttcgacattcacaagaacagcatcacggacgcctgcttgtcggtggtggcccagaccttcatggactcctgctccacctctgagcacaagctgggcaaggactcaccctccaacaagctgctctacgccaaggacatccccaactacaagagctgggtggagaggtactatgcagacatcgccaagatgccagccatcagcgaccaggacatgagtgcgtatctggctgagcagtcccgcctgcacctgagccagttcaacagcatgagcgccttgcacgagatctactcctacatcaccaagtacaaggatgagatcctggcagccctggagaaggatgagcaggcgcggcggcagcggctgcggagcaagctggagcaggtggtggacacgatggccctgagcagctgagccccagctgtgatcatccagcatgatgcagcgtgaggacagctgagcagggaccgggacagccctcaccgcatgcgtgtggagtgtccggtggtgctcgggccgccgcagtgcagcgactgcccggccctccctcccctgcctcacccggtcgggtcccggctcttcctgtgtggaggtgatggtacctgccacaccacagctgcgcacacagctgcttgctcaggggccgggacagcactgggtgctcaggctggccaaggaccttcattgcctggcaagagctgcccagtggccttcatgggagaagggctgacctctgaggggctgaggggtgaggccagggccctccagggggaggggtagccagcttgggctgtccccttgagaccaggacaagaggctgggggtgtcagcattcccagctttccaagctgcccccaggcggcagagtctgagggtcccggggcccggttggcagctggagaaagaggcaaaaagcccgtagccgggcaagaggagctcaagtcggtctgggcccgttgccaccgactcccacctccagcacccatgcccgctgcaccgctgccatcctcagattcaccgcgtgctctgcgcggccgaggccggagcaccacatccacctcgccccagagaggctctgctccctcctatggaggggctgtgggccaggctgctcagactcctgggtggcttccagacggaccgggcagcccctctccgtcctcagggctgtgcctctgggagccactgggccaggggccccgggtcgcagagagcacgttcccgttatttattcccctccgcgtctacacaggctgccctggcagctgtcttcaagggtaggctgagctccccaccctggagcccctgagggcggcccctgagcactcctctctctccactctctctgtccctgccccagcggcttccagtgtggcatctcagcagtgtcctggcccctccagagcagtgggacatctggggactgtttttgtgtttaggggaaaaaattctgctgcactctgcttgggccttgaggtctgtggcagggctcctctggcccgcagtggcctggatctatctgggccatgagtgacgggcagtgaccagagggactggaggccagcggtgtccacccttgccctcagcaagagagaatgcattcttaaaagaaagctgtacatgtatatatatgcatatatatatatgtggctctagcctcaggctccagccccagtggggtactgtacagttaactgaagaagaattttaaagacgatttgaacaagaaaatgaaggcagtgggaaagcaatgccaaatggttgtggagaaagtggccggagcctccctggagtggagcagccctgaagcctgtgccccccgacctgcgggccgctgttttggtttgacatgacaaggaaaggacttcctgctgaccctgagagcctctggggtgccgcggcaccacggggcatgcatgattgtgctagcgtttagtctgagttgatctttttaaaactgcaagtgttgaatactagaggttgttagacccttttttatgttttttaattaatcagtcacttgtaaaagcaaacaagcggtccatccccttttcaaggtcacttttttgatggtaccgaagatcccatggacattaagggacagctaactgtggccagactcagccccatgtccttggccaggcccaaggagaggactcggccccatggggtgtgccagtcttgcagtccgccccagctgagtagcgtgagccagatgacgccacagagacccgcctcttccctgaacgcgggtcggtgtggagtcagtgactgctgactcagggagctccttggccccgtgggcactgtgccagggctggggccttctgctgctgccacacccagctcaggcctgggccagcccctgcccccagcccactgagggggtgggcttactccctgggcagtcttgggggccagagctgaggccagtccatattacagtggctgggctgtttttttcagtagcccctagcattggctgggattcctgttcctgggtgcgcctccacctcccttctgatgtttcctggctatggtggggtgggaacctcagtttcccccaaagtcttccctggatgctggcttcaggttgaagtccctggttcttccagttcctcacgggttaggtaggggctcctgcatcaccttcagaatccagttccaacccccactctccttaggccttgtgctctgctctgccctgccaggctgcccttgtccatgtgagtagcatgggcgggtggtggggacggcagtggtgatgaagggggtgcaccacaggcctcatgaagcagttcccacatgggcgtgtggctggggcgtggccaccacagagcacatggctgtgtctaggcgcaagcactttagcagtatctgtttacatgcgcaaggatcaagccgactacctgtgctgtctactgggacagcagtctccgagctactccgtacctccctctgccaggtcgtggagttaggccccagtccctacttgtcactggttcccactgtgctcctaactgtgcagcacctgggagctctggcctggggctggaggccctggtaggagctgcagttggaggccgttctgtgcccagcagcggtgagcggctcccatgggccctgtgtctgcagggagccagggctgcggcacatgtgctgtgaaactggcacccacctggcgtgctgctgccgccacttgcttcctgcagcacctcctaccctgctccgtgtcctccctctccccgcgcctggctcaggagtgctggaaaagctcacgcctcggcctgggagcctggcctcttgatatacctcgagcttcccctgtgctccccagccccaggaccactggccccttggcctgaggggctgggggccccacgacctgcagcgtcgagtccgggagagagcccggagcggcgtgccatctcggctcggccttgctgagagcctccgccctggctttctccctgtctggattcagtggctcacgttggtgctacacagctagaatagatatatttagagagagagatatttttaagacaaagcccacaattagctgtcctttaacaccgcagaaccccctcccagaagaagagcgatccctcggacggtccgggcgggcaccctcagccgggctctttgcagaagcagcaccgctgactgtgggcccggccctcagatgtgtacatatacggctatttcctattttactgttcttcagatttagtacttgtaaataaacacacacattaaggagagattaaacatttttgctaaaa

SEQ ID NO: 323818 - DNA, 3759 bp, Homo sapiens
tcgcgggatgcaaattaggctaagtagaggcgcggttaatcggccgaggctccactctgagcacaagctgggcaaggactcaccctccaacaagctgctctacgccaaggacatccccaactacaagagctgggtggagaggtactatgcagacatcgccaagatgccagccatcagcgaccaggacatgagtgcgtatctggctgagcagtcccgcctgcacctgagccagttcaacagcatgagcgccttgcacgagatctactcctacatcaccaagtacaaggatgagatcctggcagccctggagaaggatgagcaggcgcggcggcagcggctgcggagcaagctggagcaggtggtggacacgatggccctgagcagctgagccccagctgtgatcatccagcatgatgcagcgtgaggacagctgagcagggaccgggacagccctcaccgcatgcgtgtggagtgtccggtggtgctcgggccgccgcagtgcagcgactgcccggccctccctcccctgcctcacccggtcgggtcccggctcttcctgtgtggaggtgatggtacctgccacaccacagctgcgcacacagctgcttgctcaggggccgggacagcactgggtgctcaggctggccaaggaccttcattgcctggcaagagctgcccagtggccttcatgggagaagggctgacctctgaggggctgaggggtgaggccagggccctccagggggaggggtagccagcttgggctgtccccttgagaccaggacaagaggctgggggtgtcagcattcccagctttccaagctgcccccaggcggcagagtctgagggtcccggggcccggttggcagctggagaaagaggcaaaaagcccgtagccgggcaagaggagctcaagtcggtctgggcccgttgccaccgactcccacctccagcacccatgcccgctgcaccgctgccatcctcagattcaccgcgtgctctgcgcggccgaggccggagcaccacatccacctcgccccagagaggctctgctccctcctatggaggggctgtgggccaggctgctcagactcctgggtggcttccagacggaccgggcagcccctctccgtcctcagggctgtgcctctgggagccactgggccaggggccccgggtcgcagagagcacgttcccgttatttattcccctccgcgtctacacaggctgccctggcagctgtcttcaagggtaggctgagctccccaccctggagcccctgagggcggcccctgagcactcctctctctccactctctctgtccctgccccagcggcttccagtgtggcatctcagcagtgtcctggcccctccagagcagtgggacatctggggactgtttttgtgtttaggggaaaaaattctgctgcactctgcttgggccttgaggtctgtggcagggctcctctggcccgcagtggcctggatctatctgggccatgagtgacgggcagtgaccagagggactggaggccagcggtgtccacccttgccctcagcaagagagaatgcattcttaaaagaaagctgtacatgtatatatatgcatatatatatatgtggctctagcctcaggctccagccccagtggggtactgtacagttaactgaagaagaattttaaagacgatttgaacaagaaaatgaaggcagtgggaaagcaatgccaaatggttgtggagaaagtggccggagcctccctggagtggagcagccctgaagcctgtgccccccgacctgcgggccgctgttttggtttgacatgacaaggaaaggacttcctgctgaccctgagagcctctggggtgccgcggcaccacggggcatgcatgattgtgctagcgtttagtctgagttgatctttttaaaactgcaagtgttgaatactagaggttgttagacccttttttatgttttttaattaatcagtcacttgtaaaagcaaacaagcggtccatccccttttcaaggtcacttttttgatggtaccgaagatcccatggacattaagggacagctaactgtggccagactcagccccatgtccttggccaggcccaaggagaggactcggccccatggggtgtgccagtcttgcagtccgccccagctgagtagcgtgagccagatgacgccacagagacccgcctcttccctgaacgcgggtcggtgtggagtcagtgactgctgactcagggagctccttggccccgtgggcactgtgccagggctggggccttctgctgctgccacacccagctcaggcctgggccagcccctgcccccagcccactgagggggtgggcttactccctgggcagtcttgggggccagagctgaggccagtccatattacagtggctgggctgtttttttcagtagcccctagcattggctgggattcctgttcctgggtgcgcctccacctcccttctgatgtttcctggctatggtggggtgggaacctcagtttcccccaaagtcttccctggatgctggcttcaggttgaagtccctggttcttccagttcctcacgggttaggtaggggctcctgcatcaccttcagaatccagttccaacccccactctccttaggccttgtgctctgctctgccctgccaggctgcccttgtccatgtgagtagcatgggcgggtggtggggacggcagtggtgatgaagggggtgcaccacaggcctcatgaagcagttcccacatgggcgtgtggctggggcgtggccaccacagagcacatggctgtgtctaggcgcaagcactttagcagtatctgtttacatgcgcaaggatcaagccgactacctgtgctgtctactgggacagcagtctccgagctactccgtacctccctctgccaggtcgtggagttaggccccagtccctacttgtcactggttcccactgtgctcctaactgtgcagcacctgggagctctggcctggggctggaggccctggtaggagctgcagttggaggccgttctgtgcccagcagcggtgagcggctcccatgggccctgtgtctgcagggagccagggctgcggcacatgtgctgtgaaactggcacccacctggcgtgctgctgccgccacttgcttcctgcagcacctcctaccctgctccgtgtcctccctctccccgcgcctggctcaggagtgctggaaaagctcacgcctcggcctgggagcctggcctcttgatatacctcgagcttcccctgtgctccccagccccaggaccactggccccttggcctgaggggctgggggccccacgacctgcagcgtcgagtccgggagagagcccggagcggcgtgccatctcggctcggccttgctgagagcctccgccctggctttctccctgtctggattcagtggctcacgttggtgctacacagctagaatagatatatttagagagagagatatttttaagacaaagcccacaattagctgtcctttaacaccgcagaaccccctcccagaagaagagcgatccctcggacggtccgggcgggcaccctcagccgggctctttgcagaagcagcaccgctgactgtgggcccggccctcagatgtgtacatatacggctatttcctattttactgttcttcagatttagtacttgtaaataaacacacacattaaggagagattaaacatttttgctaaaa

SEQ ID NO: 323819 - DNA, 4356 bp, Homo sapiens
  misc_feature (72)..(72): n is a, c, g, or t
  misc_feature (98)..(98): n is a, c, g, or t
  misc_feature (264)..(264): n is a, c, g, or t
  misc_feature (354)..(354): n is a, c, g, or t
  misc_feature (847)..(847): n is a, c, g, or t
  misc_feature (952)..(952): n is a, c, g, or t
  misc_feature (958)..(958): n is a, c, g, or t
  misc_feature (1154)..(1154): n is a, c, g, or t
  misc_feature (1315)..(1315): n is a, c, g, or t
  misc_feature (1444)..(1444): n is a, c, g, or t
gggcatgtgggctgaggcaggcttgcccagggcaggcgggggttcacagccccccttccgcaccttctcggncagcgactggggcctcacccacctantggtgcatgagcagacaggcgaggtgtatgtgggcgcagtgaaccgcatctataagctgtcggggaacctgacactgctgcgggcccacgtcacgggccctgtggaggacaacgagaagtgctacccgccgcccagcgtgcagtcctgcccccacggcctgggcantactgacaacgtcaacaagctgctgctgctggactatgccgctaaccgcctgctggcctgtggcagcgcctcccagggcatctgccagtncctgcgtctggacgatctcttcaaactgggtgagccacaccaccgtaaggagcactacctgtccagcgtgcaggaggcaggcagcatggcgggcgtgctcattgccgggccaccgggccagggccaggccaagctcttcgtgggcacacccatcgatggcaagtccgagtacttccccacactgtccagccgtcggctcatggccaacgaggaggatgccgacatgttcggcttcgtgtaccaggatgagtttgtgtcatcacagctcaagatcccttcggacacgctgtccaagttcccggcctttgacatctactatgtgtacagcttccgcagcgagcagtttgtctactacctcacgctgcagctagacacacagctgacctcgcctgatgccgccggcgagcacttcttcacgtccaagatcgtgcggctctgtgtggacgaccccaaattctactcgtacgttgagttccccattggctgcgagcangcgggtgtggagtaccgcctggtgcaggatgcctacctgagccggcccggccgtgccctggcccaccagctgggcctggctgaggacgaggacgtgctgttcacngtgttngcccagggccagaagaaccgcgtgaagccaccaaaggagtcagcactgtgcctgttcacgctcagggccatcaaggagaagattaaggagcgcatccagtcctgctaccgtggtgagggcaagctctccctgccgtggctgctcaacaaggagctgggctgcatcaactcgcccctgcagatcgatgacgacttcngcgggcaggacttcaaccagcccctggggggcacagtcaccattgaggggacgcccctgttcgtggacaaggatgatggcctgaccgccgtggctgcctatgactatcggggccgcactgtggtattcgccggcacgcgaagtggccgcatccgcaagatnctggtggacctctcaaaccccggtggccggcctgccctggcctacgagagcgtcgtggcccaggagggcagccccatcctgcgagacctcgtcctcagccccaaccaccagtacctctacgccatgacngagaagcaggtgacgcgggtgcctgtggagagctgtgtgcagtacacgtcctgtgagctgtgtctggggtcacgggacccccactgtggctggtgtgtcctgcacagcatctgctcgcggcgggacgcctgtgagcgagcagacgagccccagcgctttgctgcggacctgctgcagtgtgtgcagctgactgtgcagccccgcaatgtgtctgtcaccatgtcccaggtcccacttgtgctgcaggcctggaacgtgcctgacctctcagctggcgtcaactgctccttcgaggacttcacggaatctgagagcgtcctggaggatggccggatccactgccgctcaccctccgcccgggaggtggcgcccatcacgcggggccagggagaccagcgggtggtgaaactctacctaaagtccaaggagacagggaagaagtttgcgtctgtggacttcgtcttctacaactgcagcgtccaccagtcctgcctgtcctgtgtcaacggctcctttccctgccactggtgcaaataccgccacgtgtgcacacacaacgtggctgactgcgccttcctggagggccgtgtcaacgtgtctgaggactgcccacagatcctgccctccacgcagatctacgtgccagtgggagtggtaaaacccatcaccctggccgcacggaacctgccacagccacagtcaggccagcgtggatatgagtgcctcttccacatcccgggcagcccggcccgtgtcaccgccctgcgcttcaacagctccagcctgcagtgccagaattcctcgtactcctacgaggggaacgatgtcagcgacctgccagtgaacctgtcagtcgtgtggaacggcaactttgtcattgacaacccacagaacatccaggcgcacctctacaagtgcccggccctgcgcgagagctgcggcctctgcctcaaggccgacccgcgcttcgagtgcggatggtgcgtggccgagcgccgctgctccctgcgacaccactgcgctgccggcaccacggggcatgcatgattgtgctagcgtttagtctgagttgatctttttaaaactgcaagtgttgaatactagaggttgttagacccttttttatgttttttaattaatcagtcacttgtaaaagcaaacaagcggtccatccccttttcaaggtcacttttttgatggtaccgaagatcccatggacattaagggacagctaactgtggccagactcagccccatgtccttggccaggcccaaggagaggactcggccccatggggtgtgccagtcttgcagtccgccccagctgagtagcgtgagccagatgacgccacagagacccgcctcttccctgaacgcgggtcggtgtggagtcagtgactgctgactcagggagctccttggccccgtgggcactgtgccagggctggggccttctgctgctgccacacccagctcaggcctgggccagcccctgcccccagcccactgagggggtgggcttactccctgggcagtcttgggggccagagctgaggccagtccatattacagtggctgggctgtttttttcagtagcccctagcattggctgggattcctgttcctgggtgcgcctccacctcccttctgatgtttcctggctatggtggggtgggaacctcagtttcccccaaagtcttccctggatgctggcttcaggttgaagtccctggttcttccagttcctcacgggttaggtaggggctcctgcatcaccttcagaatccagttccaacccccactctccttaggccttgtgctctgctctgccctgccaggctgcccttgtccatgtgagtagcatgggcgggtggtggggacggcagtggtgatgaagggggtgcaccacaggcctcatgaagcagttcccacatgggcgtgtggctggggcgtggccaccacagagcacatggctgtgtctaggcgcaagcactttagcagtatctgtttacatgcgcaaggatcaagccgactacctgtgctgtctactgggacagcagtctccgagctactccgtacctccctctgccaggtcgtggagttaggccccagtccctacttgtcactggttcccactgtgctcctaactgtgcagcacctgggagctctggcctggggctggaggccctggtaggagctgcagttggaggccgttctgtgcccagcagcggtgagcggctcccatgggccctgtgtctgcagggagccagggctgcggcacatgtgctgtgaaactggcacccacctggcgtgctgctgccgccacttgcttcctgcagcacctcctaccctgctccgtgtcctccctctccccgcgcctggctcaggagtgctggaaaagctcacgcctcggcctgggagcctggcctcttgatatacctcgagcttcccctgtgctccccagccccaggaccactggccccttggcctgaggggctgggggccccacgacctgcagcgtcgagtccgggagagagcccggagcggcgtgccatctcggctcggccttgctgagagcctccgccctggctttctccctgtctggattcagtggctcacgttggtgctacacagctagaatagatatatttagagagagagatatttttaagacaaagcccacaattagctgtcctttaacaccgcagaaccccctcccagaagaagagcgatccctcggacggtccgggcgggcaccctcagccgggctctttgcagaagcagcaccgctgactgtgggcccggccctcagatgtgtacatatacggctatttcctattttactgttcttcagatttagtacttgtaaataaacacacacattaaggagagattaaacatttttgctaaaa

SEQ ID NO: 323820 - DNA, 559 bp, Homo sapiens
ggccgcggcatccccctgcccatccagaccttcctgtggcggcaaaccagtgcatttttgaggcccaaactggggaagcaatatgaagcttcttgtgtgtcctttgagcgagtgttggtagaaaacaagctgcatggcctctctccagctctctctgaagccatccagagcatttccagatgggaactggtgcaagctgctttgcctcatgtcctccactgcactgcaaccctgctttcaaaccgaaacaagctaggccaccaggataaattgggtgttgctgagacaaagctccttcacactctacactggatgcttctggaggccccccaggactgcaacaatgagcggtttgggggtacagaccgaggctccagctggggtggaagcagcagtgctttcatccaccaggttgaaaaccagggttctccagggcagccttgccaaagcagctctaatgacgaagaagagaacaaccgaagaaagatcttccagaactccatggctactgtggagctcttcgtgtttctgtttgctcccctggtacacaggatcaagg

SEQ ID NO: 323821 - DNA, 510 bp, Homo sapiens
ggccgcggcatccccctgcccatccagaccttcctgtggcggcaaaccagtcctttgagcgagtgttggtagaaaacaagctgcatggcctctctccagctctctctgaagccatccagagcatttccagatgggaactggtgcaagctgctttgcctcatgtcctccactgcactgcaaccctgctttcaaaccgaaacaagctaggccaccaggataaattgggtgttgctgagacaaagctccttcacactctacactggatgcttctggaggccccccaggactgcaacaatgagcggtttgggggtacagaccgaggctccagctggggtggaagcagcagtgctttcatccaccaggttgaaaaccagggttctccagggcagccttgccaaagcagctctaatgacgaagaagagaacaaccgaagaaagatcttccagaactccatggctactgtggagctcttcgtgtttctgtttgctcccctggtacacaggatcaagg

SEQ ID NO: 323822 - DNA, 343 bp, Homo sapiens
cggccgcggcatccccctgcccatccagaccttcctgtggcggcaaaccaggtgaggggcgcagagggcgcaccgcgggccgccctgggctgggggcgctcctggggccgcccgggtcgccgctgccgccgccgccgctgaggccgcgccacagcctgcagctccctctctggggctggaaaacaagccctctgcaccagcttaaaaacacgcattaaaatatgtatatatatgtatatatttcagtgaagtttgacgacaagcagattggcagttgtcgcataaatgtatacattattttagggggtgggagggcagagagcctgggaagagggggcgggga

SEQ ID NO: 323823 - DNA, 314 bp, Homo sapiens
gtgtgtgtgtgtgtgtgtgtgtgtgtattttttttgtctgcctggtcctttgttgctaaacatgccatttcagcagtctgctttgggtttgtgtttgagatctgttttaattgttgtggcctgttgagaaagaacacagacagactgaacacaaaacaattcagtggtgcaaaatgaggcctaatgataggatagcaatatatgtacaaacagaggttctttataattgaattgagaaaagaggtgggagagggtgtcatgtggcacacagtaatataagcatgtggatggcaagagaactacttacggagaga

SEQ ID NO: 323824 - DNA, 789 bp, Homo sapiens
agtagcggaagtcccgcccagcctaggccgaacttccggctctcactgctaggggcttaagcggagggagtcgagccagcgtcgccgcgatggtgttgttggagagcgagcagttcctgacggagctgaccagacttttccagaagtgccggacgtcgggcagcgtctatatcaccttgaagaagtatgacggtcgaaccaaacccattccaaagaaaggtactgtggagggctttgagcccgcagacaacaagtgtctgttaagagctaccgatgggaagaagaagatcagcactgtggtgagctccaaggaagtgaataagtttcagatggcttattcaaacctccttagagctaacatggatgggttgaagaagagagacaaaaagaacaaaactaagaagaccaaagcagcagcagcagcagcagcagcagcacctgccgcagcagcaacagcagcaacaacagcagcaacaacagcagcaacagcagcacagtaaagggcatacatttcctgctttcaccaattaaccactgaattgctattttttccttttggccagatagctaggtttctggttcccccacagtaggtgttttcacataagattagggtccttttggaaagaatagttgcagtgtttataggatagttgtggtaagaatctagtttattttgcatttggctaattggtctgtgctgcatggttatatactcctggattatagattaaaagtctctgtagacatctctgtgaagagcaagctatcattaaacatgtctgttta

SEQ ID NO: 323825 - DNA, 902 bp, Homo sapiens
agtagcggaagtcccgcccagcctaggccgaacttccggctctcactgctaggggcttaagcggagggagtcgagccagcgtcgccgcgatggtgttgttggagagcgagcagttcctgacggagctgaccagacttttccagaagtgccggacgtcgggcagcgtctatatcaccttgaagaagtatgacggtcgaaccaaacccattccaaagaaaggtactgtggagggctttgagcccgcagacaacaagtgtctgttaagagctaccgatgggaagaagaagatcagcactgtggtgagctccaaggaagtgaataagtttcagatggcttattcaaacctccttagagctaacatggatgggttgaagaagagagacaaaaagaacaaaactaagaagaccaaagcagcagcagcagcagcagcagcagcacctgccgcagcagcaacagcagcaacaacagcagcaacaacagcagcaacagcagcacagtaaagggcatacatttcctgctttcaccaattaaccactgaattgctattttttccttttggccagatagctaggtttctggttcccccacagtaggtgttttcacataagattagggtccttttggaaagaatagttgcagtgtttataggatagttgtggtaagaatctagtttattttgcatttggctaattggtctgtgctgcatggttatatactcctggattatagattaaaagtctctgtagacatctctgtgaagagcaagctatcattaaacatgtctgtttaaaaaaaaaaaaaacccgggctcttatgccggggggggaaaagggtatgaacggccctggccatgggttccgaccattttgtcagggaaacccggcccaagaggcaaaatcaac

SEQ ID NO: 323826 - DNA, 836 bp, Homo sapiens
agtagcggaagtcccgcccagcctaggccgaacttccggctctcactgctaggggcttaagcggagggagtcgagccagcgtcgccgcgatggtgttgttggagagcgagcagttcctgacggagctgaccagacttttccagaagtgccggacgtcgggcagcgtctatatcaccttgaagaagtatgacggtcgaaccaaacccattccaaagaaaggtactgtggagggctttgagcccgcagacaacaagtgtctgttaagagctaccgatgggaagaagaagatcagcactgtgaacccagggagaaaacccaatgccacctttctaagggatttcaagaggtgagctccaaggaagtgaataagtttcagatggcttattcaaacctccttagagctaacatggatgggttgaagaagagagacaaaaagaacaaaactaagaagaccaaagcagcagcagcagcagcagcagcagcacctgccgcagcagcaacagcagcaacaacagcagcaacaacagcagcaacagcagcacagtaaagggcatacatttcctgctttcaccaattaaccactgaattgctattttttccttttggccagatagctaggtttctggttcccccacagtaggtgttttcacataagattagggtccttttggaaagaatagttgcagtgtttataggatagttgtggtaagaatctagtttattttgcatttggctaattggtctgtgctgcatggttatatactcctggattatagattaaaagtctctgtagacatctctgtgaagagcaagctatcattaaacatgtctgttta

SEQ ID NO: 323827 - DNA, 363 bp, Homo sapiens
gttgtccctcgtagagaagttggttgggaaagtcgagtgcgtattaatacgcactgagtttcctcctcgttcttccccctacacccaggaaatacagtttgcaatgcactgaaacagaaccgagcaagtcatgagatttgggagtaaagatgagacagatggttgaagaaaattagaggcataatttctcagtgaatcaaggaatagttgcagtgtttataggatagttgtggtaagaatctagtttattttgcatttggctaattggtctgtgctgcatggttatatactcctggattatagattaaaagtctctgtagacatctctgtgaagagcaagctatcattaaacatgtctgttta

SEQ ID NO: 323828 - DNA, 416 bp, Homo sapiens
gttgtccctcgtagagaagttggttgggaaagtcgagtgcgtattaatacgcactgagtttcctcctcgttcttccccctacacccaggaaatacagtttgcaatgcactgaaacagaaccgagcaagtcatgagatttgggagtaaagatgagacagatggttgaagaaaattagaggcataatttctcagtgaatcaaggaatagttgcagtgtttataggatagttgtggtaagaatctagtttattttgcatttggctaattggtctgtgctgcatggttatatactcctggattatagattaaaagtctctgtagacatctctgtgaagagcaagctatcattaaacatgtctgtttaaaaaaaaaagaagaaaataatatttgccctatagagagttcgtattacaagtc

SEQ ID NO: 323829 - DNA, 1094 bp, Homo sapiens
agtagcggaagtcccgcccagcctaggccgaacttccggctctcactgctaggggcttaagcggagggagtcgagccagcgtcgccgcgatggtgttgttggagagcgagcagttcctgacggagctgaccagacttttccagaagtgccggacgtcgggcagcgtctatatcaccttgaagaagtatgacggtcgaaccaaacccattccaaagaaaggtactgtggagggctttgagcccgcagacaacaagtgtctgttaagagctaccgatgggaagaagaagatcagcactgtggtgagctccaaggaagtgaataagtttcagatggcttattcaaacctccttagagctaacatggatgggttgaagaagagagacaaaaagaacaaaactaagaagaccaaagcagcagcagcagcagcagcagcagcacctgccgcagcagcaacagcagcaacaacagcagcaacaacagcagcaacagcagcacagtaaagggcatacatttcctgctttcaccaattaaccactgaattgctattttttccttttggccagatagctaggtttctggttcccccacagtaggtgttttcacataagattagggtccttttggaaagaatagttgcagtgtttataggatagttgtggtaagaatctagtttattttgcatttggctaattggtctgtgctgcatggttatatactcctggattatagattaaaagtctctgtagacatctctgtgaagagcaagctatcattaaacatgtctgtttatcagcactgtctctttattcctttcccaacccattttaatagttctggcaataactactaaatctagaatgatgtgattaatgaataggctttagctctataatatcttctaggttattagaattgaaacctgacagttttataaaaagtcatgttatctcatgagctgcttcccacctggctgtataattttatcatcatggttccccagtttcgatgagttctcacagtcaaatgagagtttgtttaaccaccttaggagaaacatactacaaagtcatcaagaataaaggttccaaagtaat

SEQ ID NO: 323830 - DNA, 1850 bp, Homo sapiens
  misc_feature (1849)..(1850): n is a, c, g, or t
agtagcggaagtcccgcccagcctaggccgaacttccggctctcactgctaggggcttaagcggagggagtcgagccagcgtcgccgcgatggtgttgttggagagcgagcagttcctgacggagctgaccagacttttccagaagtgccggacgtcgggcagcgtctatatcaccttgaagaagtatgacggtcgaaccaaacccattccaaagaaaggtactgtggagggctttgagcccgcagacaacaagtgtctgttaagagctaccgatgggaagaagaagatcagcactgtggtgagctccaaggaagtgaataagtttcagatggcttattcaaacctccttagagctaacatggatgggttgaagaagagagacaaaaagaacaaaactaagaagaccaaagcagcagcagcagcagcagcagcagcacctgccgcagcagcaacagcagcaacaacagcagcaacaacagcagcaacagcagcacagtaaagggcatacatttcctgctttcaccaattaaccactgaattgctattttttccttttggccagatagctaggtttctggttcccccacagtaggtgttttcacataagattagggtccttttggaaagaatagttgcagtgtttataggatagttgtggtaagaatctagtttattttgcatttggctaattggtctgtgctgcatggttatatactcctggattatagattaaaagtctctgtagacatctctgtgaagagcaagctatcattaaacatgtctgtttatcagcactgtctctttattcctttcccaacccattttaatagttctggcaataactactaaatctagaatgatgtgattaatgaataggctttagctctataatatcttctaggttattagaattgaaacctgacagttttataaaaagtcatgttatctcatgagctgcttcccacctggctgtataattttatcatcatggttccccagtttcgatgagttctcacagtcaaatgagagtttgtttaaccaccttaggagaaacatactacaaagtcatcaagaataaaggttccaaagtaataaaacaaaatacacacaccaacaacaaacaacaaacaaactaccaaaaaaaaaaaaaaaaaaaaaaacaaaaaaaaaaaaaaaaaaaaaaacaaaaaaaaaaaaaaaaaaaaaaaaacacaaccacaaaacaaaaaaaaaaacaaaaaaatagagggggcagcctatctgaaaacaacaagggagaccacaaagtctgacatcacacaacataaaaagagcggctctcaataagaagaaataaaacaatacagcggcgacgggcaaacaaacagacaggacgccggaaaaaaacatccccacgcacctaggagagagcaacacccttagagtagagacaaaaagaggaccaacacataccacgataataacccagccgcacaacaaacaaagaaagactgtcgagataacccaccactataactgacgacaagaaaacaatgacatagcagggtattcgccactatcacgcgcgcatcacgctaactataataaatacagaagcagtagtgcgtccagacgaaggcgtcagcgacaagggaaagagaaaccagacgagacgtggtcagcgctatagcataggaaaagagaaagaacagaccaacgaaaaggcaaaaaaagacacaaccccccagcagagagagagagaatcaaagagataagaaagcaaaaaacaaatgaaactaatcagaagaggagagaagaaaaagggtgaaactagagatacaaatcaactctccctgggtaagtctaatnn

SEQ ID NO: 323831 - DNA, 1086 bp, Homo sapiens
gcgttactcgagacctgtgcctcctgcaggaggaccaggccttgacgcggcaggacgaggatttggggctggctaacggggctgggcctgttgttttgcgagcagttcctgacggagctgaccagacttttccagaagtgccggacgtcgggcagcgtctatatcaccttgaagaagtatgacggtcgaaccaaacccattccaaagaaaggtactgtggagggctttgagcccgcagacaacaagtgtctgttaagagctaccgatgggaagaagaagatcagcactgtggtgagctccaaggaagtgaataagtttcagatggcttattcaaacctccttagagctaacatggatgggttgaagaagagagacaaaaagaacaaaactaagaagaccaaagcagcagcagcagcagcagcagcagcacctgccgcagcagcaacagcagcaacaacagcagcaacaacagcagcaacagcagcacagtaaagggcatacatttcctgctttcaccaattaaccactgaattgctattttttccttttggccagatagctaggtttctggttcccccacagtaggtgttttcacataagattagggtccttttggaaagaatagttgcagtgtttataggatagttgtggtaagaatctagtttattttgcatttggctaattggtctgtgctgcatggttatatactcctggattatagattaaaagtctctgtagacatctctgtgaagagcaagctatcattaaacatgtctgtttatcagcactgtctctttattcctttcccaacccattttaatagttctggcaataactactaaatctagaatgatgtgattaatgaataggctttagctctataatatcttctaggttattagaattgaaacctgacagttttataaaaagtcatgttatctcatgagctgcttcccacctggctgtataattttatcatcatggttccccagtttcgatgagttctcacagtcaaatgagagtttgtttaaccaccttaggagaaacatactacaaagtcatcaagaataaaggttccaaagtaat

SEQ ID NO: 323832 - DNA, 1446 bp, Homo sapiens
agtagcggaagtcccgcccagcctaggccgaacttccggctctcactgctaggggcttaagcggagggagtcgagccagcgtcgccgcgatggtgttgttggagagcgagcagttcctgacggagctgaccagacttttccagaagtgccggacgtcgggcagcgtctatatcaccttgaagaagtgtaagcagcgggaggggagccgggcgatgctccctgggttcccggtgtctgggagccaccggagtctgtctgccgcggaccgccgccttcctctacctttccccaccctgtactgagcacattcggggcttcgggcccggaaaatagtagggattgtagctggctcagtccccagcactgagccgcctaggttgcttctggtaacaatgggccccaagcagcccagggctctttgtcagggatcccagacgccgccactttgagtggaatttaacgtgcttcgatattacatgtttccgtcgtggaaataatagtttctccagggtttcgccagaccgtgatagcagatgagatgacggtcgaaccaaacccattccaaagaaaggtactgtggagggctttgagcccgcagacaacaagtgtctgttaagagctaccgatgggaagaagaagatcagcactgtggtgagctccaaggaagtgaataagtttcagatggcttattcaaacctccttagagctaacatggatgggttgaagaagagagacaaaaagaacaaaactaagaagaccaaagcagcagcagcagcagcagcagcagcacctgccgcagcagcaacagcagcaacaacagcagcaacaacagcagcaacagcagcacagtaaagggcatacatttcctgctttcaccaattaaccactgaattgctattttttccttttggccagatagctaggtttctggttcccccacagtaggtgttttcacataagattagggtccttttggaaagaatagttgcagtgtttataggatagttgtggtaagaatctagtttattttgcatttggctaattggtctgtgctgcatggttatatactcctggattatagattaaaagtctctgtagacatctctgtgaagagcaagctatcattaaacatgtctgtttatcagcactgtctctttattcctttcccaacccattttaatagttctggcaataactactaaatctagaatgatgtgattaatgaataggctttagctctataatatcttctaggttattagaattgaaacctgacagttttataaaaagtcatgttatctcatgagctgcttcccacctggctgtataattttatcatcatggttccccagtttcgatgagttctcacagtcaaatgagagtttgtttaaccaccttaggagaaacatactacaaagtcatcaagaataaaggttccaaagtaat

SEQ ID NO: 323833 - DNA, 968 bp, Homo sapiens
ggtcggagtgtggtgcaattcgcaggagggatggcagcgtctatattaccttgaagatttatgacggtcgaaccaaacccattccaaagaaaggtactgtggagggctttgagcccgcagacaacaagtgtctgttaagagctaccgatgggaagaagaagatcagcactgtggtgagctccaaggaagtgaataagtttcagatggcttattcaaacctccttagagctaacatggatgggttgaagaagagagacaaaaagaacaaaactaagaagaccaaagcagcagcagcagcagcagcagcagcacctgccgcagcagcaacagcagcaacaacagcagcaacaacagcagcaacagcagcacagtaaagggcatacatttcctgctttcaccaattaaccactgaattgctattttttccttttggccagatagctaggtttctggttcccccacagtaggtgttttcacataagattagggtccttttggaaagaatagttgcagtgtttataggatagttgtggtaagaatctagtttattttgcatttggctaattggtctgtgctgcatggttatatactcctggattatagattaaaagtctctgtagacatctctgtgaagagcaagctatcattaaacatgtctgtttatcagcactgtctctttattcctttcccaacccattttaatagttctggcaataactactaaatctagaatgatgtgattaatgaataggctttagctctataatatcttctaggttattagaattgaaacctgacagttttataaaaagtcatgttatctcatgagctgcttcccacctggctgtataattttatcatcatggttccccagtttcgatgagttctcacagtcaaatgagagtttgtttaaccaccttaggagaaacatactacaaagtcatcaagaataaaggttccaaagtaat

SEQ ID NO: 323834 - DNA, 1141 bp, Homo sapiens
agtagcggaagtcccgcccagcctaggccgaacttccggctctcactgctaggggcttaagcggagggagtcgagccagcgtcgccgcgatggtgttgttggagagcgagcagttcctgacggagctgaccagacttttccagaagtgccggacgtcgggcagcgtctatatcaccttgaagaagtatgacggtcgaaccaaacccattccaaagaaaggtactgtggagggctttgagcccgcagacaacaagtgtctgttaagagctaccgatgggaagaagaagatcagcactgtgaacccagggagaaaacccaatgccacctttctaagggatttcaagaggtgagctccaaggaagtgaataagtttcagatggcttattcaaacctccttagagctaacatggatgggttgaagaagagagacaaaaagaacaaaactaagaagaccaaagcagcagcagcagcagcagcagcagcacctgccgcagcagcaacagcagcaacaacagcagcaacaacagcagcaacagcagcacagtaaagggcatacatttcctgctttcaccaattaaccactgaattgctattttttccttttggccagatagctaggtttctggttcccccacagtaggtgttttcacataagattagggtccttttggaaagaatagttgcagtgtttataggatagttgtggtaagaatctagtttattttgcatttggctaattggtctgtgctgcatggttatatactcctggattatagattaaaagtctctgtagacatctctgtgaagagcaagctatcattaaacatgtctgtttatcagcactgtctctttattcctttcccaacccattttaatagttctggcaataactactaaatctagaatgatgtgattaatgaataggctttagctctataatatcttctaggttattagaattgaaacctgacagttttataaaaagtcatgttatctcatgagctgcttcccacctggctgtataattttatcatcatggttccccagtttcgatgagttctcacagtcaaatgagagtttgtttaaccaccttaggagaaacatactacaaagtcatcaagaataaaggttccaaagtaat

SEQ ID NO: 323835 - DNA, 1181 bp, Homo sapiens
gtaagattgatacttgggttcactgctctccggagataagttttaccagtatgtttcaagtaaaagctgccagggtgtgaatttcaacgctaataccgtcttcctttctagtttttttaagttagattttgtcttaggctgtagatacatgctacctatactatagttgaacaagaagttgcctgcaattttcccttggaaaaaaacgtaaaaaatgtgtgcaactgtctgtgggtgttgcagaagctgctataatgtgaaagagtgttttatgcttataccattttccggtacaagtgtccaatggtgctatattctttcctgatttttggctaccctaaatccattatgcagatagggctggtgttctgccagtttgcacatcttcccactaaggtatgctctgttgtatctttcaggcttattcaaacctccttagagctaacatggatgggttgaagaagagagacaaaaagaacaaaactaagaagaccaaagcagcagcagcagcagcagcagcagcacctgccgcagcagcaacagcagcaacaacagcagcaacaacagcagcaacagcagcacagtaaagggcatacatttcctgctttcaccaattaaccactgaattgctattttttccttttggccagatagctaggtttctggttcccccacagtaggtgttttcacataagattagggtccttttggaaagaatagttgcagtgtttataggatagttgtggtaagaatctagtttattttgcatttggctaattggtctgtgctgcatggttatatactcctggattatagattaaaagtctctgtagacatctctgtgaagagcaagctatcattaaacatgtctgtttatcagcactgtctctttattcctttcccaacccattttaatagttctggcaataactactaaatctagaatgatgtgattaatgaataggctttagctctataatatcttctaggttattagaattgaaacctgacagttttataaaaagtcatgttatctcatgagctgcttcccacctggctgtataattttatcatcatggttccccagtttcgatgagttctcacagtcaaatgagagtttgtttaaccaccttaggagaaacatactacaaagtcatcaagaataaaggttccaaagtaat

SEQ ID NO: 323836 - DNA, 1212 bp, Homo sapiens
  misc_feature (115)..(115): n is a, c, g, or t
  misc_feature (130)..(130): n is a, c, g, or t
  misc_feature (134)..(134): n is a, c, g, or t
  misc_feature (137)..(137): n is a, c, g, or t
ggacacattccgtctgctcactggtaccgcggctatagtcggtgaggcagtgcgatcctcagctgtctgtcccgtagagtaggagctctggtggtgcgcatgaactgcagtgacnttgcgtgttcctcgnaccntgntacacaagaacatgtctcccgaggagagtgcctgagacgctccgtggcaaccagatctctcatgatctgaccattgcatagaaagtcattacacgtggcgatcatcatacaacccagatcacctcacaagagacagagagcttctgatgatcagaggactttacgccacccgggccatgacaaacaagtgtctgttaagagctaccgatgggaagaagaagatcagcactgtgaacccagggagaaaacccaatgccacctttctaagggatttcaagaggtgagctccaaggaagtgaataagtttcagatggcttattcaaacctccttagagctaacatggatgggttgaagaagagagacaaaaagaacaaaactaagaagaccaaagcagcagcagcagcagcagcagcagcacctgccgcagcagcaacagcagcaacaacagcagcaacaacagcagcaacagcagcacagtaaagggcatacatttcctgctttcaccaattaaccactgaattgctattttttccttttggccagatagctaggtttctggttcccccacagtaggtgttttcacataagattagggtccttttggaaagaatagttgcagtgtttataggatagttgtggtaagaatctagtttattttgcatttggctaattggtctgtgctgcatggttatatactcctggattatagattaaaagtctctgtagacatctctgtgaagagcaagctatcattaaacatgtctgtttatcagcactgtctctttattcctttcccaacccattttaatagttctggcaataactactaaatctagaatgatgtgattaatgaataggctttagctctataatatcttctaggttattagaattgaaacctgacagttttataaaaagtcatgttatctcatgagctgcttcccacctggctgtataattttatcatcatggttccccagtttcgatgagttctcacagtcaaatgagagtttgtttaaccaccttaggagaaacatactacaaagtcatcaagaataaaggttccaaagtaat

SEQ ID NO: 323837 - DNA, 780 bp, Homo sapiens
gccgactactactactactactactactaaattcgcggccggtcgatggatgggttgaagaagagagacaaaaagaacaaaactaagaagaccaaagcagcagcagcagcagcagcagcagcacctgccgcagcagcaacagcagcaacaacagcagcaacaacagcagcaacagcagcacagtaaagggcatacatttcctgctttcaccaattaaccactgaattgctattttttccttttggccagatagctaggtttctggttcccccacagtaggtgttttcacataagattagggtccttttggaaagaatagttgcagtgtttataggatagttgtggtaagaatctagtttattttgcatttggctaattggtctgtgctgcatggttatatactcctggattatagattaaaagtctctgtagacatctctgtgaagagcaagctatcattaaacatgtctgtttatcagcactgtctctttattcctttcccaacccattttaatagttctggcaataactactaaatctagaatgatgtgattaatgaataggctttagctctataatatcttctaggttattagaattgaaacctgacagttttataaaaagtcatgttatctcatgagctgcttcccacctggctgtataattttatcatcatggttccccagtttcgatgagttctcacagtcaaatgagagtttgtttaaccaccttaggagaaacatactacaaagtcatcaagaataaaggttccaaagtaat

SEQ ID NO: 323838 - DNA, 1043 bp, Homo sapiens
agtagcggaagtcccgcccagcctaggccgaacttccggctctcactgctaggggcttaagcggagggagtcgagccagcgtcgccgcgatggtgttgttggagagcgagcagttcctgacggagctgaccagacttttccagaagtgccggacgtcgggcagcgtctatatcaccttgaagaagtatgacggtcgaaccaaacccattccaaagaaaggtactgtggagggctttgagcccgcagacaacaagtgtctgttaagagctaccgatgggaagaagaagatcagcactgtggtgagctccaaggaagtgaataagtttcagatggcttattcaaacctccttagagctaacatggatgggttgaagaagagagacaaaaagaacgcagcagcaacagcagcaacaacagcagcaacaacagcagcaacagcagcacagtaaagggcatacatttcctgctttcaccaattaaccactgaattgctattttttccttttggccagatagctaggtttctggttcccccacagtaggtgttttcacataagattagggtccttttggaaagaatagttgcagtgtttataggatagttgtggtaagaatctagtttattttgcatttggctaattggtctgtgctgcatggttatatactcctggattatagattaaaagtctctgtagacatctctgtgaagagcaagctatcattaaacatgtctgtttatcagcactgtctctttattcctttcccaacccattttaatagttctggcaataactactaaatctagaatgatgtgattaatgaataggctttagctctataatatcttctaggttattagaattgaaacctgacagttttataaaaagtcatgttatctcatgagctgcttcccacctggctgtataattttatcatcatggttccccagtttcgatgagttctcacagtcaaatgagagtttgtttaaccaccttaggagaaacatactacaaagtcatcaagaataaaggttccaaagtaat

SEQ ID NO: 323839 - DNA, 1024 bp, Homo sapiens
agtagcggaagtcccgcccagcctaggccgaacttccggctctcactgctaggggcttaagcggagggagtcgagccagcgtcgccgcgatggtgttgttggagagcgagcagttcctgacggagctgaccagacttttccagaagtgccggacgtcgggcagcgtctatatcaccttgaagaagtatgacggtcgaaccaaacccattccaaagaaaggtactgtggagggctttgagcccgcagacaacaagtgtctgttaagagctaccgatgggaagaagaagatcagcactgtggtgagctccaaggaagtgaataagtttcagatggcttattcaaacctccttagagctaacatggatgggttgaagaagagagacaaaaagaaacaacagcagcaacaacagcagcaacagcagcacagtaaagggcatacatttcctgctttcaccaattaaccactgaattgctattttttccttttggccagatagctaggtttctggttcccccacagtaggtgttttcacataagattagggtccttttggaaagaatagttgcagtgtttataggatagttgtggtaagaatctagtttattttgcatttggctaattggtctgtgctgcatggttatatactcctggattatagattaaaagtctctgtagacatctctgtgaagagcaagctatcattaaacatgtctgtttatcagcactgtctctttattcctttcccaacccattttaatagttctggcaataactactaaatctagaatgatgtgattaatgaataggctttagctctataatatcttctaggttattagaattgaaacctgacagttttataaaaagtcatgttatctcatgagctgcttcccacctggctgtataattttatcatcatggttccccagtttcgatgagttctcacagtcaaatgagagtttgtttaaccaccttaggagaaacatactacaaagtcatcaagaataaaggttccaaagtaat

SEQ ID NO: 323840 - DNA, 770 bp, Homo sapiens
agtagcggaagtcccgcccagcctaggccgaacttccggctctcactgctaggggcttaagcggagggagtcgagccagcgtcgccgcgatggtgttgttggagagcgagcagttcctgacggagctgaccagacttttccagaagtgccggacgtcgggcagcgtctatatcaccttgaagaagtatgacggtcgaaccaaacccattccaaagaaaggtactgtggagggctttgagcccgcagacaacaagtgtctgttaagagctaccgatgggaagaagaagatcagcactgtggtgagctccaaggaagtgaataagtttcagatggcttattcaaacctccttagagctaacatggatgggttgaagaagagagacaaaaagaacaaaactaagaagaccaaagcagcagcagcagcagcagcagcagcacctgcacaacagcagcaacaacagcagcaacagcagcacagtaaagggcatacatttcctgctttcaccaattaaccactgaattgctattttttccttttggccagatagctaggtttctggttcccccacagtaggtgttttcacataagattagggtccttttggaaagaatagttgcagtgtttataggatagttgtggtaagaatctagtttattttgcatttggctaattggtctgtgctgcatggttatatactcctggattatagattaaaagtctctgtagacatctctgtgaagagcaagctatcattaaacatgtctgttta

SEQ ID NO: 323841 - DNA, 742 bp, Homo sapiens
  misc_feature (541)..(542): n is a, c, g, or t
gagatatgaggaaattgttaaggaagatcagcactgtggtgagctccaaggaagtgaataagtttcagatggcttattcaaacctccttagagctaacatggatgggttgaagaagagagacaaaaagaacaaaactaagaagaccaaagcagcagcagcagcagcagcagcagcacctgccgcagcagcaacagcagcaacaacagcagcaacaacagcagcaacagcagcacagtaaagggcatacatttcctgctttcaccaattaaccactgaattgctattttttccttttggccagatagctaggtttctggttcccccacagtaggtgttttcacataagattagggtccttttggaaagaatagttgcagtgtttataggatagttgtggtaagaatctagtttattttgcatttggctaattggtctgtgctgcatggttatatactcctggattatagattaaaagtctctgtagacatctctgtgaagagcaagctatcattaaacatgtctgtttaaaaaaaaaaactnnacactttttaaaccaatttaaatagactttacgctttataccaatgatcattaaatactcattcctgatatacattacgtaaaataaaaacttcggggggggcccccgtccacaaattgacccttaagggagtcgtttacacataaggggccccgttttcacaccttgaacttggagtgcgttttgcgaaaggcccccct

SEQ ID NO: 323842 - DNA, 1009 bp, Homo sapiens
gcgttactcgagacctgtgcctcctgcaggaggaccaggccttgacgcggcaggacgaggatttggggctggctaacggggctgggcctgttgttttgcgagcagttcctgacggagctgaccagacttttccagaagtgccggacgtcgggcagcgtctatatcaccttgaagaagtatgacggtcgaaccaaacccattccaaagaaaggtactgtggagggctttgagcccgcagacaacaagtgtctgttaagagctaccgatgggaagaagaagatcagcactgtggtgagctccaaggaagtgaataagtttcagatggcttattcaaacctccttagagctaacatggatgggttgaagaagagagacaaaaagaacaaaactaagaagaccaaagcagcagcagcagcagcagcagcagcacctgcacaacagcagcaacaacagcagcaacagcagcacagtaaagggcatacatttcctgctttcaccaattaaccactgaattgctattttttccttttggccagatagctaggtttctggttcccccacagtaggtgttttcacataagattagggtccttttggaaagaatagttgcagtgtttataggatagttgtggtaagaatctagtttattttgcatttggctaattggtctgtgctgcatggttatatactcctggattatagattcagcactgtctctttattcctttcccaacccattttaatagttctggcaataactactaaatctagaatgatgtgattaatgaataggctttagctctataatatcttctaggttattagaattgaaacctgacagttttataaaaagtcatgttatctcatgagctgcttcccacctggctgtataattttatcatcatggttccccagtttcgatgagttctcacagtcaaatgagagtttgtttaaccaccttaggagaaacatactacaaagtcatcaagaataaaggttccaaagtaat

SEQ ID NO: 323843 - DNA, 1501 bp, Homo sapiens
  misc_feature (1500)..(1501): n is a, c, g, or t
agtagcggaagtcccgcccagcctaggccgaacttccggctctcactgctaggggcttaagcggagggagtcgagccagcgtcgccgcgatggtgttgttggagagcgagcagttcctgacggagctgaccagacttttccagaagtgccggacgtcgggcagcgtctatatcaccttgaagaagtatgacggtcgaaccaaacccattccaaagaaaggtactgtggagggctttgagcccgcagacaacaagtgtctgttaagagctaccgatgggaagaagaagatcagcactgtggtgagctccaaggaagtgaataagtttcagatggcttattcaaacctccttagagctaacatggatgggttgaagaagagagacaaaaagaacaaaactaagaagaccaaagcagcagcagcagcagcagcagcagcacctgccgcagcagcaacagcagcaacaacagcagcaacaacagcagcaacagcagcacagtaaagggcatacatttcctgctttcaccaattaaccactgaattgctattttttccttttggccagatagctaggtttctggttcccccacagtaggtgttttcacataagattagggtccttttggaaagaatagttgcagtgtttataggatagttgtggtaagaatctagtttattttgcatttggctaattggtctgtgctgcatggttatatactcctggattatagattaaaagtctctgtagacatctctgtgaagagcaagctatcattaaacatgtctgtttaaaaaaaaaaaaaaaaaaaaaaaacaaaaaaaaaaaaaaaaaaaaaaacaaaaaaaaaaaaaaaaaaaaaaaaacacaaccacaaaacaaaaaaaaaaacaaaaaaatagagggggcagcctatctgaaaacaacaagggagaccacaaagtctgacatcacacaacataaaaagagcggctctcaataagaagaaataaaacaatacagcggcgacgggcaaacaaacagacaggacgccggaaaaaaacatccccacgcacctaggagagagcaacacccttagagtagagacaaaaagaggaccaacacataccacgataataacccagccgcacaacaaacaaagaaagactgtcgagataacccaccactataactgacgacaagaaaacaatgacatagcagggtattcgccactatcacgcgcgcatcacgctaactataataaatacagaagcagtagtgcgtccagacgaaggcgtcagcgacaagggaaagagaaaccagacgagacgtggtcagcgctatagcataggaaaagagaaagaacagaccaacgaaaaggcaaaaaaagacacaaccccccagcagagagagagagaatcaaagagataagaaagcaaaaaacaaatgaaactaatcagaagaggagagaagaaaaagggtgaaactagagatacaaatcaactctccctgggtaagtctaatnn

SEQ ID NO: 323844 - DNA, 974 bp, Homo sapiens
  misc_feature (812)..(813): n is a, c, g, or t
  misc_feature (817)..(817): n is a, c, g, or t
  misc_feature (823)..(824): n is a, c, g, or t
  misc_feature (830)..(830): n is a, c, g, or t
  misc_feature (832)..(832): n is a, c, g, or t
  misc_feature (840)..(840): n is a, c, g, or t
agtagcggaagtcccgcccagcctaggccgaacttccggctctcactgctaggggcttaagcggagggagtcgagccagcgtcgccgcgatggtgttgttggagagcgagcagttcctgacggagctgaccagacttttccagaagtgccggacgtcgggcagcgtctatatcaccttgaagaagtatgacggtcgaaccaaacccattccaaagaaaggtactgtggagggctttgagcccgcagacaacaagtgtctgttaagagctaccgatgggaagaagaagatcagcactgtggtgagctccaaggaagtgaataagtttcagatggcttattcaaacctccttagagctaacatggatgggttgaagaagagagacaaaaagaacaaaactaagaagaccaaagcagcagcagcagcagcagcagcagcacctgccgcagcagcaacagcagcaacaacagcagcaacaacagcagcaacagcagcacagtaaagggcatacatttcctgctttcaccaattaaccactgaattgctattttttccttttggccagatagctaggtttctggttcccccacagtaggtgttttcacataagattagggtccttttggaaagaatagttgcagtgtttataggatagttgtggtaagaatctagtttattttgcatttggctaattggtctgtgctgcatggttatatactcctggattatagattaaaagtctctgtagacatctctgtgaagagcaagctatcattaaacatgtctgtttaaaacacacaccaacaaacaaaannccgnggggcnnatatgngnggggcggnaaacaggaggctacacgacaaggggcccaggggcacatcagcgtgtgcgctgacccagcgttcttggcaacaaggggggcaacccgggcgggtccccataagagacggcataacttggatagccgggtaccgaa

SEQ ID NO: 323845 - DNA, 539 bp, Homo sapiens
aattaggctaggtacgaggctgggtttgaatcggccgaggagagaactagtgagctccaaggaagtgaataagtttcagatggcttattcaaacctccttagagctaacatggatgggttgaagaagagagacaaaaagaacaaaactaagaagaccaaagcagcagcagcagcagcagcagcagcacctgccgcagcagcaacagcagcaacaacagcagcaacaacagcagcaacagcagcacagtaaagggcatacatttcctgctttcaccaattaaccactgaattgctattttttccttttggccagatagctaggtttctggttcccccacagtaggtgttttcacataagattagggtccttttggaaagaatagttgcagtgtttataggatagttgtggtaagaatctagtttattttgcatttggctaattggtctgtgctgcatggttatatactcctggattatagattaaaagtctctgtagacatctctgtgaagagcaagctatcattaaacatgtctgttta

SEQ ID NO: 323846 - DNA, 1046 bp, Homo sapiens
  misc_feature (6)..(7): n is a, c, g, or t
gcaccnngcacttctggaaaagtcgagccagcgtcgccgcgatggtgttgttggagagcgagcagttcctgacggagctgaccagacttttccagaagtgccggacgtcgggcagcgtctatatcaccttgaagaagtatgacggtcgaaccaaacccattccaaagaaaggtactgtggagggctttgagcccgcagacaacaagtgtctgttaagagctaccgatgggaagaagaagatcagcactgtggtgagctccaaggaagtgaataagtttcagatggcttattcaaacctccttagagctaacatggatgggttgaagaagagagacaaaaagaacaaaactaagaagaccaaagcagcagcagcagcagcagcagcagcacctgccgcagcagcaacagcagcaacaacagcagcaacaacagcagcaacagcagcacagtaaagggcatacatttcctgctttcaccaattaaccactgaattgctattttttccttttggccagatagctaggtttctggttcccccacagtaggtgttttcacataagattagggtccttttggaaagaatagttgcagtgtttataggatagttgtggtaagaatctagtttattttgcatttggctaattggtctgtgctgcatggttatatactcctggattatagattaaaagtctctgtagacatctctgtgaagagcaagctatcattaaacatgtctgtttatcagcactgtctctttattcctttcccaacccattttaatagttctggcaataactactaaatctagaatgatgtgattaatgaataggctttagctctataatatcttctaggttattagaattgaaacctgacagttttataaaaagtcatgttatctcatgagctgcttcccacctggctgtataattttatcatcatggttccccagtttcgatgagttctcacagtcaaatgagagtttgtttaaccaccttaggagaaacatactacaaagtcatcaagaataaaggttccaaagtaat

SEQ ID NO: 323847 - DNA, 833 bp, Homo sapiens
gagatatgaggaaattgttaaggaagatcagcactgtggtgagctccaaggaagtgaataagtttcagatggcttattcaaacctccttagagctaacatggatgggttgaagaagagagacaaaaagaacaaaactaagaagaccaaagcagcagcagcagcagcagcagcagcacctgccgcagcagcaacagcagcaacaacagcagcaacaacagcagcaacagcagcacagtaaagggcatacatttcctgctttcaccaattaaccactgaattgctattttttccttttggccagatagctaggtttctggttcccccacagtaggtgttttcacataagattagggtccttttggaaagaatagttgcagtgtttataggatagttgtggtaagaatctagtttattttgcatttggctaattggtctgtgctgcatggttatatactcctggattatagattaaaagtctctgtagacatctctgtgaagagcaagctatcattaaacatgtctgtttatcagcactgtctctttattcctttcccaacccattttaatagttctggcaataactactaaatctagaatgatgtgattaatgaataggctttagctctataatatcttctaggttattagaattgaaacctgacagttttataaaaagtcatgttatctcatgagctgcttcccacctggctgtataattttatcatcatggttccccagtttcgatgagttctcacagtcaaatgagagtttgtttaaccaccttaggagaaacatactacaaagtcatcaagaataaaggttccaaagtaat

SEQ ID NO: 323848 - DNA, 1575 bp, Homo sapiens
agtagcggaagtcccgcccagcctaggccgaacttccggctctcactgctaggggcttaagcggagggagtcgagccagcgtcgccgcgatggtgttgttggagagcgagcagttcctgacggagctgaccagacttttccagaagtgccggacgtcgggcagcgtctatatcaccttgaagaagtgtaagcagcgggaggggagccgggcgatgctccctgggttcccggtgtctgggagccaccggagtctgtctgccgcggaccgccgccttcctctacctttccccaccctgtactgagcacattcggggcttcgggcccggaaaatagtagggattgtagctggctcagtccccagcactgagccgcctaggttgcttctggtaacaatgggccccaagcagcccagggctctttgtcagggatcccagacgccgccactttgagtggaatttaacgtgcttcgatattacatgtttccgtcgtggaaataatagtttctccagggtttcgccagaccgtgatagcagatgaggtgtttaacaaaactagagcagcggggctgggttaggtcatcacttaccccactcctctgttttaactgtttgtctgccgctcagccacgtacgcggccgtgttcaccaggatgcattttttccttcagatgacggtcgaaccaaacccattccaaagaaaggtactgtggagggctttgagcccgcagacaacaagtgtctgttaagagctaccgatgggaagaagaagatcagcactgtggtgagctccaaggaagtgaataagtttcagatggcttattcaaacctccttagagctaacatggatgggttgaagaagagagacaaaaagaacaaaactaagaagaccaaagcagcagcagcagcagcagcagcagcacctgccgcagcagcaacagcagcaacaacagcagcaacaacagcagcaacagcagcacagtaaagggcatacatttcctgctttcaccaattaaccactgaattgctattttttccttttggccagatagctaggtttctggttcccccacagtaggtgttttcacataagattagggtccttttggaaagaatagttgcagtgtttataggatagttgtggtaagaatctagtttattttgcatttggctaattggtctgtgctgcatggttatatactcctggattatagattaaaagtctctgtagacatctctgtgaagagcaagctatcattaaacatgtctgtttatcagcactgtctctttattcctttcccaacccattttaatagttctggcaataactactaaatctagaatgatgtgattaatgaataggctttagctctataatatcttctaggttattagaattgaaacctgacagttttataaaaagtcatgttatctcatgagctgcttcccacctggctgtataattttatcatcatggttccccagtttcgatgagttctcacagtcaaatgagagtttgtttaaccaccttaggagaaacatactacaaagtcatcaagaataaaggttccaaagtaat

SEQ ID NO: 323849 - DNA, 802 bp, Homo sapiens
ttcggacctcggctctgctgtgtctctcttcttcagatgggcttattcaaacctccttagagctaacatggatgggttgaagaagagagacaaaaagaacaaaactaagaagaccaaagcagcagcagcagcagcagcagcagcacctgccgcagcagcaacagcagcaacaacagcagcaacaacagcagcaacagcagcacagtaaagggcatacatttcctgctttcaccaattaaccactgaattgctattttttccttttggccagatagctaggtttctggttcccccacagtaggtgttttcacataagattagggtccttttggaaagaatagttgcagtgtttataggatagttgtggtaagaatctagtttattttgcatttggctaattggtctgtgctgcatggttatatactcctggattatagattaaaagtctctgtagacatctctgtgaagagcaagctatcattaaacatgtctgtttatcagcactgtctctttattcctttcccaacccattttaatagttctggcaataactactaaatctagaatgatgtgattaatgaataggctttagctctataatatcttctaggttattagaattgaaacctgacagttttataaaaagtcatgttatctcatgagctgcttcccacctggctgtataattttatcatcatggttccccagtttcgatgagttctcacagtcaaatgagagtttgtttaaccaccttaggagaaacatactacaaagtcatcaagaataaaggttccaaagtaat

SEQ ID NO: 323850 - DNA, 894 bp, Homo sapiens
agtagcggaagtcccgcccagcctaggccgaacttccggctctcactgctaggggcttaagcggagggagtcgagccagcgtcgccgcgatggtgttgttggagagcgagcagttcctgacggagctgaccagacttttccagaagtgccggacgtcgggcagcgtctatatcaccttgaagaagtatgacggtcgaaccaaacccattccaaagaaaggtactgtggagggctttgagcccgcagacaacaagtgtctgttaagagctaccgatgggaagaagaagatcagcactgtggtgagctccaaggaagtgaataagtttcagatggcttattcaaacctccttagagctaacatggatgggttgaagaagagagacaaaaagaacaaaactaagaagaccaaagcagcagcagcagcagcagcagcagcacctgccgcagcagcaacagcagcaacaacagcagcaacaacagcagcaacagcagcacagtaaagggcatacatttcctgctttcaccaattaaccactgaattgctattttttccttttggccagatagctaggtttctggttcccccacagtaggtgttttcacataagattagggtccttttggaaagaatagttgcagtgtttataggatagttgtggtaagaatctagtttattttgcatttggctaattggtctgtgctgcatgccaggtagacctaacgatgactctgtgactttaagtactagtttataatttgacaagaggcaaggttgaatataatgtaatgcttttagcatttagagttaaactggattgttttcattcctcagttataacatgaaatagtttcttaattgctctctcacccacacctacctgttagtctacctgg

SEQ ID NO: 323851 - DNA, 764 bp, Homo sapiens
agtagcggaagtcccgcccagcctaggccgaacttccggctctcactgctaggggcttaagcggagggagtcgagccagcgtcgccgcgatggtgttgttggagagcgagcagttcctgacggagctgaccagacttttccagaagtgccggacgtcgggcagcgtctatatcaccttgaagaagtatgacggtcgaaccaaacccattccaaagaaaggtactgtggagggctttgagcccgcagacaacaagtgtctgttaagagctaccgatgggaagaagaagatcagcactgtggtgagctccaaggaagtgaataagtttcagatggcttattcaaacctccttagagctaacatggatgggttgaagaagagagacaaaaagaacaaaactaagaagaccaaagcagcagcgcagcagcaacagcagcaacaacagcagcaacaacagcagcaacagcagcacagtaaagggcatacatttcctgctttcaccaattaaccactgaattgctattttttccttttggccagatagctaggtttctggttcccccacagtaggtgttttcacataagattagggtccttttggaaagaatagttgcagtgtttataggatagttgtggtaagaatctagtttattttgcatttggctaattggtctgtgctgcatggttatatactcctggattatagattaaaagtctctgtagacatctctgtgaagagcaagctatcattaaacatgtctgttta

SEQ ID NO: 323852 - DNA, 868 bp, Homo sapiens
agtagcggaagtcccgcccagcctaggccgaacttccggctctcactgctaggggcttaagcggagggagtcgagccagcgtcgccgcgatggtgttgttggagagcgagcagttcctgacggagctgaccagacttttccagaagtgccggacgtcgggcagcgtctatatcaccttgaagaagtatgacggtcgaaccaaacccattccaaagaaaggtactgtggagggctttgagcccgcagacaacaagtgtctgttaagagctaccgatgggaagaagaagatcagcactgtgacgatcttgtggatgagactccaaggcaagtgaatacacgtttcagatgggcttattgcaacaccttccttagagctaacagtggagtgggttagacatgaagaagatgacgaatatagaagaactaaatagtaaagaaggacctacatatgcatggaagccaagccaagttacgcgatggagcgaggcaccatgccggcatgtcagtaacaagcaagcaaacatacctatgtaaagcttaactagacagtgatggcaagcagctagcgacaagtacaggggctagttcatttcctgctttcaccaattaaccactgaattgctattttttccttttggccagatagctaggtttctggttcccccacagtaggtgttttcacataagattagggtccttttggaaagaatagttgcagtgtttataggatagttgtggtaagaatctagtttattttgcatttggctaattggtctgtgctgcatggttatatactcctggattatagattaaaagtctctgtagacatctctgtgaagagcaagctatcattaaacatgtctgttta

SEQ ID NO: 323853 - DNA, 2562 bp, Homo sapiens
acagcgcctgcgcactgcgccgccggctggggtgctgggggcggggcaggggcaggtgtagcctctgtgcctcgttgtcccctggcgctacccggacatctctcagggtgccggcaccatgaagatctggacttcggagcacgtctttgaccacccgtgggaaactgttacaacagctgcaatgcagaaatacccaaaccctatgaacccaagtgtggttggagttgatgtgttggacagacatatagatccctctggaaagttgcacagccacagacttctcagcacagagtggggactgccttccattgtgaagtctcttattggtgcagcaagaacgaaaacatatgtgcaagaacattctgtagttgatcctgtagagaaaacaatggaacttaaatctactaatatttcatttacaaacatggtttcagtagatgagagacttatatacaaaccacatcctcaggatccagaaaaaactgttttgacacaagaagccataattaccgtgaaaggagttagcctcagcagttaccttgaaggactgatggcaagtacgatatcctcaaatgctagtaaaggccgagaagcaatggaatgggtaatacataaattaaatgctgagattgaagaactgacagcctcagcaagaggaaccataaggactccaatggcagcagcagcgtttgcagagaagtgatcgtgacagttggtagacaacatcgggtactccaggtctctccaaactgactatatatttatttgttattttaaaaatacaactatattttgggtagttttttttttttttttttttgataagttggtgtaaggctatgtgacttgatcaaaacagatgcagggcctctaaataaaagggatcatctgaaattaatgttgtttgaaattactatctgattttgagggttccagtatttctgtgaaaattcaacaagaactccttggaaactggtattgatattcagtctccttaaggtagatttttcaagcttttcatacattggaactccacctgactttggaccaaccccagaacagagcagagccacctcctatagacgcccattgccctgctgctgtacacttcagcagcttgcacaagggagctcacttaaaaggagaaattgtgtagttttaaaatatattttgtgtaaaataccttactatgctataaaccaccattaaaaaccagtgttttgatttggtacttaaatatttttggagtgaaaattatcactaaagtaacatgactccaacaaaagtatggtttcattataaaagagtactgtattgatttgcccaagttttgtaacttagtaaaggtattaacttccttggatttgtactttgtgatttagtatgctgtatcgtgggctggttatgttaactgaaaaaaataaagtcattacctgagttttgcagtgctctaacttaaacagaagaacagctgttcacatcttttagcattttacatttgcctaacttaaaaattgccatgtgtcaaaatcatggttttgtaattgctaaggcatgatatgtcaggttatttgaatataattactttttgaagtaattgtgaccacaaaacatcttttttacatgaaggagctgtgtatcatttgaaattactcaaatgatgtcttgctctgaggcataaatcccaggtacttagtgtttttaataatatggtgccactgcaggatttgggggcggtggggaagaacaagcataatggtagggggaggcttggcctgaaactaaccactgagtgaattgcactgcaggttttacttaacgggaattccttatttgggatgtcaagagggcagctgcaaactgaaaaacaatccagtaaatgtactttgttttatgtattgtagcaggcaattaactactaaataatagctttgacatttgcaattgttgcatagagactatttttgctagaagatgattagctcttgcctttattttacagtgcttagtgtgataaacttctagtcatgtttcctatccaagagaccagttaatatatgtacataaaccacagaaatagtataacacactatttttaaattatcgttttcctacttaaattttgtttagcttaagacttcttaggacatttgtaaaagcaggttaaatttaataaggtttctgatttttttttgtaaccggagatagtttttacaagtgaaataacatttcagctaaataaaacatcgctaaataattgatatttgatgaaaatctgctttgtataatttctgtaaattatccttgttctgaaaaaggtgtaatgccctaatatttttaaatccttatcctttgattttttaaaaactgacctattgataaaactataaattttcattttccagtgcagttagttacctttttaaacataaatgcacaacaagcaaatgaatttaagagaactaaactggaataagtgttcataaatgaaacccttggactatttaataaagttgaaatgtgaattaaggaaaacttttgttaataaaaactttcttttaa

SEQ ID NO: 323854 - DNA, 2951 bp, Homo sapiens
acagcgcctgcgcactgcgccgccggctggggtgctgggggcggggcaggggcaggtgtagcctctgtgcctcgttgtcccctggcgctacccggacatctctcagggtgccggcaccatgaagatctggacttcggagcacgtctttgaccacccgtgggaaactgttacaacagctgcaatgcagaaatacccaaaccctatgaacccaagtgtggttggagttgatgtgttggacagacatatagatccctctggaaagttgcacagccacagacttctcagcacagagtggggactgccttccattgtgaagtctcttattggtgcagcaagaacgaaaacatatgtgcaagaacattctgtagttgatcctgtagagaaaacaatggaacttaaatctactaatatttcatttacaaacatggtttcagtagatgagagacttatatacaaaccacatcctcaggatccagaaaaaactgttttgacacaagaagccataattaccgtgaaaggagttagcctcagcagttaccttgaaggactgatggcaagtacgatatcctcaaatgctagtaaaggccgagaagcaatggaatgggtaatacataaattaaatgctgagattgaagaactgacagcctcagcaagaggaaccataaggactccaatggcagcagcagcgtttgcagagaagtgatcgtgacagttggtagacaacatcgggtactccaggtctctccaaactgactatatatttatttgttattttaaaaatacaactatattttgggtagttttttttttttttttttttgataagttggtgtaaggctatgtgacttgatcaaaacagatgcagggcctctaaataaaagggatcatctgaaattaatgttgtttgaaattactatctgattttgagggttccagtatttctgtgaaaattcaacaagaactccttggaaactggtattgatattcagtctccttaaggtagatttttcaagcttttcatacattggaactccacctgactttggaccaaccccagaacagagcagagccacctcctatagacgcccattgccctgctgctgtacacttcagcagcttgcacaagggagctcacttaaaaggagaaattgtgtagttttaaaatatattttgtgtaaaataccttactatgctataaaccaccattaaaaaccagtgttttgatttggtacttaaatatttttggagtgaaaattatcactaaagtaacatgactccaacaaaagtatggtttcattataaaagagtactgtattgatttgcccaagttttgtaacttagtaaaggtattaacttccttggatttgtactttgtgatttagtatgctgtatcgtgggctggttatgttaactgaaaaaaataaagtcattacctgagttttgcagtgctctaacttaaacagaagaacagctgttcacatcttttagcattttacatttgcctaacttaaaaattgccatgtgtcaaaatcatggttttgtaattgctaaggcatgatatgtcaggttatttgaatataattactttttgaagtaattgtgaccacaaaacatcttttttacatgaaggagctgtgtatcatttgaaattactcaaatgatgtcttgctctgaggcataaatcccaggtacttagtgtttttaataatatggtgccactgcaggatttgggggcggtggggaagaacaagcataatggtagggggaggcttggcctgaaactaaccactgagtgaattgcactgcaggttttacttaacgggaattccttatttgggatgtcaagagggcagctgcaaactgaaaaacaatccagtaaatgtactttgttttatgtattgtagcaggcaattaactactaaataatagctttgacatttgcaattgttgcatagagactatttttgctagaagatgattagctcttgcctttattttacagtgcttagtgtgataaacttctagtcatgtttcctatccaagagaccagttaatatatgtacataaaccacagaaatagtataacacactatttttaaattatcgttttcctacttaaattttgtttagcttaagacttcttaggacatttgtaaaagcaggttaaatttaataaggtttctgatttttttttgtaaccggagatagtttttacaagtgaaataacatttcagctaaataaaacatcgctaaataattgatatttgatgaaaatctgctttgtataatttctgtaaattatccttgttctgaaaaaggtgtaatgccctaatatttttaaatccttatcctttgattttttaaaaactgacctattgataaaactataaattttcattttccagtgcagttagttacctttttaaacataaatgcacaacaagcaaatgaatttaagagaactaaactggaataagtgttcataaatgaaacccttggactatttaataaagttgaaatgtgaattaaggaaaacttttgttaataaaaactttcttttaaaaaaacaccaacacacacacaacccacccccccacacaccccacaccaccaccacccaccaacgcccacccacccacaccccacaccacaccactacacaccccgcccccacacccccaacacacacacgccgcgcggcgcccacacacgaacaaaacacccacacaccaggcaagcaccaaacaaccgaacacacatcacacctacacacaacgcccaaccaaaccgcacaccacaacaacacccacccacacgcccagccacccacaaccccaagactccgccaaaaccatgacagagtaaacacaccaacgccaccacctgcgctgcacgaaaaacaacaacaaacaacaacacacgaccaacccacgcgcgcaaccaaccgacga

SEQ ID NO: 323855 - DNA, 947 bp, Homo sapiens
acagcgcctgcgcactgcgccgccggctggggtgctgggggcggggcaggggcaggtgtagcctctgtgcctcgttgtcccctggcgctacccggacatctctcagggtgccggcaccatgaagatctggacttcggagcacgtctttgagtaagtttggggcgcgggtcggctccgtggagggcaggcacgccggccctggagtagaggcgaggcagaggcggcccgcaggaggcttctaggcgtcgggcctagcgaggggagcgaactctgaagcctgcgggccccggcgacacggagggcagaccaaggtcacgaccccgaggcgccctagccgaggggacggctccgacctccagacccaggcggcttgcgaccggcagggctacggggtcacttccgggctgtcccccaccatgaggtagcctcgggccggcggcctcctgaggtcctgggggcgtcgcggagcacgaagcccttgacagcactcagggttgccccatcccgccctgtgaaaccactttgggacgtggacccgaggatcccaagagggaggtgtggttttctccagagtgtactttccctggccgccgtttgggtggagtttctaccttcgaatgtgaatttcgggtgaactctgaccaccaggatgtgaagccttttcacaactcgttcatctacgcagcagagccttggatttggaattcaaggtctagctctggctgtaacaagcgtgtgaccctgggttacccattttcatctgagagatggaaaaggacgatcgtcagggcctacccgtgttagctcttgaggccacgttcaaggaacatctttttggcataatgtgactgtttactaacgaatagctgaaccagttgatgtgggaagtagatctttctatgtcctgattcattctaaaggccctaatttagcgggaaatctttttt

SEQ ID NO: 323856 - DNA, 2884 bp, Homo sapiens
acagcgcctgcgcactgcgccgccggctggggtgctgggggcggggcaggggcaggtgtagcctctgtgcctcgttgtcccctggcgctacccggacatctctcagggtgccggcaccatgaagatctggacttcggagcacgtctttgaccacccgtgggaaactgttacaacagctgcaatgcagaaatacccaaaccctatgaacccaagtgtggttggagttgatgtgttggacagacatatagatccctctggaaagttgcacagccacagacttctcagcacagagtggggactgccttccattgtgaagtctcttattggtgcagcaagaacgaaaacatatgtgcaagaacattctgtagttgatcctgtagagaaaacaatggaacttaaatctactaatatttcatttacaaacatggtttcagtagatgagagacttatatacaaaccacatcctcaggatccagaaaaaactgttttgacacaagaagccataattaccgtgaaaggagttagcctcagcagttaccttgaaggactgatggcaagtacgatatcctcaaatgctagtaaaggccgagaagcaatggaatgggtaatacataaattaaatgctgagattgaagaactgacagcctcagcaagaggaaccataaggactccaatggcagcagcagcgtttgcagagaagtgatcgtgacagttggtagacaacatcgggtactccaggtctctccaaactgactatatatttatttgttattttaaaaatacaactatattttgggtagttttttttttttttttttttgataagttggtgtaaggctatgtgacttgatcaaaacagatgcagggcctctaaataaaagggatcatctgaaattaatgttgtttgaaattactatctgattttgagggttccagtatttctgtgaaaattcaacaagaactccttggaaactggtattgatattcagtctccttaaggtagatttttcaagcttttcatacattggaactccacctgactttggaccaaccccagaacagagcagagccacctcctatagacgcccattgccctgctgctgtacacttcagcagcttgcacaagggagctcacttaaaaggagaaattgtgtagttttaaaatatattttgtgtaaaataccttactatgctataaaccaccattaaaaaccagtgttttgatttggtacttaaatatttttggagtgaaaattatcactaaagtaacatgactccaacaaaagtatggtttcattataaaagagtactgtattgatttgcccaagttttgtaacttagtaaaggtattaacttccttggatttgtactttgtgatttagtatgctgtatcgtgggctggttatgttaactgaaaaaaataaagtcattacctgagttttgcagtgctctaacttaaacagaagaacagctgttcacatcttttagcattttacatttgcctaacttaaaaattgccatgtgtcaaaatcatggttttgtaattgctaaggcatgatatgtcaggttatttgaatataattactttttgaagtaattgtgaccacaaaacatcttttttacatgaaggagctgtgtatcatttgaaattactcaaatgatgtcttgctctgaggcataaatcccaggtacttagtgtttttaataatatggtgccactgcaggatttgggggcggtggggaagaacaagcataatggtagggggaggcttggcctgaaactaaccactgagtgaattgcactgcaggttttacttaacgggaattccttatttgggatgtcaagagggcagctgcaaactgaaaaacaatccagtaaatgtactttgttttatgtattgtagcaggcaattaactactaaataatagctttgacatttgcaattgttgcatagagactatttttgctagaagatgattagctcttgcctttattttacagtgcttagtgtgataaacttctagtcatgtttcctatccaagagaccagttaatatatgtacataaaccacagaaatagtataacacactatttttaaattatcgttttcctacttaaattttgtttagcttaagacttcttaggacatttgtaaaagcaggttaaatttaataaggtttctgatttttttttgtaaccggagatagtttttacaagtgaaataacatttcagctaaataaaacatcgctaaataattgatatttgatgaaaatctgctttgtataatttctgtaaattatccttgttctgaaaaaggtgtaatgccctaatatttttaaatccttatcctttgattttttaaaaactgacctattgataaaactataaattttcattttccagtgcagttagttacctttttaaacataaatgcacaacaagcaaatgaatttaagagaactaaactggaataagtgttcataaatgaaacccttggactatttaataaagttgaaatgtgaattaaggaaaacttttgttaataaaaactttcttttaaaaaacaaaaacaaacaaaaaaaaaaggggggggggcaaaaaatacccccgggggcaaattagccgcgacccgttttctgtaccagcgggcctaagggaggcataaagaaggcggcgggtaaacaagcgacggaaaaagggcgttcgcctgggacggaccacatgtggggggacatatgggaccacaccagaaataagcgagaaataaactcacgatacgcagcaagcatcgcgcgaattggtgctattaatctgactataaatcaggagaaagcacaacgagcagcaagacaacaacacaacgcgaaaaagaaacgcatacg

SEQ ID NO: 323857 - DNA, 2503 bp, Homo sapiens
acagcgcctgcgcactgcgccgccggctggggtgctgggggcggggcaggggcaggtgtagcctctgtgcctcgttgtcccctggcgctacccggacatctctcagggtgccggcaccatgaagatctggacttcggagcacgtctttgaccacccgtgggaaactgttacaacagctgcaatgcagaaatacccaaaccctatgaacccaagtgtggttggagttgatgtgttggacagacatatagatccctctggaaagttgcacagccacagacttctcagcacagagtggggactgccttccattgtgaagtctcttattggtgcagcaagaacgaaaacatatgtgcaagaacattctgtagttgatcctgtagagaaaacaatggaacttaaatctactaatatttcatttacaaacatggtttcagtagatgagagacttatatacaaaccacatcctcaggatccagaaaaaactgttttgacacaagaagccataattaccgtgaaaggagttagcctcagcagttaccttgaaggactgatggcaagtacgatatcctcaaatgctagtaaaggccgagaagcaatggaatgggtaatacataaattaaatgctgagattgaagaactgacagcctcagcaagaggaaccataaggactccaatggcagcagcagcgtttgcagagaagtgatcgtgacagttggtagacaacatcgggtactccaggtctctccaaactgactatatatttatttgttattttaaaaatacaactatattttgggtagttttttttttttttttttttgataagttggtgtaaggctatgtgacttgatcaaaacagatgcagggcctctaaataaaagggatcatctgaaattaatgttgtttgaaattactatctgattttgagggttccagtatttctgtgaaaattcaacaagaactccttggaaactggtattgatattcagtctccttaaggtagatttttcaagcttttcatacattggaactccacctgactttggaccaaccccagaacagagcagagccacctcctatagacgcccattgccctgctgctgtacacttcagcagcttgcacaagggagctcacttaaaaggagaaattgtgtagttttaaaatatattttgtgtaaaataccttactatgctataaaccaccattaaaaaccagtgttttgatttggtacttaaatatttttggagtgaaaattatcactaaagtaacatgactccaacaaaagtatggtttcattataaaagagtactgtattgatttgcccaagttttgtaacttagtaaaggtattaacttccttggatttgtactttgtgatttagtatgctgtatcgtgggctggttatgttaactgaaaaaaataaagtcattacctgagttttgcagtgctctaacttaaacagaagaacagctgttcacatcttttagcattttacatttgcctaacttaaaaattgccatgtgtcaaaatcatggttttgtaattgctaaggcatgatatgtcaggttatttgaatataattactttttgaagtaattgtgaccacaaaacatcttttttacatgaaggagctgtgtatcatttgaaattactcaaatgatgtcttgctctgaggcataaatcccaggtacttagtgtttttaataatatggtgccactgcaggatttgggggcggtggggaagaacaagcataatggtagggggaggcttggcctgaaactaaccactgagtgaattgcactgcaggttttacttaacgggaattccttatttgggatgtcaagagggcagctgcaaactgaaaaacaatccagtaaatgtactttgttttatgtattgtagcaggcaattaactactaaataatagctttgacatttgcaattgttgcatagagactatttttgctagaagatgattagctcttgcctttattttacagtgcttagtgtgataaacttctagtcatgtttcctatccaagagaccagttaatatatgtacataaaccacagaaatagtataacacactatttttaaattatcgttttcctacttaaattttgtttagcttaagacttcttaggacatttgtacaagtgaaataacatttcagctaaataaaacatcgctaaataattgatatttgatgaaaatctgctttgtataatttctgtaaattatccttgttctgaaaaaggtgtaatgccctaatatttttaaatccttatcctttgattttttaaaaactgacctattgataaaactataaattttcattttccagtgcagttagttacctttttaaacataaatgcacaacaagcaaatgaatttaagagaactaaactggaataagtgttcataaatgaaacccttggactatttaataaagttgaaatgtgaattaaggaaaacttttgttaataaaaactttcttttaa

SEQ ID NO: 323858 - DNA, 2470 bp, Homo sapiens
acagcgcctgcgcactgcgccgccggctggggtgctgggggcggggcaggggcaggtgtagcctctgtgcctcgttgtcccctggcgctacccggacatctctcagggtgccggcaccatgaagatctggacttcggagcacgtctttgaccacccgtgggaaactgttacaacagctgcaatgcagaaatacccaaaccctatgaacccaagtgtggttggagttgatgtgttggacagacatatagatccctctggaaagttgcacagccacagacttctcagcacagagtggggactgccttccattgtgaagtctcttattggtgcagcaagaacgaaaacatatgtgcaagaacattctgtagttgatcctgtagagaaaacaatggaacttaaatctactaatatttcatttacaaacatggtttcagtagatgagagacttatatacaaaccacatcctcaggatccagaaaaaactgttttgacacaagaagccataattaccgtgaaaggagttagcctcagcagttaccttgaaggactgatggcaagtacgatatcctcaaatgctagtaaaggccgagaagcaatggaatgggtaatacataaattaaatgctgagattgaagaactgacagcctcagcaagaggaaccataaggactccaatggcagcagcagcgtttgcagagaagtgatcgtgacagttggtagacaacatcgggtactccaggtctctccaaactgactatatatttatttgttattttaaaaatacaactatattttgggtagttttttttttttttttttttgataagttggtgtaaggctatgtgacttgatcaaaacagatgcagggcctctaaataaaagggatcatctgaaattaatgttgtttgaaattactatctgattttgagggttccagtatttctgtgaaaattcaacaagaactccttggaaactggtattgatattcagtctccttaaggtagatttttcaagcttttcatacattggaactccacctgactttggaccaaccccagaacagagcagagccacctcctatagacgcccattgccctgctgctgtacacttcagcagcttgcacaagggagctcacttaaaaggagaaattgtgtagttttaaaatatattttgtgtaaaataccttactatgctataaaccaccattaaaaaccagtgttttgatttggtacttaaatatttttggagtgaaaattatcactaaagtaacatgactccaacaaaagtatggtttcattataaaagagtactgtattgatttgcccaagttttgtaacttagtaaaggtattaacttccttggatttgtactttgtgatttagtatgctgtatcgtgggctggttatgttaactgaaaaaaataaagtcattacctgagttttgcagtgctctaacttaaacagaagaacagctgttcacatcttttagcattttacatttgcctaacttaaaaattgccatgtgtcaaaatcatggttttgtaattgctaaggcatgatatgtcaggttatttgaatataattactttttgaagtaattgtgaccacaaaacatcttttttacatgaaggagctgtgtatcatttgaaattactcaaatgatgtcttgctctgaggcataaatcccaggtacttagtgtttttaataatatggtgccactgcaggatttgggggcggtggggaagaacaagcataatggtagggggaggcttggcctgaaactaaccactgagtgaattgcactgcaggttttacttaacgggaattccttatttgggatgtcaagagggcagctgcaaactgaaaaacaatccagtaaatgtactttgttttatgtattgtagcaggcaattaactactaaataatagctttgacatttgcaattgttgcatagagactatttttgctagaagatgattagctcttgcctttattttacagtgcttagtgtgataaacttctagtcatgtttcctatccaagagaccagttaatatatgtacataaaccacagaaatagtataacacactatttttaaattatcgttttcctacttaaattttgtttagcttaagacttcttaggacatttgtaaaagcaggttaaatttaataaggtttctgatttttttttgtaaccggagatagtttttacaagtgaaataacatttcagctaaataaaacatcgctaaataattgatatttgatgaaaatctgctttgtataattcgtaatatctgtctgaaaggtggtatgctatatttaaatctatctggatttaaaatggcatgtaactataattattcaggggagtaccttaactatggaaggagataggaacggaggttaagacgggtaaagaggtgggatggattggaaaaaaaagggggcgataatgggggggagtaa

SEQ ID NO: 323859 - DNA, 2445 bp, Homo sapiens
acagcgcctgcgcactgcgccgccggctggggtgctgggggcggggcaggggcaggtgtagcctctgtgcctcgttgtcccctggcgctacccggacatctctcagggtgccggcaccatgaagatctggacttcggagcacgtctttgaccacccgtgggaaactgttacaacagctgcaatgcagaaatacccaaaccctatgaacccaagtgtggttggagttgatgtgttggacagacatatagatccctctggaaagttgcacagccacagacttctcagcacagagtggggactgccttccattgtgaagtctcttattggtgcagcaagaacgaaaacatatgtgcaagaacattctgtagttgatcctgtagagaaaacaatggaacttaaatctactaatatttcatttacaaacatggtttcagtagatgagagacttatatacaaaccacatcctcaggatccagaaaaaactgttttgacacaagaagccataattaccgtgaaaggagttagcctcagcagttaccttgaaggactgatggcaagtacgatatcctcaaatgctagtaaaggccgagaagcaatggaatgggtaatacataaattaaatgctgagattgaagaactgacagcctcagcaagaggaaccataaggactccaatggcagcagcagcgtttgcagagaagtgatcgtgacagttggtagacaacatcgggtactccaggtctctccaaactgactatatatttatttgttattttaaaaatacaactatattttgggtagttttttttttttttttttttgataagttggtgtaaggctatgtgacttgatcaaaacagatgcagggcctctaaataaaagggatcatctgaaattaatgttgtttgaaattactatctgattttgagggttccagtatttctgtgaaaattcaacaagaactccttggaaactggtattgatattcagtctccttaaggtagatttttcaagcttttcatacattggaactccacctgactttggaccaaccccagaacagagcagagccacctcctatagacgcccattgccctgctgctgtacacttcagcagcttgcacaagggagctcacttaaaaggagaaattgtgtagttttaaaatatattttgtgtaaaataccttactatgctataaaccaccattaaaaaccagtgttttgatttggtacttaaatatttttggagtgaaaattatcactaaagtaacatgactccaacaaaagtatggtttcattataaaagagtactgtattgatttgcccaagttttgtaacttagtaaaggtattaacttccttggatttgtactttgtgatttagtatgctgtatcgtgggctggttatgttaactgaaaaaaataaagtcattacctgagttttgcagtgctctaacttaaacagaagaacagctgttcacatcttttagcattttacatttgcctaacttaaaaattgccatgtgtcaaaatcatggttttgtaattgctaaggcatgatatgtcaggttatttgaatataattactttttgaagtaattgtgaccacaaaacatcttttttacatgaaggagctgtgtatcatttgaaattactcaaatgatgtcttgctctgaggcataaatcccaggtacttagtgtttttaataatatggtgccactgcaggatttgggggcggtggggaagaacaagcataatggtagggggaggcttggcctgaaactaaccactgagtgaattgcactgcaggttttacttaacgggaattccttatttgggatgtcaagagggcagctgcaaactgaaaaacaatccagtaaatgtactttgttttatgtattgtagcaggcaattaactactaaataatagctttgacatttgcaattgttgcatagagactatttttgctagaagatgattagctcttgcctttattttacagtgcttagtgtgataaacttctagtcatgtttcctatccaagagaccagttaatatatgtacataaaccacagaaatagtataacacactatttttaaattatcgttttcctacttaaattttgtttagcttaagacttcttaggacatttgtaaaagcaggttaaatttaataaggtttctgatttttttttgtaaccggagatagtttttacaagtgaaataacatttcagctaaataaaacatcgctaaataattgatatttgatgaaaatctgctttgtataatttctgtaaattatccttgttctgaaaaaggtgtaatgccctaatatttagcgatgttttatttagctgaaatgttatttcacttgtaaaaactatctccggttacaaaaaaaaaatcagaaaccttattaaatttaacctgcttttacagtcgacg

SEQ ID NO: 323860 - DNA, 2472 bp, Homo sapiens
acagcgcctgcgcactgcgccgccggctggggtgctgggggcggggcaggggcaggtgtagcctctgtgcctcgttgtcccctggcgctacccggacatctctcagggtgccggcaccatgaagatctggacttcggagcacgtctttgaccacccgtgggaaactgttacaacagctgcaatgcagaaatacccaaaccctatgaacccaagtgtggttggagttgatgtgttggacagacatatagatccctctggaaagttgcacagccacagacttctcagcacagagtggggactgccttccattgtgaagtctatttcatttacaaacatggtttcagtagatgagagacttatatacaaaccacatcctcaggatccagaaaaaactgttttgacacaagaagccataattaccgtgaaaggagttagcctcagcagttaccttgaaggactgatggcaagtacgatatcctcaaatgctagtaaaggccgagaagcaatggaatgggtaatacataaattaaatgctgagattgaagaactgacagcctcagcaagaggaaccataaggactccaatggcagcagcagcgtttgcagagaagtgatcgtgacagttggtagacaacatcgggtactccaggtctctccaaactgactatatatttatttgttattttaaaaatacaactatattttgggtagttttttttttttttttttttgataagttggtgtaaggctatgtgacttgatcaaaacagatgcagggcctctaaataaaagggatcatctgaaattaatgttgtttgaaattactatctgattttgagggttccagtatttctgtgaaaattcaacaagaactccttggaaactggtattgatattcagtctccttaaggtagatttttcaagcttttcatacattggaactccacctgactttggaccaaccccagaacagagcagagccacctcctatagacgcccattgccctgctgctgtacacttcagcagcttgcacaagggagctcacttaaaaggagaaattgtgtagttttaaaatatattttgtgtaaaataccttactatgctataaaccaccattaaaaaccagtgttttgatttggtacttaaatatttttggagtgaaaattatcactaaagtaacatgactccaacaaaagtatggtttcattataaaagagtactgtattgatttgcccaagttttgtaacttagtaaaggtattaacttccttggatttgtactttgtgatttagtatgctgtatcgtgggctggttatgttaactgaaaaaaataaagtcattacctgagttttgcagtgctctaacttaaacagaagaacagctgttcacatcttttagcattttacatttgcctaacttaaaaattgccatgtgtcaaaatcatggttttgtaattgctaaggcatgatatgtcaggttatttgaatataattactttttgaagtaattgtgaccacaaaacatcttttttacatgaaggagctgtgtatcatttgaaattactcaaatgatgtcttgctctgaggcataaatcccaggtacttagtgtttttaataatatggtgccactgcaggatttgggggcggtggggaagaacaagcataatggtagggggaggcttggcctgaaactaaccactgagtgaattgcactgcaggttttacttaacgggaattccttatttgggatgtcaagagggcagctgcaaactgaaaaacaatccagtaaatgtactttgttttatgtattgtagcaggcaattaactactaaataatagctttgacatttgcaattgttgcatagagactatttttgctagaagatgattagctcttgcctttattttacagtgcttagtgtgataaacttctagtcatgtttcctatccaagagaccagttaatatatgtacataaaccacagaaatagtataacacactatttttaaattatcgttttcctacttaaattttgtttagcttaagacttcttaggacatttgtaaaagcaggttaaatttaataaggtttctgatttttttttgtaaccggagatagtttttacaagtgaaataacatttcagctaaataaaacatcgctaaataattgatatttgatgaaaatctgctttgtataatttctgtaaattatccttgttctgaaaaaggtgtaatgccctaatatttttaaatccttatcctttgattttttaaaaactgacctattgataaaactataaattttcattttccagtgcagttagttacctttttaaacataaatgcacaacaagcaaatgaatttaagagaactaaactggaataagtgttcataaatgaaacccttggactatttaataaagttgaaatgtgaattaaggaaaacttttgttaataaaaactttcttttaa

SEQ ID NO: 323861 - DNA, 1437 bp, Homo sapiens
acagcgcctgcgcactgcgccgccggctggggtgctgggggcggggcaggggcaggtgtagcctctgtgcctcgttgtcccctggcgctacccggacatctctcagggtgccggcaccatgaagatctggacttcggagcacgtctttgaccacccgtgggaaactgttacaacagctgcaatgcagaaatacccaaaccctatgaacccaagtgtggttggagttgatgtgttggacagacatatagatccctctggaaagttgcacagccacagacttctcagcacagagtggggactgccttccattgtgaagtctcttattggtgcagcaagaacgaaaacatatgtgcaagaacattctgtagttgatcctgtagagaaaacaatggaacttaaatctactaatatttcatttacaaacatggtttcagtagatgagagacttatatacaaaccacatcctcaggatccagaaaaaactgttttgacacaagaagccataattaccgtgaaaggagttagcctcagcagttaccttgaaggactgatggcaagtacgatatcctcaaatgctagtaaaggccgagaagcaatggaatgggtaatacataaattaaatgctgagattgaagaactgacagcctcagcaagaggaaccataaggactccaatggcagcagcagcgtttgcagagaagtgatcgtgacagttggtagacaacatcgggtactccaggtctctccaaactgactatatatttatttgttattttaaaaatacaactatattttgggtagttttttttttttttttttttgataagttggtgtaaggctatgtgacttgatcaaaacagatgcagggcctctaaataaaagggatcatctgaaattaatgttgtttgaaattactatctgattttgagggttccagtatttctgtgaaaattcaacaagaactccttggaaactggtattgatattcagtctccttaaggtagatttttcaagcttttcatacattggaactccacctgactttggaccaaccccagaacagagcagagccacctcctatagacgcccattgccctgctgctgtacacttcagcagcttgcacaagggagctcacttaaaaggagaaattgtgtagttttaaaatatattttgtgtaaaataccttactatgctataaaccaccattaaaaaccagtgttttgatttggtacttaaatatttttggagtgaaaattatcactaaagtaacatgactccaacaaaagtatggtttcattataaaagagtactgtattgatttgcccaagttttgtaacttagtaaaggtattaacttccttggatttgtactttgtgatttagtatgctgtatcgtgggctggttatgttaactgaaaaaaataaagtcattacctga

SEQ ID NO: 323862 - DNA, 2508 bp, Homo sapiens
acagcgcctgcgcactgcgccgccggctggggtgctgggggcggggcaggggcaggtgtagcctctgtgcctcgttgtcccctggcgctacccggacatctctcagggtgccggcaccatgaagatctggacttcggagcacgtctttgaccacccgtgggaaactgttacaacagctgcaatgcagaaatacccaaaccctatgaacccaagtgtggttggagttgatgtgttggacagacatatagatccctctggaaagttgcacagccacagacttctcagcacagagtggggactgccttccattgtgaagtctcttattggtgcagcaagaacgaaaacatatgtgcaagaacattctgtagttgatcctgtagagaaaacaatggaacttaaatctactaatatttcatttacaaacatggtttcagtagatgagagacttatatacaaaccacatcctcaggatccagaaaattaccttgaaggactgatggcaagtacgatatcctcaaatgctagtaaaggccgagaagcaatggaatgggtaatacataaattaaatgctgagattgaagaactgacagcctcagcaagaggaaccataaggactccaatggcagcagcagcgtttgcagagaagtgatcgtgacagttggtagacaacatcgggtactccaggtctctccaaactgactatatatttatttgttattttaaaaatacaactatattttgggtagttttttttttttttttttttgataagttggtgtaaggctatgtgacttgatcaaaacagatgcagggcctctaaataaaagggatcatctgaaattaatgttgtttgaaattactatctgattttgagggttccagtatttctgtgaaaattcaacaagaactccttggaaactggtattgatattcagtctccttaaggtagatttttcaagcttttcatacattggaactccacctgactttggaccaaccccagaacagagcagagccacctcctatagacgcccattgccctgctgctgtacacttcagcagcttgcacaagggagctcacttaaaaggagaaattgtgtagttttaaaatatattttgtgtaaaataccttactatgctataaaccaccattaaaaaccagtgttttgatttggtacttaaatatttttggagtgaaaattatcactaaagtaacatgactccaacaaaagtatggtttcattataaaagagtactgtattgatttgcccaagttttgtaacttagtaaaggtattaacttccttggatttgtactttgtgatttagtatgctgtatcgtgggctggttatgttaactgaaaaaaataaagtcattacctgagttttgcagtgctctaacttaaacagaagaacagctgttcacatcttttagcattttacatttgcctaacttaaaaattgccatgtgtcaaaatcatggttttgtaattgctaaggcatgatatgtcaggttatttgaatataattactttttgaagtaattgtgaccacaaaacatcttttttacatgaaggagctgtgtatcatttgaaattactcaaatgatgtcttgctctgaggcataaatcccaggtacttagtgtttttaataatatggtgccactgcaggatttgggggcggtggggaagaacaagcataatggtagggggaggcttggcctgaaactaaccactgagtgaattgcactgcaggttttacttaacgggaattccttatttgggatgtcaagagggcagctgcaaactgaaaaacaatccagtaaatgtactttgttttatgtattgtagcaggcaattaactactaaataatagctttgacatttgcaattgttgcatagagactatttttgctagaagatgattagctcttgcctttattttacagtgcttagtgtgataaacttctagtcatgtttcctatccaagagaccagttaatatatgtacataaaccacagaaatagtataacacactatttttaaattatcgttttcctacttaaattttgtttagcttaagacttcttaggacatttgtaaaagcaggttaaatttaataaggtttctgatttttttttgtaaccggagatagtttttacaagtgaaataacatttcagctaaataaaacatcgctaaataattgatatttgatgaaaatctgctttgtataatttctgtaaattatccttgttctgaaaaaggtgtaatgccctaatatttttaaatccttatcctttgattttttaaaaactgacctattgataaaactataaattttcattttccagtgcagttagttacctttttaaacataaatgcacaacaagcaaatgaatttaagagaactaaactggaataagtgttcataaatgaaacccttggactatttaataaagttgaaatgtgaattaaggaaaacttttgttaataaaaactttcttttaa

SEQ ID NO: 323863 - DNA, 2038 bp, Homo sapiens
attattatacttatagttcagtactacggtatgtattaagagtccggcctggtcgcgaaggccgagaagcaatggaatgggtaatacataaattaaatgctgagattgaagaactgacagcctcagcaagaggaaccataaggactccaatggcagcagcagcgtttgcagagaagtgatcgtgacagttggtagacaacatcgggtactccaggtctctccaaactgactatatatttatttgttattttaaaaatacaactatattttgggtagttttttttttttttttttttgataagttggtgtaaggctatgtgacttgatcaaaacagatgcagggcctctaaataaaagggatcatctgaaattaatgttgtttgaaattactatctgattttgagggttccagtatttctgtgaaaattcaacaagaactccttggaaactggtattgatattcagtctccttaaggtagatttttcaagcttttcatacattggaactccacctgactttggaccaaccccagaacagagcagagccacctcctatagacgcccattgccctgctgctgtacacttcagcagcttgcacaagggagctcacttaaaaggagaaattgtgtagttttaaaatatattttgtgtaaaataccttactatgctataaaccaccattaaaaaccagtgttttgatttggtacttaaatatttttggagtgaaaattatcactaaagtaacatgactccaacaaaagtatggtttcattataaaagagtactgtattgatttgcccaagttttgtaacttagtaaaggtattaacttccttggatttgtactttgtgatttagtatgctgtatcgtgggctggttatgttaactgaaaaaaataaagtcattacctgagttttgcagtgctctaacttaaacagaagaacagctgttcacatcttttagcattttacatttgcctaacttaaaaattgccatgtgtcaaaatcatggttttgtaattgctaaggcatgatatgtcaggttatttgaatataattactttttgaagtaattgtgaccacaaaacatcttttttacatgaaggagctgtgtatcatttgaaattactcaaatgatgtcttgctctgaggcataaatcccaggtacttagtgtttttaataatatggtgccactgcaggatttgggggcggtggggaagaacaagcataatggtagggggaggcttggcctgaaactaaccactgagtgaattgcactgcaggttttacttaacgggaattccttatttgggatgtcaagagggcagctgcaaactgaaaaacaatccagtaaatgtactttgttttatgtattgtagcaggcaattaactactaaataatagctttgacatttgcaattgttgcatagagactatttttgctagaagatgattagctcttgcctttattttacagtgcttagtgtgataaacttctagtcatgtttcctatccaagagaccagttaatatatgtacataaaccacagaaatagtataacacactatttttaaattatcgttttcctacttaaattttgtttagcttaagacttcttaggacatttgtaaaagcaggttaaatttaataaggtttctgatttttttttgtaaccggagatagtttttacaagtgaaataacatttcagctaaataaaacatcgctaaataattgatatttgatgaaaatctgctttgtataatttctgtaaattatccttgttctgaaaaaggtgtaatgccctaatatttttaaatccttatcctttgattttttaaaaactgacctattgataaaactataaattttcattttccagtgcagttagttacctttttaaacataaatgcacaacaagcaaatgaatttaagagaactaaactggaataagtgttcataaatgaaacccttggactatttaataaagttgaaatgtgaattaaggaaaacttttgttaataaaaactttcttttaa

SEQ ID NO: 323864 - DNA, 1001 bp, Homo sapiens
acagcgcctgcgcactgcgccgccggctggggtgctgggggcggggcaggggcaggtgtagcctctgtgcctcgttgtcccctggcgctacccggacatctctcagggtgccggcaccatgaagatctggacttcggagcacgtctttgaccacccgtgggaaactgttacaacagctgcaatgcagaaatacccaaaccctatgaacccaagtgtggttggagttgatgtgttggacagacatatagatccctctggaaagttgcacagccacagacttctcagcacagagtggggactgccttccattgtgaagtctcttattggtgcagcaagaacgaaaacatatgtgcaagaacattctgtagttgatcctgtagagaaaacaatggaacttaaatctactaatatttcatttacaaacatggtttcagtagatgagagacttatatacaaaccacatcctcaggatccagaaaaaactgttttgacacaagaagccataattaccgtgaaaggagttagcctcagcagttaccttgaaggactgatggcaagtacgatatcctcaaatgctagtaaaggccgagaagcaatggaatgggtaatacataaattaaatgctgagattgaagaactgacagcctcagcaagaggaaccataaggactccaatggcagcagcagcgtttgcagagaagtgatcgtgacagttggtagacaacatcgggtactccaggtctctccaaactgactatatatttatttgttattttaaaaatacaactatattttgggtcgcgggaccctggaaactggggcaaggttgtcccttgcccaccccggagccgggccctaaaaaaggggtccctggatgcgtgggcgccaccacctcgcttgggggcacgtttgggaaacaacacaaaccggaacggagatacagcccaggaatccacgtccactggccccgttgccccgaaaaccctaacgctgcgccacgag

SEQ ID NO: 323865 - DNA, 1074 bp, Homo sapiens
  misc_feature (12)..(12): n is a, c, g, or t
ggggctactccntagtttagatgttgtttcagaggtttcttttgtggttctggttgtgtgttacttcggtccgatgtggaacatccctagcggtaaacgcgccatattttaacgactaatagggtactccgcaccgatgacggccatgatcgtggcgagaacgccgaatacttcgtatgcatcaatatacgagtatcagtgacgtaccgacatatgccggatcgccattacgccgggatttgggggcggtggggaagaacaagcataatggtagggggaggcttggcctgaaactaaccactgagtgaattgcactgcaggttttacttaacgggaattccttatttgggatgtcaagagggcagctgcaaactgaaaaacaatccagtaaatgtactttgttttatgtattgtagcaggcaattaactactaaataatagctttgacatttgcaattgttgcatagagactatttttgctagaagatgattagctcttgcctttattttacagtgcttagtgtgataaacttctagtcatgtttcctatccaagagaccagttaatatatgtacataaaccacagaaatagtataacacactatttttaaattatcgttttcctacttaaattttgtttagcttaagacttcttaggacatttgtaaaagcaggttaaatttaataaggtttctgatttttttttgtaaccggagatagtttttacaagtgaaataacatttcagctaaataaaacatcgctaaataattgatatttgatgaaaatctgctttgtataatttctgtaaattatccttgttctgaaaaaggtgtaatgccctaatatttttaaatccttatcctttgattttttaaaaactgacctattgataaaactataaattttcattttccagtgcagttagttacctttttaaacataaatgcacaacaagcaaatgaatttaagagaactaaactggaataagtgttcataaatgaaacccttggactatttaataaagttgaaatgtgaattaaggaaaacttttgttaataaaaactttcttttaa

SEQ ID NO: 323866 - DNA, 1363 bp, Homo sapiens
acagcgcctgcgcactgcgccgccggctggggtgctgggggcggggcaggggcaggtgtagcctctgtgcctcgttgtcccctggcgctacccggacatctctcagggtgccggcaccatgaagatctggacttcggagcacgtctttgaccacccgtgggaaactgttacaacagctgcaatgcagaaatacccaaaccctatgaacccaagtgtggttggagttgatgtgttggacagacatatagatccctctggaaagttgcacagccacagacttctcagcacagagtggggactgccttccattgtgaagtctcttattggtgcagcaagaacgaaaacatatgtgcaagaacattctgtagttgatcctgtagagaaaacaatggaacttaaatctactaatatttcatttacaaacatggtttcagtagatgagagacttatatacaaaccacatcctcaggatccagaaaaaactgttttgacacaagaagccataattaccgtgaaaggagttagcctcagcagttaccttgaaggactgatggcaagtacgatatcctcaaatgctagtaaaggccgagaagcaatggaatgggtaatacataaattaaatgctgagattgaagaactgacagcctcagcaagaggaaccataaggactccaatggcagcagcagcgtttgcagagaagtgatcgtgacagttggtagacaacatcgggtactccaggtctctccaaactgactatatatttatttgttattttaaaaatacaactatattttgggtagttttttttttttttttttttgataagttggtgtaaggctatgtgacttgatcaaaacagatgcagggcctctaaataaaagggatcatctgaaattaatgttgtttgaaattactatctgattttgagggttccagtatttctgtgaaaattcaacaagaactccttggaaactggtattgatattcagtctccttaaggtagatttttcaagcttttcatacattggaactccacctgactttggaccaaccccagaacagagcagagccacctcctatagacgcccattgccctgctgctgtacacttcagcagcttgcacaagggagctcacttaaaaggagaaattgtgtagttttaaaatatattttgtgtaaaataccttactatgctataaaccaccattaaaaaccagtgttttgatttggtacttaaatatttttggagtgaaaattatcactaaagtaacatgactccaacaaaagtatggtttcattataaaagagtactgtattgatttgcccaagttttgtaacttagtaaaggtattaacttccttgga

SEQ ID NO: 323867 - DNA, 1020 bp, Homo sapiens
acagcgcctgcgcactgcgccgccggctggggtgctgggggcggggcaggggcaggtgtagcctctgtgcctcgttgtcccctggcgctacccggacatctctcagggtgccggcaccatgaagatctggacttcggagcacgtctttgaccacccgtgggaaactgttacaacagctgcaatgcagaaatacccaaaccctatgaacccaagtgtggttggagttgatgtgttggacagacatatagatccctctggaaagttgcacagccacagacttctcagcacagagtggggactgccttccattgtgaagtctttctgaatgttttacttagcttattggtgcagcaagaacgaaaacatatgtgcaagaacattctgtagttgatcctgtagagaaaacaatggaacttaaatctactaatatttcatttacaaacatggtttcagtagatgagagacttatatacaaaccacatcctcaggatccagaaaaaactgttttgacacaagaagccataattaccgtgaaaggagttagcctcagcagttaccttgaaggactgatggcaagtacgatatcctcaaatgctagtaaaggccgagaagcaatggaatgggtaatacataaattaaatgctgagattgaagaactgacagcctcagcaagaggaaccataaggactccaatggcagcagcagcgtttgcagagaagtgatcgtgacagttggtagacaacatcgggtactccaggtctctccaaactgactatatatttatttgttattttaaaaatacaactatattttgggtcgcgggaccctggaaactggggcaaggttgtcccttgcccaccccggagccgggccctaaaaaaggggtccctggatgcgtgggcgccaccacctcgcttgggggcacgtttgggaaacaacacaaaccggaacggagatacagcccaggaatccacgtccactggccccgttgccccgaaaaccctaacgctgcgccacgag

SEQ ID NO: 323868 - DNA, 2517 bp, Homo sapiens
acagcgcctgcgcactgcgccgccggctggggtgctgggggcggggcaggggcaggtgtagcctctgtgcctcgttgtcccctggcgctacccggacatctctcagggtgccggcaccatgaagatctggacttcggagcacgtctttgaccacccgtgggaaactgttacaacagctgcaatgcagaaatacccaaaccctatgaacccaagtgtggttggagttgatgtgttggacagacatatagatccctctggaaagttgcacagccacagacttctcagcacagagtggggactgccttccattgtgaagtctcttattggtgcagcaagaacgaaaacatatgtgcaagaacattctgtagttgatcctgtagagaaaacaatggaacttaaatctactaataaaccacatcctcaggatccagaaaaaactgttttgacacaagaagccataattaccgtgaaaggagttagcctcagcagttaccttgaaggactgatggcaagtacgatatcctcaaatgctagtaaaggccgagaagcaatggaatgggtaatacataaattaaatgctgagattgaagaactgacagcctcagcaagaggaaccataaggactccaatggcagcagcagcgtttgcagagaagtgatcgtgacagttggtagacaacatcgggtactccaggtctctccaaactgactatatatttatttgttattttaaaaatacaactatattttgggtagttttttttttttttttttttgataagttggtgtaaggctatgtgacttgatcaaaacagatgcagggcctctaaataaaagggatcatctgaaattaatgttgtttgaaattactatctgattttgagggttccagtatttctgtgaaaattcaacaagaactccttggaaactggtattgatattcagtctccttaaggtagatttttcaagcttttcatacattggaactccacctgactttggaccaaccccagaacagagcagagccacctcctatagacgcccattgccctgctgctgtacacttcagcagcttgcacaagggagctcacttaaaaggagaaattgtgtagttttaaaatatattttgtgtaaaataccttactatgctataaaccaccattaaaaaccagtgttttgatttggtacttaaatatttttggagtgaaaattatcactaaagtaacatgactccaacaaaagtatggtttcattataaaagagtactgtattgatttgcccaagttttgtaacttagtaaaggtattaacttccttggatttgtactttgtgatttagtatgctgtatcgtgggctggttatgttaactgaaaaaaataaagtcattacctgagttttgcagtgctctaacttaaacagaagaacagctgttcacatcttttagcattttacatttgcctaacttaaaaattgccatgtgtcaaaatcatggttttgtaattgctaaggcatgatatgtcaggttatttgaatataattactttttgaagtaattgtgaccacaaaacatcttttttacatgaaggagctgtgtatcatttgaaattactcaaatgatgtcttgctctgaggcataaatcccaggtacttagtgtttttaataatatggtgccactgcaggatttgggggcggtggggaagaacaagcataatggtagggggaggcttggcctgaaactaaccactgagtgaattgcactgcaggttttacttaacgggaattccttatttgggatgtcaagagggcagctgcaaactgaaaaacaatccagtaaatgtactttgttttatgtattgtagcaggcaattaactactaaataatagctttgacatttgcaattgttgcatagagactatttttgctagaagatgattagctcttgcctttattttacagtgcttagtgtgataaacttctagtcatgtttcctatccaagagaccagttaatatatgtacataaaccacagaaatagtataacacactatttttaaattatcgttttcctacttaaattttgtttagcttaagacttcttaggacatttgtaaaagcaggttaaatttaataaggtttctgatttttttttgtaaccggagatagtttttacaagtgaaataacatttcagctaaataaaacatcgctaaataattgatatttgatgaaaatctgctttgtataatttctgtaaattatccttgttctgaaaaaggtgtaatgccctaatatttttaaatccttatcctttgattttttaaaaactgacctattgataaaactataaattttcattttccagtgcagttagttacctttttaaacataaatgcacaacaagcaaatgaatttaagagaactaaactggaataagtgttcataaatgaaacccttggactatttaataaagttgaaatgtgaattaaggaaaacttttgttaataaaaactttcttttaa

SEQ ID NO: 323869 - DNA, 2532 bp, Homo sapiens
acagcgcctgcgcactgcgccgccggctggggtgctgggggcggggcaggggcaggtgtagcctctgtgcctcgttgtcccctggcgctacccggacatctctcagggtgccggcaccatgaagatctggacttcggagcacgtctttgaccacccgtgggaaactgttacaacagctgcaatgcagaaatacccaaaccctatgaacccaagtgtggttggagttgatgtgttggacagacatatagatccctctggaaagttgcacagccacagacttctcagcacagagtggggactgccttccattgtgaagtctcttattggtgcagcaagaacgaaaacatatgtgcaagaacattctgtagttgatcctgtagagaaaacaatggaacttaaatctactaatatttcatttacaaacatggtttcagtagatgagagacttatatacaaaccacatcctcaggatccagaaaaaactgttttgacacaagaagccataattaccgtgaaaggagttagcctcagcagttaccttgaaggactgatgggccgagaagcaatggaatgggtaatacataaattaaatgctgagattgaagaactgacagcctcagcaagaggaaccataaggactccaatggcagcagcagcgtttgcagagaagtgatcgtgacagttggtagacaacatcgggtactccaggtctctccaaactgactatatatttatttgttattttaaaaatacaactatattttgggtagttttttttttttttttttttgataagttggtgtaaggctatgtgacttgatcaaaacagatgcagggcctctaaataaaagggatcatctgaaattaatgttgtttgaaattactatctgattttgagggttccagtatttctgtgaaaattcaacaagaactccttggaaactggtattgatattcagtctccttaaggtagatttttcaagcttttcatacattggaactccacctgactttggaccaaccccagaacagagcagagccacctcctatagacgcccattgccctgctgctgtacacttcagcagcttgcacaagggagctcacttaaaaggagaaattgtgtagttttaaaatatattttgtgtaaaataccttactatgctataaaccaccattaaaaaccagtgttttgatttggtacttaaatatttttggagtgaaaattatcactaaagtaacatgactccaacaaaagtatggtttcattataaaagagtactgtattgatttgcccaagttttgtaacttagtaaaggtattaacttccttggatttgtactttgtgatttagtatgctgtatcgtgggctggttatgttaactgaaaaaaataaagtcattacctgagttttgcagtgctctaacttaaacagaagaacagctgttcacatcttttagcattttacatttgcctaacttaaaaattgccatgtgtcaaaatcatggttttgtaattgctaaggcatgatatgtcaggttatttgaatataattactttttgaagtaattgtgaccacaaaacatcttttttacatgaaggagctgtgtatcatttgaaattactcaaatgatgtcttgctctgaggcataaatcccaggtacttagtgtttttaataatatggtgccactgcaggatttgggggcggtggggaagaacaagcataatggtagggggaggcttggcctgaaactaaccactgagtgaattgcactgcaggttttacttaacgggaattccttatttgggatgtcaagagggcagctgcaaactgaaaaacaatccagtaaatgtactttgttttatgtattgtagcaggcaattaactactaaataatagctttgacatttgcaattgttgcatagagactatttttgctagaagatgattagctcttgcctttattttacagtgcttagtgtgataaacttctagtcatgtttcctatccaagagaccagttaatatatgtacataaaccacagaaatagtataacacactatttttaaattatcgttttcctacttaaattttgtttagcttaagacttcttaggacatttgtaaaagcaggttaaatttaataaggtttctgatttttttttgtaaccggagatagtttttacaagtgaaataacatttcagctaaataaaacatcgctaaataattgatatttgatgaaaatctgctttgtataatttctgtaaattatccttgttctgaaaaaggtgtaatgccctaatatttttaaatccttatcctttgattttttaaaaactgacctattgataaaactataaattttcattttccagtgcagttagttacctttttaaacataaatgcacaacaagcaaatgaatttaagagaactaaactggaataagtgttcataaatgaaacccttggactatttaataaagttgaaatgtgaattaaggaaaacttttgttaataaaaactttcttttaa

SEQ ID NO: 323870 - DNA, 1578 bp, Homo sapiens
acagcgcctgcgcactgcgccgccggctggggtgctgggggcggggcaggggcaggtgtagcctctgtgcctcgttgtcccctggcgctacccggacatctctcagggtgccggcaccatgaagatctggacttcggagcacgtctttgaccacccgtgggaaactgttacaacagctgcaatgcagaaatacccaaaccctatgaacccaagtgtggttggagttgatgtgttggacagacatatagatccctctggaaagttgcacagccacagacttctcagcacagagtggggactgccttccattgtgaagtctcttattggtgcagcaagaacgaaaacatatgtgcaagaacattctgtagttgatcctgtagagaaaacaatggaacttaaatctactaatatttcatttacaaacatggtttcagtagatgagagacttatatacaaaccacatcctcaggatccagaaaaaactgttttgacacaagaagccataattaccgtgaaaggagttagcctcagcagttaccttgaaggactgatggcaagtacgatatcctcaaatgctagtaaaggccgagaagcaatggaatgggtaatacataaattaaatgctgagattgaagaactgacagcctcagcaagaggaaccataaggactccaatggcagcagcagcgtttgcagagaagtgatcgtgacagttggtagacaacatcgggtactccaggtctctccaaactgactatatatttatttgttattttaaaaatacaactatattttgggtagttttttttttttttttttttgataagttggtgtaaggctatgtgacttgatcaaaacagatgcagggcctctaaataaaagggatcatctgaaattaatgttgtttgaaattactatctgattttgagggttccagtatttctgtgaaaattcaacaagaactccttggaaactggtattgatattcagtctccttaaggtagatttttcaagcttttcatacattggaactccacctgactttggaccaaccccagaacagagcagagccacctcctatagacgcccattgccctgctgctgtacacttcagcagcttgcacaagggagctcacttaaaaggagaaattgtgtagttttaaaatatattttgtgtaaaataccttactatgctataaaccaccattaaaaaccagtgttttgatttggtacttaaatatttttggagtgaaaattatcactaaagtaacatgactccaacaaaagtatggtttcattataaaagagtactgtattgatttgcccaagttttgtaacttagtaaaggtattaacttccttggatttgtactttgtgatttagtatgctgtatcgtgggctggttatgttaactggttaattctttagctttttaatttgcctacttaaaaatgcatgtgtcaaatatggtttgtaatgtaagctgatagcaggtattggaatatcttttgaagatgggcgcaaaatttttttgaggggggtttttaaaccaagtgggtagggggaaaaacgcgggtgg

SEQ ID NO: 323871 - DNA, 391 bp, Homo sapiens
ggaatttaagaattggagatgatttttgaggacatttggtccaaactttacccggtgcagaagttgatcttgttatctctctgactgataagagaaacaccacctatttgcaaacctcggtggggtcaatagtacattcacccgtctttcacttcatcctcatatctgcatggcgagtttgttgttttcgttgtgctactgacatcattgctaataatgcttattgggtactttctttatgaaatccattcattaaaggaatattcatttaatgattatttacctggggcttcatgtgccaaacaatgagtgaaacagattacatgccttatcttattgaatcctacgacgagcacctgagacaggtgctgtctttatctcccatttgcag

SEQ ID NO: 323872 - DNA, 270 bp, Homo sapiens
ctttgtcacccaggctggagtgcagtggcaccatcttggctcacagcaacctccgcctcctgagttcaagtaattctcctgtctcagcctcctgagtagctgggactacaggtgtgcaccactacgcccagctaatttgtgtatttttagtagagacggggtttcaccatattggttggccaggatggtctcaatctcttgacctccggatcaactccccttggcctcccaaagtgctgggattacaggagtgagccaccgcgcccggcc

SEQ ID NO: 323873 - DNA, 1223 bp, Homo sapiens
  misc_feature (1)..(3): n is a, c, g, or t
  misc_feature (767)..(767): n is a, c, g, or t
nnnagggtttaggttattttttgtttttctcttctagaaaaatataaggaaactaaaattatctataatgctctcttgagggcaggtcttatatatgtattatcccacttcccagcatggttgtttcttaatagataagcatacaaactgatgctttgtaagggtttgaactttcaatagagagaacaatttgttaatagccagaaattttccctttcctcctttatatatgctgcatatcatctatagggtagaggaatgagaaagtatgttttataaggtaaaaatgaaaattcaaagatgaaacaacaataaaggtaaagccagagagagagacagaggagtacttcgtataaacattctgtatacattaggcagaatctaataaatgtttttgggtggatactaaaatactaatgaaacatttgcttataagagaataaatttctactttttaattgaattttagttttactggtgtaaccttctgtatcccttctgtcttattagctaaatgcattcgttattatacagtctaagttggaagtctaaaagcatatttattaaggtgaatatttcatggagatgaaattatggaagagtttagcttctttatatttttatagaaatttgtacttgtactttatcagaaaaaaaattttatacttacatgcttatgaaaactaatgtataaaatggtgaaattgattgaaaggacatttattgaaaggcatttattgaatggtatttattgaaaggacaagatntacattttatttttcccttcagctataataaccataaaactatttcctagaagtctgctagcaatttaacactaattaaggaaaaccttaacttctgccctttttttcctagatgagaatgaagatttaaggaaacttgcagagaatgaaatcactttgtgtcaaaaagaaataactcagctgaagcatcaggtatggtatttctgcaaagaataaagcatttgtgctattcttaggcattaaagtttattaaaggtttataaaaacaagtgactagcttgttactgtttagaataaactgggttttttaaatttattttctagatttattgaggtataaattgacccccaaaattgcatatatttaaggtatatgatgtgatgttttgatatatgcatacattttgaaatgattatgactatcaataaactggtttttaaagaacaaacttcaca

SEQ ID NO: 323874 - DNA, 637 bp, Homo sapiens
  misc_feature (3)..(4): n is a, c, g, or t
  misc_feature (6)..(6): n is a, c, g, or t
ggnncnggtcagggtccgcgatctcggactaaggatgcggtcccgggttctgtggggcgctgcccggtggctctggccccgccgggccgttggcccagcccgccggcccctgagctccggtagcccgccgctggaggagctgttcgcccggggcgggcccttgcggaccttcctcgagcgccaggcggggtctgaagcccatttgaaggtcaggaggcccgagttgctggcggtgatcaaactgctgaacgagaaggagcaggagctgcgggagactgagcacttgctgcacgatgagaatgaagatttaaggaaacttgcagagaatgaaatcactttgtgtcaaaaagaaataactcagctgaagcatcaggtatggtatttctgcaaagaataaagcatttgtgctattcttaggcattaaagtttattaaaggtttataaaaacaagtgactagcttgttactgtttagaataaactgggttttttaaatttattttctagatttattgaggtataaattgacccccaaaattgcatatatttaaggtatatgatgtgatgttttgatatatgcatacattttgaaatgattatgactatcaataaactggtttttaaagaacaaacttcaca

SEQ ID NO: 323875 - DNA, 3850 bp, Homo sapiens
  misc_feature (3)..(4): n is a, c, g, or t
  misc_feature (6)..(6): n is a, c, g, or t
ggnncnggtcagggtccgcgatctcggactaaggatgcggtcccgggttctgtggggcgctgcccggtggctctggccccgccgggccgttggcccagcccgccggcccctgagctccggtagcccgccgctggaggagctgttcgcccggggcgggcccttgcggaccttcctcgagcgccaggcggggtctgaagcccatttgaaggtcaggaggcccgagttgctggcggtgatcaaactgctgaacgagaaggagcaggagctgcgggagactgagcacttgctgcacgatgagaatgaagatttaaggaaacttgcagagaatgaaatcactttgtgtcaaaaagaaataactcagctgaagcatcagaagaaacagatgaaaatgatttgatcctggaagtaactgcaggagttggaggtcaggaggcaatgttgtttacatcagagatatttgatatgtatcagcaatatgctgcatttaaaagatggcattttgaaaccctggaatattttccaagtgaactaggtggccttagacatgcatctgccagcattgggggttcagaagcctataggcacatgaaatttgaaggaggtgttcacagagtacaaagagtgccaaagacagaaaagcaaggccgcgtccatactagcaccatgactgtagcaatattaccccagcctactgagattaatctggtgattaatccgaaagatttgagaattgacactaagcgagccagtggagctggggggcagcatgtaaataccacggacagtgctgtccggatagttcatcttccaacaggtgttgtttctgaatgtcaacaagagagatctcagctgaaaaataaagagctggctatgacaaagttacgtgcaaaactgtacagcatgcatctagaagaagaaataaataaaagacagaatgctagaaaaattcagattggaagtaaaggaagatcagagaaaataagaacatataattttccacagaaccgggtcacagatcacagaataaacaagacgctgcatgatcttgaaacttttatgcaaggagattatctactggatgaacttgtacagtcattgaaggaatacgccgattatgaatctttagtagaaattatttcccaaaaagtttaagttgatttgttatttatagactttcgtagcttagaaaaattctacagtacatccacatagggtgaaagtacccttactctcttgaaaaacgttgagttaacacagttggaggtaatatgcatattctgaagtcatagataatttacacagatctctctcaatgcattagcaaaaatcatacaatatacagatggtcctcgatttacattgtggttaattcccaataaacccatcataagttaaaaatgcatataacgttagcaacacagcagtctcctaattaatgacagcttgacttaacaattttccaactttaccatggtgtgaaagaggtatgattcctaagccctaaggagctcctcagcttgaaatggggctgcatccctataaacccatcataaagtcaaaaaatcctaaaacataagttggtgaccatctgtaatcatgatgtggtggtaaatcttggacgctaccttacaataactagacaaaggaaaatcatcctttgtcctgttctgtgtaaatatttaatgaatgatcaaaacttcagtttaaatattatgaaaaactttaaacataaagtagtagaaataagacagtaaatactgtatcctaatatccagtcaggatacagaaaccataccattaacttgaacagggataattttaatataaaaactgttaactgataatggtattaacttttaagagggatgaaagagagctatgatgtcctaggactgagagtaccccaggaaagaatacccttgaaagggtctccccttccccatggtgaagtcaggcctaatggagagagtggctacagcctactcagtgattgggaaattccctgtcttgccctgggccagagctggtgtaccgctggtggatcaggtcttacaagcaaagaacctcacactcccaactggtaagccagaagcctcttgctagggtgtgagcaaaacttggacaggaactctcagtagatgtttgtgtttgtcaagattctccagacaaacttccttaaaaggattggcttgtgttgttattattaagtctaacaagtccaaaagctggagtgtgaggcaggaggctggaaacccaggaaagctgatggtgcaaggtccagtccaaaggtatctgttggaggattctcttgttctgggaagaggacggtctttttttctcttcagaccttcacctgactggatcaagcccactaacatcgaggaggacagtctgcattactcagagttcactgattgatttaaatgtcaatctcatataaaacaccctcacagaaacacctagaataatgtttgaccttataattggaaaatcagagcaaaagttaaatctcaaaaaaaaaaaaaaaaaaagtatgacccagtagctaggcacctgtggccccgccaagttgacacataaaattaactgtcacagtatcatcttagaagtgaaagaagcccctttatcctgcagtgcccctctaccaccacctactgacaaagaacatggtgctatctggcatgggagaaatgttcagtttgctatggcttgtatgtgtcccctcaaattcaagtgttgccaatgtgacagcatcaagaggtggggtctttaagagatcactaggccatgagggattctcttaggactgggatgaaggcccataataaaagaggtttcagggagcatcctgctagcttgccttctgtatgtgagaacacagcaagaaagccctagtcaacaagtgccagctccttgatcttagacttcccatcctccagaactgtgagaaatacatttctgttccttacaaattacccagtctcctgtattctgttatagcagcacaaaatgaagataccatacctgaacacctgaacattcttcacaaggtagtaaatgcactgctttattctggtctcagtattgtgtgcttaataaggaaatgagaaagggtggatcagggcataggatgaacaagttactgctagacctctcacaatgccactaatggataagattgtattttcatcattcttgtctcttcggaagctaacaccatgctataataggcactaaatagatgtctaaaaacaccttaagtatttgtctagaaatctggtgcattgttcagaaagaaccaaaattcaaaataatttcaaagggcctaaagcactagttaatcaaaattcattagtttttaatggtactaccactctcaaatttaaaatgtcatcttacgttcctcttcctcgcattggatttattgctaaaacctggtaaacacttttaatccttttcaattccattaccactgctcttgtccagaattacttcgcagactaatagtcacctgacttctcccctgcatccgatttgctgtctaattctggttacaaataagtaactgccaaactaatctttctaaaaagcaagactgatctcgtcactcctttgctcaacaatgtaaaagctcccattgtctcccaaataaaaccagctttccactgtgtatacaatacatccatgatctgtatccagcatcattttgtattagctcactttatacaccaccccccatgccacatcaaattaaattatcctgataaatgcaactgcatttaccctttcccttattttgttctttatgttgtaggcctcctttgtgcccatttcttcagaagacatcccc

SEQ ID NO: 323876 - DNA, 3738 bp, Homo sapiens
  misc_feature (3)..(4): n is a, c, g, or t
  misc_feature (6)..(6): n is a, c, g, or t
ggnncnggtcagggtccgcgatctcggactaaggatgcggtcccgggttctgtggggcgctgcccggtggctctggccccgccgggccgttggcccagcccgccggcccctgagctccggtagcccgccgctggaggagctgttcgcccggggcgggcccttgcggaccttcctcgagcgccaggcggggtctgaagcccatttgaaggtcaggaggcccgagttgctggcggtgatcaaactgctgaacgagaaggagcaggagctgcgggagactgagcacttgctgcacgatgagaatgaagatttaaggaaacttgcagagaatgaaatcactttgtgtcaaaaagaaataactcagctgaagcatcagattatcttacttttggttccctcagaagaaacagatgaaaatgatttgatcctggaagtaactgcaggagttggaggtcaggaggcaatgttgtttacatcagagatatttgatatgtatcagcaatatgctgcatttaaaagatggcattttgaaaccctggaatattttccaagtgaactaggtggccttagacatgcatctgccagcattgggggttcagaagcctataggcacatgaaatttgaaggaggtgttcacagagtacaaagagtgccaaagacagaaaagcaaggccgcgtccatactagcaccatgactgtagcaatattaccccagcctactgagattaatctggtgattaatccgaaagatttgagaattgacactaagcgagccagtggagctggggggcagcatgtaaataccacggacagtgctgtccggatagttcatcttccaacagattggaagtaaaggaagatcagagaaaataagaacatataattttccacagaaccgggtcacagatcacagaataaacaagacgctgcatgatcttgaaacttttatgcaaggagattatctactggatgaacttgtacagtcattgaaggaatacgccgattatgaatctttagtagaaattatttcccaaaaagtttaagttgatttgttatttatagactttcgtagcttagaaaaattctacagtacatccacatagggtgaaagtacccttactctcttgaaaaacgttgagttaacacagttggaggtaatatgcatattctgaagtcatagataatttacacagatctctctcaatgcattagcaaaaatcatacaatatacagatggtcctcgatttacattgtggttaattcccaataaacccatcataagttaaaaatgcatataacgttagcaacacagcagtctcctaattaatgacagcttgacttaacaattttccaactttaccatggtgtgaaagaggtatgattcctaagccctaaggagctcctcagcttgaaatggggctgcatccctataaacccatcataaagtcaaaaaatcctaaaacataagttggtgaccatctgtaatcatgatgtggtggtaaatcttggacgctaccttacaataactagacaaaggaaaatcatcctttgtcctgttctgtgtaaatatttaatgaatgatcaaaacttcagtttaaatattatgaaaaactttaaacataaagtagtagaaataagacagtaaatactgtatcctaatatccagtcaggatacagaaaccataccattaacttgaacagggataattttaatataaaaactgttaactgataatggtattaacttttaagagggatgaaagagagctatgatgtcctaggactgagagtaccccaggaaagaatacccttgaaagggtctccccttccccatggtgaagtcaggcctaatggagagagtggctacagcctactcagtgattgggaaattccctgtcttgccctgggccagagctggtgtaccgctggtggatcaggtcttacaagcaaagaacctcacactcccaactggtaagccagaagcctcttgctagggtgtgagcaaaacttggacaggaactctcagtagatgtttgtgtttgtcaagattctccagacaaacttccttaaaaggattggcttgtgttgttattattaagtctaacaagtccaaaagctggagtgtgaggcaggaggctggaaacccaggaaagctgatggtgcaaggtccagtccaaaggtatctgttggaggattctcttgttctgggaagaggacggtctttttttctcttcagaccttcacctgactggatcaagcccactaacatcgaggaggacagtctgcattactcagagttcactgattgatttaaatgtcaatctcatataaaacaccctcacagaaacacctagaataatgtttgaccttataattggaaaatcagagcaaaagttaaatctcaaaaaaaaaaaaaaaaaaagtatgacccagtagctaggcacctgtggccccgccaagttgacacataaaattaactgtcacagtatcatcttagaagtgaaagaagcccctttatcctgcagtgcccctctaccaccacctactgacaaagaacatggtgctatctggcatgggagaaatgttcagtttgctatggcttgtatgtgtcccctcaaattcaagtgttgccaatgtgacagcatcaagaggtggggtctttaagagatcactaggccatgagggattctcttaggactgggatgaaggcccataataaaagaggtttcagggagcatcctgctagcttgccttctgtatgtgagaacacagcaagaaagccctagtcaacaagtgccagctccttgatcttagacttcccatcctccagaactgtgagaaatacatttctgttccttacaaattacccagtctcctgtattctgttatagcagcacaaaatgaagataccatacctgaacacctgaacattcttcacaaggtagtaaatgcactgctttattctggtctcagtattgtgtgcttaataaggaaatgagaaagggtggatcagggcataggatgaacaagttactgctagacctctcacaatgccactaatggataagattgtattttcatcattcttgtctcttcggaagctaacaccatgctataataggcactaaatagatgtctaaaaacaccttaagtatttgtctagaaatctggtgcattgttcagaaagaaccaaaattcaaaataatttcaaagggcctaaagcactagttaatcaaaattcattagtttttaatggtactaccactctcaaatttaaaatgtcatcttacgttcctcttcctcgcattggatttattgctaaaacctggtaaacacttttaatccttttcaattccattaccactgctcttgtccagaattacttcgcagactaatagtcacctgacttctcccctgcatccgatttgctgtctaattctggttacaaataagtaactgccaaactaatctttctaaaaagcaagactgatctcgtcactcctttgctcaacaatgtaaaagctcccattgtctcccaaataaaaccagctttccactgtgtatacaatacatccatgatctgtatccagcatcattttgtattagctcactttatacaccaccccccatgccacatcaaattaaattatcctgataaatgcaactgcatttaccctttcccttattttgttctttatgttgtaggcctcctttgtgcccatttcttcagaagacatcccc

SEQ ID NO: 323877 - DNA, 3630 bp, Homo sapiens
  misc_feature (3)..(4): n is a, c, g, or t
  misc_feature (6)..(6): n is a, c, g, or t
ggnncnggtcagggtccgcgatctcggactaaggatgcggtcccgggttctgtggggcgctgcccggtggctctggccccgccgggccgttggcccagcccgccggcccctgagctccggtagcccgccgctggaggagctgttcgcccggggcgggcccttgcggaccttcctcgagcgccaggcggggtctgaagcccatttgaaggtcaggaggcccgagttgctggcggtgatcaaactgctgaacgagaaggagcaggagctgcgggagactgagcacttgctgcacgatgagaatgaagatttaaggaaacttgcagagaatgaaatcactttgtgtcaaaaagaaataactcagctgaagcatcagattatcttacttttggttccctcagaagaaacagatgaaaatgatttgatcctggaagtaactgcaggagttggaggtggccttagacatgcatctgccagcattgggggttcagaagcctataggcacatgaaatttgaaggaggtgttcacagagtacaaagagtgccaaagacagaaaagcaaggccgcgtccatactagcaccatgactgtagcaatattaccccagcctactgagattaatctggtgattaatccgaaagatttgagaattgacactaagcgagccagtggagctggggggcagcatgtaaataccacggacagtgctgtccggatagttcatcttccaacagattggaagtaaaggaagatcagagaaaataagaacatataattttccacagaaccgggtcacagatcacagaataaacaagacgctgcatgatcttgaaacttttatgcaaggagattatctactggatgaacttgtacagtcattgaaggaatacgccgattatgaatctttagtagaaattatttcccaaaaagtttaagttgatttgttatttatagactttcgtagcttagaaaaattctacagtacatccacatagggtgaaagtacccttactctcttgaaaaacgttgagttaacacagttggaggtaatatgcatattctgaagtcatagataatttacacagatctctctcaatgcattagcaaaaatcatacaatatacagatggtcctcgatttacattgtggttaattcccaataaacccatcataagttaaaaatgcatataacgttagcaacacagcagtctcctaattaatgacagcttgacttaacaattttccaactttaccatggtgtgaaagaggtatgattcctaagccctaaggagctcctcagcttgaaatggggctgcatccctataaacccatcataaagtcaaaaaatcctaaaacataagttggtgaccatctgtaatcatgatgtggtggtaaatcttggacgctaccttacaataactagacaaaggaaaatcatcctttgtcctgttctgtgtaaatatttaatgaatgatcaaaacttcagtttaaatattatgaaaaactttaaacataaagtagtagaaataagacagtaaatactgtatcctaatatccagtcaggatacagaaaccataccattaacttgaacagggataattttaatataaaaactgttaactgataatggtattaacttttaagagggatgaaagagagctatgatgtcctaggactgagagtaccccaggaaagaatacccttgaaagggtctccccttccccatggtgaagtcaggcctaatggagagagtggctacagcctactcagtgattgggaaattccctgtcttgccctgggccagagctggtgtaccgctggtggatcaggtcttacaagcaaagaacctcacactcccaactggtaagccagaagcctcttgctagggtgtgagcaaaacttggacaggaactctcagtagatgtttgtgtttgtcaagattctccagacaaacttccttaaaaggattggcttgtgttgttattattaagtctaacaagtccaaaagctggagtgtgaggcaggaggctggaaacccaggaaagctgatggtgcaaggtccagtccaaaggtatctgttggaggattctcttgttctgggaagaggacggtctttttttctcttcagaccttcacctgactggatcaagcccactaacatcgaggaggacagtctgcattactcagagttcactgattgatttaaatgtcaatctcatataaaacaccctcacagaaacacctagaataatgtttgaccttataattggaaaatcagagcaaaagttaaatctcaaaaaaaaaaaaaaaaaaagtatgacccagtagctaggcacctgtggccccgccaagttgacacataaaattaactgtcacagtatcatcttagaagtgaaagaagcccctttatcctgcagtgcccctctaccaccacctactgacaaagaacatggtgctatctggcatgggagaaatgttcagtttgctatggcttgtatgtgtcccctcaaattcaagtgttgccaatgtgacagcatcaagaggtggggtctttaagagatcactaggccatgagggattctcttaggactgggatgaaggcccataataaaagaggtttcagggagcatcctgctagcttgccttctgtatgtgagaacacagcaagaaagccctagtcaacaagtgccagctccttgatcttagacttcccatcctccagaactgtgagaaatacatttctgttccttacaaattacccagtctcctgtattctgttatagcagcacaaaatgaagataccatacctgaacacctgaacattcttcacaaggtagtaaatgcactgctttattctggtctcagtattgtgtgcttaataaggaaatgagaaagggtggatcagggcataggatgaacaagttactgctagacctctcacaatgccactaatggataagattgtattttcatcattcttgtctcttcggaagctaacaccatgctataataggcactaaatagatgtctaaaaacaccttaagtatttgtctagaaatctggtgcattgttcagaaagaaccaaaattcaaaataatttcaaagggcctaaagcactagttaatcaaaattcattagtttttaatggtactaccactctcaaatttaaaatgtcatcttacgttcctcttcctcgcattggatttattgctaaaacctggtaaacacttttaatccttttcaattccattaccactgctcttgtccagaattacttcgcagactaatagtcacctgacttctcccctgcatccgatttgctgtctaattctggttacaaataagtaactgccaaactaatctttctaaaaagcaagactgatctcgtcactcctttgctcaacaatgtaaaagctcccattgtctcccaaataaaaccagctttccactgtgtatacaatacatccatgatctgtatccagcatcattttgtattagctcactttatacaccaccccccatgccacatcaaattaaattatcctgataaatgcaactgcatttaccctttcccttattttgttctttatgttgtaggcctcctttgtgcccatttcttcagaagacatcccc

SEQ ID NO: 323878 - DNA, 3188 bp, Homo sapiens
taagcttatagtctctcccttttttattagagtcctctgttttttcccctcataaaggaagaagaaaaaggatgaggaggaaaagtattccttgataataagtaaagaagatttttttattaaaactttttaattctcgtaacactattcaggtgttgtttctgaatgtcaacaagagagatctcagctgaaaaataaagagctggctatgacaaagttacgtgcaaaactgtacagcatgcatctagaagaagaaataaataaaagacagaatgctagaaaaattcagattggaagtaaaggaagatcagagaaaataagaacatataattttccacagaaccgggtcacagatcacagaataaacaagacgctgcatgatcttgaaacttttatgcaaggagattatctactggatgaacttgtacagtcattgaaggaatacgccgattatgaatctttagtagaaattatttcccaaaaagtttaagttgatttgttatttatagactttcgtagcttagaaaaattctacagtacatccacatagggtgaaagtacccttactctcttgaaaaacgttgagttaacacagttggaggtaatatgcatattctgaagtcatagataatttacacagatctctctcaatgcattagcaaaaatcatacaatatacagatggtcctcgatttacattgtggttaattcccaataaacccatcataagttaaaaatgcatataacgttagcaacacagcagtctcctaattaatgacagcttgacttaacaattttccaactttaccatggtgtgaaagaggtatgattcctaagccctaaggagctcctcagcttgaaatggggctgcatccctataaacccatcataaagtcaaaaaatcctaaaacataagttggtgaccatctgtaatcatgatgtggtggtaaatcttggacgctaccttacaataactagacaaaggaaaatcatcctttgtcctgttctgtgtaaatatttaatgaatgatcaaaacttcagtttaaatattatgaaaaactttaaacataaagtagtagaaataagacagtaaatactgtatcctaatatccagtcaggatacagaaaccataccattaacttgaacagggataattttaatataaaaactgttaactgataatggtattaacttttaagagggatgaaagagagctatgatgtcctaggactgagagtaccccaggaaagaatacccttgaaagggtctccccttccccatggtgaagtcaggcctaatggagagagtggctacagcctactcagtgattgggaaattccctgtcttgccctgggccagagctggtgtaccgctggtggatcaggtcttacaagcaaagaacctcacactcccaactggtaagccagaagcctcttgctagggtgtgagcaaaacttggacaggaactctcagtagatgtttgtgtttgtcaagattctccagacaaacttccttaaaaggattggcttgtgttgttattattaagtctaacaagtccaaaagctggagtgtgaggcaggaggctggaaacccaggaaagctgatggtgcaaggtccagtccaaaggtatctgttggaggattctcttgttctgggaagaggacggtctttttttctcttcagaccttcacctgactggatcaagcccactaacatcgaggaggacagtctgcattactcagagttcactgattgatttaaatgtcaatctcatataaaacaccctcacagaaacacctagaataatgtttgaccttataattggaaaatcagagcaaaagttaaatctcaaaaaaaaaaaaaaaaaaagtatgacccagtagctaggcacctgtggccccgccaagttgacacataaaattaactgtcacagtatcatcttagaagtgaaagaagcccctttatcctgcagtgcccctctaccaccacctactgacaaagaacatggtgctatctggcatgggagaaatgttcagtttgctatggcttgtatgtgtcccctcaaattcaagtgttgccaatgtgacagcatcaagaggtggggtctttaagagatcactaggccatgagggattctcttaggactgggatgaaggcccataataaaagaggtttcagggagcatcctgctagcttgccttctgtatgtgagaacacagcaagaaagccctagtcaacaagtgccagctccttgatcttagacttcccatcctccagaactgtgagaaatacatttctgttccttacaaattacccagtctcctgtattctgttatagcagcacaaaatgaagataccatacctgaacacctgaacattcttcacaaggtagtaaatgcactgctttattctggtctcagtattgtgtgcttaataaggaaatgagaaagggtggatcagggcataggatgaacaagttactgctagacctctcacaatgccactaatggataagattgtattttcatcattcttgtctcttcggaagctaacaccatgctataataggcactaaatagatgtctaaaaacaccttaagtatttgtctagaaatctggtgcattgttcagaaagaaccaaaattcaaaataatttcaaagggcctaaagcactagttaatcaaaattcattagtttttaatggtactaccactctcaaatttaaaatgtcatcttacgttcctcttcctcgcattggatttattgctaaaacctggtaaacacttttaatccttttcaattccattaccactgctcttgtccagaattacttcgcagactaatagtcacctgacttctcccctgcatccgatttgctgtctaattctggttacaaataagtaactgccaaactaatctttctaaaaagcaagactgatctcgtcactcctttgctcaacaatgtaaaagctcccattgtctcccaaataaaaccagctttccactgtgtatacaatacatccatgatctgtatccagcatcattttgtattagctcactttatacaccaccccccatgccacatcaaattaaattatcctgataaatgcaactgcatttaccctttcccttattttgttctttatgttgtaggcctcctttgtgcccatttcttcagaagacatcccc

SEQ ID NO: 323879 - DNA, 3110 bp, Homo sapiens
  misc_feature (3)..(4): n is a, c, g, or t
  misc_feature (6)..(6): n is a, c, g, or t
ggnncnggtcagggtccgcgatctcggactaaggatgcggtcccgggttctgtggggcgctgcccggtggctctggccccgccgggccgttggcccagcccgccggcccctgagctccggtagcccgccgctggaggagctgttcgcccggggcgggcccttgcggaccttcctcgagcgccaggcggggtctgaagcccatttgaaggtcaggaggcccgagttgctggcggtgatcaaactgctgaacgagaaggagcaggagctgcgggagactgagcacttgctgcacgatgagaatgaagatttaaggaaacttgcagagaatgaaatcactttgtgtcaaaaagaaataactcagctgaagcatcagattatcttacttttggttccctcagaagaaacagatgaaaatgatttgatcctggaagtaactgcaggagttggaggtcaggaggcaatgttgtttacatcagagatatttgatatgtatcagcaatatgctgcatttaaaagatggcattttgaaaccctggaatattttccaagtgaactaggtggccttagacatgcatctgccagcattgggggttcagaagcctataggcacatgaaatttgaaggaggtgttcacagagtacaaagagtgccaaagacagaaaagcaaggccgcgtccatactagcaccatgactgtagcaatattaccccagcctactgagattaatctggtgattaatccgaaagatttgagaattgacactaagagctcctcagcttgaaatggggctgcatccctataaacccatcataaagtcaaaaaatcctaaaacataagttggtgaccatctgtaatcatgatgtggtggtaaatcttggacgctaccttacaataactagacaaaggaaaatcatcctttgtcctgttctgtgtaaatatttaatgaatgatcaaaacttcagtttaaatattatgaaaaactttaaacataaagtagtagaaataagacagtaaatactgtatcctaatatccagtcaggatacagaaaccataccattaacttgaacagggataattttaatataaaaactgttaactgataatggtattaacttttaagagggatgaaagagagctatgatgtcctaggactgagagtaccccaggaaagaatacccttgaaagggtctccccttccccatggtgaagtcaggcctaatggagagagtggctacagcctactcagtgattgggaaattccctgtcttgccctgggccagagctggtgtaccgctggtggatcaggtcttacaagcaaagaacctcacactcccaactggtaagccagaagcctcttgctagggtgtgagcaaaacttggacaggaactctcagtagatgtttgtgtttgtcaagattctccagacaaacttccttaaaaggattggcttgtgttgttattattaagtctaacaagtccaaaagctggagtgtgaggcaggaggctggaaacccaggaaagctgatggtgcaaggtccagtccaaaggtatctgttggaggattctcttgttctgggaagaggacggtctttttttctcttcagaccttcacctgactggatcaagcccactaacatcgaggaggacagtctgcattactcagagttcactgattgatttaaatgtcaatctcatataaaacaccctcacagaaacacctagaataatgtttgaccttataattggaaaatcagagcaaaagttaaatctcaaaaaaaaaaaaaaaaaaagtatgacccagtagctaggcacctgtggccccgccaagttgacacataaaattaactgtcacagtatcatcttagaagtgaaagaagcccctttatcctgcagtgcccctctaccaccacctactgacaaagaacatggtgctatctggcatgggagaaatgttcagtttgctatggcttgtatgtgtcccctcaaattcaagtgttgccaatgtgacagcatcaagaggtggggtctttaagagatcactaggccatgagggattctcttaggactgggatgaaggcccataataaaagaggtttcagggagcatcctgctagcttgccttctgtatgtgagaacacagcaagaaagccctagtcaacaagtgccagctccttgatcttagacttcccatcctccagaactgtgagaaatacatttctgttccttacaaattacccagtctcctgtattctgttatagcagcacaaaatgaagataccatacctgaacacctgaacattcttcacaaggtagtaaatgcactgctttattctggtctcagtattgtgtgcttaataaggaaatgagaaagggtggatcagggcataggatgaacaagttactgctagacctctcacaatgccactaatggataagattgtattttcatcattcttgtctcttcggaagctaacaccatgctataataggcactaaatagatgtctaaaaacaccttaagtatttgtctagaaatctggtgcattgttcagaaagaaccaaaattcaaaataatttcaaagggcctaaagcactagttaatcaaaattcattagtttttaatggtactaccactctcaaatttaaaatgtcatcttacgttcctcttcctcgcattggatttattgctaaaacctggtaaacacttttaatccttttcaattccattaccactgctcttgtccagaattacttcgcagactaatagtcacctgacttctcccctgcatccgatttgctgtctaattctggttacaaataagtaactgccaaactaatctttctaaaaagcaagactgatctcgtcactcctttgctcaacaatgtaaaagctcccattgtctcccaaataaaaccagctttccactgtgtatacaatacatccatgatctgtatccagcatcattttgtattagctcactttatacaccaccccccatgccacatcaaattaaattatcctgataaatgcaactgcatttaccctttcccttattttgttctttatgttgtaggcctcctttgtgcccatttcttcagaagacatcccc

SEQ ID NO: 323880 - DNA, 2575 bp, Homo sapiens
gccacgaacagtgctcgttcgttcgcagggccagcaaggagagccccgcccatgtctgctcatggtgacagaatcgaatagaatataacatatggtcctcattacatgtggttttcccaataaccatcatatagtgatatcgtaacgagtctcctaattaatgacagcttgacttaacaattttccaactttaccatggtgtgaaagaggtatgattcctaagccctaaggagctcctcagcttgaaatggggctgcatccctataaacccatcataaagtcaaaaaatcctaaaacataagttggtgaccatctgtaatcatgatgtggtggtaaatcttggacgctaccttacaataactagacaaaggaaaatcatcctttgtcctgttctgtgtaaatatttaatgaatgatcaaaacttcagtttaaatattatgaaaaactttaaacataaagtagtagaaataagacagtaaatactgtatcctaatatccagtcaggatacagaaaccataccattaacttgaacagggataattttaatataaaaactgttaactgataatggtattaacttttaagagggatgaaagagagctatgatgtcctaggactgagagtaccccaggaaagaatacccttgaaagggtctccccttccccatggtgaagtcaggcctaatggagagagtggctacagcctactcagtgattgggaaattccctgtcttgccctgggccagagctggtgtaccgctggtggatcaggtcttacaagcaaagaacctcacactcccaactggtaagccagaagcctcttgctagggtgtgagcaaaacttggacaggaactctcagtagatgtttgtgtttgtcaagattctccagacaaacttccttaaaaggattggcttgtgttgttattattaagtctaacaagtccaaaagctggagtgtgaggcaggaggctggaaacccaggaaagctgatggtgcaaggtccagtccaaaggtatctgttggaggattctcttgttctgggaagaggacggtctttttttctcttcagaccttcacctgactggatcaagcccactaacatcgaggaggacagtctgcattactcagagttcactgattgatttaaatgtcaatctcatataaaacaccctcacagaaacacctagaataatgtttgaccttataattggaaaatcagagcaaaagttaaatctcaaaaaaaaaaaaaaaaaaagtatgacccagtagctaggcacctgtggccccgccaagttgacacataaaattaactgtcacagtatcatcttagaagtgaaagaagcccctttatcctgcagtgcccctctaccaccacctactgacaaagaacatggtgctatctggcatgggagaaatgttcagtttgctatggcttgtatgtgtcccctcaaattcaagtgttgccaatgtgacagcatcaagaggtggggtctttaagagatcactaggccatgagggattctcttaggactgggatgaaggcccataataaaagaggtttcagggagcatcctgctagcttgccttctgtatgtgagaacacagcaagaaagccctagtcaacaagtgccagctccttgatcttagacttcccatcctccagaactgtgagaaatacatttctgttccttacaaattacccagtctcctgtattctgttatagcagcacaaaatgaagataccatacctgaacacctgaacattcttcacaaggtagtaaatgcactgctttattctggtctcagtattgtgtgcttaataaggaaatgagaaagggtggatcagggcataggatgaacaagttactgctagacctctcacaatgccactaatggataagattgtattttcatcattcttgtctcttcggaagctaacaccatgctataataggcactaaatagatgtctaaaaacaccttaagtatttgtctagaaatctggtgcattgttcagaaagaaccaaaattcaaaataatttcaaagggcctaaagcactagttaatcaaaattcattagtttttaatggtactaccactctcaaatttaaaatgtcatcttacgttcctcttcctcgcattggatttattgctaaaacctggtaaacacttttaatccttttcaattccattaccactgctcttgtccagaattacttcgcagactaatagtcacctgacttctcccctgcatccgatttgctgtctaattctggttacaaataagtaactgccaaactaatctttctaaaaagcaagactgatctcgtcactcctttgctcaacaatgtaaaagctcccattgtctcccaaataaaaccagctttccactgtgtatacaatacatccatgatctgtatccagcatcattttgtattagctcactttatacaccaccccccatgccacatcaaattaaattatcctgataaatgcaactgcatttaccctttcccttattttgttctttatgttgtaggcctcctttgtgcccatttcttcagaagacatcccc

SEQ ID NO: 323881 - DNA, 597 bp, Homo sapiens
ataaaaataattctatttccctgtattttcaaggtggccttagacatgcatctgccagcattgggggttcagaagcctataggcacatgaaatttgaaggaggtgttcacagagtacaaagagtgccaaagacagaaaagcaaggccgcgtccatactagcaccatgactgtagcaatattaccccagcctactgaggtaaggcataagcccctctccttggaatcccgggcctagcacagtgccttgtccccagagttaacattcagagtttactgaattgagtatctatttggtcttccttgtgtattttgagttgcatattatctcagtctaaaaaatataattttataatgctaaaaaattaaggatttgtaaatgatacaatgttgcattgtctgtgtattagtattttcctaataagtagttattgtgagatcatctctgtgggtgaaataataacctatttaaatatggactggttgcctttataatgacttctgccttgtgtgactggtttgtggggtattaacagcaacaatcctatttaacaaaggtaattacttaacagaattgctgcttcataacccagttacat

SEQ ID NO: 323882 - DNA, 1828 bp, Homo sapiens
  misc_feature (3)..(4): n is a, c, g, or t
  misc_feature (6)..(6): n is a, c, g, or t
ggnncnggtcagggtccgcgatctcggactaaggatgcggtcccgggttctgtggggcgctgcccggtggctctggccccgccgggccgttggcccagcccgccggcccctgagctccggtagcccgccgctggaggagctgttcgcccggggcgggcccttgcggaccttcctcgagcgccaggcggggtctgaagcccatttgaaggtcaggaggcccgagttgctggcggtgatcaaactgctgaacgagaaggagcaggagctgcgggagactgagcacttgctgcacggtaagggtcgggcccgggggagaggcgtcagagcacattcttgactcttcgtttgacttttccactgcccacactacccgagtttgaaactctttactcacttgcagccgtttttattttggatcagaggtcaggacatcattacgtgctgtgatcccatcctctcctgtgggctctcttgtgctcctttgccacggcgctctgccgccttttacatgcttattagttgtggactcgggcaagagctcattagctcagcaaggataaataaggcactgtccctgtgatgggctccacagcggtgtttctcaaagtgtggtgtggagacccatttgcagtagtatcagggcagtgcttgttaatagcagacttaggactcagaatctcagacctatacgtgggtaaaggtactaaattgggaaattcagtatggcctaagtatagaataggtgggagatgatgtcatagaaacatgaagccagaaaaatagttaagaaccttgcaagacaaagaatttggatttattttttatagaccatggaaagttagcaaatgtttttaagcagagaattcacgtctttgtaaagaaaagttaatggtggcatgcgctgaggataaattggagtattctccagaaacgctggtggctgacaggccagggaggaggcagttgaaacaatccaaagaagaaatggtgataggcatagttctgactcacaaaacattttgagaaacaagttaggatttagtggcttatgccctgagaaggatgagggagagagttagttctaagaaaagtcttaggtttctggcttcagcacgagtggtactgttaattaagatgaaagtataaaagttggaccgaattttttaaaaagatgagttttgcattgaatgccatattaagttaaaaatacctgtgaaaaggaattccaataaagatatctgtactagtctaggagaaaaaattactgacataggagaaaaattgagcccaaataatcatatgagagctctcgagatatacagtacgtggtaaattaaaccttagaagtagatgagaacactcagggaaaatgtgttaagatagaaacaagtctaacaaggccagaaatacacagtatttgaggagcaggcagagaagaaggctataaaaggtcaagaaaaaaacagccagagctttgtgaccctgaagtagataaataaatgaagctgtagaagccaatagaaaatttcaagaagtaagagatccttggccaggcgtggtggctcacgcctctaattccagcactttgagaggctcaggtgggccgatcacttgagcccaggagttcgagaccagcctgggtaacatggcaaaaccctgtctctacaaacaatgcaaaattagctgggcatggtggtgcgtgcctgtggtcccagctacttgagaggctgaggtgggagaatcgcttgaacccgggaggtggaggttgcagtgagccaagatggtgccactgcattccagcctgggtgacagcgcaagaccctgcctc

SEQ ID NO: 323883 - DNA, 3875 bp, Homo sapiens
  misc_feature (3)..(4): n is a, c, g, or t
  misc_feature (6)..(6): n is a, c, g, or t
ggnncnggtcagggtccgcgatctcggactaaggatgcggtcccgggttctgtggggcgctgcccggtggctctggccccgccgggccgttggcccagcccgccggcccctgagctccggtagcccgccgctggaggagctgttcgcccggggcgggcccttgcggaccttcctcgagcgccaggcggggtctgaagcccatttgaaggtcaggaggcccgagttgctggcggtgatcaaactgctgaacgagaaggagcaggagctgcgggagactgagcacttgctgcacgatgagaatgaagatttaaggaaacttgcagagaatgaaatcactttgtgtcaaaaagaaataactcagctgaagcatcagattatcttacttttggttccctcagaagaaacagatgaaaatgatttgatcctggaagtaactgcaggagttggaggtcaggaggcaatgttgtttacatcagagatatttgatatgtatcagcaatatgctgcatttaaaagatggcattttgaaaccctggaatattttccaagtgaactaggtggccttagacatgcatctgccagcattgggggttcagaagcctataggcacatgaaatttgaaggaggtgttcacagagtacaaagagtgccaaagacagaaaagcaaggccgcgtccatactagcaccatgactgtagcaatattaccccagcctactgagattaatctggtgattaatccgaaagatttgagaattgacactaagcgagccagtggagctggggggcagcatgtaaataccacggacagtgctgtccggatagttcatcttccaacaggtgttgtttctgaatgtcaacaagagagatctcagctgaaaaataaagagctggctatgacaaagttacgtgcaaaactgtacagcatgcatctagaagaagaaataaataaaagacagaatgctagaaaaattcagattggaagtaaaggaagatcagagaaaataagaacatataattttccacagaaccgggtcacagatcacagaataaacaagacgctgcatgatcttgaaacttttatgcaaggagattatctactggatgaacttgtacagtcattgaaggaatacgccgattatgaatctttagtagaaattatttcccaaaaagtttaagttgatttgttatttatagactttcgtagcttagaaaaattctacagtacatccacatagggtgaaagtacccttactctcttgaaaaacgttgagttaacacagttggaggtaatatgcatattctgaagtcatagataatttacacagatctctctcaatgcattagcaaaaatcatacaatatacagatggtcctcgatttacattgtggttaattcccaataaacccatcataagttaaaaatgcatataacgttagcaacacagcagtctcctaattaatgacagcttgacttaacaattttccaactttaccatggtgtgaaagaggtatgattcctaagccctaaggagctcctcagcttgaaatggggctgcatccctataaacccatcataaagtcaaaaaatcctaaaacataagttggtgaccatctgtaatcatgatgtggtggtaaatcttggacgctaccttacaataactagacaaaggaaaatcatcctttgtcctgttctgtgtaaatatttaatgaatgatcaaaacttcagtttaaatattatgaaaaactttaaacataaagtagtagaaataagacagtaaatactgtatcctaatatccagtcaggatacagaaaccataccattaacttgaacagggataattttaatataaaaactgttaactgataatggtattaacttttaagagggatgaaagagagctatgatgtcctaggactgagagtaccccaggaaagaatacccttgaaagggtctccccttccccatggtgaagtcaggcctaatggagagagtggctacagcctactcagtgattgggaaattccctgtcttgccctgggccagagctggtgtaccgctggtggatcaggtcttacaagcaaagaacctcacactcccaactggtaagccagaagcctcttgctagggtgtgagcaaaacttggacaggaactctcagtagatgtttgtgtttgtcaagattctccagacaaacttccttaaaaggattggcttgtgttgttattattaagtctaacaagtccaaaagctggagtgtgaggcaggaggctggaaacccaggaaagctgatggtgcaaggtccagtccaaaggtatctgttggaggattctcttgttctgggaagaggacggtctttttttctcttcagaccttcacctgactggatcaagcccactaacatcgaggaggacagtctgcattactcagagttcactgattgatttaaatgtcaatctcatataaaacaccctcacagaaacacctagaataatgtttgaccttataattggaaaatcagagcaaaagttaaatctcaaaaaaaaaaaaaaaaaaagtatgacccagtagctaggcacctgtggccccgccaagttgacacataaaattaactgtcacagtatcatcttagaagtgaaagaagcccctttatcctgcagtgcccctctaccaccacctactgacaaagaacatggtgctatctggcatgggagaaatgttcagtttgctatggcttgtatgtgtcccctcaaattcaagtgttgccaatgtgacagcatcaagaggtggggtctttaagagatcactaggccatgagggattctcttaggactgggatgaaggcccataataaaagaggtttcagggagcatcctgctagcttgccttctgtatgtgagaacacagcaagaaagccctagtcaacaagtgccagctccttgatcttagacttcccatcctccagaactgtgagaaatacatttctgttccttacaaattacccagtctcctgtattctgttatagcagcacaaaatgaagataccatacctgaacacctgaacattcttcacaaggtagtaaatgcactgctttattctggtctcagtattgtgtgcttaataaggaaatgagaaagggtggatcagggcataggatgaacaagttactgctagacctctcacaatgccactaatggataagattgtattttcatcattcttgtctcttcggaagctaacaccatgctataataggcactaaatagatgtctaaaaacaccttaagtatttgtctagaaatctggtgcattgttcagaaagaaccaaaattcaaaataatttcaaagggcctaaagcactagttaatcaaaattcattagtttttaatggtactaccactctcaaatttaaaatgtcatcttacgttcctcttcctcgcattggatttattgctaaaacctggtaaacacttttaatccttttcaattccattaccactgctcttgtccagaattacttcgcagactaatagtcacctgacttctcccctgcatccgatttgctgtctaattctggttacaaataagtaactgccaaactaatctttctaaaaagcaagactgatctcgtcactcctttgctcaacaatgtaaaagctcccattgtctcccaaataaaaccagctttccactgtgtatacaatacatccatgatctgtatccagcatcattttgtattagctcactttatacaccaccccccatgccacatcaaattaaattatcctgataaatgcaactgcatttaccctttcccttattttgttctttatgttgtaggcctcctttgtgcccatttcttcagaagacatcccc

SEQ ID NO: 323884 - DNA, 3767 bp, Homo sapiens
  misc_feature (3)..(4): n is a, c, g, or t
  misc_feature (6)..(6): n is a, c, g, or t
ggnncnggtcagggtccgcgatctcggactaaggatgcggtcccgggttctgtggggcgctgcccggtggctctggccccgccgggccgttggcccagcccgccggcccctgagctccggtagcccgccgctggaggagctgttcgcccggggcgggcccttgcggaccttcctcgagcgccaggcggggtctgaagcccatttgaaggtcaggaggcccgagttgctggcggtgatcaaactgctgaacgagaaggagcaggagctgcgggagactgagcacttgctgcacgatgagaatgaagatttaaggaaacttgcagagaatgaaatcactttgtgtcaaaaagaaataactcagctgaagcatcagattatcttacttttggttccctcagaagaaacagatgaaaatgatttgatcctggaagtaactgcaggagttggaggtggccttagacatgcatctgccagcattgggggttcagaagcctataggcacatgaaatttgaaggaggtgttcacagagtacaaagagtgccaaagacagaaaagcaaggccgcgtccatactagcaccatgactgtagcaatattaccccagcctactgagattaatctggtgattaatccgaaagatttgagaattgacactaagcgagccagtggagctggggggcagcatgtaaataccacggacagtgctgtccggatagttcatcttccaacaggtgttgtttctgaatgtcaacaagagagatctcagctgaaaaataaagagctggctatgacaaagttacgtgcaaaactgtacagcatgcatctagaagaagaaataaataaaagacagaatgctagaaaaattcagattggaagtaaaggaagatcagagaaaataagaacatataattttccacagaaccgggtcacagatcacagaataaacaagacgctgcatgatcttgaaacttttatgcaaggagattatctactggatgaacttgtacagtcattgaaggaatacgccgattatgaatctttagtagaaattatttcccaaaaagtttaagttgatttgttatttatagactttcgtagcttagaaaaattctacagtacatccacatagggtgaaagtacccttactctcttgaaaaacgttgagttaacacagttggaggtaatatgcatattctgaagtcatagataatttacacagatctctctcaatgcattagcaaaaatcatacaatatacagatggtcctcgatttacattgtggttaattcccaataaacccatcataagttaaaaatgcatataacgttagcaacacagcagtctcctaattaatgacagcttgacttaacaattttccaactttaccatggtgtgaaagaggtatgattcctaagccctaaggagctcctcagcttgaaatggggctgcatccctataaacccatcataaagtcaaaaaatcctaaaacataagttggtgaccatctgtaatcatgatgtggtggtaaatcttggacgctaccttacaataactagacaaaggaaaatcatcctttgtcctgttctgtgtaaatatttaatgaatgatcaaaacttcagtttaaatattatgaaaaactttaaacataaagtagtagaaataagacagtaaatactgtatcctaatatccagtcaggatacagaaaccataccattaacttgaacagggataattttaatataaaaactgttaactgataatggtattaacttttaagagggatgaaagagagctatgatgtcctaggactgagagtaccccaggaaagaatacccttgaaagggtctccccttccccatggtgaagtcaggcctaatggagagagtggctacagcctactcagtgattgggaaattccctgtcttgccctgggccagagctggtgtaccgctggtggatcaggtcttacaagcaaagaacctcacactcccaactggtaagccagaagcctcttgctagggtgtgagcaaaacttggacaggaactctcagtagatgtttgtgtttgtcaagattctccagacaaacttccttaaaaggattggcttgtgttgttattattaagtctaacaagtccaaaagctggagtgtgaggcaggaggctggaaacccaggaaagctgatggtgcaaggtccagtccaaaggtatctgttggaggattctcttgttctgggaagaggacggtctttttttctcttcagaccttcacctgactggatcaagcccactaacatcgaggaggacagtctgcattactcagagttcactgattgatttaaatgtcaatctcatataaaacaccctcacagaaacacctagaataatgtttgaccttataattggaaaatcagagcaaaagttaaatctcaaaaaaaaaaaaaaaaaaagtatgacccagtagctaggcacctgtggccccgccaagttgacacataaaattaactgtcacagtatcatcttagaagtgaaagaagcccctttatcctgcagtgcccctctaccaccacctactgacaaagaacatggtgctatctggcatgggagaaatgttcagtttgctatggcttgtatgtgtcccctcaaattcaagtgttgccaatgtgacagcatcaagaggtggggtctttaagagatcactaggccatgagggattctcttaggactgggatgaaggcccataataaaagaggtttcagggagcatcctgctagcttgccttctgtatgtgagaacacagcaagaaagccctagtcaacaagtgccagctccttgatcttagacttcccatcctccagaactgtgagaaatacatttctgttccttacaaattacccagtctcctgtattctgttatagcagcacaaaatgaagataccatacctgaacacctgaacattcttcacaaggtagtaaatgcactgctttattctggtctcagtattgtgtgcttaataaggaaatgagaaagggtggatcagggcataggatgaacaagttactgctagacctctcacaatgccactaatggataagattgtattttcatcattcttgtctcttcggaagctaacaccatgctataataggcactaaatagatgtctaaaaacaccttaagtatttgtctagaaatctggtgcattgttcagaaagaaccaaaattcaaaataatttcaaagggcctaaagcactagttaatcaaaattcattagtttttaatggtactaccactctcaaatttaaaatgtcatcttacgttcctcttcctcgcattggatttattgctaaaacctggtaaacacttttaatccttttcaattccattaccactgctcttgtccagaattacttcgcagactaatagtcacctgacttctcccctgcatccgatttgctgtctaattctggttacaaataagtaactgccaaactaatctttctaaaaagcaagactgatctcgtcactcctttgctcaacaatgtaaaagctcccattgtctcccaaataaaaccagctttccactgtgtatacaatacatccatgatctgtatccagcatcattttgtattagctcactttatacaccaccccccatgccacatcaaattaaattatcctgataaatgcaactgcatttaccctttcccttattttgttctttatgttgtaggcctcctttgtgcccatttcttcagaagacatcccc

SEQ ID NO: 323885 - DNA, 3713 bp, Homo sapiens
  misc_feature (3)..(4): n is a, c, g, or t
  misc_feature (6)..(6): n is a, c, g, or t
ggnncnggtcagggtccgcgatctcggactaaggatgcggtcccgggttctgtggggcgctgcccggtggctctggccccgccgggccgttggcccagcccgccggcccctgagctccggtagcccgccgctggaggagctgttcgcccggggcgggcccttgcggaccttcctcgagcgccaggcggggtctgaagcccatttgaaggtcaggaggcccgagttgctggcggtgatcaaactgctgaacgagaaggagcaggagctgcgggagactgagcacttgctgcacgatgagaatgaagatttaaggaaacttgcagagaatgaaatcactttgtgtcaaaaagaaataactcagctgaagcatcagaagaaacagatgaaaatgatttgatcctggaagtaactgcaggagttggaggtcaggaggcaatgttgtttacatcagagatatttgatatgtatcagcaatatgctgcatttaaaagatggcattttgaaaccctggaatattttccaagtgaactaggtggccttagacatgcatctgccagcattgggggttcagaagcctataggcacatgaaatttgaaggaggtgttcacagagtacaaagagtgccaaagacagaaaagcaaggccgcgtccatactagcaccatgactgtagcaatattaccccagcctactgagattaatctggtgattaatccgaaagatttgagaattgacactaagcgagccagtggagctggggggcagcatgtaaataccacggacagtgctgtccggatagttcatcttccaacagattggaagtaaaggaagatcagagaaaataagaacatataattttccacagaaccgggtcacagatcacagaataaacaagacgctgcatgatcttgaaacttttatgcaaggagattatctactggatgaacttgtacagtcattgaaggaatacgccgattatgaatctttagtagaaattatttcccaaaaagtttaagttgatttgttatttatagactttcgtagcttagaaaaattctacagtacatccacatagggtgaaagtacccttactctcttgaaaaacgttgagttaacacagttggaggtaatatgcatattctgaagtcatagataatttacacagatctctctcaatgcattagcaaaaatcatacaatatacagatggtcctcgatttacattgtggttaattcccaataaacccatcataagttaaaaatgcatataacgttagcaacacagcagtctcctaattaatgacagcttgacttaacaattttccaactttaccatggtgtgaaagaggtatgattcctaagccctaaggagctcctcagcttgaaatggggctgcatccctataaacccatcataaagtcaaaaaatcctaaaacataagttggtgaccatctgtaatcatgatgtggtggtaaatcttggacgctaccttacaataactagacaaaggaaaatcatcctttgtcctgttctgtgtaaatatttaatgaatgatcaaaacttcagtttaaatattatgaaaaactttaaacataaagtagtagaaataagacagtaaatactgtatcctaatatccagtcaggatacagaaaccataccattaacttgaacagggataattttaatataaaaactgttaactgataatggtattaacttttaagagggatgaaagagagctatgatgtcctaggactgagagtaccccaggaaagaatacccttgaaagggtctccccttccccatggtgaagtcaggcctaatggagagagtggctacagcctactcagtgattgggaaattccctgtcttgccctgggccagagctggtgtaccgctggtggatcaggtcttacaagcaaagaacctcacactcccaactggtaagccagaagcctcttgctagggtgtgagcaaaacttggacaggaactctcagtagatgtttgtgtttgtcaagattctccagacaaacttccttaaaaggattggcttgtgttgttattattaagtctaacaagtccaaaagctggagtgtgaggcaggaggctggaaacccaggaaagctgatggtgcaaggtccagtccaaaggtatctgttggaggattctcttgttctgggaagaggacggtctttttttctcttcagaccttcacctgactggatcaagcccactaacatcgaggaggacagtctgcattactcagagttcactgattgatttaaatgtcaatctcatataaaacaccctcacagaaacacctagaataatgtttgaccttataattggaaaatcagagcaaaagttaaatctcaaaaaaaaaaaaaaaaaaagtatgacccagtagctaggcacctgtggccccgccaagttgacacataaaattaactgtcacagtatcatcttagaagtgaaagaagcccctttatcctgcagtgcccctctaccaccacctactgacaaagaacatggtgctatctggcatgggagaaatgttcagtttgctatggcttgtatgtgtcccctcaaattcaagtgttgccaatgtgacagcatcaagaggtggggtctttaagagatcactaggccatgagggattctcttaggactgggatgaaggcccataataaaagaggtttcagggagcatcctgctagcttgccttctgtatgtgagaacacagcaagaaagccctagtcaacaagtgccagctccttgatcttagacttcccatcctccagaactgtgagaaatacatttctgttccttacaaattacccagtctcctgtattctgttatagcagcacaaaatgaagataccatacctgaacacctgaacattcttcacaaggtagtaaatgcactgctttattctggtctcagtattgtgtgcttaataaggaaatgagaaagggtggatcagggcataggatgaacaagttactgctagacctctcacaatgccactaatggataagattgtattttcatcattcttgtctcttcggaagctaacaccatgctataataggcactaaatagatgtctaaaaacaccttaagtatttgtctagaaatctggtgcattgttcagaaagaaccaaaattcaaaataatttcaaagggcctaaagcactagttaatcaaaattcattagtttttaatggtactaccactctcaaatttaaaatgtcatcttacgttcctcttcctcgcattggatttattgctaaaacctggtaaacacttttaatccttttcaattccattaccactgctcttgtccagaattacttcgcagactaatagtcacctgacttctcccctgcatccgatttgctgtctaattctggttacaaataagtaactgccaaactaatctttctaaaaagcaagactgatctcgtcactcctttgctcaacaatgtaaaagctcccattgtctcccaaataaaaccagctttccactgtgtatacaatacatccatgatctgtatccagcatcattttgtattagctcactttatacaccaccccccatgccacatcaaattaaattatcctgataaatgcaactgcatttaccctttcccttattttgttctttatgttgtaggcctcctttgtgcccatttcttcagaagacatcccc

SEQ ID NO: 323886 - DNA, 3232 bp, Homo sapiens
cgcatataacgttagcaacacagcagtctcctaattaatgacagcttgactgtagcaatattaccccagcctactgagattaatctggtgattaatccgaaagatttgagaattgacactaagcgagccagtggagctggggggcagcatgtaaataccacggacagtgctgtccggatagttcatcttccaacaggtgttgtttctgaatgtcaacaagagagatctcagctgaaaaataaagagctggctatgacaaagttacgtgcaaaactgtacagcatgcatctagaagaagaaataaataaaagacagaatgctagaaaaattcagattggaagtaaaggaagatcagagaaaataagaacatataattttccacagaaccgggtcacagatcacagaataaacaagacgctgcatgatcttgaaacttttatgcaaggagattatctactggatgaacttgtacagtcattgaaggaatacgccgattatgaatctttagtagaaattatttcccaaaaagtttaagttgatttgttatttatagactttcgtagcttagaaaaattctacagtacatccacatagggtgaaagtacccttactctcttgaaaaacgttgagttaacacagttggaggtaatatgcatattctgaagtcatagataatttacacagatctctctcaatgcattagcaaaaatcatacaatatacagatggtcctcgatttacattgtggttaattcccaataaacccatcataagttaaaaatgcatataacgttagcaacacagcagtctcctaattaatgacagcttgacttaacaattttccaactttaccatggtgtgaaagaggtatgattcctaagccctaaggagctcctcagcttgaaatggggctgcatccctataaacccatcataaagtcaaaaaatcctaaaacataagttggtgaccatctgtaatcatgatgtggtggtaaatcttggacgctaccttacaataactagacaaaggaaaatcatcctttgtcctgttctgtgtaaatatttaatgaatgatcaaaacttcagtttaaatattatgaaaaactttaaacataaagtagtagaaataagacagtaaatactgtatcctaatatccagtcaggatacagaaaccataccattaacttgaacagggataattttaatataaaaactgttaactgataatggtattaacttttaagagggatgaaagagagctatgatgtcctaggactgagagtaccccaggaaagaatacccttgaaagggtctccccttccccatggtgaagtcaggcctaatggagagagtggctacagcctactcagtgattgggaaattccctgtcttgccctgggccagagctggtgtaccgctggtggatcaggtcttacaagcaaagaacctcacactcccaactggtaagccagaagcctcttgctagggtgtgagcaaaacttggacaggaactctcagtagatgtttgtgtttgtcaagattctccagacaaacttccttaaaaggattggcttgtgttgttattattaagtctaacaagtccaaaagctggagtgtgaggcaggaggctggaaacccaggaaagctgatggtgcaaggtccagtccaaaggtatctgttggaggattctcttgttctgggaagaggacggtctttttttctcttcagaccttcacctgactggatcaagcccactaacatcgaggaggacagtctgcattactcagagttcactgattgatttaaatgtcaatctcatataaaacaccctcacagaaacacctagaataatgtttgaccttataattggaaaatcagagcaaaagttaaatctcaaaaaaaaaaaaaaaaaaagtatgacccagtagctaggcacctgtggccccgccaagttgacacataaaattaactgtcacagtatcatcttagaagtgaaagaagcccctttatcctgcagtgcccctctaccaccacctactgacaaagaacatggtgctatctggcatgggagaaatgttcagtttgctatggcttgtatgtgtcccctcaaattcaagtgttgccaatgtgacagcatcaagaggtggggtctttaagagatcactaggccatgagggattctcttaggactgggatgaaggcccataataaaagaggtttcagggagcatcctgctagcttgccttctgtatgtgagaacacagcaagaaagccctagtcaacaagtgccagctccttgatcttagacttcccatcctccagaactgtgagaaatacatttctgttccttacaaattacccagtctcctgtattctgttatagcagcacaaaatgaagataccatacctgaacacctgaacattcttcacaaggtagtaaatgcactgctttattctggtctcagtattgtgtgcttaataaggaaatgagaaagggtggatcagggcataggatgaacaagttactgctagacctctcacaatgccactaatggataagattgtattttcatcattcttgtctcttcggaagctaacaccatgctataataggcactaaatagatgtctaaaaacaccttaagtatttgtctagaaatctggtgcattgttcagaaagaaccaaaattcaaaataatttcaaagggcctaaagcactagttaatcaaaattcattagtttttaatggtactaccactctcaaatttaaaatgtcatcttacgttcctcttcctcgcattggatttattgctaaaacctggtaaacacttttaatccttttcaattccattaccactgctcttgtccagaattacttcgcagactaatagtcacctgacttctcccctgcatccgatttgctgtctaattctggttacaaataagtaactgccaaactaatctttctaaaaagcaagactgatctcgtcactcctttgctcaacaatgtaaaagctcccattgtctcccaaataaaaccagctttccactgtgtatacaatacatccatgatctgtatccagcatcattttgtattagctcactttatacaccaccccccatgccacatcaaattaaattatcctgataaatgcaactgcatttaccctttcccttattttgttctttatgttgtaggcctcctttgtgcccatttcttcagaagacatcccc

SEQ ID NO: 323887 - DNA, 2917 bp, Homo sapiens
  misc_feature (3)..(4): n is a, c, g, or t
  misc_feature (6)..(6): n is a, c, g, or t
ggnncnggtcagggtccgcgatctcggactaaggatgcggtcccgggttctgtggggcgctgcccggtggctctggccccgccgggccgttggcccagcccgccggcccctgagctccggtagcccgccgctggaggagctgttcgcccggggcgggcccttgcggaccttcctcgagcgccaggcggggtctgaagcccatttgaaggtcaggaggcccgagttgctggcggtgatcaaactgctgaacgagaaggagcaggagctgcgggagactgagcacttgctgcacgatgagaatgaagatttaaggaaacttgcagagaatgaaatcactttgtgtcaaaaagaaataactcagctgaagcatcagattatcttacttttggttccctcagaagaaacagatgaaaatgatttgatcctggaagtaactgcaggagttggaggtcaggaggcaatgttgtttacatcagagatatttgatatgtatcagcaatatgctgcatttaaaagatggcattttgaaaccctggaatattttccaagtgaactaggtggccttagacatgcatctgccagcattgggggttcagaagcctataggcacatgaaatttgaaggaggtgttcacagagtacaaagagtgccaaagacagaaaagcaaggccgcgtccatactagcaccatgactgtagcaatattaccccagcctactgagattaatctggtgattaatccgaaagatttgagaattgacactaagcgagccagtggagctggggggcagcatgtaaataccacggacagtgctgtccggatagttcatcttccaacaggtgttgtttctgaatgtcaacaagagagatctcagctgaaaaataaagagctggctatgacaaagttacgtgcaaaactgtacagcatgcatctagaagaagaaataaataaaagacagaatgctagaaaaattcagattggaagtaaaggaagatcagagaaaataagaacatataattttccacagaaccgggtcacagatcacagaataaacaagacgctgcatgatcttgaaacttttatgcaaggagattatctactggatgaacttgtacagtcattgaaggaatacgccgattatgaatctttagtagaaattatttcccaaaaagtttaagttgatttgttatttatagactttcgtagcttagaaaaattctacagtacatccacatagggtgaaagtacccttactctcttgaaaaacgttgagttaacacagttggaggtaatatgcatattctgaagtcatagataatttacacagatctctctcaatgcattagcaaaaatcatacaatatacagatggtcctcgatttacattgtggttaattcccaataaacccatcataagttaaaaatgcatataacgttagcaacacagcagtctcctaattaatgacagcttgacttaacaattttccaactttaccatggtgtgaaagaggtatgattcctaagccctaaggagctcctcagcttgaaatggggctgcatccctataaacccatcataaagtcaaaaaatcctaaaacataagttggtgaccatctgtaatcatgatgtggtggtaaatcttggacgctaccttacaataactagacaaaggaaaatcatcctttgtcctgttctgtgtaaatatttaatgaatgatcaaaacttcagtttaaatattatgaaaaactttaaacataaagtagtagaaataagacagtaaatactgtatcctaatatccagtcaggatacagaaaccataccattaacttgaacagggataattttaatataaaaactgttaactgataatggtattaacttttaagagggatgaaagagagtttcagggagcatcctgctagcttgccttctgtatgtgagaacacagcaagaaagccctagtcaacaagtgccagctccttgatcttagacttcccatcctccagaactgtgagaaatacatttctgttccttacaaattacccagtctcctgtattctgttatagcagcacaaaatgaagataccatacctgaacacctgaacattcttcacaaggtagtaaatgcactgctttattctggtctcagtattgtgtgcttaataaggaaatgagaaagggtggatcagggcataggatgaacaagttactgctagacctctcacaatgccactaatggataagattgtattttcatcattcttgtctcttcggaagctaacaccatgctataataggcactaaatagatgtctaaaaacaccttaagtatttgtctagaaatctggtgcattgttcagaaagaaccaaaattcaaaataatttcaaagggcctaaagcactagttaatcaaaattcattagtttttaatggtactaccactctcaaatttaaaatgtcatcttacgttcctcttcctcgcattggatttattgctaaaacctggtaaacacttttaatccttttcaattccattaccactgctcttgtccagaattacttcgcagactaatagtcacctgacttctcccctgcatccgatttgctgtctaattctggttacaaataagtaactgccaaactaatctttctaaaaagcaagactgatctcgtcactcctttgctcaacaatgtaaaagctcccattgtctcccaaataaaaccagctttccactgtgtatacaatacatccatgatctgtatccagcatcattttgtattagctcactttatacaccaccccccatgccacatcaaattaaattatcctgataaatgcaactgcatttaccctttcccttattttgttctttatgttgtaggcctcctttgtgcccatttcttcagaagacatcccc

SEQ ID NO: 323888 - DNA, 376 bp, Homo sapiens
ggttgtggggggtgggtgcatagatgaaacaaggccggctttaagttggcaactgttgaagctggatgatgggtgcataggggtttactgacaactgtctccagattagtatgtttgtaaacttccataataaaaagttgacaacaaaccaacaaacaaacatgaactctggagacagactgcctgggaatttacttaatctgtttgtgtgctgtagttttcttacccataaattggagatcattgcacctgcttcacagggttgttgtgaaaattcagtaagtcaatacacaaaaaggctggaatgatgcttggctatcgtcaccatcttatggggagaaagatggtcacagaccaccaacactcatcacccttt

SEQ ID NO: 323889 - DNA, 231 bp, Homo sapiens
atgaaatgttccaaatagataaatccacagagatagaaagtaaattagtggttgtgatgggctggggggagaggaggatggagaagcactgctagtgggtatgggttctccttttgggatgatgagaatgtttgttttctctttatttctttttcttttcttttgtagagatgggttttcgccatgttgtccaggctggtcttgaactcctgacttcaagcaattctcctg

SEQ ID NO: 323890 - DNA, 981 bp, Homo sapiens
gcagtgctatccctgtatggatggccacgtacatggcagggacattgaaggtctcaaacatgtacgtggccatccaggcagtgctatccctgtatgcttctggccgtaccacaggcattgttctggactctggggatggtgtaactcacaatgtccccatctatgagggctacgctttgccccatgccatcatgcgtctggatctggctggtcgggacctcactgactacctcatgaagatcctcactgagcgtggctactcctttgtcaccactgctgaacgtgaaattgtccgtgacattaaagagaagctgtgctatgtcgccctggattttgagaatgagatggccacagctgcctcttcctcctccctggagaagagctatgaactgcctgatggccaagtcatcactattggcaatgagcgcttccgctgtcctgagacactcttccagccctccttcattggtatggaatctgctggcatccatgaaacaacttacaatagcatcatgaagtgtgacattgatatccgcaaggacctgtatgccaacaatgtcttatctggaggcaccactatgtaccctggtattgctgatcgtatgcagaaggaaatcactgctctggctcctagcaccatgaagattaagattattgctccccctgagcgtaaatactctgtctggattgggggctccatcctggcctctctgtccaccttccagcaaatgtggattagcaagcaagagtacgatgaggcaggcccatccattgtccaccgcaaatgcttctaagatgccttctctctccatctaccttccagtcaggatgacggtattatgcttcttggagtcttccaaaccaccttccctcatctttcatcaatcattgtacagtttgtttacacacgtgcaatttgtttgtgcttctaatatttattgctttataaataaaccagaccaggacttgcaacctaaaaaa

SEQ ID NO: 323891 - DNA, 1415 bp, Homo sapiens
  misc_feature (1)..(2): n is a, c, g, or t
  misc_feature (5)..(5): n is a, c, g, or t
nncangaggcctcggcagtcctagcgggtgcgaaggggaccaaataaggcaaggtggcagaccgggccccccacccctgcccccggctgctccaactgaccctgtccatcagcgttctataaagcggccctcctggagccagccacccagagcccgctgccgccggagccgagccgacccgccccgccgacgaaccccctgaagctgtgccaagatgtgtgacgacgaggagaccaccgccctggtgtgcgacaacggctctgggctggtgaaggccggctttgcgggcgatgacgcgccccgcgctgtcttcccgtccatcgtgggccgcccgcggcaccagggagttatggtgggtatgggtcagaaggactcctacgtaggtgatgaagcccagagcaagagaggcatcctgaccctgaagtatcccatcgagcatggtatcatcaccaactgggacgacatggagaagatctggcaccacaccttctacaatgagctccgtgtggctcccgaggagcaccccaccctgctcacagaggccccgctgaaccccaaggccaaccgggatggtgtaactcacaatgtccccatctatgagggctacgctttgccccatgccatcatgcgtctggatctggctggtcgggacctcactgactacctcatgaagatcctcactgagcgtggctactcctttgtcaccactgctgaacgtgaaattgtccgtgacattaaagagaagctgtgctatgtcgccctggattttgagaatgagatggccacagctgcctcttcctcctccctggagaagagctatgaactgcctgatggccaagtcatcactattggcaatgagcgcttccgctgtcctgagacactcttccagccctccttcattggtatggaatctgctggcatccatgaaacaacttacaatagcatcatgaagtgtgacattgatatccgcaaggacctgtatgccaacaatgtcttatctggaggcaccactatgtaccctggtattgctgatcgtatgcagaaggaaatcactgctctggctcctagcaccatgaagattaagattattgctccccctgagcgtaaatactctgtctggattgggggctccatcctggcctctctgtccaccttccagcaaatgtggattagcaagcaagagtacgatgaggcaggcccatccattgtccaccgcaaatgcttctaagatgccttctctctccatctaccttccagtcaggatgacggtattatgcttcttggagtcttccaaaccaccttccctcatctttcatcaatcattgtacagtttgtttacacacgtgcaatttgtttgtgcttctaatatttattgctttataaataaaccagaccaggacttgcaacctaaaaaa

SEQ ID NO: 323892 - DNA, 1911 bp, Homo sapiens
  misc_feature (1)..(2): n is a, c, g, or t
  misc_feature (5)..(5): n is a, c, g, or t
  misc_feature (1538)..(1538): n is a, c, g, or t
nncangaggcctcggcagtcctagcgggtgcgaaggggaccaaataaggcaaggtggcagaccgggccccccacccctgcccccggctgctccaactgaccctgtccatcagcgttctataaagcggccctcctggagccagccacccagagcccgctgccgccggagccgagccgacccgccccgccgacgaaccccctgaagctgtgccaagatgtgtgacgacgaggagaccaccgccctggtgtgcgacaacggctctgggctggtgaaggccggctttgcgggcgatgacgcgccccgcgctgtcttcccgtccatcgtgggccgcccgcggcaccagggagttatggtgggtatgggtcagaaggactcctacgtaggtgatgaagcccagagcaagagaggcatcctgaccctgaagtatcccatcgagcatggtatcatcaccaactgggacgacatggagaagatctggcaccacaccttctacaatgagctccgtgtggctcccgaggagcaccccaccctgctcacagaggccccgctgaaccccaaggccaaccgggagaagatgactcagatcatgtttgagaccttcaatgtccctgccatgtacgtggccatccaggcagtgctatccctgtatgcttctggccgtaccacaggcattgttctggactctggggatggtgtaactcacaatgtccccatctatgagggctacgctttgccccatgccatcatgcgtctggatctggctggtcgggacctcactgactacctcatgaagatcctcactgagcgtggctactcctttgtcaccactgctgaacgtgaaattgtccgtgacattaaagagaagctgtgctatgtcgccctggattttgagaatgagatggccacagctgcctcttcctcctccctggagaagagctatgaactgcctgatggccaagtcatcactattggcaatgagcgcttccgctgtcctgagacactcttccagccctccttcattggtatggaatctgctggcatccatgaaacaacttacaatagcatcatgaagtgtgacattgatatccgcaaggacctgtatgccaacaatgtcttatctggaggcaccactatgtaccctggtattgctgatcgtatgcagaaggaaatcactgctctggctcctagcaccatgaagattaagattattgctccccctgagcgtaaatactctgtctggattgggggctccatcctggcctctctgtccaccttccagcaaatgtggattagcaagcaagagtacgatgaggcaggcccatccattgtccaccgcaaatgcttctaagatgccttctctctccatctaccttccagtcaggatgacggtattatgcttcttggagtcttccaaaccaccttccctcatctttcatcaatcattgtacagtttgtttacacacgtgcaatttgtttgtgcttctaatatttattgctttataaataaaccagaccaggacttgcaacctaaaaaaaanaaaaaaaaaaaaaaaaaaaaacaaaaaaaagaacaaaaaaaaacaaagacgaaaagcaaagacaaaagaggagggcgggccgccgcgcggcccacagaacgggggacgaacgacacaacctcgggggggggggcgcgccgcgcgcgagcgtcacgacgcgtgagatgcccgtctctcacaccgcgccgcgggccgccccaccacccccagtgcgggatgcgctgtcacacggcagcacaaacacgctccgggcggccagcacacgcttgggtggtcgtagcacaccaaccaaactcgaggtgctcagcgaacctgacggacgccctaatcgcagcaggggggaccctccaaggtcgcgcccgactgatcccgc

SEQ ID NO: 323893 - DNA, 1278 bp, Homo sapiens
  misc_feature (1)..(2): n is a, c, g, or t
  misc_feature (5)..(5): n is a, c, g, or t
nncangaggcctcggcagtcctagcgggtgcgaaggggaccaaataaggcaaggtggcagaccgggccccccacccctgcccccggctgctccaactgaccctgtccatcagcgttctataaagcggccctcctggagccagccacccagagcccgctgccgccggagccgagccgacccgccccgccgacgaaccccctgaagctgtgccaagatgtgtgacgacgaggagaccaccgccctggtgtgcgacaacggctctgggctggtgaaggccggctttgcgggcgatgacgcgccccgcgctgtcttcccgtccatcgtgggccgcccgcggcaccagggagttatggtgggtatgggtcagaaggactcctacgtaggtgatgaagcccagagcaagagaggcatcctgaccctgaagtatcccatcgagcatggtatcatcaccaactgggacgacatggagaagatctggcaccacaccttctacaatgagctccgtgtggctcccgaggagcaccccaccctgctcacagaggccccgctgaaccccaaggccaaccgggagaagatgactcagatcatgtttgagaccttcaatgtccctgccatgtacgtggccatccaggcagtgctatccctgtatgcttctggccgtaccacaggcattgttctggactctggggatggtgtaactcacaatgtccccatctatgagggctacgctttgccccatgccatcatgcgtctggatctggctggtcgggacctcactgactacctcatgaagatcctcactgagcgtggctactcctttgtcaccactgctgaacgtgaaattgtccgtgacattaaagagaagctgtgctatgtcgccctggattttgagaatgagatggccacagctgcctcttcctcctccctggagaagagctatgaactgcctgatggccaagtcatcactattggcaatgagcgcttccgaagtccatctgacccatcttaagatgggtcagatggacatgggggtggggtggtctccccacctcctcacattatgcctacaagaacacagacacatgcaggtgcctttgcagaaacaaagtcagggttcttcaagtcacaaagggaagggcaggaacaaatcttgcctctcagtcccacacaaggcagctgtctcacactatagaaaaaaatattcatgaacaaattcgtatctgtcacagtgaggagtcactttaaatcagcccatcgcatgctcaataattacgcccg

SEQ ID NO: 323894 - DNA, 786 bp, Homo sapiens
  misc_feature (1)..(2): n is a, c, g, or t
  misc_feature (5)..(5): n is a, c, g, or t
nncangaggcctcggcagtcctagcgggtgcgaaggggaccaaataaggcaaggtggcagaccgggccccccacccctgcccccggctgctccaactgaccctgtccatcagcgttctataaagcggccctcctggagccagccacccagagcccgctgccgccggagccgagccgacccgccccgccgacgaaccccctgaagctgtgccaagatgtgtgacgacgaggagaccaccgccctggtgtgcgacaacggctctgggctggtgaaggccggctttgcgggcgatgacgcgccccgcgctgtcttcccgtccatcgtgggccgcccgcggcaccagggagttatggtgggtatgggtcagaaggactcctacgtaggtgatgaagcccagagcaagagaggcatcctgaccctgaagtatcccatcgagcatggtatcatcaccaactgggacgacatggagaagatctggcaccacaccttctacaatgagctccgtgtggctcccgaggagcaccccaccctgctcacagaggccccgctgaaccccaaggccaaccgggagaagatgactcagatcatgtttgagaccttcaatgtccctgccatgtacgtggccatccaggcagtgctatccctgtatgcttctggccgtaccacaggcattgttctggactctggggatggtgtaactcacaatgtccccatctatgagcgttccctgtcctgagaaatcttccagccctccttaatgggatggaatctgctggaatcataaaa

SEQ ID NO: 323895 - DNA, 741 bp, Homo sapiens
agcacttttcccaagataggtaacttccaaaatgcttttaagcagtgaataaaaataaatctttgacaaaaaaaagacacacacacacgcaacaaaatctttgaatacatttttaaagctcccaacttttgggctaggctccactacacatttagcttgttgccaaattacactctaggtaagtggagaaattccattttaataatagaatatatctttaataatataaatgatgaaatagaggtgagttcatataacttgattggccacattatttcgtggtatgacatatcccacattatagcgaattaatatctaatggtttttttctgtgaatcctcccaatgtgttatttgctcccttgcttggaacttcagagttcactggaagtttttgttttctttctgcagattattgctccccctgagcgtaaatactctgtctggattgggggctccatcctggcctctctgtccaccttccagcaaatgtggattagcaagcaagagtacgatgaggcaggcccatccattgtccaccgcaaatgcttctaagatgccttctctctccatctaccttccagtcaggatgacggtattatgcttcttggagtcttccaaaccaccttccctcatctttcatcaatcattgtacagtttgtttacacacgtgcaatttgtttgtgcttctaatatttattgctttataaataaaccagaccaggacttgcaacctaaaaaa

SEQ ID NO: 323896 - DNA, 867 bp, Homo sapiens
  misc_feature (2)..(2): n is a, c, g, or t
  misc_feature (43)..(43): n is a, c, g, or t
  misc_feature (92)..(92): n is a, c, g, or t
  misc_feature (98)..(98): n is a, c, g, or t
  misc_feature (125)..(125): n is a, c, g, or t
  misc_feature (494)..(494): n is a, c, g, or t
cnatgaagagagatcttataagagaagtgtgagactggatgangaactgagggaagcatcaaaggcagctaaaactagctgcctttacaatnatccanaaatgtcttctatggagaaggatattnacttgaagctgaaagaaaagccttagttggcctctctgtccaccttccagcaaatgtggattagcaagcaagagtacgatgaggcaggcccatccattgtccaccgcaaatgcttctaagatgccttctctctccatctaccttccagtcaggatgacggtattatgcttcttggagtcttccaaaccaccttccctcatctttcatcaatcattgtacagtttgtttacacacgtgcaatttgtttgtgcttctaatatttattgctttataaataaaccagaccaggacttgcaacctaaaaaaaaaaaaaaaaaaaaaaaaaaaaaaaaaaaaaaaaaaaaaaaaaaaaaaaaaaaaaaaaaaaanaaaaaaaaaaaaaaaaaaaaacaaaaaaaagaacaaaaaaaaacaaagacgaaaagcaaagacaaaagaggagggcgggccgccgcgcggcccacagaacgggggacgaacgacacaacctcgggggggggggcgcgccgcgcgcgagcgtcacgacgcgtgagatgcccgtctctcacaccgcgccgcgggccgccccaccacccccagtgcgggatgcgctgtcacacggcagcacaaacacgctccgggcggccagcacacgcttgggtggtcgtagcacaccaaccaaactcgaggtgctcagcgaacctgacggacgccctaatcgcagcaggggggaccctccaaggtcgcgcccgactgatcccgc

SEQ ID NO: 323897 - DNA, 409 bp, Homo sapiens
attgctttataaataaaccagaccaggacttgcaacctaaaaaaaagcctctcgtttgtttttggggtaggcgtggggtggggcaggtgtttgctttgacaccctgagcattgtcaaagttcagtaccacaaggttcatccagatgaattaatatgacagttagctgggagttataatgctaacttttgatttcatattttgagacagaatcatgaatatatttcatacctgaaaagcagattaaggtttagttccatataagtaagaaatgaaattgaataagatagttctctagaattagttgctgcagatgacactgaagattattttaacatatgttccagttgtttttgtaaccttgcagaaaatacacatatattgataatgagaaagtcaaagattatttta

SEQ ID NO: 323898 - DNA, 1535 bp, Homo sapiens
  misc_feature (1)..(2): n is a, c, g, or t
  misc_feature (5)..(5): n is a, c, g, or t
nncangaggcctcggcagtcctagcgggtgcgaaggggaccaaataaggcaaggtggcagaccgggccccccacccctgcccccggctgctccaactgaccctgtccatcagcgttctataaagcggccctcctggagccagccacccagagcccgctgccgccggagccgagccgacccgccccgccgacgaaccccctgaagctgtgccaagatgtgtgacgacgaggagaccaccgccctggtgtgcgacaacggctctgggctggtgaaggccggctttgcgggcgatgacgcgccccgcgctgtcttcccgtccatcgtgggccgcccgcggcaccagggagttatggtgggtatgggtcagaaggactcctacgtaggtgatgaagcccagagcaagagaggcatcctgaccctgaagtatcccatcgagcatggtatcatcaccaactgggacgacatggagaagatctggcaccacaccttctacaatgagctccgtgtggctcccgaggagcaccccaccctgctcacagaggccccgctgaaccccaaggccaaccgggagaagatgactcagatcatgtttgagaccttcaatgtccctgccatgtacgtggccatccaggcagtgctatccctgtatgcttctggccgtaccacaggcattgttctggactctggggatggtgtaactcacaatgtccccatctatgagggctacgctttgccccatgccatcatgcgtctggatctggctggtcgggacctcactgactacctcatgaagatcctcactgagcgtggctactcctttgtcaccactgctgaacgtgaaattgtccgtgacattaaagagaagctgtgctatgtcgccctggattttgagaatgagatggccacagctgcctcttcctcctccctggagaagagctatgaactgcctgatggccaagtcatcactattggcaatgagcgcttccgctgtcctgagacactcttccagccctccttcattggtatggaatctgctggcatccatgaaacaacttacaatagcatcatgaagtgtgacattgatatccgcaaggacctgtatgccaacaatgtcttatctggaggcaccactatgtaccctggtattgctgatcgtatgcagaaggaaatcactgctctggctcctagcaccatgaagattaagattattgctccccctgagcgtaaatactctgtctggattgggggctccatcctggcctctctgtccaccttccagcaaatgtggattagcaagcaagagtacgatgaggcaggcccatccattgtccaccgcaaatgcttctaagatgccttctctctccatctaccttccagtcaggatgacggtattatgcttcttggagtcttccaaaccaccttccctcatctttcatcaatcattgtacagtttgtttacacacgtgcaatttgtttgtgcttctaatatttattgctttataaataaaccagaccaggacttgcaacctaaaaaa

SEQ ID NO: 323899 - DNA, 1971 bp, Homo sapiens
  misc_feature (1)..(2): n is a, c, g, or t
  misc_feature (5)..(5): n is a, c, g, or t
  misc_feature (1598)..(1598): n is a, c, g, or t
nncangaggcctcggcagtcctagcgggtgcgaaggggaccaaataaggcaaggtggcagaccgggccccccacccctgcccccggctgctccaactgaccctgtccatcagcgttctataaagcggccctcctggagccagccacccagagcccgctgccgccggagccgagccgacccgccccgccgacgaaccccctgaagctgtgccaagatgtgtgacgacgaggagaccaccgccctggtgtgcgacaacggctctgggctggtgaaggccggctttgcgggcgatgacgcgccccgcgctgtcttcccgtccatcgtgggccgcccgcggcaccagggagttatggtgggtatgggtcagaaggactcctacgtaggtgatgaagcccagagcaagagaggcatcctgaccctgaagtatcccatcgagcatggtatcatcaccaactgggacgacatggagaagatctggcaccacaccttctacaatgagctccgtgtggctcccgaggagcaccccaccctgctcacagaggccccgctgaaccccaaggccaaccgggagaagatgactcagatcatgtttgagaccttcaatgtccctgccatgtacgtggccatccaggcagtgctatccctgtatgcttctggccgtaccacaggcattgttctggactctggggatggtgtaactcacaatgtccccatctatgagggctacgctttgccccatgccatcatgcgtctggatctggctggtcgggacctcactgactacctcatgaagatcctcactgagcgtggctactcctttgtcaccactgctgaacgtgaaattgtccgtgacattaaagagaagctgtgctatgtcgccctggattttgagaatgagatggccacagctgcctcttcctcctccctggagaagagctatgaactgcctgatggccaagtcatcactattggcaatgagcgcttccgctgtcctgagacactcttccagccctccttcattggtatggaatctgctggcatccatgaaacaacttacaatagcatcatgaagtgtgacattgatatccgcaaggacctgtatgccaacaatgtcttatctggaggcaccactatgtaccctggtattgctgatcgtatgcagaaggaaatcactgctctggctcctagcaccatgaagattaagattattgctccccctgagcgtaaatactctgtctggattgggggctccatcctggcctctctgtccaccttccagcaaatgtggattagcaagcaagagtacgatgaggcaggcccatccattgtccaccgcaaatgcttctaagatgccttctctctccatctaccttccagtcaggatgacggtattatgcttcttggagtcttccaaaccaccttccctcatctttcatcaatcattgtacagtttgtttacacacgtgcaatttgtttgtgcttctaatatttattgctttataaataaaccagaccaggacttgcaacctaaaaaaaaaaaaaaaaaaaaaaaaaaaaaaaaaaaaaaaaaaaaaaaaaaaaaaaaaaaaaaaaaaaanaaaaaaaaaaaaaaaaaaaaacaaaaaaaagaacaaaaaaaaacaaagacgaaaagcaaagacaaaagaggagggcgggccgccgcgcggcccacagaacgggggacgaacgacacaacctcgggggggggggcgcgccgcgcgcgagcgtcacgacgcgtgagatgcccgtctctcacaccgcgccgcgggccgccccaccacccccagtgcgggatgcgctgtcacacggcagcacaaacacgctccgggcggccagcacacgcttgggtggtcgtagcacaccaaccaaactcgaggtgctcagcgaacctgacggacgccctaatcgcagcaggggggaccctccaaggtcgcgcccgactgatcccgc

SEQ ID NO: 323900 - DNA, 1326 bp, Homo sapiens
  misc_feature (1)..(2): n is a, c, g, or t
  misc_feature (5)..(5): n is a, c, g, or t
nncangaggcctcggcagtcctagcgggtgcgaaggggaccaaataaggcaaggtggcagaccgggccccccacccctgcccccggctgctccaactgaccctgtccatcagcgttctataaagcggccctcctggagccagccacccagagcccgctgccgccggagccgagccgacccgccccgccgacgaaccccctgaagctgtgccaagatgtgtgacgacgaggagaccaccgccctggtgtgcgacaacggctctgggctggtgaaggccggctttgcgggcgatgacgcgccccgcgctgtcttcccgtccatcgtgggccgcccgcggcaccagggagttatggtgggtatgggtcagaaggactcctacgtaggtgatgaagcccagagcaagagaggcatcctgaccctgaagtatcccatcgagcatggtatcatcaccaactgggacgacatggagaagatctggcaccacaccttctacaatgagctccgtgtggctcccgaggagcaccccaccctgctcacagaggccccgctgaaccccaaggccaaccgggagaagatgactcagatcatgtttgagaccttcaatgtccctgccatgtacgtggccatccaggcagtgctatccctgtatgcttctggccgtaccacaggcattgttctggactctggggatggtgtaactcacaatgtccccatctatgagggctacgctttgccccatgccatcatgcgtctggatctggctggtcgggacctcactgactacctcatgaagatcctcactgagcgtggctactcctttgtcaccactgctgaacgtgaaattgtccgtgacattaaagagaagctgtgctatgtcgccctggattttgagaatgagatggccacagctgcctcttcctcctccctggagaagagctatgaactgcctgatggccaagtcatcactattggcaatgagcgcttccgctgtcctgagacactcttccagccctccttcattggtatggaatctgctggcatccatgaaacaacttacaatagcatcatgaagtgtgacattgatatcccaagagtacgatgaggcaggcccatccattgtccaccgcaaatgcttctaagatgccttctctctccatctaccttccagtcaggatgacggtattatgcttcttggagtcttccaaaccaccttccctcatctttcatcaatcattgtacagtttgtttacacacgtgcaatttgtttgtgcttctaatatttattgctttataaataaaccagaccaggacttgcaacctaaaaaa

SEQ ID NO: 323901 - DNA, 1014 bp, Homo sapiens
  misc_feature (1)..(2): n is a, c, g, or t
  misc_feature (5)..(5): n is a, c, g, or t
nncangaggcctcggcagtcctagcgggtgcgaaggggaccaaataaggcaaggtggcagaccgggccccccacccctgcccccggctgctccaactgaccctgtccatcagcgttctataaagcggccctcctggagccagccacccagagcccgctgccgccggagccgagccgacccgccccgccgacgaaccccctgaagctgtgccaagatgtgtgacgacgaggagaccaccgccctggtgtgcgacaacggctctgggctggtgaaggccggctttgcgggcgatgacgcgccccgcgctgtcttcccgtccatcgtgggccgcccgcggcaccagggagttatggtgggtatgggtcagaaggactcctacgtaggtgatgaagcccagagcaagagaggcatcctgaccctgaagtatcccatcgagcatggtatcatcaccaactgggacgacatggagaagatctggcaccacaccttctacaatgagctccgtgtggctcccgaggagcaccccaccctgctcacagaggccccgctgaaccccaaggccaaccgggagaagatgactcagatcatgtttgagaccttcaatgtccctgccatgtacgtggccatccaggcagtgctatccctgtatgcttctggccgtaccacaggcattgttctggactctggggatggtgtaactcacaatgtccccatctatgagggctacgctttgccccatgccatcatgcgtctggatctggctggtcgggacctcactgactacctcatgaagatcctcactgagcgtggctactcctttgtcaccactgctgaacgtgaaattgtccgtgacattaaagagaagctgtgctatgtcgccctggattttgagaatgagatggccacagctgcctcttcctcctccctggagaagagctatgaactgcctgatggccacgtacatggcagggacatccttggggttcagcggggcctctgtgagcagggtggggt

SEQ ID NO: 323902 - DNA, 327 bp, Homo sapiens
gcagacacagacgtgtgtgtgtataaaattataatcacctacttgctattaaaggaagagaaccaggtgctatgagaaaatgaaatatgggcctaatttagaaggagggtggtgaaaatgtagtcaatgaaggcttctaaacttgagtgagttttactagatttggggaagggattgatgagtgttccaagtggaaggaatcgcatgtatttgaaattatcaaggtgggaaatattcaacttgtcatggaatggaaggaatggcagttcacatggagggtgactgaatgagaaaggaaaaacaaacaaatttagattaagggtgtag

SEQ ID NO: 323903 - DNA, 514 bp, Homo sapiens
  misc_feature (3)..(3): n is a, c, g, or t
  misc_feature (7)..(8): n is a, c, g, or t
gcngccnnctactactactaaattcgcggccgcgtcgacaaggagtcctgcttatcacaatgaatgttctcctgggcagcgttgtgatctttgccaccttcgtgactttatgcaatgcatcatgctatttcatacctaatgagggagttccaggagattcaaccaggaaatgcatggatctcaaaggaaacaaacacccaataaactcggagtggcagactgacaactgtgagacatgcacttgctacgaaacagaaatttcatgttgcacccttgtttctacacctgtgggttatgacaaagacaactgccaaagaatcttcaagaaggaggactgcaagtatatcgtggtggagaagaaggacccaaaaaagacctgttctgtcagtgaatggataatctaatgtgcttctagtaggcacagggctcccaggccaggcctcattctcctctggcctctaatagtcaatgattgtgtagccatgcctatcagtaaaaaagatttttgagcaaa

SEQ ID NO: 323904 - DNA, 503 bp, Homo sapiens
gctgccgcctactactactaaattcgcggcgctcgactgcttatcacaatgaatgttctcctgggcagcgttgtgatctttgccaccttcgtgactttatgcaatgcatcatgctatttcatacctaatgagggagttccaggagattcaaccaggaaatgcatggatctcaaaggaaacaaacacccaataaactcggagtggcagactgacaactgtgagacatgcacttgctacgaaacagaaatttcatgttgcacccttgtttctacacctgtgggttatgacaaagacaactgccaaagaatcttcaagaaggaggactgcaagtatatcgtggtggagaagaaggacccaaaaaagacctgttctgtcagtgaatggataatctaatgtgcttctagtaggcacagggctcccaggccaggcctcattctcctctggcctctaatagtcaatgattgtgtagccatgcctatcagtaaaaaagatttttgagcaaa

SEQ ID NO: 323905 - DNA, 739 bp, Homo sapiens
  misc_feature (675)..(675): n is a, c, g, or t
ggaggtacctgtctataaggagtcctgcttatcacaatgaatgttctcctgggcagcgttgtgatctttgccaccttcgtgactttatgcaatgcatcatgctatttcatacctaatgagggagttccaggagattcaaccaggaaatgcatggatctcaaaggaaacaaacacccaataaactcggagtggcagactgacaactgtgagacatgcacttgctacgaaacagaaatttcatgttgcacccttgtttctacacctgtgggttatgacaaagacaactgccaaagaatcttcaagaaggaggactgcaagtatatcgtggtggagaagaaggacccaaaaaagacctgttctgtcagtgaatggataatctaatgtgcttctagtaggcacagggctcccaggccaggcctcattctcctctggcctctaatagtcaatgattgtgtagccatgcctatcagtaaaaaagatttttgagcaaaaaaaaaaaaaaaaaaaaaaaacatttgggggggcggcctgggcccagaaaaaggttttaaacaccattcgtgtgggggcggcgggcccagtgggttagtacaccttggccaaagggggcccaaagagaacccgggccagacatgggggtgggtttcccccataaaaaaccgcgggggcaccggnggtctggaccaactccaggggtcgggggccacggtcaccacgggtcccgaaccaaaataggagg

SEQ ID NO: 323906 - DNA, 733 bp, Homo sapiens
ggaggtacctgtctataaggagtcctgcttatcacaatgaatgttctcctgggcagcgttgtgatctttgccaccttcgtgactttatgcaatgcatcatgctatttcatacctaatgagggagttccaggagattcaaccaggaaatgcatggatctcaaaggaaacaaacacccaataaactcggagtggcagactgacaactgtgagacatgcacttgctacgaaacagaaatttcatgttgcacccttgtttctacacctgtgggttatgacaaagacaactgccaaagaatcttcaagaaggaggactgcaagtatatcgtggtggagaagaaggacccaaaaaagacctgttctgtcagtgaatggataatctaatgtgcttctagtaggcacagggctcccaggccaggcctcattctcctctggcctctaatagtcaatgattgtgtagccatgcctatcagtaaaaaagatttttgagcaaaaaaaaaaaaaaaaaaaaaaaacaaaaaatggtggggggcgctcccggcccggaaagtttttagaacccctcccgttggggggggccgggcccaggggttatggcacttgggccaaagtggccaagggaacccgggctggctggcttgggtttcccccaaaaaaaaacgcgggggacgggggtttggacatccgaggggtccggcgctcggtctcacaggcccgggtctaacccgggggggga

SEQ ID NO: 323907 - DNA, 625 bp, Homo sapiens
ggaggtacctgtctataaggagtcctgcttatcacaatggggctcccaaacttggctgtgcagtggaaactccgggggaattttgaagaacactgacacccatcttccaccccgacactctgatttaattgggctgcagtgagaacagagcatcaatttaaaaagctgcccagaatgttctcctgggcagcgttgtgatctttgccaccttcgtgactttatgcaatgcatcatgctatttcatacctaatgagggagttccaggagattcaaccaggaaatgcatggatctcaaaggaaacaaacacccaataaactcggagtggcagactgacaactgtgagacatgcacttgctacgaaacagaaatttcatgttgcacccttgtttctacacctgtgggttatgacaaagacaactgccaaagaatcttcaagaaggaggactgcaagtatatcgtggtggagaagaaggacccaaaaaagacctgttctgtcagtgaatggataatctaatgtgcttctagtaggcacagggctcccaggccaggcctcattctcctctggcctctaatagtcaatgattgtgtagccatgcctatcagtaaaaaagatttttgagcaaa

SEQ ID NO: 323908 - DNA, 503 bp, Homo sapiens
gcctactactactccccggggggcggccgcgtcgacctgcttatcacaatgaatgttctcctgggcagcgttgtgatctttgccaccttcgtgactttatgcaatgcatcatgctatttcatacctaatgagggagttccaggagattcaaccaggaaatgcatggatctcaaaggaaacaaacacccaataaactcggagtggcagactgacaactgtgagacatgcacttgctacgaaacagaaatttcatgttgcacccttgtttctacacctgtgggttatgacaaagacaactgccaaagaatcttcaagaaggaggactgcaagtatatcgtggtggagaagaaggacccaaaaaagacctgttctgtcagtgaatggataatctaatgtgcttctagtaggcacagggctcccaggccaggcctcattctcctctggcctctaatagtcaatgattgtgtagccatgcctatcagtaaaaaagatttttgagcaaa

SEQ ID NO: 323909 - DNA, 725 bp, Homo sapiens
ggaggtacctgtctataaggagtcctgcttatcacaatggggctcccaaacttggctgtgcagtggaaactccgggggaattttgaagaacactgacacccatcttccaccccgacactctgatttaattgggctgcagtgagaacagagcatcaatttaaaaagctgcccaggatcacatcttggagatgaaaaggtgaaatcaaatgttgtaaacggttttaagaatgtggatatatagtagcaaattgttctccttaacgattgttcaaaaatgttctcctgggcagcgttgtgatctttgccaccttcgtgactttatgcaatgcatcatgctatttcatacctaatgagggagttccaggagattcaaccaggaaatgcatggatctcaaaggaaacaaacacccaataaactcggagtggcagactgacaactgtgagacatgcacttgctacgaaacagaaatttcatgttgcacccttgtttctacacctgtgggttatgacaaagacaactgccaaagaatcttcaagaaggaggactgcaagtatatcgtggtggagaagaaggacccaaaaaagacctgttctgtcagtgaatggataatctaatgtgcttctagtaggcacagggctcccaggccaggcctcattctcctctggcctctaatagtcaatgattgtgtagccatgcctatcagtaaaaaagatttttgagcaaa

SEQ ID NO: 323910 - DNA, 763 bp, Homo sapiens
  misc_feature (616)..(616): n is a, c, g, or t
  misc_feature (624)..(624): n is a, c, g, or t
  misc_feature (659)..(659): n is a, c, g, or t
  misc_feature (673)..(673): n is a, c, g, or t
gctgccgcctactactactaaattcgcggcgctcgactgcttatcacaatgaatgttctcctgggcagcgttgtgatctttgccaccttcgtgactttatgcaatgcatcatgctatttcatacctaatgagggagttccaggagattcaaccaggaaatgcatggatctcaaaggaaacaaacacccaataaactcggagtggcagactgacaactgtgagacatgcacttgctacgaaacagaaatttcatgttgcacccttgtttctacacctgtgggttatgacaaagacaactgccaaagaatcttcaagaaggaggactgcaagtatatcgtggtggagaagaaggacccaaaaaagacctgttctgtcagtgaatggataatctaatgtgcttctagtaggcacagggctcccaggccaggcctcattctcctctggcctctaatagtcaatgattgtgtagccatgcctatcagtaaaaaagatttttgagcaaaaaaaaaacaacacaaaacacaaaaaaaaaaaaatttgttggggcggccctgggcccccggaaaaagttttttagacccatcgttgggggcgcggcgggccccactagggttangggacaangggccaaagggggcccagaggagaacccgggcaanagaaggggggggtncccccataaaaagccgcgggaaccgcgtcgaccatccagggtgcgggacacggcttataccggccacagcgaaatcgccgcggagggggc

SEQ ID NO: 323911 - DNA, 689 bp, Homo sapiens
  misc_feature (3)..(3): n is a, c, g, or t
  misc_feature (7)..(8): n is a, c, g, or t
gcngccnnctactactactaaattcgcggccgcgtcgacaaggagtcctgcttatcacaatgaatgttctcctgggcagcgttgtgatctttgccaccttcgtgactttatgcaatgcatcatgctatttcatacctaatgagggagttccaggagattcaaccaggaaatgcatggatctcaaaggaaacaaacacccaataaactcggagtggcagactgacaactgtgagacatgcacttgctacgaaacagaaatttcatgttgcacccttgtttctacacctgtgggttatgacaaagacaactgccaaagaatcttcaagaaggaggactgcaagtatatcgtggtggagaagaaggacccaaaaaagacctgttctgtcagtgaatggataatctaatgtgcttctagtaggcacagggctcccaggccaggcctcattctcctctggcctctaatagtcaatgattgtgtagccatgcctatcagtaaaaaagatttttgagcaaaaaaaaaacaaaaaacaaaaaaaaacggtgggcgccggcctgaaaattttaaccatcgggggccggcccaggacggaacggcacaggggcccaggaaacggcgaaaagggggtcccccaaaaagccgggacccgggtgaaaccaggggcgggccagggctaacgggccggcgaaac

SEQ ID NO: 323912 - DNA, 654 bp, Homo sapiens
gtcgccttaaaggggaaaagctggtagtgcctgcaagggcccggtccggaattcccggggtcgacaaattattaaattttcggccgggtcgacaaggagtcctgcttatcacaatgaatgttctcctgggcagcgttgtgatctttgccaccttcgtgactttatgcaatgcatcatgctatttcatacctaatgagggagttccaggagattcaaccaggaaatgcatggatctcaaaggaaacaaacacccaataaactcggagtggcagactgacaactgtgagacatgcacttgctacgaaacagaaatttcatgttgcacccttgtttctacacctgtgggttatgacaaagacaactgccaaagaatcttcaagaaggaggactgcaagtatatcgtggtggagaagaaggacccaaaaaagacctgttctgtcagtgaatggataatctaatgtgcttctagtaggcacagggctcccaggccaggcctcattctcctctggcctctaatagtcaatgattgtgtagccatgcctatcagtaaaaaagatttttgagcaaaacacttgaatatgtgtgtccttttaatttataatttatgtatgcattgatttaatacacattataaagaatacaaacatttaaaaa

SEQ ID NO: 323913 - DNA, 370 bp, Homo sapiens
  misc_feature (3)..(3): n is a, c, g, or t
  misc_feature (7)..(8): n is a, c, g, or t
gcngccnnctactactactaaattcgcggccgcgtcgacaaggaaacaaacacccaataaactcggagtggcagactgacaactgtgagacatgcacttgctacgaaacagaaatttcatgttgcacccttgtttctacacctgtgggttatgacaaagacaactgccaaagaatcttcaagaaggaggactgcaagtatatcgtggtggagaagaaggacccaaaaaagacctgttctgtcagtgaatggataatctaatgtgcttctagtaggcacagggctcccaggccaggcctcattctcctctggcctctaatagtcaatgattgtgtagccatgcctatcagtaaaaaagatttttgagcaaa

SEQ ID NO: 323914 - DNA, 501 bp, Homo sapiens
gcattcctctctccctgccaggggctcccaaacttggctgtgcagtggaaactccgggggaattttgaagaacactgacacccatcttccaccccgacactctgatttaattgggctgcagtgagaacagagcatcaatttaaaaagctgcccagaatgttctcctgggcagcgttgtgatctttgccaccttcgtgactttatgcaatgcatcatgctatttcatacctaatgagggagttccaggagattcaaccaggatgtttctacacctgtgggttatgacaaagacaactgccaaagaatcttcaagaaggaggactgcaagtatatcgtggtggagaagaaggacccaaaaaagacctgttctgtcagtgaatggataatctaatgtgcttctagtaggcacagggctcccaggccaggcctcattctcctctggcctctaatagtcaatgattgtgtagccatgcctatcagtaaaaaagatttttgagcaaa

SEQ ID NO: 323915 - DNA, 703 bp, Homo sapiens
  misc_feature (631)..(632): n is a, c, g, or t
ggaggtacctgtctataaggagtcctgcttatcacaatggggctcccaaacttggctgtgcagtggaaactccgggggaattttgaagaacactgacacccatcttccaccccgacactctgatttaattgggctgcagtgagaacagagcatcaatttaaaaagctgcccagaatgttctcctgggcagcgttgtgatctttgccaccttcgtgactttatgcaatgcatcatgctatttcatacctaatgagggagttccaggagattcaaccaggaaatgcatggatctcaaaggaaacaaacacccaataaactcggagtggcagactgacaactgtgagacatgcacttgctacgaaacagaaatttcatgttgcacccttgtttctacacctgtgggttatgacaaagacaactgccaaagaatcttcaagaaggaggactgcaagtatatcgtggtggagaagaaggacccaaaaaagacctgttctgtcagtgaatggataatctaatgtgcttctagtaggcacagggctcccaggccaggcctcattctcctctggcctctaatagtcaatgattgtgtagccatgcctatcagtaaaaaagatttttgagcaaagccccnnataggacataatttcgatttttttcccattcactatttagttaatagtacttggggggggcccggccccaa

SEQ ID NO: 323916 - DNA, 916 bp, Homo sapiens
ggaggtacctgtctataaggagtcctgcttatcacaatgaatgttctcctgggcagcgttgtgatctttgccaccttcgtgactttatgcaatgcatcatgctatttcatacctaatgagggagttccaggagattcaaccaggaaatgcatggatctcaaaggaaacaaacacccaataaactcggagtggcagactgacaactgtgagacatgcacttgctacgaaacagaaatttcatgttgcacccttgtttctacacctgtgggttatgacaaagacaactgccaaaaaaaaaaaaaaaaaaaaaaaacaacaaaaacgtgtgtggggcagcacgagaccctagcaaaacaggttcttataccacaattggtgtggggggcgcggggaccccacaggggtacgtgacacacttgtggcacaaggcgtgtcccaagaggagacccggtggcatcagacacacgtggtcggggcatccctcccacaataaaaaacgcgccaggggggcaccaacgcagcgtgctggaacaaaatcgagagggggatcgggagggccacaacgggggacttcataccacgggggggtccaaagggagagactccgacataacaaaattacgccccggcgccgggggggagtgcgacagaggacacatcagcaaacaccacacggagcacagggcaacaccacataacacaccaaatcaacacctacgcacgacgacacgtcagcgcgcgaacgaccgcacgacgacaagaccagaccatcaacgaacgagtaccaacgagagcgtcgcgagacaccgcgacgcacgcagaacgcagataacgaccaacgacacagagcgtaccaccgcagacacctagaccaccatcacgacacaccaacgcacagagatgccacacacagcaa

SEQ ID NO: 323917 - DNA, 723 bp, Homo sapiens
ggaggtacctgtctataaggagtcctgcttatcacaatgaatgttctcctgggcagcgttgtgatctttgccaccttcgtgactttatgcaatgcatcatgctatttcatacctaatgagggagttccaggagattcaaccaggagtaagtcttggcttttcaatgtttattatgttattgcagcctggtagatggacctgtctgcagatgaaagcctttgtgtttctgtttgtttgtttctttgttttttgagatagtcatgctctgtctcccaggctggagtgcagtggcaccatttcagctcactgcaaactcctcctcccgggttccagtgattctacctcctcagcctcccaagtagctgggactacaggtgtgtgccatcatgcctggctaatttttgtatttttggtaaagatggggctttgccacgttggccaggctggtctcgaactcctgacctcaggtcatctgcccgccacagcctcccaaagtgttgggattacaggtgtgagccactgtgcctggcctcacttgggcagccttctaagaacacagtagcctgggccctgtacccagagatactgatttcattgttctagggtaaggctgagacatgggtggctttcaagtacccaagatgtttcacatgtgcacccagggttgaaaaccaccgatgcaaagcaaagggaagtgtagaagtgagattctcatccagagat

SEQ ID NO: 323918 - DNA, 665 bp, Homo sapiens
ggtgcttgttggctttaacatccacaatgaacacaagtgtgttgttgtcttctatcttcttcgtggtgactcagtggtcagcggaaacttgatgatagcgtagtggtcaagcttgtatctcctgggagtcgactcttccaaagatatttgggctgcctcgggagttgcagcgtcttgggccgccggaaggtgggtgacgtacggatcttctttttttgtgtggctgtggacacctttcaacactgtcttcttggcctttaaatccttcgctttggtttcggctttaggaggggcaggagcttccttcttcactttcggcgccatcttgtgaaaagggaaagtttcctttctaataccattttcacttctcccgaattttgtggatcgtttcttggtatctaccccagatttcaggagtgttggctggatcttagggattgtgaagtcttcatttccctgtggtgagatctgaggcatgattttaaacagtgtgagggaaggagatctccaggcactttaatagaatggagaagcaggatgggatttgagaggaaatctgattttgaaaaaaggagaactagagttgagttcgtaattaactagcaccttaaaggtcattcagcatgcccatctgcacagtgggtgtaatcaccctacagaacaaa

SEQ ID NO: 323919 - DNA, 641 bp, Homo sapiens
ggtgcttgttggctttaacatccacaatgaacacaagtgtgttgttgtcttctatcttcttcgtggtgactcagtggtcagcggaaacttgatgatagcgtagtggtcaagcttgtatctcctgggagtcgactcttccaaagatatttgggctgcctcgggagttgcagcgtcttgggccgccggaagaatgttctcctgggcagcgttgtgatctttgccaccttcgtgactttatgcaatgcatcatgctatttcatacctaatgagggagttccaggagattcaaccaggaaatgcatggatctcaaaggaaacaaacacccaataaactcggagtggcagactgacaactgtgagacatgcacttgctacgaaacagaaatttcatgttgcacccttgtttctacacctgtgggttatgacaaagacaactgccaaagaatcttcaagaaggaggactgcaagtatatcgtggtggagaagaaggacccaaaaaagacctgttctgtcagtgaatggataatctaatgtgcttctagtaggcacagggctcccaggccaggcctcattctcctctggcctctaatagtcaatgattgtgtagccatgcctatcagtaaaaaagatttttgagcaaa

SEQ ID NO: 323920 - DNA, 751 bp, Homo sapiens
  misc_feature (604)..(604): n is a, c, g, or t
  misc_feature (612)..(612): n is a, c, g, or t
  misc_feature (647)..(647): n is a, c, g, or t
  misc_feature (661)..(661): n is a, c, g, or t
ggaggtacctgtctataaggagtcctgcttatcacaatgaatgttctcctgggcagcgttgtgatctttgccaccttcgtgactttatgcaatgcatcatgctatttcatacctaatgagggagttccaggagattcaaccaggaaatgcatggatctcaaaggaaacaaacacccaataaactcggagtggcagactgacaactgtgagacatgcacttgctacgaaacagaaatttcatgttgcacccttgtttctacacctgtgggttatgacaaagacaactgccaaagaatcttcaagaaggaggactgcaagtatatcgtggtggagaagaaggacccaaaaaagacctgttctgtcagtgaatggataatctaatgtgcttctagtaggcacagggctcccaggccaggcctcattctcctctggcctctaatagtcaatgattgtgtagccatgcctatcagtaaaaaagatttttgagcaaaaaaaaaacaacacaaaacacaaaaaaaaaaaaatttgttggggcggccctgggcccccggaaaaagttttttagacccatcgttgggggcgcggcgggccccactagggttangggacaangggccaaagggggcccagaggagaacccgggcaanagaaggggggggtncccccataaaaagccgcgggaaccgcgtcgaccatccagggtgcgggacacggcttataccggccacagcgaaatcgccgcggagggggc

SEQ ID NO: 323921 - DNA, 784 bp, Homo sapiens
  misc_feature (720)..(720): n is a, c, g, or t
ggaggtacctgtctataaggagtcctgcttatcacaatgaatgttctcctgggcagcgttgtgatctttgccaccttcgtgactttatgcaatgcatcatgctatttcatacctaatgagggagttccaggagattcaaccaggaaatgcatggatctcaaaggaaacaaacacccaataaactcggagtggcagactgacaactgtgagacatgcacttgctacgaaacagaaatttcatgttgcacccttgtttctacacctgtgggttatgacaaagacaactgccaaagaatcttcaagaaggaggactgcaagtatatcgtggtggagaagaaggacccaaaaaagacctgttctgtcagtgaatggataatctaatgtgcttctagtaggcacagggctcccaggccaggcctcattctcctctggcctctaatagtcaatgattgtgtagccatgcctatcagtaaaaaagatttttgagcaaaaaaaaaaaaaaaaaaaaaaaaaaaaaaaaaaaaaaaaggcgcaaaaaaaaaaaaaaaaaaaaaaaacatttgggggggcggcctgggcccagaaaaaggttttaaacaccattcgtgtgggggcggcgggcccagtgggttagtacaccttggccaaagggggcccaaagagaacccgggccagacatgggggtgggtttcccccataaaaaaccgcgggggcaccggnggtctggaccaactccaggggtcgggggccacggtcaccacgggtcccgaaccaaaataggagg

SEQ ID NO: 323922 - DNA, 701 bp, Homo sapiens
  misc_feature (3)..(3): n is a, c, g, or t
  misc_feature (7)..(8): n is a, c, g, or t
  misc_feature (637)..(637): n is a, c, g, or t
gcngccnnctactactactaaattcgcggccgcgtcgacaaggagtcctgcttatcacaatgaatgttctcctgggcagcgttgtgatctttgccaccttcgtgactttatgcaatgcatcatgctatttcatacctaatgagggagttccaggagattcaaccaggatgtttctacacctgtgggttatgacaaagacaactgccaaagaatcttcaagaaggaggactgcaagtatatcgtggtggagaagaaggacccaaaaaagacctgttctgtcagtgaatggataatctaatgtgcttctagtaggcacagggctcccaggccaggcctcattctcctctggcctctaatagtcaatgattgtgtagccatgcctatcagtaaaaaagatttttgagcaaaaaaaaaaaaaaaaaaaaaaaaaaaaaaaaaaaaaaaaggcgcaaaaaaaaaaaaaaaaaaaaaaaacatttgggggggcggcctgggcccagaaaaaggttttaaacaccattcgtgtgggggcggcgggcccagtgggttagtacaccttggccaaagggggcccaaagagaacccgggccagacatgggggtgggtttcccccataaaaaaccgcgggggcaccggnggtctggaccaactccaggggtcgggggccacggtcaccacgggtcccgaaccaaaataggagg

SEQ ID NO: 323923 - DNA, 568 bp, Homo sapiens
gtcgccttaaaggggaaaagctggtagtgcctgcaagggcccggtccggaattcccggggtcgacaaattattaaattttcggccgggtcgacaaggagtcctgcttatcacaatgaatgttctcctgggcagcgttgtgatctttgccaccttcgtgactttatgcaatgcatcatgctatttcatacctaatgagggagttccaggagattcaaccaggaaatgcatggatctcaaaggaaacaaacacccaataaactcggagtggcagactgacaactgtgagacatgcacttgctacgaaacagaaatttcatgttgcacccttgtttctacacctgtgggttatgacaaagacaactgccaaagaatcttcaagaaggaggactgcaagtatatcgtggtggagaagaaggacccaaaaaagacctgttctgtcagtgaatggataatctaatgtgcttctagtaggcacagggctcccaggccaggcctcattctcctctggcctctaatagtcaatgattgtgtagccatgcctatcagtaaaaaagatttttgagcaaa

SEQ ID NO: 323924 - DNA, 408 bp, Homo sapiens
  misc_feature (3)..(3): n is a, c, g, or t
  misc_feature (7)..(8): n is a, c, g, or t
gcngccnnctactactactaaattcgcggccgcgtcgacaaggagtcctgcttatcacaatgaatgttctcctgggcagcgttgtgatctttgccaccttcgtgactttatgcaatgcatcatgctatttcatacctaatgagggagttccaggagattcaaccaggatgtttctacacctgtgggttatgacaaagacaactgccaaagaatcttcaagaaggaggactgcaagtatatcgtggtggagaagaaggacccaaaaaagacctgttctgtcagtgaatggataatctaatgtgcttctagtaggcacagggctcccaggccaggcctcattctcctctggcctctaatagtcaatgattgtgtagccatgcctatcagtaaaaaagatttttgagcaaa

SEQ ID NO: 323925 - DNA, 386 bp, Homo sapiens
ggaggtacctgtctataaggagtcctgcttatcacaatgaatgttctcctgggcagcgttgtgatctttgccaccttcgtgactttatgcaatgcatcatgctatttcatacctaatgagggagttccaggagattcaaccaggaaatgcatggatctcaaaggaaacaaacacccaataaactcggagtggcagactgacaactgtgagacatgcacttgctacgaaacagaaatttcatgttgcacccttgtttctacaacctggttggggggtttaacttggaccaaaaagggaacaaatcttggccaaaaagcaattctttcaagaaaggacggactggcaaggtatattcgtgcgtggagaagaaggacccaaaaaaagac

SEQ ID NO: 323926 - DNA, 564 bp, Homo sapiens
  misc_feature (8)..(8): n is a, c, g, or t
  misc_feature (62)..(62): n is a, c, g, or t
  misc_feature (66)..(67): n is a, c, g, or t
  misc_feature (92)..(92): n is a, c, g, or t
  misc_feature (112)..(112): n is a, c, g, or t
ggtacctngttctactacaggacgtccgtgcttatcacaagtgacatgttcttccgtgtggncacnnctgttgttgaatcctttgttgggcncaaaccctttttttccgggntttggggaaaccttttttttttaaaactttggggccccaaaaaattggggccattttcaatgctatttcatacctaatgagggagttccaggagattcaaccaggaaatgcatggatctcaaaggaaacaaacacccaataaactcggagtggcagactgacaactgtgagacatgcacttgctacgaaacagaaatttcatgttgcacccttgtttctacacctgtgggttatgacaaagacaactgccaaagaatcttcaagaaggaggactgcaagtatatcgtggtggagaagaaggacccaaaaaagacctgttctgtcagtgaatggataatctaatgtgcttctagtaggcacagggctcccaggccaggcctcattctcctctggcctctaatagtcaatgattgtgtagccatgcctatcagtaaaaaagatttttgagcaaa

SEQ ID NO: 323927 - DNA, 666 bp, Homo sapiens
ggaggtacctgtctataaggagtcctgcttatcacaatgaatgttctcctgggcagcgttgtgatctttgccaccttcgtgactttatgcaatgcatcatgctatttcatacctaatgagggagttccaggagattcaaccaggaaatgcatggatctcaaaggaaacaaacacccaataaactcggagtggcagactgacaactgtgagacatgcacttgctacgaaacagaaatttcatgttgcacccttgtttctacacctgtgggttatgacaaagacaactgccaaagaatcttcaagaaggaggactgcaagtatatcgtggtggagaagaaggacccaaaaaagacctgttctgtcagtgaatggataatctaatgtgcttctagtaggcacagggctcccaggccaggcctcattctcctctggcctctaatagtcaatgattgtgtagccatgcctatcagtaaaaaagatttttgagcaaaaaaaaaacaaaaaacaaaaaaaaacggtgggcgccggcctgaaaattttaaccatcgggggccggcccaggacggaacggcacaggggcccaggaaacggcgaaaagggggtcccccaaaaagccgggacccgggtgaaaccaggggcgggccagggctaacgggccggcgaaac

SEQ ID NO: 323928 - DNA, 789 bp, Homo sapiens
ggaggtacctgtctataaggagtcctgcttatcacaatgaatgttctcctgggcagcgttgtgatctttgccaccttcgtgactttatgcaatgcatcatgctatttcatacctaatgagggagttccaggagattcaaccaggaaatgcatggatctcaaaggaaacaaacacccaataaactcggagtggcagactgacaactgtgagacatgcacttgctacgaaacagaaatttcatgttgcacccttgtttctacacctgtgggttatgacaaagacaactgccaaagaatcttcaagaaggaggactgcaagtatatcgtggtggagaagaaggacccaaaaaagacctgttctgtcagtgaatggataatctaatgtgcttctagtaggcacagggctcccaggccaggcctcattctcctctggcctctaatagtcaatgattgtgtagccatgcctatcagtaaaaaagatttttgagcaaacaaaaaaaacaataacacgacacaacagactaaaccactcgttgtcgggccacgctggcgccgctacaaaaaaaagtgttacgagacacccaatgccgtgtgggcgccgcggcaccaggtaggctagctggtaaccagttgccactaggcagtgttcacaagggaaaaaccctgcgcgcgagaacaaggcggtgggacgcctccccgaataaaaaacgccggggggacacgcaggcggctccggaaacaactccgggagggcgtcggaagccacaaaggggcccaccaaagcggccag

SEQ ID NO: 323929 - DNA, 491 bp, Homo sapiens
ggaggtacctgtctataaggagtcctgcttatcacaatgaatgttctcctgggcagcgttgtgatctttgccaccttcgtgactttatgcaatgcatcatgctatttcatacctaatgagggagttccaggagattcaaccaggaaatgcatggatctcaaaggaaacaaacacccaataaactcggagtggcagactgacaactgtgagacatgcacttgctacgaaacagaaatttcatgttgcacccttgtttctacacctgtgggttatgacaaagacaactgccaaagaatcttcaagaaggaggactgcaagtatatcgtggtggagaagaaggacccaaaaaagacctgttctgtcagtgaatggataatctaatgtgcttctagtaggcacagggctcccaggccaggcctcattctcctctggcctctaatagtcaatgattgtgtagccatgcctatcagtaaaaaagatttttgagcaaa

SEQ ID NO: 323930 - DNA, 1510 bp, Homo sapiens
ttaaatgcccagttcaagattttttccttctccaccttcccctggggttgactttagatctgggaggtttgggatttagggagaggcttcagggtcctgggaggtgctctgtcctaccctggtgttcttcctggctagtcctgggcatggctttccctccagggtggcttctgtataagcatcttcagtcccatttggtccctgtcccgtggtccgagcctgacatatgtgcccatcccaaggcctctccagccttaccatcctccaagacacatcagtgcccctctctgccctgtgtgaaaatctttggtttctccgttgaaactattcagggggctgcatcaagcccagcttcctagggccagtgggtggtcctccctataccacaccttaggtgtggtggcaagaggcattctcttttcgtgtcatctcccaggccattcaggggatacagctcatgtgcccttcactcttggttttctaccctccccaggagttctgccctctaccccgaggctctgctgggggccaggcagagagctcttctccagggaactcaatagtgtctgccatcatcctctcctctcggacttctcttccatagtccaaggagttactttctatcccagggctaggaaggttaccactggaaactctaaagccaagaattaacttctgtatcaataacctctataccaataagtgcagaaaatacatcagacacagtccaatctcattcatgataaaagtgctcaacagactgagaataaaagggaattttctcagcctgatactgagcatttatgaaaagtccacagctcacatcatattaatatttaatcgtgaatgactggatcctttcccactaaaatcaggaacaaaacaagaatgtgtactctcaccacttctattcaacattgtattggaagttctagccagaaattagccaaggaagtgaaagaaaaggcatccaagttggaaaaaaagaagtcagttacctctatttacagataatatgacacagtttaaaaagtgagggttgtgcaacctgccaatgtactaaaatatattgaattatacgcttcaaatggatgaattgtattgcatgtggtatatgaagcgtatctcaatgaagccatctgtttgctgttgttgttgttgctgctgttgttgttgtttgtttttttttaagacaggatcttgctctgttgcccaggctggagtgtagcggtgcaatcatggcttactgcaccctcgacctcctaggctcaagtgatcctcccatctcagactccgagtagctgggactacagttgcatgtcaccatacccagctaagttttgtatttttcatagagactgggtttcaccatattgaccaggctgatctcaaattcctgggctcaagtgatcagcctgcgtcagcctcccaaagtgctgggattttaggcatgagccactgtgcctagctaaagccatgtttttaaagtgataaaaataaagaatgaaga

SEQ ID NO: 323931 - DNA, 753 bp, Homo sapiens
ggcactttcccagtccccgaggcggatccggtgttgcatccttggagagagctgagagctcgagggacggggatttcgctatgttgcccaagctggtctggaactccggagctcaagcagtccgcccgccttggccccccaaagctctggaattacaggcgtaatgcactgtgcctggccttttaaaaaaaaattgaggttattttggggacagtagagcgtccagacacatcctaatttgcgtagctgctcagttttaaaaaatgcaatgcatttttacctcttagggtatgtgatttctggctggtaagctacaccgaatcttggctagcacagttgaattccatgtcagatttgtaaacgcaaatttgctctctgcatttaaatatattagatatatttaggtaactacatttaaatgtattgagacatttaaatacacttgccgtctgtatctaaatatctgaagtggaccaggtgcggtggctcacacctataatcccatcactttgggaggccaaggcaagtggatcatgaggtcaggagttcacgaccagcctggccaacatggtgaaatcccatttctactaaaaatacaaaaattagctgggcgtggtggcaggcgcctgtaatcctagctacttgggaggctgaggcaggagaatcgctggaacccaggagacagaggttgcagtgagctgagattgcaccactgcagtctagcctgggtgacacagcaagactccatctcaa

SEQ ID NO: 323932 - DNA, 851 bp, Homo sapiens
ggcactttcccagtccccgaggcggatccggtgttgcatccttggagagagctgagagctcgagtacagaacctgctaaggccatcaaacctattgatcggaagtcagtccatcagatttgctctgggccggtggtactgagtctaagcactgcggtgaagaagatagtaggaaacagtctggatgctggtgccactaatattgatctaaagcttaaggactatggaatggatctcattgaagtttcaggcaatggatgtggggtagaagaagaaaacttcgaaggcttaatctctttcagctctgaaacatcacacatctaagattcaagagtttgccgacctaactcgggttgaaacttttggctttcgggggaaagctctgagctcactttgtgcactgagtgatgtcaccatttctacctgccacgtatcggcgaaggttgggactcgactggtgtttgatcacgatgggaaaatcatccagaaaaccccctacccccaccccagagggaccacagtcagcgtgaagcagttattttctacgctacctgtgcgccataaggaatttcaaaggaatattaagaagaaacgtgcctgcttccccttcgccttctgccgtgattgtcagtttcttgagggctccccagccatgcttcctgtacagcctgcaaaactgactcctagaagtaccccaccccacccctgctccttggaggacaacgtgatcactgtattcagctctgtcaagaatggtccaggttcttctagatgatctgcacaaatggttcctctcctccttcctgatgtctgccattagcattggaataaagttcctgctgaaaatccaaa

SEQ ID NO: 323933 - DNA, 1023 bp, Homo sapiens
ggcactttcccagtccccgaggcggatccggtgttgcatccttggagagagctgagagctcgagggacggggatttcgctatgttgcccaagctggtctggaactccggagctcaagcagtccgcccgccttggccccccaaagctctggaattacaggcgtaatgcactgtgcctggccttttaaaaaaaaattgaggttattttggggacagtagagcgtccagacacatcctaatttgcgtagctgctcagttttaaaaaatgcaatgcatttttacctcttaggtacagaacctgctaaggccatcaaacctattgatcggaagtcagtccatcagatttgctctgggccggtggtactgagtctaagcactgcggtgaagaagatagtaggaaacagtctggatgctggtgccactaatattgatctaaagcttaaggactatggaatggatctcattgaagtttcaggcaatggatgtggggtagaagaagaaaacttcgaaggcttaatctctttcagctctgaaacatcacacatctaagattcaagagtttgccgacctaactcgggttgaaacttttggctttcgggggaaagctctgagctcactttgtgcactgagtgatgtcaccatttctacctgccacgtatcggcgaaggttgggactcgactggtgtttgatcacgatgggaaaatcatccagaaaaccccctacccccaccccagagggaccacagtcagcgtgaagcagttattttctacgctacctgtgcgccataaggaatttcaaaggaatattaagaagaaacgtgcctgcttccccttcgccttctgccgtgattgtcagtttcttgagggctccccagccatgcttcctgtacagcctgcaaaactccaagaagagcccaagaagacattactactaactgtcacatggtgtcacggatgggatcttcggacagaaaaaggaaattgggccaggcgcggtggctcacgcctataatcccatcactttg

SEQ ID NO: 323934 - DNA, 1031 bp, Homo sapiens
ggcactttcccagtccccgaggcggatccggtgttgcatccttggagagagctgagagctcgaggtgagctgggctcgcggtcgcccctctcgctcgccctctttgagaaccacggcttccgacctccctggaaatggggggaacatggccgaggcgcgtgggaggccgcctcgtggaggccccggagcggcatcctcagcgccccagcgatccggtgcccattaggtgcgccttgaagccgagtacagaacctgctaaggccatcaaacctattgatcggaagtcagtccatcagatttgctctgggccggtggtactgagtctaagcactgcggtgaagaagatagtaggaaacagtctggatgctggtgccactaatattgatctaaagcttaaggactatggaatggatctcattgaagtttcaggcaatggatgtggggtagaagaagaaaacttcgaaggcttaatctctttcagctctgaaacatcacacatctaagattcaagagtttgccgacctaactcgggttgaaacttttggctttcgggggaaagctctgagctcactttgtgcactgagtgatgtcaccatttctacctgccacgtatcggcgaaggttgggactcgactggtgtttgatcacgatgggaaaatcatccagaaaaccccctacccccaccccagagggaccacagtcagcgtgaagcagttattttctacgctacctgtgcgccataaggaatttcaaaggaatattaagaagaaacgtgcctgcttccccttcgccttctgccgtgattgtcagtttcttgagggctccccagccatgcttcctgtacagcctgcaaaactgactcctagaagtaccccaccccacccctgctccttggaggacaacgtgatcactgtattcagctctgtcaagaatggtccaggttcttctagatgatctgcacaaatggttcctctcctccttcctgatgtctgccattagcattggaataaagttcctgctgaaaatccaaa

SEQ ID NO: 323935 - DNA, 326 bp, Homo sapiens
ttgtttagaagcatgcagcacctcctgcttcactctctctgtctctcctgctccaccatggccagaaacgtgcctgcttccccttcgccttctgccgtgattgtcagtttcttgagggctccccagccatgcttcctgtacagcctgcaaaactgactcctagaagtaccccaccccacccctgctccttggaggacaacgtgatcactgtattcagctctgtcaagaatggtccaggttcttctagatgatctgcaccaatggttcctctcctccttcctgatgtctgccattagcattggaataaagttcctgctgaaaatcca

SEQ ID NO: 323936 - DNA, 836 bp, Homo sapiens
ggcactttcccagtccccgaggcggatccggtgttgcatccttggagagagctgagagctcgagtacagaacctgctaaggccatcaaacctattgatcggaagtcagtccatcagatttgctctgggccggtggtactgagtctaagcactgcggtgaagaagatagtaggaaacagtctggatgctggtgccactaatattgatctaaagcttaaggactatggaatggatctcattgaagtttcaggcaatggatgtggggtagaagaagaaaacttcgaaggcttaatctctttcagctctgaaacatcacacatctaagattcaagagtttgccgacctaactcgggttgaaacttttggctttcgggggaaagctctgagctcactttgtgcactgagatgccagaccttagattttgtgatgactcctcaaccgtttagatctcggttatctcagagggatcatcagctttttaagaaaattttgagagaaaagcaagtgaagaaaagagtagtcagtgcccaacatcatggatctctcactgaacacaccatgcctggtattctctcacagtgatgtcaccatttctacctgccacgtatcggcgaaggttgggactcgactggtgtttgatcacgatgggaaaatcatccagaaaaccccctacccccaccccagagggaccacagtcagcgtgaagcagttattttctacgctacctgtgcgccataaggaatttcaaaggaatattaagaagtacagaacctgctaaggccatcaacctattgatcggcaagtatgtacttcgggaccctatagaccacaccgta

SEQ ID NO: 323937 - DNA, 256 bp, Homo sapiens
tataaagtaaatatacatgagtccatactgacataagtaaataaatgggggagaacaggcaactctccagaacagaattccagaagattatgtagatactccaccaccttggaggaacagggtaacttcccagtccttacgtgtaggctgcacacagtgacttccttccaaagagttatgaaaagggagaaaaagagtaacttcaaagcagagaaacctagccacgtgcaatagctcacatctgtaataccagcac

SEQ ID NO: 323938 - DNA, 533 bp, Homo sapiens
attccaataaaagtaaattgagttaccctagctgttacctggagatgcagaggtaaaagtaactacagtaattcaacttaaaacagtgtttttcaaactttaaaatgaagaaggttcatttggtaattttgataaaatatagattctaatctgtaaatcacatggggcctgttcttctgcatgtctaaaaagctgctcagtaatggccaggaatacacctttgaataacaagaatttaaaatattaatgaggataaaacgtaattgattcaaatgttttaaagctctgaaggcttgcaaatctaagttataaatattaatctatttagaacttttcaagtatgtaaatgaatgtactgattttttttttaataaaactggtctaatggtatcaagctttggaatctcatttttagtgcctccattgaaatgctccatctctcattagtcaccgtgccttacttttttcaactttaaaattggaagaatactttctactttttttgttttttttttttaaatggagtttcactc

SEQ ID NO: 323939 - DNA, 171 bp, Homo sapiens
ctcccaaagtgctgggattacaggcttgaaccaccttgaccagtcagactttataattggttttagtaactccttccattcatttactcatccactcactcactgagcaaccacgtggataccagcatcttcttggacagtgccaggttctggggtacagaggtgaataag

SEQ ID NO: 323940 - DNA, 816 bp, Homo sapiens
gcaggagaatcacttgaacccgggaggtggaggttgcagtaagccaagatcgcgccactgcactccagcctggggaacagagcaagactgtctcaaaaaaaaaatgaagtaaattaaaaacaacaaaacccatgttccgtaatcccatatatagtcactccaccgtgcaaagctgactatgcacattgaacaggaatgtgcccttacagggatcagtgtccttcagggatgtggctatcgatttcagcagagaggaatggcggcacctggacctttctcagagaaacctgtaccgggatgtgatgctggagacctacagccacctgctctcagtaggtaagcacagtcaccttggtatctgaaaggaggcctcactgagagtgttttcattctcagttgacgaatgctgttggcatcttagataggtgatggttttgtccttttttcctccagggttctctgtttgtttagggtactcagaatattactcagagatatctggttactttcctaaagaacaaaccatcattgaacaataagactgtatttgttgggctctgaaacgtaattagctggacccagacctttatcatttcccatgaacagggtatcaagttcctaaaccagaggtggtcatgttggagcaaggaaaggaaccatgggcactgcagggtgagaggccacgtcacagctgcccaggtgagtgaagtgaggtgaatgtgactcaggttagatgggagacaggaggaaatctcagctgtcttgaaaaacactggaacctgtgaagtgctattaagaccactcttcagtaaggct

SEQ ID NO: 323941 - DNA, 239 bp, Homo sapiens
cccagaaatcctcagccctggctccagaggatcatggcagctcctatgaggtatataggtaccattttcaaagaaatgatgttctgagccctataagcacaatcaatatgcatcacaagagacaaactgtaatctctgaatgcagttaaatgaagaaatcaacaagggggacagagttttgctcttgttgcccaggctggagtgcagtggcacaatcttggctcaccgcaacctctgcc

SEQ ID NO: 323942 - DNA, 503 bp, Homo sapiens
cccagaaatcctcagccctggctccagaggatcatggcagctcctatgaggtatataggtaccattttcaaagaaatgatgttctgagccctataagcacaatcaatatgcatcacaagagacaaactgtaatctctgaatgcagttaaatgaagaaatcaacaagggatcagtgtccttcagggatgtggctatcgatttcagcagagaggaatggcggcacctggacctttctcagagaaacctgtaccgggatgtgatgctggagacctacagccacctgctctcagtagggtatcaagttcctaaaccagaggtggtcatgttggagcaaggaaaggaaccatgggcactgcagggtgagaggccacgtcacagctgcccaggtgagtgaagtgaggtgaatgtgactcaggttagatgggagacaggaggaaatctcagctgtcttgaaaaacactggaacctgtgaagtgctattaagaccactcttcagtaaggct

SEQ ID NO: 323943 - DNA, 385 bp, Homo sapiens
cccagaaatcctcagccctggctccagaggatcatggcagctcctatgaggtatataggtaccattttcaaagaaatgatgttctgagccctataagcacaatcaatatgcatcacaagagacaaactgtaatctctgaatgcagttaaatgaagaaatcaacaagagcaaaactctgtctcaaaacaaacaaaaaaactggtttttatgagactcatacaataggggcagaactcccagataaataaatcaaaaaaggaagtggaccaggtgcggtggctcatgcttgtagttctagcactttggaggcaagaggatcacttgaagccaggagttcaagaccagcctaggcatcatagcaagactctgtctctacaaaaaaaaa

SEQ ID NO: 323944 - DNA, 364 bp, Homo sapiens
catggaagacagatgtttaaagatctttctctagcataactgcaggcagggcctggccctgcccaacactcagtatatttagctgtaggatgccacacagtggttaataccatgtgtttattttgtagctcctagacagcagagagattataacctgcttttgcaaatgataaaatggaacctcaccagctaagtaatatagacctataaactagcaaaaccagatgtttacttctgccatggtttgaatgtgtcctcgaagttgatgtattggagagctgggcatagtggctcatgcctgtaatcccagcactttgagaggactgggtgggtggattgcttgagcccaggagtttgagaccag

SEQ ID NO: 323945 - DNA, 299 bp, Homo sapiens
tgcagaggattcctgcagaggatcaagacagcacgtggacctcgcacagcctctcccacaggtaccatgaaggtctccgcggcagccctcgctgtcatcctcattgctactgccctctgcgctcctgcatctgcctccccatattcctcggacaccacaccctggtgacatgcaatttacctatatagcaagcctacacatgtgcccctgaacctaaaaaccaacgttaaaagaaaaacgtttggattattttccctctttcgacagacattggtttgcccaggatactcacaggcgtc

SEQ ID NO: 323946 - DNA, 1160 bp, Homo sapiens
tgcagaggattcctgcagaggatcaagacagcacgtggacctcgcacagcctctcccacaggtaccatgaaggtctccgcggcagccctcgctgtcatcctcattgctactgccctctgcgctcctgcatctgcctccccatattcctcggacaccacaccctgctgctttgcctacattgcccgcccactgccccgtgcccacatcaaggagtatttctacaccagtggcaagtgctccaacccagcagtcgtctttgtcacccgaaagaaccgccaagtgtgtgccaacccagagaagaaatgggttcgggagtacatcaactctttggagatgagctaggatggagagtccttgaacctgaacttacacaaatttgcctgtttctgcttgctcttgtcctagcttgggaggcttcccctcactatcctaccccacccgctccttgaagggcccagattctaccacacagcagcagttacaaaaaccttccccaggctggacgtggtggctcacgcctgtaatcccagcactttgggaggccaaggtgggtggatcacttgaggtcaggagttcgagaccagcctggccaacatgatgaaaccccatctctactaaaaatacaaaaaattagccgggcgtggtagcgggcgcctgtagtcccagctactcgggaggctgaggcaggagaatggcgtgaacccgggaggcggagcttgcagtgagccgagatcgcgccactgcactccagcctgggcgacagagcgagactccgtctcaaaaaaaaaaaaaaaaaaaaaaaaatacaaaaattagccgggcgtggtggcccacgcctgtaatcccagctactcgggaggctaaggcaggaaaattgtttgaacccaggaggtggaggctgcagtgagctgagattgtgccacttcactccagcctgggtgacaaagtgagactccgtcacaacaacaacaacaaaaagcttccccaactaaagcctagaagagcttctgaggcgctgctttgtcaaaaggaagtctctaggttctgagctctggctttgccttggctttgccagggctctgtgaccaggaaggaagtcagcatgtccccgtacatcgttagaagcttgaattcgagcagtagtagtagtaggcggccgc

SEQ ID NO: 323947 - DNA, 903 bp, Homo sapiens
tgcagaggattcctgcagaggatcaagacagcacgtggacctcgcacagcctctcccacaggtaccatgaaggtctccgcggcagccctcgctgtcatcctcattgctactgccctctgcgctcctgcatctgcctccccatattcctcggacaccacaccctgctgctttgcctacattgcccgcccactgccccgtgcccacatcaaggagtatttctacaccagtggcaagtgctccaacccagcagtcgtctttgtcacccgaaagaaccgccaagtgtgtgccaacccagagaagaaatgggttcgggagtacatcaactctttggagatgagctaggatggagagtccttgaacctgaacttacacaaatttgcctgtttctgcttgctcttgtcctagcttgggaggcttcccctcactatcctaccccacccgctccttgaagggcccagattctaccacacagcagcagttacaaaaaccttccccaggctggacgtggtggctcacgcctgtaatcccagcactttgggaggccaaggtgggtggatcacttgagtgcagtgagctgagattgtgccacttcactccagcctgggtgacaaagtgagactccgtcacaacaacaacaacaaaaagcttccccaactaaagcctagaagagcttctgaggcgctgctttgtcaaaaggaagtctctaggttctgagctctggctttgccttggctttgccagggctctgtgaccaggaaggaagtcagcatgcctctagaggcaaggaggggaggaacactgcactcttaagcttccgccgtctcaacccctcacaggagcttactggcaaacatgaaaaatcggcttaccattaaagttctcaatgcaaccataaaaaaaaaa

SEQ ID NO: 323948 - DNA, 419 bp, Homo sapiens
cactgtttatccatggccaagtgactttacctctctgagcctcagtttctgtcaaggaagataacagttctttctaaataaatcatataaagtgtccagcacaatgtcaagtgtgcagtagcaatgaataaaagggtctccctccttcctttcctcttccagattcctcggacaccacaccctgctgctttgcctacattgcccgcccactgccccgtgcccacatcaaggagtatttctacaccagtggcaagtgctccaacccagcagtcgtgtgagtctcagccccatggagccctcccagagcctgttccctgaggagtcctctgagaggatgccctacccacttccacctatcctccagctgcaagcagccacagctcctccatctctagcctcagagtcccctgctatcatgt

SEQ ID NO: 323949 - DNA, 1237 bp, Homo sapiens
tgcagaggattcctgcagaggatcaagacagcacgtggacctcgcacagcctctcccacaggtaccatgaaggtctccgcggcagccctcgctgtcatcctcattgctactgccctctgcgctcctgcatctgcctccccatattcctcggacaccacaccctgctgctttgcctacattgcccgcccactgccccgtgcccacatcaaggagtatttctacaccagtggcaagtgctccaacccagcagtcgtctttgtcacccgaaagaaccgccaagtgtgtgccaacccagagaagaaatgggttcgggagtacatcaactctttggagatgagctaggatggagagtccttgaacctgaacttacacaaatttgcctgtttctgcttgctcttgtcctagcttgggaggcttcccctcactatcctaccccacccgctccttgaagggcccagattctaccacacagcagcagttacaaaaaccttccccaggctggacgtggtggctcacgcctgtaatcccagcactttgggaggccaaggtgggtggatcacttgaggtcaggagttcgagaccagcctggccaacatgatgaaaccccatctctactaaaaatacaaaaaattagccgggcgtggtagcgggcgcctgtagtcccagctactcgggaggctgaggcaggagaatggcgtgaacccgggaggcggagcttgcagtgagccgagatcgcgccactgcactccagcctgggcgacagagcgagactccgtctcaaaaaaaaaaaaaaaaaaaaaaaaatacaaaaattagccgggcgtggtggcccacgcctgtaatcccagctactcgggaggctaaggcaggaaaattgtttgaacccaggaggtggaggctgcagtgagctgagattgtgccacttcactccagcctgggtgacaaagtgagactccgtcacaacaacaacaacaaaaagcttccccaactaaagcctagaagagcttctgaggcgctgctttgtcaaaaggaagtctctaggttctgagctctggctttgccttggctttgccagggctctgtgaccaggaaggaagtcagcatgcctctagaggcaaggaggggaggaacactgcactcttaagcttccgccgtctcaacccctcacaggagcttactggcaaacatgaaaaatcggcttaccattaaagttctcaatgcaaccataaaaaaaaaa

SEQ ID NO: 323950 - DNA, 1055 bp, Homo sapiens
tgcagaggattcctgcagaggatcaagacagcacgtggacctcgcacagcctctcccacaggtaccatgaaggtctccgcggcagccctcgctgtcatcctcattgctactgccctctgcgctcctgcatctgcctccccatattcctcggacaccacaccctgctgctttgcctacattgcccgcccactgccccgtgcccacatcaaggagtatttctacaccagtggcaagtgctccaacccagcagtcgtctttgtcacccgaaagaaccgccaagtgtgtgccaacccagagaagaaatgggttcgggagtacatcaactctttggagatgagctaggatggagagtccttgaacctgaacttacacaaatttgcctgtttctgcttgctcttgtcctagcttgggaggcttcccctcactatcctaccccacccgctccttgaagggcccagattctaccacacagcagcagttacaaaaaccttccccaggctggacgtggtggctcacgcctgtaatcccagcactttgggaggccaaggtgggtggatcacttgaggtcaggagttcgagaccagcctggccaacatgatgaaaccccatctctactaaaaatacaaaaaattagccgggcgtggtagcgggcgcctgtagtcccagctactcgggaggctaaggcaggaaaattgtttgaacccaggaggtggaggctgcagtgagctgagattgtgccacttcactccagcctgggtgacaaagtgagactccgtcacaacaacaacaacaaaaagcttccccaactaaagcctagaagagcttctgaggcgctgctttgtcaaaaggaagtctctaggttctgagctctggctttgccttggctttgccagggctctgtgaccaggaaggaagtcagcatgcctctagaggcaaggaggggaggaacactgcactcttaagcttccgccgtctcaacccctcacaggagcttactggcaaacatgaaaaatcggcttaccattaaagttctcaatgcaaccataaaaaaaaaa

SEQ ID NO: 323951 - DNA, 992 bp, Homo sapiens
agcgaaagcaggaagtacagacgtgaagcctagcagaggactttttagctgctcactggccccgcttgtctggccgactcatccgcccgcgacccctaatcccctctgcctgccccaagatgctgaagccagccctggagccccgagggggcttctccttcgagaactgccaaagaaatgcatcattggaacgcgtcctcccggggctcaaggtccctcacgcacgcaagaccgggaccaccatcgcgggcctggtgttccaagacggggtcattctgggcgccgatacgcgagccactaacgattcggtcgtggcggacaagagctgcgagaagatccacttcatcgcccccaaaatctactgctgtggggctggagtagccgcggacgccgagatgaccacacggatggtggcgtccaagatggagctacacgcgttatctacgggccgcgagccccgcgtggccacggtcactcgcatcctgcgccagacgctcttcaggtaccagggccacgtgggtgcatcgctgatcgtgggcggcgtagacctgactggaccgcagctctacggtgtgcatccccatggctcctacagccgtctgcccttcacagccctgggctctggtcaggacgcggccctggcggtgctagaagaccggttccagccgaacatgacgctggaggctgctcaggggctgctggtggaagccgtcaccgccgggatcttgggtgacctgggctccgggggcaatgtggacgcatgtgtgatcacaaagactggcgccaagctgctgcggacactgagctcacccacagagcccgtgaagaggtctggccgctaccactttgtgcctggaaccacagctgtcctgacccagacagtgaagccactaaccctggagctagtggaggaaactgtgcaggctatggaggtggagtaagctgaggcttagagcttggaacaagggggaataaacccagaaaatacagtt

SEQ ID NO: 323952 - DNA, 474 bp, Homo sapiens
agcgcttctgtcccttctcctcgaactctgcccctgtgaccttggcctcactccaaacggcgtcgcagcggttgacttcagatgcttctcctgccttcaggctctggtcaggacgcggccctggcggtgctagaagaccggttccagccgaacatgacgctggaggctgctcaggggctgctggtggaagccgtcaccgccgggatcttgggtgacctgggctccgggggcaatgtggacgcatgtgtgatcacaaagactggcgccaagctgctgcggacactgagctcacccacagagcccgtgaagaggtctggccgctaccactttgtgcctggaaccacagctgtcctgacccagacagtgaagccactaaccctggagctagtggaggaaactgtgcaggctatggaggtggagtaagctgaggcttagagcttggaacaagggggaataaacccagaaaatacagtt

SEQ ID NO: 323953 - DNA, 718 bp, Homo sapiens
ggcgccagcccacaggaaggggcggggatagcacctaggagctgggcatagagaggtggggcctaggccccagcttgtggccgaccccgcccatcctcgagcaggtaccagggccacgtgggtgcatcgctgatcgtgggcggcgtagacctgactggaccgcagctctacggtgtgcatccccatggctcctacagccgtctgcccttcacagccctgggctctggtcaggacgcggccctggcggtgctagaagaccggttccagccgaacatgacggtgagcggcctctgtccccgactttgtggtcgctggtgggatgtgcacccgggagctgggggagcacaggaccctggcccagtgcgggtggctaaggcttgtcggaggaggtgaccactgaaggctggaggctgctcaggggctgctggtggaagccgtcaccgccgggatcttgggtgacctgggctccgggggcaatgtggacgcatgtgtgatcacaaagactggcgccaagctgctgcggacactgagctcacccacagagcccgtgaagaggtctggccgctaccactttgtgcctggaaccacagctgtcctgacccagacagtgaagccactaaccctggagctagtggaggaaactgtgcaggctatggaggtggagtaagctgaggcttagagcttggaacaagggggaataaacccagaaaatacagtt

SEQ ID NO: 323954 - DNA, 720 bp, Homo sapiens
ggcgccagcccacaggaaggggcggggatagcacctaggagctgggcatagagaggtggggcctaggccccagcttgtggccgaccccgcccatcctcgagcaggtaccagggccacgtgggtgcatcgctgatcgtgggcggcgtagacctgactggaccgcagctctacggtgtgcatccccatggctcctacagccgtctgcccttcacagccctgggctctggtcaggacgcggccctggcggtgctagaagaccggttccagccgaacatgacgctggaggctgctcaggggctgctggtggaagccgtcaccgccgggatcttgggtgacctgggctccgggggcaatgtggacgcatgtgtgatcacaaagactggcgccaagctgctgcggacactgagctcacccacagagcccgtgaagaggtctggccgctaccactttgtgcctggaaccacagctgtcctgacccagacagtgaagccactaaccctggagctagtggaggaaactgtgcaggctatggaggtggagtaagctgaggcttagagcttggaacaagggggaataaacccagaaaatacagttcggtataaaaaaatagcgtttttatcccctccttcttgatatacccctcctctttcttcacctcatatcctaacaaaatactggccgccgtttaaacgcgcggactggggaacaccctggcgccct

SEQ ID NO: 323955 - DNA, 227 bp, Homo sapiens
  misc_feature (28)..(28): n is a, c, g, or t
aacggctgcgagaagcacgacagaagtnccggacactgagctcacccacagagcccgtgaagaggtctggccgctaccactttgtgcctggaaccacagctgtcctgacccagacagtgaagccactaaccctggagctagtggaggaaactgtgcaggctatggaggtggagtaagctgaggcttagagcttggaacaagggggaataaacccagaaaatacagtt

SEQ ID NO: 323956 - DNA, 324 bp, Homo sapiens
ggcgccagcccacaggaaggggcggggatagcacctaggagctgggcatagagaggtggggcctaggccccagcttgtggccgaccccgcccatcctcgagcaggtaccagggccacgtgggtgcatcgctgatcgtgggcggcgtagacctgactggaccgcagctctacggtgtgcatccccatggctcctacagccgtctgcccttcacagccctgggctctggtcaggacgcggcctgcggtgctagaagacggtccaccgacatgcgtgagctgtcagggctgtgtgaagcgcacgcggtctggtgactggtcggcaat

SEQ ID NO: 323957 - DNA, 1491 bp, Homo sapiens
agcgaaagcaggaagtacagacgtgaagcctagcagaggactttttagctgctcactggccccgcttgtctggccgactcatccgcccgcgacccctaatcccctctgcctgccccaagatgctgaagccagccctggagccccgagggggcttctccttcgagaactgccaaagaaatgcatcattggaacgcgtcctcccggggctcaaggtccctcacgcacgcaagaccgggaccaccatcgcgggcctggtgttccaagacggggtcattctgggcgccgatacgcgagccactaacgattcggtcgtggcggacaagagctgcgagaagatccacttcatcgcccccaaaatctactgctgtggggctggagtagccgcggacgccgagatgaccacacggatggtggcgtccaagatggagctacacgcgttatctacgggccgcgagccccgcgtggccacggtcactcgcatcctgcgccagacgctcttcaggtaccagggccacgtgggtgcatcgctgatcgtgggcggcgtagacctgactggaccgcagctctacggtgtgcatccccatggctcctacagccgtctgcccttcacagccctgggctctggtcaggacgcggccctggcggtgctagaagaccggttccagccgaacatgacgctggaggctgctcaggggctgctggtggaagccgtcaccgccgggatcttgggtgacctgggctccgggggcaatgtggacgcatgtgtgatcacaaagactggcgccaagctgctgcggacactgagctcacccacagagcccgtgaagaggtctggccgctaccactttgtgcctggaaccacagctgtcctgacccagacagtgaagccactaaccctggagctagtggaggaaactgtgcaggctatggaggtggagtaagctgaggcttagagcttggaacaagggggaataaacccagaaaatacagttaaacaaaatggctgtgtcattcttgagtggaatggggtgggcaggcagccagcagggctctgtagctaaggcgtccctgcaggggccattacctaccatagctctagtgtctggcctaagagatgcccttcacccataacctcaggcacctacaactccagaaccccagccctggccagcattgcaggcttggtctccacccaaaccttccttctgactccacacttgaaggctcccccaccactccactgtcttgctcttgccctctagtccactggagacttgtaaattatgaaataccccatgtactaccccctcctagagactttccatggctcctcagtggcccaggacaaagctcatacctttcaatcaggcccccacaggccccactgagggctaaagtgctgacaagaggagccgctccctgactccaaggcaagttctcaccaagcactcctcaacctcgcaacatctttacctgtgacaccccttagat

SEQ ID NO: 323958 - DNA, 1090 bp, Homo sapiens
agcgaaagcaggaagtacagacgtgaagcctagcagaggactttttagctgctcactggccccgcttgtctggccgactcatccgcccgcgacccctaatcccctctgcctgccccaagatgctgaagccagccctggagccccgagggggcttctccttcgagaactgccaaagaaatgcatcattggaacgcgtcctcccggggctcaaggtccctcacgcacgcaagaccgggaccaccatcgcgggcctggtgttccaagacggggtcattctgggcgccgatacgcgagccactaacgattcggtcgtggcggacaagagctgcgagaagatccacttcatcgcccccaaaatctactgctgtggggctggagtagccgcggacgccgagatgaccacacggatggtggcgtccaagatggagctacacgcgttatctacgggccgcgagccccgcgtggccacggtcactcgcatcctgcgccagacgctcttcaggtaccagggccacgtgggtgcatcgctgatcgtgggcggcgtagacctgactggaccgcagctctacggtgtgcatccccatggctcctacagccgtctgcccttcacagccctgggctctggtcaggacgcggccctggcggtgctagaagaccggttccagccgaacatgacgctggaggctgctcaggggctgctggtggaagccgtcaccgccgggatcttgggtgacctgggctccgggggcaatgtggacgcatgtgtgatcacaaagactggcgccaagctgctgcggacactgagctcacccacagagcccgtgaagaggtctggccgctaccactttgtgcctggaaccacagctgtcctgacccagacagtgaagccactaaccctggagctagtggaggaaactgtgcaggctatggaggtggagtaagctgaggcttagagcttggaacaagggggaataaacccagaaaatacagttaaacaacacacgaaatgacaatacaacaatataatcactgaatacgtaatacacaactacaacataccacaaagaacaatgaccacaacagagggggg

SEQ ID NO: 323959 - DNA, 1103 bp, Homo sapiens
agcgaaagcaggaagtacagacgtgaagcctagcagaggactttttagctgctcactggccccgcttgtctggccgactcatccgcccgcgacccctaatcccctctgcctgccccaagatgctgaagccagccctggagccccgagggggcttctccttcgagaactgccaaagaaatgcatcattggaacgcgtcctcccggggctcaaggtccctcacgcacgcaagaccgggaccaccatcgcgggcctggtgttccaagacggggtcattctgggcgccgatacgcgagccactaacgattcggtcgtggcggacaagagctgcgagaagatccacttcatcgcccccaaaatctagtgagactcccgagcccagttcccgtacgcaaaaaagaacggccccctcgttcccactccggtccccgcacgtcccagccctgcccacaccgatcctcccttttgcctcagctgctgtggggctggagtagccgcggacgccgagatgaccacacggatggtggcgtccaagatggagctacacgcgttatctacgggccgcgagccccgcgtggccacggtcactcgcatcctgcgccagacgctcttcaggtaccagggccacgtgggtgcatcgctgatcgtgggcggcgtagacctgactggaccgcagctctacggtgtgcatccccatggctcctacagccgtctgcccttcacagccctgggctctggtcaggacgcggccctggcggtgctagaagaccggttccagccgaacatgacgctggaggctgctcaggggctgctggtggaagccgtcaccgccgggatcttgggtgacctgggctccgggggcaatgtggacgcatgtgtgatcacaaagactggcgccaagctgctgcggacactgagctcacccacagagcccgtgaagaggtctggccgctaccactttgtgcctggaaccacagctgtcctgacccagacagtgaagccactaaccctggagctagtggaggaaactgtgcaggctatggaggtggagtaagctgaggcttagagcttggaacaagggggaataaacccagaaaatacagtt

SEQ ID NO: 323960 - DNA, 1463 bp, Homo sapiens
agcgaaagcaggaagtacagacgtgaagcctagcagaggactttttagctgctcactggccccgcttgtctggccgactcatccgcccgcgacccctaatcccctctgcctgccccaagatgctgaagccagccctggagccccgagggggcttctccttcgagaactgccaaagaaatgcatcattggaacgcgtcctcccggggctcaaggtccctcacgcacgcaagaccgggaccaccatcgcgggcctggtgttccaagacggggtcattctgggcgccgatacgcgagccactaacgattcggtcgtggcggacaagagctgcgagaagatccacttcatcgcccccaaaatctactgctgtggggctggagtagccgcggacgccgagatgaccacacggatggtggcgtccaagatggagctacacgcgttatctacgggccgcgagccccgcgtggccacggtcactcgcatcctgcgccagacgctcttcaggtaccagggccacgtgggtgcatcgctgatcgtgggcggcgtagacctgactggaccgcagctctacggtgtgcatccccatggctcctacagccgtctgcccttcacagccctgggctctggtcaggacgcggccctggcggtgctagaagaccggttccagccgaacatgacggtgagcggcctctgtccccgactttgtggtcgctggtgggatgtgcacccgggagctgggggagcacaggaccctggcccagtgcgggtggctaaggcttgtcggaggaggtgaccactgaagggtgagtggagtaagggcagagaagtgcggtcccgacataacaccgtccaataccaaagcctgcacggctgggagaagtcgaagctcacagaggatctttaggagccgagggcggagagaaggaccagtagggtcctacttatatcaacgtctggagcctagattttgtttggggtgggatggaagcaggtgatgttgcctcagaggtggctaaggctcagagggagaaacacagtgggggtttggagggcaagaccagattgggtaagtggacaggcaagtccccaggctgtagcctaagttaacagcagagagagcccgttaggtctcacacacccatcaccgcagctggaggctgctcaggggctgctggtggaagccgtcaccgccgggatcttgggtgacctgggctccgggggcaatgtggacgcatgtgtgatcacaaagactggcgccaagctgctgcggacactgagctcacccacagagcccgtgaagaggtctggccgctaccactttgtgcctggaaccacagctgtcctgacccagacagtgaagccactaaccctggagctagtggaggaaactgtgcaggctatggaggtggagtaagctgaggcttagagcttggaacaagggggaataaacccagaaaatacagtt

SEQ ID NO: 323961 - DNA, 691 bp, Homo sapiens
  misc_feature (580)..(580): n is a, c, g, or t
  misc_feature (628)..(629): n is a, c, g, or t
  misc_feature (673)..(673): n is a, c, g, or t
agcgaaagcaggaagtacagacgtgaagcctagcagaggactttttagctgctcactggccccgcttgtctggccgactcatccgcccgcgacccctaatcccctctgcctgccccaagatgctgaagccagccctggagccccgagggggcttctccttcgagaactgccaaagaaatgcatcattggaacgcgtcctcccggggctcaaggtccctcacgcacgcaagaccgggaccaccatcgcgggcctggtgttccaagacggggtcattctgggcgccgatacgcgagccactaacgattcggtcgtggcggacaagagctgcgagaagatccacttcatcgcccccaaaatctactgctgtggggctggagtagccgcagacgccaagagcttctcgctgaacctgggcaaagatgacaacaatctgtgcctgcacttcaaccctcgtttcgaagcgcatggggacatcaacaccatcgtgtgtaacagcaaggacggtggggcctggggggctgagcagagggaatctgccttccccttccagccatgaagtgtcgctgaggtatgcgtctnctttcacgagacagacctaaccatcaagctgcctgatggatacgaatnntcagttcctcaaccagctcaaccctggatggcatcaactacctntggctgcagtggtgactt

SEQ ID NO: 323962 - DNA, 594 bp, Homo sapiens
ggcgccagcccacaggaaggggcggggatagcacctaggagctgggcatagagaggtggggcctaggccccagcttgtggccgaccccgcccatcctcgagcaggtaccagggccacgtgggtgcatcgctgatcgtgggcggcgtagacctgactggaccgcagctctacggtgtgcatccccatggctcctacagccgtctgcccttcacagccctgggctctggtcaggacgcggccctggcggtgctagaagaccggttccagccgaacatgacgctggaggctgctcaggggctgctggtggaagccgtcaccgccgggatcttgggtgacctgggctccgggggcaatgtggacgcatgtgtgatcacaaagactggcgccaagctgctgcggacactgagctcacccacagagcccgtgaagaggtctggccgctaccactttgtgcctggaaccacagctgtcctgacccagacagtgaagccactaaccctggagctagtggaggaaactgtgcaggctatggaggtggagtaagctgaggcttagagcttggaacaagggggaataaacccagaaaatacagtt

SEQ ID NO: 323963 - DNA, 692 bp, Homo sapiens
ggcgccagcccacaggaaggggcggggatagcacctaggagctgggcatagagaggtggggcctaggccccagcttgtggccgaccccgcccatcctcgagcaggtaccagggccacgtgggtgcatcgctgatcgtgggcggcgtagacctgactggaccgcagctctacggtgtgcatccccatggctcctacagccgtctgcccttcacagccctgggctctggtcaggacgcggccctggcggtgctagaagaccggttccagccgaacatgacgctggaggctgctcaggggctgctggtggaagccgtcaccgccgggatcttgggtgacctgggctccgggggcaatgtggacgcatgtgtgatcacaaagactggcgccaagctgctgcggacactgagctcacccacagagcccgtgaagaggtctggccgctaccactttgtgcctggaaccacagctgtcctgacccagacagtgaagccactaaccctggagctagtggaggaaactgtgcaggctatggaggtggagtaagctgaggcttagagcttggaacaagggggaataaacccagaaaatacagttaaacaacacacgaaatgacaatacaacaatataatcactgaatacgtaatacacaactacaacataccacaaagaacaatgaccacaacagagggggg

SEQ ID NO: 323964 - DNA, 992 bp, Homo sapiens
  misc_feature (21)..(21): n is a, c, g, or t
ccggcagtaactcacggctangtagcgaggctgggtggcgctttttagctgctcactggccccgcttgtctggccgactcatccgcccgcgacccctaatcccctctgcctgccccaagatgctgaagccagccctggagccccgagggggcttctccttcgagaactgccaaagaaatgcatcattggaacgcgtcctcccggggctcaaggtccctcacgcacgcaagaccgggaccaccatcgcgggcctggtgttccaagacggggtcattctgggcgccgatacgcgagccactaacgattcggtcgtggcggacaagagctgcgagaagatccacttcatcgcccccaaaatctactgctgtggggctggagtagccgcggacgccgagatgaccacacggatggtggcgtccaagatggagctacacgcgttatctacgggccgcgagccccgcgtggccacggtcactcgcatcctgcgccagacgctcttcaggtaccagggccacgtgggtgcatcgctgatcgtgggcggcgtagacctgactggaccgcagctctacggtgtgcatccccatggctcctacagccgtctgcccttcacagccctgggctctggtcaggacgcggccctggcggtgctagaagaccggttccagccgaacatgacgctggaggctgctcaggggctgctggtggaagccgtcaccgccgggatcttgggtgacctgggctccgggggcaatgtggacgcatgtgtgatcacaaagactggcgccaagctgctgcggacactgagctcacccacagagcccgtgaagaggtctggccgctaccactttgtgcctggaaccacagctgtcctgacccagacagtgaagccactaaccctggagctagtggaggaaactgtgcaggctatggaggtggagtaagctgaggcttagagcttggaacaagggggaataaacccagaaaatacagtt

SEQ ID NO: 323965 - DNA, 951 bp, Homo sapiens
gaacaggtgtctaacacgcacgctgtgattgtgagccgtacttcttggctatggggggctgagatgggctccaacgagcatggtgtctgcattgtcaaccaggctgggtggtcgaacgagccaattggccaaagaaatgcatcattggaacgcgtcctcccggggctcaaggtccctcacgcacgcaagaccgggaccaccatcgcgggcctggtgttccaagacggggtcattctgggcgccgatacgcgagccactaacgattcggtcgtggcggacaagagctgcgagaagatccacttcatcgcccccaaaatctactgctgtggggctggagtagccgcggacgccgagatgaccacacggatggtggcgtccaagatggagctacacgcgttatctacgggccgcgagccccgcgtggccacggtcactcgcatcctgcgccagacgctcttcaggtaccagggccacgtgggtgcatcgctgatcgtgggcggcgtagacctgactggaccgcagctctacggtgtgcatccccatggctcctacagccgtctgcccttcacagccctgggctctggtcaggacgcggccctggcggtgctagaagaccggttccagccgaacatgacgctggaggctgctcaggggctgctggtggaagccgtcaccgccgggatcttgggtgacctgggctccgggggcaatgtggacgcatgtgtgatcacaaagactggcgccaagctgctgcggacactgagctcacccacagagcccgtgaagaggtctggccgctaccactttgtgcctggaaccacagctgtcctgacccagacagtgaagccactaaccctggagctagtggaggaaactgtgcaggctatggaggtggagtaagctgaggcttagagcttggaacaagggggaataaacccagaaaatacagtt

SEQ ID NO: 323966 - DNA, 1514 bp, Homo sapiens
agcgaaagcaggaagtacagacgtgaagcctagcagaggactttttagctgctcactggccccgcttgtctggccgactcatccgcccgcgacccctaatcccctctgcctgccccaagatgctgaagccagccctggagccccgagggggcttctccttcgagaactgccaaagaaatgcatcattggaacgcgtcctcccggggctcaaggtccctcacgcacgcaagaccgggaccaccatcgcgggcctggtgttccaagacggggtcattctgggcgccgatacgcgagccactaacgattcggtcgtggcggacaagagctgcgagaagatccacttcatcgcccccaaaatctactgctgtggggctggagtagccgcggacgccgagatgaccacacggatggtggcgtccaagatggagctacacgcgttatctacgggccgcgagccccgcgtggccacggtcactcgcatcctgcgccagacgctcttcaggtaccagggccacgtgggtgcatcgctgatcgtgggcggcgtagacctgactggaccgcagctctacggtgtgcatccccatggctcctacagccgtctgcccttcacagccctgggctctggtcaggacgcggccctggcggtgctagaagaccggttccagccgaacatgacgctggaggctgctcaggggctgctggtggaagccgtcaccgccgggatcttgggtgacctgggctccgggggcaatgtggacgcatgtgtgatcacaaagactggcgccaagctgctgcggacactgagctcacccacagagcccgtgaagagaggctgtccctcctccctcccaggtctggccgctaccactttgtgcctggaaccacagctgtcctgacccagacagtgaagccactaaccctggagctagtggaggaaactgtgcaggctatggaggtggagtaagctgaggcttagagcttggaacaagggggaataaacccagaaaatacagttaaacaaaatggctgtgtcattcttgagtggaatggggtgggcaggcagccagcagggctctgtagctaaggcgtccctgcaggggccattacctaccatagctctagtgtctggcctaagagatgcccttcacccataacctcaggcacctacaactccagaaccccagccctggccagcattgcaggcttggtctccacccaaaccttccttctgactccacacttgaaggctcccccaccactccactgtcttgctcttgccctctagtccactggagacttgtaaattatgaaataccccatgtactaccccctcctagagactttccatggctcctcagtggcccaggacaaagctcatacctttcaatcaggcccccacaggccccactgagggctaaagtgctgacaagaggagccgctccctgactccaaggcaagttctcaccaagcactcctcaacctcgcaacatctttacctgtgacaccccttagat

SEQ ID NO: 323967 - DNA, 1546 bp, Homo sapiens
  misc_feature (1483)..(1483): n is a, c, g, or t
  misc_feature (1546)..(1546): n is a, c, g, or t
agcgaaagcaggaagtacagacgtgaagcctagcagaggactttttagctgctcactggccccgcttgtctggccgactcatccgcccgcgacccctaatcccctctgcctgccccaagatgctgaagccagccctggagccccgagggggcttctccttcgagaactgccaaagaaatgcatcattggaacgcgtcctcccggggctcaaggtccctcacgcacgcaagaccgggaccaccatcgcgggcctggtgttccaagacggggtcattctgggcgccgatacgcgagccactaacgattcggtcgtggcggacaagagctgcgagaagatccacttcatcgcccccaaaatctactgctgtggggctggagtagccgcggacgccgagatgaccacacggatggtggcgtccaagatggagctacacgcgttatctacgggccgcgagccccgcgtggccacggtcactcgcatcctgcgccagacgctcttcaggtaccagggccacgtgggtgcatcgctgatcgtgggcggcgtagacctgactggaccgcagctctacggtgtgcatccccatggctcctacagccgtctgcccttcacagccctgggctctggtcaggacgcggccctggcggtgctagaagaccggttccagccgaacatgacggtgagcggcctctgtccccgactttgtggtcgctggtgggatgtgcacccgggagctgggggagcacaggaccctggcccagtgcgggtggctaaggcttgtcggaggaggtgaccactgaagggtgagtggagtaagggcagagaagtgcggtcccgacataacaccgtccaataccaaagcctgcacggctgggagaagtcgaagctcacagaggatctttaggagccgagggcggagagaaggaccagtagggtcctacttatatcaacgtctggagcctagattttgtttggggtgggatggaagcaggtgatgttgcctcagaggtggctaaggctcagagggagaaacacagtgggggtttggagggcaagaccagattgggtaagtggacaggcaagtccccaggctgtagcctaagttaacagcagagagagcccgttaggtctcacacacccatcaccgcagctggaggctgctcaggggctgctggtggaagccgtcaccgccgggatcttgggtgacctgggctccgggggcaatgtggacgcatgtgtgatcacaaagactggcgccaagctgctgcggacactgagctcacccacagagcccgtgaagaggtctggccgctaccactttgtgcctggaaccacagctgtcctgacccagacagtgaagccactaaccctggagctagtggaggaaactgtgcaggctatggaggtggagtaagctgaggcttagagcttggaacaagggggaataaacccagaaaatacagttaaaaaaaaataatcactgcncgtcgttttaaacgtcgtgattgggaaaccctgcgttccccaactaaacgccttgagacatcn

SEQ ID NO: 323968 - DNA, 820 bp, Homo sapiens
tttttagctgctcactggccccgcttgtctggccgactcatccgcccgcgacccctaatcccctctgcctgccccaagatgctgaagccagccctggagccccgagggggcttctccttcgagaactgccaaaggtgaagcgggggcgcggggggcggtcactcctgagccgcctctgcttgctcgtggccttttttcctggctgggggtgggggagggtgtgttggtcgacttgggttccaggcttaccccggaagatgagggagacggggaccaggttaggggaagcaacaggggtcttgaaagcagagccgaaacatgggcgccctcctccgtttccagaaatgcatcattggaacgcgtcctcccggggctcaaggtccctcacgcacgcaagaccgggaccaccatcgcgggcctggtgttccaagtgagcagcggggagggacggggagctggaggggagccgagagtatcgagcaggcactgaagctgcggtccctccctctcctcaggacggggtcattctgggcgccgatacgcgagccactaacgattcggtcgtggcggacaagagctgcgagaagatccacttcatcgcccccaaaatctagtgagactcccgagcccagttcccgtacgcaaaaaagaacggccccctcgttcccactccggtccccgcacgtcccagccctgcccacaccgatcctcccttttgcctcagctgctgtggggctggagtagccgcggacgccgagatgaccacacggatggtggcgtccaagatggagctacacgcgttatctacgggccgcgagcc

SEQ ID NO: 323969 - DNA, 759 bp, Homo sapiens
tatacttcctgtagggcttgcagatccaagagtcacttactcctctttttcttatggattacctcatctccagtatttctttatagcagagcaagaacagcctaatacacctgccaaaccagaataaactgtgcttgtccaataactcctgtatcccgtagcttgaaataaatcaccaaaaaaatctaaaatcttcatatgtttataaacatcacttctatctttaaagagtaattaggatagtggataaatattaaaaaggaagatgtttcctggtgtgttacgactgtgccatttgatgtgggaaatttctgagtttcttctttgaggcagaacaacaataatgaagagccaatttaaatgtttttcactgcacagaagaaaaatgaacctgttttggtcctgttgttttgcaagccatcaatcaaaagagccttgaaccaagatgtggcaaaaaatgagatttaataaaagaagcaagttttcaagaagctgctctatgaatctgacatgaggaggagctataataatagccacaccaacttgcaaatgcaaacttttctcctctgattaaattatcttgtaaagatatatacatcacaagaaggtgaataggtttcgtgttacatattaactcagatcaattggtagtgacagcctggagccctgtattgagtgtgactggattctcatttggaccaggtgaggaagaaggcctgactaatgattgatgtctactgttggaaaggatggagggaa

SEQ ID NO: 323970 - DNA, 1100 bp, Homo sapiens
ggggaggctcaagcttcccagaatcccttgtccctccccactttgggcacttaggggtggggctggggagtgagagggacaaggcagggcatgattgattaaagctaacgagcagacagaaggcactggtgggtcacatctcgggcctgggagagggaacatgctgagaaactgatgaagctgcagaaccaacgaggtggccgaatcttccttcaggatatcaagaaaccagactgtgatgactgggagagcgggctgaatgcaatggagtgtgcattacatttggaaaaaaatgtgaatcagtcactactggaactgcacaaactggccactgacaaaaatgacccccatttgtgtgacttcattgagacacattacctgaatgagcaggtgaaagccatcaaagaattgggtgaccacgtgaccaacttgcgcaagatgggagcgcccgaatctggcttggcggaatatctctttgacaagcacaccctgggagacagtgataatgaaagctaagcctcgggctaatttccccatagccgtggggtgacttccctggtcaccaaggcagtgcatgcatgttggggtttcctttaccttttctataagttgtaccaaaacatccacttaagttctttgatttgtaccattccttcaaataaagaaatttggtacccaaaaaaaaaaaaaaaaaaaaaaaaaaaaaaaaaaaaaaaaaaaaaaaaaaaaaaaaaaaaaaaaaaaaaaaaaaaaaaaaaaaaaaaaaaaaaaaaaaaaaaaagggggggggggaaagaaaaaaacaggggggggggaaaaaaaacacctgtttgattataaaagaagagagccacaccaaggagggcagcgtaaataaaaaaagaagacggaagccagcggcgaaaaaacaaaccgaaggaggaaacaaccccgtccacgggagatctattggagagaagaacaacactaggcgggggggagaaaaggtggaacaaccaccaccagagaataaaggccgccgcagcaaaaaaacgaaggcgggtgatgcggaccacacaggatctatcccgccgagaaagtagccgacgagtaatgaaata

SEQ ID NO: 323971 - DNA, 677 bp, Homo sapiens
ggggaggctcaagcttcccagaatcccttgtccctccccactttgggcacttaggggtggggctggggagtgagagggacaaggcagggcatgattgattaaagctaacgagcagacagaaggcactggtgggtcacatctcgggcctgggagagggaacatgctgagaaactgatgaagctgcagaaccaacgaggtggccgaatcttccttcaggatatcaagaaaccagactgtgatgactgggagagcgggctgaatgcaatggagtgtgcattacatttggaaaaaaatgtgaatcagtcactactggaactgcacaaactggccactgacaaaaatgacccccatttgtgtgacttcattgagacacattacctgaatgagcaggtgaaagccatcaaagaattgggtgaccacgtgaccaacttgcgcaagatgggagcgcccgaatctggcttggcggaatatctctttgacaagcacaccctgggagacagtgataatgaaagctaagcctcgggctaatttccccatagccgtggggtgacttccctggtcaccaaggcagtgcatgcatgttggggtttcctttaccttttctataagttgtaccaaaacatccacttaagttctttgatttgtaccattccttcaaataaagaaatttggtaccc

SEQ ID NO: 323972 - DNA, 1027 bp, Homo sapiens
ggggaggctcaagcttcccagaatcccttgtccctccccactttgggcacttaggggtggggctggggagtgagagggacaaggcagggcatgattgattaaagctaacgagcagacagaaggcactggtgggtcacatctcgggcctgggagagggaacatgctgagaaactgatgaagctgcagaaccaacgaggtggccgaatcttccttcaggatatcaagaaaccagactgtgatgactgggagagcgggctgaatgcaatggagtgtgcattacatttggaaaaaaatgtgaatcagtcactactggaactgcacaaactggccactgacaaaaatgacccccatttgtgtgacttcattgagacacattacctgaatgagcaggtgaaagccatcaaagaattgggtgaccacgtgaccaacttgcgcaagatgggagcgcccgaatctggcttggcggaatatctctttgacaagcacaccctgggagacagtgataatgaaagctaagcctcgggctaatttccccatagccgtggggtgacttccctggtcaccaaggcagtgcatgcatgttggggtttcctttaccttttctataagttgtaccaaaacatccacttaagttctttgatttgtaccattccttcaaataaagaaatttggtacccaaaaaaaaaaaaaaaaaaaaaaaaaaaaaaaaaaaaaaaaaaaaaaaaaaaaaaaaaaaaaaaaaaaaaaaaaaaaaaaaaaaaattaataataacttttaaaaataaaaaaaaaatcttaggggggggcccggttcccaatttgcccttatgggagggcgtttaaaaataaattgggccggtttttaacaaggtgggatggggaaaacccttgggtttccccaatttaagcgccttgggaaaaattcccccttttgacaagtggggtttatacccaaaagaggccccacccgatggccctttccagtggccccccctgaatgggaaaggggatttgccggtttttgggt

SEQ ID NO: 323973 - DNA, 1005 bp, Homo sapiens
gacccgatcgcctcccaaaggccctacctccaaaggccatcacattaaggattagatttcaacataggaagtctgggggacacaggcatttagttgataatatcaagcttttacatctggtaaaggaccctgtgaatccgactcaggaagtggtttggtaaagttggaaaggtattggcttgtgactgaggagaggtggctttcctttgttagcatcccatagccggatgctaactttgctgtatttaacgatgctcatcactaagggccgatactgtctaatgcctggtctacctgaaaatgtgcccttcagtgctctagtggtggtgtatttacatctaggcttcctgtcgataagctgttagttaccattgaatccagggagcactttacacactaatcatctttcccagttcacagcctgtttcttatcttctttgtcatgatgtacatttactcatgtctttcctttgctgtaccctgacagaccatttgcccacttgctgcccagcctatttttacccgaaggcttaaatggcctctgaagtctcaagtctacgggaaaataagtaaaacctgcccacatgcttgtgatggtattggaatatttcagtcctttgagaagaacacttcactttgaaccttacgggctattttccagactgtccaaatatgatttgtttcctctcaccatcatttccagtaccctgtcccaagtgtttgaatatagacattgatatgccctgatttttgctctacttcagaaaggatcggggatgtagtttagccctctaggagcttggaactaatttgtttgtctatttcttgtttgcttccaagttgcttattatgtgttacaggtagcagctacagctgaaggccatggtgaattgctggtgatgtaaatactcccagccctgactgatcggccttgtttaaattttaaggattagtaaacaggttgctgctggagctacttctgcttaggctattaggagaataaat

SEQ ID NO: 323974 - DNA, 299 bp, Homo sapiens
ttggctccttgtcaattcaaactggaaaaaaaatgcacagaggagagtgaacaccttctctgttaacatgctgaggaaaattttacaatgaatctttacacagtatttccaaaaaaacaaaaatttatttttatttctttgataaaaatgagtcttctgccctgttaggtgtctggatatttcacctgtaatactcataaaaaatgagaattcccggctgggcgtggtggctcatgcctgtaatcccatcacttttgggaggcagaggcgggcagatcacttgaggtcaggagttcgag

SEQ ID NO: 323975 - DNA, 264 bp, Homo sapiens
aatttgtgcatgtttgtcttgtctggggtgtccggtcatatgctagtgtgtatttaacgtagcaaaaggggtcacatgtttaagaacccacagaagccaggcaagtaatgtaaatgaaagaaccatgccaggcataagagcttttttccattgttcttgagatgttggctatacttgggcaagcttttatcttcacagtttggataaagtcataattcaatacttctctactataaggaaagcaattgcataagaatgacaata

SEQ ID NO: 323976 - DNA, 924 bp, Homo sapiens
gaatgccgctcgcacgggacgaggcatgggcggggtcgggctgtgctctggactccatttcccggcggccctgggtgtgtggcgcgtgcgcaccgttcccggcgacgaacggaagatggcggcggcggcggcggcggagtgtaggaagaggcactgctgagggggcgcgaggggaacggaggccagagctgcggtgagcgggaggcggcgtttgggcccggagacgaaaggaggaggctcctaaagaagcaggggctcgggcggggagggcatcgccgtggggagaggggaacagtggctttcgcgacccatgtttcttcccttgctcaggacccttccttggctccctagtgccctcgaggcaaagttccaacgtggccccccgggcgccaccgccccgcagacctcgcttgcttcgactcggcctctttgctttttcccccacctctaacagccgccctggcctttcggttccttaaacttgccatgcgctttcccgcttcggggattttgcacaggctgtcccttctgcctgcaacatccttttacccattcggcttggctaactcccatttcatccttcgggtctcggcaccaacgtcacttcctctgcgaagccctccttccctgccctccatccagaaatccgcctgttaaatgcttttgtcggtccgtgttccttcatgtcacgtgtggtctaatttgttatccgactcttatctgtgtgctgttttatgatgtctatgaccgtgtgttccatgaaggtagggactaggtttgtctctgtcgccactgtgttctcagcacagcgccaatcacgccggagacgcccagctaatgttcgttgaaggaataaaagatactcctagagccagtttggggaaacagggtagtcatcagattcctaggtagcagtggggcagg

SEQ ID NO: 323977 - DNA, 4156 bp, Homo sapiens
gaatgccgctcgcacgggacgaggcatgggcggggtcgggctgtgctctggactccatttcccggcggccctgggtgtgtggcgcgtgcgcaccgttcccggcgacgaacggaagatggcggcggcggcggcggcggagtgtaggaagaggcactgctgagggggcgcgaggggaacggaggccagagctgcgctgacagcagccatggcgagcggcagtggagacagcgtcacccgtcggagcgtggcatcacagtttttcactcaagaggaggggccgggcatcgatggcatgaccacctcagagagggtggtggatcttctgaaccaggcggcgctgatcaccaatgactcaaagatcacagtgctcaaacaggtccaggagctgatcatcaacaaagaccccacactactggacaacttcctggatgagatcatcgcattccaagcagacaagtcaatcgaagtgcgaaaatttgtcatcggcttcatcgaggaggcatgcaagcgagacattgagttgctgctgaaactcattgcaaacctcaacatgctcttgagggacgagaatgtgaacgtggtgaagaaggctatcctcaccatgacccagctctacaaggtggccctgcagtggatggtaaagtcacgggtcattagcgagctacaggaggcctgctgggacatggtatctgccatggcgggggacatcatcctgctattggactctgacaatgacggcatccgcacccacgccatcaagtttgtggagggcctcattgtcaccctgtcaccccgcatggctgactcagagataccccgacgccaggagcatgatatcagcctggaccgcatccctcgtgaccacccctacatccagtacaacgtgctatgggaagagggcaaggcagccttggagcagctgcttaagttcatggtgcaccctgccatctcctccatcaacctgaccacagcgctgggctcccttgccaatatcgcccgccagagacccatgttcatgtctgaggtgatccaggcctatgaaactctgcatgccaacctgcccccgacgctggccaaatcgcaggtgagcagtgtgcgtaagaatctgaagctgcacctgttgagtgtgctgaagcacccggcttccttggagttccaggcccagatcaccaccctgctggtggacctgggcacacctcaggccgagatcgcccgcaacatgccgagcagcaaggacacccgcaagcggccccgcgatgactcggactccacactcaagaagatgaagctggagcccaacctgggggaggacgatgaggacaaagacttggagccaggcccgtcggggacctcgaaggcctcagcgcagatctccggccagtcagacacggacatcacagctgagttcctgcagcctctgctgacgcctgataatgtggctaatctggtcctcatcagcatggtgtacctacccgaggccatgccagcctccttccaggccatctacacccccgtggagtcagcaggcacggaagcccagatcaagcacctggctcggctcatggccacacagatgacagctgccggactgggaccaggtgtagagcagaccaaacagtgcaaggaggagcccaaggaggagaaggtggtgaagacagagagcgtcctgatcaagcggcgcctgtcagcccagggccaagccatctcggtggtgggttccctgagctccatgtcccccctggaggaagaggcaccgcaggccaagaggaggccagagcccattatccctgtcactcagccccggctggcaggcgctggtgggcgcaagaaaattttccgtctcagcgacgtgctgaagccccttaccgatgcccaggtggaagccatgaagctgggcgctgtgaagcggatcctgcgggctgagaaggctgtggcctgcagcggggcagcccaggtccgcataaagatcctggccagcctggtgacacagttcaactcgggcctgaaggcggaggtcctgtccttcatcctggaggatgtgcgggcccgcctggacctggccttcgcctggctctaccaggagtacaacgcctacctggccgcaggtgcctcgggctccctggacaagtatgaggactgcctcatccgcctgttgtctggcctgcaggagaaaccagaccagaaggatgggatcttcaccaaggttgtgctggaggcgccactcatcacagagagtgccctggaggtggtccgcaagtactgcgaggatgagagtcgcacctatctgggcatgtccacacttcgagacctgatcttcaagcgcccgtcccgccagttccagtacctgcatgtcctcctcgacctcagctcccatgagaaggacaaggtgcgctcccaggccctgctgttcatcaaacgcatgtatgagaaggagcagctgcgggagtatgtggagaaatttgccctcaactacctgcagctcctggtgcaccccaacccaccgtctgtgctgtttggagctgacaaggacacagaggtggcagcaccctggacggaggagacagtgaagcagtgtctgtacctctacctggccctcctgcctcagaaccacaagctgatccacgaactggcggccgtgtacactgaagccatcgccgacatcaagcggacggtgctgagggtcattgagcagccgatccgaggaatgggcatgaactccccggagctgctcctgctggtggaaaattgtcccaagggagcagagacactggtcacgagatgtctgcacagcctcacagacaaagtcccaccctccccagagctggtgaagcgggtccgggatctctaccacaagcgactgccagacgtccgcttcctcatcccggtgctcaatgggctggagaagaaagaggtgatccaggccctgcctaaactcatcaaactcaaccccatcgtggtgaaggaagtcttcaaccgcctgctgggcacccagcatggtgagggaaactcagccttgtccccgctgaaccctggagagctcctgatcgcattacacaacattgactccgtgaagtgcgacatgaaatccatcatcaaagccaccaacctgtgctttgcggagcggaacgtgtacacgtcagaggtgctggccgtggtgatgcagcagctgatggagcagagccccctgcccatgctgctcatgaggaccgtcatccagtccctgaccatgtacccccgcctggggggcttcgtcatgaacatcctgtcccgcctcatcatgaagcaggtgtggaagtaccccaaggtgtgggagggcttcatcaagtgctgccagcgcacaaagccccagagcttccaggtcatcctgcagctgccgccccagcagctgggagccgtctttgacaagtgcccagagctccgggagcccctgctggcccatgtccgctccttcaccccccaccagcaagctcacatccctaactccatcatgaccatcttggaggccagcggcaagcaggagccagaggccaaggaggcgcctgcggggcccttggaggaggatgatctggagcccctgaccttggccccggccccagcaccccggccccctcaggacctcatcggcctgcgactggcccaggagaaggccttaaagcggcagctggaggaggaacagaagctgaagccgggaggagtgggagccccctcctcttcctccccctctccctctccgtcggcccggccaggcccgcccccgtctgaggaagccatggatttccgggaggaggggcctgagtgcgagaccccgggcatcttcatcagcatggatgacgactcggggctgaccgaggccgcgctgttggactctagtctcgagggccccctacccaaggagacggcagcgggcgggctgaccttgaaggaggagcggagcccccagaccctcgcacctgttggagaagatgctatgaagactcccagcccggctgccgaggacgccagggaacccgaggccaaggggaacagctgacggggctcgagggggaaagggggtgggacagggactcggggctgggggacggggcggggcttgacctgcgggtgctttgccttaaaaagaaataaaagatgtgaacttgggcaagttactgaaaag

SEQ ID NO: 323978 - DNA, 574 bp, Homo sapiens
gagcttctgtgtggccctccctatccccaggatgatctggagcccctgaccttggccccggccccagcaccccggccccctcaggacctcatcggcctgcgactggcccaggagaaggccttaaagcggcagctggaggaggaacagaagctgaagccgggaggagtgggagccccctcctcttcctccccctctccctctccgtcggcccggccaggcccgcccccgtctgaggaagccatggatttccgggaggaggggcctgagtgcgagaccccgggcatcttcatcagcatggatgacgactcggggctgaccgaggccgcgctgttggactctagtctcgagggccccctacccaagcgcacctgttggagaagatgctatgaagactcccagcccggctgccgaggacgccagggaacccgaggccaaggggaacagctgacggggctcgagggggaaagggggtgggacagggactcggggctgggggacggggcggggcttgacctgcgggtgctttgccttaaaaagaaataaaagatgtgaacttgggcaagttactgaaaag

SEQ ID NO: 323979 - DNA, 406 bp, Homo sapiens
  misc_feature (20)..(20): n is a, c, g, or t
tactactactaaattcgcgnccgcgtcgacggaaacgtcaagtggcccggcagttaggagcttggagctgatagacctgggttcgcgttcacttctcgctttctcactgcgaccttgggcccgtcagtaaaaatggggaagacgttccagtccctccacgctgatgcaaggagtccatgaactcaggcacataaacctctgtgttactgtcactttatgagctggccttcctggtgttgctaacgggactctttagctgtcattacataaacataagtccttcctgcccctctctctagaggcacagggctgcccacatgagaagcagctcagtgacagactagcacttgagattaaaaggtctgctcttccagtttgcaaaaaaaaagtcgacgcggccgcgaat

SEQ ID NO: 323980 - DNA, 514 bp, Homo sapiens
agtgagactccatctcaaaaaaaaaaaaaaaaaaaaagaagcaaaactttcaacttagaaaaactagcaagggattgttcacccttaccccagtggttggtgctagagaaaaaatggaggatgtctgttccacgcagaccctggtggtttaaaacacacatatagatggctctgggaccatcaaaatagcagcagcaaagagccactccaccagcctcccctccactcccccaggccccacacagcagaaggctccagccactttttggaagcctgtagcctggctccatcttgccctgtgccacaaatgcccatgaccccctgtgccgcgttggagtctgtgttggggaccacacgaggaggtggtcctaccctgccctcgggggtgcacagcccaggggcagagagacccagccgtgccacacgctacccagggtgggagcccaggatggggaggagcacacagtggcaacctcacgctgcctgagggctgctgctgccttcggtgtcccct

SEQ ID NO: 323981 - DNA, 4136 bp, Homo sapiens
tcgtggtggaggaaaggcagatggttagctagtgacgactttattataatgctaattcaggagtatctgggtctctagtgctgaggaaaactgaattttcatgcaaagggcatctatattttcacatctgtatctttatccatctagcttggggaacggaggccagagctgcgctgacagcagccatggcgagcggcagtggagacagcgtcacccgtcggagcgtggcatcacagtttttcactcaagaggaggggccgggcatcgatggcatgaccacctcagagagggtggtggatcttctgaaccaggcggcgctgatcaccaatgactcaaagatcacagtgctcaaacaggtccaggagctgatcatcaacaaagaccccacactactggacaacttcctggatgagatcatcgcattccaagcagacaagtcaatcgaagtgcgaaaatttgtcatcggcttcatcgaggaggcatgcaagcgagacattgagttgctgctgaaactcattgcaaacctcaacatgctcttgagggacgagaatgtgaacgtggtgaagaaggctatcctcaccatgacccagctctacaaggtggccctgcagtggatggtaaagtcacgggtcattagcgagctacaggaggcctgctgggacatggtatctgccatggcgggggacatcatcctgctattggactctgacaatgacggcatccgcacccacgccatcaagtttgtggagggcctcattgtcaccctgtcaccccgcatggctgactcagagataccccgacgccaggagcatgatatcagcctggaccgcatccctcgtgaccacccctacatccagtacaacgtgctatgggaagagggcaaggcagccttggagcagctgcttaagttcatggtgcaccctgccatctcctccatcaacctgaccacagcgctgggctcccttgccaatatcgcccgccagagacccatgttcatgtctgaggtgatccaggcctatgaaactctgcatgccaacctgcccccgacgctggccaaatcgcaggtgagcagtgtgcgtaagaatctgaagctgcacctgttgagtgtgctgaagcacccggcttccttggagttccaggcccagatcaccaccctgctggtggacctgggcacacctcaggccgagatcgcccgcaacatgccgagcagcaaggacacccgcaagcggccccgcgatgactcggactccacactcaagaagatgaagctggagcccaacctgggggaggacgatgaggacaaagacttggagccaggcccgtcggggacctcgaaggcctcagcgcagatctccggccagtcagacacggacatcacagctgagttcctgcagcctctgctgacgcctgataatgtggctaatctggtcctcatcagcatggtgtacctacccgaggccatgccagcctccttccaggccatctacacccccgtggagtcagcaggcacggaagcccagatcaagcacctggctcggctcatggccacacagatgacagctgccggactgggaccaggtgtagagcagaccaaacagtgcaaggaggagcccaaggaggagaaggtggtgaagacagagagcgtcctgatcaagcggcgcctgtcagcccagggccaagccatctcggtggtgggttccctgagctccatgtcccccctggaggaagaggcaccgcaggccaagaggaggccagagcccattatccctgtcactcagccccggctggcaggcgctggtgggcgcaagaaaattttccgtctcagcgacgtgctgaagccccttaccgatgcccaggtggaagccatgaagctgggcgctgtgaagcggatcctgcgggctgagaaggctgtggcctgcagcggggcagcccaggtccgcataaagatcctggccagcctggtgacacagttcaactcgggcctgaaggcggaggtcctgtccttcatcctggaggatgtgcgggcccgcctggacctggccttcgcctggctctaccaggagtacaacgcctacctggccgcaggtgcctcgggctccctggacaagtatgaggactgcctcatccgcctgttgtctggcctgcaggagaaaccagaccagaaggatgggatcttcaccaaggttgtgctggaggcgccactcatcacagagagtgccctggaggtggtccgcaagtactgcgaggatgagagtcgcacctatctgggcatgtccacacttcgagacctgatcttcaagcgcccgtcccgccagttccagtacctgcatgtcctcctcgacctcagctcccatgagaaggacaaggtgcgctcccaggccctgctgttcatcaaacgcatgtatgagaaggagcagctgcgggagtatgtggagaaatttgccctcaactacctgcagctcctggtgcaccccaacccaccgtctgtgctgtttggagctgacaaggacacagaggtggcagcaccctggacggaggagacagtgaagcagtgtctgtacctctacctggccctcctgcctcagaaccacaagctgatccacgaactggcggccgtgtacactgaagccatcgccgacatcaagcggacggtgctgagggtcattgagcagccgatccgaggaatgggcatgaactccccggagctgctcctgctggtggaaaattgtcccaagggagcagagacactggtcacgagatgtctgcacagcctcacagacaaagtcccaccctccccagagctggtgaagcgggtccgggatctctaccacaagcgactgccagacgtccgcttcctcatcccggtgctcaatgggctggagaagaaagaggtgatccaggccctgcctaaactcatcaaactcaaccccatcgtggtgaaggaagtcttcaaccgcctgctgggcacccagcatggtgagggaaactcagccttgtccccgctgaaccctggagagctcctgatcgcattacacaacattgactccgtgaagtgcgacatgaaatccatcatcaaagccaccaacctgtgctttgcggagcggaacgtgtacacgtcagaggtgctggccgtggtgatgcagcagctgatggagcagagccccctgcccatgctgctcatgaggaccgtcatccagtccctgaccatgtacccccgcctggggggcttcgtcatgaacatcctgtcccgcctcatcatgaagcaggtgtggaagtaccccaaggtgtgggagggcttcatcaagtgctgccagcgcacaaagccccagagcttccaggtcatcctgcagctgccgccccagcagctgggagccgtctttgacaagtgcccagagctccgggagcccctgctggcccatgtccgctccttcaccccccaccagcaagctcacatccctaactccatcatgaccatcttggaggccagcggcaagcaggagccagaggccaaggaggcgcctgcggggcccttggaggaggatgatctggagcccctgaccttggccccggccccagcaccccggccccctcaggacctcatcggcctgcgactggcccaggagaaggccttaaagcggcagctggaggaggaacagaagctgaagccgggaggagtgggagccccctcctcttcctccccctctccctctccgtcggcccggccaggcccgcccccgtctgaggaagccatggatttccgggaggaggggcctgagtgcgagaccccgggcatcttcatcagcatggatgacgactcggggctgaccgaggccgcgctgttggactctagtctcgagggccccctacccaaggagacggcagcgggcgggctgaccttgaaggaggagcggagcccccagaccctcgcacctgttggagaagatgctatgaagactcccagcccggctgccgaggacgccagggaacccgaggccaaggggaacagctgacggggctcgagggggaaagggggtgggacagggactcggggctgggggacggggcggggcttgacctgcgggtgctttgccttaaaaagaaataaaagatgtgaacttgggcaagttactgaaaag

SEQ ID NO: 323982 - DNA, 3982 bp, Homo sapiens
gaatgccgctcgcacgggacgaggcatgggcggggtcgggctgtgctctggactccatttcccggcggccctgggtgtgtggcgcgtgcgcaccgttcccggcgacgaacggaagatggcggcggcggcggcggcggagtgtaggaagaggcactgctgagggggcgcgaggggaacggaggccagagctgcgctgacagcagccatggcgagcggcagtggagacagcgtcacccgtcggagcgtggcatcacagtttttcactcaagaggaggggccgggcatcgatggcatgaccacctcagagagggtggtggatcttctgaaccaggcggcgctgatcaccaatgactcaaagatcacagtgctcaaacaggtccaggagctgatcatcaacaaagaccccacactactggacaacttcctggatgagatcatcgcattccaagcagacaagtcaatcgaagtgcgaaaatttgtcatcggcttcatcgaggaggcatgcaagcgagacattgagttgctgctgaaactcattgcaaacctcaacatgctcttgagggacgagaatgtgaacgtggtgaagaaggctatcctcaccatgacccagctctacaaggtggccctgcagtggatggtaaagtcacgggtcattagcgagctacaggaggcctgctgggacatggtatctgccatggcgggggacatcatcctgctattggactctgacaatgacggcatccgcacccacgccatcaagtttgtggagggcctcattgtcaccctgtcaccccgcatggctgactcagagataccccgacgccaggagcatgatatcagcctggaccgcatccctcgtgaccacccctacatccagtacaacgtgctatgggaagagggcaaggcagccttggagcagctgcttaagttcatggtgcaccctgccatctcctccatcaacctgaccacagcgctgggctcccttgccaatatcgcccgccagagacccatgttcatgtctgaggtgatccaggcctatgaaactctgcatgccaacctgcccccgacgctggccaaatcgcaggtgagcagtgtgcgtaagaatctgaagctgcacctgttgagtgtgctgaagcacccggcttccttggagttccaggcccagatcaccaccctgctggtggacctgggcacacctcaggccgagatcgcccgcaacatgccgagcagcaaggacacccgcaagcggccccgcgatgactcggactccacactcaagaagatgaagctggagcccaacctgggggaggacgatgaggacaaagacttggagccaggcccgtcggggacctcgaaggcctcagcgcagatctccggccagtcagacacggacatcacagctgagttcctgcagcctctgctgacgcctgataatgtggctaatctggtcctcatcagcatggtgtacctacccgaggccatgccagcctccttccaggccatctacacccccgtggagtcagcaggcacggaagcccagatcaagcacctggctcggctcatggccacacagatgacagctgccggactgggaccaggtgtagagcagaccaaacagtgcaaggaggagcccaaggaggagaaggtggtgaagaaaattttccgtctcagcgacgtgctgaagccccttaccgatgcccaggtggaagccatgaagctgggcgctgtgaagcggatcctgcgggctgagaaggctgtggcctgcagcggggcagcccaggtccgcataaagatcctggccagcctggtgacacagttcaactcgggcctgaaggcggaggtcctgtccttcatcctggaggatgtgcgggcccgcctggacctggccttcgcctggctctaccaggagtacaacgcctacctggccgcaggtgcctcgggctccctggacaagtatgaggactgcctcatccgcctgttgtctggcctgcaggagaaaccagaccagaaggatgggatcttcaccaaggttgtgctggaggcgccactcatcacagagagtgccctggaggtggtccgcaagtactgcgaggatgagagtcgcacctatctgggcatgtccacacttcgagacctgatcttcaagcgcccgtcccgccagttccagtacctgcatgtcctcctcgacctcagctcccatgagaaggacaaggtgcgctcccaggccctgctgttcatcaaacgcatgtatgagaaggagcagctgcgggagtatgtggagaaatttgccctcaactacctgcagctcctggtgcaccccaacccaccgtctgtgctgtttggagctgacaaggacacagaggtggcagcaccctggacggaggagacagtgaagcagtgtctgtacctctacctggccctcctgcctcagaaccacaagctgatccacgaactggcggccgtgtacactgaagccatcgccgacatcaagcggacggtgctgagggtcattgagcagccgatccgaggaatgggcatgaactccccggagctgctcctgctggtggaaaattgtcccaagggagcagagacactggtcacgagatgtctgcacagcctcacagacaaagtcccaccctccccagagctggtgaagcgggtccgggatctctaccacaagcgactgccagacgtccgcttcctcatcccggtgctcaatgggctggagaagaaagaggtgatccaggccctgcctaaactcatcaaactcaaccccatcgtggtgaaggaagtcttcaaccgcctgctgggcacccagcatggtgagggaaactcagccttgtccccgctgaaccctggagagctcctgatcgcattacacaacattgactccgtgaagtgcgacatgaaatccatcatcaaagccaccaacctgtgctttgcggagcggaacgtgtacacgtcagaggtgctggccgtggtgatgcagcagctgatggagcagagccccctgcccatgctgctcatgaggaccgtcatccagtccctgaccatgtacccccgcctggggggcttcgtcatgaacatcctgtcccgcctcatcatgaagcaggtgtggaagtaccccaaggtgtgggagggcttcatcaagtgctgccagcgcacaaagccccagagcttccaggtcatcctgcagctgccgccccagcagctgggagccgtctttgacaagtgcccagagctccgggagcccctgctggcccatgtccgctccttcaccccccaccagcaagctcacatccctaactccatcatgaccatcttggaggccagcggcaagcaggagccagaggccaaggaggcgcctgcggggcccttggaggaggatgatctggagcccctgaccttggccccggccccagcaccccggccccctcaggacctcatcggcctgcgactggcccaggagaaggccttaaagcggcagctggaggaggaacagaagctgaagccgggaggagtgggagccccctcctcttcctccccctctccctctccgtcggcccggccaggcccgcccccgtctgaggaagccatggatttccgggaggaggggcctgagtgcgagaccccgggcatcttcatcagcatggatgacgactcggggctgaccgaggccgcgctgttggactctagtctcgagggccccctacccaaggagacggcagcgggcgggctgaccttgaaggaggagcggagcccccagaccctcgcacctgttggagaagatgctatgaagactcccagcccggctgccgaggacgccagggaacccgaggccaaggggaacagctgacggggctcgagggggaaagggggtgggacagggactcggggctgggggacggggcggggcttgacctgcgggtgctttgccttaaaaagaaataaaagatgtgaacttgggcaagttactgaaaag

SEQ ID NO: 323983 - DNA, 4118 bp, Homo sapiens
gaatgccgctcgcacgggacgaggcatgggcggggtcgggctgtgctctggactccatttcccggcggccctgggtgtgtggcgcgtgcgcaccgttcccggcgacgaacggaagatggcggcggcggcggcggcggagtgtaggaagaggcactgctgagggggcgcgaggggaacggaggccagagctgcgctgacagcagccatggcgagcggcagtggagacagcgtcacccgtcggagcgtggcatcacagtttttcactcaagaggaggggccgggcatcgatggcatgaccacctcagagagggtggtggatcttctgaaccaggcggcgctgatcaccaatgactcaaagatcacagtgctcaaacaggtccaggagctgatcatcaacaaagaccccacactactggacaacttcctggatgagatcatcgcattccaagcagacaagtcaatcgaacaagcgagacattgagttgctgctgaaactcattgcaaacctcaacatgctcttgagggacgagaatgtgaacgtggtgaagaaggctatcctcaccatgacccagctctacaaggtggccctgcagtggatggtaaagtcacgggtcattagcgagctacaggaggcctgctgggacatggtatctgccatggcgggggacatcatcctgctattggactctgacaatgacggcatccgcacccacgccatcaagtttgtggagggcctcattgtcaccctgtcaccccgcatggctgactcagagataccccgacgccaggagcatgatatcagcctggaccgcatccctcgtgaccacccctacatccagtacaacgtgctatgggaagagggcaaggcagccttggagcagctgcttaagttcatggtgcaccctgccatctcctccatcaacctgaccacagcgctgggctcccttgccaatatcgcccgccagagacccatgttcatgtctgaggtgatccaggcctatgaaactctgcatgccaacctgcccccgacgctggccaaatcgcaggtgagcagtgtgcgtaagaatctgaagctgcacctgttgagtgtgctgaagcacccggcttccttggagttccaggcccagatcaccaccctgctggtggacctgggcacacctcaggccgagatcgcccgcaacatgccgagcagcaaggacacccgcaagcggccccgcgatgactcggactccacactcaagaagatgaagctggagcccaacctgggggaggacgatgaggacaaagacttggagccaggcccgtcggggacctcgaaggcctcagcgcagatctccggccagtcagacacggacatcacagctgagttcctgcagcctctgctgacgcctgataatgtggctaatctggtcctcatcagcatggtgtacctacccgaggccatgccagcctccttccaggccatctacacccccgtggagtcagcaggcacggaagcccagatcaagcacctggctcggctcatggccacacagatgacagctgccggactgggaccaggtgtagagcagaccaaacagtgcaaggaggagcccaaggaggagaaggtggtgaagacagagagcgtcctgatcaagcggcgcctgtcagcccagggccaagccatctcggtggtgggttccctgagctccatgtcccccctggaggaagaggcaccgcaggccaagaggaggccagagcccattatccctgtcactcagccccggctggcaggcgctggtgggcgcaagaaaattttccgtctcagcgacgtgctgaagccccttaccgatgcccaggtggaagccatgaagctgggcgctgtgaagcggatcctgcgggctgagaaggctgtggcctgcagcggggcagcccaggtccgcataaagatcctggccagcctggtgacacagttcaactcgggcctgaaggcggaggtcctgtccttcatcctggaggatgtgcgggcccgcctggacctggccttcgcctggctctaccaggagtacaacgcctacctggccgcaggtgcctcgggctccctggacaagtatgaggactgcctcatccgcctgttgtctggcctgcaggagaaaccagaccagaaggatgggatcttcaccaaggttgtgctggaggcgccactcatcacagagagtgccctggaggtggtccgcaagtactgcgaggatgagagtcgcacctatctgggcatgtccacacttcgagacctgatcttcaagcgcccgtcccgccagttccagtacctgcatgtcctcctcgacctcagctcccatgagaaggacaaggtgcgctcccaggccctgctgttcatcaaacgcatgtatgagaaggagcagctgcgggagtatgtggagaaatttgccctcaactacctgcagctcctggtgcaccccaacccaccgtctgtgctgtttggagctgacaaggacacagaggtggcagcaccctggacggaggagacagtgaagcagtgtctgtacctctacctggccctcctgcctcagaaccacaagctgatccacgaactggcggccgtgtacactgaagccatcgccgacatcaagcggacggtgctgagggtcattgagcagccgatccgaggaatgggcatgaactccccggagctgctcctgctggtggaaaattgtcccaagggagcagagacactggtcacgagatgtctgcacagcctcacagacaaagtcccaccctccccagagctggtgaagcgggtccgggatctctaccacaagcgactgccagacgtccgcttcctcatcccggtgctcaatgggctggagaagaaagaggtgatccaggccctgcctaaactcatcaaactcaaccccatcgtggtgaaggaagtcttcaaccgcctgctgggcacccagcatggtgagggaaactcagccttgtccccgctgaaccctggagagctcctgatcgcattacacaacattgactccgtgaagtgcgacatgaaatccatcatcaaagccaccaacctgtgctttgcggagcggaacgtgtacacgtcagaggtgctggccgtggtgatgcagcagctgatggagcagagccccctgcccatgctgctcatgaggaccgtcatccagtccctgaccatgtacccccgcctggggggcttcgtcatgaacatcctgtcccgcctcatcatgaagcaggtgtggaagtaccccaaggtgtgggagggcttcatcaagtgctgccagcgcacaaagccccagagcttccaggtcatcctgcagctgccgccccagcagctgggagccgtctttgacaagtgcccagagctccgggagcccctgctggcccatgtccgctccttcaccccccaccagcaagctcacatccctaactccatcatgaccatcttggaggccagcggcaagcaggagccagaggccaaggaggcgcctgcggggcccttggaggaggatgatctggagcccctgaccttggccccggccccagcaccccggccccctcaggacctcatcggcctgcgactggcccaggagaaggccttaaagcggcagctggaggaggaacagaagctgaagccgggaggagtgggagccccctcctcttcctccccctctccctctccgtcggcccggccaggcccgcccccgtctgaggaagccatggatttccgggaggaggggcctgagtgcgagaccccgggcatcttcatcagcatggatgacgactcggggctgaccgaggccgcgctgttggactctagtctcgagggccccctacccaaggagacggcagcgggcgggctgaccttgaaggaggagcggagcccccagaccctcgcacctgttggagaagatgctatgaagactcccagcccggctgccgaggacgccagggaacccgaggccaaggggaacagctgacggggctcgagggggaaagggggtgggacagggactcggggctgggggacggggcggggcttgacctgcgggtgctttgccttaaaaagaaataaaagatgtgaacttgggcaagttactgaaaag

SEQ ID NO: 323984 - DNA, 3234 bp, Homo sapiens
gaatgccgctcgcacgggacgaggcatgggcggggtcgggctgtgctctggactccatttcccggcggccctgggtgtgtggcgcgtgcgcaccgttcccggcgacgaacggaagatggcggcggcggcggcggcggagtgtaggaagaggcactgctgagggggcgcgaggggaacggaggccagagctgcgctgacagcagccatggcgagcggcagtggagacagcgtcacccgtcggagcgtggcatcacagtttttcactcaagaggaggggccgggcatcgatggcatgaccacctcagagagggtggtggatcttctgaaccaggcggcgctgatcaccaatgactcaaagatcacagtgctcaaacaggtccaggagctgatcatcaacaaagaccccacactactggacaacttcctggatgagatcatcgcattccaagcagacaagtcaatcgaagtgcgaaaatttgtcatcggcttcatcgaggaggcatgcaagcgagacattgagttgctgctgaaactcattgcaaacctcaacatgctcttgagggacgagaatgtgaacgtggtgaagaaggctatcctcaccatgacccagctctacaaggtggccctgcagtggatggtaaagtcacgggtcattagcgagctacaggaggcctgctgggacatggtatctgccatggcgggggacatcatcctgctattggactctgacaatgacggcatccgcacccacgccatcaagtttgtggagggcctcattgtcaccctgtcaccccgcatggctgactcagagataccccgacgccaggagcatgatatcagcctggaccgcatccctcgtgaccacccctacatccagtacaacgtgctatgggaagagggcaaggcagccttggagcagctgcttaagttcatggtgcaccctgccatctcctccatcaacctgaccacagcgctgggctcccttgccaatatcgcccgccagagacccatgttcatgtctgaggtgatccaggcctatgaaactctgcatgccaacctgcccccgacgctggccaaatcgcaggtgagcagtgtgcgtaagaatctgaagctgcacctgttgagtgtgctgaagcacccggcttccttggagttccaggcccagatcaccaccctgctggtggacctgggcacacctcaggccgagatcgcccgcaacatgccgagcagcaaggacacccgcaagcggccccgcgatgactcggactccacactcaagaagatgaagctggagcccaacctgggggaggacgatgaggacaaagacttggagccaggcccgtcggggacctcgaaggcctcagcgcagatctccggccagtcagacacggacatcacagctgagttcctgcagcctctgctgacgcctgataatgtggctaatctggtcctcatcagcatggtgtacctacccgaggccatgccagcctccttccaggccatctacacccccgtggagtcagcaggcacggaagcccagatcaagcacctggctcggctcatggccacacagatgacagctgccggactgggaccaggtgtagagcagaccaaacagtgcaaggaggagcccaaggaggagaaggtggtgaagacagagagcgtcctgatcaagcggcgcctgtcagcccagggccaagccatctcggtggtgggttccctgagctccatgtcccccctggaggaagaggcaccgcaggccaagaggaggccagagcccattatccctgtcactcagccccggctggcaggcgctggtgggcgcaagaaaattttccgtctcagcgacgtgctgaagccccttaccgatgcccaggtggaagccatgaagctgggcgctgtgaagcggatcctgcgggctgagaaggctgtggcctgcagcggggcagcccaggtccgcataaagatcctggccagcctggtgacacagttcaactcgggcctgaaggcggaggtcctgtccttcatcctggaggatgtgcgggcccgcctggacctggccttcgcctggctctaccaggagtacaacgcctacctggccgcaggtgcctcgggctccctggacaagtatgaggactgcctcatccgcctgttgtctggcctgcaggagaaaccagaccagaaggatgggatcttcaccaaggttgtgctggaggcgccactcatcacagagagtgccctggaggtggtccgcaagtactgcgaggatgagagtcgcacctatctgggcatgtccacacttcgagacctgatcttcaagcgcccgtcccgccagttccagtacctgcatgtcctcctcgacctcagctcccatgagaaggacaaggtgcgctcccaggccctgctgttcatcaaacgcatgtatgagaaggagcagctgcgggagtatgtggagaaatttgccctcaactacctgcagctcctggtgcaccccaacccaccgtctgtgctgtttggagctgacaaggacacagaggtggcagcaccctggacggaggagacagtgaagcagtgtctgtacctctacctggccctcctgcctcagaaccacaagctgatccacgaactggcggccgtgtacactgaagccatcgccgacatcaagcggacggtgctgagggtcattgagcagccgatccgaggaatgggcatgaactccccggagctgctcctgctggtggaaaattgtcccaagggagcagagacactggtcacgagatgtctgcacagcctcacagacaaagtcccaccctccccagagctggtgaagcgggtccgggatctctaccacaagcgactgccagacgtccgcttcctcatcccggtgctcaatgggctggagaagaaagaggtgatccaggccctgcctaaactcatcaaactcaaccccatcgtggtgaaggaagtcttcaaccgcctgctgggcacccagcatggtgagggaaactcagccttgtccccgctgaaccctggagagctcctgatcgcattacacaacattgactccgtgaagtgcgacatgaaatccatcatcaaagccaccaacctgtgctttgcggagcggaacgtgtacacgtcagaggccctgctggaggagatcgagcgccacggcaagaaggtcgaggagtgccagaggtttgcgaaacagtacacctgccggtggagtacaacctg

SEQ ID NO: 323985 - DNA, 1786 bp, Homo sapiens
tggtgggactcctccatgtccgctccttcaccccccaccagcaagctcacatcctaactccatcatgaccatcttggaggccagcggcaagcaggagccagaggccaaggaggcgcctgcggggcccttggaggaggatgatctggagcccctgaccttggcccaggtggcagcaccctggacggaggagacagtgaagcagtgtctgtacctctacctggccctcctgcctcagaaccacaagctgatccacgaactggcggccgtgtacactgaagccatcgccgacatcaagcggacggtgctgagggtcattgagcagccgatccgaggaatgggcatgaactccccggagctgctcctgctggtggaaaattgtcccaagggagcagagacactggtcacgagatgtctgcacagcctcacagacaaagtcccaccctccccagagctggtgaagcgggtccgggatctctaccacaagcgactgccagacgtccgcttcctcatcccggtgctcaatgggctggagaagaaagaggtgatccaggccctgcctaaactcatcaaactcaaccccatcgtggtgaaggaagtcttcaaccgcctgctgggcacccagcatggtgagggaaactcagccttgtccccgctgaaccctggagagctcctgatcgcattacacaacattgactccgtgaagtgcgacatgaaatccatcatcaaagccaccaacctgtgctttgcggagcggaacgtgtacacgtcagaggtgctggccgtggtgatgcagcagctgatggagcagagccccctgcccatgctgctcatgaggaccgtcatccagtccctgaccatgtacccccgcctggggggcttcgtcatgaacatcctgtcccgcctcatcatgaagcaggtgtggaagtaccccaaggtgtgggagggcttcatcaagtgctgccagcgcacaaagccccagagcttccaggtcatcctgcagctgccgccccagcagctgggagccgtctttgacaagtgcccagagctccgggagcccctgctggcccatgtccgctccttcaccccccaccagcaagctcacatccctaactccatcatgaccatcttggaggccagcggcaagcaggagccagaggccaaggaggcgcctgcggggcccttggaggaggatgatctggagcccctgaccttggccccggccccagcaccccggccccctcaggacctcatcggcctgcgactggcccaggagaaggccttaaagcggcagctggaggaggaacagaagctgaagccgggaggagtgggagccccctcctcttcctccccctctccctctccgtcggcccggccaggcccgcccccgtctgaggaagccatggatttccgggaggaggggcctgagtgcgagaccccgggcatcttcatcagcatggatgacgactcggggctgaccgaggccgcgctgttggactctagtctcgagggccccctacccaaggagacggcagcgggcgggctgaccttgaaggaggagcggagcccccagaccctcgcacctgttggagaagatgctatgaagactcccagcccggctgccgaggacgccagggaacccgaggccaaggggaacagctgacggggctcgagggggaaagggggtgggacagggactcggggctgggggacggggcggggcttgacctgcgggtgctttgccttaaaaagaaataaaagatgtgaacttgggcaagttactgaaaag

SEQ ID NO: 323986 - DNA, 1556 bp, Homo sapiens
tgagccacagaggagtggcccgcaggaggacagcccagccagggctgggagctggagcaggcccatgtctggaggagctgcagggagatgccaagatccgaggaatgggcatgaactccccggagctgctcctgctggtggaaaattgtcccaagggagcagagacactggtcacgagatgtctgcacagcctcacagacaaagtcccaccctccccagagctggtgaagcgggtccgggatctctaccacaagcgactgccagacgtccgcttcctcatcccggtgctcaatgggctggagaagaaagaggtgatccaggccctgcctaaactcatcaaactcaaccccatcgtggtgaaggaagtcttcaaccgcctgctgggcacccagcatggtgagggaaactcagccttgtccccgctgaaccctggagagctcctgatcgcattacacaacattgactccgtgaagtgcgacatgaaatccatcatcaaagccaccaacctgtgctttgcggagcggaacgtgtacacgtcagaggtgctggccgtggtgatgcagcagctgatggagcagagccccctgcccatgctgctcatgaggaccgtcatccagtccctgaccatgtacccccgcctggggggcttcgtcatgaacatcctgtcccgcctcatcatgaagcaggtgtggaagtaccccaaggtgtgggagggcttcatcaagtgctgccagcgcacaaagccccagagcttccaggtcatcctgcagctgccgccccagcagctgggagccgtctttgacaagtgcccagagctccgggagcccctgctggcccatgtccgctccttcaccccccaccagcaagctcacatccctaactccatcatgaccatcttggaggccagcggcaagcaggagccagaggccaaggaggcgcctgcggggcccttggaggaggatgatctggagcccctgaccttggccccggccccagcaccccggccccctcaggacctcatcggcctgcgactggcccaggagaaggccttaaagcggcagctggaggaggaacagaagctgaagccgggaggagtgggagccccctcctcttcctccccctctccctctccgtcggcccggccaggcccgcccccgtctgaggaagccatggatttccgggaggaggggcctgagtgcgagaccccgggcatcttcatcagcatggatgacgactcggggctgaccgaggccgcgctgttggactctagtctcgagggccccctacccaaggagacggcagcgggcgggctgaccttgaaggaggagcggagcccccagaccctcgcacctgttggagaagatgctatgaagactcccagcccggctgccgaggacgccagggaacccgaggccaaggggaacagctgacggggctcgagggggaaagggggtgggacagggactcggggctgggggacggggcggggcttgacctgcgggtgctttgccttaaaaagaaataaaagatgtgaacttgggcaagttactgaaaag

SEQ ID NO: 323987 - DNA, 1658 bp, Homo sapiens
gaatgccgctcgcacgggacgaggcatgggcggggtcgggctgtgctctggactccatttcccggcggccctgggtgtgtggcgcgtgcgcaccgttcccggcgacgaacggaagatggcggcggcggcggcggcggagtgtaggaagaggcactgctgagggggcgcgaggggaacggaggccagagctgcgctgacagcagccatggcgagcggcagtggagacagcgtcacccgtcggagcaaattgtcccaagggagcagagacactggtcacgagatgtctgcacagcctcacagacaaagtcccaccctccccagagctggtgaagcgggtccgggatctctaccacaagcgactgccagacgtccgcttcctcatcccggtgctcaatgggctggagaagaaagaggtgatccaggccctgcctaaactcatcaaactcaaccccatcgtggtgaaggaagtcttcaaccgcctgctgggcacccagcatggtgagggaaactcagccttgtccccgctgaaccctggagagctcctgatcgcattacacaacattgactccgtgaagtgcgacatgaaatccatcatcaaagccaccaacctgtgctttgcggagcggaacgtgtacacgtcagaggtgctggccgtggtgatgcagcagctgatggagcagagccccctgcccatgctgctcatgaggaccgtcatccagtccctgaccatgtacccccgcctggggggcttcgtcatgaacatcctgtcccgcctcatcatgaagcaggtgtggaagtaccccaaggtgtgggagggcttcatcaagtgctgccagcgcacaaagccccagagcttccaggtcatcctgcagctgccgccccagcagctgggagccgtctttgacaagtgcccagagctccgggagcccctgctggcccatgtccgctccttcaccccccaccagcaagctcacatccctaactccatcatgaccatcttggaggccagcggcaagcaggagccagaggccaaggaggcgcctgcggggcccttggaggaggatgatctggagcccctgaccttggccccggccccagcaccccggccccctcaggacctcatcggcctgcgactggcccaggagaaggccttaaagcggcagctggaggaggaacagaagctgaagccgggaggagtgggagccccctcctcttcctccccctctccctctccgtcggcccggccaggcccgcccccgtctgaggaagccatggatttccgggaggaggggcctgagtgcgagaccccgggcatcttcatcagcatggatgacgactcggggctgaccgaggccgcgctgttggactctagtctcgagggccccctacccaaggagacggcagcgggcgggctgaccttgaaggaggagcggagcccccagaccctcgcacctgttggagaagatgctatgaagactcccagcccggctgccgaggacgccagggaacccgaggccaaggggaacagctgacggggctcgagggggaaagggggtgggacagggactcggggctgggggacggggcggggcttgacctgcgggtgctttgccttaaaaagaaataaaagatgtgaacttgggcaagttactgaaaag

SEQ ID NO: 323988 - DNA, 985 bp, Homo sapiens
  misc_feature (933)..(933): n is a, c, g, or t
gaatgccgctcgcacgggacgaggcatgggcggggtcgggctgtgctctggactccatttcccggcggccctgggtgtgtggcgcgtgcgcaccgttcccggcgacgaacggaagatggcggcggcggcggcggcggagtgtaggaagaggcactgctgagggggcgcgaggggaacggaggccagagctgcgctgacagcagccatggcgagcggcagtggagacagcgtcacccgtcggagcgtggcatcacagtttttcactcaagaggaggggccgggcatcgatggcatgaccacctcagagagggtggtggatcttctgaaccaggcggcgctgatcaccaatgactcaaagatcacagtgctcaaacaggtccaggagctgatcatcaacaaagaccccacactactggacaacttcctggatgagatcatcgcattccaagcagacaagtcaatcgaagtgcgaaaatttgtcatcggcttcatcgaggaggcatgcaagcgagacattgagttgctgctgaaactcattgcaaacctcaacatgctcttgagggacgagaatgtgaacgtggtgaagaaggctatcctcaccatgacccagctctacaaggtggccctgcagtggatggtaaagtcacgggtcattagcgagctacaggaggcctgctgggacatggtatctgccatggcgggggacatcatcctgctattggactctgacaatgacggcatccgcacccacgccatcaagtttgtggagggcctcattgtcaccctgtcaccccgcatggctgactcagagataccccgacgccaggagcatgatatcagcctggaccgcatccctcgtgaccacccctacatccagtacaacggaagatggcgcggcggcgcggcggagtgtaggaagaggcactgctgagngcgcgcgaggggaacgaggccagagctgcgtctgctgatggagggaccgctc

SEQ ID NO: 323989 - DNA, 827 bp, Homo sapiens
gaatgccgctcgcacgggacgaggcatgggcggggtcgggctgtgctctggactccatttcccggcggccctgggtgtgtggcgcgtgcgcaccgttcccggcgacgaacggaagatggcggcggcggcggcggcggagtgtaggaagaggcactgctgagggggcgcgaggggaacggaggccagagctgcggtgagcgggaggcggcgtttgggcccggagacgaaaggaggaggctcctaaagaagcaggggctcgggcggggagggcatcgccgtggggagaggggaacagtggctttcgcgacccatgtttcttcccttgctcaggacccttccttggctccctagtgccctcgaggcaaagttccaacgtggccccccgggcgccaccgccccgcagacctcgcttgcttcgactcggcctctttgctttttcccccacctctaacagccgccctggcctttcggttccttaaacttgccatgcgctttcccgcttcggggattttgcacaggctgtcccttccctgccctccatccagaaatccgcctgttaaatgcttttgtcggtccgtgttccttcatgtcacgtgtggtctaatttgttatccgactcttatctgtgtgctgttttatgatgtctatgaccgtgtgttccatgaaggtagggactaggtttgtctctgtcgccactgtgttctcagcacagcgccaatcacgccggagacgcccagctaatgttcgttgaaggaataaaagatactcctagagccagtttggggaaacagggtagtcatcagattcctaggtagcagtggggcagg

SEQ ID NO: 323990 - DNA, 222 bp, Homo sapiens
cagagagcgtcctgatcaagcggcgcctgtcagcccagggccaagccatctcggtggtgggttccctgagctccatgtcccccctggaggaagaggcaccgcaggccaagaggaggccagagcccattatccctgtcactcagccccggtgagtcctcttctgggtgctagggcaggacaggagccctaccctgaaggtctggttctcagctcgtgtgcgtg

SEQ ID NO: 323991 - DNA, 566 bp, Homo sapiens
agcagaaggctccagccactttttggaagcctgtagcctggctccatcttgccctgtgccacaaatgcccatgaccccctgtgccgcgttggagtctgtgttggggaccacacgaggaggtggtcctaccctgccctcgggggtgcacagcccaggggcagagagacccagccgtgccacacgctacccagggtgggagcccaggatggggaggagcacacagtggcaacctcacgctgcctgagggctgctgctgccttcggtgtcccctttttatgttgtcagtcgcttcccctgttccagccctgaaagcagagggcacctcatctttgctcgcagctcccccgatctggggaactcagacccatctcttcacttatgcgtccgcactgtcttcccccacccttcctcccgcctgctgcaggtgagggaaactcagccttgtccccgctgaaccctggagagctcctgatcgcattacacaacattgactccgtgaagtgcgacatgaaatccatcatcaaaggtgaggcgcttcccccccactccagtggcctggcccctgc

SEQ ID NO: 323992 - DNA, 4293 bp, Homo sapiens
gagagaggggacacacggagacctgcaaggtggctgttgcacgttcatgtggcccatcgttcagcagctgtttgtggttggcccacttgaggctgagacttctggctctgccttgggagatgtcagtctcccccaagttacaggccccgtgcacatatccataagccagagacagaccctggaggggagagggacttgagaaggcctgactggggaggaacagcctgggaaggaggcttgggccctttgtaggtgttcgggtgacaatccagcccagcccatccgctggttccctgagcttgatccatcctcttctttcctggggacaagctgacagcagccatggcgagcggcagtggagacagcgtcacccgtcggagcgtggcatcacagtttttcactcaagaggaggggccgggcatcgatggcatgaccacctcagagagggtggtggatcttctgaaccaggcggcgctgatcaccaatgactcaaagatcacagtgctcaaacaggtccaggagctgatcatcaacaaagaccccacactactggacaacttcctggatgagatcatcgcattccaagcagacaagtcaatcgaagtgcgaaaatttgtcatcggcttcatcgaggaggcatgcaagcgagacattgagttgctgctgaaactcattgcaaacctcaacatgctcttgagggacgagaatgtgaacgtggtgaagaaggctatcctcaccatgacccagctctacaaggtggccctgcagtggatggtaaagtcacgggtcattagcgagctacaggaggcctgctgggacatggtatctgccatggcgggggacatcatcctgctattggactctgacaatgacggcatccgcacccacgccatcaagtttgtggagggcctcattgtcaccctgtcaccccgcatggctgactcagagataccccgacgccaggagcatgatatcagcctggaccgcatccctcgtgaccacccctacatccagtacaacgtgctatgggaagagggcaaggcagccttggagcagctgcttaagttcatggtgcaccctgccatctcctccatcaacctgaccacagcgctgggctcccttgccaatatcgcccgccagagacccatgttcatgtctgaggtgatccaggcctatgaaactctgcatgccaacctgcccccgacgctggccaaatcgcaggtgagcagtgtgcgtaagaatctgaagctgcacctgttgagtgtgctgaagcacccggcttccttggagttccaggcccagatcaccaccctgctggtggacctgggcacacctcaggccgagatcgcccgcaacatgccgagcagcaaggacacccgcaagcggccccgcgatgactcggactccacactcaagaagatgaagctggagcccaacctgggggaggacgatgaggacaaagacttggagccaggcccgtcggggacctcgaaggcctcagcgcagatctccggccagtcagacacggacatcacagctgagttcctgcagcctctgctgacgcctgataatgtggctaatctggtcctcatcagcatggtgtacctacccgaggccatgccagcctccttccaggccatctacacccccgtggagtcagcaggcacggaagcccagatcaagcacctggctcggctcatggccacacagatgacagctgccggactgggaccaggtgtagagcagaccaaacagtgcaaggaggagcccaaggaggagaaggtggtgaagacagagagcgtcctgatcaagcggcgcctgtcagcccagggccaagccatctcggtggtgggttccctgagctccatgtcccccctggaggaagaggcaccgcaggccaagaggaggccagagcccattatccctgtcactcagccccggctggcaggcgctggtgggcgcaagaaaattttccgtctcagcgacgtgctgaagccccttaccgatgcccaggtggaagccatgaagctgggcgctgtgaagcggatcctgcgggctgagaaggctgtggcctgcagcggggcagcccaggtccgcataaagatcctggccagcctggtgacacagttcaactcgggcctgaaggcggaggtcctgtccttcatcctggaggatgtgcgggcccgcctggacctggccttcgcctggctctaccaggagtacaacgcctacctggccgcaggtgcctcgggctccctggacaagtatgaggactgcctcatccgcctgttgtctggcctgcaggagaaaccagaccagaaggatgggatcttcaccaaggttgtgctggaggcgccactcatcacagagagtgccctggaggtggtccgcaagtactgcgaggatgagagtcgcacctatctgggcatgtccacacttcgagacctgatcttcaagcgcccgtcccgccagttccagtacctgcatgtcctcctcgacctcagctcccatgagaaggacaaggtgcgctcccaggccctgctgttcatcaaacgcatgtatgagaaggagcagctgcgggagtatgtggagaaatttgccctcaactacctgcagctcctggtgcaccccaacccaccgtctgtgctgtttggagctgacaaggacacagaggtggcagcaccctggacggaggagacagtgaagcagtgtctgtacctctacctggccctcctgcctcagaaccacaagctgatccacgaactggcggccgtgtacactgaagccatcgccgacatcaagcggacggtgctgagggtcattgagcagccgatccgaggaatgggcatgaactccccggagctgctcctgctggtggaaaattgtcccaagggagcagagacactggtcacgagatgtctgcacagcctcacagacaaagtcccaccctccccagagctggtgaagcgggtccgggatctctaccacaagcgactgccagacgtccgcttcctcatcccggtgctcaatgggctggagaagaaagaggtgatccaggccctgcctaaactcatcaaactcaaccccatcgtggtgaaggaagtcttcaaccgcctgctgggcacccagcatggtgagggaaactcagccttgtccccgctgaaccctggagagctcctgatcgcattacacaacattgactccgtgaagtgcgacatgaaatccatcatcaaagccaccaacctgtgctttgcggagcggaacgtgtacacgtcagaggtgctggccgtggtgatgcagcagctgatggagcagagccccctgcccatgctgctcatgaggaccgtcatccagtccctgaccatgtacccccgcctggggggcttcgtcatgaacatcctgtcccgcctcatcatgaagcaggtgtggaagtaccccaaggtgtgggagggcttcatcaagtgctgccagcgcacaaagccccagagcttccaggtcatcctgcagctgccgccccagcagctgggagccgtctttgacaagtgcccagagctccgggagcccctgctggcccatgtccgctccttcaccccccaccagcaagctcacatccctaactccatcatgaccatcttggaggccagcggcaagcaggagccagaggccaaggaggcgcctgcggggcccttggaggaggatgatctggagcccctgaccttggccccggccccagcaccccggccccctcaggacctcatcggcctgcgactggcccaggagaaggccttaaagcggcagctggaggaggaacagaagctgaagccgggaggagtgggagccccctcctcttcctccccctctccctctccgtcggcccggccaggcccgcccccgtctgaggaagccatggatttccgggaggaggggcctgagtgcgagaccccgggcatcttcatcagcatggatgacgactcggggctgaccgaggccgcgctgttggactctagtctcgagggccccctacccaaggagacggcagcgggcgggctgaccttgaaggaggagcggagcccccagaccctcgcacctgttggagaagatgctatgaagactcccagcccggctgccgaggacgccagggaacccgaggccaaggggaacagctgacggggctcgagggggaaagggggtgggacagggactcggggctgggggacggggcggggcttgacctgcgggtgctttgccttaaaaagaaataaaagatgtgaacttgggcaagttactgaaaag

SEQ ID NO: 323993 - DNA, 3797 bp, Homo sapiens
ccccaatctccttccaggtccaggagctgatcatcaacaaagaccccacactactggacaacttcctggatgagatcatcgcattccaagcagacaagtcaatcgaagtgcgaaaatttgtcatcggcttcatcgaggaggcatgcaagcgagacattgagttgctgctgaaactcattgcaaacctcaacatgctcttgagggacgagaatgtgaacgtggtgaagaaggctatcctcaccatgacccagctctacaaggtggccctgcagtggatggtaaagtcacgggtcattagcgagctacaggaggcctgctgggacatggtatctgccatggcgggggacatcatcctgctattggactctgacaatgacggcatccgcacccacgccatcaagtttgtggagggcctcattgtcaccctgtcaccccgcatggctgactcagagataccccgacgccaggagcatgatatcagcctggaccgcatccctcgtgaccacccctacatccagtacaacgtgctatgggaagagggcaaggcagccttggagcagctgcttaagttcatggtgcaccctgccatctcctccatcaacctgaccacagcgctgggctcccttgccaatatcgcccgccagagacccatgttcatgtctgaggtgatccaggcctatgaaactctgcatgccaacctgcccccgacgctggccaaatcgcaggtgagcagtgtgcgtaagaatctgaagctgcacctgttgagtgtgctgaagcacccggcttccttggagttccaggcccagatcaccaccctgctggtggacctgggcacacctcaggccgagatcgcccgcaacatgccgagcagcaaggacacccgcaagcggccccgcgatgactcggactccacactcaagaagatgaagctggagcccaacctgggggaggacgatgaggacaaagacttggagccaggcccgtcggggacctcgaaggcctcagcgcagatctccggccagtcagacacggacatcacagctgagttcctgcagcctctgctgacgcctgataatgtggctaatctggtcctcatcagcatggtgtacctacccgaggccatgccagcctccttccaggccatctacacccccgtggagtcagcaggcacggaagcccagatcaagcacctggctcggctcatggccacacagatgacagctgccggactgggaccaggtgtagagcagaccaaacagtgcaaggaggagcccaaggaggagaaggtggtgaagacagagagcgtcctgatcaagcggcgcctgtcagcccagggccaagccatctcggtggtgggttccctgagctccatgtcccccctggaggaagaggcaccgcaggccaagaggaggccagagcccattatccctgtcactcagccccggctggcaggcgctggtgggcgcaagaaaattttccgtctcagcgacgtgctgaagccccttaccgatgcccaggtggaagccatgaagctgggcgctgtgaagcggatcctgcgggctgagaaggctgtggcctgcagcggggcagcccaggtccgcataaagatcctggccagcctggtgacacagttcaactcgggcctgaaggcggaggtcctgtccttcatcctggaggatgtgcgggcccgcctggacctggccttcgcctggctctaccaggagtacaacgcctacctggccgcaggtgcctcgggctccctggacaagtatgaggactgcctcatccgcctgttgtctggcctgcaggagaaaccagaccagaaggatgggatcttcaccaaggttgtgctggaggcgccactcatcacagagagtgccctggaggtggtccgcaagtactgcgaggatgagagtcgcacctatctgggcatgtccacacttcgagacctgatcttcaagcgcccgtcccgccagttccagtacctgcatgtcctcctcgacctcagctcccatgagaaggacaaggtgcgctcccaggccctgctgttcatcaaacgcatgtatgagaaggagcagctgcgggagtatgtggagaaatttgccctcaactacctgcagctcctggtgcaccccaacccaccgtctgtgctgtttggagctgacaaggacacagaggtggcagcaccctggacggaggagacagtgaagcagtgtctgtacctctacctggccctcctgcctcagaaccacaagctgatccacgaactggcggccgtgtacactgaagccatcgccgacatcaagcggacggtgctgagggtcattgagcagccgatccgaggaatgggcatgaactccccggagctgctcctgctggtggaaaattgtcccaagggagcagagacactggtcacgagatgtctgcacagcctcacagacaaagtcccaccctccccagagctggtgaagcgggtccgggatctctaccacaagcgactgccagacgtccgcttcctcatcccggtgctcaatgggctggagaagaaagaggtgatccaggccctgcctaaactcatcaaactcaaccccatcgtggtgaaggaagtcttcaaccgcctgctgggcacccagcatggtgagggaaactcagccttgtccccgctgaaccctggagagctcctgatcgcattacacaacattgactccgtgaagtgcgacatgaaatccatcatcaaagccaccaacctgtgctttgcggagcggaacgtgtacacgtcagaggtgctggccgtggtgatgcagcagctgatggagcagagccccctgcccatgctgctcatgaggaccgtcatccagtccctgaccatgtacccccgcctggggggcttcgtcatgaacatcctgtcccgcctcatcatgaagcaggtgtggaagtaccccaaggtgtgggagggcttcatcaagtgctgccagcgcacaaagccccagagcttccaggtcatcctgcagctgccgccccagcagctgggagccgtctttgacaagtgcccagagctccgggagcccctgctggcccatgtccgctccttcaccccccaccagcaagctcacatccctaactccatcatgaccatcttggaggccagcggcaagcaggagccagaggccaaggaggcgcctgcggggcccttggaggaggatgatctggagcccctgaccttggccccggccccagcaccccggccccctcaggacctcatcggcctgcgactggcccaggagaaggccttaaagcggcagctggaggaggaacagaagctgaagccgggaggagtgggagccccctcctcttcctccccctctccctctccgtcggcccggccaggcccgcccccgtctgaggaagccatggatttccgggaggaggggcctgagtgcgagaccccgggcatcttcatcagcatggatgacgactcggggctgaccgaggccgcgctgttggactctagtctcgagggccccctacccaaggagacggcagcgggcgggctgaccttgaaggaggagcggagcccccagaccctcgcacctgttggagaagatgctatgaagactcccagcccggctgccgaggacgccagggaacccgaggccaaggggaacagctgacggggctcgagggggaaagggggtgggacagggactcggggctgggggacggggcggggcttgacctgcgggtgctttgccttaaaaagaaataaaagatgtgaacttgggcaagttactgaaaag

SEQ ID NO: 323994 - DNA, 4094 bp, Homo sapiens
gaatgccgctcgcacgggacgaggcatgggcggggtcgggctgtgctctggactccatttcccggcggccctgggtgtgtggcgcgtgcgcaccgttcccggcgacgaacggaagatggcggcggcggcggcggcggagtgtaggaagaggcactgctgagggggcgcgaggggaacggaggccagagctgcgctgacagcagccatggcgagcggcagtggagacagcgtcacccgtcggagcgtggcatcacagtttttcactcaagaggaggggccgggcatcgatggcatgaccacctcagagagggtggtggatcttctgaaccaggcggcgctgatcaccaatgactcaaagatcacagtgctcaaacaggtccaggagctgatcatcaacaaagaccccacactactggacaacttcctggatgagatcatcgcattccaagcagacaagtcaatcgaagtgcgaaaatttgtcatcggcttcatcgaggaggcatgcaagcgagacattgagttgctgctgaaactcattgcaaacctcaacatgctcttgagggacgagaatgtgaacgtggtgaagaaggctatcctcaccatgacccagctctacaaggtggccctgcagtggatggtaaagtcacgggtcattagcgagctacaggaggcctgctgggacatggtatctgccatggcgggggacatcatcctgctattggactctgacaatgacggcatccgcacccacgccatcaagtttgtggagggcctcattgtcaccctgtcaccccgcatggctgactcagagataccccgacgccaggagcatgatatcagcctggaccgcatccctcgtgaccacccctacatccagtacaacgtgctatgggaagagggcaaggcagccttggagcagctgcttaagttcatggtgcaccctgccatctcctccatcaacctgaccacagcgctgggctcccttgccaatatcgcccgccagagacccatgttcatgtctgaggtgatccaggcctatgaaactctgcatgccaacctgcccccgacgctggccaaatcgcaggtgagcagtgtgcgtaagaatctgaagctgcacctgttgagtgtgctgaagcacccggcttccttggagttccaggcccagatcaccaccctgctggtggacctgggcacacctcaggccgagatcgcccgcaacatgccgagcagcaaggacacccgcaagcggccccgcgatgactcggactccacactcaagaagatgaagctggagcccaacctgggggaggacgatgaggacaaagacttggagccaggcccgtcggggacctcgaaggcctcagcgcagatctccggccagtcagacacggacatcacagctgagttcctgcagcctctgctgacgcctgataatgtggctaatctggtcctcatcagcatggtgtacctacccgaggccatgccagcctccttccaggccatctacacccccgtggagtcagcaggcacggaagcccagatcaagcacctggctcggctcatggccacacagatgacagctgccggactgggaccaggtgtagagcagaccaaacagtgcaaggaggagcccaaggaggagaaggtggtgaagacagagagcgtcctgatcaagcggcgcctgtcagcccagggccaagccatctcggtggtgggttccctgagctccatgtcccccctggaggaagaggcaccgcaggccaagaggaggccagagcccattatccctgtcactcagccccggctggcaggcgctggtgggcgcaagaaaattttccgtctcagcgacgtgctgaagccccttaccgatgcccaggtggaagccatgaagctgggcgctgtgaagcggatcctgcgggctgagaaggctgtggcctgcagcggggcagcccaggtccgcataaagatcctggccagcctggtgacacagttcaactcgggcctgaaggcggaggtcctgtccttcatcctggaggatgtgcgggcccgcctggacctggccttcgcctggctctaccaggagtacaacgcctacctggccgcaggtgcctcgggctccctggacaagtatgaggactgcctcatccgcctgttgtctggcctgcaggagaaaccagaccagaaggatgggatcttcaccaaggttgtgctggaggcgccactcatcacagagagtgccctggaggtggtccgcaagtactgcgaggatgagagtcgcacctatctgggcatgtccacacttcgagacctgatcttcaagcgcccgtcccgccagttccagtacctgcatgtcctcctcgacctcagctcccatgagaaggacaaggtgcgctcccaggccctgctgttcatcaaacgcatgtatgagaaggagcagctgcgggagtatgtggagaaatttgccctcaactacctgcagctcctggtgcaccccaacccaccgtctgtgctgtttggagctgacaaggacacagaggtggcagcaccctggacggaggagacagtgaagcagtgtctgtacctctacctggccctcctgcctcagaaccacaagctgatccacgaactggcggccgtgtacactgaagccatcgccgacatcaagcggacggtgctgagggtcattgagcagccgatccgaggaatgggcatgaactccccggagctgctcctgctggtggatcccaccctccccagagctggtgaagcgggtccgggatctctaccacaagcgactgccagacgtccgcttcctcatcccggtgctcaatgggctggagaagaaagaggtgatccaggccctgcctaaactcatcaaactcaaccccatcgtggtgaaggaagtcttcaaccgcctgctgggcacccagcatggtgagggaaactcagccttgtccccgctgaaccctggagagctcctgatcgcattacacaacattgactccgtgaagtgcgacatgaaatccatcatcaaagccaccaacctgtgctttgcggagcggaacgtgtacacgtcagaggtgctggccgtggtgatgcagcagctgatggagcagagccccctgcccatgctgctcatgaggaccgtcatccagtccctgaccatgtacccccgcctggggggcttcgtcatgaacatcctgtcccgcctcatcatgaagcaggtgtggaagtaccccaaggtgtgggagggcttcatcaagtgctgccagcgcacaaagccccagagcttccaggtcatcctgcagctgccgccccagcagctgggagccgtctttgacaagtgcccagagctccgggagcccctgctggcccatgtccgctccttcaccccccaccagcaagctcacatccctaactccatcatgaccatcttggaggccagcggcaagcaggagccagaggccaaggaggcgcctgcggggcccttggaggaggatgatctggagcccctgaccttggccccggccccagcaccccggccccctcaggacctcatcggcctgcgactggcccaggagaaggccttaaagcggcagctggaggaggaacagaagctgaagccgggaggagtgggagccccctcctcttcctccccctctccctctccgtcggcccggccaggcccgcccccgtctgaggaagccatggatttccgggaggaggggcctgagtgcgagaccccgggcatcttcatcagcatggatgacgactcggggctgaccgaggccgcgctgttggactctagtctcgagggccccctacccaaggagacggcagcgggcgggctgaccttgaaggaggagcggagcccccagaccctcgcacctgttggagaagatgctatgaagactcccagcccggctgccgaggacgccagggaacccgaggccaaggggaacagctgacggggctcgagggggaaagggggtgggacagggactcggggctgggggacggggcggggcttgacctgcgggtgctttgccttaaaaagaaataaaagatgtgaacttgggcaagttactgaaaag

SEQ ID NO: 323995 - DNA, 3240 bp, Homo sapiens
gaatgccgctcgcacgggacgaggcatgggcggggtcgggctgtgctctggactccatttcccggcggccctgggtgtgtggcgcgtgcgcaccgttcccggcgacgaacggaagatggcggcggcggcggcggcggagtgtaggaagaggcactgctgagggggcgcgaggggaacggaggccagagctgcgctgacagcagccatggcgagcggcagtggagacagcgtcacccgtcggagcgtggcatcacagtttttcactcaagaggaggggccgggcatcgatggcatgaccacctcagagagggtggtggatcttctgaaccaggcggcgctgatcaccaatgactcaaagatcacagtgctcaaacaggtccaggagctgatcatcaacaaagaccccacactactggacaacttcctggatgagatcatcgcattccaagcagacaagtcaatcgaagtgcgaaaatttgtcatcggcttcatcgaggaggcatgcaagcgagacattgagttgctgctgaaactcattgcaaacctcaacatgctcttgagggacgagaatgtgaacgtggtgaagaaggctatcctcaccatgacccagctctacaaggtggccctgcagtggatggtaaagtcacgggtcattagcgagctacaggaggcctgctgggacatggtatctgccatggcgggggacatcatcctgctattggactctgacaatgacggcatccgcacccacgccatcaagtttgtggagggcctcattgtcaccctgtcaccccgcatggctgactcagagataccccgacgccaggagcatgatatcagcctggaccgcatccctcgtgaccacccctacatccagtacaacgtgctatgggaagagggcaaggcagccttggagcagctgcttaagttcatggtgcaccctgccatctcctccatcaacctgaccacagcgctgggctcccttgccaatatcgcccgccagagacccatgttcatgtctgaggtgatccaggcctatgaaactctgcatgccaacctgcccccgacgctggccaaatcgcaggtgagcagtgtgcgtaagaatctgaagctgcacctgttgagtgtgctgaagcacccggcttccttggagttccaggcccagatcaccaccctgctggtggacctgggcacacctcaggccgagatcgcccgcaacatgccgagcagcaaggacacccgcaagcggccccgcgatgactcggactccacactcaagaagatgaagctggagcccaacctgggggaggacgatgaggacaaagacttggagccaggcccgtcggggacctcgaaggcctcagcgcagatctccggccagtcagacacggacatcacagctgagttcctgcagcctctgctgacgcctgataatgtggctaatctggtcctcatcagcatggtgtacctacccgaggccatgccagcctccttccaggccatctacacccccgtggagtcagcaggcacggaagcccagatcaagcacctggctcggctcatggccacacagatgacagctgccggactgggaccaggtgtagagcagaccaaacagtgcaaggaggagcccaaggaggagaaggtggtgaagacagagagcgtcctgatcaagcggcgcctgtcagcccagggccaagccatctcggtggtgggttccctgagctccatgtcccccctggaggaagaggcaccgcaggccaagaggaggccagagcccattatccctgtcactcagccccggctggcaggcgctggtgggcgcaagaaaattttccgtctcagcgacgtgctgaagccccttaccgatgcccaggtggaagccatgaagctgggcgctgtgaagcggatcctgcgggctgagaaggctgtggcctgcagcggggcagcccaggtccgcataaagatcctggccagcctggtgacacagttcaactcgggcctgaaggcggaggtcctgtccttcatcctggaggatgtgcgggcccgcctggacctggccttcgcctggctctaccaggagtacaacgcctacctggccgcaggtgcctcgggctccctggacaagtatgaggactgcctcatccgcctgttgtctggcctgcaggagaaaccagaccagaaggatgggatcttcaccaaggttgtgctggaggcgccactcatcacagagagtgccctggaggtggtccgcaagtactgcgaggatgagagtcgcacctatctgggcatgtccacacttcgagacctgatcttcaagcgcccgtcccgccagttccagtacctgcatgtcctcctcgacctcagctcccatgagaaggacaaggtgcgctcccaggccctgctgttcatcaaacgcatgtatgagaaggagcagctgcgggagtatgtggagaaatttgccctcaactacctgcagctcctggtgcaccccaacccaccgtctgtgctgtttggagctgacaaggacacagaggtggcagcaccctggacggaggagacagtgaagcagtgtctgtacctctacctggccctcctgcctcagaaccacaagctgatccacgaactggcggccgtgtacactgaagccatcgccgacatcaagcggacggtgctgagggtcattgagcagccggtgaggcccctgagcccaccaggccctgcccacccacgggcaaggctgtgtccccagctccagctcttccccaacctgctccacctcagagtgtgccaagcccgaagggtggtcaccccgggccgacccaggctgtgtagcttgcaggcggtccgcatgtcactcctgaggaaacgtcaagtggcccggcagttaggagcttggagctgatagacctgggttcgcgttcacttctcgctttctcactgcgaccttgggcccgtcagtaaaaatggggaagacgttccagtccctccacgctgatgcaaggagtccatgaactcaggcacataaacctctgtgttactgtcactttatgagctggccttcctggtgttgctaacgggactctttagctgtcattacataaacataagtccttcctgcccctctctctagaggcacagggctgcccacatgagaagcagctcagtgacagactagcacttgagattaaaaggtctgctcttccagtttgcaaaaaaaaagtcgacgcggccgcgaat

SEQ ID NO: 323996 - DNA, 1483 bp, Homo sapiens
tcatccctgtctctgcctctagatccgaggaatgggcatgaactccccggagctgctcctgctggtggaaaattgtcccaagggagcagagacactggtcacgagatgtctgcacagcctcacagacaaagtcccaccctccccagagctggtgaagcgggtccgggatctctaccacaagcgactgccagacgtccgcttcctcatcccggtgctcaatgggctggagaagaaagaggtgatccaggccctgcctaaactcatcaaactcaaccccatcgtggtgaaggaagtcttcaaccgcctgctgggcacccagcatggtgagggaaactcagccttgtccccgctgaaccctggagagctcctgatcgcattacacaacattgactccgtgaagtgcgacatgaaatccatcatcaaagccaccaacctgtgctttgcggagcggaacgtgtacacgtcagaggtgctggccgtggtgatgcagcagctgatggagcagagccccctgcccatgctgctcatgaggaccgtcatccagtccctgaccatgtacccccgcctggggggcttcgtcatgaacatcctgtcccgcctcatcatgaagcaggtgtggaagtaccccaaggtgtgggagggcttcatcaagtgctgccagcgcacaaagccccagagcttccaggtcatcctgcagctgccgccccagcagctgggagccgtctttgacaagtgcccagagctccgggagcccctgctggcccatgtccgctccttcaccccccaccagcaagctcacatccctaactccatcatgaccatcttggaggccagcggcaagcaggagccagaggccaaggaggcgcctgcggggcccttggaggaggatgatctggagcccctgaccttggccccggccccagcaccccggccccctcaggacctcatcggcctgcgactggcccaggagaaggccttaaagcggcagctggaggaggaacagaagctgaagccgggaggagtgggagccccctcctcttcctccccctctccctctccgtcggcccggccaggcccgcccccgtctgaggaagccatggatttccgggaggaggggcctgagtgcgagaccccgggcatcttcatcagcatggatgacgactcggggctgaccgaggccgcgctgttggactctagtctcgagggccccctacccaaggagacggcagcgggcgggctgaccttgaaggaggagcggagcccccagaccctcgcacctgttggagaagatgctatgaagactcccagcccggctgccgaggacgccagggaacccgaggccaaggggaacagctgacggggctcgagggggaaagggggtgggacagggactcggggctgggggacggggcggggcttgacctgcgggtgctttgccttaaaaagaaataaaagatgtgaacttgggcaagttactgaaaag

SEQ ID NO: 323997 - DNA, 2607 bp, Homo sapiens
gaatgccgctcgcacgggacgaggcatgggcggggtcgggctgtgctctggactccatttcccggcggccctgggtgtgtggcgcgtgcgcaccgttcccggcgacgaacggaagatggcggcggcggcggcggcggagtgtaggaagaggcactgctgagggggcgcgaggggaacggaggccagagctgcgctgacagcagccatggcgagcggcagtggagacagcgtcacccgtcggagcgtggcatcacagtttttcactcaagaggaggggccgggcatcgatggcatgaccacctcagagagggtggtggatcttctgaaccaggcggcgctgatcaccaatgactcaaagatcacagtgctcaaacaggtccaggagctgatcatcaacaaagaccccacactactggacaacttcctggatgagatcatcgcattccaagcagacaagtcaatcgaagtgcgaaaatttgtcatcggcttcatcgaggaggcatgcaagcgagacattgagttgctgctgaaactcattgcaaacctcaacatgctcttgagggacgagaatgtgaacgtggtgaagaaggctatcctcaccatgacccagctctacaaggtggccctgcagtggatggtaaagtcacgggtcattagcgagctacaggaggcctgctgggacatggtatctgccatggcgggggacatcatcctgctattggactctgacaatgacggcatccgcacccacgccatcaagtttgtggagggcctcattgtcaccctgtcaccccgcatggctgactcagagataccccgacgccaggagcatgatatcagcctggaccgcatccctcgtgaccacccctacatccagtacaacgtgctatgggaagagggcaaggcagccttggagcagctgcttaagttcatggtgcaccctgccatctcctccatcaacctgaccacagcgctgggctcccttgccaatatcgcccgccagagacccatgttcatgtctgaggtgatccaggcctatgaaactctgcatgccaacctgcccccgacgctggccaaatcgcaggtgagcagtgtgcgtaagaatctgaagctgcacctgttgagtgtgctgaagcacccggcttccttggagttccaggcccagatcaccaccctgctggtggacctgggcacacctcaggccgagatcgcccgcaacatgccgagcagcaaggacacccgcaagcggccccgcgatgactcggactccacactcaagaagatgaagctggagcccaacctgggggaggacgatgaggacaaagacttggagccaggcccgtcggggacctcgaaggcctcagcgcagatctccggccagtcagacacggacatcacagctgagttcctgcagcctctgctgacgcctgataatgtggctaatctggtcctcatcagcatggtgtacctacccgaggccatgccagcctccttccaggccatctacacccccgtggagtcagcaggcacggaagcccagatcaagcacctggctcggctcatggccacacagatgacagctgccggactgggaccaggtgtagagcagaccaaacagtgcaaggaggagcccaaggaggagaaggtggtgaagacagagagcgtcctgatcaagcggcgcctgtcagcccagggccaagccatctcggtggtgggttccctgagctccatgtcccccctggaggaagaggcaccgcaggccaagaggaggccagagcccattatccctgtcactcagccccggctggcaggcgctggtgggcgcaagaaaattttccgtctcagcgacgtgctgaagccccttaccgatgcccaggtggaagccatgaagctgggcgctgtgaagcggatcctgcgggctgagaaggctgtggcctgcagcggggcagcccaggtccgcataaagatcctggccagcctggtgacacagttcaactcgggcctgaaggcggaggtcctgtccttcatcctggaggatgtgcgggcccgcctggacctggccttcgcctggctctaccaggagtacaacgcctacctggccgcaggtgcctcgggctccctggacaagtatgaggactgcctcatccgcctgttgtctggcctgcaggagaaaccagaccagaaggatgggtgagggggctgaccctgcaccctcctgtccccaagaggcttcctctcctggtgctgccctccctttctgattgcgaccacctccctcttcgtcaccccccgagtcagtcctcctcgcacccatcccaagtctcctctcctcctccccctctggaggcacgttcaaggttgtagttttgcatgtgggctccaggtcgcactccctgagctgttcctcagctctgccacttgctctgagcttgctctgcgtggctttgtcactccctctctctgccattttcccatctgtaaataacagtgctcacccatgggcctggagatagacttctctacaccccattcactacctgagttggttctgtagcttcctccctatccgtggcctccagcttactcgtctatcctccacacagcagc

SEQ ID NO: 323998 - DNA, 291 bp, Homo sapiens
agcccaacctgggggaggacgatgaggacaaagacttggagccaggcccgtcggggacctcgaaggcctcagcgcagatctccggccagtcagacacggacatcacagctgagttcctgcagcctctgctgacgcctgataatgtggctaatctggtgaggatgggtggggagcgttttccccctgggcaggaaggaaggatctcctcggtctttcacctgcctccacttcacaccatccacctcctccagagtaccctcctaattaataaagaaaaggggtttaattggc

SEQ ID NO: 323999 - DNA, 367 bp, Homo sapiens
ctttgcggagcggaacgtgtacacgtcagaggtgctggccgtggtgatgcagcagctgatggagcagagccccctgcccatgctgctcatgaggaccgtcatccagtccctgaccatgtacccccgcctggggggcttcgtcatgaacatcctgtcccgcctcatcatgaagcaggtaacccatccccggccaccccgcctccaggctgcagacagcagcttctagcctgcttgccctccccttcccccgtctgaccccggagggagcccggtggaggacagcaggctctgctctgcctcctgccaagaaaatagcagtgctccagggtgtatgactgggccagctcccaggtgatgagggagggca

SEQ ID NO: 324000 - DNA, 728 bp, Homo sapiens
ggcacgagggagccgcagcccgagcggcggggtgaccatggaggaagaagatgagtctcgagggaagacagaggagtcgggggaggatcggggcgatggtccgccagacagagaccccacgctttctccttctgcctttatcctgcgagccatccagcaggctgtgggaagctccctgcagggggacctgcccaatgataaagatggctctcggtgtcatggccttcgatggcggcgctgccggagtccacggtcagagccccgttcccaggaatcagggggcactgacacggctactgtgttggacatggccacggacagcttcctcgcagggctggtgagtgtcctggatcccccggatacctgggttcccagccgcctggacctgcggcctggcgaaagtgaggacatgctggagctggtggctgaggtccgaatcggggacagagatcccatccctctgcctgtgcccagcctgctgccccgtctcagggcctggaggacgggcaaaacggtttctccacagtcgaactcctctaggcccacctgtgcccgtcacctcaccttgggcacgggagacgggggccctgccccaccccctgccccctcctctgcatcctcctccccttccccttctccctcatcttcctccccttcccctcccccacccccaccccctctccccaatttcattaaagatttcatgaaacattacccctgaaaaaaaa

SEQ ID NO: 324001 - DNA, 386 bp, Homo sapiens
aaaaaggaagagaattgctcctagtccctggggtgtctgtgctgggtccagcgcccacccaagcacagggtggagtgggaggaggtggaggagaggaggggtgccagaggggatgctgagggagatagtgtggggcccttgaggtcttcatgtctatcctctacttccatcctttctcccgggacctccactccaaactctcccccctggacccccaggtgaccatggaggaagaagatgagtctcgagggaagacagaggagtcgggggaggatcggggcgatggtccgccagacagagaccccacgctttctccttctgcctttatcctgcgagccatccagcagctctggacttgttctggtcagatctgccgggatcctcta

SEQ ID NO: 324002 - DNA, 3318 bp, Homo sapiens
  misc_feature (1382)..(1382): n is a, c, g, or t
tgaaatcccggcaagctcggcggcgctttagctccgcctctctcctcctttgctcacgaaccccgccccagcccgccccgccccgcgccggggccggagccgcagcccgagcggcggggtgaccatggaggaagaagatgagtctcgagggaagacagaggagtcgggggaggatcggggcgatggtccgccagacagagaccccacgctttctccttctgcctttatcctgcgagccatccagcaggctgtgggaagctccctgcagggggacctgcccaatgataaagatggctctcggtgtcatggccttcgatggcggcgctgccggagtccacggtcagagccccgttcccaggaatcagggggcactgacacggctactgtgttggacatggccacggacagcttcctcgcagggctggtgagtgtcctggatcccccggatacctgggttcccagccgcctggacctgcggcctggcgaaagtgaggacatgctggagctggtggctgaggtccgaatcggggacagagatcccatccctctgcctgtgcccagcctgctgccccgtctcagggcctggaggacgggcaaaacggtttctccacagtcgaactcctctaggcccacctgtgcccgtcacctcaccttgggcacgggagacgggggccctgccccaccccctgccccctcctctgcatcctcctccccttccccttctccctcatcttcctccccttcccctcccccacccccaccgccccctgcacccccagccccacctgccccccgattcgatatctatgaccccttccaccccaccgacgaggcctactctccaccgcctgctccggagcaaaagtacgacccttttgagcccaccggctccaaccccagctcatcagcggggaccccctcacctgaggaggaagaggaggaggaagaggaagaagaagaggaagaggaagacgaggaggaggaggaaggcctgtcccagagcatcagccgcatctcggagaccctggcgggcatctacgatgacaacagcctgagccaggacttcccaggtgacgagagcccccgcccggacgcgcagcccacacagccgactcccgcccctggaacgccgccccaggtggactccacccgggctgatggagccatgcgccggcgggtcttcgtggtggggaccgaggcagaggcttgtcgggaaggcaaggtctcggtggaggtggtgaccgctggtggagccgccctcccgccgcccctgctgccgcccggcgactcggagatcgaggaaggggagatcgtccagccggaggaggagcccaggctggcgctgtccctcttccgccccggcggccgggccgcccggcctncaccggccgcctcggccacccccacggcccagccccttcctcagcctcccgctccgcgggcccccgagggggacgacttcttgtccctgcatgcggagtcggacggcgagggcgccctgcaggtggacctaggggagccggctcccgcgccgcccgccgccgactcgcgctggggcggcctggacctgcgccgcaagatcctgacccaacggcgggagcgctaccgccagcgctcgccctccccggcgcccgcgcccgccccggccgccgctgctggtccgcccacgcgcaagaagtccaggcgggaacgcaagcgcagcggcgaggccaaggaggccgcctcgtcctcgtcgggcacccagccagcgccgcccgccccggcctcgccctgggactccaagaagcaccgctcgcgggaccgcaagcccggctcccacgcctcgtcgtccgcccgccgccgctcccgctcccgctcccgctcccgctccacccgccgccgctcgcgcagcaccgaccgccgccgcgggggcagccgcaggtcgcggtcccgggagaagcggcgacggcggcggcgctccgcctccccgcccccggccacttcctcatcgtcgtcctcgaggcgcgagcggcaccgcgggaaacaccgggacggtggcggcagcaagaagaagaagaagcggtcgcggtcccggggtgagaagcggtctggggatggcagcgagaaggccccggcgcccgccccgccgccctctggctccacctcgtgtggtgaccgcgacagccgccgccggggggccgtgccaccctccatccaggacctcacggaccacgacctcttcgccatcaagcggaccatcacggtgggccggcttgacaagtccgacccccgaggaccctctcctgctccggcctcctcacctaagcgggaggtcctgtacgactccgagggactgagcggcgaggagcggggcggcaagagcagccagaaggatcggcgccgctcgggggccgcctcctcctcctcctcttcccgggagaaggggtctcgtcggaaggcgctggacgggggtgaccgggatcgggacagggacagagatagggacagggacaggtcatccaagaaggcccggccccccaaggagtcggcgccttcctcagggcccccgccaaagccaccagtcagcagcggctcaggctcttcatcctcgtcgtcctcctgttcttcccggaaggtgaagctgcagtccaaggtggcggtgctgatccgcgagggtgtcagcagcaccaccccggccaaggatgccgcgtcagccggcctgggctccattggcgtcaaattcagccgtgaccgcgagagtcgctcccccttcctcaaacctgacgagcgggcccccactgagatggccaaagcagctccgggcagcaccatgccctggaatctgccagctggtgtggactgcaccaccagcggcgtcctggccttgactgcacttctcttcaagatggaagaagccaacctggcgagccgagcgaaggcccaggagctgatccaggccaccaaccagatctcagcacagaaaagcacctcagtctggggatgacccagttccggggccactctggggggtgggcccgggcccccaaaccggtcgggaggcccctcggggggctgcggtggaccccaaacccacgcgtgcggcaccgtgaacacaaagaggaagccgccttgaggccgggggaaccaaatgatctgagaaaggaacggaaggaggcaggaggaaagacgggacaacgacacatatagaaaggacaccgaggagcgacacccacggccaccaacccaacaggaggaaccccagccagcggcgaccccgaacacgacggaccgacccccaccaagcgagagcaacacgtaatcaacacgagcagctagacc

SEQ ID NO: 324003 - DNA, 444 bp, Homo sapiens
ggatgggagacggggaggaggtcagtctgggaggtgaggagggtgacaggattttctcaaggccacctgggcctgttccgctggccctggggcacccatcgtctagggggacagagggactttggcctggttattggggaagctcctcctaccgcagttccaagctgcgcccaacagtcctgggtggatggggccccgggagcctggtggtgactccaactgtccccggccccccagatctgccacagcaaaagtggggaaatcaacccagtgaaggtgagcaacctggtgcgggcctacgtccagcgctaccgctacttccgcaagcacggtcgcaagccaggggaccccccagggcccccacggccgcccaaggagccagggcccccagacaagggtggcccgggcctgcccctgccccctctctgagagccctggccagct

SEQ ID NO: 324004 - DNA, 4321 bp, Homo sapiens
  misc_feature (1382)..(1382): n is a, c, g, or t
tgaaatcccggcaagctcggcggcgctttagctccgcctctctcctcctttgctcacgaaccccgccccagcccgccccgccccgcgccggggccggagccgcagcccgagcggcggggtgaccatggaggaagaagatgagtctcgagggaagacagaggagtcgggggaggatcggggcgatggtccgccagacagagaccccacgctttctccttctgcctttatcctgcgagccatccagcaggctgtgggaagctccctgcagggggacctgcccaatgataaagatggctctcggtgtcatggccttcgatggcggcgctgccggagtccacggtcagagccccgttcccaggaatcagggggcactgacacggctactgtgttggacatggccacggacagcttcctcgcagggctggtgagtgtcctggatcccccggatacctgggttcccagccgcctggacctgcggcctggcgaaagtgaggacatgctggagctggtggctgaggtccgaatcggggacagagatcccatccctctgcctgtgcccagcctgctgccccgtctcagggcctggaggacgggcaaaacggtttctccacagtcgaactcctctaggcccacctgtgcccgtcacctcaccttgggcacgggagacgggggccctgccccaccccctgccccctcctctgcatcctcctccccttccccttctccctcatcttcctccccttcccctcccccacccccaccgccccctgcacccccagccccacctgccccccgattcgatatctatgaccccttccaccccaccgacgaggcctactctccaccgcctgctccggagcaaaagtacgacccttttgagcccaccggctccaaccccagctcatcagcggggaccccctcacctgaggaggaagaggaggaggaagaggaagaagaagaggaagaggaagacgaggaggaggaggaaggcctgtcccagagcatcagccgcatctcggagaccctggcgggcatctacgatgacaacagcctgagccaggacttcccaggtgacgagagcccccgcccggacgcgcagcccacacagccgactcccgcccctggaacgccgccccaggtggactccacccgggctgatggagccatgcgccggcgggtcttcgtggtggggaccgaggcagaggcttgtcgggaaggcaaggtctcggtggaggtggtgaccgctggtggagccgccctcccgccgcccctgctgccgcccggcgactcggagatcgaggaaggggagatcgtccagccggaggaggagcccaggctggcgctgtccctcttccgccccggcggccgggccgcccggcctncaccggccgcctcggccacccccacggcccagccccttcctcagcctcccgctccgcgggcccccgagggggacgacttcttgtccctgcatgcggagtcggacggcgagggcgccctgcaggtggacctaggggagccggctcccgcgccgcccgccgccgactcgcgctggggcggcctggacctgcgccgcaagatcctgacccaacggcgggagcgctaccgccagcgctcgccctccccggcgcccgcgcccgccccggccgccgctgctggtccgcccacgcgcaagaagtccaggcgggaacgcaagcgcagcggcgaggccaaggaggccgcctcgtcctcgtcgggcacccagccagcgccgcccgccccggcctcgccctgggactccaagaagcaccgctcgcgggaccgcaagcccggctcccacgcctcgtcgtccgcccgccgccgctcccgctcccgctcccgctcccgctccacccgccgccgctcgcgcagcaccgaccgccgccgcgggggcagccgcaggtcgcggtcccgggagaagcggcgacggcggcggcgctccgcctccccgcccccggccacttcctcatcgtcgtcctcgaggcgcgagcggcaccgcgggaaacaccgggacggtggcggcagcaagaagaagaagaagcggtcgcggtcccggggtgagaagcggtctggggatggcagcgagaaggccccggcgcccgccccgccgccctctggctccacctcgtgtggtgaccgcgacagccgccgccggggggccgtgccaccctccatccaggacctcacggaccacgacctcttcgccatcaagcggaccatcacggtgggccggcttgacaagtccgacccccgaggaccctctcctgctccggcctcctcacctaagcgggaggtcctgtacgactccgagggactgagcggcgaggagcggggcggcaagagcagccagaaggatcggcgccgctcgggggccgcctcctcctcctcctcttcccgggagaaggggtctcgtcggaaggcgctggacgggggtgaccgggatcgggacagggacagagatagggacagggacaggtcatccaagaaggcccggccccccaaggagtcggcgccttcctcagggcccccgccaaagccaccagtcagcagcggctcaggctcttcatcctcgtcgtcctcctgttcttcccggaaggtgaagctgcagtccaaggtggcggtgctgatccgcgagggtgtcagcagcaccaccccggccaaggatgccgcgtcagccggcctgggctccattggcgtcaaattcagccgtgaccgcgagagtcgctcccccttcctcaaacctgacgagcgggcccccactgagatggccaaagcagctccgggcagcaccaagcccaaaaagaccaaggtcaaggccaaggcaggggccaagaaaaccaaggggaccaagggaaagaccaagccatccaagaccaggaaaaaggtccgcagtggaggtggcagcgggggcagtggtggccaggtgtcgctgaagaagtccaaggcggatagctgcagccaggcggcaggcaccaagggggcggaggagacttcctggtccggggaggagcgggcagccaaggttcctagcaccccgccccccaaggcaggccccaccaccccctgccctcactccggactcgcagaccgtggacagcagctgcaagacacctgaggtctccttcctgcccgaggaggccactgaggaggctggggtccgaggtggggcggaggaggaggaggaggaagaagaagaggaggaggaagaggaagaggaggaggagcagcagcctgctaccaccacggccaccagcactgctgcagccgccccaagcactgcccccagcgcggggtccacagccggtgactcgggggcggaggacgggccagcttcccgtgtctcccagctgcccacgctgcccccgcccatgccctggaatctgccagctggtgtggactgcaccaccagcggcgtcctggccttgactgcacttctcttcaagatggaagaagccaacctggcgagccgagcgaaggcccaggagctgatccaggccaccaaccagatcctcagccacagaaagccaccctcaagtctggggatgaccccagctcctgtgcccacctctttgggtctgccccctggcccctccagctacctgcttcctggcagcctccctctggggggctgcggttcgaccccccccacccccaccgggctggctgccacgtctgacaagagagagggcagcagcagctctgagggccgtggggacacagataagtatctgaagaagctgcacacgcaggagcgggcggtggaggaggtgaagctggccatcaagccatactatcagaagaaggacatcaccaaggaggagtacaaggacatcctgaggaaggccgtccacaagatctgccacagcaaaagtggggaaatcaacccagtgaaggtgagcaacctggtgcgggcctacgtccagcgctaccgctacttccgcaagcacggtcgcaagccaggggaccccccagggcccccacggccgcccaaggagccagggcccccagacaagggtggcccgggcctgcccctgccccctctctgagagccctggccagctcttcgcccctcacctctttgaaactctggacgtatttatggctccacctccccacctccctcccccgtcagtgggatgactgggggagggttgctgcagggaagaggagagccccctgccctgccctgccccgtgtccacctcccttgcccccaagcctgtccccagtgcccctcccttctgtttgtgcccctctccccaatttcattaaagatttcatgaaacattacccctgaaaaaaaa

SEQ ID NO: 324005 - DNA, 4421 bp, Homo sapiens
  misc_feature (1482)..(1482): n is a, c, g, or t
aaaaaggaagagaattgctcctagtccctggggtgtctgtgctgggtccagcgcccacccaagcacagggtggagtgggaggaggtggaggagaggaggggtgccagaggggatgctgagggagatagtgtggggcccttgaggtcttcatgtctatcctctacttccatcctttctcccgggacctccactccaaactctcccccctggacccccaggtgaccatggaggaagaagatgagtctcgagggaagacagaggagtcgggggaggatcggggcgatggtccgccagacagagaccccacgctttctccttctgcctttatcctgcgagccatccagcaggctgtgggaagctccctgcagggggacctgcccaatgataaagatggctctcggtgtcatggccttcgatggcggcgctgccggagtccacggtcagagccccgttcccaggaatcagggggcactgacacggctactgtgttggacatggccacggacagcttcctcgcagggctggtgagtgtcctggatcccccggatacctgggttcccagccgcctggacctgcggcctggcgaaagtgaggacatgctggagctggtggctgaggtccgaatcggggacagagatcccatccctctgcctgtgcccagcctgctgccccgtctcagggcctggaggacgggcaaaacggtttctccacagtcgaactcctctaggcccacctgtgcccgtcacctcaccttgggcacgggagacgggggccctgccccaccccctgccccctcctctgcatcctcctccccttccccttctccctcatcttcctccccttcccctcccccacccccaccgccccctgcacccccagccccacctgccccccgattcgatatctatgaccccttccaccccaccgacgaggcctactctccaccgcctgctccggagcaaaagtacgacccttttgagcccaccggctccaaccccagctcatcagcggggaccccctcacctgaggaggaagaggaggaggaagaggaagaagaagaggaagaggaagacgaggaggaggaggaaggcctgtcccagagcatcagccgcatctcggagaccctggcgggcatctacgatgacaacagcctgagccaggacttcccaggtgacgagagcccccgcccggacgcgcagcccacacagccgactcccgcccctggaacgccgccccaggtggactccacccgggctgatggagccatgcgccggcgggtcttcgtggtggggaccgaggcagaggcttgtcgggaaggcaaggtctcggtggaggtggtgaccgctggtggagccgccctcccgccgcccctgctgccgcccggcgactcggagatcgaggaaggggagatcgtccagccggaggaggagcccaggctggcgctgtccctcttccgccccggcggccgggccgcccggcctncaccggccgcctcggccacccccacggcccagccccttcctcagcctcccgctccgcgggcccccgagggggacgacttcttgtccctgcatgcggagtcggacggcgagggcgccctgcaggtggacctaggggagccggctcccgcgccgcccgccgccgactcgcgctggggcggcctggacctgcgccgcaagatcctgacccaacggcgggagcgctaccgccagcgctcgccctccccggcgcccgcgcccgccccggccgccgctgctggtccgcccacgcgcaagaagtccaggcgggaacgcaagcgcagcggcgaggccaaggaggccgcctcgtcctcgtcgggcacccagccagcgccgcccgccccggcctcgccctgggactccaagaagcaccgctcgcgggaccgcaagcccggctcccacgcctcgtcgtccgcccgccgccgctcccgctcccgctcccgctcccgctccacccgccgccgctcgcgcagcaccgaccgccgccgcgggggcagccgcaggtcgcggtcccgggagaagcggcgacggcggcggcgctccgcctccccgcccccggccacttcctcatcgtcgtcctcgaggcgcgagcggcaccgcgggaaacaccgggacggtggcggcagcaagaagaagaagaagcggtcgcggtcccggggtgagaagcggtctggggatggcagcgagaaggccccggcgcccgccccgccgccctctggctccacctcgtgtggtgaccgcgacagccgccgccggggggccgtgccaccctccatccaggacctcacggaccacgacctcttcgccatcaagcggaccatcacggtgggccggcttgacaagtccgacccccgaggaccctctcctgctccggcctcctcacctaagcgggaggtcctgtacgactccgagggactgagcggcgaggagcggggcggcaagagcagccagaaggatcggcgccgctcgggggccgcctcctcctcctcctcttcccgggagaaggggtctcgtcggaaggcgctggacgggggtgaccgggatcgggacagggacagagatagggacagggacaggtcatccaagaaggcccggccccccaaggagtcggcgccttcctcagggcccccgccaaagccaccagtcagcagcggctcaggctcttcatcctcgtcgtcctcctgttcttcccggaaggtgaagctgcagtccaaggtggcggtgctgatccgcgagggtgtcagcagcaccaccccggccaaggatgccgcgtcagccggcctgggctccattggcgtcaaattcagccgtgaccgcgagagtcgctcccccttcctcaaacctgacgagcgggcccccactgagatggccaaagcagctccgggcagcaccaagcccaaaaagaccaaggtcaaggccaaggcaggggccaagaaaaccaaggggaccaagggaaagaccaagccatccaagaccaggaaaaaggtccgcagtggaggtggcagcgggggcagtggtggccaggtgtcgctgaagaagtccaaggcggatagctgcagccaggcggcaggcaccaagggggcggaggagacttcctggtccggggaggagcgggcagccaaggttcctagcaccccgccccccaaggcaggccccaccaccccctgccctcactccggactcgcagaccgtggacagcagctgcaagacacctgaggtctccttcctgcccgaggaggccactgaggaggctggggtccgaggtggggcggaggaggaggaggaggaagaagaagaggaggaggaagaggaagaggaggaggagcagcagcctgctaccaccacggccaccagcactgctgcagccgccccaagcactgcccccagcgcggggtccacagccggtgactcgggggcggaggacgggccagcttcccgtgtctcccagctgcccacgctgcccccgcccatgccctggaatctgccagctggtgtggactgcaccaccagcggcgtcctggccttgactgcacttctcttcaagatggaagaagccaacctggcgagccgagcgaaggcccaggagctgatccaggccaccaaccagatcctcagccacagaaagccaccctcaagtctggggatgaccccagctcctgtgcccacctctttgggtctgccccctggcccctccagctacctgcttcctggcagcctccctctggggggctgcggttcgaccccccccacccccaccgggctggctgccacgtctgacaagagagagggcagcagcagctctgagggccgtggggacacagataagtatctgaagaagctgcacacgcaggagcgggcggtggaggaggtgaagctggccatcaagccatactatcagaagaaggacatcaccaaggaggagtacaaggacatcctgaggaaggccgtccacaagatctgccacagcaaaagtggggaaatcaacccagtgaaggtgagcaacctggtgcgggcctacgtccagcgctaccgctacttccgcaagcacggtcgcaagccaggggaccccccagggcccccacggccgcccaaggagccagggcccccagacaagggtggcccgggcctgcccctgccccctctctgagagccctggccagctcttcgcccctcacctctttgaaactctggacgtatttatggctccacctccccacctccctcccccgtcagtgggatgactgggggagggttgctgcagggaagaggagagccccctgccctgccctgccccgtgtccacctcccttgcccccaagcctgtccccagtgcccctcccttctgtttgtgcccctctccccaatttcattaaagatttcatgaaacattacccctgaaaaaaaa

SEQ ID NO: 324006 - DNA, 940 bp, Homo sapiens
tgaaatcccggcaagctcggcggcgctttagctccgcctctctcctcctttgctcacgaaccccgccccagcccgccccgccccgcgccggggccggagccgcagcccgagcggcggggtgaccatggaggaagaagatgagtctcgagggaagacagaggagtcgggggaggatcggggcgatggtccgccagacagagaccccacgctttctccttctgcctttatcctgcgagccatccagcaggctgtgggaagctccctgcagggggacctgcccaatgataaagatggctctcggtgtcatggccttcgatggcggcgctgccggagtccacggtcagagccccgttcccaggaatcagggggcactgacacggctactgtgttggacatggccacggacagcttcctcgcagggctggtgagtgtcctggatcccccggatacctgggttcccagccgcctggacctgcggcctggcgaaagtgaggacatgctggagctggtggctgaggtccgaatcggggacagagatcccatccctctgcctgtgcccagcctgctgccccgtctcagggcctggaggacgggcaaaacggtttctccacagtcgaactcctctaggcccacctgtgcccgtcacctcaccttgggcacgggagacgggggccctgccccaccccctgccccctcctctgcatcctcctccccttccccttctccctcatcttcctccccttcccctcccccacccccaccgccccctgcacccccagccccacctgccccccgattcgatatctatgacccctgccctgccctgccccgtgtccacctcccttgcccccaagcctgtccccagtgcccctcccttctgtttgtgcccctctccccaatttcattaaagatttcatgaaacattacccctgaaaaaaaa

SEQ ID NO: 324007 - DNA, 127 bp, Homo sapiens
ctcctgctctgacccgaaggtgacctgagcctaaattcctttccaagttccgggccctctgcagtttgcagagtggctccagagcagaccccctggggagtccctggtggtggcaggtcaggattta

SEQ ID NO: 324008 - DNA, 502 bp, Homo sapiens
ctgtttgctgttacaaacaccaattccccctggagttgatgagagttcagtgactgtatccaaggggtcgaaatttgataggttccaaacaacagacacatcagtcaacagcaggagatttcaatgaagggttgtagggagaagaattaggaaatgcctgctggattcggtatccttcggagggatgagacagcaggggggcattattacttaaatgccccccactccagtgggggctgggcctctggtgatgatggactggtgggtgtacacctgactgtagccgtggtacccaggctccataaggaccctttccagaaagctgagtcaattttttcttctttaatgatttaattctgacaaggatgtattgcccagtgcatttcatctataaactttgaacaatgacaaacagccactgtcgactgaaccactggttcaccctggatctgaaagacttttctgctgccttttctgagggagtaggacctgtgaccccgcc

SEQ ID NO: 324009 - DNA, 757 bp, Homo sapiens
gaataattctgccttcggaccagaggaagagagcaagagttagagacagcttcctggaagaggtggcatttgagctagctctttaagtttcaatgggagaagaaagaaaaggcatctggaaacaaggaagcagcagtagcaaatgaggaagaatcagaagggaagccagagagcaccattatcaccagaggatataccaaatccagtcattcataagctatttattttgtgtgattttaaacaatagctgctatcggctgggcacggtggttcacgcctgtaatcctggcactttgggaggccgaggtgggaggatcacctgaggtcaggagttcaaggccagcctggccaacatggtgaaaccctgtctctactaaaaatacaaaataaaaattagccaggcgtggtgtcgtgcacctgtaatcccagctatttgggaggctgaggcacaagaatcgcttgaacttggaaggtggaggttgcagtaagccaagattgcaccactgtactccagcttgggcaatagaacaagactctgtctcaaaaaaaaaaaaaattaaaaaaaatagctgttaccttctccttaaaattaatttaagttgaaggcaggattatgtcttacccagctgcactacaatgcttttacagagaaggttcctaaattttaatttagtacatatattttttcattctagtttaagttacctgaattagcaatgcactgtgctccataactttatggcatttttatccataa

SEQ ID NO: 324010 - DNA, 335 bp, Homo sapiens
cagaagaagccctgtggtatctgagccctttagggccctggggcctggcacagcgctggtgctcaggaactgtgggcaggatcagggagggaggcatctagaagtctctcagggtaaggaccacaaggggttgagaccagagacccagactgatgcccacaaggacagtccctctgatagcccacccaccaccatccatgtgccacaggtcagtgtgccagccagagaagatgccaggctagaggcacggaaggatctgaatacagccccctatattcccagctggctagaacagataccaaggcagcagaactgccagcttcatcttatgggac

SEQ ID NO: 324011 - DNA, 2362 bp, Homo sapiens
  misc_feature (4)..(4): n is a, c, g, or t
  misc_feature (7)..(7): n is a, c, g, or t
  misc_feature (2359)..(2362): n is a, c, g, or t
ggcncangcgcgctggcccggcacggcggtggtcttgcgggaggcgtgggctgggattgcggtgcctgtgcttcccggtgccagggtgtcatggaagggctgctgacaagatgcagagcattgcccgccctggccacctgcagccgccagctctctgggtatgttccttgcaggtttcaccactgtgccccaagaagagggcggcgcctgctgctgtctcgtgtgttccagccacagaaccttcgggaagaccgggtgctctccctgcaggacaaatctgatgacctgacctgtaagagccagcggctgatgctgcaggtgggcctgatctacccagcaagccccggctgttaccacctcctgccatataccgtccgtgccatggagaagctcgtgcgagtgatagaccaggagatgcaggccatcgggggccagaaagtcaacatgcccagcctcagcccggcagagctctggcaagccaccaaccggtgggacttgatgggcaaagagctgctaagacttagagacaggcatggcaaggaatactgcttaggaccaactcacgaggaagccattacggccttaattgcctcccagaagaaactgtcctacaagcagcttcccttcctgctgtaccaagtgacaaggaagtttcgggatgagcccaggccccgctttggtcttctccgtggccgagagttttacatgaaggatatgtacacctttgactcctccccagaggctgcccagcagacctacagcctggtgtgtgatgcctactgcagcctgttcaacaagctagggctgccatttgtcaaggtccaggccgatgtgggcaccatcgggggcacagtgtctcatgagttccagctcccagtggatattggagaggaccggcttgccatctgtccccgctgcagcttctcagccaacatggagacactagacttgtcacaaatgaactgccctgcttgccagggcccattgactaaaaccaaaggcattgaggtggggcacacattttacctgggtaccaagtactcatccattttcaatgcccagtttaccaatgtctgtggcaaaccaaccctggctgaaatggggtgctatggcttgggtgtgacacggatcttggctgctgccattgaagtcctctctacagaagactgtgtccgctggcccagcctactggccccttaccaagcctgcctcatcccccctaagaagggcagtaaggagcaggcggcctccgagctcatagggcagctgtacgaccacatcacagaggcagtgcctcagcttcacggggaggtgctcctggacgacaggacccatctgaccatcggaaacagactgaaagatgccaacaagtttggctacccctttgtgataatcgctggcaagagggccctggaggaccctgcacattttgaggtttggtgtcagaacactggtgaggtggccttcctcaccaaagatggagtcatggatttactgaccccagtgcagactgtctaaatgcccccagcccacccctgcccccatttgcagccttggtgttcgttctaacactgcattttcctacacccctttcctggactgctctctccagaaacagcacagctcatggagggtgagatcatgttagggaaatcaatttttatctagtcatttgttcagattatttgtatttaaagtcattaacttgatccctttctccagactggccatgccgccatatacctttccttttgtattccattgtggaagcttctaggaggctgagaagcaggagatccaagctccagtcctgggtgttaccctgaggggggaagtcacttcccttctctcagctgagtttttcacgtgtaagatgagaatggctgatggctgagagcccaccaaccttccccaccccgtatcagtttgaccacgggccttttgctacattctatccagagagcaggcctgccagcccctctccactgagaagttgggctgagagtatggggaaaagaatcaagagacctgactgccgccaactcactagtgacttagatacatcccctccccctgctggggcctcagtttccccatctgtaacttgagaaaatagaactagatctgtaaagtctggaactagatctgtaacgtccttataggtgtcactagggggttccatgagaggtgtgtgacaggcagtctgattcctctcattctccatagtctgtttcctggaaagtcgatgtaattaactgatggcccaaaaactacctcaagagacctggccctgttaagacggcttaaccactgagatcccgttctattgatttaataaagtcaaactattggaaaaaannnn

SEQ ID NO: 324012 - DNA, 185 bp, Homo sapiens
tagcagcatttcttcctatcactttcagattataataaagcaatcaataagacattcattctcttcatacacagcctaataatcctggtgaccaactatacccagcagggaggacaaagctcttaacacgaaagagtgaggagaatctctccattacccttttacatattcagggaagagagaat

SEQ ID NO: 324013 - DNA, 400 bp, Homo sapiens
gccaaaagttaatcctttgccaagattttaaaaatggacaaacttttactaagactgatcaagaaagagaagtcagacataaataatattcaacatgagaaaaggggaacacatatacaaataaaacagagattaaaaagagaattaatgccataccacgagcggtggctcacacctgtaatcctagcactttgggaggccgaggtgggcagaccacttgaggtcaggagtttgtgaagagcctggccaacatggtgaaactccgtctctactaaaaatacaaaaaaatcagccaagcatggtggcgcacggctgtaatcccagctactcaggaggctgaggcaggagaatcgcttgaactcaggaggcagaggttgcaatgagatggcaccactgcact

SEQ ID NO: 324014 - DNA, 258 bp, Homo sapiens
tcttccaattaggttacttttctttaataaagttatgctgccttcagttttccaatggcaagtagacaggatatgttcaaggttttctgcactgtaggcacagtctctcaagcatatcagtgcagtggcacaatctcagctcattgcaacctctgcctcctgggttcaagtgattctgctgcctcagcctcctgagtggttgggattacaggcatccaccaccaggcccagctaattttttgtattcttcagtagaga

SEQ ID NO: 324015 - DNA, 1766 bp, Homo sapiens
tcttccaattaggttacttttctttaataaagttatgctgccttcagttttccaatggcaagtagacaggatatgttcaaggttttctgcactgtaggcacagtctctcaagcatatcctgatcatgtaatgactgcataaactccatcaacctaaggtgatacttgtaaataatttatttttaagggatggtgactttaaaaattattaatgaactttgagaagttttaagagtgcttttaaaacttcacagtattgccaattatcttaggttattcagtattcaggtttgtgtttctctgttttaaactaaaatgtgttttctgaagaaaaaaataatagtttacacaaatgtacaatcatagaataagcattttaagctggcgactagtgttctatagattacaaagcaagaaaactttctatgaagataaatgaccttttgcctgaagagtacagataaaatcaaagatgtgtgcaagctagtttttggaagaagtgatgcttctcttctttaaagagacagtcaccaaatacttggtttaactcgactattgacttgggcattgagagagatgatatatacatctttggaaagtgaagtcaatgttcaagaggtgatagaagctttactttttagtgatcagaaatatttagtgcatcttttcagacaggaagaattttatcatcaagtattcccttataaaaccaagtaacacttctttatcagtaacttttagaacttaaaagaaagcaaaaagtaaatggaattgtaggcaatttatgaatcctagtagattttacaatatgtaatttatgttgtttacagtatataaacactaagttttgtgttaaatgtgatcaggaataaaagtatcccacaggcatctgacacaaattccagaattagccaaagaattgtttatttgaggccaggcaatcccagcattttgggaagccaagttgggctgatctcgaactcctgacctcaggtgatccacctgcctcagcctcccaaagcgctgggattacaggcatgagccatcacacccagcgaaaagtttgtttgaataaacaatatccgaaagacaattagtttcttcagatgtattttgaaattctcctaaagagctagtgtttctattcattttcacaatttaaaaacagctcttaacattgctgaagttgggagaactttccatctcttcttaataacagtgcaagattttgtaaattcttttttgtgtttaatgtttaataaaacgagtattaagcttaaattactgaagtacctgggagaagtaatgatgtgtactttcaaaaaaatggaaaatgcttttattttattttctataatttgttaacatgatatgtaaaattaaacttcggagcacaatgaaatgccgattatttttaccttgtttgggcttaaagtaggtatttaaggtttatgtgttcaaaatgccttggtaaattggatgacctctaactttactgtccatatggagtttgtcattctttatggataagagaacttaaggaaaagttactgtttttcttcagtctttttatatctatctgatttaaaatctgttactttattaaaaggcttcaacaacaggttgttaggatgtagtcttacatccaggttcacataataaccccatttgaatccaaatttgtgtatattttcttatgccagcagtatttgtatccaattttaacttaggtttgttttcttgagtattaaaatttaaacatatata

SEQ ID NO: 324016 - DNA, 1567 bp, Homo sapiens
tcttccaattaggttacttttctttaataaagttatgctgccttcagttttccaatggcaagtagacaggatatgttcaaggttttctgcactgtaggcacagtctctcaagcatatcctgatcatgtaatgactgcataaactccatcaacctaaggtgatacttgtaaataatttatttttaagggatggtgactttaaaaattattaatgaactttgagaagttttaagagtgcttttaaaacttcacagtattgccaattatcttaggttattcagtattcaggtttgtgtttctctgttttaaactaaaatgtgttttctgaagaaaaaaataatagtttacacaaatgtacaatcatagaataagcattttaagctggcgactagtgttctatagattacaaagcaagaaaactttctatgaagataaatgaccttttgcctgaagagtacagataaaatcaaagatgtgtgcaagctagtttttggaagaagtgatgcttctcttctttaaagagacagtcaccaaatacttggtttaactcgactattgacttgggcattgagagagatgatatatacatctttggaaagtgaagtcaatgttcaagaggtgatagaagctttactttttagtgatcagaaatatttagtgcatcttttcagacaggaagaattttatcatcaagtattcccttataaaaccaagtaacacttctttatcagtaacttttagaacttaaaagaaagcaaaaagtaaatggaattgtaggcaatttatgaatcctagtagattttacaatatgtaatttatgttgtttacagtatataaacactaagttttgtgttaaatgtgatcaggaataaaagtatcccacaggcatctgacacaaattccagaattagccaaagaattgtttatttgaggccaggcaatcccagcattttgggaagccaagttgggcagatcacgaagtcaggagttcgaaatcagcctgaccaacatggtgaaacctcttctctactaaaaatacaaaattagccgggcatggtggcacatgcctataatctcagctactcaggaggctgaggcaggaggatcgcttgaacccgggaggcagaggttgcagtgagccaagattgcgccactgcactccagcctgggcaacagagtgagactctgtctcaaaaaaaaaaaaaaagaaaaagaaaagaaaaaggtttatttgaataattggaagtcagtttatacattactatttttcagcagtagggaatttctccaattacattcatgttgaatgaatttttatttatatatagcttacccttccaaaataaaagtgtttttttaatgttgttttgttttgttttgtttttttccttttttgagacggagtttcactcttgttgcccagactggagtgcagtggcacaatctcagctcattgcaacctctgcctcctgggttcaagtgattctgctgcctcagcctcctgagtggttgggattacaggcatccaccaccaggcccagctaattttttgtattcttcagtagaga

SEQ ID NO: 324017 - DNA, 699 bp, Homo sapiens
gaatattggctgtggcataacaggctgccaatagcgtttttgtgaggaaattgtggcattttggaaatgatcctagagaatctacagaggtgggcaaacgtaaacacttgtacagtgctttcagtaggctttttattgccccagtgcccttgtgccctcgatgtgacatgccacaagtgaaggagaagtggtgaggggattatttgaggaaagctttgttggacagtttggatgcatcatcgggagatactgccaatttacaggaagtactgtataaagagttctctctttgtgtcttaattttataagatttcctcttctcttgcaggtagccctaatacagtggtttttcttatgacttatttttcttgagggtgtacttcgtttctcaccagtcaaaaacatagaagttctgcaactcagaatggaaattcacttgaagtaatgtgtgattcctctgtaatcagtgccattaatagcaaaaaatatttaaaaggaagatgattgggacctaatagtctataaacaaattgagtaagaaagcattaagaaggactagtaatgtattctgccttgtttctttcaaatgaagactgttaaactgagttacggggaagaaaaagtgaataccctattgtttcaaggtaataaagaataaacagtatacttccttttggttagtgttttccagaatttact

SEQ ID NO: 324018 - DNA, 3985 bp, Homo sapiens
  misc_feature (2373)..(2373): n is a, c, g, or t
  misc_feature (2419)..(2419): n is a, c, g, or t
tttaaatgctgcttttaaactttgaaagtacaatttgaagttgtaactatacatctaattagacttaagtaaaaccctgatttttttcctggaaagaacaaaatctacaaataaaatttgagttgtttgtatttcttaattaggtgttacaagctacaaagttgtcataaagaatgctaagaatggggatagaaatgattctgagaaaacaaaccctcgcaaaaacataagattaaaacttgggttccatgtcaaaatcctttcctttaattgcaaattatattttgaattttaaagtggccacctcctcctctgtccttttcactaattaaaaatatatttgcagaggtaccctctaatatttggtttataggttttgtggctattttaaattgtaaagcataatcctataaacattaaaactcaagagcttttcttctttcatgtcttgtaaattaacactgtagcagcattcagagaaaatagattcagagctcaacttttcacataaataaatctaacagtgtaatatataaacctgaaaaatgtcagttgagggaggtctttattctagattggcatttttttttttttaaattaggtacaaattatgagtgtaaggaattgggtttcctgctctcctgtctttccatctttttggttccccaagctaattgattgggtttatttatgagcctgttacagtaaagtgtgtgttgggaaatatattgaggtatagagctattctttgtaggtaccctggtgagaccgatacaaatatgcccctccccataatggaatactaattttatttgatcactcatttatagcagttgcttaaatgtatgtatttatatgaaggtattttaatttttaagagcaaaaaagttctaataagttgccagatttctaataaatgcaggtttatttggtgaaaagataaggaaaatgagttatgattctgtagtttttttaaaatgagttcagcataattgtttttcaggtttttttagttactggggttattctgcataagaaagcccaatgctttctgatagtaggagataatttttctctcttttgactttgaaatctgacttaggagatgaattctttttaaaaaggtcagcatgcaaaaaaataaattatatattttaaattctaaaagagaagggacataaaatttcactcctagcataaagccatataatattattcttgaaactcattacatcatttgcctcctgcccatttgaatataatcatacctacgttttattaattgtgcatttgtaaaaccaaacccttccagtaaatacttgctataaggctattgcttgtcaattatcaaggcttctaaatatgttaaaacttgtcattttgatttttcaaagataattttattatactgagctaccaatattcttaaagaaaactaaccaaagttaatattagtgtagtccattattatgtggacaattattatgtggaatctcttaagtgagcaactaagaaaaagccttatagaaagactacactggatttataagtgtgtttatgtttctctaagaatgggagcttctgttaacttaggggtggagttgttctgaggaaaccagtagattggatgactgactggagaatccagaataacaaatccattagccagacatgtttacttttatattagaagtttgttgattaggtcttaattttcaaatgcaaacaccaagctttaaaaatattgcatatacaatgtattggtcagcaatttaataatatttaatttgaagttaattattgttaatccttctagaaaagttttttttctttaaataaaagtacatatatatacttttttatttagaggttaccagaagctctggttttgttttgttttgttttgtttttttgtttttttaatcattttcagatgttatccagaaatctgcaagtgtacttttcctgttttaactccttccttttatcacctgactatcagggaagcgaggttgaggctgccctgacctgacatgtcatgatgtcgacttgctaggtggggttcgctggggacgataaccagtggaattgttggtaagaacttttttttcctatttttttttttatcagtagtggggcattaagtgtgggagaatgcccatatcctataagtgggcaattatgtcagccttgtagaaaaataggactttaatattaaattattttgttcttaataggaacatataataacacttcacttacttttaaattggtagcagatcagcaggaaaggcctgcaagtatgaagtaatgaaatactcagggtatattttaagtgagcaaaatagacaccttataatcttaaaaagtctnttggagagacaataaatttgctttaactgtcatttcagtctagtantatattttctatattttgttggatagattaacatataatgcatcttaaagagatatttattgcacactaattttagtgaaaacaagaagacattgatagaatggagggcttaaacaccaaagatactatttttaaaaatcttccaaagtaatcttaacactgtaaaatgaaactttaaaaagttttagcagtttgacaataatggcctcaatttagagatatgttgagacaatgactttgggtcaagaggaaattacatagctgaaatattaagaccttgaacatagcagaaacataaacctatgaacaacttgtgttttgtgtgaaagctagggtagctgataggattagcagatattggtagaattaagagtcaatatttaaattattgctaaagattaaaatccctcatcttatagtttgtaggggattccatgatggtaaggtatagattgaaattaaatttagtaactaggcatttctgaccataccatataaaaaataattgtaatatggtataaacactgattaaaagtaattatggattttcatgcctgaagaaccttctcagtattcttacagcactgtatcttctttattggttgagaatatcagtctagaaagactttcctagatgttaaatgtgctagtcagtgtcatgaatataaacccttacttgtaagtttgctatagactagttgtacaacactagaatgaaattatgtaatacttttaagaattgtagtgattgcagggttgtgttaaggtaacattttatgcatgtgtcagtgacagaaaggatcagggtataaaacttagcactaaatagcatgctccttaggaagttttaaggtaagcagtaggaatattcatgtaattctgatgagtttatgtaagttaaggaaaatgcaatgccagtttgttgactttaaacactaaaaacaaaatacattttgtggaaccaacaaaggagacattctggggaaaaacttaaattgctcaaatttaaataagggctctcactttatatagtagatttgtcaggatcccatgaacattgcttttcttgatttctcacatatgagggttgggcaaaagggacttctctagcctcttcgataatgtaggtagacttgtacttagtgaatcccattataatgttaggtactatgttctaagactatttctataattggactgaaggctcctgcaaacataaattgctgatatggatatagtaacataagaaataccaaaatagggacatttgcaagaccttttccatttaatcatcagtttaataaaaatcatgcttttggtacagtgttcatgtaccataactgtattggaatatttgtacgatgttaaatatttttaataaaatttaacatgttcaaaatgttgtgttggtgattttgggtggggtgtgatgggtttgattgtgcaaaacagatttagtagttatgtgatttaggcttttgtagttaaatggagtttctgtcttcaaatttagtactagatactgtacctgttctaaggaaggtagtgaaggagtaggatagtaaa

SEQ ID NO: 324019 - DNA, 2465 bp, Homo sapiens
tttaaatgctgcttttaaactttgaaagtacaatttgaagttgtaactatacatctaattagacttaagtaaaaccctgatttttttcctggaaagaacaaaatctacaaataaaatttgagttgtttgtatttcttaattaggtgttacaagctacaaagttgtcataaagaatgctaagaatggggatagaaatgattctgagaaaacaaaccctcgcaaaaacataagattaaaacttgggttccatgtcaaaatcctttcctttaattgcaaattatattttgaattttaaagtggccacctcctcctctgtccttttcactaattaaaaatatatttgcagaggtaccctctaatatttggtttataggttttgtggctattttaaattgtaaagcataatcctataaacattaaaactcaagagcttttcttctttcatgtcttgtaaattaacactgtagcagcattcagagaaaatagattcagagctcaacttttcacataaataaatctaacagtgtaatatataaacctgaaaaatgtcagttgagggaggtctttattctagattggcatttttttttttttaaattaggtacaaattatgagtgtaaggaattgggtttcctgctctcctgtctttccatctttttggttccccaagctaattgattgggtttatttatgagcctgttacagtaaagtgtgtgttgggaaatatattgaggtatagagctattctttgtaggtaccctggtgagaccgatacaaatatgcccctccccataatggaatactaattttatttgatcactcatttatagcagttgcttaaatgtatgtatttatatgaaggtattttaatttttaagagcaaaaaagttctaataagttgccagatttctaataaatgcaggtttatttggtgaaaagataaggaaaatgagttatgattctgtagtttttttaaaatgagttcagcataattgtttttcaggtttttttagttactggggttattctgcataagaaagcccaatgctttctgatagtaggagataatttttctctcttttgactttgaaatctgacttaggagatgaattctttttaaaaaggtcagcatgcaaaaaaataaattatatattttaaattctaaaagagaagggacataaaatttcactcctagcataaagccatataatattattcttgaaactcattacatcatttgcctcctgcccatttgaatataatcatacctacgttttattaattgtgcatttgtaaaaccaaacccttccagtaaatacttgctataaggctattgcttgtcaattatcaaggcttctaaatatgttaaaacttgtcattttgatttttcaaagataattttattatactgagctaccaatattcttaaagaaaactaaccaaagttaatattagtgtagtccattattatgtggacaattattatgtggaatctcttaagtgagcaactaagaaaaagccttatagaaagactacactggatttataagtgtgtttatgtttctctaagaatgggagcttctgttaacttaggggtggagttgttctgaggaaaccagtagattggatgactgactggagaatccagaataacaaatccattagccagacatgtttacttttatattagaagtttgttgattaggtcttaattttcaaatgcaaacaccaagctttaaaaatattgcatatacaatgtattggtcagcaatttaataatatttaatttgaagttaattattgttaatccttctagaaaagttttttttctttaaataaaagtacatatatatacttttttatttagaggttaccagaagctctggttttgttttgttttgttttgtttttttgtttttttaatcattttcagatgttatccagaaatctgcaagtgtacttttcctgttttaactccttccttttatcacctgactatcagggaagcgaggttgaggctgccctgacctgacatgtcatgatgtcgacttgctaggtggggttcgctggggacgataaccagtggaattgttggtagccctaatacagtggtttttcttatgacttatttttcttgagggtgtacttcgtttctcaccagtcaaaaacatagaagttctgcaactcagaatggaaattcacttgaagtaatgtgtgattcctctgtaatcagtgccattaatagcaaaaaatatttaaaaggaagatgattgggacctaatagtctataaacaaattgagtaagaaagcattaagaaggactagtaatgtattctgccttgtttctttcaaatgaagactgttaaactgagttacggggaagaaaaagtgaataccctattgtttcaaggtaataaagaataaacagtatacttccttttggttagtgttttccagaatttact

SEQ ID NO: 324020 - DNA, 2129 bp, Homo sapiens
tttaaatgctgcttttaaactttgaaagtacaatttgaagttgtaactatacatctaattagacttaagtaaaaccctgatttttttcctggaaagaacaaaatctacaaataaaatttgagttgtttgtatttcttaattaggtgttacaagctacaaagttgtcataaagaatgctaagaatggggatagaaatgattctgagaaaacaaaccctcgcaaaaacataagattaaaacttgggttccatgtcaaaatcctttcctttaattgcaaattatattttgaattttaaagtggccacctcctcctctgtccttttcactaattaaaaatatatttgcagaggtaccctctaatatttggtttataggttttgtggctattttaaattgtaaagcataatcctataaacattaaaactcaagagcttttcttctttcatgtcttgtaaattaacactgtagcagcattcagagaaaatagattcagagctcaacttttcacataaataaatctaacagtgtaatatataaacctgaaaaatgtcagttgagggaggtctttattctagattggcatttttttttttttaaattaggtacaaattatgagtgtaaggaattgggtttcctgctctcctgtctttccatctttttggttccccaagctaattgattgggtttatttatgagcctgttacagtaaagtgtgtgttgggaaatatattgaggtatagagctattctttgtaggtaccctggtgagaccgatacaaatatgcccctccccataatggaatactaattttatttgatcactcatttatagcagttgcttaaatgtatgtatttatatgaaggtattttaatttttaagagcaaaaaagttctaataagttgccagatttctaataaatgcaggtttatttggtgaaaagataaggaaaatgagttatgattctgtagtttttttaaaatgagttcagcataattgtttttcaggtttttttagttactggggttattctgcataagaaagcccaatgctttctgatagtaggagataatttttctctcttttgactttgaaatctgacttaggagatgaattctttttaaaaaggtcagcatgcaaaaaaataaattatatattttaaattctaaaagagaagggacataaaatttcactcctagcataaagccatataatattattcttgaaactcattacatcatttgcctcctgcccatttgaatataatcatacctacgttttattaattgtgcatttgtaaaaccaaacccttccagtaaatacttgctataaggctattgcttgtcaattatcaaggcttctaaatatgttaaaacttgtcattttgatttttcaaagataattttattatactgagctaccaatattcttaaagaaaactaaccaaagttaatattagtgtagtccattattatgtggacaattattatgtggaatctcttaagtgagcaactaagaaaaagccttatagaaagactacactggatttataagtgtgtttatgtttctctaagaatgggagcttctgttaacttaggggtggagttgttctgaggaaaccagtagattggatgactgactggagaatccagaataacaaatccattagccagacatgtttacttttatattagaagtttgttgattaggtcttaattttcaaatgcaaacaccaagctttaaaaatattgcatatacaatgtattggtcagcaatttaataatatttaatttgaagttaattattgttaatccttctagaaaagttttttttctttaaataaaagtacatatatatacttttttatttagaggttaccagaagctctggttttgttttgttttgttttgtttttttgtttttttaatcattttcagatgttatccagaaatctgcaagtgtacttttcctgttttaactccttccttttatcacctgactatcagggaagcgaggttgaggctgccctgacctgacatgtcatgatgtcgactcaggtggtgtggctcaggtggtgtgactcaggtggtgtgactcaggtggtgtgactcaggtggtgggactcaggtggtg

SEQ ID NO: 324021 - DNA, 870 bp, Homo sapiens
tctcagcctcccaaagtgctgggattacaggtgtgagccactgctcccagccgggtgtgatatttttaataaaacaagtattcaaattcacttacaggaccaatgaaagaatcgtttgtcgtaattttatgccaaagggtacttgtggcttaagataaacttcccataatgacattatccacagattcaaaaagtagtttatcttaaacaacttctgtgacattttaaaatgatgtggcttagaaaattgctaggttatctaaaatggctctattgatgatgtaaatgtagcacatgaagagcttgaataaaatagacttttgaagtgtgcaaatggaaagaacagtccttctaaataattatttcccctcccttttattgacgtatacatacagaaaagatatcatgtcgtaagtgtattgcttagtgaattactccaaagttggatatacctggttaaccaccacctgaatgaaaaaaacagaacactgcttcatatggagaagcccctcctgcccctcctggtcattgtcctttccatccctcccacaggtagtcactgagttctaataccacagagtcttttgactttcttttgagccttatgtaattagaatcacaaaagatgtattcttttgcctgacttttatacttagtattgtttttgaaattcatcttgtgtgtaactgcgatttgttcattttcattgcttagtgaattattccaaagttggatatacctggttaaccaccacccgaatgaaaaaaacagtttttggcgtgagccactgtgccccactgttcaagttttcattgattgctgcctacatatagttgttcaacagctattgattccccctgccctgtgaaa

SEQ ID NO: 324022 - DNA, 516 bp, Homo sapiens
tctcagcctcccaaagtgctgggattacaggtgtgagccactgctcccagccgggtgtgatatttttaataaaacaagtattcaaattcacttacaggaccaatgaaagaatcgtttgtcgtaattttatgccaaagggtacttgtggcttaagataaacttcccataatgacattatccacagattcaaaaagtagtttatcttaaacaacttctgtgacattttaaaatgatgtggcttagaaaattgctaggttatctaaaatggctctattgatgatgtaaatgtagcacatgaagagcttgaataaaatagacttttgaagtgtgcaaatggaaagaacagtccttctaaataattatttcccctcccttttattgacgtatacatacagaaaagatatcatgtcgtaagtgtattgcttagtgaattactccaaagttggatatacctggttaaccaccacctgaatgaaaaaaacatgacaccgtcgaaggggatcctatagagtctgc

SEQ ID NO: 324023 - DNA, 514 bp, Homo sapiens
tgaactcctgacttcaggtgatccacccatctcagcctcccaaagtgctgggattacaggtgtgagccactgctcccagccgggtgtgatatttttaataaaacaagtattcaaattcacttacaggaccaatgaaagaatcgtttgtcgtaattttatgccaaagggtacttgtggcttaagataaacttcccataatgacattatccacagattcaaaaagtagtttatcttaaacaacttctgtgacattttaaaatgatgtggcttagaaaattgctaggttatctaaaatggctctattgatgatgtaaatgtagcacatgaagagcttgaataaaatagacttttgaagtgtgcaaatggaaagaacagtccttctaaataattatttcccctcccttttattgacgtatacatacagaaaagatatcatgtcgtaagtgtattgcttagtgaattactccaaagttggatatacctggttaaccaccacctgaatgaaaaaaacaga

SEQ ID NO: 324024 - DNA, 5382 bp, Homo sapiens
tctggaggaggcgcagggaacctggagagggtccagccctcagtgccccggccagaggcgggaaggggctctagagcttcgggaggcaagatgacttctctgccccaagcttggaacagctaaagggaaaaacagtgcaagatgagaacaacaaaggtctacaaactcgtcatccacaagaagggctttgggggcagtgatgatgagctagttgtgaaccccaaagtgttccctcacatcaagcttggagacattgtagagattgcacaccccaacgatgaatacagccctctgcttttgcaggtcaagtctcttaaggaagatttacagaaggaaactatcagtgtggaccagactgtgactcaagtgttccggctgagaccttatcaggatgtctatgttaatgtcgtagaccctaaggatgtgacccttgacctagtggaattaacttttaaggatcagtatattggccgtggggatatgtggcgactaaagaaaagtttggtcagcacatgtgcctatatcacccagaaggtggagtttgctggcatcagagcacaggctggtgaactgtgggttaagaatgagaaggtcatgtgtggctacatcagtgaagataccagggtggtgtttcgttctacgtcggctatggtttacatatttattcagatgagctgtgaaatgtgggattttgatatttatggggatttgtattttgagaaagctgtgaatggtttccttgctgatctatttaccaagtggaaggagaagaactgtagtcatgaagtgacagtggtcctgttttctagaactttctatgatgcaaaatctgttgatgaatttcctgaaataaaccgagcctcaattcgacaggatcacaaggggagattctatgaagacttttacaaagtggtggtgcagaatgagagaagagaagaatggacttcacttctcgtaaccattaaaaaactcttcatccagtatccagtgttggtgcgactggaacaggcagagggctttcctcaaggagataattctacctcagcacaaggaaactacctggaggccatcaatctgtcattcaatgtgtttgataagcactacatcaaccgcaactttgaccgaactgggcagatgtcagtggtgatcacgcccggggtgggtgtctttgaagtggaccgcctactcatgatcctgaccaagcagcggatgatagataatggaattggtgtggatttggtgtgcatgggagagcaaccgttacatgctgtcccattgttcaagctccataatcggagtgctccccgtgattctcgtctgggcgatgactataatatccctcactggataaaccacagtttctacacatccaaaagccagctcttttgtaatagtttcaccccacgaataaaactggcaggaaagaagcccgcctctgagaaagcaaaaaatggccgtgatacatctctcgggagtccaaaagaatctgagaacgcccttcccatccaagtagattatgacgcctatgacgctcaagtgttcaggctgcccggcccatcccgggcccagtgcctcaccacctgcagatctgtgcgagagcgagagagtcacagtcgaaagagtgccagctcctgtgatgtttcatccagcccttccctaccaagccgcacactgcccactgaggaagtgaggagccaggcttctgacgacagctccctaggcaagagtgccaacatcctgatgatcccacacccccacctgcaccagtatgaagtcagcagctccttgggatacaccagcactcgagatgtcctggagaacatgatggagccaccacagcgagactccagtgcaccagggaggtttcacgttggcagtgcagaatccatgctgcatgttcgacctggtggatacacgccccagagagcactgattaaccccttcgctccctctcggatgcccatgaagcttacgtccaacagaaggcgctggatgcacacttttcctgtggggccatccggagaagccatccagatccaccaccagacccgacagaatatggcggagctacaaggcagcgggcagagggatccaactcactcctctgcagagctgctggagttagcatatcatgaagctgctggaaggcacagcaattcccgccagcctggtgacggcatgtccttcttgaacttcagtggaacagaggagctttctgtcggcctgcttagcaacagtggtgcaggtatgaatcctaggacccagaataaggattctctagaggacagtgtttctacctctccagacccaatgccaggcttctgttgcacagttggagtggactggaagtctctcactactccggcgtgcctcccccttaccaccgactacttccctgaccgccagggcctgcagaatgactacacagagggctgttatgatctccttccagaagcagacatcgacaggagggacgaagatggtgtgcagatgacagcccagcaggtatttgaagagtttatttgccaacgtctcatgcagggctaccaaatcatagtgcagcccaagacacagaaacccaatcctgctgtcccgcccccgctgagcagtagcccactctatagccgaggccttgtgtcccgaaaccgccctgaggaggaggaccagtattggctgagtatgggcagaacgttccacaaagtgacgctgaaggataagatgatcacagtgacgcgataccttcccaagtatccttatgaatctgcccagatccactacacctacagcctctgtccttcccactcagactcagagttcgtctcctgctgggtggaattctcccacgaacggctggaggagtacaagtggaattacttagatcagtatatctgttctgccggctctgaagacttcagcttaattgagtccctgaagttctggaggacccgcttcctgctgctgccagcctgtgtcaccgccaccaagcgcatcacggagggggaggcccactgcgacatctatggggacaggccccgtgcagacgaggacgagtggcaactcctggatggttttgtccgctttgtggagggcttgaatcgcattcgcaggcggcatcgctcggatcgcatgatgcggaaagggaccgccatgaaaggcttgcagatgactgggcccatttccacgcattctctggagtcaactgcacccccagtggggaagaagggaacctcagctctctctgccctgttggagatggaggccagtcagaagtgcctgggagaacagcaggcagctgtgcatggtgggaagagctccgcccagtcagccgagagcagcagcgttgccatgactcccacctacatggacagcccacgaaaggtatctgtggaccaaacagccactcctatgttggacggcaccagtttgggcatatgcacaggccaatccatggacagaggcaacagccagacctttgggaactcccagaacataggagaacagggctactcctccacaaactccagtgacagcagctctcagcagctggtggcaagctccttgacctcatcctctaccctgacagagatcctggaagccatgaagcacccctcgacaggagtccagctgctctctgaacagaagggcctctcaccgtactgcttcatcagcgcggaggtggtacactggttggtgaaccacgtggaggggatccagacacaggcgatggccattgacatcatgcagaaaatgctggaagagcagctcatcacacatgcatctggcgaagcctggcggaccttcatctacggcttctatttctacaagatagtaacggacaaagagcccgaccgagtggccatgcagcagcccgccaccacctggcacacagcaggagtggacgacttcgccagcttccagcgcaagtggtttgaggtggcctttgtggcagaagagctcgtgcactctgagattcctgcctttctcctgccctggctgcctagccggccagcctcctatgcaagtaggcacagctcctttagccgaagttttggaggacggagccaggcggcagcacttttagctgccactgtcccagagcagaggactgtgaccctggatgttgacgtgaacaaccgcacagaccggctggagtggtgcagctgttattaccatggcaacttttctctgaatgcagcctttgagatcaagctgcactggatggcggtgaccgcagcagtactcttcgagatggtccaaggttggcatcggaaagccacctcctgtggcttcttgttagtcccagttttggaggggccttttgcactgcccagttacctgtatggcgacccccttcgtgcccagctcttcatcccactcaacatcagctgcttgctcaaggagggcagcgagcacctgtttgatagctttgaacccgaaacgtactgggatcgaatgcacctcttccaggaagccattgcacacaggtttgggtttgtacaagataaatattctgcctctgcttttaacttccctgctgagaacaagcctcagtatatccacgttacaggaacagtgtttctgcagctgccctactccaagcgcaagttctcagggcagcagcggcggcggcggaactccaccagctccaccaaccagaacatgttctgcgaggagcgggtcggctacaactgggcctacaacaccatgctcaccaaaacatggcgctccagcgccacaggggatgaaaagtttgctgatcggctgctgaaggacttcacggacttctgcatcaaccgtgacaaccggctggtcacgttctggacaagttgcctggagaagatgcatgccagtgccccgtgaggccaggctgcacctgtgctgggggaaggtgggtgagccactgccctcaaacccggggcggaggattccaggcaggctctaggagtcaggtgtccgtttgctgctatcagtgagtgggggccattgttttttgtttgtttgtttgtttgtttgtttgtttttggcccccacgacaagtcttctactctagaagaaagactttggaagcagctgctgctgctgccaccactcctgtcagcaagtgctcagagcaggtgggaggcacagattgtccgtgggagggctccagtgtctgggaagagggcaggcggcccccatgaatgtcctcggaagggggtggctcctggtagcatccttttccttcaccatctatgggatattaggggcagaatctgccacttcttgcccaggagtgtgcacagatgtaagataattttgtgaaataatgtaccatagactctcaccaactgtatatacctgtacatatcagaagcaaataaagagctccacgtgcaaaaaaaa

SEQ ID NO: 324025 - DNA, 5641 bp, Homo sapiens
tctggaggaggcgcagggaacctggagagggtccagccctcagtgccccggccagaggcgggaaggggctctagagcttcgggaggcaagatgacttctctgccccaagcttggaacagctaaagggaaaaacagtgcaagatgagaacaacaaaggtctacaaactcgtcatccacaagaagggctttgggggcagtgatgatgagctagttgtgaaccccaaagtgttccctcacatcaagcttggagacattgtagagattgcacaccccaacgatgaatacagccctctgcttttgcaggtcaagtctcttaaggaagatttacagaaggaaactatcagtgtggaccagactgtgactcaagtgttccggctgagaccttatcaggatgtctatgttaatgtcgtagaccctaaggatgtgacccttgacctagtggaattaacttttaaggatcagtatattggccgtggggatatgtggcgactaaagaaaagtttggtcagcacatgtgcctatatcacccagaaggtggagtttgctggcatcagagcacaggctggtgaactgtgggttaagaatgagaaggtcatgtgtggctacatcagtgaagataccagggtggtgtttcgttctacgtcggctatggtttacatatttattcagatgagctgtgaaatgtgggattttgatatttatggggatttgtattttgagaaagctgtgaatggtttccttgctgatctatttaccaagtggaaggtacatttcttcttacacactaagtctcattatgtaaacattactcaatcagatttttaaaatgcactgtttttattaaattgccctaaattgagctattttaggtaaaacccggactccagatttaaattaccctaataatctcaatttatgagaatttatgaaaaacacaaagctaacatcacactcaatggtaaaagactgaaaactttcccccaagatcagtaacaaggagaagaactgtagtcatgaagtgacagtggtcctgttttctagaactttctatgatgcaaaatctgttgatgaatttcctgaaataaaccgagcctcaattcgacaggatcacaaggggagattctatgaagacttttacaaagtggtggtgcagaatgagagaagagaagaatggacttcacttctcgtaaccattaaaaaactcttcatccagtatccagtgttggtgcgactggaacaggcagagggctttcctcaaggagataattctacctcagcacaaggaaactacctggaggccatcaatctgtcattcaatgtgtttgataagcactacatcaaccgcaactttgaccgaactgggcagatgtcagtggtgatcacgcccggggtgggtgtctttgaagtggaccgcctactcatgatcctgaccaagcagcggatgatagataatggaattggtgtggatttggtgtgcatgggagagcaaccgttacatgctgtcccattgttcaagctccataatcggagtgctccccgtgattctcgtctgggcgatgactataatatccctcactggataaaccacagtttctacacatccaaaagccagctcttttgtaatagtttcaccccacgaataaaactggcaggaaagaagcccgcctctgagaaagcaaaaaatggccgtgatacatctctcgggagtccaaaagaatctgagaacgcccttcccatccaagtagattatgacgcctatgacgctcaagtgttcaggctgcccggcccatcccgggcccagtgcctcaccacctgcagatctgtgcgagagcgagagagtcacagtcgaaagagtgccagctcctgtgatgtttcatccagcccttccctaccaagccgcacactgcccactgaggaagtgaggagccaggcttctgacgacagctccctaggcaagagtgccaacatcctgatgatcccacacccccacctgcaccagtatgaagtcagcagctccttgggatacaccagcactcgagatgtcctggagaacatgatggagccaccacagcgagactccagtgcaccagggaggtttcacgttggcagtgcagaatccatgctgcatgttcgacctggtggatacacgccccagagagcactgattaaccccttcgctccctctcggatgcccatgaagcttacgtccaacagaaggcgctggatgcacacttttcctgtggggccatccggagaagccatccagatccaccaccagacccgacagaatatggcggagctacaaggcagcgggcagagggatccaactcactcctctgcagagctgctggagttagcatatcatgaagctgctggaaggcacagcaattcccgccagcctggtgacggcatgtccttcttgaacttcagtggaacagaggagctttctgtcggcctgcttagcaacagtggtgcaggtatgaatcctaggacccagaataaggattctctagaggacagtgtttctacctctccagacccaattctgacactgtctgctccccctgtagtgccaggcttctgttgcacagttggagtggactggaagtctctcactactccggcgtgcctcccccttaccaccgactacttccctgaccgccagggcctgcagaatgactacacagagggctgttatgatctccttccagaagcagacatcgacaggagggacgaagatggtgtgcagatgacagcccagcaggtatttgaagagtttatttgccaacgtctcatgcagggctaccaaatcatagtgcagcccaagacacagaaacccaatcctgctgtcccgcccccgctgagcagtagcccactctatagccgaggccttgtgtcccgaaaccgccctgaggaggaggaccagtattggctgagtatgggcagaacgttccacaaagtgacgctgaaggataagatgatcacagtgacgcgataccttcccaagtatccttatgaatctgcccagatccactacacctacagcctctgtccttcccactcagactcagagttcgtctcctgctgggtggaattctcccacgaacggctggaggagtacaagtggaattacttagatcagtatatctgttctgccggctctgaagacttcagcttaattgagtccctgaagttctggaggacccgcttcctgctgctgccagcctgtgtcaccgccaccaagcgcatcacggagggggaggcccactgcgacatctatggggacaggccccgtgcagacgaggacgagtggcaactcctggatggttttgtccgctttgtggagggcttgaatcgcattcgcaggcggcatcgctcggatcgcatgatgcggaaagggaccgccatgaaaggcttgcagatgactgggcccatttccacgcattctctggagtcaactgcacccccagtggggaagaagggaacctcagctctctctgccctgttggagatggaggccagtcagaagtgcctgggagaacagcaggcagctgtgcatggtgggaagagctccgcccagtcagccgagagcagcagcgttgccatgactcccacctacatggacagcccacgaaaggtatctgtggaccaaacagccactcctatgttggacggcaccagtttgggcatatgcacaggccaatccatggacagaggcaacagccagacctttgggaactcccagaacataggagaacagggctactcctccacaaactccagtgacagcagctctcagcagctggtggcaagctccttgacctcatcctctaccctgacagagatcctggaagccatgaagcacccctcgacaggagtccagctgctctctgaacagaagggcctctcaccgtactgcttcatcagcgcggaggtggtacactggttggtgaaccacgtggaggggatccagacacaggcgatggccattgacatcatgcagaaaatgctggaagagcagctcatcacacatgcatctggcgaagcctggcggaccttcatctacggcttctatttctacaagatagtaacggacaaagagcccgaccgagtggccatgcagcagcccgccaccacctggcacacagcaggagtggacgacttcgccagcttccagcgcaagtggtttgaggtggcctttgtggcagaagagctcgtgcactctgagattcctgcctttctcctgccctggctgcctagccggccagcctcctatgcaagtaggcacagctcctttagccgaagttttggaggacggagccaggcggcagcacttttagctgccactgtcccagagcagaggactgtgaccctggatgttgacgtgaacaaccgcacagaccggctggagtggtgcagctgttattaccatggcaacttttctctgaatgcagcctttgagatcaagctgcactggatggcggtgaccgcagcagtactcttcgagatggtccaaggttggcatcggaaagccacctcctgtggcttcttgttagtcccagttttggaggggccttttgcactgcccagttacctgtatggcgacccccttcgtgcccagctcttcatcccactcaacatcagctgcttgctcaaggagggcagcgagcacctgtttgatagctttgaacccgaaacgtactgggatcgaatgcacctcttccaggaagccattgcacacaggtttgggtttgtacaagataaatattctgcctctgcttttaacttccctgctgagaacaagcctcagtatatccacgttacaggaacagtgtttctgcagctgccctactccaagcgcaagttctcagggcagcagcggcggcggcggaactccaccagctccaccaaccagaacatgttctgcgaggagcgggtcggctacaactgggcctacaacaccatgctcaccaaaacatggcgctccagcgccacaggggatgaaaagtttgctgatcggctgctgaaggacttcacggacttctgcatcaaccgtgacaaccggctggtcacgttctggacaagttgcctggagaagatgcatgccagtgccccgtgaggccaggctgcacctgtgctgggggaaggtgggtgagccactgccctcaaacccggggcggaggattccaggcaggctctaggagtcaggtgtccgtttgctgctatcagtgagtgggggccattgttttttgtttgtttgtttgtttgtttgtttgtttttggcccccacgacaagtcttctactctagaagaaagactttggaagcagctgctgctgctgccaccactcctgtcagcaagtgctcagagcaggtgggaggcacagattgtccgtgggagggctccagtgtctgggaagagggcaggcggcccccatgaatgtcctcggaagggggtggctcctggtagcatccttttccttcaccatctatgggatattaggggcagaatctgccacttcttgcccaggagtgtgcacagatgtaagataattttgtgaaataatgtaccatagactctcaccaactgtatatacctgtacatatcagaagcaaataaagagctccacgtgcaaaaaaaa

SEQ ID NO: 324026 - DNA, 4371 bp, Homo sapiens
gacaaaactgaatttctcttctcagcctgaactacatactccgttttctctatttcagatgaatttcctgaaataaaccgagcctcaattcgacaggatcacaaggggagattctatgaagacttttacaaagtggtggtgcagaatgagagaagagaagaatggacttcacttctcgtaaccattaaaaaactcttcatccagtatccagtgttggtgcgactggaacaggcagagggctttcctcaaggagataattctacctcagcacaaggaaactacctggaggccatcaatctgtcattcaatgtgtttgataagcactacatcaaccgcaactttgaccgaactgggcagatgtcagtggtgatcacgcccggggtgggtgtctttgaagtggaccgcctactcatgatcctgaccaagcagcggatgatagataatggaattggtgtggatttggtgtgcatgggagagcaaccgttacatgctgtcccattgttcaagctccataatcggagtgctccccgtgattctcgtctgggcgatgactataatatccctcactggataaaccacagtttctacacatccaaaagccagctcttttgtaatagtttcaccccacgaataaaactggcaggaaagaagcccgcctctgagaaagcaaaaaatggccgtgatacatctctcgggagtccaaaagaatctgagaacgcccttcccatccaagtagattatgacgcctatgacgctcaagtgttcaggctgcccggcccatcccgggcccagtgcctcaccacctgcagatctgtgcgagagcgagagagtcacagtcgaaagagtgccagctcctgtgatgtttcatccagcccttccctaccaagccgcacactgcccactgaggaagtgaggagccaggcttctgacgacagctccctaggcaagagtgccaacatcctgatgatcccacacccccacctgcaccagtatgaagtcagcagctccttgggatacaccagcactcgagatgtcctggagaacatgatggagccaccacagcgagactccagtgcaccagggaggtttcacgttggcagtgcagaatccatgctgcatgttcgacctggtggatacacgccccagagagcactgattaaccccttcgctccctctcggatgcccatgaagcttacgtccaacagaaggcgctggatgcacacttttcctgtgggtatgaatcctaggacccagaataaggattctctagaggacagtgtttctacctctccagacccaatgccaggcttctgttgcacagttggagtggactggaagtctctcactactccggcgtgcctcccccttaccaccgactacttccctgaccgccagggcctgcagaatgactacacagagggctgttatgatctccttccagaagcagacatcgacaggagggacgaagatggtgtgcagatgacagcccagcaggtatttgaagagtttatttgccaacgtctcatgcagggctaccaaatcatagtgcagcccaagacacagaaacccaatcctgctgtcccgcccccgctgagcagtagcccactctatagccgaggccttgtgtcccgaaaccgccctgaggaggaggaccagtattggctgagtatgggcagaacgttccacaaagtgacgctgaaggataagatgatcacagtgacgcgataccttcccaagtatccttatgaatctgcccagatccactacacctacagcctctgtccttcccactcagactcagagttcgtctcctgctgggtggaattctcccacgaacggctggaggagtacaagtggaattacttagatcagtatatctgttctgccggctctgaagacttcagcttaattgagtccctgaagttctggaggacccgcttcctgctgctgccagcctgtgtcaccgccaccaagcgcatcacggagggggaggcccactgcgacatctatggggacaggccccgtgcagacgaggacgagtggcaactcctggatggttttgtccgctttgtggagggcttgaatcgcattcgcaggcggcatcgctcggatcgcatgatgcggaaagggaccgccatgaaaggcttgcagatgactgggcccatttccacgcattctctggagtcaactgcacccccagtggggaagaagggaacctcagctctctctgccctgttggagatggaggccagtcagaagtgcctgggagaacagcaggcagctgtgcatggtgggaagagctccgcccagtcagccgagagcagcagcgttgccatgactcccacctacatggacagcccacgaaaggtatctgtggaccaaacagccactcctatgttggacggcaccagtttgggcatatgcacaggccaatccatggacagaggcaacagccagacctttgggaactcccagaacataggagaacagggctactcctccacaaactccagtgacagcagctctcagcagctggtggcaagctccttgacctcatcctctaccctgacagagatcctggaagccatgaagcacccctcgacaggagtccagctgctctctgaacagaagggcctctcaccgtactgcttcatcagcgcggaggtggtacactggttggtgaaccacgtggaggggatccagacacaggcgatggccattgacatcatgcagaaaatgctggaagagcagctcatcacacatgcatctggcgaagcctggcggaccttcatctacggcttctatttctacaagatagtaacggacaaagagcccgaccgagtggccatgcagcagcccgccaccacctggcacacagcaggagtggacgacttcgccagcttccagcgcaagtggtttgaggtggcctttgtggcagaagagctcgtgcactctgagattcctgcctttctcctgccctggctgcctagccggccagcctcctatgcaagtaggcacagctcctttagccgaagttttggaggacggagccaggcggcagcacttttagctgccactgtcccagagcagaggactgtgaccctggatgttgacgtgaacaaccgcacagaccggctggagtggtgcagctgttattaccatggcaacttttctctgaatgcagcctttgagatcaagctgcactggatggcggtgaccgcagcagtactcttcgagatggtccaaggttggcatcggaaagccacctcctgtggcttcttgttagtcccagttttggaggggccttttgcactgcccagttacctgtatggcgacccccttcgtgcccagctcttcatcccactcaacatcagctgcttgctcaaggagggcagcgagcacctgtttgatagctttgaacccgaaacgtactgggatcgaatgcacctcttccaggaagccattgcacacaggtttgggtttgtacaagataaatattctgcctctgcttttaacttccctgctgagaacaagcctcagtatatccacgttacaggaacagtgtttctgcagctgccctactccaagcgcaagttctcagggcagcagcggcggcggcggaactccaccagctccaccaaccagaacatgttctgcgaggagcgggtcggctacaactgggcctacaacaccatgctcaccaaaacatggcgctccagcgccacaggggatgaaaagtttgctgatcggctgctgaaggacttcacggacttctgcatcaaccgtgacaaccggctggtcacgttctggacaagttgcctggagaagatgcatgccagtgccccgtgaggccaggctgcacctgtgctgggggaaggtgggtgagccactgccctcaaacccggggcggaggattccaggcaggctctaggagtcaggtgtccgtttgctgctatcagtgagtgggggccattgttttttgtttgtttgtttgtttgtttgtttgtttttggcccccacgacaagtcttctactctagaagaaagactttggaagcagctgctgctgctgccaccactcctgtcagcaagtgctcagagcaggtgggaggcacagattgtccgtgggagggctccagtgtctgggaagagggcaggcggcccccatgaatgtcctcggaagggggtggctcctggtagcatccttttccttcaccatctatgggatattaggggcagaatctgccacttcttgcccaggagtgtgcacagatgtaagataattttgtgaaataatgtaccatagactctcaccaactgtatatacctgtacatatcagaagcaaataaagagctccacgtgcaaaaaaaa

SEQ ID NO: 324027 - DNA, 3843 bp, Homo sapiens
gacaaaactgaatttctcttctcagcctgaactacatactccgttttctctatttcagatgaatttcctgaaataaaccgagcctcaattcgacaggatcacaaggggagattctatgaagacttttacaaagtggtggtgcagaatgagagaagagaagaatggacttcacttctcgtaaccattaaaaaactcttcatccagtatccagtgttggtgcgactggaacaggcagagggctttcctcaaggagataattctacctcagcacaaggaaactacctggaggccatcaatctgtcattcaatgtgtttgataagcactacatcaaccgcaactttgaccgaactgggcagatgtcagtggtgatcacgcccggggtgggtgtctttgaagtggaccgcctactcatgatcctgaccaagcagcggatgatagataatggaattggtgtggatttggtgtgcatgggagagcaaccgttacatgctgtcccattgttcaagctccataatcggagtgctccccgtgattctcgtctgggcgatgactataatatccctcactggataaaccacagtttctacacatccaaaagccagctcttttgtaatagtttcaccccacgaataaaactggcaggaaagaagcccgcctctgagaaagcaaaaaatggccgtgatacatctctcgggagtccaaaagaatctgagaacgcccttcccatccaagtagattatgacgcctatgacgctcaagtgttcaggctgcccggcccatcccgggcccagtgcctcaccacctgcagatctgtgcgagagcgagagagtcacagtcgaaagagtgccagctcctgtgatgtttcatccagcccttccctaccaagccgcacactgcccactgaggaagtgaggagccaggcttctgacgacagctccctaggcaagagtgccaacatcctgatgatcccacacccccacctgcaccagtatgaagtcagcagctccttgggatacaccagcactcgagatgtcctggagaacatgatggagccaccacagcgagactccagtgcaccagggaggtttcacgttggcagtgcagaatccatgctgcatgttcgacctggtggatacacgccccagagagcactgattaaccccttcgctccctctcggatgcccatgaagcttacgtccaacagaaggcgctggatgcacacttttcctgtggggccatccggagaagccatccagatccaccaccagacccgacagaatatggcggagctacaaggcagcgggcagagggatccaactcactcctctgcagagctgctggagttagcatatcatgaagctgctggaaggcacagcaattcccgccagcctggtgacggcatgtccttcttgaacttcagtggaacagaggagctttctgtcggcctgcttagcaacagtggtgcaggtatgaatcctaggacccagaataaggattctctagaggacagtgtttctacctctccagacccaattctgacactgtctgctccccctgtagtgccaggcttctgttgcacagttggagtggactggaagtctctcactactccggcgtgcctcccccttaccaccgactacttccctgaccgccagggcctgcagaatgactacacagagggctgttatgatctccttccagaagcagacatcgacaggagggacgaagatggtgtgcagatgacagcccagcaggtatttgaagagtttatttgccaacgtctcatgcagggctaccaaatcatagtgcagcccaagacacagaaacccaatcctgctgtcccgcccccgctgagcagtagcccactctatagccgaggccttgtgtcccgaaaccgccctgaggaggaggaccagtattggctgagtatgggcagaacgttccacaaagtgacgctgaaggataagatgatcacagtgacgcgataccttcccaagtatccttatgaatctgcccagatccactacacctacagcctctgtccttcccactcagactcagagttcgtctcctgctgggtggaattctcccacgaacggctggaggagtacaagtggaattacttagatcagtatatctgttctgccggctctgaagacttcagcttaattgagtccctgaagttctggaggacccgcttcctgctgctgccagcctgtgtcaccgccaccaagcgcatcacggagggggaggcccactgcgacatctatggggacaggccccgtgcagacgaggacgagtggcaactcctggatggttttgtccgctttgtggagggcttgaatcgcattcgcaggcggcatcgctcggatcgcatgatgcggaaagggaccgccatgaaaggcttgcagatgactgggcccatttccacgcattctctggagtcaactgcacccccagtggggaagaagggaacctcagctctctctgccctgttggagatggaggccagtcagaagtgcctgggagaacagcaggcagctgtgcatggtgggaagagctccgcccagtcagccgagagcagcagcgttgccatgactcccacctacatggacagcccacgaaaggtatctgtggaccaaacagccactcctatgttggacggcaccagtttgggcatatgcacaggccaatccatggacagaggcaacagccagacctttgggaactcccagaacataggagaacagggctactcctccacaaactccagtgacagcagctctcagcagctggtggcaagctccttgacctcatcctctaccctgacagagatcctggaagccatgaagcacccctcgacaggagtccagctgctctctgaacagaagggcctctcaccgtactgcttcatcagcgcggaggtggtacactggttggtgaaccacgtggaggggatccagacacaggcgatggccattgacatcatgcagaaaatgctggaagagcagctcatcacacatgcatctggcgaagcctggcggaccttcatctacggcttctatttctacaagatagtaacggacaaagagcccgaccgagtggccatgcagcagcccgccaccacctggcacacagcaggagtggacgacttcgccagcttccagcgcaagtggtttgaggtggcctttgtggcagaagagctcgtgcactctgagattcctgcctttctcctgccctggctgcctagccggccagcctcctatgcaagtaggcacagctcctttagccgaagttttggaggacggagccaggcggcagcacttttagctgccactgtcccagagcagaggactgtgaccctggatgttgacgtgaacaaccgcacagaccggctggagtggtgcagctgttattaccatggcaacttttctctgaatgcagcctttgagatcaagctgcactggatggcggtgaccgcagcagtactcttcgagatggtccaaggttggcatcggaaagccacctcctgtggcttcttgttagtcccagttttggaggggccttttgcactgcccagttaccagattgtccgtgggagggctccagtgtctgggaagagggcaggcggcccccatgaatgtcctcggaagggggtggctcctggtagcatccttttccttcaccatctatgggatattaggggcagaatctgccacttcttgcccaggagtgtgcacagatgtaagataattttgtgaaataatgtaccatagactctcaccaactgtatatacctgtacatatcagaagcaaataaagagctccacgtgcaaaaaaaa

SEQ ID NO: 324028 - DNA, 3791 bp, Homo sapiens
gacaaaactgaatttctcttctcagcctgaactacatactccgttttctctatttcagatgaatttcctgaaataaaccgagcctcaattcgacaggatcacaaggggagattctatgaagacttttacaaagtggtggtgcagaatgagagaagagaagaatggacttcacttctcgtaaccattaaaaaactcttcatccagtatccagtgttggtgcgactggaacaggcagagggctttcctcaaggagataattctacctcagcacaaggaaactacctggaggccatcaatctgtcattcaatgtgtttgataagcactacatcaaccgcaactttgaccgaactgggcagatgtcagtggtgatcacgcccggggtgggtgtctttgaagtggaccgcctactcatgatcctgaccaagcagcggatgatagataatggaattggtgtggatttggtgtgcatgggagagcaaccgttacatgctgtcccattgttcaagctccataatcggagtgctccccgtgattctcgtctgggcgatgactataatatccctcactggataaaccacagtttctacacatccaaaagccagctcttttgtaatagtttcaccccacgaataaaactggcaggaaagaagcccgcctctgagaaagcaaaaaatggccgtgatacatctctcgggagtccaaaagaatctgagaacgcccttcccatccaagtagattatgacgcctatgacgctcaagtgttcaggctgcccggcccatcccgggcccagtgcctcaccacctgcagatctgtgcgagagcgagagagtcacagtcgaaagagtgccagctcctgtgatgtttcatccagcccttccctaccaagccgcacactgcccactgaggaagtgaggagccaggcttctgacgacagctccctaggcaagagtgccaacatcctgatgatcccacacccccacctgcaccagtatgaagtcagcagctccttgggatacaccagcactcgagatgtcctggagaacatgatggagccaccacagcgagactccagtgcaccagggaggtttcacgttggcagtgcagaatccatgctgcatgttcgacctggtggatacacgccccagagagcactgattaaccccttcgctccctctcggatgcccatgaagcttacgtccaacagaaggcgctggatgcacacttttcctgtggggccatccggagaagccatccagatccaccaccagacccgacagaatatggcggagctacaaggcagcgggcagagggatccaactcactcctctgcagagctgctggagttagcatatcatgaagctgctggaaggcacagcaattcccgccagcctggtgacggcatgtccttcttgaacttcagtggaacagaggagctttctgtcggcctgcttagcaacagtggtgcaggtatgaatcctaggacccagaataaggattctctagaggacagtgtttctacctctccagacccaattctgacactgtctgctccccctgtagtgccaggcttctgttgcacagttggagtggactggaagtctctcactactccggcgtgcctcccccttaccaccgactacttccctgaccgccagggcctgcagaatgactacacagagggctgttatgatctccttccagaagcagacatcgacaggagggacgaagatggtgtgcagatgacagcccagcaggtatttgaagagtttatttgccaacgtctcatgcagggctaccaaatcatagtgcagcccaagacacagaaacccaatcctgctgtcccgcccccgctgagcagtagcccactctatagccgaggccttgtgtcccgaaaccgccctgaggaggaggaccagtattggctgagtatgggcagaacgttccacaaagtgacgctgaaggataagatgatcacagtgacgcgataccttcccaagtatccttatgaatctgcccagatccactacacctacagcctctgtccttcccactcagactcagagttcgtctcctgctgggtggaattctcccacgaacggctggaggagtacaagtggaattacttagatcagtatatctgttctgccggctctgaagacttcagcttaattgagtccctgaagttctggaggacccgcttcctgctgctgccagcctgtgtcaccgccaccaagcgcatcacggagggggaggcccactgcgacatctatggggacaggccccgtgcagacgaggacgagtggcaactcctggatggttttgtccgctttgtggagggcttgaatcgcattcgcaggcggcatcgctcggatcgcatgatgcggaaagggaccgccatgaaaggcttgcagatgactgggcccatttccacgcattctctggagtcaactgcacccccagtggggaagaagggaacctcagctctctctgccctgttggagatggaggccagtcagaagtgcctgggagaacagcaggcagctgtgcatggtgggaagagctccgcccagtcagccgagagcagcagcgttgccatgactcccacctacatggacagcccacgaaaggtatctgtggaccaaacagccactcctatgttggacggcaccagtttgggcatatgcacaggccaatccatggacagaggcaacagccagacctttgggaactcccagaacataggagaacagggctactcctccacaaactccagtgacagcagctctcagcagctggtggcaagctccttgacctcatcctctaccctgacagagatcctggaagccatgaagcacccctcgacaggagtccagctgctctctgaacagaagggcctctcaccgtactgcttcatcagcgcggaggtggtacactggttggtgaaccacgtggaggggatccagacacaggcgatggccattgacatcatgcagaaaatgctggaagagcagctcatcacacatgcatctggcgaagcctggcggaccttcatctacggcttctatttctacaagatagtaacggacaaagagcccgaccgagtggccatgcagcagcccgccaccacctggcacacagcaggagtggacgacttcgccagcttccagcgcaagtggtttgaggtggcctttgtggcagaagagctcgtgcactctgagattcctgcctttctcctgccctggctgcctagccggccagcctcctatgcaagtaggcacagctcctttagccgaagttttggaggacggagccaggcggcagcacttttagctgccactgtcccagagcagaggactgtgaccctggatgttgacgtgaacaaccgcacagaccggctggagtggtgcagctgttattaccatggcaacttttctctgaatgcagcctttgagatcaagctgcactggatggcggtgaccgcagcagtactcttcgagatggtccaaggttggcatcggaaagccacctcctgtggcttcttgttagtcccagttttggaggggccttttgcactgcccagttacctgtatggcgacccccttcgtgcccagctcttcatcccactcaacatcagctgcttgctcaaggagggcagcgagcacctgtttgatagctttgaacccgaaacgtactgggatcgaatgcacctcttccaggaagccattgcacacagctgtaaggatctttgagatgatttaaataaatcgctgcagagtaattgtcttgtggt

SEQ ID NO: 324029 - DNA, 1878 bp, Homo sapiens
gacaaaactgaatttctcttctcagcctgaactacatactccgttttctctatttcagatgaatttcctgaaataaaccgagcctcaattcgacaggatcacaaggggagattctatgaagacttttacaaagtggtggtgcagaatgagagaagagaagaatggacttcacttctcgtaaccattaaaaaactcttcatccagtatccagtgttggtgcgactggaacaggcagagggctttcctcaaggagataattctacctcagcacaaggaaactacctggaggccatcaatctgtcattcaatgtgtttgataagcactacatcaaccgcaactttgaccgaactgggcagatgtcagtggtgatcacgcccggggtgggtgtctttgaagtggaccgcctactcatgatcctgaccaagcagcggatgatagataatggaattggtgtggatttggtgtgcatgggagagcaaccgttacatgctgtcccattgttcaagctccataatcggagtgctccccgtgattctcgtctgggcgatgactataatatccctcactggataaaccacagtttctacacatccaaaagccagctcttttgtaatagtttcaccccacgaataaaactggcaggaaagaagcccgcctctgagaaagcaaaaaatggccgtgatacatctctcgggagtccaaaagaatctgagaacgcccttcccatccaagtagattatgacgcctatgacgctcaagtgttcaggctgcccggcccatcccgggcccagtgcctcaccacctgcagatctgtgcgagagcgagagagtcacagtcgaaagagtgccagctcctgtgatgtttcatccagcccttccctaccaagccgcacactgcccactgaggaagtgaggagccaggcttctgacgacagctccctaggcaagagtgccaacatcctgatgatcccacacccccacctgcaccagtatgaagtcagcagctccttgggatacaccagcactcgagatgtcctggagaacatgatggagccaccacagcgagactccagtgcaccagggaggtttcacgttggcagtgcagaatccatgctgcatgttcgacctggtggatacacgccccagagagcactgattaaccccttcgctccctctcggatgcccatgaagcttacgtccaacagaaggcgctggatgcacacttttcctgtggggccatccggagaagccatccagatccaccaccagacccgacagaatatggcggagctacaaggcagcgggcagagggatccaactcactcctctgcagagctgctggagttagcatatcatgaagctgctggaaggcacagcaattcccgccagcctggtgacggcatgtccttcttgaacttcagtggaacagaggagctttctgtcggcctgcttagcaacagtggtgcaggtatgaatcctaggacccagaataaggattctctagaggacagtgtttctacctctccagacccaattctgacactgtctgctccccctgtagtgccaggcttctgttgcacagttggagtggactggaagtctctcactactccggcgtgcctcccccttaccaccgactacttccctgaccgccagggcctgcagaatgactacacagagggctgttatgatctccttccagaagcagacatcgacaggtcagtgtcagagaaaaaggcacttggcttggttggtgagggtttcggatatatcccacacatgcatcagaacactggatttgtgctggcttcagcaacacatatattaaaattggaacgatatagaggagattagcatggccgttaaataaaaaatttt

SEQ ID NO: 324030 - DNA, 1733 bp, Homo sapiens
gacaaaactgaatttctcttctcagcctgaactacatactccgttttctctatttcagatgaatttcctgaaataaaccgagcctcaattcgacaggatcacaaggggagattctatgaagacttttacaaagtggtggtgcagaatgagagaagagaagaatggacttcacttctcgtaaccattaaaaaactcttcatccagtatccagtgttggtgcgactggaacaggcagagggctttcctcaaggagataattctacctcagcacaaggaaactacctggaggccatcaatctgtcattcaatgtgtttgataagcactacatcaaccgcaactttgaccgaactgggcagatgtcagtggtgatcacgcccggggtgggtgtctttgaagtggaccgcctactcatgatcctgaccaagcagcggatgatagataatggaattggtgtggatttggtgtgcatgggagagcaaccgttacatgctgtcccattgttcaagctccataatcggagtgctccccgtgattctcgtctgggcgatgactataatatccctcactggataaaccacagtttctacacatccaaaagccagctcttttgtaatagtttcaccccacgaataaaactggcaggaaagaagcccgcctctgagaaagcaaaaaatggccgtgatacatctctcgggagtccaaaagaatctgagaacgcccttcccatccaagtagattatgacgcctatgacgctcaagtgttcaggctgcccggcccatcccgggcccagtgcctcaccacctgcagatctgtgcgagagcgagagagtcacagtcgaaagagtgccagctcctgtgatgtttcatccagcccttccctaccaagccgcacactgcccactgaggaagtgaggagccaggcttctgacgacagctccctaggcaagagtgccaacatcctgatgatcccacacccccacctgcaccagtatgaagtcagcagctccttgggatacaccagcactcgagatgtcctggagaacatgatggagccaccacagcgagactccagtgcaccagggaggtttcacgttggcagtgcagaatccatgctgcatgttcgacctggtggatacacgccccagagagcactgattaaccccttcgctccctctcggatgcccatgaagcttacgtccaacagaaggcgctggatgcacacttttcctgtggggccatccggagaagccatccagatccaccaccagacccgacagaatatggcggagctacaaggcagcgggcagagggatccaactcactcctctgcagagctgctggagttagcatatcatgaagctgctggaaggcacagcaattcccgccagcctggtgacggcatgtccttcttgaacttcagtggaacagaggagctttctgtcggcctgcttagcaacagtggtgcaggtaaccaatccaagaggtaatagagttgggatgtttagatcaggctcacatctggaaatgacacaagggccagaaaagcagggccatgtctattttgagatcatttcagccacacttttgggtgacctatttagaaacagtgctctataatgcatggaattaaaaatgggctgcacgttaacatttttagctcagaacatgttggtcaagccacatttatcatcattctgtcacagagttgtgattgagggcagcttaggagcat

SEQ ID NO: 324031 - DNA, 375 bp, Homo sapiens
cacaggctggctgaaatcagccgttgcggtggctgtaagatagtatatgtgctcttgcctctgctcgggtgacattagatagcgagcacctgtttgatagctttgaacccgaaacgtactgggatcgaatgcacctcttccaggaagccattgcacacaggcggcccccatgaatgtcctcggaagggggtggctcctggtagcatccttttccttcaccatctatgggatattaggggcagaatctgccacttcttgcccaggagtgtgcacagatgtaagataattttgtgaaataatgtaccatagactctcaccaactgtatatacctgtacatatcagaagcaaataaagagctccacgtgcaaaaaaaa

SEQ ID NO: 324032 - DNA, 207 bp, Homo sapiens
ctcaacatcagctgcttgctcaaggagggcagcgagcacctgtttgatagtaagaaatattcccttctggaggttgtctcaaccagtaagaccccgtccctaacaaggacaccactctgggtatccagtcaacacggactagggaaaagggacagcctttcaacaaggggccaaaaggatcaaggttctaaaggatcctgattcttg

SEQ ID NO: 324033 - DNA, 427 bp, Homo sapiens
tccctcccctggccccccatcccacacttgccatggtgaccacatgtaccttttccccctgttacgtgaggcagttctgacactgtctgctccccctgtagtgccaggcttctgttgcacagttggagtggactggaagtctctcactactccggcgtgcctcccccttaccaccgactacttccctgaccgccagggcctgcagaatgactacacagagggctgttatgatctccttccagaagcagacatcgacaggtcagtgtcagagaaaaaggcacttggcttggttggtgagggtttcggatatatcccacacatgcatcagaacactggatttgtgctggcttcagcaacacatatattaaaattggaacgatatagaggagattagcatggccgttaaataaaaaattttaaaaaaaca

SEQ ID NO: 324034 - DNA, 545 bp, Homo sapiens
tattgggttccatgtggcttgggctggtgatgggttttagttttaactcaaggtaggacagcatccctcgcttgatggtaactttttgtctcttgcctggcagatctgtgcgagagcgagagagtcacagtcgaaagagtgccagctcctgtgatgtttcatccagcccttccctaccaagccgcacactgcccactgaggaagtgaggagccaggcttctgacgacagctccctaggcaagagtgccaacatcctgatgatcccacacccccacctgcaccagtatgaagtcagcagctccttgggatacaccagcactcgaggtaagagtgctgaagcacagacagagccagggacatctttcttaatatagtgggtgactggaggtgggaggattggtcagaggtggggtgtaaatcccacatcttaatgatttctttgccagtgcagtaggtacaaatcactttagctgttagctatgtatatattatacttcttttttttttttttttttttttggtgacagagcacctaggataaagtg

SEQ ID NO: 324035 - DNA, 305 bp, Homo sapiens
gtacatttcttcttacacactaagtctcattatgtaaacattactcaatcagatttttaaaatgcactgtttttattaaattgccctaaattgagctattttaggtaaaacccggactccagatttaaattaccctaataatctcaatttatgagaatttatgaaaaacacaaagctaacatcacactcaatggtaaaagactgaaaactttcccccaagatcagtaacaaggtaagtatgcttgcttttgccactgatattcaacattatactaactagaagttctagacagaccacctaggca

SEQ ID NO: 324036 - DNA, 4632 bp, Homo sapiens
gacaaaactgaatttctcttctcagcctgaactacatactccgttttctctatttcagatgaatttcctgaaataaaccgagcctcaattcgacaggatcacaaggggagattctatgaagacttttacaaagtggtggtgcagaatgagagaagagaagaatggacttcacttctcgtaaccattaaaaaactcttcatccagtatccagtgttggtgcgactggaacaggcagagggctttcctcaaggagataattctacctcagcacaaggaaactacctggaggccatcaatctgtcattcaatgtgtttgataagcactacatcaaccgcaactttgaccgaactgggcagatgtcagtggtgatcacgcccggggtgggtgtctttgaagtggaccgcctactcatgatcctgaccaagcagcggatgatagataatggaattggtgtggatttggtgtgcatgggagagcaaccgttacatgctgtcccattgttcaagctccataatcggagtgctccccgtgattctcgtctgggcgatgactataatatccctcactggataaaccacagtttctacacatccaaaagccagctcttttgtaatagtttcaccccacgaataaaactggcaggaaagaagcccgcctctgagaaagcaaaaaatggccgtgatacatctctcgggagtccaaaagaatctgagaacgcccttcccatccaagtagattatgacgcctatgacgctcaagtgttcaggctgcccggcccatcccgggcccagtgcctcaccacctgcagatctgtgcgagagcgagagagtcacagtcgaaagagtgccagctcctgtgatgtttcatccagcccttccctaccaagccgcacactgcccactgaggaagtgaggagccaggcttctgacgacagctccctaggcaagagtgccaacatcctgatgatcccacacccccacctgcaccagtatgaagtcagcagctccttgggatacaccagcactcgagatgtcctggagaacatgatggagccaccacagcgagactccagtgcaccagggaggtttcacgttggcagtgcagaatccatgctgcatgttcgacctggtggatacacgccccagagagcactgattaaccccttcgctccctctcggatgcccatgaagcttacgtccaacagaaggcgctggatgcacacttttcctgtggggccatccggagaagccatccagatccaccaccagacccgacagaatatggcggagctacaaggcagcgggcagagggatccaactcactcctctgcagagctgctggagttagcatatcatgaagctgctggaaggcacagcaattcccgccagcctggtgacggcatgtccttcttgaacttcagtggaacagaggagctttctgtcggcctgcttagcaacagtggtgcaggtatgaatcctaggacccagaataaggattctctagaggacagtgtttctacctctccagacccaattctgacactgtctgctccccctgtagtgccaggcttctgttgcacagttggagtggactggaagtctctcactactccggcgtgcctcccccttaccaccgactacttccctgaccgccagggcctgcagaatgactacacagagggctgttatgatctccttccagaagcagacatcgacaggagggacgaagatggtgtgcagatgacagcccagcaggtatttgaagagtttatttgccaacgtctcatgcagggctaccaaatcatagtgcagcccaagacacagaaacccaatcctgctgtcccgcccccgctgagcagtagcccactctatagccgaggccttgtgtcccgaaaccgccctgaggaggaggaccagtattggctgagtatgggcagaacgttccacaaagtgacgctgaaggataagatgatcacagtgacgcgataccttcccaagtatccttatgaatctgcccagatccactacacctacagcctctgtccttcccactcagactcagagttcgtctcctgctgggtggaattctcccacgaacggctggaggagtacaagtggaattacttagatcagtatatctgttctgccggctctgaagacttcagcttaattgagtccctgaagttctggaggacccgcttcctgctgctgccagcctgtgtcaccgccaccaagcgcatcacggagggggaggcccactgcgacatctatggggacaggccccgtgcagacgaggacgagtggcaactcctggatggttttgtccgctttgtggagggcttgaatcgcattcgcaggcggcatcgctcggatcgcatgatgcggaaagggaccgccatgaaaggcttgcagatgactgggcccatttccacgcattctctggagtcaactgcacccccagtggggaagaagggaacctcagctctctctgccctgttggagatggaggccagtcagaagtgcctgggagaacagcaggcagctgtgcatggtgggaagagctccgcccagtcagccgagagcagcagcgttgccatgactcccacctacatggacagcccacgaaaggtatctgtggaccaaacagccactcctatgttggacggcaccagtttgggcatatgcacaggccaatccatggacagaggcaacagccagacctttgggaactcccagaacataggagaacagggctactcctccacaaactccagtgacagcagctctcagcagctggtggcaagctccttgacctcatcctctaccctgacagagatcctggaagccatgaagcacccctcgacaggagtccagctgctctctgaacagaagggcctctcaccgtactgcttcatcagcgcggaggtggtacactggttggtgaaccacgtggaggggatccagacacaggcgatggccattgacatcatgcagaaaatgctggaagagcagctcatcacacatgcatctggcgaagcctggcggaccttcatctacggcttctatttctacaagatagtaacggacaaagagcccgaccgagtggccatgcagcagcccgccaccacctggcacacagcaggagtggacgacttcgccagcttccagcgcaagtggtttgaggtggcctttgtggcagaagagctcgtgcactctgagattcctgcctttctcctgccctggctgcctagccggccagcctcctatgcaagtaggcacagctcctttagccgaagttttggaggacggagccaggcggcagcacttttagctgccactgtcccagagcagaggactgtgaccctggatgttgacgtgaacaaccgcacagaccggctggagtggtgcagctgttattaccatggcaacttttctctgaatgcagcctttgagatcaagctgcactggatggcggtgaccgcagcagtactcttcgagatggtccaaggttggcatcggaaagccacctcctgtggcttcttgttagtcccagttttggaggggccttttgcactgcccagttacctgtatggcgacccccttcgtgcccagctcttcatcccactcaacatcagctgcttgctcaaggagggcagcgagcacctgtttgatagctttgaacccgaaacgtactgggatcgaatgcacctcttccaggaagccattgcacacaggtttgggtttgtacaagataaatattctgcctctgcttttaacttccctgctgagaacaagcctcagtatatccacgttacaggaacagtgtttctgcagctgccctactccaagcgcaagttctcagggcagcagcggcggcggcggaactccaccagctccaccaaccagaacatgttctgcgaggagcgggtcggctacaactgggcctacaacaccatgctcaccaaaacatggcgctccagcgccacaggggatgaaaagtttgctgatcggctgctgaaggacttcacggacttctgcatcaaccgtgacaaccggctggtcacgttctggacaagttgcctggagaagatgcatgccagtgccccgtgaggccaggctgcacctgtgctgggggaaggtgggtgagccactgccctcaaacccggggcggaggattccaggcaggctctaggagtcaggtgtccgtttgctgctatcagtgagtgggggccattgttttttgtttgtttgtttgtttgtttgtttgtttttggcccccacgacaagtcttctactctagaagaaagactttggaagcagctgctgctgctgccaccactcctgtcagcaagtgctcagagcaggtgggaggcacagattgtccgtgggagggctccagtgtctgggaagagggcaggcggcccccatgaatgtcctcggaagggggtggctcctggtagcatccttttccttcaccatctatgggatattaggggcagaatctgccacttcttgcccaggagtgtgcacagatgtaagataattttgtgaaataatgtaccatagactctcaccaactgtatatacctgtacatatcagaagcaaataaagagctccacgtgcaaaaaaaa

SEQ ID NO: 324037 - DNA, 4069 bp, Homo sapiens
tcctttctttacaactatgatcctaggactttggctgcataatgtctgtcatttcccccctctcttatataacatctcaagctgttaagggtgaagtaccgcatacaggtttcccacttgtagatcacactggggatttttgttattgggttccatgtggcttgggctggtgatgggttttagttttaactcaaggtaggacagcatccctcgcttgatggtaactttttgtctcttgcctggcagatctgtgcgagagcgagagagtcacagtcgaaagagtgccagctcctgtgatgtttcatccagcccttccctaccaagccgcacactgcccactgaggaagtgaggagccaggcttctgacgacagctccctaggcaagagtgccaacatcctgatgatcccacacccccacctgcaccagtatgaagtcagcagctccttgggatacaccagcactcgagatgtcctggagaacatgatggagccaccacagcgagactccagtgcaccagggaggtttcacgttggcagtgcagaatccatgctgcatgttcgacctggtggatacacgccccagagagcactgattaaccccttcgctccctctcggatgcccatgaagcttacgtccaacagaaggcgctggatgcacacttttcctgtggggccatccggagaagccatccagatccaccaccagacccgacagaatatggcggagctacaaggcagcgggcagagggatccaactcactcctctgcagagctgctggagttagcatatcatgaagctgctggaaggcacagcaattcccgccagcctggtgacggcatgtccttcttgaacttcagtggaacagaggagctttctgtcggcctgcttagcaacagtggtgcaggtatgaatcctaggacccagaataaggattctctagaggacagtgtttctacctctccagacccaattctgacactgtctgctccccctgtagtgccaggcttctgttgcacagttggagtggactggaagtctctcactactccggcgtgcctcccccttaccaccgactacttccctgaccgccagggcctgcagaatgactacacagagggctgttatgatctccttccagaagcagacatcgacaggagggacgaagatggtgtgcagatgacagcccagcaggtatttgaagagtttatttgccaacgtctcatgcagggctaccaaatcatagtgcagcccaagacacagaaacccaatcctgctgtcccgcccccgctgagcagtagcccactctatagccgaggccttgtgtcccgaaaccgccctgaggaggaggaccagtattggctgagtatgggcagaacgttccacaaagtgacgctgaaggataagatgatcacagtgacgcgataccttcccaagtatccttatgaatctgcccagatccactacacctacagcctctgtccttcccactcagactcagagttcgtctcctgctgggtggaattctcccacgaacggctggaggagtacaagtggaattacttagatcagtatatctgttctgccggctctgaagacttcagcttaattgagtccctgaagttctggaggacccgcttcctgctgctgccagcctgtgtcaccgccaccaagcgcatcacggagggggaggcccactgcgacatctatggggacaggccccgtgcagacgaggacgagtggcaactcctggatggttttgtccgctttgtggagggcttgaatcgcattcgcaggcggcatcgctcggatcgcatgatgcggaaagggaccgccatgaaaggcttgcagatgactgggcccatttccacgcattctctggagtcaactgcacccccagtggggaagaagggaacctcagctctctctgccctgttggagatggaggccagtcagaagtgcctgggagaacagcaggcagctgtgcatggtgggaagagctccgcccagtcagccgagagcagcagcgttgccatgactcccacctacatggacagcccacgaaaggtatctgtggaccaaacagccactcctatgttggacggcaccagtttgggcatatgcacaggccaatccatggacagaggcaacagccagacctttgggaactcccagaacataggagaacagggctactcctccacaaactccagtgacagcagctctcagcagctggtggcaagctccttgacctcatcctctaccctgacagagatcctggaagccatgaagcacccctcgacaggagtccagctgctctctgaacagaagggcctctcaccgtactgcttcatcagcgcggaggtggtacactggttggtgaaccacgtggaggggatccagacacaggcgatggccattgacatcatgcagaaaatgctggaagagcagctcatcacacatgcatctggcgaagcctggcggaccttcatctacggcttctatttctacaagatagtaacggacaaagagcccgaccgagtggccatgcagcagcccgccaccacctggcacacagcaggagtggacgacttcgccagcttccagcgcaagtggtttgaggtggcctttgtggcagaagagctcgtgcactctgagattcctgcctttctcctgccctggctgcctagccggccagcctcctatgcaagtaggcacagctcctttagccgaagttttggaggacggagccaggcggcagcacttttagctgccactgtcccagagcagaggactgtgaccctggatgttgacgtgaacaaccgcacagaccggctggagtggtgcagctgttattaccatggcaacttttctctgaatgcagcctttgagatcaagctgcactggatggcggtgaccgcagcagtactcttcgagatggtccaaggttggcatcggaaagccacctcctgtggcttcttgttagtcccagttttggaggggccttttgcactgcccagttacctgtatggcgacccccttcgtgcccagctcttcatcccactcaacatcagctgcttgctcaaggagggcagcgagcacctgtttgatagctttgaacccgaaacgtactgggatcgaatgcacctcttccaggaagccattgcacacaggtttgggtttgtacaagataaatattctgcctctgcttttaacttccctgctgagaacaagcctcagtatatccacgttacaggaacagtgtttctgcagctgccctactccaagcgcaagttctcagggcagcagcggcggcggcggaactccaccagctccaccaaccagaacatgttctgcgaggagcgggtcggctacaactgggcctacaacaccatgctcaccaaaacatggcgctccagcgccacaggggatgaaaagtttgctgatcggctgctgaaggacttcacggacttctgcatcaaccgtgacaaccggctggtcacgttctggacaagttgcctggagaagatgcatgccagtgccccgtgaggccaggctgcacctgtgctgggggaaggtgggtgagccactgccctcaaacccggggcggaggattccaggcaggctctaggagtcaggtgtccgtttgctgctatcagtgagtgggggccattgttttttgtttgtttgtttgtttgtttgtttgtttttggcccccacgacaagtcttctactctagaagaaagactttggaagcagctgctgctgctgccaccactcctgtcagcaagtgctcagagcaggtgggaggcacagattgtccgtgggagggctccagtgtctgggaagagggcaggcggcccccatgaatgtcctcggaagggggtggctcctggtagcatccttttccttcaccatctatgggatattaggggcagaatctgccacttcttgcccaggagtgtgcacagatgtaagataattttgtgaaataatgtaccatagactctcaccaactgtatatacctgtacatatcagaagcaaataaagagctccacgtgcaaaaaaaa

SEQ ID NO: 324038 - DNA, 1318 bp, Homo sapiens
gacaaaactgaatttctcttctcagcctgaactacatactccgttttctctatttcagatgaatttcctgaaataaaccgagcctcaattcgacaggatcacaaggggagattctatgaagacttttacaaagtggtggtgcagaatgagagaagagaagaatggacttcacttctcgtaaccattaaaaaactcttcatccagtatccagtgttggtgcgactggaacaggcagagggctttcctcaaggagataattctacctcagcacaaggaaactacctggaggccatcaatctgtcattcaatgtgtttgataagcactacatcaaccgcaactttgaccgaactgggcagatgtcagtggtgatcacgcccggggtgggtgtctttgaagtggaccgcctactcatgatcctgaccaagcagcggatgatagataatggaattggtgtggatttggtgtgcatgggagagcaaccgttacatgctgtcccattgttcaagctccataatcggagtgctccccgtgattctcgtctgggcgatgactataatatccctcactggataaaccacagtttctacacatccaaaagccagctcttttgtaatagtttcaccccacgaataaaactggcaggaaagaagcccgcctctgagaaagcaaaaaatggccgtgatacatctctcgggagtccaaaagaatctgagaacgcccttcccatccaagtagattatgacgcctatgacgctcaagtgttcaggctgcccggcccatcccgggcccagtgcctcaccacctgcagctgtgctgggggaaggtgggtgagccactgccctcaaacccggggcggaggattccaggcaggctctaggagtcaggtgtccgtttgctgctatcagtgagtgggggccattgttttttgtttgtttgtttgtttgtttgtttgtttttggcccccacgacaagtcttctactctagaagaaagactttggaagcagctgctgctgctgccaccactcctgtcagcaagtgctcagagcaggtgggaggcacagattgtccgtgggagggctccagtgtctgggaagagggcaggcggcccccatgaatgtcctcggaagggggtggctcctggtagcatccttttccttcaccatctatgggatattaggggcagaatctgccacttcttgcccaggagtgtgcacagatgtaagataattttgtgaaataatgtaccatagactctcaccaactgtatatacctgtacatatcagaagcaaataaagagctccacgtgcaaaaaaaa

SEQ ID NO: 324039 - DNA, 3772 bp, Homo sapiens
gacaaaactgaatttctcttctcagcctgaactacatactccgttttctctatttcagatgaatttcctgaaataaaccgagcctcaattcgacaggatcacaaggggagattctatgaagacttttacaaagtggtggtgcagaatgagagaagagaagaatggacttcacttctcgtaaccattaaaaaactcttcatccagtatccagtgttggtgcgactggaacaggcagagggctttcctcaaggagataattctacctcagcacaaggaaactacctggaggccatcaatctgtcattcaatgtgtttgataagcactacatcaaccgcaactttgaccgaactgggcagatgtcagtggtgatcacgcccggggtgggtgtctttgaagtggaccgcctactcatgatcctgaccaagcagcggatgatagataatggaattggtgtggatttggtgtgcatgggagagcaaccgttacatgctgtcccattgttcaagctccataatcggagtgctccccgtgattctcgtctgggcgatgactataatatccctcactggataaaccacagtttctacacatccaaaagccagctcttttgtaatagtttcaccccacgaataaaactggcaggaaagaagcccgcctctgagaaagcaaaaaatggccgtgatacatctctcgggagtccaaaagaatctgagaacgcccttcccatccaagtagattatgacgcctatgacgctcaagtgttcaggctgcccggcccatcccgggcccagtgcctcaccacctgcagatctgtgcgagagcgagagagtcacagtcgaaagagtgccagctcctgtgatgtttcatccagcccttccctaccaagccgcacactgcccactgaggaagtgaggagccaggcttctgacgacagctccctaggcaagagtgccaacatcctgatgatcccacacccccacctgcaccagtatgaagtcagcagctccttgggatacaccagcactcgagatgtcctggagaacatgatggagccaccacagcgagactccagtgcaccagggaggtttcacgttggcagtgcagaatccatgctgcatgttcgacctggtggatacacgccccagagagcactgattaaccccttcgctccctctcggatgcccatgaagcttacgtccaacagaaggcgctggatgcacacttttcctgtggggccatccggagaagccatccagatccaccaccagacccgacagaatatggcggagctacaaggcagcgggcagagggatccaactcactcctctgcagagctgctggagttagcatatcatgaagctgctggaaggcacagcaattcccgccagcctggtgacggcatgtccttcttgaacttcagtggaacagaggagctttctgtcggcctgcttagcaacagtggtgcaggtatgaatcctaggacccagaataaggattctctagaggacagtgtttctacctctccagacccaattctgacactgtctgctccccctgtagtgccaggcttctgttgcacagttggagtggactggaagtctctcactactccggcgtgcctcccccttaccaccgactacttccctgaccgccagggcctgcagaatgactacacagagggctgttatgatctccttccagaagcagacatcgacaggagggacgaagatggtgtgcagatgacagcccagcaggtatttgaagagtttatttgccaacgtctcatgcagggctaccaaatcatagtgcagcccaagacacagaaacccaatcctgctgtcccgcccccgctgagcagtagcccactctatagccgaggccttgtgtcccgaaaccgccctgaggaggaggaccagtattggctgagtatgggcagaacgttccacaaagtgacgctgaaggataagatgatcacagtgacgcgataccttcccaagtatccttatgaatctgcccagatccactacacctacagcctctgtccttcccactcagactcagagttcgtctcctgctgggtggaattctcccacgaacggctggaggagtacaagtggaattacttagatcagtatatctgttctgccggctctgaagacttcagcttaattgagtccctgaagttctggaggacccgcttcctgctgctgccagcctgtgtcaccgccaccaagcgcatcacggagggggaggcccactgcgacatctatggggacaggccccgtgcagacgaggacgagtggcaactcctggatggttttgtccgctttgtggagggcttgaatcgcattcgcaggcggcatcgctcggatcgcatgatgcggaaagggaccgccatgaaaggcttgcagatgactgggcccatttccacgcattctctggagtcaactgcacccccagtggggaagaagggaacctcagctctctctgccctgttggagatggaggccagtcagaagtgcctgggagaacagcaggcagctgtgcatggtgggaagagctccgcccagtcagccgagagcagcagcgttgccatgactcccacctacatggacagcccacgaaaggtatctgtggaccaaacagccactcctatgttggacggcaccagtttgggcatatgcacaggccaatccatggacagaggcaacagccagacctttgggaactcccagaacataggagaacagggctactcctccacaaactccagtgacagcagctctcagcagctggtggcaagctccttgacctcatcctctaccctgacagagatcctggaagccatgaagcacccctcgacaggagtccagctgctctctgaacagaagggcctctcaccgtactgcttcatcagcgcggaggtggtacactggttggtgaaccacgtggaggggatccagacacaggcgatggccattgacatcatgcagaaaatgctggaagagcagctcatcacacatgcatctggcgaagcctggcggaccttcatctacggcttctatttctacaagatagtaacggacaaagagcccgaccgagtggccatgcagcagcccgccaccacctggcacacagcaggagtggacgacttcgccagcttccagcgcaagtggtttgaggtggcctttgtggcagaagagctcgtgcactctgagattcctgcctttctcctgccctggctgcctagccggccagcctcctatgcaagtaggcacagctcctttagccgaagttttggaggacggagccaggcggcagcacttttagctgccactgtcccagagcagaggactgtgaccctggatgttgacgtgaacaaccgcacagaccggctggagtggtgcagctgttattaccatggcaacttttctctgaatgcagcctttgagatcaagctgcactggatggcggtgaccgcagcagtactcttcgagatggtccaaggttggcatcggaaagccacctcctgtggcttcttgttagtcccagttttggaggggccttttgcactgcccagttaccgtggctcctggtagcatccttttccttcaccatctatgggatattaggggcagaatctgccacttcttgcccaggagtgtgcacagatgtaagataattttgtgaaataatgtaccatagactctcaccaactgtatatacctgtacatatcagaagcaaataaagagctccacgtgcaaaaaaaa

SEQ ID NO: 324040 - DNA, 1013 bp, Homo sapiens
gacaaaactgaatttctcttctcagcctgaactacatactccgttttctctatttcagatgaatttcctgaaataaaccgagcctcaattcgacaggatcacaaggggagattctatgaagacttttacaaagtggtggtgcagaatgagagaagagaagaatggacttcacttctcgtaaccattaaaaaactcttcatccagtatccagtgttggtgcgactggaacaggcagagggctttcctcaaggagataattctacctcagcacaaggaaactacctggaggccatcaatctgtcattcaatgtgtttgataagcactacatcaaccgcaactttgaccgaactgggcagatgtcagtggtgatcacgcccggggtgggtgtctttgaagtggaccgcctactcatgatcctgaccaagcagcggatgatagataatggaattggtgtggatttggtgtgcatgggagagcaaccgttacatgctgtcccattgttcaagctccataatcggagtgctccccgtgattctcgtctgggcgatgactataatatccctcactggataaaccacagtttctacacatccaaaagccagctcttttgtaatagtttcaccccacgaataaaactggcaggaaagaagcccgcctctgagaaagcaaaaaatggccgtgatacatctctcgggagtccaaaagaatctgagaacgcccttcccatccaagtagattatgacgcctatgacgctcaagtgttcaggctgcccggcccatcccgggcccagtgcctcaccacctgcagatctgtgcgagagcgagagagtcacagtcgaaagagtgccagctcctgtgatgtttcatccagcccttccctaccaagccgcacactgcccactgaggaagtgaggagccaggcttctgacgacagctccctaggcagaggttgcagtgaatcaagatcgcaccactgaactccagcctagagacagaacgagattccgtctca

SEQ ID NO: 324041 - DNA, 391 bp, Homo sapiens
tttgactagcccctggcccgaattccccttagttcctggattctgtggttctatttgttctccatcgctccttgtaactggaggagtgacttcttccgagagtcacttggcaccacttcacagcagaggaacaccagtatcttcactggcctaaaatcaaagagtggttgcaaggaaaaatctgacattccaaccttttcgtttgtatttctgtggcagggaggcaagatgacttctctgccccaagcttggaacagctaaagggaaaaacagtgcaagatgagaacaacaaaggtctacaaactcgtcatccacaagaagggctttgggggcagtggtcagtatcgattggtctttagaggttttgtaagttggctgaggttctggtgtg

SEQ ID NO: 324042 - DNA, 739 bp, Homo sapiens
agtgatatatctactctatcaggcagaatgacttagagaaatttctcaaacctgagttaggaaaaaatacatagtggactcctaagtcccttaacatctgctcataaattaagtcaaccattacattgagggattaaaccagggaccagaatatcaaatgtctacacatgtcagccaaagaagagatgcagagggttgggtggggctggaagcagataggaggggtctccagggactataggagtacaatcaacttgagtaatcacctgcttttttccccaaaccctgtgtggaatgcagccagctagctggtttaaaccagttcatgacagacctcagcaatttacagatggatcccagtgtactttcctcattaccatgctagtatcttcaccctgggagatgctatagcttcattaccataacatgtgacctgtgtgctgaaataacgactcactgcatctgcacaactgcaacccctttccatgcaacgacataccctcttccctctctatcaccccataaaaccctcctgtcactttcctgctttggagactatgcccggtgctttatttgtgacaagtaataaaactattgctcaaagcctgcattcttggttggttatagtggctcatgcctataatcccagcactttggaaggctgaggcaggaggattgcttgagcccaggagttcaaaactagcctgggcaacacagacccccttctctataaaaaaga

SEQ ID NO: 324043 - DNA, 1285 bp, Homo sapiens
aaaaaactcctcagtttcttctggtttcaaactttttaaaaaaatattaggacaagtgcagtggctcacacctataatctgttttcatcactgcttcatatttaagttctaagaagttatctgtacttactgtctctacttaatctctcatgtgcttttcaaatgcactgaaatttgggttctgtcttcatcagtccatcaaagtagcttttactaaaatcatcaatgatctccaatccattatctagttttcagttcttatcttacttgtctgcccctggcactgttcttcacagttgtactcgctcctttttgcttccaaattacattttcctcatctggtactgagctccctgttaactttctttactcttggttttagcatttccatttccttgaatgtgccagagctctgtcctctgggtctttgtacaggttgttccttgggcctacaatactcatttccaaacttttcacttaactaagaattgcaggcctcagcattaatgctacctgaagctttctctaatcctcatttaaattagttctgttacaaactttcaagttgccatattctttcataacattaacacaaattttgtaaacatgtatttggtggtttgtctaatttctgtatccatactacgtttaacctctgtgaggacaagggagcatgtttcttgttcagaattataaattagtccagtcatagtccctggcacataatattgaaattagtgaatcgtgtgtatcttcataaacatactgtttgtcctggtagagcaaaaattgtcaacctgggattcatggacaaccaatgatgtgaaaaaaacccagtaatttcctgcaagattctgtgcttttccttggagggaagtccctgaatttcatgggactttcaaaagaactgagacattctgacccccagaaagaaagacccaccacagtgataaaagagttccaaagcttcacctccagctttttactgtctctcccaccgccatgcatctgcacaactgcaacccctttccatgcaacgacataccctcttccctctctatcaccccataaaaccctcctgtcactttcctgctttggagactatgcccggtgctttatttgtgacaagtaataaaactattgctcaaagcctgcattcttggttggttatagtggctcatgcctataatcccagcactttggaaggctgaggcaggaggattgcttgagcccaggagttcaaaactagcctgggcaacacagacccccttctctataaaaaaga

SEQ ID NO: 324044 - DNA, 1125 bp, Homo sapiens
aaaaaactcctcagtttcttctggtttcaaactttttaaaaaaatattaggacaagtgcagtggctcacacctataatctgttttcatcactgcttcatatttaagttctaagaagttatctgtacttactgtctctacttaatctctcatgtgcttttcaaatgcactgaaatttgggttctgtcttcatcagtccatcaaagtagcttttactaaaatcatcaatgatctccaatccattatctagttttcagttcttatcttacttgtctgcccctggcactgttcttcacagttgtactcgctcctttttgcttccaaattacattttcctcatctggtactgagctccctgttaactttctttactcttggttttagcatttccatttccttgaatgtgccagagctctgtcctctgggtctttgtacaggttgttccttgggcctacaatactcatttccaaacttttcacttaactaagaattgcaggcctcagcattaatgctacctgaagctttctctaatcctcatttaaattagttctgttacaaactttcaagttgccatattctttcataacattaacacaaattttgtaaacatgtatttggtggtttgtctaatttctgtatccatactacgtttaacctctgtgaggacaagggagcatgtttcttgttcagaattataaattagtccagtcatagtccctggcacataatattgaaattagtgaatcgtgtgtatcttcataaacatactgtttgtcctggtagagcaaaaattgtcaacctgggattcatggacaaccaatgatgtgaaaaaaacccagtaatttcctgcaagattctgtgcttttccttggagggaagtccctgaatttcatgggactttcaaaagaactgagacattctgacccccagaaagaaagacccaccacagtgataaaagagttccaaagcttcacctccagctttttactgtctctcccaccgccagtatctgtgacactgccgtatcaacatacagcaatctcctaatttgaatataatcaagaacttttccactacctgtttggatggagaaactgattaaaaaaacgtttctagaaagcatacct

SEQ ID NO: 324045 - DNA, 665 bp, Homo sapiens
gagaatgggtagatatgattgaggatgcagcccatgagactgttcccattatgctggtaggaaacaaggctgacattcgtgacactgctgctacagagggacaaaaatgtgtcccagggcactttggagagaaactggccatgacgtatggggcattattctgtgaaacaagtgccaaagatggttctaacatagtggaggctgttctgcaccttgctcgagaagtgaaaaagagaactgacaaggatgacagcagatccattaccaatctaaccgggaccaattccaaaaagtcaccacagatgaagaattgttgcaatggctaaatcccaaacatccttggcctgtgaagtcttcatttccagaatactgaatttgtgtgacttatttggctcttaacagagtggcacatcctactgacactgtcctatggagagttacagtgcaggaaacctgaacccagctctcaggtccctctggaactttggctcttctttgttttgtctcagtgagtgatttgggccctctggctaaatagactagtcatgtccttacaggtcttaaaagataacatgtaaatgtttttaaaatggtaaaaaaaaagaaatcacatgctcagatcaaagctgtagaggaaactgacataattagactcaggtggtgtg

SEQ ID NO: 324046 - DNA, 431 bp, Homo sapiens
cagtaatcctctctctctctctctctctctctctctgtctctctctatctctgtctcagagaagtgaaaaagagaactgacaaggatgacagcagatccattaccaatctaaccgggaccaattccaaaaagtcaccacagatgaagaattgttgcaatggctaaatcccaaacatccttggcctgtgaagtcttcatttccagaatactgaatttgtgtgacttatttggctcttaacagagtggcacatcctactgacactgtcctatggagagttacagtgcaggaaacctgaacccagctctcaggtccctctggaactttggctcttctttgttttgtctcagtgagtgatttgggccctctggctaaatagactagtcatgtccttacaggtcttaaaagataacatgtaaatgtttttaaaatg

SEQ ID NO: 324047 - DNA, 784 bp, Homo sapiens
gagaatgggtagatatgattgaggatgcagcccatgagactgttcccattatgctggtaggaaacaaggctgacattcgtgacactgctgctacagagggacaaaaatgtgtcccagggcactttggagagaaactggccatgacgtatggggcattattctgtgaaacaagtgccaaagatggttctaacatagtggaggctgttctgcaccttgctcgagaagtgaaaaagagaactgacaaggatgacagcagatccattaccaatctaaccgggaccaattccaaaaagtcaccacagatgaagaattgttgcaatggctaaatcccaaacatccttggcctgtgaagtcttcatttccagaatactgaatttgtgtgacttatttggctcttaacagagtggcacatcctactgacactgtcctatggagagttacagtgcaggaaacctgaacccagctctcaggtccctctggaactttggctcttctttgttttgtctcagtgagtgatttgggccctctggctaaatagactagtcatgtccttacaggtcttaaaagataacatgtaaatgtttttaaaatggtaacctcgtgccgaattcggcacgaggagtttagattcaagaatgttaagcaactttgtttttgcggtgctccctatttcatagtatcttcaaatcaaaaataaaaattatctccattttgttaaagaacttacagggtcagggttctccttgtcacttagaattgggacactgccaggcaatcctctccc

SEQ ID NO: 324048 - DNA, 518 bp, Homo sapiens
cagcactgaagcactgcagcccagcccagcagcaaggtatgttgccgtgtactgcttcctagggtgcgggactgcacgccctcagagtctcaccctgaggcccaggccggagtgctgtgacgtgatcttggctcactgcaacctctgcctcccggattcaagcaattctcctgtctcaacctcccaagtaactgggattacaggtatgcgccaccacacacaactaatttttgtattttttagtcgacatggggtttctccattttggcctggctggtctcaaactcctggctgcaagtgatccacctgcctcggcctcccaaagtcctgaaattacaggcgtgagccacccctcccaaactcttttttctttattagtctagctagtggtctatcttactaacttttccaaagaaacaattcctgggttcattgaccttttgtatagttttttgcttctcaatttccttcaattcagctctgatttgggttatttctggtcttctgctagatttggg

SEQ ID NO: 324049 - DNA, 2452 bp, Homo sapiens
agcgggggtttctctcactgcctgccttggtgatcttggttacttaaaggctctaagcttgagttttctcatccatcaaaacacacacctactacttggaagatgaactgttctcatcagcaacatgctattatgtcatcttttaggactaggtaatgctccagtgacttaataccaatgacattttcatgttgtccacaaattctgagtagaaaccttttcaagcctgtagcctctctgagagctgactgttattaactgaatgagaggatgtcagcaaacagagttaatagagtggatacaaccttgctgaagatgaagaatatacaatattgaggatatttttttcttttttttttcaagtcttgatttgtggcttacctcaagttaccatttttcagtcaagtctgtttgtttgcttcttcagaaatgttttttacaatctcaagaaaaaatatgtcccagaaattgagtttactgttgcttgtatttggactcatttggggattgatgttactgcactatacttttcaacaaccaagacatcaaagcagtgtcaagttacgtgagcaaatactagacttaagcaaaagatatgttaaagctctagcagaggaaaataagaacacagtggatgtcgagaacggtgcttctatggcaggatatgcggatctgaaaagaacaattgctgtccttctggatgacattttgcaacgattggtgaagctggagaacaaagttgactatattgttgtgaatggctcagcagccaacaccaccaatggtactagtgggaatttggtgccagtaaccacaaataaaagaacgaatgtctcgggcagtatcagatagcagttgaaaatcaccttgtgctgctccatccactgtggattatatcctatggcagaaaagctttataattgctggcttaggacagagcaatactttacaataaaagctctacacattttcaaggagtatgctggattcatggaactctaattctgtacataaaaattttaaagttatttgtttgctttcaggcaagtctgttcaatgctgtactatgtccttaaagagaatttggtaatttggttgatgtggtaagcagataggtgagttttgtataaatcttttgtgtttgagatcaagctgaaatgaaaacactgaaaaacatggattcatttctataacacatttatttaagtatataacacgttttttggacaagtgaagaatgtttaatcattctgtcatttgttctcaatagatgtaactgttagactacggctatttgaaaaaatgtgcttattgtactatattttgttattccaattatgagcagagaaaggaaatataatgttgaaaataatgttttgaaatcatgacccaaagaatgtattgatttgcactatccttcagaataactgaaggttaattattgtatatttttaaaaattacacttataagagtataatcttgaaatgggtagcagccactgtccattacctatcgtaaacattggggcaatttaataacagcattaaaatagttgtaaactctaatcttatacttattgaagaataaaagatatttttatgatgagagtaacaataaagtattcatgatttttcacatacatgaatgttcatttaaaagtttaatcctttgagtgtctatgctatcaggaaagcacattatttccatatttgggttaattttgcttttattatattggtctaggaggaagggactttggagaatggaactcttgaggactttagccaggtgtatataataaaggtacttttgtgctgcattaaattgcttggaaaatgttaacattatattatataagagtatcctttatgaaattttgaatttgtataacagatacattagatattcattttatataatggccacttaaaataagaacatttaaaatataaactatgaagattgactatcttttcaggaaaaaagctgtatatagcacagggaaccctaatcttgggtaattctagtataaaacaaattatacttttatttaaatttcccttgtagcaaatctaattgccacatggtgccctatatttcatagtatttattctctatagtaactgcttaagtgcagctagcttctagatttagactatatagaatttagatattgtattgttcgtcattataatatgctaccacatgtagcaataattacaatattttattaaaataaatatgtgaaatattgtttcatgaaagacagatttccaaatctctcttctcttctctgtactgtctacctttatgtgaagaaattaattatatgccattgccaggtagaagtttggaataattgtttagtctctcctattagatgtggacatttttgtttttgtttttgttttcagggatgaaataaaatatattatttctacctacaaagta

SEQ ID NO: 324050 - DNA, 2636 bp, Homo sapiens
aaggctctttgtcccttcctttgggccgcgtctctgcccctccgcgtctgacagccgcggcgcctcggctcgggcggagagccgagcgtggctggggctgcgcgagtcgagcggggcgggcttggtccggagctgcgggatgtagatcccgggcggcaccgcactcacttctttttctgtttttgacagctcagttctcttctactttgggagagagagaaagtcagatgccccttttaaactccctcttcaaaactcatctcctgggtgactgactacttggaagatgaactgttctcatcagcaacatgctattatgtcatcttttaggactaggtaatgctccagtgacttaataccaatgacattttcatgttgtccacaaattctgagtagaaaccttttcaagcctgtagcctctctgagagctgactgttattaactgaatgagaggatgtcagcaaacagagttaatagagtggatacaaccttgctgaagatgaagaatatacaatattgaggatatttttttcttttttttttcaagtcttgatttgtggcttacctcaagttaccatttttcagtcaagtctgtttgtttgcttcttcagaaatgttttttacaatctcaagaaaaaatatgtcccagaaattgagtttactgttgcttgtatttggactcatttggggattgatgttactgcactatacttttcaacaaccaagacatcaaagcagtgtcaagttacgtgagcaaatactagacttaagcaaaagatatgttaaagctctagcagaggaaaataagaacacagtggatgtcgagaacggtgcttctatggcaggatatgcggatctgaaaagaacaattgctgtccttctggatgacattttgcaacgattggtgaagctggagaacaaagttgactatattgttgtgaatggctcagcagccaacaccaccaatggtactagtgggaatttggtgccagtaaccacaaataaaagaacgaatgtctcgggcagtatcagatagcagttgaaaatcaccttgtgctgctccatccactgtggattatatcctatggcagaaaagctttataattgctggcttaggacagagcaatactttacaataaaagctctacacattttcaaggagtatgctggattcatggaactctaattctgtacataaaaattttaaagttatttgtttgctttcaggcaagtctgttcaatgctgtactatgtccttaaagagaatttggtaatttggttgatgtggtaagcagataggtgagttttgtataaatcttttgtgtttgagatcaagctgaaatgaaaacactgaaaaacatggattcatttctataacacatttatttaagtatataacacgttttttggacaagtgaagaatgtttaatcattctgtcatttgttctcaatagatgtaactgttagactacggctatttgaaaaaatgtgcttattgtactatattttgttattccaattatgagcagagaaaggaaatataatgttgaaaataatgttttgaaatcatgacccaaagaatgtattgatttgcactatccttcagaataactgaaggttaattattgtatatttttaaaaattacacttataagagtataatcttgaaatgggtagcagccactgtccattacctatcgtaaacattggggcaatttaataacagcattaaaatagttgtaaactctaatcttatacttattgaagaataaaagatatttttatgatgagagtaacaataaagtattcatgatttttcacatacatgaatgttcatttaaaagtttaatcctttgagtgtctatgctatcaggaaagcacattatttccatatttgggttaattttgcttttattatattggtctaggaggaagggactttggagaatggaactcttgaggactttagccaggtgtatataataaaggtacttttgtgctgcattaaattgcttggaaaatgttaacattatattatataagagtatcctttatgaaattttgaatttgtataacagatacattagatattcattttatataatggccacttaaaataagaacatttaaaatataaactatgaagattgactatcttttcaggaaaaaagctgtatatagcacagggaaccctaatcttgggtaattctagtataaaacaaattatacttttatttaaatttcccttgtagcaaatctaattgccacatggtgccctatatttcatagtatttattctctatagtaactgcttaagtgcagctagcttctagatttagactatatagaatttagatattgtattgttcgtcattataatatgctaccacatgtagcaataattacaatattttattaaaataaatatgtgaaatattgtttcatgaaagacagatttccaaatctctcttctcttctctgtactgtctacctttatgtgaagaaattaattatatgccattgccaggtagaagtttggaataattgtttagtctctcctattagatgtggacatttttgtttttgtttttgttttcagggatgaaataaaatatattatttctacctacaaagta

SEQ ID NO: 324051 - DNA, 1665 bp, Homo sapiens
gcagggaggcggagcggaagccgagtgcgagggacgagcggagtaaaatctccacaagctgggaacaaacctcgtcccaactcccacccaccggcgtttctccagctcgatctggaggctgcttcgccagtgtgggacgcagctgacgcccgcttattagctctcgctgcgtcgccccggctcagaagctccgtggcggcggcgaccgtgacgagaagcccacggccagctcagttctcttctactttgggagagagagaaagtcagatgccccttttaaactccctcttcaaaactcatctcctgggtgactgagttaatagagtggatacaaccttgctgaagatgaagaatatacaatattgaggatatttttttcttttttttttcaagtcttgatttgtggcttacctcaagttaccatttttcagtcaagtctgtttgtttgcttcttcagaaatgttttttacaatctcaagaaaaaatatgtcccagaaattgagtttactgttgcttgtatttggactcatttggggattgatgttactgcactatacttttcaacaaccaagacatcaaagcagtgtcaagttacgtgagcaaatactagacttaagcaaaagatatgttaaagctctagcagaggaaaataagaacacagtggatgtcgagaacggtgcttctatggcaggatatgcggatctgaaaagaacaattgctgtccttctggatgacattttgcaacgattggtgaagctggagaacaaagttgactatattgttgtgaatggctcagcagccaacaccaccaatggtactagtgggaatttggtgccagtaaccacaaataaaagaacgaatgtctcgggcagtatcagatagcagttgaaaatcaccttgtgctgctccatccactgtggattatatcctatggcagaaaagctttataattgctggcttaggacagagcaatactttacaataaaagctctacacattttcaaggagtatgctggattcatggaactctaattctgtacataaaaattttaaagttatttgtttgctttcaggcaagtctgttcaatgctgtactatgtccttaaagagaatttggtaatttggttgatgtggtaagcagataggtgagttttgtataaatcttttgtgtttgagatcaagctgaaatgaaaacactgaaaaacatggattcatttctataacacatttatttaagtatataacacgttttttggacaagtgaagaatgtttaatcattctgtcatttgttctcaatagatgtaactgttagactacggctatttgaaaaaatgtgcttattgtactatattttgttattccaattatgagcagagaaaggaaatataatgttgaaaataatgttttgaaatcatgacccaaagaatgtattgatttgcactatccttcagaataactgaaggttaattattgtatatttttaaaaattacacttataagagtataatcttgaaatgggtagcagccactgtccattacctatcgtaaacattggggcaatttaataacagcattaaaatagttgtaaactctaatcttatacttattgaagaataaaagatatttttatgatgagagtaacaataaagtattcatgatttttc

SEQ ID NO: 324052 - DNA, 2482 bp, Homo sapiens
gcagggaggcggagcggaagccgagtgcgagggacgagcggagtaaaatctccacaagctgggaacaaacctcgtcccaactcccacccaccggcgtttctccagctcgatctggaggctgcttcgccagtgtgggacgcagctgacgcccgcttattagctctcgctgcgtcgccccggctcagaagctccgtggcggcggcgaccgtgacgagaagcccacggccagctcagttctcttctactttgggagagagagaaagtcagatgccccttttaaactccctcttcaaaactcatctcctgggtgactgagttaatagagtggatacaaccttgctgaagatgaagaatatacaatattgaggatatttttttcttttttttttcaagtcttgatttgtggcttacctcaagttaccatttttcagtcaagtctgtttgtttgcttcttcagaaatgttttttacaatctcaagaaaaaatatgtcccagaaattgagtttactgttgcttgtatttggactcatttggggattgatgttactgcactatacttttcaacaaccaagacatcaaagcagtgtcaagttacgtgagcaaatactagacttaagcaaaagatatgttaaagctctagcagaggaaaataagaacacagtggatgtcgagaacggtgcttctatggcaggatatgcggatctgaaaagaacaattgctgtccttctggatgacattttgcaacgattggtgaagctggagaacaaagttgactatattgttgtgaatggctcagcagccaacaccaccaatggtactagtgggaatttggtgccagtaaccacaaataaaagaacgaatgtctcgggcagtatcagatagcagttgaaaatcaccttgtgctgctccatccactgtggattatatcctatggcagaaaagctttataattgctggcttaggacagagcaatactttacaataaaagctctacacattttcaaggagtatgctggattcatggaactctaattctgtacataaaaattttaaagttatttgtttgctttcaggcaagtctgttcaatgctgtactatgtccttaaagagaatttggtaatttggttgatgtggtaagcagataggtgagttttgtataaatcttttgtgtttgagatcaagctgaaatgaaaacactgaaaaacatggattcatttctataacacatttatttaagtatataacacgttttttggacaagtgaagaatgtttaatcattctgtcatttgttctcaatagatgtaactgttagactacggctatttgaaaaaatgtgcttattgtactatattttgttattccaattatgagcagagaaaggaaatataatgttgaaaataatgttttgaaatcatgacccaaagaatgtattgatttgcactatccttcagaataactgaaggttaattattgtatatttttaaaaattacacttataagagtataatcttgaaatgggtagcagccactgtccattacctatcgtaaacattggggcaatttaataacagcattaaaatagttgtaaactctaatcttatacttattgaagaataaaagatatttttatgatgagagtaacaataaagtattcatgatttttcacatacatgaatgttcatttaaaagtttaatcctttgagtgtctatgctatcaggaaagcacattatttccatatttgggttaattttgcttttattatattggtctaggaggaagggactttggagaatggaactcttgaggactttagccaggtgtatataataaaggtacttttgtgctgcattaaattgcttggaaaatgttaacattatattatataagagtatcctttatgaaattttgaatttgtataacagatacattagatattcattttatataatggccacttaaaataagaacatttaaaatataaactatgaagattgactatcttttcaggaaaaaagctgtatatagcacagggaaccctaatcttgggtaattctagtataaaacaaattatacttttatttaaatttcccttgtagcaaatctaattgccacatggtgccctatatttcatagtatttattctctatagtaactgcttaagtgcagctagcttctagatttagactatatagaatttagatattgtattgttcgtcattataatatgctaccacatgtagcaataattacaatattttattaaaataaatatgtgaaatattgtttcatgaaagacagatttccaaatctctcttctcttctctgtactgtctacctttatgtgaagaaattaattatatgccattgccaggtagaagtttggaataattgtttagtctctcctattagatgtggacatttttgtttttgtttttgttttcagggatgaaataaaatatattatttctacctacaaagta

SEQ ID NO: 324053 - DNA, 2442 bp, Homo sapiens
aaggctctttgtcccttcctttgggccgcgtctctgcccctccgcgtctgacagccgcggcgcctcggctcgggcggagagccgagcgtggctggggctgcgcgagtcgagcggggcgggcttggtccggagctgcgggatgtagatcccgggcggcaccgcactcacttctttttctgtttttgacagctcagttctcttctactttgggagagagagaaagtcagatgccccttttaaactccctcttcaaaactcatctcctgggtgactgagttaatagagtggatacaaccttgctgaagatgaagaatatacaatattgaggatatttttttcttttttttttcaagtcttgatttgtggcttacctcaagttaccatttttcagtcaagtctgtttgtttgcttcttcagaaatgttttttacaatctcaagaaaaaatatgtcccagaaattgagtttactgttgcttgtatttggactcatttggggattgatgttactgcactatacttttcaacaaccaagacatcaaagcagtgtcaagttacgtgagcaaatactagacttaagcaaaagatatgttaaagctctagcagaggaaaataagaacacagtggatgtcgagaacggtgcttctatggcaggatatgcggatctgaaaagaacaattgctgtccttctggatgacattttgcaacgattggtgaagctggagaacaaagttgactatattgttgtgaatggctcagcagccaacaccaccaatggtactagtgggaatttggtgccagtaaccacaaataaaagaacgaatgtctcgggcagtatcagatagcagttgaaaatcaccttgtgctgctccatccactgtggattatatcctatggcagaaaagctttataattgctggcttaggacagagcaatactttacaataaaagctctacacattttcaaggagtatgctggattcatggaactctaattctgtacataaaaattttaaagttatttgtttgctttcaggcaagtctgttcaatgctgtactatgtccttaaagagaatttggtaatttggttgatgtggtaagcagataggtgagttttgtataaatcttttgtgtttgagatcaagctgaaatgaaaacactgaaaaacatggattcatttctataacacatttatttaagtatataacacgttttttggacaagtgaagaatgtttaatcattctgtcatttgttctcaatagatgtaactgttagactacggctatttgaaaaaatgtgcttattgtactatattttgttattccaattatgagcagagaaaggaaatataatgttgaaaataatgttttgaaatcatgacccaaagaatgtattgatttgcactatccttcagaataactgaaggttaattattgtatatttttaaaaattacacttataagagtataatcttgaaatgggtagcagccactgtccattacctatcgtaaacattggggcaatttaataacagcattaaaatagttgtaaactctaatcttatacttattgaagaataaaagatatttttatgatgagagtaacaataaagtattcatgatttttcacatacatgaatgttcatttaaaagtttaatcctttgagtgtctatgctatcaggaaagcacattatttccatatttgggttaattttgcttttattatattggtctaggaggaagggactttggagaatggaactcttgaggactttagccaggtgtatataataaaggtacttttgtgctgcattaaattgcttggaaaatgttaacattatattatataagagtatcctttatgaaattttgaatttgtataacagatacattagatattcattttatataatggccacttaaaataagaacatttaaaatataaactatgaagattgactatcttttcaggaaaaaagctgtatatagcacagggaaccctaatcttgggtaattctagtataaaacaaattatacttttatttaaatttcccttgtagcaaatctaattgccacatggtgccctatatttcatagtatttattctctatagtaactgcttaagtgcagctagcttctagatttagactatatagaatttagatattgtattgttcgtcattataatatgctaccacatgtagcaataattacaatattttattaaaataaatatgtgaaatattgtttcatgaaagacagatttccaaatctctcttctcttctctgtactgtctacctttatgtgaagaaattaattatatgccattgccaggtagaagtttggaataattgtttagtctctcctattagatgtggacatttttgtttttgtttttgttttcagggatgaaataaaatatattatttctacctacaaagta

SEQ ID NO: 324054 - DNA, 726 bp, Homo sapiens
  misc_feature (706)..(707): n is a, c, g, or t
  misc_feature (718)..(718): n is a, c, g, or t
gcagggaggcggagcggaagccgagtgcgagggacgagcggagtaaaatctccacaagctgggaacaaacctcgtcccaactcccacccaccggcgtttctccagctcgatctggaggctgcttcgccagtgtgggacgcagctgacgcccgcttattagctctcgctgcgtcgccccggctcagaagctccgtggcggcggcgaccgtgacgagaagcccacggccagctcagttctcttctactttgggagagagagaaagtcagatgccccttttaaactccctcttcaaaactcatctcctgggtgactggactaggtaatgctccagtgacttaataccaatgacattttcatgttgtccacaaattctgagtagaaaccttttcaagcctgtagcctctctgagagctgactgttattaactgaatgagaggatgtcagcaaacagagttaatagagtggatacaaccttgctgaagatgaagaatatacaatattgaggatatttttttcttttttttttcaagtcttgatttgtggcttacctcaagttaccatttttcagtcaagtctgtttgtttgcttcttcagaaatgttttttacaatctcaagaaaaaatatgtcccagaaattgagtttactgttgcttgtatttggactcatttggggattgatgttactgcactccagcctgggtgacnngagtgagactntgtctcag

SEQ ID NO: 324055 - DNA, 253 bp, Homo sapiens
agctgacagaacaagaggaggtcgagttgatgagaagagagagagagagagagagcactgtaatcaaggagaaccaactgaagctggagggaagcagaaagaatagccaggctggttcaggaggcagttctggtacctctgaccccattgcccacccccagtaggcagcatgaaatatgccagaggtcaacaattttttttttgggtatttttaagacagagtctcactctgtcacccaggctggagtgcagt

SEQ ID NO: 324056 - DNA, 245 bp, Homo sapiens
agaagaaagaattatctcaccattccggctcaacaagaaattcagtcctgaacagacaaaaaagtttaaaaatattttataaacattaacctggacttttcgtagaagaaataaagctgagaacgtcatatttcagcagcttcaatacttgttttctgattgaatcataaatttcattactttatacttgcttctacaatgacaaagtacccaaagctaaatgtgaatgtctagtaggtcagaaa

SEQ ID NO: 324057 - DNA, 490 bp, Homo sapiens
gtggtatttaacatgaaaatttaggaaaaaataacagacttagattcctcatgctcaggaatatgggccttcaagaccctgaaaatactagaaggagccaaaggaatttttgcctagaggcaccaaacaagttcaatcagaaaaaccacaaacaattaggcacctctcagctccaggaagactcggctaagctccaggaagatagggagagtgataaatagcgcccagtggcggcaaggccaagcctggcagtcattgctagcctccaatctgaactaaagaatattccagacaacactggggcctgcagactccattcacaaatcccagggaccaagagccacccacataagcaaggggccccagcaccacggaacagggagaggagcacctgccaatgtcctgcggcctcctcctgctttccagctgtgaatgaggccctggttcccacacttcattcacagtctgggcggctactgtaactacatcc

SEQ ID NO: 324058 - DNA, 6692 bp, Homo sapiens
gaattccgccctcgccgcccgcggcgccccgagcgctttgtgagcagatgcggagccgagtggagggcgcgagccagatgcggggcgacagctgacttgctgagaggaggcggggaggcgcggagcgcgcgtgtggtccttgcgccgctgacttctccactggttcctgggcaccgaaagataaacctctcataatgaaggcccccgctgtgcttgcacctggcatcctcgtgctcctgtttaccttggtgcagaggagcaatggggagtgtaaagaggcactagcaaagtccgagatgaatgtgaatatgaagtatcagcttcccaacttcaccgcggaaacacccatccagaatgtcattctacatgagcatcacattttccttggtgccactaactacatttatgttttaaatgaggaagaccttcagaaggttgctgagtacaagactgggcctgtgctggaacacccagattgtttcccatgtcaggactgcagcagcaaagccaatttatcaggaggtgtttggaaagataacatcaacatggctctagttgtcgacacctactatgatgatcaactcattagctgtggcagcgtcaacagagggacctgccagcgacatgtctttccccacaatcatactgctgacatacagtcggaggttcactgcatattctccccacagatagaagagcccagccagtgtcctgactgtgtggtgagcgccctgggagccaaagtcctttcatctgtaaaggaccggttcatcaacttctttgtaggcaataccataaattcttcttatttcccagatcatccattgcattcgatatcagtgagaaggctaaaggaaacgaaagatggttttatgtttttgacggaccagtcctacattgatgttttacctgagttcagagattcttaccccattaagtatgtccatgcctttgaaagcaacaattttatttacttcttgacggtccaaagggaaactctagatgctcagacttttcacacaagaataatcaggttctgttccataaactctggattgcattcctacatggaaatgcctctggagtgtattctcacagaaaagagaaaaaagagatccacaaagaaggaagtgtttaatatacttcaggctgcgtatgtcagcaagcctggggcccagcttgctagacaaataggagccagcctgaatgatgacattcttttcggggtgttcgcacaaagcaagccagattctgccgaaccaatggatcgatctgccatgtgtgcattccctatcaaatatgtcaacgacttcttcaacaagatcgtcaacaaaaacaatgtgagatgtctccagcatttttacggacccaatcatgagcactgctttaataggacacttctgagaaattcatcaggctgtgaagcgcgccgtgatgaatatcgaacagagtttaccacagctttgcagcgcgttgacttattcatgggtcaattcagcgaagtcctcttaacatctatatccaccttcattaaaggagacctcaccatagctaatcttgggacatcagagggtcgcttcatgcaggttgtggtttctcgatcaggaccatcaacccctcatgtgaattttctcctggactcccatccagtgtctccagaagtgattgtggagcatacattaaaccaaaatggctacacactggttatcactgggaagaagatcacgaagatcccattgaatggcttgggctgcagacatttccagtcctgcagtcaatgcctctctgccccaccctttgttcagtgtggctggtgccacgacaaatgtgtgcgatcggaggaatgcctgagcgggacatggactcaacagatctgtctgcctgcaatctacaaggttttcccaaatagtgcaccccttgaaggagggacaaggctgaccatatgtggctgggactttggatttcggaggaataataaatttgatttaaagaaaactagagttctccttggaaatgagagctgcaccttgactttaagtgagagcacgatgaatacattgaaatgcacagttggtcctgccatgaataagcatttcaatatgtccataattatttcaaatggccacgggacaacacaatacagtacattctcctatgtggatcctgtaataacaagtatttcgccgaaatacggtcctatggctggtggcactttacttactttaactggaaattacctaaacagtgggaattctagacacatttcaattggtggaaaaacatgtactttaaaaagtgtgtcaaacagtattcttgaatgttataccccagcccaaaccatttcaactgagtttgctgttaaattgaaaattgacttagccaaccgagagacaagcatcttcagttaccgtgaagatcccattgtctatgaaattcatccaaccaaatcttttattagtacttggtggaaagaacctctcaacattgtcagttttctattttgctttgccagtggtgggagcacaataacaggtgttgggaaaaacctgaattcagttagtgtcccgagaatggtcataaatgtgcatgaagcaggaaggaactttacagtggcatgtcaacatcgctctaattcagagataatctgttgtaccactccttccctgcaacagctgaatctgcaactccccctgaaaaccaaagcctttttcatgttagatgggatcctttccaaatactttgatctcatttatgtacataatcctgtgtttaagccttttgaaaagccagtgatgatctcaatgggcaatgaaaatgtactggaaattaagggaaatgatattgaccctgaagcagttaaaggtgaagtgttaaaagttggaaataagagctgtgagaatatacacttacattctgaagccgttttatgcacggtccccaatgacctgctgaaattgaacagcgagctaaatatagagtggaagcaagcaatttcttcaaccgtccttggaaaagtaatagttcaaccagatcagaatttcacaggattgattgctggtgttgtctcaatatcaacagcactgttattactacttgggtttttcctgtggctgaaaaagagaaagcaaattaaagatctgggcagtgaattagttcgctacgatgcaagagtacacactcctcatttggataggcttgtaagtgcccgaagtgtaagcccaactacagaaatggtttcaaatgaatctgtagactaccgagctacttttccagaagatcagtttcctaattcatctcagaacggttcatgccgacaagtgcagtatcctctgacagacatgtcccccatcctaactagtggggactctgatatatccagtccattactgcaaaatactgtccacattgacctcagtgctctaaatccagagctggtccaggcagtgcagcatgtagtgattgggcccagtagcctgattgtgcatttcaatgaagtcataggaagagggcattttggttgtgtatatcatgggactttgttggacaatgatggcaagaaaattcactgtgctgtgaaatccttgaacagaatcactgacataggagaagtttcccaatttctgaccgagggaatcatcatgaaagattttagtcatcccaatgtcctctcgctcctgggaatctgcctgcgaagtgaagggtctccgctggtggtcctaccatacatgaaacatggagatcttcgaaatttcattcgaaatgagactcataatccaactgtaaaagatcttattggctttggtcttcaagtagccaaaggcatgaaatatcttgcaagcaaaaagtttgtccacagagacttggctgcaagaaactgtatgctggatgaaaaattcacagtcaaggttgctgattttggtcttgccagagacatgtatgataaagaatactatagtgtacacaacaaaacaggtgcaaagctgccagtgaagtggatggctttggaaagtctgcaaactcaaaagtttaccaccaagtcagatgtgtggtcctttggcgtgctcctctgggagctgatgacaagaggagccccaccttatcctgacgtaaacacctttgatataactgtttacttgttgcaagggagaagactcctacaacccgaatactgcccagaccccttatatgaagtaatgctaaaatgctggcaccctaaagccgaaatgcgcccatccttttctgaactggtgtcccggatatcagcgatcttctctactttcattggggagcactatgtccatgtgaacgctacttatgtgaacgtaaaatgtgtcgctccgtatccttctctgttgtcatcagaagataacgctgatgatgaggtggacacacgaccagcctccttctgggagacatcatagtgctagtactatgtcaaagcaacagtccacactttgtccaatggttttttcactgcctgacctttaaaaggccatcgatattctttgctcttgccaaaattgcactattataggacttgtattgttatttaaattactggattctaaggaatttcttatctgacagagcatcagaaccagaggcttggtcccacaggccacggaccaatggcctgcagccgtgacaacactcctgtcatattggagtccaaaacttgaattctgggttgaattttttaaaaatcaggtaccacttgatttcatatgggaaattgaagcaggaaatattgagggcttcttgatcacagaaaactcagaagagatagtaatgctcaggacaggagcggcagccccagaacaggccactcatttagaattctagtgtttcaaaacacttttgtgtgttgtatggtcaataacatttttcattactgatggtgtcattcacccattaggtaaacattcccttttaaatgtttgtttgttttttgagacaggatctcactctgttgccagggctgtagtgcagtggtgtgatcatagctcactgcaacctccacctcccaggctcaagcctcccgaatagctgggactacaggcgcacaccaccatccccggctaatttttgtattttttgtagagacggggttttgccatgttgccaaggctggtttcaaactcctggactcaagaaatccacccacctcagcctcccaaagtgctaggattacaggcatgagccactgcgcccagcccttataaatttttgtatagacattcctttggttggaagaatatttataggcaatacagtcaaagtttcaaaatagcatcacacaaaacatgtttataaatgaacaggatgtaatgtacatagatgacattaagaaaatttgtatgaaataatttagtcatcatgaaatatttagttgtcatataaaaacccactgtttgagaatgatgctactctgatctaatgaatgtgaacatgtagatgttttgtgtgtatttttttaaatgaaaactcaaaataagacaagtaatttgttgataaatatttttaaagataactcagcatgtttgtaaagcaggatacattttactaaaaggttcattggttccaatcacagctcataggtagagcaaagaaagggtggatggattgaaaagattagcctctgtctcggtggcaggttcccacctcgcaagcaattggaaacaaaacttttggggagttttattttgcattagggtgtgttttatgttaagcaaaacatactttagaaacaaatgaaaaaggcaattgaaaatcccagctatttcacctagatggaatagccaccctgagcagaactttgtgatgcttcattctgtggaattttgtgcttactactgtatagtgcatgtggtgtaggttactctaactggttttgtcgacgtaaacatttaaagtgttatattttttataaaaatgtttatttttaatgatatgagaaaaattttgttaggccacaaaaacactgcactgtgaacattttagaaaaggtatgtcagactgggattaatgacagcatgattttcaatgactgtaaattgcgataaggaaatgtactgattgccaatacaccccaccctcattacatcatcaggacttgaagccaagggttaacccagcaagctacaaagagggtgtgtcacactgaaactcaatagttgagtttggctgttgttgcaggaaaatgattataactaaaagctctctgatagtgcagagacttaccagaagacacaaggaattgtactgaagagctattacaatccaaatattgccgtttcataaatgtaataagtaatactaattcacagagtattgtaaatggtggatgacaaaagaaaatctgctctgtggaaagaaagaactgtctctaccagggtcaagagcatgaacgcatcaatagaaagaactcggggaaacatcccatcaacaggactacacacttgtatatacattcttgagaacactgcaatgtgaaaatcacgtttgctatttataaacttgtccttagattaatgtgtctggacagattgtgggagtaagtgattcttctaagaattagatacttgtcactgcctatacctgcagctgaactgaatggtacttcgtatgttaatagttgttctgataaatcatgcaattaaagtaaagtgatgcaacatcttgtaaaaaaaaag

SEQ ID NO: 324059 - DNA, 6569 bp, Homo sapiens
gaattccgccctcgccgcccgcggcgccccgagcgctttgtgagcagatgcggagccgagtggagggcgcgagccagatgcggggcgacagctgacttgctgagaggaggcggggaggcgcggagcgcgcgtgtggtccttgcgccgctgacttctccactggttcctgggcaccgaaagataaacctctcataatgaaggcccccgctgtgcttgcacctggcatcctcgtgctcctgtttaccttggtgcagaggagcaatggggagtgtaaagaggcactagcaaagtccgagatgaatgtgaatatgaagtatcagcttcccaacttcaccgcggaaacacccatccagaatgtcattctacatgagcatcacattttccttggtgccactaactacatttatgttttaaatgaggaagaccttcagaaggttgctgagtacaagactgggcctgtgctggaacacccagattgtttcccatgtcaggactgcagcagcaaagccaatttatcaggaggtgtttggaaagataacatcaacatggctctagttgtcgacacctactatgatgatcaactcattagctgtggcagcgtcaacagagggacctgccagcgacatgtctttccccacaatcatactgctgacatacagtcggaggttcactgcatattctccccacagatagaagagcccagccagtgtcctgactgtgtggtgagcgccctgggagccaaagtcctttcatctgtaaaggaccggttcatcaacttctttgtaggcaataccataaattcttcttatttcccagatcatccattgcattcgatatcagtgagaaggctaaaggaaacgaaagatggttttatgtttttgacggaccagtcctacattgatgttttacctgagttcagagattcttaccccattaagtatgtccatgcctttgaaagcaacaattttatttacttcttgacggtccaaagggaaactctagatgctcagacttttcacacaagaataatcaggttctgttccataaactctggattgcattcctacatggaaatgcctctggagtgtattctcacagaaaagagaaaaaagagatccacaaagaaggaagtgtttaatatacttcaggctgcgtatgtcagcaagcctggggcccagcttgctagacaaataggagccagcctgaatgatgacattcttttcggggtgttcgcacaaagcaagccagattctgccgaaccaatggatcgatctgccatgtgtgcattccctatcaaatatgtcaacgacttcttcaacaagatcgtcaacaaaaacaatgtgagatgtctccagcatttttacggacccaatcatgagcactgctttaataggacacttctgagaaattcatcaggctgtgaagcgcgccgtgatgaatatcgaacagagtttaccacagctttgcagcgcgttgacttattcatgggtcaattcagcgaagtcctcttaacatctatatccaccttcattaaaggagacctcaccatagctaatcttgggacatcagagggtcgcttcatgcaggttgtggtttctcgatcaggaccatcaacccctcatgtgaattttctcctggactcccatccagtgtctccagaagtgattgtggagcatacattaaaccaaaatggctacacactggttatcactgggaagaagatcacgaagatcccattgaatggcttgggctgcagacatttccagtcctgcagtcaatgcctctctgccccaccctttgttcagtgtggctggtgccacgacaaatgtgtgcgatcggaggaatgcctgagcgggacatggactcaacagatctgtctgcctgcaatctacaaggttttcccaaatagtgcaccccttgaaggagggacaaggctgaccatatgtggctgggactttggatttcggaggaataataaatttgatttaaagaaaactagagttctccttggaaatgagagctgcaccttgactttaagtgagagcacgatgaatacattgaaatgcacagttggtcctgccatgaataagcatttcaatatgtccataattatttcaaatggccacgggacaacacaatacagtacattctcctatgtggatcctgtaataacaagtatttcgccgaaatacggtcctatggctggtggcactttacttactttaactggaaattacctaaacagtgggaattctagacacatttcaattggtggaaaaacatgtactttaaaaagtgtgtcaaacagtattcttgaatgttataccccagcccaaaccatttcaactgagtttgctgttaaattgaaaattgacttagccaaccgagagacaagcatcttcagttaccgtgaagatcccattgtctatgaaattcatccaaccaaatcttttattagtacttggtggaaagaacctctcaacattgtcagttttctattttgctttgccagtggtgggagcacaataacaggtgttgggaaaaacctgaattcagttagtgtcccgagaatggtcataaatgtgcatgaagcaggaaggaactttacagtggcatgtcaacatcgctctaattcagagataatctgttgtaccactccttccctgcaacagctgaatctgcaactccccctgaaaaccaaagcctttttcatgttagatgggatcctttccaaatactttgatctcatttatgtacataatcctgtgtttaagccttttgaaaagccagtgatgatctcaatgggcaatgaaaatgtactggaaattaagggaaatgatattgaccctgaagcagttaaaggtgaagtgttaaaagttggaaataagagctgtgagaatatacacttacattctgaagccgttttatgcacggtccccaatgacctgctgaaattgaacagcgagctaaatatagagtggaagcaagcaatttcttcaaccgtccttggaaaagtaatagttcaaccagatcagaatttcacaggattgattgctggtgttgtctcaatatcaacagcactgttattactacttgggtttttcctgtggctgaaaaagagaaagcaaattaaagatctgggcagtgaattagttcgctacgatgcaagagtacacactcctcatttggataggcttgtaagtgcccgaagtgtaagcccaactacagaaatggtttcaaatgaatctgtagactaccgagctacttttccagaagatcagtttcctaattcatctcagaacggttcatgccgacaagtgcagtatcctctgacagacatgtcccccatcctaactagtggggactctgatatatccagtccattactgcaaaatactgtccacattgacctcagtgctctaaatccagagctggtccaggcagtgcagcatgtagtgattgggcccagtagcctgattgtgcatttcaatgaagtcataggaagagggcattttggttgtgtatatcatgggactttgttggacaatgatggcaagaaaattcactgtgctgtgaaatccttgaacagaatcactgacataggagaagtttcccaatttctgaccgagggaatcatcatgaaagattttagtcatcccaatgtcctctcgctcctgggaatctgcctgcgaagtgaagggtctccgctggtggtcctaccatacatgaaacatggagatcttcgaaatttcattcgaaatgagactcataatccaactgtaaaagatcttattggctttggtcttcaagtagccaaaggcatgaaatatcttgcaagcaaaaagtttgtccacagagacttggctgcaagaaactgtatgctggatgaaaaattcacagtcaaggttgctgattttggtcttgccagagacatgtatgataaagaatactatagtgtacacaacaaaacaggtgcaaagctgccagtgaagtggatggctttggaaagtctgcaaactcaaaagtttaccaccaagtcagatgtgtggtcctttggcgtgctcctctgggagctgatgacaagaggagccccaccttatcctgacgtaaacacctttgatataactgtttacttgttgcaagggagaagactcctacaacccgaatactgcccagaccccttatatgaagtaatgctaaaatgctggcaccctaaagccgaaatgcgcccatccttttctgaactggtgtcccggatatcagcgatcttctctactttcattggggagcactatgtccatgtgaacgctacttatgtgaacgtaaaatgtgtcgctccgtatccttctctgttgtcatcagaagataacgctgatgatgaggtggacacacgaccagcctccttctgggagacatcatagtgctagtactatgtcaaagcaacagtccacactttgtccaatggttttttcactgcctgacctttaaaaggccatcgatattctttgctcttgccaaaattgcactattataggacttgtattgttatttaaattactggattctaaggaatttcttatctgacagagcatcagaaccagaggcttggtcccacaggccacggaccaatggcctgcagccgtgacaacactcctgtcatattggagtctcaggacaggagcggcagccccagaacaggccactcatttagaattctagtgtttcaaaacacttttgtgtgttgtatggtcaataacatttttcattactgatggtgtcattcacccattaggtaaacattcccttttaaatgtttgtttgttttttgagacaggatctcactctgttgccagggctgtagtgcagtggtgtgatcatagctcactgcaacctccacctcccaggctcaagcctcccgaatagctgggactacaggcgcacaccaccatccccggctaatttttgtattttttgtagagacggggttttgccatgttgccaaggctggtttcaaactcctggactcaagaaatccacccacctcagcctcccaaagtgctaggattacaggcatgagccactgcgcccagcccttataaatttttgtatagacattcctttggttggaagaatatttataggcaatacagtcaaagtttcaaaatagcatcacacaaaacatgtttataaatgaacaggatgtaatgtacatagatgacattaagaaaatttgtatgaaataatttagtcatcatgaaatatttagttgtcatataaaaacccactgtttgagaatgatgctactctgatctaatgaatgtgaacatgtagatgttttgtgtgtatttttttaaatgaaaactcaaaataagacaagtaatttgttgataaatatttttaaagataactcagcatgtttgtaaagcaggatacattttactaaaaggttcattggttccaatcacagctcataggtagagcaaagaaagggtggatggattgaaaagattagcctctgtctcggtggcaggttcccacctcgcaagcaattggaaacaaaacttttggggagttttattttgcattagggtgtgttttatgttaagcaaaacatactttagaaacaaatgaaaaaggcaattgaaaatcccagctatttcacctagatggaatagccaccctgagcagaactttgtgatgcttcattctgtggaattttgtgcttactactgtatagtgcatgtggtgtaggttactctaactggttttgtcgacgtaaacatttaaagtgttatattttttataaaaatgtttatttttaatgatatgagaaaaattttgttaggccacaaaaacactgcactgtgaacattttagaaaaggtatgtcagactgggattaatgacagcatgattttcaatgactgtaaattgcgataaggaaatgtactgattgccaatacaccccaccctcattacatcatcaggacttgaagccaagggttaacccagcaagctacaaagagggtgtgtcacactgaaactcaatagttgagtttggctgttgttgcaggaaaatgattataactaaaagctctctgatagtgcagagacttaccagaagacacaaggaattgtactgaagagctattacaatccaaatattgccgtttcataaatgtaataagtaatactaattcacagagtattgtaaatggtggatgacaaaagaaaatctgctctgtggaaagaaagaactgtctctaccagggtcaagagcatgaacgcatcaatagaaagaactcggggaaacatcccatcaacaggactacacacttgtatatacattcttgagaacactgcaatgtgaaaatcacgtttgctatttataaacttgtccttagattaatgtgtctggacagattgtgggagtaagtgattcttctaagaattagatacttgtcactgcctatacctgcagctgaactgaatggtacttcgtatgttaatagttgttctgataaatcatgcaattaaagtaaagtgatgcaacatcttgtaaaaaaaaag

SEQ ID NO: 324060 - DNA, 4099 bp, Homo sapiens
gggttcgtagcttccaacggctgcgcgcgcacttcggtcgcgggcggtgaggtgctgttgctgaaacgctgccgctgagggtggactcgatttcccagggtcccgccgcgggagtctccggcgggcgggcgcgcgcgagccaccgagcgaggtgatagaggcggcggcccaggcgtctgggtcctgctggtcttcgcctttcttctccgcttctaccccgtcggccgctgccactggggtccctggccccaccgacatggcggcggtgttgcagcaagtcctggagcgcacggagctgaacaagctgcccaagtctgtccagaacaaacttgaaaagttccttgctgatcagcaatccgagatcgatggcctgaaggggcggcatgagaaatttaaggtggagagcgaacaacagtattttgaaatagaaaagaggttgtcccacagtcaggagagacttgtgaatgaaacccgagagtgtcaaagcttgcggcttgagctagagaaactcaacaatcaactgaaggcactaactgagaaaaacaaagaacttgaaattgctcaggatcgcaatattgccattcagagccaatttacaagaacaaaggaagaattagaagctgagaaaagagacttaattagaaccaatgagagactatctcaagaacttgaatacttaacagatcagtttcctaattcatctcagaacggttcatgccgacaagtgcagtatcctctgacagacatgtcccccatcctaactagtggggactctgatatatccagtccattactgcaaaatactgtccacattgacctcagtgctctaaatccagagctggtccaggcagtgcagcatgtagtgattgggcccagtagcctgattgtgcatttcaatgaagtcataggaagagggcattttggttgtgtatatcatgggactttgttggacaatgatggcaagaaaattcactgtgctgtgaaatccttgaacagaatcactgacataggagaagtttcccaatttctgaccgagggaatcatcatgaaagattttagtcatcccaatgtcctctcgctcctgggaatctgcctgcgaagtgaagggtctccgctggtggtcctaccatacatgaaacatggagatcttcgaaatttcattcgaaatgagactcataatccaactgtaaaagatcttattggctttggtcttcaagtagccaaaggcatgaaatatcttgcaagcaaaaagtttgtccacagagacttggctgcaagaaactgtatgctggatgaaaaattcacagtcaaggttgctgattttggtcttgccagagacatgtatgataaagaatactatagtgtacacaacaaaacaggtgcaaagctgccagtgaagtggatggctttggaaagtctgcaaactcaaaagtttaccaccaagtcagatgtgtggtcctttggcgtgctcctctgggagctgatgacaagaggagccccaccttatcctgacgtaaacacctttgatataactgtttacttgttgcaagggagaagactcctacaacccgaatactgcccagaccccttatatgaagtaatgctaaaatgctggcaccctaaagccgaaatgcgcccatccttttctgaactggtgtcccggatatcagcgatcttctctactttcattggggagcactatgtccatgtgaacgctacttatgtgaacgtaaaatgtgtcgctccgtatccttctctgttgtcatcagaagataacgctgatgatgaggtggacacacgaccagcctccttctgggagacatcatagtgctagtactatgtcaaagcaacagtccacactttgtccaatggttttttcactgcctgacctttaaaaggccatcgatattctttgctcttgccaaaattgcactattataggacttgtattgttatttaaattactggattctaaggaatttcttatctgacagagcatcagaaccagaggcttggtcccacaggccacggaccaatggcctgcagccgtgacaacactcctgtcatattggagtccaaaacttgaattctgggttgaattttttaaaaatcaggtaccacttgatttcatatgggaaattgaagcaggaaatattgagggcttcttgatcacagaaaactcagaagagatagtaatgctcaggacaggagcggcagccccagaacaggccactcatttagaattctagtgtttcaaaacacttttgtgtgttgtatggtcaataacatttttcattactgatggtgtcattcacccattaggtaaacattcccttttaaatgtttgtttgttttttgagacaggatctcactctgttgccagggctgtagtgcagtggtgtgatcatagctcactgcaacctccacctcccaggctcaagcctcccgaatagctgggactacaggcgcacaccaccatccccggctaatttttgtattttttgtagagacggggttttgccatgttgccaaggctggtttcaaactcctggactcaagaaatccacccacctcagcctcccaaagtgctaggattacaggcatgagccactgcgcccagcccttataaatttttgtatagacattcctttggttggaagaatatttataggcaatacagtcaaagtttcaaaatagcatcacacaaaacatgtttataaatgaacaggatgtaatgtacatagatgacattaagaaaatttgtatgaaataatttagtcatcatgaaatatttagttgtcatataaaaacccactgtttgagaatgatgctactctgatctaatgaatgtgaacatgtagatgttttgtgtgtatttttttaaatgaaaactcaaaataagacaagtaatttgttgataaatatttttaaagataactcagcatgtttgtaaagcaggatacattttactaaaaggttcattggttccaatcacagctcataggtagagcaaagaaagggtggatggattgaaaagattagcctctgtctcggtggcaggttcccacctcgcaagcaattggaaacaaaacttttggggagttttattttgcattagggtgtgttttatgttaagcaaaacatactttagaaacaaatgaaaaaggcaattgaaaatcccagctatttcacctagatggaatagccaccctgagcagaactttgtgatgcttcattctgtggaattttgtgcttactactgtatagtgcatgtggtgtaggttactctaactggttttgtcgacgtaaacatttaaagtgttatattttttataaaaatgtttatttttaatgatatgagaaaaattttgttaggccacaaaaacactgcactgtgaacattttagaaaaggtatgtcagactgggattaatgacagcatgattttcaatgactgtaaattgcgataaggaaatgtactgattgccaatacaccccaccctcattacatcatcaggacttgaagccaagggttaacccagcaagctacaaagagggtgtgtcacactgaaactcaatagttgagtttggctgttgttgcaggaaaatgattataactaaaagctctctgatagtgcagagacttaccagaagacacaaggaattgtactgaagagctattacaatccaaatattgccgtttcataaatgtaataagtaatactaattcacagagtattgtaaatggtggatgacaaaagaaaatctgctctgtggaaagaaagaactgtctctaccagggtcaagagcatgaacgcatcaatagaaagaactcggggaaacatcccatcaacaggactacacacttgtatatacattcttgagaacactgcaatgtgaaaatcacgtttgctatttataaacttgtccttagattaatgtgtctggacagattgtgggagtaagtgattcttctaagaattagatacttgtcactgcctatacctgcagctgaactgaatggtacttcgtatgttaatagttgttctgataaatcatgcaattaaagtaaagtgatgcaacatcttgtaaaaaaaaag

SEQ ID NO: 324061 - DNA, 5293 bp, Homo sapiens
cagactgctgtgctagcaatcagcgggactccgtgggcgtaggaccctccgagccaggcagaaaatgtgctagattggaggtgaagaccctggagccagagagcctaggcttagtcctagccctgcactgaagacacttctgagaaattcatcaggctgtgaagcgcgccgtgatgaatatcgaacagagtttaccacagctttgcagcgcgttgacttattcatgggtcaattcagcgaagtcctcttaacatctatatccaccttcattaaaggagacctcaccatagctaatcttgggacatcagagggtcgcttcatgcaggttgtggtttctcgatcaggaccatcaacccctcatgtgaattttctcctggactcccatccagtgtctccagaagtgattgtggagcatacattaaaccaaaatggctacacactggttatcactgggaagaagtgtggctggtgccacgacaaatgtgtgcgatcggaggaatgcctgagcgggacatggactcaacagatctgtctgcctgcaatctacaaggttttcccaaatagtgcaccccttgaaggagggacaaggctgaccatatgtggctgggactttggatttcggaggaataataaatttgatttaaagaaaactagagttctccttggaaatgagagctgcaccttgactttaagtgagagcacgatgaatacattgaaatgcacagttggtcctgccatgaataagcatttcaatatgtccataattatttcaaatggccacgggacaacacaatacagtacattctcctatgtggatcctgtaataacaagtatttcgccgaaatacggtcctatggctggtggcactttacttactttaactggaaattacctaaacagtgggaattctagacacatttcaattggtggaaaaacatgtactttaaaaagtgtgtcaaacagtattcttgaatgttataccccagcccaaaccatttcaactgagtttgctgttaaattgaaaattgacttagccaaccgagagacaagcatcttcagttaccgtgaagatcccattgtctatgaaattcatccaaccaaatcttttattagtggtgggagcacaataacaggtgttgggaaaaacctgaattcagttagtgtcccgagaatggtcataaatgtgcatgaagcaggaaggaactttacagtggcatgtcaacatcgctctaattcagagataatctgttgtaccactccttccctgcaacagctgaatctgcaactccccctgaaaaccaaagcctttttcatgttagatgggatcctttccaaatactttgatctcatttatgtacataatcctgtgtttaagccttttgaaaagccagtgatgatctcaatgggcaatgaaaatgtactggaaattaagggaaatgatattgaccctgaagcagttaaaggtgaagtgttaaaagttggaaataagagctgtgagaatatacacttacattctgaagccgttttatgcacggtccccaatgacctgctgaaattgaacagcgagctaaatatagagtggaagcaagcaatttcttcaaccgtccttggaaaagtaatagttcaaccagatcagaatttcacaggattgattgctggtgttgtctcaatatcaacagcactgttattactacttgggtttttcctgtggctgaaaaagagaaagcaaattaaagatctgggcagtgaattagttcgctacgatgcaagagtacacactcctcatttggataggcttgtaagtgcccgaagtgtaagcccaactacagaaatggtttcaaatgaatctgtagactaccgagctacttttccagaagatcagtttcctaattcatctcagaacggttcatgccgacaagtgcagtatcctctgacagacatgtcccccatcctaactagtggggactctgatatatccagtccattactgcaaaatactgtccacattgacctcagtgctctaaatccagagctggtccaggcagtgcagcatgtagtgattgggcccagtagcctgattgtgcatttcaatgaagtcataggaagagggcattttggttgtgtatatcatgggactttgttggacaatgatggcaagaaaattcactgtgctgtgaaatccttgaacagaatcactgacataggagaagtttcccaatttctgaccgagggaatcatcatgaaagattttagtcatcccaatgtcctctcgctcctgggaatctgcctgcgaagtgaagggtctccgctggtggtcctaccatacatgaaacatggagatcttcgaaatttcattcgaaatgagactcataatccaactgtaaaagatcttattggctttggtcttcaagtagccaaaggcatgaaatatcttgcaagcaaaaagtttgtccacagagacttggctgcaagaaactgtatgctggatgaaaaattcacagtcaaggttgctgattttggtcttgccagagacatgtatgataaagaatactatagtgtacacaacaaaacaggtgcaaagctgccagtgaagtggatggctttggaaagtctgcaaactcaaaagtttaccaccaagtcagatgtgtggtcctttggcgtgctcctctgggagctgatgacaagaggagccccaccttatcctgacgtaaacacctttgatataactgtttacttgttgcaagggagaagactcctacaacccgaatactgcccagaccccttatatgaagtaatgctaaaatgctggcaccctaaagccgaaatgcgcccatccttttctgaactggtgtcccggatatcagcgatcttctctactttcattggggagcactatgtccatgtgaacgctacttatgtgaacgtaaaatgtgtcgctccgtatccttctctgttgtcatcagaagataacgctgatgatgaggtggacacacgaccagcctccttctgggagacatcatagtgctagtactatgtcaaagcaacagtccacactttgtccaatggttttttcactgcctgacctttaaaaggccatcgatattctttgctcttgccaaaattgcactattataggacttgtattgttatttaaattactggattctaaggaatttcttatctgacagagcatcagaaccagaggcttggtcccacaggccacggaccaatggcctgcagccgtgacaacactcctgtcatattggagtccaaaacttgaattctgggttgaattttttaaaaatcaggtaccacttgatttcatatgggaaattgaagcaggaaatattgagggcttcttgatcacagaaaactcagaagagatagtaatgctcaggacaggagcggcagccccagaacaggccactcatttagaattctagtgtttcaaaacacttttgtgtgttgtatggtcaataacatttttcattactgatggtgtcattcacccattaggtaaacattcccttttaaatgtttgtttgttttttgagacaggatctcactctgttgccagggctgtagtgcagtggtgtgatcatagctcactgcaacctccacctcccaggctcaagcctcccgaatagctgggactacaggcgcacaccaccatccccggctaatttttgtattttttgtagagacggggttttgccatgttgccaaggctggtttcaaactcctggactcaagaaatccacccacctcagcctcccaaagtgctaggattacaggcatgagccactgcgcccagcccttataaatttttgtatagacattcctttggttggaagaatatttataggcaatacagtcaaagtttcaaaatagcatcacacaaaacatgtttataaatgaacaggatgtaatgtacatagatgacattaagaaaatttgtatgaaataatttagtcatcatgaaatatttagttgtcatataaaaacccactgtttgagaatgatgctactctgatctaatgaatgtgaacatgtagatgttttgtgtgtatttttttaaatgaaaactcaaaataagacaagtaatttgttgataaatatttttaaagataactcagcatgtttgtaaagcaggatacattttactaaaaggttcattggttccaatcacagctcataggtagagcaaagaaagggtggatggattgaaaagattagcctctgtctcggtggcaggttcccacctcgcaagcaattggaaacaaaacttttggggagttttattttgcattagggtgtgttttatgttaagcaaaacatactttagaaacaaatgaaaaaggcaattgaaaatcccagctatttcacctagatggaatagccaccctgagcagaactttgtgatgcttcattctgtggaattttgtgcttactactgtatagtgcatgtggtgtaggttactctaactggttttgtcgacgtaaacatttaaagtgttatattttttataaaaatgtttatttttaatgatatgagaaaaattttgttaggccacaaaaacactgcactgtgaacattttagaaaaggtatgtcagactgggattaatgacagcatgattttcaatgactgtaaattgcgataaggaaatgtactgattgccaatacaccccaccctcattacatcatcaggacttgaagccaagggttaacccagcaagctacaaagagggtgtgtcacactgaaactcaatagttgagtttggctgttgttgcaggaaaatgattataactaaaagctctctgatagtgcagagacttaccagaagacacaaggaattgtactgaagagctattacaatccaaatattgccgtttcataaatgtaataagtaatactaattcacagagtattgtaaatggtggatgacaaaagaaaatctgctctgtggaaagaaagaactgtctctaccagggtcaagagcatgaacgcatcaatagaaagaactcggggaaacatcccatcaacaggactacacacttgtatatacattcttgagaacactgcaatgtgaaaatcacgtttgctatttataaacttgtccttagattaatgtgtctggacagattgtgggagtaagtgattcttctaagaattagatacttgtcactgcctatacctgcagctgaactgaatggtacttcgtatgttaatagttgttctgataaatcatgcaattaaagtaaagtgatgcaacatcttgtaaaaaaaaag

SEQ ID NO: 324062 - DNA, 3742 bp, Homo sapiens
  misc_feature (13)..(13): n is a, c, g, or t
tggggtgatctanaggatccctatagagtggaagcaagcaatttcttcaaccgtccttggaaaagtaatagttcaaccagatcagaatttcacaggattgattgctggtgttgtctcaatatcaacagcactgttattactacttgggtttttcctgtggctgaaaaagagaaagcaaattaaagatctgggcagtgaattagttcgctacgatgcaagagtacacactcctcatttggataggcttgtaagtgcccgaagtgtaagcccaactacagaaatggtttcaaatgaatctgtagactaccgagctacttttccagaagatcagtttcctaattcatctcagaacggttcatgccgacaagtgcagtatcctctgacagacatgtcccccatcctaactagtggggactctgatatatccagtccattactgcaaaatactgtccacattgacctcagtgctctaaatccagagctggtccaggcagtgcagcatgtagtgattgggcccagtagcctgattgtgcatttcaatgaagtcataggaagagggcattttggttgtgtatatcatgggactttgttggacaatgatggcaagaaaattcactgtgctgtgaaatccttgaacagaatcactgacataggagaagtttcccaatttctgaccgagggaatcatcatgaaagattttagtcatcccaatgtcctctcgctcctgggaatctgcctgcgaagtgaagggtctccgctggtggtcctaccatacatgaaacatggagatcttcgaaatttcattcgaaatgagactcataatccaactgtaaaagatcttattggctttggtcttcaagtagccaaaggcatgaaatatcttgcaagcaaaaagtttgtccacagagacttggctgcaagaaactgtatgctggatgaaaaattcacagtcaaggttgctgattttggtcttgccagagacatgtatgataaagaatactatagtgtacacaacaaaacaggtgcaaagctgccagtgaagtggatggctttggaaagtctgcaaactcaaaagtttaccaccaagtcagatgtgtggtcctttggcgtgctcctctgggagctgatgacaagaggagccccaccttatcctgacgtaaacacctttgatataactgtttacttgttgcaagggagaagactcctacaacccgaatactgcccagaccccttatatgaagtaatgctaaaatgctggcaccctaaagccgaaatgcgcccatccttttctgaactggtgtcccggatatcagcgatcttctctactttcattggggagcactatgtccatgtgaacgctacttatgtgaacgtaaaatgtgtcgctccgtatccttctctgttgtcatcagaagataacgctgatgatgaggtggacacacgaccagcctccttctgggagacatcatagtgctagtactatgtcaaagcaacagtccacactttgtccaatggttttttcactgcctgacctttaaaaggccatcgatattctttgctcttgccaaaattgcactattataggacttgtattgttatttaaattactggattctaaggaatttcttatctgacagagcatcagaaccagaggcttggtcccacaggccacggaccaatggcctgcagccgtgacaacactcctgtcatattggagtccaaaacttgaattctgggttgaattttttaaaaatcaggtaccacttgatttcatatgggaaattgaagcaggaaatattgagggcttcttgatcacagaaaactcagaagagatagtaatgctcaggacaggagcggcagccccagaacaggccactcatttagaattctagtgtttcaaaacacttttgtgtgttgtatggtcaataacatttttcattactgatggtgtcattcacccattaggtaaacattcccttttaaatgtttgtttgttttttgagacaggatctcactctgttgccagggctgtagtgcagtggtgtgatcatagctcactgcaacctccacctcccaggctcaagcctcccgaatagctgggactacaggcgcacaccaccatccccggctaatttttgtattttttgtagagacggggttttgccatgttgccaaggctggtttcaaactcctggactcaagaaatccacccacctcagcctcccaaagtgctaggattacaggcatgagccactgcgcccagcccttataaatttttgtatagacattcctttggttggaagaatatttataggcaatacagtcaaagtttcaaaatagcatcacacaaaacatgtttataaatgaacaggatgtaatgtacatagatgacattaagaaaatttgtatgaaataatttagtcatcatgaaatatttagttgtcatataaaaacccactgtttgagaatgatgctactctgatctaatgaatgtgaacatgtagatgttttgtgtgtatttttttaaatgaaaactcaaaataagacaagtaatttgttgataaatatttttaaagataactcagcatgtttgtaaagcaggatacattttactaaaaggttcattggttccaatcacagctcataggtagagcaaagaaagggtggatggattgaaaagattagcctctgtctcggtggcaggttcccacctcgcaagcaattggaaacaaaacttttggggagttttattttgcattagggtgtgttttatgttaagcaaaacatactttagaaacaaatgaaaaaggcaattgaaaatcccagctatttcacctagatggaatagccaccctgagcagaactttgtgatgcttcattctgtggaattttgtgcttactactgtatagtgcatgtggtgtaggttactctaactggttttgtcgacgtaaacatttaaagtgttatattttttataaaaatgtttatttttaatgatatgagaaaaattttgttaggccacaaaaacactgcactgtgaacattttagaaaaggtatgtcagactgggattaatgacagcatgattttcaatgactgtaaattgcgataaggaaatgtactgattgccaatacaccccaccctcattacatcatcaggacttgaagccaagggttaacccagcaagctacaaagagggtgtgtcacactgaaactcaatagttgagtttggctgttgttgcaggaaaatgattataactaaaagctctctgatagtgcagagacttaccagaagacacaaggaattgtactgaagagctattacaatccaaatattgccgtttcataaatgtaataagtaatactaattcacagagtattgtaaatggtggatgacaaaagaaaatctgctctgtggaaagaaagaactgtctctaccagggtcaagagcatgaacgcatcaatagaaagaactcggggaaacatcccatcaacaggactacacacttgtatatacattcttgagaacactgcaatgtgaaaatcacgtttgctatttataaacttgtccttagattaatgtgtctggacagattgtgggagtaagtgattcttctaagaattagatacttgtcactgcctatacctgcagctgaactgaatggtacttcgtatgttaatagttgttctgataaatcatgcaattaaagtaaagtgatgcaacatcttgtaaaaaaaaag

SEQ ID NO: 324063 - DNA, 2024 bp, Homo sapiens
ccacgcgtccgcggacgcgtgggattttttaaaaatcaggtaccacttgatttcatatgggaaattgaagcaggaaatattgagggcttcttgatcacagaaaactcagaagagatagtaatgctcaggacaggagcggcagccccagaacaggccactcatttagaattctagtgtttcaaaacacttttgtgtgttgtatggtcaataacatttttcattactgatggtgtcattcacccattaggtaaacattcccttttaaatgtttgtttgttttttgagacaggatctcactctgttgccagggctgtagtgcagtggtgtgatcatagctcactgcaacctccacctcccaggctcaagcctcccgaatagctgggactacaggcgcacaccaccatccccggctaatttttgtattttttgtagagacggggttttgccatgttgccaaggctggtttcaaactcctggactcaagaaatccacccacctcagcctcccaaagtgctaggattacaggcatgagccactgcgcccagcccttataaatttttgtatagacattcctttggttggaagaatatttataggcaatacagtcaaagtttcaaaatagcatcacacaaaacatgtttataaatgaacaggatgtaatgtacatagatgacattaagaaaatttgtatgaaataatttagtcatcatgaaatatttagttgtcatataaaaacccactgtttgagaatgatgctactctgatctaatgaatgtgaacatgtagatgttttgtgtgtatttttttaaatgaaaactcaaaataagacaagtaatttgttgataaatatttttaaagataactcagcatgtttgtaaagcaggatacattttactaaaaggttcattggttccaatcacagctcataggtagagcaaagaaagggtggatggattgaaaagattagcctctgtctcggtggcaggttcccacctcgcaagcaattggaaacaaaacttttggggagttttattttgcattagggtgtgttttatgttaagcaaaacatactttagaaacaaatgaaaaaggcaattgaaaatcccagctatttcacctagatggaatagccaccctgagcagaactttgtgatgcttcattctgtggaattttgtgcttactactgtatagtgcatgtggtgtaggttactctaactggttttgtcgacgtaaacatttaaagtgttatattttttataaaaatgtttatttttaatgatatgagaaaaattttgttaggccacaaaaacactgcactgtgaacattttagaaaaggtatgtcagactgggattaatgacagcatgattttcaatgactgtaaattgcgataaggaaatgtactgattgccaatacaccccaccctcattacatcatcaggacttgaagccaagggttaacccagcaagctacaaagagggtgtgtcacactgaaactcaatagttgagtttggctgttgttgcaggaaaatgattataactaaaagctctctgatagtgcagagacttaccagaagacacaaggaattgtactgaagagctattacaatccaaatattgccgtttcataaatgtaataagtaatactaattcacagagtattgtaaatggtggatgacaaaagaaaatctgctctgtggaaagaaagaactgtctctaccagggtcaagagcatgaacgcatcaatagaaagaactcggggaaacatcccatcaacaggactacacacttgtatatacattcttgagaacactgcaatgtgaaaatcacgtttgctatttataaacttgtccttagattaatgtgtctggacagattgtgggagtaagtgattcttctaagaattagatacttgtcactgcctatacctgcagctgaactgaatggtacttcgtatgttaatagttgttctgataaatcatgcaattaaagtaaagtgatgcaacatcttgtaaaaaaaaag

SEQ ID NO: 324064 - DNA, 5301 bp, Homo sapiens
gaattccgccctcgccgcccgcggcgccccgagcgctttgtgagcagatgcggagccgagtggagggcgcgagccagatgcggggcgacagctgacttgctgagaggaggcggggaggcgcggagcgcgcgtgtggtccttgcgccgctgacttctccactggttcctgggcaccgaaagataaacctctcataatgaaggcccccgctgtgcttgcacctggcatcctcgtgctcctgtttaccttggtgcagaggagcaatggggagtgtaaagaggcactagcaaagtccgagatgaatgtgaatatgaagtatcagcttcccaacttcaccgcggaaacacccatccagaatgtcattctacatgagcatcacattttccttggtgccactaactacatttatgttttaaatgaggaagaccttcagaaggttgctgagtacaagactgggcctgtgctggaacacccagattgtttcccatgtcaggactgcagcagcaaagccaatttatcaggaggtgtttggaaagataacatcaacatggctctagttgtcgacacctactatgatgatcaactcattagctgtggcagcgtcaacagagggacctgccagcgacatgtctttccccacaatcatactgctgacatacagtcggaggttcactgcatattctccccacagatagaagagcccagccagtgtcctgactgtgtggtgagcgccctgggagccaaagtcctttcatctgtaaaggaccggttcatcaacttctttgtaggcaataccataaattcttcttatttcccagatcatccattgcattcgatatcagtgagaaggctaaaggaaacgaaagatggttttatgtttttgacggaccagtcctacattgatgttttacctgagttcagagattcttaccccattaagtatgtccatgcctttgaaagcaacaattttatttacttcttgacggtccaaagggaaactctagatgctcagacttttcacacaagaataatcaggttctgttccataaactctggattgcattcctacatggaaatgcctctggagtgtattctcacagaaaagagaaaaaagagatccacaaagaaggaagtgtttaatatacttcaggctgcgtatgtcagcaagcctggggcccagcttgctagacaaataggagccagcctgaatgatgacattcttttcggggtgttcgcacaaagcaagccagattctgccgaaccaatggatcgatctgccatgtgtgcattccctatcaaatatgtcaacgacttcttcaacaagatcgtcaacaaaaacaatgtgagatgtctccagcatttttacggacccaatcatgagcactgctttaataggacacttctgagaaattcatcaggctgtgaagcgcgccgtgatgaatatcgaacagagtttaccacagctttgcagcgcgttgacttattcatgggtcaattcagcgaagtcctcttaacatctatatccaccttcattaaaggagacctcaccatagctaatcttgggacatcagagggtcgcttcatgcaggttgtggtttctcgatcaggaccatcaacccctcatgtgaattttctcctggactcccatccagtgtctccagaagtgattgtggagcatacattaaaccaaaatggctacacactggttatcactgggaagaagatcacgaagatcccattgaatggcttgggctgcagacatttccagtcctgcagtcaatgcctctctgccccaccctttgttcagtgtggctggtgccacgacaaatgtgtgcgatcggaggaatgcctgagcgggacatggactcaacagatctgtctgcctgcaatctacaaggttttcccaaatagtgcaccccttgaaggagggacaaggctgaccatatgtggctgggactttggatttcggaggaataataaatttgatttaaagaaaactagagttctccttggaaatgagagctgcaccttgactttaagtgagagcacgatgaatacattgaaatgcacagttggtcctgccatgaataagcatttcaatatgtccataattatttcaaatggccacgggacaacacaatacagtacattctcctatgtggatcctgtaataacaagtatttcgccgaaatacggtcctatggctggtggcactttacttactttaactggaaattacctaaacagtgggaattctagacacatttcaattggtggaaaaacatgtactttaaaaagtgtgtcaaacagtattcttgaatgttataccccagcccaaaccatttcaactgagtttgctgttaaattgaaaattgacttagccaaccgagagacaagcatcttcagttaccgtgaagatcccattgtctatgaaattcatccaaccaaatcttttattagtacttggtggaaagaacctctcaacattgtcagttttctattttgctttgccagtggtgggagcacaataacaggtgttgggaaaaacctgaattcagttagtgtcccgagaatggtcataaatgtgcatgaagcaggaaggaactttacagtggcatgtcaacatcgctctaattcagagataatctgttgtaccactccttccctgcaacagctgaatctgcaactccccctgaaaaccaaagcctttttcatgttagatgggatcctttccaaatactttgatctcatttatgtacataatcctgtgtttaagccttttgaaaagccagtgatgatctcaatgggcaatgaaaatgtactggaaattaagggaaatgatattgaccctgaagcagttaaaggtgaagtgttaaaagttggaaataagagctgtgagaatatacacttacattctgaagccgttttatgcacggtccccaatgacctgctgaaattgaacagcgagctaaatatagagtggaagcaagcaatttcttcaaccgtccttggaaaagtaatagttcaaccagatcagaatttcacaggattgattgctggtgttgtctcaatatcaacagcactgttattactacttgggtttttcctgtggctgaaaaagagaaagcaaattaaagatctgggcagtgaattagttcgctacgatgcaagagtacacactcctcatttggataggcttgtaagtgcccgaagtgtaagcccaactacagaaatggtttcaaatgaatctgtagactaccgagctacttttccagaagatcagtttcctaattcatctcagaacggttcatgccgacaagtgcagtatcctctgacagacatgtcccccatcctaactagtggggactctgatatatccagtccattactgcaaaatactgtccacattgacctcagtgctctaaatccagagctggtccaggcagtgcagcatgtagtgattgggcccagtagcctgattgtgcatttcaatgaagtcataggaagagggcattttggttgtgtatatcatgggactttgttggacaatgatggcaagaaaattcactgtgctgtgaaatccttgaacagaatcactgacataggagaagtttcccaatttctgaccgagggaatcatcatgaaagattttagtcatcccaatgtcctctcgctcctgggaatctgcctgcgaagtgaagggtctccgctggtggtcctaccatacatgaaacatggagatcttcgaaatttcattcgaaatgagactcataatccaactgtaaaagatcttattggctttggtcttcaagtagccaaaggcatgaaatatcttgcaagcaaaaagtttgtccacagagacttggctgcaagaaactgtatgctggatgaaaaattcacagtcaaggttgctgattttggtcttgccagagacatgtatgataaagaatactatagtgtacacaacaaaacaggtgcaaagctgccagtgaagtggatggctttggaaagtctgcaaactcaaaagtttaccaccaagtcagatgtgtggtcctttggcgtgctcctctgggagctgatgacaagaggagccccaccttatcctgacgtaaacacctttgatataactgtttacttgttgcaagggagaagactcctacaacccgaatactgcccagaccccttatatgaagtaatgctaaaatgctggcaccctaaagccgaaatgcgcccatccttttctgaactggtgtcccggatatcagcgatcttctctactttcattggggagcactatgtccatgtgaacgctacttatgtgaacgtaaaatgtgtcgctccgtatccttctctgttgtcatcagaagataacgctgatgatgaggtggacacacgaccagcctccttctgggagacatcatagtgctagtactatgtcaaagcaacagtccacactttgtccaatggttttttcactgcctgacctttaaaaggccatcgatattctttgctcttgccaaaattgcactattataggacttgtattgttatttaaattactggattctaaggaatttcttatctgacagagcatcagaaccagaggcttggtcccacaggccacggaccaatggcctgcagccgtgacaacactcctgtcatattggagtccaaaacttgaattctgggttgaattttttaaaaatcaggtaccacttgatttcatatgggaaattgaagcaggaaatattgagggcttcttgatcacagaaaactcagaagagatagtaatgctcaggacaggagcggcagccccagaacaggccactcatttagaattctagtgtttcaaaacacttttgtgtgttgtatggtcaataacatttttcattactgatggtgtcattcacccattaggtaaacattcccttttaaatgtttgtttgttttttgagacaggatctcactctgttgccagggctgtagtgcagtggtgtgatcatagctcactgcaacctccacctcccaggctcaagcctcccgaatagctgggactacaggcgcacaccaccatccccggctaatttttgtattttttgtagagacggggttttgccatgttgccaaggctggtttcaaactcctggactcaagaaatccacccacctcagcctcccaaagtgctaggattacaggcatgagccactgcgcccagcccttataaatttggtagactcttgtggggactttatggcaagcacgttcaaatggtcgcaactcttatgcggccttgtctccatgat

SEQ ID NO: 324065 - DNA, 3042 bp, Homo sapiens
gaattccgccctcgccgcccgcggcgccccgagcgctttgtgagcagatgcggagccgagtggagggcgcgagccagatgcggggcgacagctgacttgctgagaggaggcggggaggcgcggagcgcgcgtgtggtccttgcgccgctgacttctccactggttcctgggcaccgaaagataaacctctcataatgaaggcccccgctgtgcttgcacctggcatcctcgtgctcctgtttaccttggtgcagaggagcaatggggagtgtaaagaggcactagcaaagtccgagatgaatgtgaatatgaagtatcagcttcccaacttcaccgcggaaacacccatccagaatgtcattctacatgagcatcacattttccttggtgccactaactacatttatgttttaaatgaggaagaccttcagaaggttgctgagtacaagactgggcctgtgctggaacacccagattgtttcccatgtcaggactgcagcagcaaagccaatttatcaggaggtgtttggaaagataacatcaacatggctctagttgtcgacacctactatgatgatcaactcattagctgtggcagcgtcaacagagggacctgccagcgacatgtctttccccacaatcatactgctgacatacagtcggaggttcactgcatattctccccacagatagaagagcccagccagtgtcctgactgtgtggtgagcgccctgggagccaaagtcctttcatctgtaaaggaccggttcatcaacttctttgtaggcaataccataaattcttcttatttcccagatcatccattgcattcgatatcagtgagaaggctaaaggaaacgaaagatggttttatgtttttgacggaccagtcctacattgatgttttacctgagttcagagattcttaccccattaagtatgtccatgcctttgaaagcaacaattttatttacttcttgacggtccaaagggaaactctagatgctcagacttttcacacaagaataatcaggttctgttccataaactctggattgcattcctacatggaaatgcctctggagtgtattctcacagaaaagagaaaaaagagatccacaaagaaggaagtgtttaatatacttcaggctgcgtatgtcagcaagcctggggcccagcttgctagacaaataggagccagcctgaatgatgacattcttttcggggtgttcgcacaaagcaagccagattctgccgaaccaatggatcgatctgccatgtgtgcattccctatcaaatatgtcaacgacttcttcaacaagatcgtcaacaaaaacaatgtgagatgtctccagcatttttacggacccaatcatgagcactgctttaataggacacttctgagaaattcatcaggctgtgaagcgcgccgtgatgaatatcgaacagagtttaccacagctttgcagcgcgttgacttattcatgggtcaattcagcgaagtcctcttaacatctatatccaccttcattaaaggagacctcaccatagctaatcttgggacatcagagggtcgcttcatgcaggttgtggtttctcgatcaggaccatcaacccctcatgtgaattttctcctggactcccatccagtgtctccagaagtgattgtggagcatacattaaaccaaaatggctacacactggttatcactgggaagaagatcacgaagatcccattgaatggcttgggctgcagacatttccagtcctgcagtcaatgcctctctgccccaccctttgttcagtgtggctggtgccacgacaaatgtgtgcgatcggaggaatgcctgagcgggacatggactcaacagatctgtctgcctgcaatctacaaggttttcccaaatagtgcaccccttgaaggagggacaaggctgaccatatgtggctgggactttggatttcggaggaataataaatttgatttaaagaaaactagagttctccttggaaatgagagctgcaccttgactttaagtgagagcacgatgaatacattgaaatgcacagttggtcctgccatgaataagcatttcaatatgtccataattatttcaaatggccacgggacaacacaatacagtacattctcctatgtggatcctgtaataacaagtatttcgccgaaatacggtcctatggctggtggcactttacttactttaactggaaattacctaaacagtgggaattctagacacatttcaattggtggaaaaacatgtactttaaaaagtgtgtcaaacagtattcttgaatgttataccccagcccaaaccatttcaactgagtttgctgttaaattgaaaattgacttagccaaccgagagacaagcatcttcagttaccgtgaagatcccattgtctatgaaattcatccaaccaaatcttttattagtggtgggagcacaataacaggtgttgggaaaaacctgaattcagttagtgtcccgagaatggtcataaatgtgcatgaagcaggaaggaactttacagtggcatgtcaacatcgctctaattcagagataatctgttgtaccactccttccctgcaacagctgaatctgcaactccccctgaaaaccaaagcctttttcatgttagatgggatcctttccaaatactttgatctcatttatgtacataatcctgtgtttaagccttttgaaaagccagtgatgatctcaatgggcaatgaaaatgtactggaaattaagggaaatgatattgaccctgaagcagttaaaggtgaagtgttaaaagttggaaataagagctgtgagaatatacacttacattctgaagccgttttatgcacggtccccaatgacctgctgaaattgaacagcgagctaaatatagaggtgggattcctgcattcctctcatgatgtaaataaggaagccagtgtaattatgttattctcaggcttaaaataaatcattaaagctcatttatgtgtgggttttggctcatcaactc

SEQ ID NO: 324066 - DNA, 515 bp, Homo sapiens
acaattcatgatctctttcctcagcctgttgaattggcaatgtcaatgtcaagcatttttattcaagaattctgttgtaatttagtgttagtcaatagaggccagatgaaatacttccttcagaagttatggatttcaaatactgaagccacttgtttaatctgtagatattcagcatcattgtaaattattctatttcagccacgggtaataatttttgtcctttctgtaggctggatgaaaaattcacagtcaaggttgctgattttggtcttgccagagacatgtatgataaagaatactatagtgtacacaacaaaacaggtgcaaagctgccagtgaagtggatggctttggaaagtctgcaaactcaaaagtttaccaccaagtcagatgtggtaatgtattggttatctctgagtttctcctcttttactttcatatccaactttttttgaagttttatcactacttaattttttaaaaaaattcaacaccaccaattccagttttct

SEQ ID NO: 324067 - DNA, 436 bp, Homo sapiens
tcctattcggccatcttggctccgtggataagccttaaaaggctcaatactttttaaaaatttcctataaaatccagaatctatctagatttttgagcagcctgtagtggttggaggaccatgattgtttactcatttggtcacctaaacatcccaagcaatgatttgttctgacagcagactgataacagttttttttactccttggaatcggaaaaaaaatcagcaagggaagcttttggaagccacccggtagagctggaagagaatttcgaaatcaattcgctcaacctctccctttacaggcagaaaatgtgctagattggaggtgaagaccctggagccagagagcctaggcttagtcctagccctgcactgaaggtaatgtgaacactcagtgcctcagtttccttctaggcttcttgttctgagattc

SEQ ID NO: 324068 - DNA, 361 bp, Homo sapiens
atacccctctggaagctctttccaccccttctcttcacagatcacgaagatcccattgaatggcttgggctgcagacatttccagtcctgcagtcaatgcctctctgccccaccctttgttcagtgtggctggtgccacgacaaatgtgtgcgatcggaggaatgcctgagcgggacatggactcaacagatctgtctgcctgcaatctacaaggtaggaatctctaacagctggcatacatgtttttgtttggtgttttttttttttttttggtttggtttggtttgttttttgtttttttagatacaaatcccactaatgaaaaaaatttaaaaatcaatttactcatttaggctgtga

SEQ ID NO: 324069 - DNA, 397 bp, Homo sapiens
caccccttctcttcacagatcacgaagatcccattgaatggcttgggctgcagacatttccagtcctgcagtcaatgcctctctgccccaccctttgttcagtgtggctggtgccacgacaaatgtgtgcgatcggaggaatgcctgagcgggacatggactcaacagatctgtctgcctgcaatctacaaggtaggaatctctaacagctggcatacatgtttttgtttggtgttttttttttttttttggtttggtttggtttgttttttgtttttttagatacaaatcccactaatgaaaaaaatttaaaaatcaatttactcatttaggctgtgagtcatcagctaaagcaccatctctctcttggctttatccctcgggcagggagggggtg

SEQ ID NO: 324070 - DNA, 6638 bp, Homo sapiens
gaattccgccctcgccgcccgcggcgccccgagcgctttgtgagcagatgcggagccgagtggagggcgcgagccagatgcggggcgacagctgacttgctgagaggaggcggggaggcgcggagcgcgcgtgtggtccttgcgccgctgacttctccactggttcctgggcaccgaaagataaacctctcataatgaaggcccccgctgtgcttgcacctggcatcctcgtgctcctgtttaccttggtgcagaggagcaatggggagtgtaaagaggcactagcaaagtccgagatgaatgtgaatatgaagtatcagcttcccaacttcaccgcggaaacacccatccagaatgtcattctacatgagcatcacattttccttggtgccactaactacatttatgttttaaatgaggaagaccttcagaaggttgctgagtacaagactgggcctgtgctggaacacccagattgtttcccatgtcaggactgcagcagcaaagccaatttatcaggaggtgtttggaaagataacatcaacatggctctagttgtcgacacctactatgatgatcaactcattagctgtggcagcgtcaacagagggacctgccagcgacatgtctttccccacaatcatactgctgacatacagtcggaggttcactgcatattctccccacagatagaagagcccagccagtgtcctgactgtgtggtgagcgccctgggagccaaagtcctttcatctgtaaaggaccggttcatcaacttctttgtaggcaataccataaattcttcttatttcccagatcatccattgcattcgatatcagtgagaaggctaaaggaaacgaaagatggttttatgtttttgacggaccagtcctacattgatgttttacctgagttcagagattcttaccccattaagtatgtccatgcctttgaaagcaacaattttatttacttcttgacggtccaaagggaaactctagatgctcagacttttcacacaagaataatcaggttctgttccataaactctggattgcattcctacatggaaatgcctctggagtgtattctcacagaaaagagaaaaaagagatccacaaagaaggaagtgtttaatatacttcaggctgcgtatgtcagcaagcctggggcccagcttgctagacaaataggagccagcctgaatgatgacattcttttcggggtgttcgcacaaagcaagccagattctgccgaaccaatggatcgatctgccatgtgtgcattccctatcaaatatgtcaacgacttcttcaacaagatcgtcaacaaaaacaatgtgagatgtctccagcatttttacggacccaatcatgagcactgctttaataggacacttctgagaaattcatcaggctgtgaagcgcgccgtgatgaatatcgaacagagtttaccacagctttgcagcgcgttgacttattcatgggtcaattcagcgaagtcctcttaacatctatatccaccttcattaaaggagacctcaccatagctaatcttgggacatcagagggtcgcttcatgcaggttgtggtttctcgatcaggaccatcaacccctcatgtgaattttctcctggactcccatccagtgtctccagaagtgattgtggagcatacattaaaccaaaatggctacacactggttatcactgggaagaagatcacgaagatcccattgaatggcttgggctgcagacatttccagtcctgcagtcaatgcctctctgccccaccctttgttcagtgtggctggtgccacgacaaatgtgtgcgatcggaggaatgcctgagcgggacatggactcaacagatctgtctgcctgcaatctacaaggttttcccaaatagtgcaccccttgaaggagggacaaggctgaccatatgtggctgggactttggatttcggaggaataataaatttgatttaaagaaaactagagttctccttggaaatgagagctgcaccttgactttaagtgagagcacgatgaatacattgaaatgcacagttggtcctgccatgaataagcatttcaatatgtccataattatttcaaatggccacgggacaacacaatacagtacattctcctatgtggatcctgtaataacaagtatttcgccgaaatacggtcctatggctggtggcactttacttactttaactggaaattacctaaacagtgggaattctagacacatttcaattggtggaaaaacatgtactttaaaaagtgtgtcaaacagtattcttgaatgttataccccagcccaaaccatttcaactgagtttgctgttaaattgaaaattgacttagccaaccgagagacaagcatcttcagttaccgtgaagatcccattgtctatgaaattcatccaaccaaatcttttattagtggtgggagcacaataacaggtgttgggaaaaacctgaattcagttagtgtcccgagaatggtcataaatgtgcatgaagcaggaaggaactttacagtggcatgtcaacatcgctctaattcagagataatctgttgtaccactccttccctgcaacagctgaatctgcaactccccctgaaaaccaaagcctttttcatgttagatgggatcctttccaaatactttgatctcatttatgtacataatcctgtgtttaagccttttgaaaagccagtgatgatctcaatgggcaatgaaaatgtactggaaattaagggaaatgatattgaccctgaagcagttaaaggtgaagtgttaaaagttggaaataagagctgtgagaatatacacttacattctgaagccgttttatgcacggtccccaatgacctgctgaaattgaacagcgagctaaatatagagtggaagcaagcaatttcttcaaccgtccttggaaaagtaatagttcaaccagatcagaatttcacaggattgattgctggtgttgtctcaatatcaacagcactgttattactacttgggtttttcctgtggctgaaaaagagaaagcaaattaaagatctgggcagtgaattagttcgctacgatgcaagagtacacactcctcatttggataggcttgtaagtgcccgaagtgtaagcccaactacagaaatggtttcaaatgaatctgtagactaccgagctacttttccagaagatcagtttcctaattcatctcagaacggttcatgccgacaagtgcagtatcctctgacagacatgtcccccatcctaactagtggggactctgatatatccagtccattactgcaaaatactgtccacattgacctcagtgctctaaatccagagctggtccaggcagtgcagcatgtagtgattgggcccagtagcctgattgtgcatttcaatgaagtcataggaagagggcattttggttgtgtatatcatgggactttgttggacaatgatggcaagaaaattcactgtgctgtgaaatccttgaacagaatcactgacataggagaagtttcccaatttctgaccgagggaatcatcatgaaagattttagtcatcccaatgtcctctcgctcctgggaatctgcctgcgaagtgaagggtctccgctggtggtcctaccatacatgaaacatggagatcttcgaaatttcattcgaaatgagactcataatccaactgtaaaagatcttattggctttggtcttcaagtagccaaaggcatgaaatatcttgcaagcaaaaagtttgtccacagagacttggctgcaagaaactgtatgctggatgaaaaattcacagtcaaggttgctgattttggtcttgccagagacatgtatgataaagaatactatagtgtacacaacaaaacaggtgcaaagctgccagtgaagtggatggctttggaaagtctgcaaactcaaaagtttaccaccaagtcagatgtgtggtcctttggcgtgctcctctgggagctgatgacaagaggagccccaccttatcctgacgtaaacacctttgatataactgtttacttgttgcaagggagaagactcctacaacccgaatactgcccagaccccttatatgaagtaatgctaaaatgctggcaccctaaagccgaaatgcgcccatccttttctgaactggtgtcccggatatcagcgatcttctctactttcattggggagcactatgtccatgtgaacgctacttatgtgaacgtaaaatgtgtcgctccgtatccttctctgttgtcatcagaagataacgctgatgatgaggtggacacacgaccagcctccttctgggagacatcatagtgctagtactatgtcaaagcaacagtccacactttgtccaatggttttttcactgcctgacctttaaaaggccatcgatattctttgctcttgccaaaattgcactattataggacttgtattgttatttaaattactggattctaaggaatttcttatctgacagagcatcagaaccagaggcttggtcccacaggccacggaccaatggcctgcagccgtgacaacactcctgtcatattggagtccaaaacttgaattctgggttgaattttttaaaaatcaggtaccacttgatttcatatgggaaattgaagcaggaaatattgagggcttcttgatcacagaaaactcagaagagatagtaatgctcaggacaggagcggcagccccagaacaggccactcatttagaattctagtgtttcaaaacacttttgtgtgttgtatggtcaataacatttttcattactgatggtgtcattcacccattaggtaaacattcccttttaaatgtttgtttgttttttgagacaggatctcactctgttgccagggctgtagtgcagtggtgtgatcatagctcactgcaacctccacctcccaggctcaagcctcccgaatagctgggactacaggcgcacaccaccatccccggctaatttttgtattttttgtagagacggggttttgccatgttgccaaggctggtttcaaactcctggactcaagaaatccacccacctcagcctcccaaagtgctaggattacaggcatgagccactgcgcccagcccttataaatttttgtatagacattcctttggttggaagaatatttataggcaatacagtcaaagtttcaaaatagcatcacacaaaacatgtttataaatgaacaggatgtaatgtacatagatgacattaagaaaatttgtatgaaataatttagtcatcatgaaatatttagttgtcatataaaaacccactgtttgagaatgatgctactctgatctaatgaatgtgaacatgtagatgttttgtgtgtatttttttaaatgaaaactcaaaataagacaagtaatttgttgataaatatttttaaagataactcagcatgtttgtaaagcaggatacattttactaaaaggttcattggttccaatcacagctcataggtagagcaaagaaagggtggatggattgaaaagattagcctctgtctcggtggcaggttcccacctcgcaagcaattggaaacaaaacttttggggagttttattttgcattagggtgtgttttatgttaagcaaaacatactttagaaacaaatgaaaaaggcaattgaaaatcccagctatttcacctagatggaatagccaccctgagcagaactttgtgatgcttcattctgtggaattttgtgcttactactgtatagtgcatgtggtgtaggttactctaactggttttgtcgacgtaaacatttaaagtgttatattttttataaaaatgtttatttttaatgatatgagaaaaattttgttaggccacaaaaacactgcactgtgaacattttagaaaaggtatgtcagactgggattaatgacagcatgattttcaatgactgtaaattgcgataaggaaatgtactgattgccaatacaccccaccctcattacatcatcaggacttgaagccaagggttaacccagcaagctacaaagagggtgtgtcacactgaaactcaatagttgagtttggctgttgttgcaggaaaatgattataactaaaagctctctgatagtgcagagacttaccagaagacacaaggaattgtactgaagagctattacaatccaaatattgccgtttcataaatgtaataagtaatactaattcacagagtattgtaaatggtggatgacaaaagaaaatctgctctgtggaaagaaagaactgtctctaccagggtcaagagcatgaacgcatcaatagaaagaactcggggaaacatcccatcaacaggactacacacttgtatatacattcttgagaacactgcaatgtgaaaatcacgtttgctatttataaacttgtccttagattaatgtgtctggacagattgtgggagtaagtgattcttctaagaattagatacttgtcactgcctatacctgcagctgaactgaatggtacttcgtatgttaatagttgttctgataaatcatgcaattaaagtaaagtgatgcaacatcttgtaaaaaaaaag

SEQ ID NO: 324071 - DNA, 6733 bp, Homo sapiens
  misc_feature (4146)..(4146): n is a, c, g, or t
gaattccgccctcgccgcccgcggcgccccgagcgctttgtgagcagatgcggagccgagtggagggcgcgagccagatgcggggcgacagctgacttgctgagaggaggcggggaggcgcggagcgcgcgtgtggtccttgcgccgctgacttctccactggttcctgggcaccgaaagataaacctctcataatgaaggcccccgctgtgcttgcacctggcatcctcgtgctcctgtttaccttggtgcagaggagcaatggggagtgtaaagaggcactagcaaagtccgagatgaatgtgaatatgaagtatcagcttcccaacttcaccgcggaaacacccatccagaatgtcattctacatgagcatcacattttccttggtgccactaactacatttatgttttaaatgaggaagaccttcagaaggttgctgagtacaagactgggcctgtgctggaacacccagattgtttcccatgtcaggactgcagcagcaaagccaatttatcaggaggtgtttggaaagataacatcaacatggctctagttgtcgacacctactatgatgatcaactcattagctgtggcagcgtcaacagagggacctgccagcgacatgtctttccccacaatcatactgctgacatacagtcggaggttcactgcatattctccccacagatagaagagcccagccagtgtcctgactgtgtggtgagcgccctgggagccaaagtcctttcatctgtaaaggaccggttcatcaacttctttgtaggcaataccataaattcttcttatttcccagatcatccattgcattcgatatcagtgagaaggctaaaggaaacgaaagatggttttatgtttttgacggaccagtcctacattgatgttttacctgagttcagagattcttaccccattaagtatgtccatgcctttgaaagcaacaattttatttacttcttgacggtccaaagggaaactctagatgctcagacttttcacacaagaataatcaggttctgttccataaactctggattgcattcctacatggaaatgcctctggagtgtattctcacagaaaagagaaaaaagagatccacaaagaaggaagtgtttaatatacttcaggctgcgtatgtcagcaagcctggggcccagcttgctagacaaataggagccagcctgaatgatgacattcttttcggggtgttcgcacaaagcaagccagattctgccgaaccaatggatcgatctgccatgtgtgcattccctatcaaatatgtcaacgacttcttcaacaagatcgtcaacaaaaacaatgtgagatgtctccagcatttttacggacccaatcatgagcactgctttaataggacacttctgagaaattcatcaggctgtgaagcgcgccgtgatgaatatcgaacagagtttaccacagctttgcagcgcgttgacttattcatgggtcaattcagcgaagtcctcttaacatctatatccaccttcattaaaggagacctcaccatagctaatcttgggacatcagagggtcgcttcatgcaggttgtggtttctcgatcaggaccatcaacccctcatgtgaattttctcctggactcccatccagtgtctccagaagtgattgtggagcatacattaaaccaaaatggctacacactggttatcactgggaagaagatcacgaagatcccattgaatggcttgggctgcagacatttccagtcctgcagtcaatgcctctctgccccaccctttgttcagtgtggctggtgccacgacaaatgtgtgcgatcggaggaatgcctgagcgggacatggactcaacagatctgtctgcctgcaatctacaaggttttcccaaatagtgcaccccttgaaggagggacaaggctgaccatatgtggctgggactttggatttcggaggaataataaatttgatttaaagaaaactagagttctccttggaaatgagagctgcaccttgactttaagtgagagcacgatgaatacattgaaatgcacagttggtcctgccatgaataagcatttcaatatgtccataattatttcaaatggccacgggacaacacaatacagtacattctcctatgtggatcctgtaataacaagtatttcgccgaaatacggtcctatggctggtggcactttacttactttaactggaaattacctaaacagtgggaattctagacacatttcaattggtggaaaaacatgtactttaaaaagtgtgtcaaacagtattcttgaatgttataccccagcccaaaccatttcaactgagtttgctgttaaattgaaaattgacttagccaaccgagagacaagcatcttcagttaccgtgaagatcccattgtctatgaaattcatccaaccaaatcttttattagtggtgggagcacaataacaggtgttgggaaaaacctgaattcagttagtgtcccgagaatggtcataaatgtgcatgaagcaggaaggaactttacagtggcatgtcaacatcgctctaattcagagataatctgttgtaccactccttccctgcaacagctgaatctgcaactccccctgaaaaccaaagcctttttcatgttagatgggatcctttccaaatactttgatctcatttatgtacataatcctgtgtttaagccttttgaaaagccagtgatgatctcaatgggcaatgaaaatgtactggaaattaagggaaatgatattgaccctgaagcagttaaaggtgaagtgttaaaagttggaaataagagctgtgagaatatacacttacattctgaagccgttttatgcacggtccccaatgacctgctgaaattgaacagcgagctaaatatagagtggaagcaagcaatttcttcaaccgtccttggaaaagtaatagttcaaccagatcagaatttcacaggattgattgctggtgttgtctcaatatcaacagcactgttattactacttgggtttttcctgtggctgaaaaagagaaagcaaattaaagatctgggcagtgaattagttcgctacgatgcaagagtacacactcctcatttggataggcttgtaagtgcccgaagtgtaagcccaactacagaaatggtttcaaatgaatctgtagactaccgagctacttttccagaagatcagtttcctaattcatctcagaacggttcatgccgacaagtgcagtatcctctgacagacatgtcccccatcctaactagtggggactctgatatatccagtccattactgcaaaatactgtccacattgacctcagtgctctaaatccagagctggtccaggcagtgcagcatgtagtgattgggcccagtagcctgattgtgcatttcaatgaagtcataggaagagggcattttggttgtgtatatcatgggactttgttggacaatgatggcaagaaaattcactgtgctgtgaaatccttgaacagaatcactgacataggagaagtttcccaatttctgaccgagggaatcatcatgaaagattttagtcatcccaatgtcctctcgctcctgggaatctgcctgcgaagtgaagggtctccgctggtggtcctaccatacatgaaacatggagatcttcgaaatttcattcgaaatgagactcataatccaactgtaaaagatcttattggctttggtcttcaagtagccaaaggcatgaaatatcttgcaagcaaaaagtttgtccacagagacttggctgcaagaaactgtatgctggatgaaaaattcacagtcaaggttgctgattttggtcttgccagagacatgtatgataaagaatactatagtgtacacaacaaaacaggtgcaaagctgccagtgaagtggatggctttggaaagtctgcaaactcaaaagtttaccaccaagtcagatgtgtggtcctttggcgtgctcctctgggagctgatgacaagaggagccccaccttatcctgacgtaaacacctttgatataactgtttacttgttgcaagggagaagactcctacaacccgaatactgcccagaccccttgtaagtagtctttctgnacctcttacgttctttacttttacagaaatgcctgccttcaaagggtctcttacagcatgtctttctttttggaacagatatgaagtaatgctaaaatgctggcaccctaaagccgaaatgcgcccatccttttctgaactggtgtcccggatatcagcgatcttctctactttcattggggagcactatgtccatgtgaacgctacttatgtgaacgtaaaatgtgtcgctccgtatccttctctgttgtcatcagaagataacgctgatgatgaggtggacacacgaccagcctccttctgggagacatcatagtgctagtactatgtcaaagcaacagtccacactttgtccaatggttttttcactgcctgacctttaaaaggccatcgatattctttgctcttgccaaaattgcactattataggacttgtattgttatttaaattactggattctaaggaatttcttatctgacagagcatcagaaccagaggcttggtcccacaggccacggaccaatggcctgcagccgtgacaacactcctgtcatattggagtccaaaacttgaattctgggttgaattttttaaaaatcaggtaccacttgatttcatatgggaaattgaagcaggaaatattgagggcttcttgatcacagaaaactcagaagagatagtaatgctcaggacaggagcggcagccccagaacaggccactcatttagaattctagtgtttcaaaacacttttgtgtgttgtatggtcaataacatttttcattactgatggtgtcattcacccattaggtaaacattcccttttaaatgtttgtttgttttttgagacaggatctcactctgttgccagggctgtagtgcagtggtgtgatcatagctcactgcaacctccacctcccaggctcaagcctcccgaatagctgggactacaggcgcacaccaccatccccggctaatttttgtattttttgtagagacggggttttgccatgttgccaaggctggtttcaaactcctggactcaagaaatccacccacctcagcctcccaaagtgctaggattacaggcatgagccactgcgcccagcccttataaatttttgtatagacattcctttggttggaagaatatttataggcaatacagtcaaagtttcaaaatagcatcacacaaaacatgtttataaatgaacaggatgtaatgtacatagatgacattaagaaaatttgtatgaaataatttagtcatcatgaaatatttagttgtcatataaaaacccactgtttgagaatgatgctactctgatctaatgaatgtgaacatgtagatgttttgtgtgtatttttttaaatgaaaactcaaaataagacaagtaatttgttgataaatatttttaaagataactcagcatgtttgtaaagcaggatacattttactaaaaggttcattggttccaatcacagctcataggtagagcaaagaaagggtggatggattgaaaagattagcctctgtctcggtggcaggttcccacctcgcaagcaattggaaacaaaacttttggggagttttattttgcattagggtgtgttttatgttaagcaaaacatactttagaaacaaatgaaaaaggcaattgaaaatcccagctatttcacctagatggaatagccaccctgagcagaactttgtgatgcttcattctgtggaattttgtgcttactactgtatagtgcatgtggtgtaggttactctaactggttttgtcgacgtaaacatttaaagtgttatattttttataaaaatgtttatttttaatgatatgagaaaaattttgttaggccacaaaaacactgcactgtgaacattttagaaaaggtatgtcagactgggattaatgacagcatgattttcaatgactgtaaattgcgataaggaaatgtactgattgccaatacaccccaccctcattacatcatcaggacttgaagccaagggttaacccagcaagctacaaagagggtgtgtcacactgaaactcaatagttgagtttggctgttgttgcaggaaaatgattataactaaaagctctctgatagtgcagagacttaccagaagacacaaggaattgtactgaagagctattacaatccaaatattgccgtttcataaatgtaataagtaatactaattcacagagtattgtaaatggtggatgacaaaagaaaatctgctctgtggaaagaaagaactgtctctaccagggtcaagagcatgaacgcatcaatagaaagaactcggggaaacatcccatcaacaggactacacacttgtatatacattcttgagaacactgcaatgtgaaaatcacgtttgctatttataaacttgtccttagattaatgtgtctggacagattgtgggagtaagtgattcttctaagaattagatacttgtcactgcctatacctgcagctgaactgaatggtacttcgtatgttaatagttgttctgataaatcatgcaattaaagtaaagtgatgcaacatcttgtaaaaaaaaag

SEQ ID NO: 324072 - DNA, 4203 bp, Homo sapiens
gttaaatacagattttttcaaaaattatatattttcaattgattggggtggtaaattataaagttgctatggatgttgccaagctgtattctgtttacagtggataattgtgtctttctctaggcatgtcaacatcgctctaattcagagataatctgttgtaccactccttccctgcaacagctgaatctgcaactccccctgaaaaccaaagcctttttcatgttagatgggatcctttccaaatactttgatctcatttatgtacataatcctgtgtttaagccttttgaaaagccagtgatgatctcaatgggcaatgaaaatgtactggaaattaagggaaatgatattgaccctgaagcagttaaaggtgaagtgttaaaagttggaaataagagctgtgagaatatacacttacattctgaagccgttttatgcacggtccccaatgacctgctgaaattgaacagcgagctaaatatagagtggaagcaagcaatttcttcaaccgtccttggaaaagtaatagttcaaccagatcagaatttcacaggattgattgctggtgttgtctcaatatcaacagcactgttattactacttgggtttttcctgtggctgaaaaagagaaagcaaattaaagatctgggcagtgaattagttcgctacgatgcaagagtacacactcctcatttggataggcttgtaagtgcccgaagtgtaagcccaactacagaaatggtttcaaatgaatctgtagactaccgagctacttttccagaagatcagtttcctaattcatctcagaacggttcatgccgacaagtgcagtatcctctgacagacatgtcccccatcctaactagtggggactctgatatatccagtccattactgcaaaatactgtccacattgacctcagtgctctaaatccagagctggtccaggcagtgcagcatgtagtgattgggcccagtagcctgattgtgcatttcaatgaagtcataggaagagggcattttggttgtgtatatcatgggactttgttggacaatgatggcaagaaaattcactgtgctgtgaaatccttgaacagaatcactgacataggagaagtttcccaatttctgaccgagggaatcatcatgaaagattttagtcatcccaatgtcctctcgctcctgggaatctgcctgcgaagtgaagggtctccgctggtggtcctaccatacatgaaacatggagatcttcgaaatttcattcgaaatgagactcataatccaactgtaaaagatcttattggctttggtcttcaagtagccaaaggcatgaaatatcttgcaagcaaaaagtttgtccacagagacttggctgcaagaaactgtatgctggatgaaaaattcacagtcaaggttgctgattttggtcttgccagagacatgtatgataaagaatactatagtgtacacaacaaaacaggtgcaaagctgccagtgaagtggatggctttggaaagtctgcaaactcaaaagtttaccaccaagtcagatgtgtggtcctttggcgtgctcctctgggagctgatgacaagaggagccccaccttatcctgacgtaaacacctttgatataactgtttacttgttgcaagggagaagactcctacaacccgaatactgcccagaccccttatatgaagtaatgctaaaatgctggcaccctaaagccgaaatgcgcccatccttttctgaactggtgtcccggatatcagcgatcttctctactttcattggggagcactatgtccatgtgaacgctacttatgtgaacgtaaaatgtgtcgctccgtatccttctctgttgtcatcagaagataacgctgatgatgaggtggacacacgaccagcctccttctgggagacatcatagtgctagtactatgtcaaagcaacagtccacactttgtccaatggttttttcactgcctgacctttaaaaggccatcgatattctttgctcttgccaaaattgcactattataggacttgtattgttatttaaattactggattctaaggaatttcttatctgacagagcatcagaaccagaggcttggtcccacaggccacggaccaatggcctgcagccgtgacaacactcctgtcatattggagtccaaaacttgaattctgggttgaattttttaaaaatcaggtaccacttgatttcatatgggaaattgaagcaggaaatattgagggcttcttgatcacagaaaactcagaagagatagtaatgctcaggacaggagcggcagccccagaacaggccactcatttagaattctagtgtttcaaaacacttttgtgtgttgtatggtcaataacatttttcattactgatggtgtcattcacccattaggtaaacattcccttttaaatgtttgtttgttttttgagacaggatctcactctgttgccagggctgtagtgcagtggtgtgatcatagctcactgcaacctccacctcccaggctcaagcctcccgaatagctgggactacaggcgcacaccaccatccccggctaatttttgtattttttgtagagacggggttttgccatgttgccaaggctggtttcaaactcctggactcaagaaatccacccacctcagcctcccaaagtgctaggattacaggcatgagccactgcgcccagcccttataaatttttgtatagacattcctttggttggaagaatatttataggcaatacagtcaaagtttcaaaatagcatcacacaaaacatgtttataaatgaacaggatgtaatgtacatagatgacattaagaaaatttgtatgaaataatttagtcatcatgaaatatttagttgtcatataaaaacccactgtttgagaatgatgctactctgatctaatgaatgtgaacatgtagatgttttgtgtgtatttttttaaatgaaaactcaaaataagacaagtaatttgttgataaatatttttaaagataactcagcatgtttgtaaagcaggatacattttactaaaaggttcattggttccaatcacagctcataggtagagcaaagaaagggtggatggattgaaaagattagcctctgtctcggtggcaggttcccacctcgcaagcaattggaaacaaaacttttggggagttttattttgcattagggtgtgttttatgttaagcaaaacatactttagaaacaaatgaaaaaggcaattgaaaatcccagctatttcacctagatggaatagccaccctgagcagaactttgtgatgcttcattctgtggaattttgtgcttactactgtatagtgcatgtggtgtaggttactctaactggttttgtcgacgtaaacatttaaagtgttatattttttataaaaatgtttatttttaatgatatgagaaaaattttgttaggccacaaaaacactgcactgtgaacattttagaaaaggtatgtcagactgggattaatgacagcatgattttcaatgactgtaaattgcgataaggaaatgtactgattgccaatacaccccaccctcattacatcatcaggacttgaagccaagggttaacccagcaagctacaaagagggtgtgtcacactgaaactcaatagttgagtttggctgttgttgcaggaaaatgattataactaaaagctctctgatagtgcagagacttaccagaagacacaaggaattgtactgaagagctattacaatccaaatattgccgtttcataaatgtaataagtaatactaattcacagagtattgtaaatggtggatgacaaaagaaaatctgctctgtggaaagaaagaactgtctctaccagggtcaagagcatgaacgcatcaatagaaagaactcggggaaacatcccatcaacaggactacacacttgtatatacattcttgagaacactgcaatgtgaaaatcacgtttgctatttataaacttgtccttagattaatgtgtctggacagattgtgggagtaagtgattcttctaagaattagatacttgtcactgcctatacctgcagctgaactgaatggtacttcgtatgttaatagttgttctgataaatcatgcaattaaagtaaagtgatgcaacatcttgtaaaaaaaaag

SEQ ID NO: 324073 - DNA, 4231 bp, Homo sapiens
gaattccgccctcgccgcccgcggcgccccgagcgctttgtgagcagatgcggagccgagtggagggcgcgagccagatgcggggcgacagctgacttgctgagaggaggcggggaggcgcggagcgcgcgtgtggtccttgcgccgctgacttctccactggttcctgggcaccgaaagataaacctctcataatgaaggcccccgctgtgcttgcacctggcatcctcgtgctcctgtttaccttggtgcagaggagcaatggggagtgtaaagaggcactagcaaagtccgagatgaatgtgaatatgaagtatcagcttcccaacttcaccgcggaaacacccatccagaatgtcattctacatgagcatcacattttccttggtgccactaactacatttatgttttaaatgaggaagaccttcagaaggttgctgagtacaagactgggcctgtgctggaacacccagattgtttcccatgtcaggactgcagcagcaaagccaatttatcaggaggtgtttggaaagataacatcaacatggctctagttgtcgacacctactatgatgatcaactcattagctgtggcagcgtcaacagagggacctgccagcgacatgtctttccccacaatcatactgctgacatacagtcggaggttcactgcatattctccccacagatagaagagcccagccagtgtcctgactgtgtggtgagcgccctgggagccaaagtcctttcatctgtaaaggaccggttcatcaacttctttgtaggcaataccataaattcttcttatttcccagatcatccattgcattcgatatcagtgagaaggctaaaggaaacgaaagatggttttatgtttttgacggaccagtcctacattgatgttttacctgagttcagagattcttaccccattaagtatgtccatgcctttgaaagcaacaattttatttacttcttgacggtccaaagggaaactctagatgctcagacttttcacacaagaataatcaggttctgttccataaactctggattgcattcctacatggaaatgcctctggagtgtattctcacagaaaagagaaaaaagagatccacaaagaaggaagtgtttaatatacttcaggctgcgtatgtcagcaagcctggggcccagcttgctagacaaataggagccagcctgaatgatgacattcttttcggggtgttcgcacaaagcaagccagattctgccgaaccaatggatcgatctgccatgtgtgcattccctatcaaatatgtcaacgacttcttcaacaagatcgtcaacaaaaacaatgtgagatgtctccagcatttttacggacccaatcatgagcactgctttaataggacacttctgagaaattcatcaggctgtgaagcgcgccgtgatgaatatcgaacagagtttaccacagctttgcagcgcgttgacttattcatgggtcaattcagcgaagtcctcttaacatctatatccaccttcattaaaggagacctcaccatagctaatcttgggacatcagagggtcgcttcatgcaggttgtggtttctcgatcaggaccatcaacccctcatgtgaattttctcctggactcccatccagtgtctccagaagtgattgtggagcatacattaaaccaaaatggctacacactggttatcactgggaagaagatcacgaagatcccattgaatggcttgggctgcagacatttccagtcctgcagtcaatgcctctctgccccaccctttgttcagtgtggctggtgccacgacaaatgtgtgcgatcggaggaatgcctgagcgggacatggactcaacagatctgtctgcctgcaatctacaaggttttcccaaatagtgcaccccttgaaggagggacaaggctgaccatatgtggctgggactttggatttcggaggaataataaatttgatttaaagaaaactagagttctccttggaaatgagagctgcaccttgactttaagtgagagcacgatgaatacattgaaatgcacagttggtcctgccatgaataagcatttcaatatgtccataattatttcaaatggccacgggacaacacaatacagtacattctcctatgtggatcctgtaataacaagtatttcgccgaaatacggtcctatggctggtggcactttacttactttaactggaaattacctaaacagtgggaattctagacacatttcaattggtggaaaaacatgtactttaaaaagtgtgtcaaacagtattcttgaatgttataccccagcccaaaccatttcaactgagtttgctgttaaattgaaaattgacttagccaaccgagagacaagcatcttcagttaccgtgaagatcccattgtctatgaaattcatccaaccaaatcttttattagtggtgggagcacaataacaggtgttgggaaaaacctgaattcagttagtgtcccgagaatggtcataaatgtgcatgaagcaggaaggaactttacagtggcatgtcaacatcgctctaattcagagataatctgttgtaccactccttccctgcaacagctgaatctgcaactccccctgaaaaccaaagcctttttcatgttagatgggatcctttccaaatactttgatctcatttatgtacataatcctgtgtttaagccttttgaaaagccagtgatgatctcaatgggcaatgaaaatgtactggaaattaagggaaatgatattgaccctgaagcagttaaaggtgaagtgttaaaagttggaaataagagctgtgagaatatacacttacattctgaagccgttttatgcacggtccccaatgacctgctgaaattgaacagcgagctaaatatagagtggaagcaagcaatttcttcaaccgtccttggaaaagtaatagttcaaccagatcagaatttcacaggattgattgctggtgttgtctcaatatcaacagcactgttattactacttgggtttttcctgtggctgaaaaagagaaagcaaattaaagatctgggcagtgaattagttcgctacgatgcaagagtacacactcctcatttggataggcttgtaagtgcccgaagtgtaagcccaactacagaaatggtttcaaatgaatctgtagactaccgagctacttttccagaagatcagtttcctaattcatctcagaacggttcatgccgacaagtgcagtatcctctgacagacatgtcccccatcctaactagtggggactctgatatatccagtccattactgcaaaatactgtccacattgacctcagtgctctaaatccagagctggtccaggcagtgcagcatgtagtgattgggcccagtagcctgattgtgcatttcaatgaagtcataggaagagggcattttggttgtgtatatcatgggactttgttggacaatgatggcaagaaaattcactgtgctgtgaaatccttgaacagaatcactgacataggagaagtttcccaatttctgaccgagggaatcatcatgaaagattttagtcatcccaatgtcctctcgctcctgggaatctgcctgcgaagtgaagggtctccgctggtggtcctaccatacatgaaacatggagatcttcgaaatttcattcgaaatgagactcataatccaactgtaaaagatcttattggctttggtcttcaagtagccaaaggcatgaaatatcttgcaagcaaaaagtttgtccacagagacttggctgcaagaaactgtatgctggatgaaaaattcacagtcaaggttgctgattttggtcttgccagagacatgtatgataaagaatactatagtgtacacaacaaaacaggtgcaaagctgccagtgaagtggatggctttggaaagtctgcaaactcaaaagtttaccaccaagtcagatgtgtggtcctttggcgtgctcctctgggagctgatgacaagaggagccccaccttatcctgacgtaaacacctttgatataactgtttacttgttgcaagggagtaagtgattcttctaagaattagatacttgtcactgcctatacctgcagctgaactgaatggtacttcgtatgttaatagttgttctgataaatcatgcaattaaagtaaagtgatgcaacatcttgtaaaaaaaaag

SEQ ID NO: 324074 - DNA, 1700 bp, Homo sapiens
tataaaacaacttagcaggatatgagttatgacatttaggggtgttgtcctattgcttcagaacagtggggttatcgtgtaacacaccatgtcacatgatttgactaaatacaggaaaaaaaaaccctgaacttggtttcattggctcaaatatagttcaagacaacagagacaaagctaagatgaggaagttctgtacagtttaggaaatagaggctttcaaagataattcgcagtgatgtgaaactggcctcccaagccctgataacaacatggccaacgccctggccagcgccacttgcgagcgctgcaagggcggctttgcgcccgctgagaagatcgtgaacagtaatggggagctgtaccatgagcagtgtttcgtgtgcgctcagtgcttccagcagttcccagaaggactcttctatgagtttgaaggaagaaagtactgtgaacatgactttcagatgctctttgccccttgctgtcatcagtgtggtgaattcatcattggccgagttatcaaagccatgaataacagctggcatccggagtgcttccgctgtgacctctgccaggaagttctggcagatatcgggtttgtcaagaatgctgggagacacctgtgtcgcccctgtcataatcgtgagaaagccagaggccttgggaaatacatctgccagaaatgccatgctatcatcgatgagcagcctctgatattcaagaacgacccctaccatccagaccatttcaactgcgccaactgcgggaaggagctgactgccgatgcacgggagctgaaaggggagctatactgcctcccatgccatgataaaatgggggtccccatctgtggtgcttgccgacggcccatcgaagggcgcgtggtgaacgctatgggcaagcagtggcatgtggagcattttgtttgtgccaagtgtgagaaaccctttcttggacatcgccattatgagaggaaaggcctggcatattgtgaaactcactataaccagctatttggtgatgtttgcttccactgcaatcgtgttatagaaggtgatgtggtctctgctcttaataaggcctggtgcgtgaactgctttgcctgttctacctgcaacactaaattaacactcaagaataagtttgtggagtttgacatgaagccagtctgtaagaagtgctatgagaaatttccattggagctgaagaaaagacttaagaaactagctgagaccttaggaaggaaataagttcctttattttttcttttctatgcaagataagagattaccaacattacttgtcttgatctacccatatttaaagctatatctcaaagcagttgagagaagaggacctatatgaatggttttatgtcatttttttaattaaaaaagaaaaattcatataatcgtgtttaaaacacaaatgaagtcagtatttgcctttgttaacccttatccatttgttgacatgtagactgtttacaaaaaaaaaacacatggttaaatgttaaattttaattaaggcccccaaaaattaaatataactttttaaaatgaaaggagtcaccttttacatgactcaggtgaaaaaacagtataaacattaatttactttgtgttcaaaagaaaattccaactgctgttggggaaggacacagaaaagaaaaataaccacccaagaaaaacaaaaaaaaa

SEQ ID NO: 324075 - DNA, 421 bp, Homo sapiens
tataaaacaacttagcaggatatgagttatgacatttaggggtgttgtcctattgcttcagaacagtggggttatcgtgtaacacaccatgtcacatgatttgactaaatacaggaaaaaaaaaccctgaacttggtttcattggctcaaatatagttcaagacaacagagacaaagctaagatgaggaagttctgtacagtttaggaaatagaggctttcaaagataattcttagtaatgcttttggcattttattacattaattttttaaaacattatttctgctgcctagggtctttggtggggaaatgtactatttagcaatatgtttagtgaacttttgtcctgtcatggtaagaagaaagcagctataactaagtaaggagttactcttattcattaacatgtaaaacgctgttt

SEQ ID NO: 324076 - DNA, 1903 bp, Homo sapiens
tataaaacaacttagcaggatatgagttatgacatttaggggtgttgtcctattgcttcagaacagtggggttatcgtgtaacacaccatgtcacatgatttgactaaatacaggaaaaaaaaaccctgaacttggtttcattggctcaaatatagttcaagacaacagagacaaagctaagatgaggaagttctgtacagtttaggaaatagaggctttcaaagataattcgcagtgatgtgaaactggcctcccaagccctgataagtaagttaaataagagtaggagccaggagggaggttctttactcttgaattaagagaaggggagctggaggtggctcaggtagagtgcgtaggtttgcagaactgggcctgtgtgtgtaaagtgactaaggcaaaggagtggaagtttgagagaagtttaagagaagaaatggacatgattgcctaaatcagccaaacacaggcaacatggccaacgccctggccagcgccacttgcgagcgctgcaagggcggctttgcgcccgctgagaagatcgtgaacagtaatggggagctgtaccatgagcagtgtttcgtgtgcgctcagtgcttccagcagttcccagaaggactcttctatgagtttgaaggaagaaagtactgtgaacatgactttcagatgctctttgccccttgctgtcatcagtgtggtgaattcatcattggccgagttatcaaagccatgaataacagctggcatccggagtgcttccgctgtgacctctgccaggaagttctggcagatatcgggtttgtcaagaatgctgggagacacctgtgtcgcccctgtcataatcgtgagaaagccagaggccttgggaaatacatctgccagaaatgccatgctatcatcgatgagcagcctctgatattcaagaacgacccctaccatccagaccatttcaactgcgccaactgcgggaaggagctgactgccgatgcacgggagctgaaaggggagctatactgcctcccatgccatgataaaatgggggtccccatctgtggtgcttgccgacggcccatcgaagggcgcgtggtgaacgctatgggcaagcagtggcatgtggagcattttgtttgtgccaagtgtgagaaaccctttcttggacatcgccattatgagaggaaaggcctggcatattgtgaaactcactataaccagctatttggtgatgtttgcttccactgcaatcgtgttatagaaggtgatgtggtctctgctcttaataaggcctggtgcgtgaactgctttgcctgttctacctgcaacactaaattaacactcaagaataagtttgtggagtttgacatgaagccagtctgtaagaagtgctatgagaaatttccattggagctgaagaaaagacttaagaaactagctgagaccttaggaaggaaataagttcctttattttttcttttctatgcaagataagagattaccaacattacttgtcttgatctacccatatttaaagctatatctcaaagcagttgagagaagaggacctatatgaatggttttatgtcatttttttaattaaaaaagaaaaattcatataatcgtgtttaaaacacaaatgaagtcagtatttgcctttgttaacccttatccatttgttgacatgtagactgtttacaaaaaaaaaacacatggttaaatgttaaattttaattaaggcccccaaaaattaaatataactttttaaaatgaaaggagtcaccttttacatgactcaggtgaaaaaacagtataaacattaatttactttgtgttcaaaagaaaattccaactgctgttggggaaggacacagaaaagaaaaataaccacccaagaaaaacaaaaaaaaa

SEQ ID NO: 324077 - DNA, 1605 bp, Homo sapiens
cgcgcggccggcccctggccttcctccccttcctgctccgggcccgccagtagccggccgcggcggcgagggactaggacgcggctggagcggcgccgggagacgaggggctgagagacggcggcggccgaaagcggagagatgctgggcgtggcggccgggatgacccacagcaacatggccaacgccctggccagcgccacttgcgagcgctgcaagggcggctttgcgcccgctgagaagatcgtgaacagtaatggggagctgtaccatgagcagtgtttcgtgtgcgctcagtgcttccagcagttcccagaaggactcttctatgagtttgaaggaagaaagtactgtgaacatgactttcagatgctctttgccccttgctgtcatcagtgtggtgaattcatcattggccgagttatcaaagccatgaataacagctggcatccggagtgcttccgctgtgacctctgccaggaagttctggcagatatcgggtttgtcaagaatgctgggagacacctgtgtcgcccctgtcataatcgtgagaaagccagaggccttgggaaatacatctgccagaaatgccatgctatcatcgatgagcagcctctgatattcaagaacgacccctaccatccagaccatttcaactgcgccaactgcgggaaggagctgactgccgatgcacgggagctgaaaggggagctatactgcctcccatgccatgataaaatgggggtccccatctgtggtgcttgccgacggcccatcgaagggcgcgtggtgaacgctatgggcaagcagtggcatgtggagcattttgtttgtgccaagtgtgagaaaccctttcttggacatcgccattatgagaggaaaggcctggcatattgtgaaactcactataaccagctatttggtgatgtttgcttccactgcaatcgtgttatagaaggtgatgtggtctctgctcttaataaggcctggtgcgtgaactgctttgcctgttctacctgcaacactaaattaacactcaagaataagtttgtggagtttgacatgaagccagtctgtaagaagtgctatgagaaatttccattggagctgaagaaaagacttaagaaactagctgagaccttaggaaggaaataagttcctttattttttcttttctatgcaagataagagattaccaacattacttgtcttgatctacccatatttaaagctatatctcaaagcagttgagagaagaggacctatatgaatggttttatgtcatttttttaattaaaaaagaaaaattcatataatcgtgtttaaaacacaaatgaagtcagtatttgcctttgttaacccttatccatttgttgacatgtagactgtttacaaaaaaaaaacacatggttaaatgttaaattttaattaaggcccccaaaaattaaatataactttttaaaatgaaaggagtcaccttttacatgactcaggtgaaaaaacagtataaacattaatttactttgtgttcaaaagaaaattccaactgctgttggggaaggacacagaaaagaaaaataaccacccaagaaaaacaaaaaaaaa

SEQ ID NO: 324078 - DNA, 1483 bp, Homo sapiens
gcttggacagccagctgatgagggacacatcgaatcaagatacatgacatgcaacatggccaacgccctggccagcgccacttgcgagcgctgcaagggcggctttgcgcccgctgagaagatcgtgaacagtaatggggagctgtaccatgagcagtgtttcgtgtgcgctcagtgcttccagcagttcccagaaggactcttctatgagtttgaaggaagaaagtactgtgaacatgactttcagatgctctttgccccttgctgtcatcagtgtggtgaattcatcattggccgagttatcaaagccatgaataacagctggcatccggagtgcttccgctgtgacctctgccaggaagttctggcagatatcgggtttgtcaagaatgctgggagacacctgtgtcgcccctgtcataatcgtgagaaagccagaggccttgggaaatacatctgccagaaatgccatgctatcatcgatgagcagcctctgatattcaagaacgacccctaccatccagaccatttcaactgcgccaactgcgggaaggagctgactgccgatgcacgggagctgaaaggggagctatactgcctcccatgccatgataaaatgggggtccccatctgtggtgcttgccgacggcccatcgaagggcgcgtggtgaacgctatgggcaagcagtggcatgtggagcattttgtttgtgccaagtgtgagaaaccctttcttggacatcgccattatgagaggaaaggcctggcatattgtgaaactcactataaccagctatttggtgatgtttgcttccactgcaatcgtgttatagaaggtgatgtggtctctgctcttaataaggcctggtgcgtgaactgctttgcctgttctacctgcaacactaaattaacactcaagaataagtttgtggagtttgacatgaagccagtctgtaagaagtgctatgagaaatttccattggagctgaagaaaagacttaagaaactagctgagaccttaggaaggaaataagttcctttattttttcttttctatgcaagataagagattaccaacattacttgtcttgatctacccatatttaaagctatatctcaaagcagttgagagaagaggacctatatgaatggttttatgtcatttttttaattaaaaaagaaaaattcatataatcgtgtttaaaacacaaatgaagtcagtatttgcctttgttaacccttatccatttgttgacatgtagactgtttacaaaaaaaaaacacatggttaaatgttaaattttaattaaggcccccaaaaattaaatataactttttaaaatgaaaggagtcaccttttacatgactcaggtgaaaaaacagtataaacattaatttactttgtgttcaaaagaaaattccaactgctgttggggaaggacacagaaaagaaaaataaccacccaagaaaaacaaaaaaaaa

SEQ ID NO: 324079 - DNA, 1798 bp, Homo sapiens
tataaaacaacttagcaggatatgagttatgacatttaggggtgttgtcctattgcttcagaacagtggggttatcgtgtaacacaccatgtcacatgatttgactaaatacaggaaaaaaaaaccctgaacttggtttcattggctcaaatatagttcaagacaacagagacaaagctaagatgaggaagttctgtacagtttaggaaatagaggctttcaaagataattcgcagtgatgtgaaactggcctcccaagccctgataacaacatggccaacgccctggccagcgccacttgcgagcgctgcaagggcggctttgcgcccgctgagaagatcgtgaacagtaatggggagctgtaccatgagcagtgtttcgtgtgcgctcagtgcttccagcagttcccagaaggactcttctatgagtttgaaggaagaaagtactgtgaacatgactttcagatgctctttgccccttgctgtcatcagtgtggtgaattcatcattggccgagttatcaaagccatgaataacagctggcatccggagtgcttccgctgtgacctctgccaggaagttctggcagatatcgggtttgtcaagaatgctgggagacacctgtgtcgcccctgtcataatcgtgagaaagccagaggccttgggaaatacatctgccagaaatgccatgctatcatcgatgagcagcctctgatattcaagaacgacccctaccatccagaccatttcaactgcgccaactgcgggaaggagctgactgccgatgcacgggagctgaaaggggagctatactgcctcccatgccatgataaaatgggggtccccatctgtggtgcttgccgacggcccatcgaagggcgcgtggtgaacgctatgggcaagcagtggcatgtggagcattttgtttgtgccaagtgtgagaaaccctttcttggacatcgccattatgagaggaaaggcctggcatattgtgaaactcactataaccagctatttggtgatgtttgcttccactgcaatcgtgttatagaaggtgatgtggtctctgctcttaataaggcctggtgcgtgaactgctttgcctgttctacctgcaacactaaattaacactcaagtaagtgtacggttttgtccagtgtgaatcctaagactgaaaactttggggggacactgaaaaaaaatcctagaatttagaaaaagagaattatttgatttcttatttcctctttctgttcaggccttctgaaagtaaaggttcttcctttaactgttccctgttctttcttctattccttctttgtcctactcaaagggataagtttgttgaaattgacctaaagccagtctgcaaacactgttatgagaaaatgccagaagaatttaagaggcgacttgccaaacgggagagagaagcaaaggataaggacaagcagaaaaagaaaaagccagtctgtttgtaaacttttctatccctgtgtcatcattttcactactttctcctttggttagtcctttggaatatgtttttgttctgtttctgtcttttgctttcttccccccctgcaacttttgggcgtgtatttgtagtcatcagaaattgaaaatacaagtatttgtcctatgtagaactggtccttttgcataactggctaaaaattacaaaaaattaaatgaatacactccatacttaatacagttttgtggccatgtatttcacttactctgtagactcactcaactcattttttaaacaccatatagttatacatttctttac

SEQ ID NO: 324080 - DNA, 941 bp, Homo sapiens
  misc_feature (937)..(940): n is a, c, g, or t
cctcgggcaagggacgctgctttcccctggcagccacactgctgagcataaatgctttaaagtgtcagcaattgatgtgtggagagaagtatgactgcattacagcttaaagagctttcacattcaggtctctacaggagaagacgagatcgccccgatagtttgagagtaaatgggttaccagaggaagagctacaacatggccaacgccctggccagcgccacttgcgagcgctgcaagggcggctttgcgcccgctgagaagatcgtgaacagtaatggggagctgtaccatgagcagtgtttcgtgtgcgctcagtgcttccagcagttcccagaaggactcttctatgaggaacgaacatgatggttaagctaccttcattaagcagcatgaccgcttcctgagctcctgctgccgcatttaggccctgtcagctgtgaggccactggtgctgagtcagagggaaaagctcagaacagccttgagcagtgaagaataaagtgtgactcatctcgtcctgcccacccctcacactggactataaataccctccctgggtctgtgtgctgttattccaaaagatgcgatgaatacccagaactaggctattcatgggctgttgcccagttcaagctctattgggtcctgaggaagattactattttggctacattgtttatcattaaaaccagcccagggatgtgtaaacctgcatctggagaataagacatttctttttggttaaatgatattagagaaaaaaaaactatccaaggctgctaacaaataatcttcactttcaattatatccagcaataagttgttctccagaaaagaaagcttggaaacttacccagtttgccttccatttgggacatgactgatgtgcttcagtctttgtataataaatgcatcttcgccactctaaaaaannnna

SEQ ID NO: 324081 - DNA, 1014 bp, Homo sapiens
  misc_feature (1010)..(1013): n is a, c, g, or t
tataaaacaacttagcaggatatgagttatgacatttaggggtgttgtcctattgcttcagaacagtggggttatcgtgtaacacaccatgtcacatgatttgactaaatacaggaaaaaaaaaccctgaacttggtttcattggctcaaatatagttcaagacaacagagacaaagctaagatgaggaagttctgtacagtttaggaaatagaggctttcaaagataattcgcagtgatgtgaaactggcctcccaagccctgataacaacatggccaacgccctggccagcgccacttgcgagcgctgcaagggcggctttgcgcccgctgagaagatcgtgaacagtaatggggagctgtaccatgagcagtgtttcgtgtgcgctcagtgcttccagcagttcccagaaggactcttctatgaggaacgaacatgatggttaagctaccttcattaagcagcatgaccgcttcctgagctcctgctgccgcatttaggccctgtcagctgtgaggccactggtgctgagtcagagggaaaagctcagaacagccttgagcagtgaagaataaagtgtgactcatctcgtcctgcccacccctcacactggactataaataccctccctgggtctgtgtgctgttattccaaaagatgcgatgaatacccagaactaggctattcatgggctgttgcccagttcaagctctattgggtcctgaggaagattactattttggctacattgtttatcattaaaaccagcccagggatgtgtaaacctgcatctggagaataagacatttctttttggttaaatgatattagagaaaaaaaaactatccaaggctgctaacaaataatcttcactttcaattatatccagcaataagttgttctccagaaaagaaagcttggaaacttacccagtttgccttccatttgggacatgactgatgtgcttcagtctttgtataataaatgcatcttcgccactctaaaaaannnna

SEQ ID NO: 324082 - DNA, 449 bp, Homo sapiens
tacagtttaggaaatagaggctttcaaagataattcgcagtgatgtgaaactggcctcccaagccctgataagtaagttaaataagagtaggagccaggagggaggttctttactcttgaattaagagaaggggagctggaggtggctcaggtagagtgcgtaggtttgcagaactgggcctgtgtgtgtaaagtgactaaggcaaaggagtggaagtttgagagaagtttaagagaagaaatggacatgattgcctaaatcagccaaacacagggtattgttgtatttctggatttgttttccttatgacctacctttctcagttatttaagaagcaaatctaaaggatatttgttgaaactctctatgcagaaagggtcttgggtgagttgtagtaaccttcagccatgctgattaaaattttctccctgctgcagaggttatgatt

SEQ ID NO: 324083 - DNA, 1191 bp, Homo sapiens
  misc_feature (1187)..(1190): n is a, c, g, or t
acaaagactgtgtcactactttgtggaatgttattttagaacttccagaatgcctcagtaaatcctgactgccatgtaactgtgtactgtgctgctgagctcttaacatgaagcagcagcagtgaccctggcgggccaggctgacgtgcgtgggaacagtgggagtgaccctggctgggaagcagggaggcctggatattgtttctcctggctctgtgtcctgccattctcatccctgtgctcagagctctcaagcacccacgatggccttctcaggccgagcgcgcccctgcattatcccagagaacgaagaaatcccccgagcagcccttaacactgtccacgaggccaatgggaccgaggacgagagggctgtttccaaactgcagcgcaggcacagtgacgtgaaagtctacaaggagttctgtgacttttatgcgaaattcaacatggccaacgccctggccagcgccacttgcgagcgctgcaagggcggctttgcgcccgctgagaagatcgtgaacagtaatggggagctgtaccatgagcagtgtttcgtgtgcgctcagtgcttccagcagttcccagaaggactcttctatgaggaacgaacatgatggttaagctaccttcattaagcagcatgaccgcttcctgagctcctgctgccgcatttaggccctgtcagctgtgaggccactggtgctgagtcagagggaaaagctcagaacagccttgagcagtgaagaataaagtgtgactcatctcgtcctgcccacccctcacactggactataaataccctccctgggtctgtgtgctgttattccaaaagatgcgatgaatacccagaactaggctattcatgggctgttgcccagttcaagctctattgggtcctgaggaagattactattttggctacattgtttatcattaaaaccagcccagggatgtgtaaacctgcatctggagaataagacatttctttttggttaaatgatattagagaaaaaaaaactatccaaggctgctaacaaataatcttcactttcaattatatccagcaataagttgttctccagaaaagaaagcttggaaacttacccagtttgccttccatttgggacatgactgatgtgcttcagtctttgtataataaatgcatcttcgccactctaaaaaannnna

SEQ ID NO: 324084 - DNA, 885 bp, Homo sapiens
atctcctttgcagttcagtctgttgcggtatgtttttatatgaagaaaatctgatcttacacagatgtgtagttggaaaatttgaaggaagaaagtactgtgaacatgactttcagatgctctttgccccttgctgtcatcagtgtggtgaattcatcattggccgagttatcaaagccatgaataacagctggcatccggagtgcttccgctgtgacctctgccaggaagttctggcagatatcgggtttgtcaagaatgctgggagacacctgtgtcgcccctgtcataatcgtgagaaagccagaggccttgggaaatacatctgccagaaatgccatgctatcatcgatgagcagcctctgatattcaagaacgacccctaccatccagaccatttcaactgcgccaactgcgggaaggagctgactgccgatgcacgggagctgaaaggggagctatactgcctcccatgccatgataaaatgggggtccccatctgtggtgcttgccgacggcccatcgaagggcgcgtggtgaacgctatgggcaagcagtggcatgtggagcattttgtttgtgccaagtgtgagaaaccctttcttggacatcgccattatgagaggaaaggcctggcatattgtgaaactcactataaccagctattggtgatgttgtccctgcatcgtgtttgaggtgaggggccgactaaaggcaggggggaaaggtgcggtcaccgcactaattaacagaatacttggggtgataagcacgtaagctgagctcgggggcaaaaaacgacggaggcaaacttttcagaaacaacggcgtcatccgcaagctttttttcacttttctccttcgtctatatcttttcgccgagca

SEQ ID NO: 324085 - DNA, 1877 bp, Homo sapiens
acaaagactgtgtcactactttgtggaatgttattttagaacttccagaatgcctcagtaaatcctgactgccatgtaactgtgtactgtgctgctgagctcttaacatgaagcagcagcagtgaccctggcgggccaggctgacgtgcgtgggaacagtgggagtgaccctggctgggaagcagggaggcctggatattgtttctcctggctctgtgtcctgccattctcatccctgtgctcagagctctcaagcacccacgatggccttctcaggccgagcgcgcccctgcattatcccagagaacgaagaaatcccccgagcagcccttaacactgtccacgaggccaatgggaccgaggacgagagggctgtttccaaactgcagcgcaggcacagtgacgtgaaagtctacaaggagttctgtgacttttatgcgaaattcaacatggccaacgccctggccagcgccacttgcgagcgctgcaagggcggctttgcgcccgctgagaagatcgtgaacagtaatggggagctgtaccatgagcagtgtttcgtgtgcgctcagtgcttccagcagttcccagaaggactcttctatgagtttgaaggaagaaagtactgtgaacatgactttcagatgctctttgccccttgctgtcatcagtgtggtgaattcatcattggccgagttatcaaagccatgaataacagctggcatccggagtgcttccgctgtgacctctgccaggaagttctggcagatatcgggtttgtcaagaatgctgggagacacctgtgtcgcccctgtcataatcgtgagaaagccagaggccttgggaaatacatctgccagaaatgccatgctatcatcgatgagcagcctctgatattcaagaacgacccctaccatccagaccatttcaactgcgccaactgcgggaaggagctgactgccgatgcacgggagctgaaaggggagctatactgcctcccatgccatgataaaatgggggtccccatctgtggtgcttgccgacggcccatcgaagggcgcgtggtgaacgctatgggcaagcagtggcatgtggagcattttgtttgtgccaagtgtgagaaaccctttcttggacatcgccattatgagaggaaaggcctggcatattgtgaaactcactataaccagctatttggtgatgtttgcttccactgcaatcgtgttatagaaggtgatgtggtctctgctcttaataaggcctggtgcgtgaactgctttgcctgttctacctgcaacactaaattaacactcaagaataagtttgtggagtttgacatgaagccagtctgtaagaagtgctatgagaaatttccattggagctgaagaaaagacttaagaaactagctgagaccttaggaaggaaataagttcctttattttttcttttctatgcaagataagagattaccaacattacttgtcttgatctacccatatttaaagctatatctcaaagcagttgagagaagaggacctatatgaatggttttatgtcatttttttaattaaaaaagaaaaattcatataatcgtgtttaaaacacaaatgaagtcagtatttgcctttgttaacccttatccatttgttgacatgtagactgtttacaaaaaaaaaacacatggttaaatgttaaattttaattaaggcccccaaaaattaaatataactttttaaaatgaaaggagtcaccttttacatgactcaggtgaaaaaacagtataaacattaatttactttgtgttcaaaagaaaattccaactgctgttggggaaggacacagaaaagaaaaataaccacccaagaaaaacaaaaaaaaa

SEQ ID NO: 324086 - DNA, 1627 bp, Homo sapiens
cctcgggcaagggacgctgctttcccctggcagccacactgctgagcataaatgctttaaagtgtcagcaattgatgtgtggagagaagtatgactgcattacagcttaaagagctttcacattcaggtctctacaggagaagacgagatcgccccgatagtttgagagtaaatgggttaccagaggaagagctacaacatggccaacgccctggccagcgccacttgcgagcgctgcaagggcggctttgcgcccgctgagaagatcgtgaacagtaatggggagctgtaccatgagcagtgtttcgtgtgcgctcagtgcttccagcagttcccagaaggactcttctatgagtttgaaggaagaaagtactgtgaacatgactttcagatgctctttgccccttgctgtcatcagtgtggtgaattcatcattggccgagttatcaaagccatgaataacagctggcatccggagtgcttccgctgtgacctctgccaggaagttctggcagatatcgggtttgtcaagaatgctgggagacacctgtgtcgcccctgtcataatcgtgagaaagccagaggccttgggaaatacatctgccagaaatgccatgctatcatcgatgagcagcctctgatattcaagaacgacccctaccatccagaccatttcaactgcgccaactgcgggaaggagctgactgccgatgcacgggagctgaaaggggagctatactgcctcccatgccatgataaaatgggggtccccatctgtggtgcttgccgacggcccatcgaagggcgcgtggtgaacgctatgggcaagcagtggcatgtggagcattttgtttgtgccaagtgtgagaaaccctttcttggacatcgccattatgagaggaaaggcctggcatattgtgaaactcactataaccagctatttggtgatgtttgcttccactgcaatcgtgttatagaaggtgatgtggtctctgctcttaataaggcctggtgcgtgaactgctttgcctgttctacctgcaacactaaattaacactcaagaataagtttgtggagtttgacatgaagccagtctgtaagaagtgctatgagaaatttccattggagctgaagaaaagacttaagaaactagctgagaccttaggaaggaaataagttcctttattttttcttttctatgcaagataagagattaccaacattacttgtcttgatctacccatatttaaagctatatctcaaagcagttgagagaagaggacctatatgaatggttttatgtcatttttttaattaaaaaagaaaaattcatataatcgtgtttaaaacacaaatgaagtcagtatttgcctttgttaacccttatccatttgttgacatgtagactgtttacaaaaaaaaaacacatggttaaatgttaaattttaattaaggcccccaaaaattaaatataactttttaaaatgaaaggagtcaccttttacatgactcaggtgaaaaaacagtataaacattaatttactttgtgttcaaaagaaaattccaactgctgttggggaaggacacagaaaagaaaaataaccacccaagaaaaacaaaaaaaaa

SEQ ID NO: 324087 - DNA, 795 bp, Homo sapiens
  misc_feature (791)..(794): n is a, c, g, or t
aaggcaaagggaaagttgtcttccagaggtgtggaggggagtgaagcaacaacatggccaacgccctggccagcgccacttgcgagcgctgcaagggcggctttgcgcccgctgagaagatcgtgaacagtaatggggagctgtaccatgagcagtgtttcgtgtgcgctcagtgcttccagcagttcccagaaggactcttctatgaggaacgaacatgatggttaagctaccttcattaagcagcatgaccgcttcctgagctcctgctgccgcatttaggccctgtcagctgtgaggccactggtgctgagtcagagggaaaagctcagaacagccttgagcagtgaagaataaagtgtgactcatctcgtcctgcccacccctcacactggactataaataccctccctgggtctgtgtgctgttattccaaaagatgcgatgaatacccagaactaggctattcatgggctgttgcccagttcaagctctattgggtcctgaggaagattactattttggctacattgtttatcattaaaaccagcccagggatgtgtaaacctgcatctggagaataagacatttctttttggttaaatgatattagagaaaaaaaaactatccaaggctgctaacaaataatcttcactttcaattatatccagcaataagttgttctccagaaaagaaagcttggaaacttacccagtttgccttccatttgggacatgactgatgtgcttcagtctttgtataataaatgcatcttcgccactctaaaaaannnna

SEQ ID NO: 324088 - DNA, 1622 bp, Homo sapiens
cagtatccctcctgacaaaactaacaaaaatcctgttagccaaataatcagccacattcatatttaccgtcaaagtttttatcctcattttacagcagtggagagcgattgccccgggtcccacgttaggaagagagagaactgggatttgcacccaggcaatctggggacagagctgtgatcacaactccatgagtcagggccgagccagccccttcaccaccagccggccgcgccccgggaagggaagtttgtggcggaggaggttcgtacgggaggagggggaggcgcccacgcatctggggctgactcgctctttcgcaaaacgtctgggaggagtccctggggccacaaaactgcctccttcctgaggccagaaggagagaagacgtgcagggaccccgcgcacaggagctgccctcgcgacatgggtcacccgccgctgctgccgctgctgctgctgctccacacctgcgtcccagcctcttggggcctgcggtgcatgcagtgtaagaccaacggggattgccgtgtggaagagtgcgccctgggacaggacctctgcaggaccacgatcgtgcgcttgtgggaagaaggagaagagctggagctggtggagaaaagctgtacccactcagagaagaccaacaggaccctgagctatcggactggcttgaagatcaccagccttaccgaggttgtgtgtgggttagacttgtgcaaccagggcaactctggccgggctgtcacctattcccgaagccgttacctcgaatgcatttcctgtggctcatcagacatgagctgtgagaggggccggcaccagagcctgcagtgccgcagccctgaagaacagtgcctggatgtggtgacccactggatccaggaaggtgaagaagtcctggagcttgaaaatctgccgcagaatggccgccagtgttacagctgcaaggggaacagcacccatggatgctcctctgaagagactttcctcattgactgccgaggccccatgaatcaatgtctggtagccaccggcactcacgaaccgaaaaaccaaagctatatggtaagaggctgtgcaaccgcctcaatgtgccaacatgcccacctgggtgacgccttcagcatgaaccacattgatgtctcctgctgtactaaaagtggctgtaaccacccagacctggatgtccagtaccgcagtggggctgctcctcagcctggccctgcccatctcagcctcaccatcaccctgctaatgactgccagactgtggggaggcactctcctctggacctaaacctgaaatccccctctctgccctggctggatccgggggacccctttgcccttccctcggctcccagccctacagacttgctgtgtgacctcaggccagtgtgccgacctctctgggcctcagttttcccagctatgaaaacagctatctcacaaagttgtgtgaagcagaagagaaaagctggaggaaggccgtgggccaatgggagagctcttgttattattaatattgttgccgctgttgtgttgttgttattaattaatattcatattatttattttatacttacataaagattttgtaccagtggaaaaaaaaaata

SEQ ID NO: 324089 - DNA, 633 bp, Homo sapiens
aatgacatatcaccacctgtcactgtagtggcttaaagaagtgaggtctgtacttctgcctcttgaatatgagtgactctgtgactgctttgaccagtagaatgtggtggaagttttgctgtgctatgttctggaaccaagttttaagaaactttcatttttcactttctgaatcttagaacgctcactctggggaagctggttgccatgtaaaagtactactgccctgagaccaccatgctgtgaggaagcccaagctactcatgtataaatgccatgtggagatagagccccagatgtttcagccatctcagcccaggcaccagacaagtgggtgaagaagccaccttggacatgtagccccagcagatgtgatatagagaagaaacaggaaacttggctatattagtttcctagggctgcctgtgataaattattacaaactttataaactaacacattgtgtgcctatatcaaaacatcatggaaggacaggcacagtggctcatgcctgtagtcctagcactttgggagggtgagaaaggaagatctcttgagctcaggagttcaagatcagcctgggcaacacagtgagacctcatctccactaaaaataaaaaaaaattggctgga

SEQ ID NO: 324090 - DNA, 1778 bp, Homo sapiens
tagagtatctaacaagaggaacaaggagggctgatggggccgggcctagaatttgggaataaattagtgggccgggagaggctctggagccgggtagaaccagggggagtgagtggagggatagttccattagggcactgggagtgacggtataacataaagatcgacgcgggtggggcaaggctagaacgtccccagcagaactggagaggcgtaatcgaccgagggccggtgcggtgagaaagacctaataggagcaggaatagaacgtactgatagagagggcggggatacgactgtcaggatatacgcctcacgaggacagaatgaaaggaaaaacgggccaaggcaggactttgggaaaggacttgtgggcagggatagaacgttcagttagtggggtggaggtagaacgtggacaacggacagactggaagtaccgccggccggaacccagcagaacatggacacgaatctgaatggacggggcctggagacttggtcctcttggggcctgcggtgcatgcagtgtaagaccaacggggattgccgtgtggaagagtgcgccctgggacaggacctctgcaggaccacgatcgtgcgcttgtgggaagaaggagaagagctggagctggtggagaaaagctgtacccactcagagaagaccaacaggaccctgagctatcggactggcttgaagatcaccagccttaccgaggttgtgtgtgggttagacttgtgcaaccagggcaactctggccgggctgtcacctattcccgaagccgttacctcgaatgcatttcctgtggctcatcagacatgagctgtgagaggggccggcaccagagcctgcagtgccgcagccctgaagaacagtgcctggatgtggtgacccactggatccaggaaggtgaagaagggcgtccaaaggatgaccgccacctccgtggctgtggctaccttcccggctgcccgggctccaatggtttccacaacaacgacaccttccacttcctgaaatgctgcaacaccaccaaatgcaacgagggcccaatcctggagcttgaaaatctgccgcagaatggccgccagtgttacagctgcaaggggaacagcacccatggatgctcctctgaagagactttcctcattgactgccgaggccccatgaatcaatgtctggtagccaccggcactcacgaaccgaaaaaccaaagctatatggtaagaggctgtgcaaccgcctcaatgtgccaacatgcccacctgggtgacgccttcagcatgaaccacattgatgtctcctgctgtactaaaagtggctgtaaccacccagacctggatgtccagtaccgcagtggggctgctcctcagcctggccctgcccatctcagcctcaccatcaccctgctaatgactgccagactgtggggaggcactctcctctggacctaaacctgaaatccccctctctgccctggctggatccgggggacccctttgcccttccctcggctcccagccctacagacttgctgtgtgacctcaggccagtgtgccgacctctctgggcctcagttttcccagctatgaaaacagctatctcacaaagttgtgtgaagcagaagagaaaagctggaggaaggccgtgggccaatgggagagctcttgttattattaatattgttgccgctgttgtgttgttgttattaattaatattcatattatttattttatacttacataaagattttgtaccagtggaaaaaaaaaata

SEQ ID NO: 324091 - DNA, 2046 bp, Homo sapiens
cagcactttggaaggccaaggcaggaggactgcttgatcccaggagttggaggctgcagtgatcacgccactgcactccagcctaggcggcagagcaaaaccctgtctcaaccaaagccgaacaagagctattaagaagcaggccttagtggtggattagatgtgggaggggacctgcaattctggtcatgatggagtcacttgtatcagaccaacccttctgccaatgacagttgcaaatgctggacaaataataaacaattattggaagtcactggagagcagcaaatgaaaggagaaacttggctgggcaaagtggttcatgcctgtaatcccagcactttgggaggccaagacaggtgaattgctcgagctcatgagttcaagaccagcctgggcaacatggcgaaaccccgtctctactaaaaatacaaaagttagccaggcgtggtggcacatgcctgtggtcccagctacttgggtggctgaggcacaagaattgcttgaacccgggaggtagaggttacagtgagccaagatcacacgactgcactccagcctgggcgacagcgcgagactccatttcaaaaaaaaaaaaagaaaaaagaaagaaaggagaaacttgaggcgctacaatctctgaaataacagaagtgtagaatttgggttccacagacaacctggctttttcccggagcgcacttgccaatctgctgctgtggaagggaaatagagcccagacggaaagagagtcgctagactgagaagacggaggttggagtttggggctgccagaatgtctggaagatgagagttaaaatcctggaatggatgggaccacagaaaagggagttcccaacctgcaaacaaatctccctcaagtcattggcaagctctacatgcacagggtgagagtccaagaaacttggaagagaaaaatagcaactgggaagctacaaaagcgaacaaggcttccagcagacatgtgatgctggggacacaggttgccaagctgaagaggccttggccgggctgtcacctattcccgaagccgttacctcgaatgcatttcctgtggctcatcagacatgagctgtgagaggggccggcaccagagcctgcagtgccgcagccctgaagaacagtgcctggatgtggtgacccactggatccaggaaggtgaagaagggcgtccaaaggatgaccgccacctccgtggctgtggctaccttcccggctgcccgggctccaatggtttccacaacaacgacaccttccacttcctgaaatgctgcaacaccaccaaatgcaacgagggcccaatcctggagcttgaaaatctgccgcagaatggccgccagtgttacagctgcaaggggaacagcacccatggatgctcctctgaagagactttcctcattgactgccgaggccccatgaatcaatgtctggtagccaccggcactcacgaaccgaaaaaccaaagctatatggtaagaggctgtgcaaccgcctcaatgtgccaacatgcccacctgggtgacgccttcagcatgaaccacattgatgtctcctgctgtactaaaagtggctgtaaccacccagacctggatgtccagtaccgcagtggggctgctcctcagcctggccctgcccatctcagcctcaccatcaccctgctaatgactgccagactgtggggaggcactctcctctggacctaaacctgaaatccccctctctgccctggctggatccgggggacccctttgcccttccctcggctcccagccctacagacttgctgtgtgacctcaggccagtgtgccgacctctctgggcctcagttttcccagctatgaaaacagctatctcacaaagttgtgtgaagcagaagagaaaagctggaggaaggccgtgggccaatgggagagctcttgttattattaatattgttgccgctgttgtgttgttgttattaattaatattcatattatttattttatacttacataaagattttgtaccagtggaaaaaaaaaata

SEQ ID NO: 324092 - DNA, 1698 bp, Homo sapiens
cagtatccctcctgacaaaactaacaaaaatcctgttagccaaataatcagccacattcatatttaccgtcaaagtttttatcctcattttacagcagtggagagcgattgccccgggtcccacgttaggaagagagagaactgggatttgcacccaggcaatctggggacagagctgtgatcacaactccatgagtcagggccgagccagccccttcaccaccagccggccgcgccccgggaagggaagtttgtggcggaggaggttcgtacgggaggagggggaggcgcccacgcatctggggctgactcgctctttcgcaaaacgtctgggaggagtccctggggccacaaaactgcctccttcctgaggccagaaggagagaagacgtgcagggaccccgcgcacaggagctgccctcgcgacatgggtcacccgccgctgctgccgctgctgctgctgctccacacctgcgtcccagcctcttggggcctgcggtgcatgcagtgtaagaccaacggggattgccgtgtggaagagtgcgccctgggacaggacctctgcaggaccacgatcgtgcgcttgtgggaagaaggagaagagctggagctggtggagaaaagctgtacccactcagagaagaccaacaggaccctgagctatcggactggcttgaagatcaccagccttaccgaggttgtgtgtgggttagacttgtgcaaccagggcaactctggccgggctgtcacctattcccgaagccgttacctcgaatgcatttcctgtggctcatcagacatgagctgtgagaggggccggcaccagagcctgcagtgccgcagccctgaagaacagtgcctggatgtggtgacccactggatccaggaaggtgaagaagggcgtccaaaggatgaccgccacctccgtggctgtggctaccttcccggctgcccgggctccaatggtttccacaacaacgacaccttccacttcctgaaatgctgcaacaccaccaaatgcaacgagggcccaaagcacccatggatgctcctctgaagagactttcctcattgactgccgaggccccatgaatcaatgtctggtagccaccggcactcacgaaccgaaaaaccaaagctatatggtaagaggctgtgcaaccgcctcaatgtgccaacatgcccacctgggtgacgccttcagcatgaaccacattgatgtctcctgctgtactaaaagtggctgtaaccacccagacctggatgtccagtaccgcagtggggctgctcctcagcctggccctgcccatctcagcctcaccatcaccctgctaatgactgccagactgtggggaggcactctcctctggacctaaacctgaaatccccctctctgccctggctggatccgggggacccctttgcccttccctcggctcccagccctacagacttgctgtgtgacctcaggccagtgtgccgacctctctgggcctcagttttcccagctatgaaaacagctatctcacaaagttgtgtgaagcagaagagaaaagctggaggaaggccgtgggccaatgggagagctcttgttattattaatattgttgccgctgttgtgttgttgttattaattaatattcatattatttattttatacttacataaagattttgtaccagtggaaaaaaaaaata

SEQ ID NO: 324093 - DNA, 1610 bp, Homo sapiens
cagtatccctcctgacaaaactaacaaaaatcctgttagccaaataatcagccacattcatatttaccgtcaaagtttttatcctcattttacagcagtggagagcgattgccccgggtcccacgttaggaagagagagaactgggatttgcacccaggcaatctggggacagagctgtgatcacaactccatgagtcagggccgagccagccccttcaccaccagccggccgcgccccgggaagggaagtttgtggcggaggaggttcgtacgggaggagggggaggcgcccacgcatctggggctgactcgctctttcgcaaaacgtctgggaggagtccctggggccacaaaactgcctccttcctgaggccagaaggagagaagacgtgcagggaccccgcgcacaggagctgccctcgcgacatgggtcacccgccgctgctgccgctgctgctgctgctccacacctgcgtcccagcctcttggggcctgcggtgcatgcagtgtaagaccaacggggattgccgtgtggaagagtgcgccctgggacaggacctctgcaggaccacgatcgtgcgcttgtgggaagaaggagaagagctggagctggtggagaaaagctgtacccactcagagaagaccaacaggaccctgagctatcggactggcttgaagatcaccagccttaccgaggttgtgtgtgggttagacttgtgcaaccagggcaactctggccgggctgtcacctattcccgaagccgttacctcgaatgcatttcctgtggctcatcagacatgagctgtgagaggggccggcaccagagcctgcagtgccgcagccctgaagaacagtgcctggatgtggtgacccactggatccaggaaggtgaagaagggcgtccaaaggatgaccgccacctccgtggctgtggctaccttcccggctgcccgggctccaatggtttccacaacaacgacaccttccacttcctgaaatgctgcaacaccaccaaatgcaacgagggcccaaaaccgaaaaaccaaagctatatggtaagaggctgtgcaaccgcctcaatgtgccaacatgcccacctgggtgacgccttcagcatgaaccacattgatgtctcctgctgtactaaaagtggctgtaaccacccagacctggatgtccagtaccgcagtggggctgctcctcagcctggccctgcccatctcagcctcaccatcaccctgctaatgactgccagactgtggggaggcactctcctctggacctaaacctgaaatccccctctctgccctggctggatccgggggacccctttgcccttccctcggctcccagccctacagacttgctgtgtgacctcaggccagtgtgccgacctctctgggcctcagttttcccagctatgaaaacagctatctcacaaagttgtgtgaagcagaagagaaaagctggaggaaggccgtgggccaatgggagagctcttgttattattaatattgttgccgctgttgtgttgttgttattaattaatattcatattatttattttatacttacataaagattttgtaccagtggaaaaaaaaaata

SEQ ID NO: 324094 - DNA, 1916 bp, Homo sapiens
cagtatccctcctgacaaaactaacaaaaatcctgttagccaaataatcagccacattcatatttaccgtcaaagtttttatcctcattttacagcagtggagagcgattgccccgggtcccacgttaggaagagagagaactgggatttgcacccaggcaatctggggacagagctgtgatcacaactccatgagtcagggccgagccagccccttcaccaccagccggccgcgccccgggaagggaagtttgtggcggaggaggttcgtacgggaggagggggaggcgcccacgcatctggggctgactcgctctttcgcaaaacgtctgggaggagtccctggggccacaaaactgcctccttcctgaggccagaaggagagaagacgtgcagggaccccgcgcacaggagctgccctcgcgacatgggtcacccgccgctgctgccgctgctgctgctgctccacacctgcgtcccagcctcttggggcctgcggtgcatgcagtgtaagaccaacggggattgccgtgtggaagagtgcgccctgggacaggacctctgcaggaccacgatcgtgcgcttgtgggaagaaggagaagagctggagctggtggagaaaagctgtacccactcagagaagaccaacaggaccctgagctatcggactggcttgaagatcaccagccttaccgaggttgtgtgtgggttagacttgtgcaaccagggcaactctggccgggctgtcacctattcccgaagccgttacctcgaatgcatttcctgtggctcatcagacatgagctgtgagaggggccggcaccagagcctgcagtgccgcagccctgaagaacagtgcctggatgtggtgacccactggatccaggaaggtgaagaagggcgtccaaaggatgaccgccacctccgtggctgtggctaccttcccggctgcccgggctccaatggtttccacaacaacgacaccttccacttcctgaaatgctgcaacaccaccaaatgcaacgagggcccaatcctggagcttgaaaatctgccgcagaatggccgccagtgttacagctgcaaggggaacagcacccatggatgctcctctgaagagactttcctcattgactgccgaggccccatgaatcaatgtctggtagccaccggcactcacgaacgctcactctggggaagctggttgccatgtaaaagtactactgccctgagaccaccatgctgtgaggaagcccaagctactcatgtataaatgccatgtggagatagagccccagatgtttcagccatctcagcccaggcaccagacaagtgggtgaagaagccaccttggacatgtagccccagcagatgtgatatagagaagaaacaggaaacttggctatattagtttcctagggctgcctgtgataaattattacaaactttataaacttaaaaaaaaaaaaaaaaaaaaataaaaaaaaaaaaaaaaaaaaaaaatctggggggggggccctgtcccctataccctctattggggggggggttagaatccaatggccgcctttataccgcggggtgacaggaaacaccctgtgtcatcccattgtattcgggttgaaacatatgcctttctccccgtctggggttatagcaaaaagccccttggcacgcgctgttccaatggatgcacactcggcgtggggagtgttaaaatgagggccaaaactgggtggcaaaaggccgtgtaaactggttgaaaaatcctggaaatttgtcaaccctttttgcgcaaaataggaatgttctttaaaccccaagggtatcccccaaaaaagggttgtttttggaacaaatttgaaaaaataggactttttttgagaccgggttcgaaaccgggagaggggtgagtg

SEQ ID NO: 324095 - DNA, 1877 bp, Homo sapiens
cagtatccctcctgacaaaactaacaaaaatcctgttagccaaataatcagccacattcatatttaccgtcaaagtttttatcctcattttacagcagtggagagcgattgccccgggtcccacgttaggaagagagagaactgggatttgcacccaggcaatctggggacagagctgtgatcacaactccatgagtcagggccgagccagccccttcaccaccagccggccgcgccccgggaagggaagtttgtggcggaggaggttcgtacgggaggagggggaggcgcccacgcatctggggctgactcgctctttcgcaaaacgtctgggaggagtccctggggccacaaaactgcctccttcctgaggccagaaggagagaagacgtgcagggaccccgcgcacaggagctgccctcgcgacatgggtcacccgccgctgctgccgctgctgctgctgctccacacctgcgtcccagcctcttggggcctgcggtgcatgcagtgtaagaccaacggggattgccgtgtggaagagtgcgccctgggacaggacctctgcaggaccacgatcgtgcgcttgtgggaagaaggagaagagctggagctggtggagaaaagctgtacccactcagagaagaccaacaggaccctgagctatcggactggcttgaagatcaccagccttaccgaggttgtgtgtgggttagacttgtgcaaccagggcaactctggccgggctgtcacctattcccgaagccgttacctcgaatgcatttcctgtggctcatcagacatgagctgtgagaggggccggcaccagagcctgcagtgccgcagccctgaagaacagtgcctggatgtggtgacccactggatccaggaaggtgaagaagggcgtccaaaggatgaccgccacctccgtggctgtggctaccttcccggctgcccgggctccaatggtttccacaacaacgacaccttccacttcctgaaatgctgcaacaccaccaaatgcaacgagggcccaatcctggagcttgaaaatctgccgcagaatggccgccagtgttacagctgcaaggggaacagcacccatggatgctcctctgaagagactttcctcattgactgccgaggccccatgaatcaatgtctggtagccaccggcactcacgaacgctcactctggggaagctggttgccatgtaaaagtactactgccctgagaccaccatgctgtgaggaagcccaagctactcatgtataaatgccatgtggagatagagccccagatgtttcagccatctcagcccaggcaccagacaagtgggtgaagaagccaccttggacatgtagccccagcagatgtgatatagagaagaaacaggaaacttggctatattagtttcctagggctgcctgtgataaattattacaaactttataaactaacacattgtgtgcctatatcaaaacatcatggaaggacaggcacagtggctcatgcctgtagtcctagcactttgggagggtgagaaaggaagatctcttgagctcaggagttcaagatcagcctgggcaacacagtgagacctcatctccactaaaaataaaaaaaaattggctggatgtggtggggcatgcctgtggtcctagttacatgggaggctgaggcaggaggatcccttgagcccgggaggtcaaggctgcagtgagccatgatcccaccactgtactccagcctgggcaacagagccagactctgtctccaaaaaaaaaacactaaaacccaaaaccatattacatatgtcctgtaaatatacaccactattatgtattcataatacttaaaaataaaaaattaaaaacac

SEQ ID NO: 324096 - DNA, 1563 bp, Homo sapiens
cagtatccctcctgacaaaactaacaaaaatcctgttagccaaataatcagccacattcatatttaccgtcaaagtttttatcctcattttacagcagtggagagcgattgccccgggtcccacgttaggaagagagagaactgggatttgcacccaggcaatctggggacagagctgtgatcacaactccatgagtcagggccgagccagccccttcaccaccagccggccgcgccccgggaagggaagtttgtggcggaggaggttcgtacgggaggagggggaggcgcccacgcatctggggctgactcgctctttcgcaaaacgtctgggaggagtccctggggccacaaaactgcctccttcctgaggccagaaggagagaagacgtgcagggaccccgcgcacaggagctgccctcgcgacatgggtcacccgccgctgctgccgctgctgctgctgctccacacctgcgtcccagcctcttggggcctgcggtgcatgcagtgtaagaccaacggggattgccgtgtggaagagtgcgccctgggacaggacctctgcaggaccacgatcgtgcgcttgtgggaagaaggagaagagctggagctggtggagaaaagctgtacccactcagagaagaccaacaggaccctgagctatcggactggcttgaagatcaccagccttaccgaggttgtgtgtgggttagacttgtgcaaccagggcaactctggccgggctgtcacctattcccgaagccgttacctcgaatgcatttcctgtggctcatcagacatgagctgtgagaggggccggcaccagagcctgcagtgccgcagccctgaagaacagtgcctggatgtggtgacccactggatccaggaaggtgaagaagggcgtccaaaggatgaccgccacctccgtggctgtggctaccttcccggctgcccgggctccaatggtttccacaacaacgacaccttccacttcctgaaatgctgcaacaccaccaaatgcaacgagggcccaatcctggagcttgaaaatctgccgcagaatggccgccagtgttacagctgcaaggggaacagcacccatggatgctcctctgaagagactttcctcattgactgccgaggccccatgaatcaatgtctggtagccaccggcactcacggatgtggacatttttgccatggaaaagtggaattccggctgggtgcggtggctgaagcttgtactctcagcactttgggaggctgaggccggaggatctcttgaggccaggagtttgagaccagcctgggcaacatagcaagacccccatctctacaaaaagaaaaatggaattctttggtggatttctcgtgggttgtggggatttgctgaagacatcttgggctttcatcctgtggtgtcctggaaaggtctctgtattccagtggttctcaaactttttggtctcaacttcttcatgcttttaaaaattatttttggccaggtgtggtggctcacgcctgtaattgcaacaccttgggagggtgaggaggagaaccact

SEQ ID NO: 324097 - DNA, 1577 bp, Homo sapiens
cagcactttggaaggccaaggcaggaggactgcttgatcccaggagttggaggctgcagtgatcacgccactgcactccagcctaggcggcagagcaaaaccctgtctcaaccaaagccgaacaagagctattaagaagcaggccttagtggtggattagatgtgggaggggacctgcaattctggtcatgatggagtcacttgtatcagaccaacccttctgccaatgacagttgcaaatgctggacaaataataaacaattattggaagtcactggagagcagcaaatgaaaggagaaacttggctgggcaaagtggttcatgcctgtaatcccagcactttgggaggccaagacaggtgaattgctcgagctcatgagttcaagaccagcctgggcaacatggcgaaaccccgtctctactaaaaatacaaaagttagccaggcgtggtggcacatgcctgtggtcccagctacttgggtggctgaggcacaagaattgcttgaacccgggaggtagaggttacagtgagccaagatcacacgactgcactccagcctgggcgacagcgcgagactccatttcaaaaaaaaaaaaagaaaaaagaaagaaaggagaaacttgaggcgctacaatctctgaaataacagaagtgtagaatttgggttccacagacaacctggctttttcccggagcgcacttgccaatctgctgctgtggaagggaaatagagcccagacggaaagagagtcgctagactgagaagacggaggttggagtttggggctgccagaatgtctggaagatgagagttaaaatcctggaatggatgggaccacagaaaagggagttcccaacctgcaaacaaatctccctcaagtcattggcaagctctacatgcacagggtgagagtccaagaaacttggaagagaaaaatagcaactgggaagctacaaaagcgaacaaggcttccagcagacatgtgatgctggggacacaggttgccaagctgaagaggccttggtaagcatctcaggctttccccctaagaccaccctaggggtaagggccaaagtgaaatagaccagccctaaacaagcctaggtccagtccttgacaggaatgaaaacctgactctctgtggaagaagaaaacatcgtttaggcccttgacagatttttatctagaatgtctggcgtctgatcaaaatttacaagatagctaggcatggtggcatgcgtctgtagtcccaactacttggaaggatttcttgagcctgagagttctgggctgtagtgtgctatatcaaccgggtgtctgcactaagtttggcatcaatatggtgatctcccaggagcaggggaccaccaggttgtctaaggaggggttgaagcagcccaggtcagaaatggagcaggtcaaaactcctgtgatgatcagtagcaggattatgcctatgaatagccactgcacaccagcctggacaacatagcaagaccccatctttaaaaaaaaaaaaaacaaaaataaacggtaacgaaataataatactctctaattgcgattatccttgt

SEQ ID NO: 324098 - DNA, 1139 bp, Homo sapiens
cagcactttggaaggccaaggcaggaggactgcttgatcccaggagttggaggctgcagtgatcacgccactgcactccagcctaggcggcagagcaaaaccctgtctcaaccaaagccgaacaagagctattaagaagcaggccttagtggtggattagatgtgggaggggacctgcaattctggtcatgatggagtcacttgtatcagaccaacccttctgccaatgacagttgcaaatgctggacaaataataaacaattattggaagtcactggagagcagcaaatgaaaggagaaacttggctgggcaaagtggttcatgcctgtaatcccagcactttgggaggccaagacaggtgaattgctcgagctcatgagttcaagaccagcctgggcaacatggcgaaaccccgtctctactaaaaatacaaaagttagccaggcgtggtggcacatgcctgtggtcccagctacttgggtggctgaggcacaagaattgcttgaacccgggaggtagaggttacagtgagccaagatcacacgactgcactccagcctgggcgacagcgcgagactccatttcaaaaaaaaaaaaagaaaaaagaaagaaaggagaaacttgaggcgctacaatctctgaaataacagaagtgtagaatttgggttccacagacaacctggctttttcccggagcgcacttgccaatctgctgctgtggaagggaaatagagcccagacggaaagagagtcgctagactgagaagacggaggttggagtttggggctgccagaatgtctggaagatgagagttaaaatcctggaatggatgggaccacagaaaagggagttcccaacctgcaaacaaatctccctcaagtcattggcaagctctacatgcacagggtgagagtccaagaaacttggaagagaaaaatagcaactgggaagctacaaaagcgaacaaggcttccagcagacatgtgatgctggggacacaggttgccaagctgaagaggccttggtaagcatctcaggctttccccctaagaccaccctaggggtaaggccagaaggtgatcactaggccagacgctaacacgtgttcgacagtgaaagtcgccaggttcatccagc

SEQ ID NO: 324099 - DNA, 1757 bp, Homo sapiens
cagtatccctcctgacaaaactaacaaaaatcctgttagccaaataatcagccacattcatatttaccgtcaaagtttttatcctcattttacagcagtggagagcgattgccccgggtcccacgttaggaagagagagaactgggatttgcacccaggcaatctggggacagagctgtgatcacaactccatgagtcagggccgagccagccccttcaccaccagccggccgcgccccgggaagggaagtttgtggcggaggaggttcgtacgggaggagggggaggcgcccacgcatctggggctgactcgctctttcgcaaaacgtctgggaggagtccctggggccacaaaactgcctccttcctgaggccagaaggagagaagacgtgcagggaccccgcgcacaggagctgccctcgcgacatgggtcacccgccgctgctgccgctgctgctgctgctccacacctgcgtcccagcctcttggggcctgcggtgcatgcagtgtaagaccaacggggattgccgtgtggaagagtgcgccctgggacaggacctctgcaggaccacgatcgtgcgcttgtgggaagaaggagaagagctggagctggtggagaaaagctgtacccactcagagaagaccaacaggaccctgagctatcggactggcttgaagatcaccagccttaccgaggttgtgtgtgggttagacttgtgcaaccagggcaactctggccgggctgtcacctattcccgaagccgttacctcgaatgcatttcctgtggctcatcagacatgagctgtgagaggggccggcaccagagcctgcagtgccgcagccctgaagaacagtgcctggatgtggtgacccactggatccaggaaggtgaagaagggcgtccaaaggatgaccgccacctccgtggctgtggctaccttcccggctgcccgggctccaatggtttccacaacaacgacaccttccacttcctgaaatgctgcaacaccaccaaatgcaacgagggcccaatcctggagcttgaaaatctgccgcagaatggccgccagtgttacagctgcaaggggaacagcacccatggatgctcctctgaagagactttcctcattgactgccgaggccccatgaatcaatgtctggtagccaccggcactcacgaaccgaaaaaccaaagctatatggtaagaggctgtgcaaccgcctcaatgtgccaacatgcccacctgggtgacgccttcagcatgaaccacattgatgtctcctgctgtactaaaagtggctgtaaccacccagacctggatgtccagtaccgcagtggggctgctcctcagcctggccctgcccatctcagcctcaccatcaccctgctaatgactgccagactgtggggaggcactctcctctggacctaaacctgaaatccccctctctgccctggctggatccgggggacccctttgcccttccctcggctcccagccctacagacttgctgtgtgacctcaggccagtgtgccgacctctctgggcctcagttttcccagctatgaaaacagctatctcacaaagttgtgtgaagcagaagagaaaagctggaggaaggccgtgggccaatgggagagctcttgttattattaatattgttgccgctgttgtgttgttgttattaattaatattcatattatttattttatacttacataaagattttgtaccagtggaaaaaaaaaata

SEQ ID NO: 324100 - DNA, 1511 bp, Homo sapiens
tagagtatctaacaagaggaacaaggagggctgatggggccgggcctagaatttgggaataaattagtgggccgggagaggctctggagccgggtagaaccagggggagtgagtggagggatagttccattagggcactgggagtgacggtataacataaagatcgacgcgggtggggcaaggctagaacgtccccagcagaactggagaggcgtaatcgaccgagggccggtgcgcctcttggggcctgcggtgcatgcagtgtaagaccaacggggattgccgtgtggaagagtgcgccctgggacaggacctctgcaggaccacgatcgtgcgcttgtgggaagaaggagaagagctggagctggtggagaaaagctgtacccactcagagaagaccaacaggaccctgagctatcggactggcttgaagatcaccagccttaccgaggttgtgtgtgggttagacttgtgcaaccagggcaactctggccgggctgtcacctattcccgaagccgttacctcgaatgcatttcctgtggctcatcagacatgagctgtgagaggggccggcaccagagcctgcagtgccgcagccctgaagaacagtgcctggatgtggtgacccactggatccaggaaggtgaagaagggcgtccaaaggatgaccgccacctccgtggctgtggctaccttcccggctgcccgggctccaatggtttccacaacaacgacaccttccacttcctgaaatgctgcaacaccaccaaatgcaacgagggcccaatcctggagcttgaaaatctgccgcagaatggccgccagtgttacagctgcaaggggaacagcacccatggatgctcctctgaagagactttcctcattgactgccgaggccccatgaatcaatgtctggtagccaccggcactcacgaaccgaaaaaccaaagctatatggtaagaggctgtgcaaccgcctcaatgtgccaacatgcccacctgggtgacgccttcagcatgaaccacattgatgtctcctgctgtactaaaagtggctgtaaccacccagacctggatgtccagtaccgcagtggggctgctcctcagcctggccctgcccatctcagcctcaccatcaccctgctaatgactgccagactgtggggaggcactctcctctggacctaaacctgaaatccccctctctgccctggctggatccgggggacccctttgcccttccctcggctcccagccctacagacttgctgtgtgacctcaggccagtgtgccgacctctctgggcctcagttttcccagctatgaaaacagctatctcacaaagttgtgtgaagcagaagagaaaagctggaggaaggccgtgggccaatgggagagctcttgttattattaatattgttgccgctgttgtgttgttgttattaattaatattcatattatttattttatacttacataaagattttgtaccagtggaaaaaaaaaata

SEQ ID NO: 324101 - DNA, 1970 bp, Homo sapiens
cagtatccctcctgacaaaactaacaaaaatcctgttagccaaataatcagccacattcatatttaccgtcaaagtttttatcctcattttacagcagtggagagcgattgccccgggtcccacgttaggaagagagagaactgggatttgcacccaggcaatctggggacagagctgtgatcacaactccatgagtcagggccgagccagccccttcaccaccagccggccgcgccccgggaagggaagtttgtggcggaggaggttcgtacgggaggagggggaggcgcccacgcatctggggctgactcgctctttcgcaaaacgtctgggaggagtccctggggccacaaaactgcctccttcctgaggccagaaggagagaagacgtgcagggaccccgcgcacaggagctgccctcgcgacatgggtcacccgccgctgctgccgctgctgctgctgctccacacctgcgtcccagcctgggcgacagcgcgagactccatttcaaaaaaaaaaaaagaaaaaagaaagaaaggagaaacttgaggcgctacaatctctgaaataacagaagtgtagaatttgggttccacagacaacctggctttttcccggagcgcacttgccaatctgctgctgtggaagggaaatagagcccagacggaaagagagtcgctagactgagaagacggaggttggagtttggggctgccagaatgtctggaagatgagagttaaaatcctggaatggatgggaccacagaaaagggagttcccaacctgcaaacaaatctccctcaagtcattggcaagctctacatgcacagggtgagagtccaagaaacttggaagagaaaaatagcaactgggaagctacaaaagcgaacaaggcttccagcagacatgtgatgctggggacacaggttgccaagctgaagaggccttggccgggctgtcacctattcccgaagccgttacctcgaatgcatttcctgtggctcatcagacatgagctgtgagaggggccggcaccagagcctgcagtgccgcagccctgaagaacagtgcctggatgtggtgacccactggatccaggaaggtgaagaagggcgtccaaaggatgaccgccacctccgtggctgtggctaccttcccggctgcccgggctccaatggtttccacaacaacgacaccttccacttcctgaaatgctgcaacaccaccaaatgcaacgagggcccaatcctggagcttgaaaatctgccgcagaatggccgccagtgttacagctgcaaggggaacagcacccatggatgctcctctgaagagactttcctcattgactgccgaggccccatgaatcaatgtctggtagccaccggcactcacgaaccgaaaaaccaaagctatatggtaagaggctgtgcaaccgcctcaatgtgccaacatgcccacctgggtgacgccttcagcatgaaccacattgatgtctcctgctgtactaaaagtggctgtaaccacccagacctggatgtccagtaccgcagtggggctgctcctcagcctggccctgcccatctcagcctcaccatcaccctgctaatgactgccagactgtggggaggcactctcctctggacctaaacctgaaatccccctctctgccctggctggatccgggggacccctttgcccttccctcggctcccagccctacagacttgctgtgtgacctcaggccagtgtgccgacctctctgggcctcagttttcccagctatgaaaacagctatctcacaaagttgtgtgaagcagaagagaaaagctggaggaaggccgtgggccaatgggagagctcttgttattattaatattgttgccgctgttgtgttgttgttattaattaatattcatattatttattttatacttacataaagattttgtaccagtggaaaaaaaaaata

SEQ ID NO: 324102 - DNA, 1456 bp, Homo sapiens
cagtatccctcctgacaaaactaacaaaaatcctgttagccaaataatcagccacattcatatttaccgtcaaagtttttatcctcattttacagcagtggagagcgattgccccgggtcccacgttaggaagagagagaactgggatttgcacccaggcaatctggggacagagctgtgatcacaactccatgagtcagggccgagccagccccttcaccaccagccggccgcgccccgggaagggaagtttgtggcggaggaggttcgtacgggaggagggggaggcgcccacgcatctggggctgactcgctctttcgcaaaacgtctgggaggagtccctggggccacaaaactgcctccttcctgaggccagaaggagagaagacgtgcagggaccccgcgcacaggagctgccctcgcgacatgggtcacccgccgctgctgccgctgctgctgctgctccacacctgcgtcccagcctcttggggcctgcggtgcatgcagtgtaagaccaacggggattgccgtgtggaagagtgcgccctgggacaggacctctgcaggaccacgatcgtgcgcttgtgggaagaaggagaagagctggagctggtggagaaaagctgtacccactcagagaagaccaacaggaccctgagctatcggactggcttgaagatcaccagccttaccgaggttgtgtgtgggttagacttgtgcaaccagggcaactctggccgggctgtcacctattcccgaagccgttacctcgaatgcatttcctgtggctcatcagacatgagctgtgagaggggccggcaccagagcctgcagtgccgcagccctgaagaacagtgcctggatgtggtgacccactggatccaggaaggtgaagaagggcgtccaaaggatgaccgccacctccgtggctgtggctaccttcccggctgcccgggctccaatggtttccacaacaacgacaccttccacttcctgaaatgctgcaacaccaccaaatgcaacgagggcccaatcctggagcttgaaaatctgccgcagaatggccgccagtgttacagctgcaaggggaacagcacccatggatgctcctctgaagagactttcctcattgactgccgaggccccatgaatcaatgtctggtagccaccggcactcacgaacgctcactctggggaagctggttgccatgtaaaagtactactgccctgagaccaccatgctgtgaggaagcccaagctactcatgtataaatgccatgtggagatagagccccagatgtttcagccatctcagcccaggcaccagacaagtgggtgaagaagccaccttggacatgtagccccagcagatgtgatatagagaagaaacaggaaacttggctatattagtttcctagggctgcctgtgataaattattacaaactttataaact

SEQ ID NO: 324103 - DNA, 1640 bp, Homo sapiens
cagtatccctcctgacaaaactaacaaaaatcctgttagccaaataatcagccacattcatatttaccgtcaaagtttttatcctcattttacagcagtggagagcgattgccccgggtcccacgttaggaagagagagaactgggatttgcacccaggcaatctggggacagagctgtgatcacaactccatgagtcagggccgagccagccccttcaccaccagccggccgcgccccgggaagggaagtttgtggcggaggaggttcgtacgggaggagggggaggcgcccacgcatctggggctgactcgctctttcgcaaaacgtctgggaggagtccctggggccacaaaactgcctccttcctgaggccagaaggagagaagacgtgcagggaccccgcgcacaggagctgccctcgcgacatgggtcacccgccgctgctgccgctgctgctgctgctccacacctgcgtcccagcctcttggggcctgcggtgcatgcagtgtaagaccaacggggattgccgtgtggaagagtgcgccctgggacaggacctctgcaggaccacgatcgtgcgcttgtgggaagaaggagaagagctggagctggtggagaaaagctgtacccactcagagaagaccaacaggaccctgagctatcggactggcttgaagatcaccagccttaccgaggttgtgtgtgggttagacttgtgcaaccagggcaactctggccgggctgtcacctattcccgaagccgttacctcgaatgcatttcctgtggctcatcagacatgagctgtgagaggggccggcaccagagcctgcagtgccgcagccctgaagaacagtgcctggatgtggtgacccactggatccaggaaggtgaagaagggcgtccaaaggatgaccgccacctccgtggctgtggctaccttcccggctgcccgggctccaatggtttccacaacaacgacaccttccacttcctgaaatgctgcaacaccaccaaatgcaacgagggcccaatcctggagcttgaaaatctgccgcagaatggccgccagtgttacagctgcaaggggaacagcacccatggatgctcctctgaagagactttcctcattgactgccgaggccccatgaatcaatgtctggtagccaccggcactcacgaacgctcactctggggaagctggttgccatgtaaaagtactactgccctgagaccaccatgctgtgaggaagcccaagctactcatgtataaatgccatgtggagatagagccccagatgtttcagccatctcagcccaggcaccagacaagtgggtgaagaagccaccttggacatgtagccccagcagatgtgatatagagaagaaacaggaaacttggctatattagtttcctagggctgcctgtgataaattattacaaactttataaactaacacattgtgtgcctatatcaaaacatcatggaaggacaggcacagtggctcatgcctgtagtcctagcactttgggagggtgagaaaggaagatctcttgagctcaggagttctagggcaggcgcgccctgctcagagagtccttgtgtacgttgaaaataaagaaaaataggtgggaaaaa

SEQ ID NO: 324104 - DNA, 641 bp, Homo sapiens
ctcttggaggggcgcatcgggtggctctttgtgcggccctttgtgtggctcgttgtgcggctcgtcgcgtggcacgtggtatggccctttgcggggctcttcgtgtggctcaatgtgccaacatgcccacctgggtgacgccttcagcatgaaccacattgatgtctcctgctgtactaaaagtggctgtaaccacccagacctggatgtccagtaccgcagtggggctgctcctcagcctggccctgcccatctcagcctcaccatcaccctgctaatgactgccagactgtggggaggcactctcctctggacctaaacctgaaatccccctctctgccctggctggatccgggggacccctttgcccttccctcggctcccagccctacagacttgctgtgtgacctcaggccagtgtgccgacctctctgggcctcagttttcccagctatgaaaacagctatctcacaaagttgtgtgaagcagaagagaaaagctggaggaaggccgtgggccaatgggagagctcttgttattattaatattgttgccgctgttgtgttgttgttattaattaatattcatattatttattttatacttacataaagattttgtaccagtggaaaaaaaaaata

SEQ ID NO: 324105 - DNA, 1366 bp, Homo sapiens
cagcactttggaaggccaaggcaggaggactgcttgatcccaggagttggaggctgcagtgatcacgccactgcactccagcctaggcggcagagcaaaaccctgtctcaaccaaagccgaacaagagctattaagaagcaggccttagtggtggattagatgtgggaggggacctgcaattctggtcatgatggagtcacttgtatcagaccaacccttctgccaatgacagttgcaaatgctggacaaataataaacaattattggaagtcactggagagcagcaaatgaaaggagaaacttggctgggcaaagtggttcatgcctgtaatcccagcactttgggaggccaagacaggtgaattgctcgagctcatgagttcaagaccagcctgggcaacatggcgaaaccccgtctctactaaaaatacaaaagttagccaggcgtggtggcacatgcctgtggtcccagctacttgggtggctgaggcacaagaattgcttgaacccgggaggtagaggttacagtgagccaagatcacacgactgcactccagcctgggcgacagcgcgagactccatttcaaaaaaaaaaaaagaaaaaagaaagaaaggagaaacttgaggcgctacaatctctgaaataacagaagtgtagaatttgggttccacagacaacctggctttttcccggagcgcacttgccaatctgctgctgtggaagggaaatagagcccagacggaaagagagtcgctagactgagaagacggaggttggagtttggggctgccagaatgtctggaagatgagagttaaaatcctggaatggatgggaccacagaaaagggagttcccaacctgcaaacaaatctccctcaagtcattggcaagctctacatgcacagggtgagagtccaagaaacttggaagagaaaaatagcaactgggaagctacaaaagcgaacaaggcttccagcagacatgtgatgctggggacacaggttgccaagctgaagaggccttggccgggctgtcacctattcccgaagccgttacctcgaatgcatttcctgtggctcatcagacatgagctgtgagaggggccggcaccagagcctgcagtgccgcagccctgaagaacagtgcctggatgtggtgacccactggatccaggaaggtgaagaagggcgtccaaaggatgaccgccacctccgtggctgtggctaccttcccggctgcccgggctccaatggtttccacaacaacgacaccttccacttcctgaaatgctgcaacaccaccaaatgcaacgagggcccaatcctggagcttgaaatggtcgccaatccggggtaccgagctcg

SEQ ID NO: 324106 - DNA, 5497 bp, Homo sapiens
ctccagctcccgctagaccttgggacccgcctctgcttttccgcgttctccaactcgggaatccccggtgactttgtcgcagcctccgttaccctgtgatctgcaagtcctgggagacgcacagctaagatgcccggacatcctggaagctgggaaatggtgatgtgactcttcttcagcctgcaccctccaaaagaggattgtgatgtatcactggacccagcacctagatgacgtgtgattgtgacacatacctctgctcagaatgtgagcgatttgactctcctgcctgggcccagtacacagatgggattgtgacatatcgctggacccagcatgtagatcatgtgaccctatactcttgccttggtgctgtcgcagagggcattgtgacatatcactggtccctgcacccagggaccattgacatttatggatgtggccatagaattctgtctggaggagtggcaatgcctggacattgcacagcagaatttatataggaatgtgatgttagagaactacagaaacctggtcttcctgggtattgctgtctctaagccagacctgatcacctgtctggagcaagaaaaagagccttgggagcctatgaggagacatgaaatggtagccaaacccccagttatgtgttctcattttacccaagacttttggccagagcagcatataaaagatcctttccaaaaagcgacactgagaagatataaaaactgtgaacataaaaatgtacatttaaaaaaagaccataaaagtgtggatgagtgtaaggtgcacagaggaggttataatggatttaaccaatgtttgccagctacccagagcaaaatatttctatttgataaatgtgtgaaagcctttcataaattttcaaattcaaacagacataagataagccatactgaaaaaaaacttttcaaatgcaaagaatgtggcaaatcattttgcatgcttccacatctagctcaacataaaataattcataccagagtgaatttctgcaaatgtgaaaaatgtggaaaagcttttaactgcccttcaatcatcactaaacataagagaattaatactggagagaaaccctacacatgtgaagaatgtggcaaagtctttaattggtcctcacgccttactacacataaaaaaaattatactagatacaaactctacaaatgtgaagaatgtggcaaagcttttaacaagtcctcaatccttactacccataagataattcgcactggagagaaattctacaaatgtaaagaatgtgccaaagcttttaaccaatcctcaaaccttactgaacataagaaaattcatcctggagagaaaccttacaaatgtgaagaatgtggcaaagcctttaactggccctcaactcttactaaacataagagaattcatactggagagaaaccctacacatgtgaagaatgtggcaaagcttttaaccagttctcaaaccttactacacataagagaatccatactgcagagaaattctataaatgtacagaatgtggtgaagcttttagccggtcctcaaaccttactaaacataagaaaattcatactgaaaagaaaccctacaaatgtgaagaatgtggcaaagcttttaagtggtcctcaaagcttactgaacataagttaactcatactggagagaaaccctacaaatgtgaagaatgtggcaaagcctttaactggccctcaacccttactaaacataacagaattcatactggagagaaaccctacaaatgtgaagtatgtggcaaagcctttaaccagttctcaaaccttactacacataagagaattcatactgcagaaaaaccgtacaaatgtgaagaatgtggcaaagcttttagccggtcctcaaaccttactaaacataagaaaattcacattgaaaagaaaccctacaaatgtgaagaatgtggcaaagcttttaagtggtcctcaaagcttactgaacataagataactcatactggagagaaaccctacaaatgtgaagaatgtggcaaagcttttaaccatttctcaatccttaccaaacataagaggattcatactggagagaaaccctacaagtgtgaagaatgtggcaaagcttttacccaatcctcaaaccttactacacataagaaaattcatactggagagaaattctacaaatgtgaagaatgtggcaaagcttttacccaatcttcaaaccttactacacataaaaaaattcatactggaggaaaaccctacaaatgtgaagaatgtggcaaagcttttaaccagttctcaactcttactaaacataagataattcacactgaggagaaaccctacaaatgtgaagaatgtggcaaagcctttaagtggtcctcaacccttactaaacataagataattcatactggagagaaaccctacaaatgtgaagaatgtggcaaagcttttaaactgtcctcaaccctttctacacataagattattcatactggagagaaaccctacaaatgtgaaaaatgtggcaaagcttttaaccgatcctcaaaccttattgaacataagaaaattcatactggagagcaaccctacaaatgtgaagaatgtggcaaagcatttaactattcctcacaccttaatacacataagagaattcatactaaagagcaaccctacaaatgtaaagaatgtggcaaagctttcaaccaatattcaaaccttactacacataacaaaattcatactggagagaaactctacaaacctgaagatgtgacagtgattttgacaacacctcaaactttttcaaacataaaataaattatactggtgagaaattctagaaatgtaaagaatgtgataaaggctttacatggttgtcacacttgattgtaggtaagataatttacattggagtaaacttctacaagtgtgaagaatgtggcaaaacttttaattaatgctcataccttattgcacaggaaagaatttttacttggaaaaaggtatatacacaaagaatgtggaaaagccattaatatgtgctcatatcttactcaacatcagagagtctgtacttaataaaaccattatagatgcaactagtgtcaaaagatctttcagaaaataaaagcctttaaagtgaagaagataattcattctgaagacaaacattacaaatattaagagggttgtagtaccattacttgcatcacagatcttattgtacacattttgtactaaagaaaaccctgaagcagttgctcaaatactgttcaacatcagaaaatttatattggaaaaaacccctggaaaatgtaataaatttgtaaaaacagttttgaaaaactacagcttataaaacatgagggtctataatgcttggttgatagtacaaagtttattcaacatcagggaatttatattggagaaaaaccctacaaatgtaatcagtttggaaaaacatttttaaaaaaaccacagcatagaaaacaccacagggttcatactaaaatatgtttttgcagatgcagtaaaaatgaaaaaaatttaatccgaaattaagtttatgtaaatatctgagaattcacagtagaaatatctaaggcgcggacacttcagacattacactaaatcagtgctaagtacagaaaacaacacaaaataaaacttggtggataaattatttgtatataacattaaaagaagtagaagattttcagttataattacaattaaagtatacttttatcttgaaaaaattactgatttttaaattagtgaataatgatgtaattaaactctcaaataactttatgctcttttttcattcctgctatattcacatgtgaaagcatgtgaccaattgttgctgcaccaaagatatgagagattcttttattaggtgggcattatttaaaacattttttatggaacagtaaggatattaaagtgtaagatgcagccaggcatggtggctcatgcctgtgatcccagcactttgggaggctgaggccggtggatcacctgaggtcaggagtttgagaccagcctgaccaacatggtgaaaccctgtctttactaaaaatacaaaaatttaccaggcacctataatcccagctacttcaaaggctgaagcaggagaatcacttgaacctggaaagtggaggtctcagtgagccgaaatcataccattgcactccaacctgggcaacaaaagtcaaactccatctcaaaaagaaaaaaaaaaaaaaaagatgcgtgatgaaaatgtaactggagaggctctttgtggttaacttataaaggagtgatgcaggagataggttttcagagtaatattcttctgcattatagtgacaaaagttttttattttagttaaaattggttaaattagtaagtcattttacttattgtaattttatgtaattaaatgtacatttttaaatttttagattacatgtaaatataacttttaaaaaaatgtgttaagaccattgtacattcaatgaagcattattatgcttctaactttaacctatttcaccttactcaagagtgtatgtaaaagatggtaacaatatactatttggtaacataatggactaacatttctattaatctatttcaccagtggctttcaactgcaaataagttaaagaatatttttctataggttaaatattcttttttgtcttatttaaacttactgttcttaatttctgtgggtacatagtatgattttaattaccttattttattctttgtgctattcataattttttttgtttgtttggtttttttttttgagacagagtcttgctctcgcccaggctggagtgcagtggcgcgatcttggctcactgcaagctccgcctcccaggttcactccattctcctgcctcagcctcccaagtagctgggaccacaggcgcccactacttgtttgggtttttttttggagatggagtctcgctctgtcacccaggctggagtacagtggcatgatcttggctcactgcaacccccacctccccggttcaagtgattctcctgcctcagcctcccgaatagctgggattacaggcgtccaccatcacaccaggctaatttttgtatttttagtagagatggagtttcaccatgttggccaggatggtctcgatcttctgacctcatgatctgcctgcctcggcctcccagagttctgggaccacaggcatgagccactgcacctggccaaatgtgtatatatttatgcaatatataacatgttttgatacaggcatataatatgtattagtcacatcaggataaagtatctattaccttcagcatttatcctttgtattacaagccaattctacacttcattattttaatgtacaattaaattgttattgactacagggtcattttaattataaaaattatatagaagtataaataaagtccatacattcctgagtcatg

SEQ ID NO: 324107 - DNA, 5094 bp, Homo sapiens
ggctgcagttggagctctgcgtctcgtcttcgttcttctgtgtcctctgctgctagaggtccagcctctgtggctctgtgacctgcgggtattgggggatccacagctaagacgccaggaccccccggaagcctagaaatggtattgctgtctctaagccagacctgatcacctgtctggagcaagaaaaagagccttgggagcctatgaggagacatgaaatggtagccaaacccccagttatgtgttctcattttacccaagacttttggccagagcagcatataaaagatcctttccaaaaagcgacactgagaagatataaaaactgtgaacataaaaatgtacatttaaaaaaagaccataaaagtgtggatgagtgtaaggtgcacagaggaggttataatggatttaaccaatgtttgccagctacccagagcaaaatatttctatttgataaatgtgtgaaagcctttcataaattttcaaattcaaacagacataagataagccatactgaaaaaaaacttttcaaatgcaaagaatgtggcaaatcattttgcatgcttccacatctagctcaacataaaataattcataccagagtgaatttctgcaaatgtgaaaaatgtggaaaagcttttaactgcccttcaatcatcactaaacataagagaattaatactggagagaaaccctacacatgtgaagaatgtggcaaagtctttaattggtcctcacgccttactacacataaaaaaaattatactagatacaaactctacaaatgtgaagaatgtggcaaagcttttaacaagtcctcaatccttactacccataagataattcgcactggagagaaattctacaaatgtaaagaatgtgccaaagcttttaaccaatcctcaaaccttactgaacataagaaaattcatcctggagagaaaccttacaaatgtgaagaatgtggcaaagcctttaactggccctcaactcttactaaacataagagaattcatactggagagaaaccctacacatgtgaagaatgtggcaaagcttttaaccagttctcaaaccttactacacataagagaatccatactgcagagaaattctataaatgtacagaatgtggtgaagcttttagccggtcctcaaaccttactaaacataagaaaattcatactgaaaagaaaccctacaaatgtgaagaatgtggcaaagcttttaagtggtcctcaaagcttactgaacataagttaactcatactggagagaaaccctacaaatgtgaagaatgtggcaaagcctttaactggccctcaacccttactaaacataacagaattcatactggagagaaaccctacaaatgtgaagtatgtggcaaagcctttaaccagttctcaaaccttactacacataagagaattcatactgcagaaaaaccgtacaaatgtgaagaatgtggcaaagcttttagccggtcctcaaaccttactaaacataagaaaattcacattgaaaagaaaccctacaaatgtgaagaatgtggcaaagcttttaagtggtcctcaaagcttactgaacataagataactcatactggagagaaaccctacaaatgtgaagaatgtggcaaagcttttaaccatttctcaatccttaccaaacataagaggattcatactggagagaaaccctacaagtgtgaagaatgtggcaaagcttttacccaatcctcaaaccttactacacataagaaaattcatactggagagaaattctacaaatgtgaagaatgtggcaaagcttttacccaatcttcaaaccttactacacataaaaaaattcatactggaggaaaaccctacaaatgtgaagaatgtggcaaagcttttaaccagttctcaactcttactaaacataagataattcacactgaggagaaaccctacaaatgtgaagaatgtggcaaagcctttaagtggtcctcaacccttactaaacataagataattcatactggagagaaaccctacaaatgtgaagaatgtggcaaagcttttaaactgtcctcaaccctttctacacataagattattcatactggagagaaaccctacaaatgtgaaaaatgtggcaaagcttttaaccgatcctcaaaccttattgaacataagaaaattcatactggagagcaaccctacaaatgtgaagaatgtggcaaagcatttaactattcctcacaccttaatacacataagagaattcatactaaagagcaaccctacaaatgtaaagaatgtggcaaagctttcaaccaatattcaaaccttactacacataacaaaattcatactggagagaaactctacaaacctgaagatgtgacagtgattttgacaacacctcaaactttttcaaacataaaataaattatactggtgagaaattctagaaatgtaaagaatgtgataaaggctttacatggttgtcacacttgattgtaggtaagataatttacattggagtaaacttctacaagtgtgaagaatgtggcaaaacttttaattaatgctcataccttattgcacaggaaagaatttttacttggaaaaaggtatatacacaaagaatgtggaaaagccattaatatgtgctcatatcttactcaacatcagagagtctgtacttaataaaaccattatagatgcaactagtgtcaaaagatctttcagaaaataaaagcctttaaagtgaagaagataattcattctgaagacaaacattacaaatattaagagggttgtagtaccattacttgcatcacagatcttattgtacacattttgtactaaagaaaaccctgaagcagttgctcaaatactgttcaacatcagaaaatttatattggaaaaaacccctggaaaatgtaataaatttgtaaaaacagttttgaaaaactacagcttataaaacatgagggtctataatgcttggttgatagtacaaagtttattcaacatcagggaatttatattggagaaaaaccctacaaatgtaatcagtttggaaaaacatttttaaaaaaaccacagcatagaaaacaccacagggttcatactaaaatatgtttttgcagatgcagtaaaaatgaaaaaaatttaatccgaaattaagtttatgtaaatatctgagaattcacagtagaaatatctaaggcgcggacacttcagacattacactaaatcagtgctaagtacagaaaacaacacaaaataaaacttggtggataaattatttgtatataacattaaaagaagtagaagattttcagttataattacaattaaagtatacttttatcttgaaaaaattactgatttttaaattagtgaataatgatgtaattaaactctcaaataactttatgctcttttttcattcctgctatattcacatgtgaaagcatgtgaccaattgttgctgcaccaaagatatgagagattcttttattaggtgggcattatttaaaacattttttatggaacagtaaggatattaaagtgtaagatgcagccaggcatggtggctcatgcctgtgatcccagcactttgggaggctgaggccggtggatcacctgaggtcaggagtttgagaccagcctgaccaacatggtgaaaccctgtctttactaaaaatacaaaaatttaccaggcacctataatcccagctacttcaaaggctgaagcaggagaatcacttgaacctggaaagtggaggtctcagtgagccgaaatcataccattgcactccaacctgggcaacaaaagtcaaactccatctcaaaaagaaaaaaaaaaaaaaaagatgcgtgatgaaaatgtaactggagaggctctttgtggttaacttataaaggagtgatgcaggagataggttttcagagtaatattcttctgcattatagtgacaaaagttttttattttagttaaaattggttaaattagtaagtcattttacttattgtaattttatgtaattaaatgtacatttttaaatttttagattacatgtaaatataacttttaaaaaaatgtgttaagaccattgtacattcaatgaagcattattatgcttctaactttaacctatttcaccttactcaagagtgtatgtaaaagatggtaacaatatactatttggtaacataatggactaacatttctattaatctatttcaccagtggctttcaactgcaaataagttaaagaatatttttctataggttaaatattcttttttgtcttatttaaacttactgttcttaatttctgtgggtacatagtatgattttaattaccttattttattctttgtgctattcataattttttttgtttgtttggtttttttttttgagacagagtcttgctctcgcccaggctggagtgcagtggcgcgatcttggctcactgcaagctccgcctcccaggttcactccattctcctgcctcagcctcccaagtagctgggaccacaggcgcccactacttgtttgggtttttttttggagatggagtctcgctctgtcacccaggctggagtacagtggcatgatcttggctcactgcaacccccacctccccggttcaagtgattctcctgcctcagcctcccgaatagctgggattacaggcgtccaccatcacaccaggctaatttttgtatttttagtagagatggagtttcaccatgttggccaggatggtctcgatcttctgacctcatgatctgcctgcctcggcctcccagagttctgggaccacaggcatgagccactgcacctggccaaatgtgtatatatttatgcaatatataacatgttttgatacaggcatataatatgtattagtcacatcaggataaagtatctattaccttcagcatttatcctttgtattacaagccaattctacacttcattattttaatgtacaattaaattgttattgactacagggtcattttaattataaaaattatatagaagtataaataaagtccatacattcctgagtcatg

SEQ ID NO: 324108 - DNA, 5239 bp, Homo sapiens
ctccagctcccgctagaccttgggacccgcctctgcttttccgcgttctccaactcgggaatccccggtgactttgtcgcagcctccgttaccctgtgatctgcaagtcctgggagacgcacagctaagatgcccggacatcctggaagctgggaaatgggaccattgacatttatggatgtggccatagaattctgtctggaggagtggcaatgcctggacattgcacagcagaatttatataggaatgtgatgttagagaactacagaaacctggtcttcctgggtattgctgtctctaagccagacctgatcacctgtctggagcaagaaaaagagccttgggagcctatgaggagacatgaaatggtagccaaacccccagttatgtgttctcattttacccaagacttttggccagagcagcatataaaagatcctttccaaaaagcgacactgagaagatataaaaactgtgaacataaaaatgtacatttaaaaaaagaccataaaagtgtggatgagtgtaaggtgcacagaggaggttataatggatttaaccaatgtttgccagctacccagagcaaaatatttctatttgataaatgtgtgaaagcctttcataaattttcaaattcaaacagacataagataagccatactgaaaaaaaacttttcaaatgcaaagaatgtggcaaatcattttgcatgcttccacatctagctcaacataaaataattcataccagagtgaatttctgcaaatgtgaaaaatgtggaaaagcttttaactgcccttcaatcatcactaaacataagagaattaatactggagagaaaccctacacatgtgaagaatgtggcaaagtctttaattggtcctcacgccttactacacataaaaaaaattatactagatacaaactctacaaatgtgaagaatgtggcaaagcttttaacaagtcctcaatccttactacccataagataattcgcactggagagaaattctacaaatgtaaagaatgtgccaaagcttttaaccaatcctcaaaccttactgaacataagaaaattcatcctggagagaaaccttacaaatgtgaagaatgtggcaaagcctttaactggccctcaactcttactaaacataagagaattcatactggagagaaaccctacacatgtgaagaatgtggcaaagcttttaaccagttctcaaaccttactacacataagagaatccatactgcagagaaattctataaatgtacagaatgtggtgaagcttttagccggtcctcaaaccttactaaacataagaaaattcatactgaaaagaaaccctacaaatgtgaagaatgtggcaaagcttttaagtggtcctcaaagcttactgaacataagttaactcatactggagagaaaccctacaaatgtgaagaatgtggcaaagcctttaactggccctcaacccttactaaacataacagaattcatactggagagaaaccctacaaatgtgaagtatgtggcaaagcctttaaccagttctcaaaccttactacacataagagaattcatactgcagaaaaaccgtacaaatgtgaagaatgtggcaaagcttttagccggtcctcaaaccttactaaacataagaaaattcacattgaaaagaaaccctacaaatgtgaagaatgtggcaaagcttttaagtggtcctcaaagcttactgaacataagataactcatactggagagaaaccctacaaatgtgaagaatgtggcaaagcttttaaccatttctcaatccttaccaaacataagaggattcatactggagagaaaccctacaagtgtgaagaatgtggcaaagcttttacccaatcctcaaaccttactacacataagaaaattcatactggagagaaattctacaaatgtgaagaatgtggcaaagcttttacccaatcttcaaaccttactacacataaaaaaattcatactggaggaaaaccctacaaatgtgaagaatgtggcaaagcttttaaccagttctcaactcttactaaacataagataattcacactgaggagaaaccctacaaatgtgaagaatgtggcaaagcctttaagtggtcctcaacccttactaaacataagataattcatactggagagaaaccctacaaatgtgaagaatgtggcaaagcttttaaactgtcctcaaccctttctacacataagattattcatactggagagaaaccctacaaatgtgaaaaatgtggcaaagcttttaaccgatcctcaaaccttattgaacataagaaaattcatactggagagcaaccctacaaatgtgaagaatgtggcaaagcatttaactattcctcacaccttaatacacataagagaattcatactaaagagcaaccctacaaatgtaaagaatgtggcaaagctttcaaccaatattcaaaccttactacacataacaaaattcatactggagagaaactctacaaacctgaagatgtgacagtgattttgacaacacctcaaactttttcaaacataaaataaattatactggtgagaaattctagaaatgtaaagaatgtgataaaggctttacatggttgtcacacttgattgtaggtaagataatttacattggagtaaacttctacaagtgtgaagaatgtggcaaaacttttaattaatgctcataccttattgcacaggaaagaatttttacttggaaaaaggtatatacacaaagaatgtggaaaagccattaatatgtgctcatatcttactcaacatcagagagtctgtacttaataaaaccattatagatgcaactagtgtcaaaagatctttcagaaaataaaagcctttaaagtgaagaagataattcattctgaagacaaacattacaaatattaagagggttgtagtaccattacttgcatcacagatcttattgtacacattttgtactaaagaaaaccctgaagcagttgctcaaatactgttcaacatcagaaaatttatattggaaaaaacccctggaaaatgtaataaatttgtaaaaacagttttgaaaaactacagcttataaaacatgagggtctataatgcttggttgatagtacaaagtttattcaacatcagggaatttatattggagaaaaaccctacaaatgtaatcagtttggaaaaacatttttaaaaaaaccacagcatagaaaacaccacagggttcatactaaaatatgtttttgcagatgcagtaaaaatgaaaaaaatttaatccgaaattaagtttatgtaaatatctgagaattcacagtagaaatatctaaggcgcggacacttcagacattacactaaatcagtgctaagtacagaaaacaacacaaaataaaacttggtggataaattatttgtatataacattaaaagaagtagaagattttcagttataattacaattaaagtatacttttatcttgaaaaaattactgatttttaaattagtgaataatgatgtaattaaactctcaaataactttatgctcttttttcattcctgctatattcacatgtgaaagcatgtgaccaattgttgctgcaccaaagatatgagagattcttttattaggtgggcattatttaaaacattttttatggaacagtaaggatattaaagtgtaagatgcagccaggcatggtggctcatgcctgtgatcccagcactttgggaggctgaggccggtggatcacctgaggtcaggagtttgagaccagcctgaccaacatggtgaaaccctgtctttactaaaaatacaaaaatttaccaggcacctataatcccagctacttcaaaggctgaagcaggagaatcacttgaacctggaaagtggaggtctcagtgagccgaaatcataccattgcactccaacctgggcaacaaaagtcaaactccatctcaaaaagaaaaaaaaaaaaaaaagatgcgtgatgaaaatgtaactggagaggctctttgtggttaacttataaaggagtgatgcaggagataggttttcagagtaatattcttctgcattatagtgacaaaagttttttattttagttaaaattggttaaattagtaagtcattttacttattgtaattttatgtaattaaatgtacatttttaaatttttagattacatgtaaatataacttttaaaaaaatgtgttaagaccattgtacattcaatgaagcattattatgcttctaactttaacctatttcaccttactcaagagtgtatgtaaaagatggtaacaatatactatttggtaacataatggactaacatttctattaatctatttcaccagtggctttcaactgcaaataagttaaagaatatttttctataggttaaatattcttttttgtcttatttaaacttactgttcttaatttctgtgggtacatagtatgattttaattaccttattttattctttgtgctattcataattttttttgtttgtttggtttttttttttgagacagagtcttgctctcgcccaggctggagtgcagtggcgcgatcttggctcactgcaagctccgcctcccaggttcactccattctcctgcctcagcctcccaagtagctgggaccacaggcgcccactacttgtttgggtttttttttggagatggagtctcgctctgtcacccaggctggagtacagtggcatgatcttggctcactgcaacccccacctccccggttcaagtgattctcctgcctcagcctcccgaatagctgggattacaggcgtccaccatcacaccaggctaatttttgtatttttagtagagatggagtttcaccatgttggccaggatggtctcgatcttctgacctcatgatctgcctgcctcggcctcccagagttctgggaccacaggcatgagccactgcacctggccaaatgtgtatatatttatgcaatatataacatgttttgatacaggcatataatatgtattagtcacatcaggataaagtatctattaccttcagcatttatcctttgtattacaagccaattctacacttcattattttaatgtacaattaaattgttattgactacagggtcattttaattataaaaattatatagaagtataaataaagtccatacattcctgagtcatg

SEQ ID NO: 324109 - DNA, 4172 bp, Homo sapiens
ggctgcagttggagctctgcgtctcgtcttcgttcttctgtgtcctctgctgctagaggtccagcctctgtggctctgtgacctgcgggtattgggggatccacagctaagacgccaggaccccccggaagcctagaaatggtattgctgtctctaagccagacctgatcacctgtctggagcaagaaaaagagccttgggagcctatgaggagacatgaaatggtagccaaacccccagttatgtgttctcattttacccaagacttttggccagagcagcatataaaagatcctttccaaaaagcgacactgagaagatataaaaactgtgaacataaaaatgtacatttaaaaaaagaccataaaagtgtggatgagtgtaaggtgcacagaggaggttataatggatttaaccaatgtttgccagctacccagagcaaaatatttctatttgataaatgtgtgaaagcctttcataaattttcaaattcaaacagacataagataagccatactgaaaaaaaacttttcaaatgcaaagaatgtggcaaatcattttgcatgcttccacatctagctcaacataaaataattcataccagagtgaatttctgcaaatgtgaaaaatgtggaaaagcttttaactgcccttcaatcatcactaaacataagagaattaatactggagagaaaccctacacatgtgaagaatgtggcaaagtctttaattggtcctcacgccttactacacataaaaaaaattatactagatacaaactctacaaatgtgaagaatgtggcaaagcttttaacaagtcctcaatccttactacccataagataattcgcactggagagaaattctacaaatgtaaagaatgtgccaaagcttttaaccaatcctcaaaccttactgaacataagaaaattcatcctggagagaaaccttacaaatgtgaagaatgtggcaaagcctttaactggccctcaactcttactaaacataagagaattcatactggagagaaaccctacacatgtgaagaatgtggcaaagcttttaaccagttctcaaaccttactacacataagagaatccatactgcagagaaattctataaatgtacagaatgtggtgaagcttttagccggtcctcaaaccttactaaacataagaaaattcatactgaaaagaaaccctacaaatgtgaagaatgtggcaaagcttttaagtggtcctcaaagcttactgaacataagttaactcatactggagagaaaccctacaaatgtgaagaatgtggcaaagcctttaactggccctcaacccttactaaacataacagaattcatactggagagaaaccctacaaatgtgaagtatgtggcaaagcctttaaccagttctcaaaccttactacacataagagaattcatactgcagaaaaaccgtacaaatgtgaagaatgtggcaaagcttttagccggtcctcaaaccttactaaacataagaaaattcacattgaaaagaaaccctacaaatgtgaagaatgtggcaaagcttttaagtggtcctcaaagcttactgaacataagataactcatactggagagaaaccctacaaattgtgaagaatgtggcaaaacttttaattaatgctcataccttattgcacaggaaagaatttttacttggaaaaaggtatatacacaaagaatgtggaaaagccattaatatgtgctcatatcttactcaacatcagagagtctgtacttaataaaaccattatagatgcaactagtgtcaaaagatctttcagaaaataaaagcctttaaagtgaagaagataattcattctgaagacaaacattacaaatattaagagggttgtagtaccattacttgcatcacagatcttattgtacacattttgtactaaagaaaaccctgaagcagttgctcaaatactgttcaacatcagaaaatttatattggaaaaaacccctggaaaatgtaataaatttgtaaaaacagttttgaaaaactacagcttataaaacatgagggtctataatgcttggttgatagtacaaagtttattcaacatcagggaatttatattggagaaaaaccctacaaatgtaatcagtttggaaaaacatttttaaaaaaaccacagcatagaaaacaccacagggttcatactaaaatatgtttttgcagatgcagtaaaaatgaaaaaaatttaatccgaaattaagtttatgtaaatatctgagaattcacagtagaaatatctaaggcgcggacacttcagacattacactaaatcagtgctaagtacagaaaacaacacaaaataaaacttggtggataaattatttgtatataacattaaaagaagtagaagattttcagttataattacaattaaagtatacttttatcttgaaaaaattactgatttttaaattagtgaataatgatgtaattaaactctcaaataactttatgctcttttttcattcctgctatattcacatgtgaaagcatgtgaccaattgttgctgcaccaaagatatgagagattcttttattaggtgggcattatttaaaacattttttatggaacagtaaggatattaaagtgtaagatgcagccaggcatggtggctcatgcctgtgatcccagcactttgggaggctgaggccggtggatcacctgaggtcaggagtttgagaccagcctgaccaacatggtgaaaccctgtctttactaaaaatacaaaaatttaccaggcacctataatcccagctacttcaaaggctgaagcaggagaatcacttgaacctggaaagtggaggtctcagtgagccgaaatcataccattgcactccaacctgggcaacaaaagtcaaactccatctcaaaaagaaaaaaaaaaaaaaaagatgcgtgatgaaaatgtaactggagaggctctttgtggttaacttataaaggagtgatgcaggagataggttttcagagtaatattcttctgcattatagtgacaaaagttttttattttagttaaaattggttaaattagtaagtcattttacttattgtaattttatgtaattaaatgtacatttttaaatttttagattacatgtaaatataacttttaaaaaaatgtgttaagaccattgtacattcaatgaagcattattatgcttctaactttaacctatttcaccttactcaagagtgtatgtaaaagatggtaacaatatactatttggtaacataatggactaacatttctattaatctatttcaccagtggctttcaactgcaaataagttaaagaatatttttctataggttaaatattcttttttgtcttatttaaacttactgttcttaatttctgtgggtacatagtatgattttaattaccttattttattctttgtgctattcataattttttttgtttgtttggtttttttttttgagacagagtcttgctctcgcccaggctggagtgcagtggcgcgatcttggctcactgcaagctccgcctcccaggttcactccattctcctgcctcagcctcccaagtagctgggaccacaggcgcccactacttgtttgggtttttttttggagatggagtctcgctctgtcacccaggctggagtacagtggcatgatcttggctcactgcaacccccacctccccggttcaagtgattctcctgcctcagcctcccgaatagctgggattacaggcgtccaccatcacaccaggctaatttttgtatttttagtagagatggagtttcaccatgttggccaggatggtctcgatcttctgacctcatgatctgcctgcctcggcctcccagagttctgggaccacaggcatgagccactgcacctggccaaatgtgtatatatttatgcaatatataacatgttttgatacaggcatataatatgtattagtcacatcaggataaagtatctattaccttcagcatttatcctttgtattacaagccaattctacacttcattattttaatgtacaattaaattgttattgactacagggtcattttaattataaaaattatatagaagtataaataaagtccatacattcctgagtcatg

SEQ ID NO: 324110 - DNA, 1684 bp, Homo sapiens
agcggccgctactactactagcctactactactaaattcgcggccgcgtcgaccacatgtgaaagcatgtgaccaattgttgctgcaccaaagatatgagagattcttttattaggtgggcattatttaaaacattttttatggaacagtaaggatattaaagtgtaagatgcagccaggcatggtggctcatgcctgtgatcccagcactttgggaggctgaggccggtggatcacctgaggtcaggagtttgagaccagcctgaccaacatggtgaaaccctgtctttactaaaaatacaaaaatttaccaggcacctataatcccagctacttcaaaggctgaagcaggagaatcacttgaacctggaaagtggaggtctcagtgagccgaaatcataccattgcactccaacctgggcaacaaaagtcaaactccatctcaaaaagaaaaaaaaaaaaaaaagatgcgtgatgaaaatgtaactggagaggctctttgtggttaacttataaaggagtgatgcaggagataggttttcagagtaatattcttctgcattatagtgacaaaagttttttattttagttaaaattggttaaattagtaagtcattttacttattgtaattttatgtaattaaatgtacatttttaaatttttagattacatgtaaatataacttttaaaaaaatgtgttaagaccattgtacattcaatgaagcattattatgcttctaactttaacctatttcaccttactcaagagtgtatgtaaaagatggtaacaatatactatttggtaacataatggactaacatttctattaatctatttcaccagtggctttcaactgcaaataagttaaagaatatttttctataggttaaatattcttttttgtcttatttaaacttactgttcttaatttctgtgggtacatagtatgattttaattaccttattttattctttgtgctattcataattttttttgtttgtttggtttttttttttgagacagagtcttgctctcgcccaggctggagtgcagtggcgcgatcttggctcactgcaagctccgcctcccaggttcactccattctcctgcctcagcctcccaagtagctgggaccacaggcgcccactacttgtttgggtttttttttggagatggagtctcgctctgtcacccaggctggagtacagtggcatgatcttggctcactgcaacccccacctccccggttcaagtgattctcctgcctcagcctcccgaatagctgggattacaggcgtccaccatcacaccaggctaatttttgtatttttagtagagatggagtttcaccatgttggccaggatggtctcgatcttctgacctcatgatctgcctgcctcggcctcccagagttctgggaccacaggcatgagccactgcacctggccaaatgtgtatatatttatgcaatatataacatgttttgatacaggcatataatatgtattagtcacatcaggataaagtatctattaccttcagcatttatcctttgtattacaagccaattctacacttcattattttaatgtacaattaaattgttattgactacagggtcattttaattataaaaattatatagaagtataaataaagtccatacattcctgagtcatg

SEQ ID NO: 324111 - DNA, 5221 bp, Homo sapiens
ggctgcagttggagctctgcgtctcgtcttcgttcttctgtgtcctctgctgctagaggtccagcctctgtggctctgtgacctgcgggtattgggggatccacagctaagacgccaggaccccccggaagcctagaaatgggaccattgacatttatggatgtggccatagaattctgtctggaggagtggcaatgcctggacattgcacagcagaatttatataggaatgtgatgttagagaactacagaaacctggtcttcctgggtattgctgtctctaagccagacctgatcacctgtctggagcaagaaaaagagccttgggagcctatgaggagacatgaaatggtagccaaacccccagttatgtgttctcattttacccaagacttttggccagagcagcatataaaagatcctttccaaaaagcgacactgagaagatataaaaactgtgaacataaaaatgtacatttaaaaaaagaccataaaagtgtggatgagtgtaaggtgcacagaggaggttataatggatttaaccaatgtttgccagctacccagagcaaaatatttctatttgataaatgtgtgaaagcctttcataaattttcaaattcaaacagacataagataagccatactgaaaaaaaacttttcaaatgcaaagaatgtggcaaatcattttgcatgcttccacatctagctcaacataaaataattcataccagagtgaatttctgcaaatgtgaaaaatgtggaaaagcttttaactgcccttcaatcatcactaaacataagagaattaatactggagagaaaccctacacatgtgaagaatgtggcaaagtctttaattggtcctcacgccttactacacataaaaaaaattatactagatacaaactctacaaatgtgaagaatgtggcaaagcttttaacaagtcctcaatccttactacccataagataattcgcactggagagaaattctacaaatgtaaagaatgtgccaaagcttttaaccaatcctcaaaccttactgaacataagaaaattcatcctggagagaaaccttacaaatgtgaagaatgtggcaaagcctttaactggccctcaactcttactaaacataagagaattcatactggagagaaaccctacacatgtgaagaatgtggcaaagcttttaaccagttctcaaaccttactacacataagagaatccatactgcagagaaattctataaatgtacagaatgtggtgaagcttttagccggtcctcaaaccttactaaacataagaaaattcatactgaaaagaaaccctacaaatgtgaagaatgtggcaaagcttttaagtggtcctcaaagcttactgaacataagttaactcatactggagagaaaccctacaaatgtgaagaatgtggcaaagcctttaactggccctcaacccttactaaacataacagaattcatactggagagaaaccctacaaatgtgaagtatgtggcaaagcctttaaccagttctcaaaccttactacacataagagaattcatactgcagaaaaaccgtacaaatgtgaagaatgtggcaaagcttttagccggtcctcaaaccttactaaacataagaaaattcacattgaaaagaaaccctacaaatgtgaagaatgtggcaaagcttttaagtggtcctcaaagcttactgaacataagataactcatactggagagaaaccctacaaatgtgaagaatgtggcaaagcttttaaccatttctcaatccttaccaaacataagaggattcatactggagagaaaccctacaagtgtgaagaatgtggcaaagcttttacccaatcctcaaaccttactacacataagaaaattcatactggagagaaattctacaaatgtgaagaatgtggcaaagcttttacccaatcttcaaaccttactacacataaaaaaattcatactggaggaaaaccctacaaatgtgaagaatgtggcaaagcttttaaccagttctcaactcttactaaacataagataattcacactgaggagaaaccctacaaatgtgaagaatgtggcaaagcctttaagtggtcctcaacccttactaaacataagataattcatactggagagaaaccctacaaatgtgaagaatgtggcaaagcttttaaactgtcctcaaccctttctacacataagattattcatactggagagaaaccctacaaatgtgaaaaatgtggcaaagcttttaaccgatcctcaaaccttattgaacataagaaaattcatactggagagcaaccctacaaatgtgaagaatgtggcaaagcatttaactattcctcacaccttaatacacataagagaattcatactaaagagcaaccctacaaatgtaaagaatgtggcaaagctttcaaccaatattcaaaccttactacacataacaaaattcatactggagagaaactctacaaacctgaagatgtgacagtgattttgacaacacctcaaactttttcaaacataaaataaattatactggtgagaaattctagaaatgtaaagaatgtgataaaggctttacatggttgtcacacttgattgtaggtaagataatttacattggagtaaacttctacaagtgtgaagaatgtggcaaaacttttaattaatgctcataccttattgcacaggaaagaatttttacttggaaaaaggtatatacacaaagaatgtggaaaagccattaatatgtgctcatatcttactcaacatcagagagtctgtacttaataaaaccattatagatgcaactagtgtcaaaagatctttcagaaaataaaagcctttaaagtgaagaagataattcattctgaagacaaacattacaaatattaagagggttgtagtaccattacttgcatcacagatcttattgtacacattttgtactaaagaaaaccctgaagcagttgctcaaatactgttcaacatcagaaaatttatattggaaaaaacccctggaaaatgtaataaatttgtaaaaacagttttgaaaaactacagcttataaaacatgagggtctataatgcttggttgatagtacaaagtttattcaacatcagggaatttatattggagaaaaaccctacaaatgtaatcagtttggaaaaacatttttaaaaaaaccacagcatagaaaacaccacagggttcatactaaaatatgtttttgcagatgcagtaaaaatgaaaaaaatttaatccgaaattaagtttatgtaaatatctgagaattcacagtagaaatatctaaggcgcggacacttcagacattacactaaatcagtgctaagtacagaaaacaacacaaaataaaacttggtggataaattatttgtatataacattaaaagaagtagaagattttcagttataattacaattaaagtatacttttatcttgaaaaaattactgatttttaaattagtgaataatgatgtaattaaactctcaaataactttatgctcttttttcattcctgctatattcacatgtgaaagcatgtgaccaattgttgctgcaccaaagatatgagagattcttttattaggtgggcattatttaaaacattttttatggaacagtaaggatattaaagtgtaagatgcagccaggcatggtggctcatgcctgtgatcccagcactttgggaggctgaggccggtggatcacctgaggtcaggagtttgagaccagcctgaccaacatggtgaaaccctgtctttactaaaaatacaaaaatttaccaggcacctataatcccagctacttcaaaggctgaagcaggagaatcacttgaacctggaaagtggaggtctcagtgagccgaaatcataccattgcactccaacctgggcaacaaaagtcaaactccatctcaaaaagaaaaaaaaaaaaaaaagatgcgtgatgaaaatgtaactggagaggctctttgtggttaacttataaaggagtgatgcaggagataggttttcagagtaatattcttctgcattatagtgacaaaagttttttattttagttaaaattggttaaattagtaagtcattttacttattgtaattttatgtaattaaatgtacatttttaaatttttagattacatgtaaatataacttttaaaaaaatgtgttaagaccattgtacattcaatgaagcattattatgcttctaactttaacctatttcaccttactcaagagtgtatgtaaaagatggtaacaatatactatttggtaacataatggactaacatttctattaatctatttcaccagtggctttcaactgcaaataagttaaagaatatttttctataggttaaatattcttttttgtcttatttaaacttactgttcttaatttctgtgggtacatagtatgattttaattaccttattttattctttgtgctattcataattttttttgtttgtttggtttttttttttgagacagagtcttgctctcgcccaggctggagtgcagtggcgcgatcttggctcactgcaagctccgcctcccaggttcactccattctcctgcctcagcctcccaagtagctgggaccacaggcgcccactacttgtttgggtttttttttggagatggagtctcgctctgtcacccaggctggagtacagtggcatgatcttggctcactgcaacccccacctccccggttcaagtgattctcctgcctcagcctcccgaatagctgggattacaggcgtccaccatcacaccaggctaatttttgtatttttagtagagatggagtttcaccatgttggccaggatggtctcgatcttctgacctcatgatctgcctgcctcggcctcccagagttctgggaccacaggcatgagccactgcacctggccaaatgtgtatatatttatgcaatatataacatgttttgatacaggcatataatatgtattagtcacatcaggataaagtatctattaccttcagcatttatcctttgtattacaagccaattctacacttcattattttaatgtacaattaaattgttattgactacagggtcattttaattataaaaattatatagaagtataaataaagtccatacattcctgagtcatg

SEQ ID NO: 324112 - DNA, 2379 bp, Homo sapiens
ggctgcagttggagctctgcgtctcgtcttcgttcttctgtgtcctctgctgctagaggtccagcctctgtggctctgtgacctgcgggtattgggggatccacagctaagacgccaggaccccccggaagcctagaaatggtattgctgtctctaagccagacctgatcacctgtctggagcaagaaaaagagccttgggagcctatgaggagacatgaaatggtagccaaacccccagttatgtgttctcattttacccaagacttttggccagagcagcatataaaagatcctttccaaaaagcgacactgagaagatataaaaactgtgaacataaaaatgtacatttaaaaaaagaccataaaagtgtggatgagtgtaaggtgcacagaggaggttataatggatttaaccaatgtttgccagctacccagagcaaaatatttctatttgataaatgtgtgaaagcctttcataaattttcaaattcaaacagacataagataagccatactgaaaaaaaacttttcaaatgcaaagaatgtggcaaatcattttgcatgcttccacatctagctcaacataaaataattcataccagagtgaatttctgcaaatgtgaaaaatgtggaaaagcttttaactgcccttcaatcatcactaaacataagagaattaatactggagagaaaccctacacatgtgaagaatgtggcaaagtctttaattggtcctcacgccttactacacataaaaaaaattatactagatacaaactctacaaatgtgaagaatgtggcaaagcttttaacaagtcctcaatccttactacccataagataattcgcactggagagaaattctacaaatgtaaagaatgtgccaaagcttttaaccaatcctcaaaccttactgaacataagaaaattcatcctggagagaaaccttacaaatgtgaagaatgtggcaaagcctttaactggccctcaactcttactaaacataagagaattcatactggagagaaaccctacacatgtgaagaatgtggcaaagcttttaaccagttctcaaaccttactacacataagagaatccatactgcagagaaattctataaatgtacagaatgtggtgaagcttttagccggtcctcaaaccttactaaacataagaaaattcatactgaaaagaaaccctacaaatgtgaagaatgtggcaaagcttttaagtggtcctcaaagcttactgaacataagttaactcatactggagagaaaccctacaaatgtgaagaatgtggcaaagcctttaactggccctcaacccttactaaacataacagaattcatactggagagaaaccctacaaatgtgaagtatgtggcaaagcctttaaccagttctcaaaccttactacacataagagaattcatactgcagaaaaaccgtacaaatgtgaagaatgtggcaaagcttttagccggtcctcaaaccttactaaacataagaaaattcacattgaaaagaaaccctacaaatgtgaagaatgtggcaaagcttttaagtggtcctcaaagcttactgaacataagataactcatactggagagaaaccctacaaattgtgaagaatgtggcaaaacttttaattaatgctcataccttattgcacaggaaagaatttttacttggaaaaaggtatatacacaaagaatgtggaaaagccattaatatgtgctcatatcttactcaacatcagagagtctgtacttaataaaaccattataggaatctaaaaaaaaaaaaaaaacaaacaaaaaaaaaacacatttgtgtggcggcgcgcgcctcggggccccccgagaaaaggcgtttttcttacaaaccaaattccgtttgggggcgcgcccggggccccccagggttaccgtggcacccgtgtggcgcccacccgcgcgtgtttccccccagaggagaaaccccccggggcagacagcacaaaggcgcgcctggaggatctccctcccccgaagattaataaaaaacacgcgcccgggttggggaaccacgcaggcccttttgtttaaaagcaaaactccaagagaaatggaaggtcttcgaagcaggtccaacaacccgggcgaatctactaatccaccaaaagggagagttccccaccagggcaggagctctccataaatataaaaaaaattaaaccgcccccggcttcggagagggtagctcccacgacatggacaggcaatgactcgacaagcacaaaaactctcacacagcaacacaccacaaatgatcgcagaactcaccacacagctgacgacaaacacctataacaggccacaccacactcaaaac

SEQ ID NO: 324113 - DNA, 780 bp, Homo sapiens
caaaatccaaaaaatattgaaatccacaacactttgtgtcccaggcatttcacacaagggatgctcaatctatattttgaaactcatactttgctgtcattagagaaaaaacacaagtttgtttttttttgtaatagtgtcttgctatgttgcccaggctagactcaaactcctgagctaaagtgatcctcctgccttagcctcctgagtacctgggattacaggcacgtgccagcatgcccacctagacacaagttgttattgtacattttcaatagtcaagaaaaagtaagtaaattagaaggaaaaaaaaactacacaagggtttaaaaggcagacccttttaaaaagttttttatttattttcctcttttcatgataataatgttaaacctgacagctaaattgccaatacatactatgaataagatcttggtcttggaataaggtcatattcttcctttctaaggggaaacccgtaggatttttgtgcatccaatttgcagttcagttcagttaattatgccattgtagaccttccgtttgaggcttgcaaaattgtatattatccataaagcagccaccatgattttttaaaattatcattgaagccattcaccggagatgtcagcgtctgttggactccgctcacatcgagacaagaccgccacctgtcagaacagccactgcttctccacatttgatcctggctcggagcaatgcctgtctatatctttaaaagagaaaaaaaataaaatgacttgaattgttccaaagatg

SEQ ID NO: 324114 - DNA, 8035 bp, Homo sapiens
gagctggctgagccgcggcgcgggactgctcacctccaagcgctcgcgcggggatcgcggctcctgctcactttgcggcccgctgtcctcctgcccgccccgagggcccccggccggagcgcagagggagggggccgcgctcgccagcaccccgccgccttcccccgcctgggggaagaatgtgccaccagctgttctccgcttgcgagcgctgcgcccagtagtgaggaacttggaggaagaagagacaaaggctgccgtcgggacgggcgagttagggacttgggtttgggcgaacaaaaggtgagaaggacaagaagggaccgggcgatggcagcaggggagccccgcgggcgcgcgtcctcgggagtggcgccgtgacacgcatggtttccccggacccgcggcggcgctgacttccgcgagtcggagcggcactcggcgagtccgggactgcgctggaacaatggataacttcttcaccgagggaacacgggtctggctgagagaaaatggccagcattttccaagtactgtaaattcctgtgcagaaggcatcgtcgtcttccggacagactatggtcaggtattcacttacaagcagagcacaattacccaccagaaggtgactgctatgcaccccacgaacgaggagggcgtggatgacatggcgtccttgacagagctccatggcggctccatcatgtataacttattccagcggtataagagaaatcaaatatatacctacatcggctccatcctggcctccgtgaacccctaccagcccatcgccgggctgtacgagcctgccaccatggagcagtacagccggcgccacctgggcgagctgcccccgcacatcttcgccatcgccaacgagtgctaccgctgcctgtggaagcgccacgacaaccagtgcatcctcatcagtggtgaaagtggggcaggtaaaaccgaaagcactaaattgatcctcaagtttctgtcagtcatcagtcaacagtctttggaattgtccttaaaggagaagacatcctgtgttgaacgagctattcttgaaagcagccccatcatggaagctttcggcaatgcgaagaccgtgtacaacaacaactctagtcgctttgggaagtttgttcagctgaacatctgtcagaaaggaaatattcagggcgggagaattgtagattatttattagaaaaaaaccgagtagtaaggcaaaatcccggggaaaggaattatcacatattttatgcactgctggcagggctggaacatgaagaaagagaagaattttatttatctacgccagaaaactaccactacttgaatcagtctggatgtgtagaagacaagacaatcagtgaccaggaatcctttagggaagttattacggcaatggacgtgatgcagttcagcaaggaggaagtttgggaagtgtcgaggctgcttgctggtatactgcatcttgggaacatagaatttatcactgctggtggggcacaggtttccttcaaaacagctttgggcagatctgcggagttacttgggctggacccaacacagctcacagatgctttgacccagagatcaatgttcctcaggggagaagagatcctcacgcctctcaatgttcaacaggcagtagacagcagggactccctggccatggctctgtatgcgtgctgctttgagtgggtaatcaagaagatcaacagcaggatcaaaggcaatgaggacttcaagtctattggcatcctcgacatctttggatttgaaaactttgaggttaatcactttgaacagttcaatataaactatgcaaacgagaaacttcaggagtacttcaacaagcatattttttctttagaacaactagaatatagccgggaaggattagtgtgggaagatattgactggatagacaatggagaatgcctggacttgattgagaagaaacttggcctcctagcccttatcaatgaagaaagccattttcctcaagccacagacagcaccttattggagaagctacacagtcagcatgcgaataaccacttttatgtgaagcccagagttgcagttaacaattttggagtgaagcactatgctggagaggtgcaatatgatgtccgaggtatcttggagaagaacagagatacatttcgagatgaccttctcaatttgctaagagaaagccgatttgactttatctacgatctttttgaacatgtttcaagccgcaacaaccaggataccttgaaatgtggaagcaaacatcggcggcctacagtcagctcacagttcaaggactcactgcattccttaatggcaacgctaagctcctctaatcctttctttgttcgctgtatcaagccaaacatgcagaagatgccagaccagtttgaccaggcggttgtgctgaaccagctgcggtactcagggatgctggagactgtgagaatccgcaaagctgggtatgcggtccgaagaccctttcaggacttttacaaaaggtataaagtgctgatgaggaatctggctctgcctgaggacgtccgagggaagtgcacgagcctgctgcagctctatgatgcctccaacagcgagtggcagctggggaagaccaaggtctttcttcgagaatccttggaacagaaactggagaagcggagggaagaggaagtgagccacgcggccatggtgattcgggcccatgtcttgggcttcttagcacgaaaacaatacagaaaggtcctttattgtgtggtgataatacagaagaattacagagcattccttctgaggaggagatttttgcacctgaaaaaggcagccatagttttccagaagcaactcagaggtcagattgctcggagagtttacagacaattgctggcagagaaaagggagcaagaagaaaagaagaaacaggaagaggaagaaaagaagaaacgggaggaagaagaaagagaaagagagagagagcgaagagaagccgagctccgcgcccagcaggaagaagaaacgaggaagcagcaagaactcgaagccttgcagaagagccagaaggaagctgaactgacccgtgaactggagaaacagaaggaaaataagcaggtggaagagatcctccgtctggagaaagaaatcgaggacctgcagcgcatgaaggagcagcaggagctgtcgctgaccgaggcttccctgcagaagctgcaggagcggcgggaccaggagctccgcaggctggaggaggaagcgtgcagggcggcccaggagttcctcgagtccctcaatttcgacgagatcgacgagtgtgtccggaatatcgagcggtccctgtcggtgggaagcgaattttccagcgagctggctgagagcgcatgcgaggagaagcccaacttcaacttcagccagccctacccagaggaggaggtcgatgagggcttcgaagccgacgacgacgccttcaaggactcccccaaccccagcgagcacggccactcagaccagcgaacaagtggcatccggaccagcgatgactcttcagaggaggacccatacatgaacgacacggtggtgcccaccagccccagtgcggacagcacggtgctgctcgccccatcagtgcaggactccgggagcctacacaactcctccagcggcgagtccacctactgcatgccccagaacgctggggacttgccctccccagacggcgactacgactacgaccaggatgactatgaggacggtgccatcacttccggcagcagcgtgaccttctccaactcctacggcagccagtggtcccccgactaccgctgctctgtggggacctacaacagctcgggtgcctaccggttcagctctgagggggcgcagtcctcgtttgaagatagtgaagaggactttgattccaggtttgatacagatgatgagctttcataccggcgtgactctgtgtacagctgtgtcactctgccgtatttccacagctttctgtacatgaaaggtggcctgatgaactcttggaaacgccgctggtgcgtcctcaaggatgaaaccttcttgtggttccgctccaagcaggaggccctcaagcaaggctggctccacaaaaaaggggggggctcctccacgctgtccaggagaaattggaagaagcgctggtttgtcctccgccagtccaagctgatgtactttgaaaacgacagcgaggagaagctcaagggcaccgtagaagtgcgaacggcaaaagagatcatagataacaccaccaaggagaatgggatcgacatcattatggccgataggactttccacctgattgcagagtccccagaagatgccagccagtggttcagcgtgctgagtcaggtccacgcgtccacggaccaggagatccaggagatgcatgatgagcaggcaaacccacagaatgctgtgggcaccttggatgtggggctgattgattctgtgtgtgcctctgacagccctgatagacccaactcgtttgtgatcatcacggccaaccgggtgctgcactgcaacgccgacacgccggaggagatgcaccactggataaccctgctgcagaggtccaaaggggacaccagagtggagggccaggaattcatcgtgagaggatggttgcacaaagaggtgaagaacagtccaaagatgtcttcactgaaactgaagaaacggtggtttgtactcacccacaattccctggattactacaagagttcagagaagaacgcgctcaaactggggaccctggtcctcaacagcctctgctctgtcgtccccccagatgagaagatattcaaagagacaggctactggaacgtcaccgtgtacgggcgcaagcactgttaccggctctacaccaagctgctcaacgaggccacccggtggtccagtgccattcaaaacgtgactgacaccaaggccccgatcgacacccccacccagcagctgattcaagatatcaaggagaactgcctgaactcggatgtggtggaacagatttacaagcggaacccgatccttcgatacacccatcaccccttgcactccccgctcctgccccttccgtatggggacataaatctcaacttgctcaaagacaaaggctataccacccttcaggatgaggccatcaagatattcaattccctgcagcaactggagtccatgtctgacccaattccaataatccagggcatcctacagacagggcatgacctgcgacctctgcgggacgagctgtactgccagcttatcaaacagaccaacaaagtgccccaccccggcagtgtgggcaacctgtacagctggcagatcctgacatgcctgagctgcaccttcctgccgagtcgagggattctcaagtatctcaagttccatctgaaaaggatacgggaacagtttccaggaaccgagatggaaaaatacgctctcttcacttacgaatctcttaagaaaaccaaatgccgagagtttgtgccttcccgagatgaaatagaagctctgatccacaggcaggaaatgacatccacggtctattgccatggcggcggctcctgcaagatcaccatcaactcccacaccaccgctggggaggtggtggagaagctgatccgaggcctggccatggaggacagcaggaacatgtttgctttgtttgaatacaacggccacgtcgacaaagccattgaaagtcgaaccgtcgtagctgatgtcttagccaagtttgaaaagctggctgccacatccgaggttggggacctgccatggaaattctacttcaaactttactgcttcctggacacagacaacgtgccaaaagacagtgtggagtttgcatttatgtttgaacaggcccacgaagcggttatccatggccaccatccagccccggaagaaaacctccaggttcttgctgccctgcgactccagtatctgcagggggattatactctgcacgctgccatcccacctctcgaagaggtttattccctgcagagactcaaggcccgcatcagccagtcaaccaaaaccttcaccccttgtgaacggctggagaagaggcggacgagcttcctagaggggaccctgaggcggagcttccggacaggatccgtggtccggcagaaggtcgaggaggagcagatgctggacatgtggattaaggaagaagtctcctctgctcgagccagtatcattgacaagtggaggaaatttcagggaatgaaccaggaacaggccatggccaagtacatggccttgatcaaggagtggcctggctatggctcgacgctgtttgatgtggagtgcaaggaaggtggcttccctcaggaactctggttgggtgtcagcgcggacgccgtctccgtctacaagcgtggagagggaagaccactggaagtcttccagtatgaacacatcctctcttttggggcacccctggcgaatacgtataagatcgtggtcgatgagagggagctgctctttgaaaccagtgaggtggtggatgtggccaagctcatgaaagcctacatcagcatgatcgtgaagaagcgctacagcacgacacgctccgccagcagccagggcagctccaggtgaaggcgggacagagcccacctgtctttgctacctgaacgcaccaccctctggcctaggctggctccagtgtgccatgcccagccaaaacaaacacagagctgcccaggctttctggaagcttctggtctgagggaggtgtctccgaggatccttttgcctgccgccttcattgatcctgtattaagctgtcaactttaacagtctgcacagtttccaaagctttactactcttagaggacacatgccttaaaaaaggaggggaggaaccacgctgccaccaaagcagccggaagtgccttaacttgtggaaccaacactaatcgaccgtaactgtgctactgaagggaactgcctttcccccttctgggggagacttaacagagcgtggaaggggggcattctctgtcaatgatgcactaacctcccaacctgatttccccgaatctgagggaaggtgagggagtgggaagggggatggagagctcgaggggacagtgtgtttgagctggagtgctgcgggcagcctttctcatggaatgacatgaatcaacttttttctttgtttcatcttttaagtgtacgtgcttgcctgttcgtgcatgtgttcataaactcaacactttaatcatggtttcatgagcattaaaaagcaaagggaaaaaggatgtgtaatggtgtacacagtctgtatattttaataatgcagagctatagtctcaattgttactttataaggtggttttattaacaaacccaaatcctggattttcctgtctttgctgtattttgaaaaacacgtgttgactccattgttttacatgtagcaaagtctgccatctgtgtctgctgtattataaacagataagcagcctacaagataactgtatttataaaccactcttcaacagctggctccagtgctggttttagaacaagaatgaagtcattttggagtctttcatgtctaaaagatttaagttaaaaacaaagtgttacttggaaggttagcttctatcattctggatagattacagatataataaccatgttgactatgggggagagacgctgcattccagaaacgtcttaacacttgagtgaatcttcaaaggaccctgacattaaatgctgaggctttaatacacacatattttatcccaagtttataatggtggtctgaacaaggcacctgtaaataaatcagcatttatgaccagaagaaaaataatctggtcttggactttttatttttatatggaaaagttttaaggacttgggccaactaagtctacccacacgaaaaaagaaatttgccttgtccctttgtgtacaaccatgcaaaactgtttgttggctcacagaagttctgacaataaaagatactagctaaca

SEQ ID NO: 324115 - DNA, 708 bp, Homo sapiens
cagatataataaccatgttgactatgggggagagacgctaaccttccaagtaacactttattaacaaacccaaatcctggattttcctgtctttgctgtattttgaaaaacacgtgttgactccattgttttacatgtagcaaagtctgccatctgtgtctgctgtattataaacagataagcagcctacaagataactgtatttataaaccactcttcaacagctggctccagtgctggttttagaacaagaatgaagtcattttggagtctttcatgtctaaaagatttaagttaaaaacaaagtgttacttggaaggttagcttctatcattctggatagattacagatataataaccatgttgactatgggggagagacgctgcattccagaaacgtcttaacacttgagtgaatcttcaaaggaccctgacattaaatgctgaggctttaatacacacatattttatcccaagtttataatggtggtctgaacaaggcacctgtaaataaatcagcatttatgaccagaagaaaaataatctggtcttggactttttatttttatatggaaaagttttaaggacttgggccaactaagtctacccacacgaaaaaagaaatttgccttgtccctttgtgtacaaccatgcaaaactgtttgttggctcacagaagttctgacaataaaagatactagctaaca

SEQ ID NO: 324116 - DNA, 1898 bp, Homo sapiens
  misc_feature (121)..(121): n is a, c, g, or t
  misc_feature (178)..(178): n is a, c, g, or t
  misc_feature (479)..(479): n is a, c, g, or t
gagacagagttttgctcttgttgcccaggctagagtgcaatggcatgatctcggctcattgcaacatctgcctcctgggttcaagcgattctcctgccttagcctcctgagtagctgagantacaggcgcccgccacaacgcctggctaattttttgtacttttagtagagatggggnttcaccgtgttggccaggctggtctcgaacttctgacctcaggtgatccacccgcctcggcctcccaaagtgctgggattacaggcgttagccacggcgcccggccaagaattttcatatgataggatgaggcatgactctttcaagtattaacaacgctgcagaggtgagttggcagcacagttgctcccagtgagacattggctctttaggggttttttgtatttaaattgaactgcacaaaatgaagcgggcccttgccaagaagtcactggtgcttgctccattcaccagtgggggnccattcactgctttggtctacagaaccttggcacagcctagttcctcccagcagccagcccccatcagtctaaaaattaacagttagtgtttgcctcctaggatacgggaacagtttccaggaaccgagatggaaaaatacgctctcttcacttacgaatctcttaagaaaaccaaatgccgagagtttgtgccttcccgagatgaaatagaagctctgatccacaggcaggaaatgacatccacggtctattgccatggcggcggctcctgcaagatcaccatcaactcccacaccaccgctggggaggtgaggagaggcagctgctgcttgttctgttagatgcctttgctgcagatacacctgcgtcaggaacattgtgcagcattagagtggctgtcctgcacagttgcagtttgcttagtacagctctcaatactaaggaaatgcatgtaacccagaagcaaccacacgaatatagagataaaaatatatatattgagtggaaacacagagataaagtacctgagacataatcttgctaatctgagaagcagctgagtgtctagcagagctgcagacctggctcaggtccagccactttgatgagggtttattgcagtgcttctgcaacaaagtgtttgtttgcacgtgactagctagatgaatatcagatgaacacattttctttttaaaatttgaacttactattataaaaccagttggccaaaagggtggtaatccaataaccaccaccccgacccccaccccccaaggcttcttatggaaaaaaaaaaaacgtcatctggagtctctgttgttccttggagttcataaatttatcagccaaaagacaggactgaagcttttcacccgcttttcctgttaatataggtttgcaagaaatcagcccagcatctgcctctaccgatgggcaaaataccctgagttattttcagcaagaaagagataaacctaatctcaagagaacaaagggaaaatagtacttttgaaattctgggatgaccacacgggtaacatttttaggaggctggagacgcccttgtgccagcagctccctctgggatcaggtgatggcacgttctgggaacacgtgttggggccgcagcctgtggaactgaagtccccctggtgtgtcttccaggtggtggagaagctgatccgaggcctggccatggaggacagcaggaacatgtttgctttgtttgaatacaacggccacgtcgacaaagccattgaaagtcgaaccgtcgtagctgatgtcttagccaagtttgaaaagtaggttccttttccctactgtgtcagaagagcaaataagagaaattgcagagcagggttcagggtttgagcttcccattccatttgtggcttcacgctgtattggagttagtttta

SEQ ID NO: 324117 - DNA, 550 bp, Homo sapiens
agctataagcaggatacaactatgaccaggagacgataagagacaggagaacatgcatatacgagagaaagcgtgaccttctccaactcctacggcagccagtggtcccccgactaccgctgctctgtggggacctacaacagctcgggtgcctaccggttcagctctgagggggcgcagtcctcggtaagtacctgcctggcgtgtcccagtgaaatgggtggccggtcacacccacccctgttgcatcctcaagttgaatgaagatacccgtaggatatctgtgcaaagattgcagagtcgtggtcttagagatcatcttaaaccttttgcttattccataagccaattgcattcataagtagaactttgatgtgcctgtttcagttttagcacaaagcctagagctgagctgtgcccaagacttcagaaaactggctatttatttatttattgtaggttgtacggcgtgtgcagtttggtgtctcggcgtgtgcagtgtggtcgctcggcgtgtgcacgtgtgcagtgtggatactcggcgtgtgca

SEQ ID NO: 324118 - DNA, 8018 bp, Homo sapiens
gagctggctgagccgcggcgcgggactgctcacctccaagcgctcgcgcggggatcgcggctcctgctcactttgcggcccgctgtcctcctgcccgccccgagggcccccggccggagcgcagagggagggggccgcgctcgccagcaccccgccgccttcccccgcctgggggaagaatgtgccaccagctgttctccgcttgcgagcgctgcgcccagtagtgaggaacttggaggaagaagagacaaaggctgccgtcgggacgggcgagttagggacttgggtttgggcgaacaaaaggtgagaaggacaagaagggaccgggcgatggcagcaggggagccccgcgggcgcgcgtcctcgggagtggcgccgtgacacgcatggtttccccggacccgcggcggcgctgacttccgcgagtcggagcggcactcggcgagtccgggactgcgctggaacaatggataacttcttcaccgagggaacacgggtctggctgagagaaaatggccagcattttccaagtactgtaaattcctgtgcagaaggcatcgtcgtcttccggacagactatggtcaggtattcacttacaagcagagcacaattacccaccagaaggtgactgctatgcaccccacgaacgaggagggcgtggatgacatggcgtccttgacagagctccatggcggctccatcatgtataacttattccagcggtataagagaaatcaaatatatacctacatcggctccatcctggcctccgtgaacccctaccagcccatcgccgggctgtacgagcctgccaccatggagcagtacagccggcgccacctgggcgagctgcccccgcacatcttcgccatcgccaacgagtgctaccgctgcctgtggaagcgccacgacaaccagtgcatcctcatcagtggtgaaagtggggcaggtaaaaccgaaagcactaaattgatcctcaagtttctgtcagtcatcagtcaacagtctttggaattgtccttaaaggagaagacatcctgtgttgaacgagctattcttgaaagcagccccatcatggaagctttcggcaatgcgaagaccgtgtacaacaacaactctagtcgctttgggaagtttgttcagctgaacatctgtcagaaaggaaatattcagggcgggagaattgtagattatttattagaaaaaaaccgagtagtaaggcaaaatcccggggaaaggaattatcacatattttatgcactgctggcagggctggaacatgaagaaagagaagaattttatttatctacgccagaaaactaccactacttgaatcagtctggatgtgtagaagacaagacaatcagtgaccaggaatcctttagggaagttattacggcaatggacgtgatgcagttcagcaaggaggaagtttgggaagtgtcgaggctgcttgctggtatactgcatcttgggaacatagaatttatcactgctggtggggcacaggtttccttcaaaacagctttgggcagatctgcggagttacttgggctggacccaacacagctcacagatgctttgacccagagatcaatgttcctcaggggagaagagatcctcacgcctctcaatgttcaacaggcagtagacagcagggactccctggccatggctctgtatgcgtgctgctttgagtgggtaatcaagaagatcaacagcaggatcaaaggcaatgaggacttcaagtctattggcatcctcgacatctttggatttgaaaactttgaggttaatcactttgaacagttcaatataaactatgcaaacgagaaacttcaggagtacttcaacaagcatattttttctttagaacaactagaatatagccgggaaggattagtgtgggaagatattgactggatagacaatggagaatgcctggacttgattgagaagaaacttggcctcctagcccttatcaatgaagaaagccattttcctcaagccacagacagcaccttattggagaagctacacagtcagcatgcgaataaccacttttatgtgaagcccagagttgcagttaacaattttggagtgaagcactatgctggagaggtgcaatatgatgtccgaggtatcttggagaagaacagagatacatttcgagatgaccttctcaatttgctaagagaaagccgatttgactttatctacgatctttttgaacatgtttcaagccgcaacaaccaggataccttgaaatgtggaagcaaacatcggcggcctacagtcagctcacagttcaaggactcactgcattccttaatggcaacgctaagctcctctaatcctttctttgttcgctgtatcaagccaaacatgcagaagatgccagaccagtttgaccaggcggttgtgctgaaccagctgcggtactcagggatgctggagactgtgagaatccgcaaagctgggtatgcggtccgaagaccctttcaggacttttacaaaaggtataaagtgctgatgaggaatctggctctgcctgaggacgtccgagggaagtgcacgagcctgctgcagctctatgatgcctccaacagcgagtggcagctggggaagaccaaggtctttcttcgagaatccttggaacagaaactggagaagcggagggaagaggaagtgagccacgcggccatggtgattcgggcccatgtcttgggcttcttagcacgaaaacaatacagaaaggtcctttattgtgtggtgataatacagaagaattacagagcattccttctgaggaggagatttttgcacctgaaaaaggcagccatagttttccagaagcaactcagaggtcagattgctcggagagtttacagacaattgctggcagagaaaagggagcaagaagaaaagaagaaacaggaagaggaagaaaagaagaaacgggaggaagaagaaagagaaagagagagagagcgaagagaagccgagctccgcgcccagcaggaagaagaaacgaggaagcagcaagaactcgaagccttgcagaagagccagaaggaagctgaactgacccgtgaactggagaaacagaaggaaaataagcaggtggaagagatcctccgtctggagaaagaaatcgaggacctgcagcgcatgaaggagcagcaggagctgtcgctgaccgaggcttccctgcagaagctgcaggagcggcgggaccaggagctccgcaggctggaggaggaagcgtgcagggcggcccaggagttcctcgagtccctcaatttcgacgagatcgacgagtgtgtccggaatatcgagcggtccctgtcggtgggaagcgaattttccagcgagctggctgagagcgcatgcgaggagaagcccaacttcaacttcagccagccctacccagaggaggaggtcgatgagggcttcgaagccgacgacgacgccttcaaggactcccccaaccccagcgagcacggccactcagaccagcgaacaagtggcatccggaccagcgatgactcttcagaggaggacccatacatgaacgacacggtggtgcccaccagccccagtgcggacagcacggtgctgctcgccccatcagtgcaggactccgggagcctacacaactcctccagcggcgagtccacctactgcatgccccagaacgctggggacttgccctccccagacggcgactacgactacgaccaggatgactatgaggacggtgccatcacttccggcagcagcgtgaccttctccaactcctacggcagccagtggtcccccgactaccgctgctctgtggggacctacaacagctcgggtgcctaccggttcagctctgagggggcgcagtcctcgtttgaagatagtgaagaggactttgattccaggtttgatacagatgatgagctttcataccggcgtgactctgtgtacagctgtgtcactctgccgtatttccacagctttctgtacatgaaaggtggcctgatgaactcttggaaacgccgctggtgcgtcctcaaggatgaaaccttcttgtggttccgctccaagcaggaggccctcaagcaaggctggctccacaaaaaaggggggggctcctccacgctgtccaggagaaattggaagaagcgctggtttgtcctccgccagtccaagctgatgtactttgaaaacgacagcgaggagaagctcaagggcaccgtagaagtgcgaacggcaaaagagatcatagataacaccaccaaggagaatgggatcgacatcattatggccgataggactttccacctgattgcagagtccccagaagatgccagccagtggttcagcgtgctgagtcaggtccacgcgtccacggaccaggagatccaggagatgcatgatgagcaggcaaacccacagaatgctgtgggcaccttggatgtggggctgattgattctgtgtgtgcctctgacagccctgatagacccaactcgtttgtgatcatcacggccaaccgggtgctgcactgcaacgccgacacgccggaggagatgcaccactggataaccctgctgcagaggtccaaaggggacaccagagtggagggccaggaattcatcgtgagaggatggttgcacaaagaggtgaagaacagtccaaagatgtcttcactgaaactgaagaaacggtggtttgtactcacccacaattccctggattactacaagagttcagagaagaacgcgctcaaactggggaccctggtcctcaacagcctctgctctgtcgtccccccagatgagaagatattcaaagagacaggctactggaacgtcaccgtgtacgggcgcaagcactgttaccggctctacaccaagctgctcaacgaggccacccggtggtccagtgccattcaaaacgtgactgacaccaaggccccgatcgacacccccacccagcagctgattcaagatatcaaggagaactgcctgaactcggatgtggtggaacagatttacaagcggaacccgatccttcgatacacccatcaccccttgcactccccgctcctgccccttccgtatggggacataaatctcaacttgctcaaagacaaaggctataccacccttcaggatgaggccatcaagatattcaattccctgcagcaactggagtccatgtctgacccaattccaataatccagggcatcctacagacagggcatgacctgcgacctctgcgggacgagctgtactgccagcttatcaaacagaccaacaaagtgccccaccccggcagtgtgggcaacctgtacagctggcagatcctgacatgcctgagctgcaccttcctgccgagtcgagggattctcaagtatctcaagttccatctgaaaaggatacgggaacagtttccaggaaccgagatggaaaaatacgctctcttcacttacgaatctcttaagaaaaccaaatgccgagaatgaaatagaagctctgatccacaggcaggaaatgacatccacggtctattgccatggcggcggctcctgcaagatcaccatcaactcccacaccaccgctggggaggtggtggagaagctgatccgaggcctggccatggaggacagcaggaacatgtttgctttgtttgaatacaacggccacgtcgacaaagccattgaaagtcgaaccgtcgtagctgatgtcttagccaagtttgaaaagctggctgccacatccgaggttggggacctgccatggaaattctacttcaaactttactgcttcctggacacagacaacgtgccaaaagacagtgtggagtttgcatttatgtttgaacaggcccacgaagcggttatccatggccaccatccagccccggaagaaaacctccaggttcttgctgccctgcgactccagtatctgcagggggattatactctgcacgctgccatcccacctctcgaagaggtttattccctgcagagactcaaggcccgcatcagccagtcaaccaaaaccttcaccccttgtgaacggctggagaagaggcggacgagcttcctagaggggaccctgaggcggagcttccggacaggatccgtggtccggcagaaggtcgaggaggagcagatgctggacatgtggattaaggaagaagtctcctctgctcgagccagtatcattgacaagtggaggaaatttcagggaatgaaccaggaacaggccatggccaagtacatggccttgatcaaggagtggcctggctatggctcgacgctgtttgatgtggagtgcaaggaaggtggcttccctcaggaactctggttgggtgtcagcgcggacgccgtctccgtctacaagcgtggagagggaagaccactggaagtcttccagtatgaacacatcctctcttttggggcacccctggcgaatacgtataagatcgtggtcgatgagagggagctgctctttgaaaccagtgaggtggtggatgtggccaagctcatgaaagcctacatcagcatgatcgtgaagaagcgctacagcacgacacgctccgccagcagccagggcagctccaggtgaaggcgggacagagcccacctgtctttgctacctgaacgcaccaccctctggcctaggctggctccagtgtgccatgcccagccaaaacaaacacagagctgcccaggctttctggaagcttctggtctgagggaggtgtctccgaggatccttttgcctgccgccttcattgatcctgtattaagctgtcaactttaacagtctgcacagtttccaaagctttactactcttagaggacacatgccttaaaaaaggaggggaggaaccacgctgccaccaaagcagccggaagtgccttaacttgtggaaccaacactaatcgaccgtaactgtgctactgaagggaactgcctttcccccttctgggggagacttaacagagcgtggaaggggggcattctctgtcaatgatgcactaacctcccaacctgatttccccgaatctgagggaaggtgagggagtgggaagggggatggagagctcgaggggacagtgtgtttgagctggagtgctgcgggcagcctttctcatggaatgacatgaatcaacttttttctttgtttcatcttttaagtgtacgtgcttgcctgttcgtgcatgtgttcataaactcaacactttaatcatggtttcatgagcattaaaaagcaaagggaaaaaggatgtgtaatggtgtacacagtctgtatattttaataatgcagagctatagtctcaattgttactttataaggtggttttattaacaaacccaaatcctggattttcctgtctttgctgtattttgaaaaacacgtgttgactccattgttttacatgtagcaaagtctgccatctgtgtctgctgtattataaacagataagcagcctacaagataactgtatttataaaccactcttcaacagctggctccagtgctggttttagaacaagaatgaagtcattttggagtctttcatgtctaaaagatttaagttaaaaacaaagtgttacttggaaggttagcttctatcattctggatagattacagatataataaccatgttgactatgggggagagacgctgcattccagaaacgtcttaacacttgagtgaatcttcaaaggaccctgacattaaatgctgaggctttaatacacacatattttatcccaagtttataatggtggtctgaacaaggcacctgtaaataaatcagcatttatgaccagaagaaaaataatctggtcttggactttttatttttatatggaaaagttttaaggacttgggccaactaagtctacccacacgaaaaaagaaatttgccttgtccctttgtgtacaaccatgcaaaactgtttgttggctcacagaagttctgacaataaaagatactagctaaca

SEQ ID NO: 324119 - DNA, 5798 bp, Homo sapiens
cagcacagcccgagacgcaccacataaaaggctgggaacaccagccagccgaagaaagcccatttttgtgtctgtcagcttagatgcccttgcccggactgctaaagatgcagctatttacagtggacagaaactgaaggggtgaaagaaaacccaagatgccagaccagtttgaccaggcggttgtgctgaaccagctgcggtactcagggatgctggagactgtgagaatccgcaaagctgggtatgcggtccgaagaccctttcaggacttttacaaaaggtataaagtgctgatgaggaatctggctctgcctgaggacgtccgagggaagtgcacgagcctgctgcagctctatgatgcctccaacagcgagtggcagctggggaagaccaaggtctttcttcgagaatccttggaacagaaactggagaagcggagggaagaggaagtgagccacgcggccatggtgattcgggcccatgtcttgggcttcttagcacgaaaacaatacagaaaggtcctttattgtgtggtgataatacagaagaattacagagcattccttctgaggaggagatttttgcacctgaaaaaggcagccatagttttccagaagcaactcagaggtcagattgctcggagagtttacagacaattgctggcagagaaaagggagcaagaagaaaagaagaaacaggaagaggaagaaaagaagaaacgggaggaagaagaaagagaaagagagagagagcgaagagaagccgagctccgcgcccagcaggaagaagaaacgaggaagcagcaagaactcgaagccttgcagaagagccagaaggaagctgaactgacccgtgaactggagaaacagaaggaaaataagcaggtggaagagatcctccgtctggagaaagaaatcgaggacctgcagcgcatgaaggagcagcaggagctgtcgctgaccgaggcttccctgcagaagctgcaggagcggcgggaccaggagctccgcaggctggaggaggaagcgtgcagggcggcccaggagttcctcgagtccctcaatttcgacgagatcgacgagtgtgtccggaatatcgagcggtccctgtcggtgggaagcgaattttccagcgagctggctgagagcgcatgcgaggagaagcccaacttcaacttcagccagccctacccagaggaggaggtcgatgagggcttcgaagccgacgacgacgccttcaaggactcccccaaccccagcgagcacggccactcagaccagcgaacaagtggcatccggaccagcgatgactcttcagaggaggacccatacatgaacgacacggtggtgcccaccagccccagtgcggacagcacggtgctgctcgccccatcagtgcaggactccgggagcctacacaactcctccagcggcgagtccacctactgcatgccccagaacgctggggacttgccctccccagacggcgactacgactacgaccaggatgactatgaggacggtgccatcacttccggcagcagcgtgaccttctccaactcctacggcagccagtggtcccccgactaccgctgctctgtggggacctacaacagctcgggtgcctaccggttcagctctgagggggcgcagtcctcgtttgaagatagtgaagaggactttgattccaggtttgatacagatgatgagctttcataccggcgtgactctgtgtacagctgtgtcactctgccgtatttccacagctttctgtacatgaaaggtggcctgatgaactcttggaaacgccgctggtgcgtcctcaaggatgaaaccttcttgtggttccgctccaagcaggaggccctcaagcaaggctggctccacaaaaaaggggggggctcctccacgctgtccaggagaaattggaagaagcgctggtttgtcctccgccagtccaagctgatgtactttgaaaacgacagcgaggagaagctcaagggcaccgtagaagtgcgaacggcaaaagagatcatagataacaccaccaaggagaatgggatcgacatcattatggccgataggactttccacctgattgcagagtccccagaagatgccagccagtggttcagcgtgctgagtcaggtccacgcgtccacggaccaggagatccaggagatgcatgatgagcaggcaaacccacagaatgctgtgggcaccttggatgtggggctgattgattctgtgtgtgcctctgacagccctgatagacccaactcgtttgtgatcatcacggccaaccgggtgctgcactgcaacgccgacacgccggaggagatgcaccactggataaccctgctgcagaggtccaaaggggacaccagagtggagggccaggaattcatcgtgagaggatggttgcacaaagaggtgaagaacagtccaaagatgtcttcactgaaactgaagaaacggtggtttgtactcacccacaattccctggattactacaagagttcagagaagaacgcgctcaaactggggaccctggtcctcaacagcctctgctctgtcgtccccccagatgagaagatattcaaagagacaggctactggaacgtcaccgtgtacgggcgcaagcactgttaccggctctacaccaagctgctcaacgaggccacccggtggtccagtgccattcaaaacgtgactgacaccaaggccccgatcgacacccccacccagcagctgattcaagatatcaaggagaactgcctgaactcggatgtggtggaacagatttacaagcggaacccgatccttcgatacacccatcaccccttgcactccccgctcctgccccttccgtatggggacataaatctcaacttgctcaaagacaaaggctataccacccttcaggatgaggccatcaagatattcaattccctgcagcaactggagtccatgtctgacccaattccaataatccagggcatcctacagacagggcatgacctgcgacctctgcgggacgagctgtactgccagcttatcaaacagaccaacaaagtgccccaccccggcagtgtgggcaacctgtacagctggcagatcctgacatgcctgagctgcaccttcctgccgagtcgagggattctcaagtatctcaagttccatctgaaaaggatacgggaacagtttccaggaaccgagatggaaaaatacgctctcttcacttacgaatctcttaagaaaaccaaatgccgagagtttgtgccttcccgagatgaaatagaagctctgatccacaggcaggaaatgacatccacggtctattgccatggcggcggctcctgcaagatcaccatcaactcccacaccaccgctggggaggtggtggagaagctgatccgaggcctggccatggaggacagcaggaacatgtttgctttgtttgaatacaacggccacgtcgacaaagccattgaaagtcgaaccgtcgtagctgatgtcttagccaagtttgaaaagctggctgccacatccgaggttggggacctgccatggaaattctacttcaaactttactgcttcctggacacagacaacgtgccaaaagacagtgtggagtttgcatttatgtttgaacaggcccacgaagcggttatccatggccaccatccagccccggaagaaaacctccaggttcttgctgccctgcgactccagtatctgcagggggattatactctgcacgctgccatcccacctctcgaagaggtttattccctgcagagactcaaggcccgcatcagccagtcaaccaaaaccttcaccccttgtgaacggctggagaagaggcggacgagcttcctagaggggaccctgaggcggagcttccggacaggatccgtggtccggcagaaggtcgaggaggagcagatgctggacatgtggattaaggaagaagtctcctctgctcgagccagtatcattgacaagtggaggaaatttcagggaatgaaccaggaacaggccatggccaagtacatggccttgatcaaggagtggcctggctatggctcgacgctgtttgatgtggagtgcaaggaaggtggcttccctcaggaactctggttgggtgtcagcgcggacgccgtctccgtctacaagcgtggagagggaagaccactggaagtcttccagtatgaacacatcctctcttttggggcacccctggcgaatacgtataagatcgtggtcgatgagagggagctgctctttgaaaccagtgaggtggtggatgtggccaagctcatgaaagcctacatcagcatgatcgtgaagaagcgctacagcacgacacgctccgccagcagccagggcagctccaggtgaaggcgggacagagcccacctgtctttgctacctgaacgcaccaccctctggcctaggctggctccagtgtgccatgcccagccaaaacaaacacagagctgcccaggctttctggaagcttctggtctgagggaggtgtctccgaggatccttttgcctgccgccttcattgatcctgtattaagctgtcaactttaacagtctgcacagtttccaaagctttactactcttagaggacacatgccttaaaaaaggaggggaggaaccacgctgccaccaaagcagccggaagtgccttaacttgtggaaccaacactaatcgaccgtaactgtgctactgaagggaactgcctttcccccttctgggggagacttaacagagcgtggaaggggggcattctctgtcaatgatgcactaacctcccaacctgatttccccgaatctgagggaaggtgagggagtgggaagggggatggagagctcgaggggacagtgtgtttgagctggagtgctgcgggcagcctttctcatggaatgacatgaatcaacttttttctttgtttcatcttttaagtgtacgtgcttgcctgttcgtgcatgtgttcataaactcaacactttaatcatggtttcatgagcattaaaaagcaaagggaaaaaggatgtgtaatggtgtacacagtctgtatattttaataatgcagagctatagtctcaattgttactttataaggtggttttattaacaaacccaaatcctggattttcctgtctttgctgtattttgaaaaacacgtgttgactccattgttttacatgtagcaaagtctgccatctgtgtctgctgtattataaacagataagcagcctacaagataactgtatttataaaccactcttcaacagctggctccagtgctggttttagaacaagaatgaagtcattttggagtctttcatgtctaaaagatttaagttaaaaacaaagtgttacttggaaggttagcttctatcattctggatagattacagatataataaccatgttgactatgggggagagacgctgcattccagaaacgtcttaacacttgagtgaatcttcaaaggaccctgacattaaatgctgaggctttaatacacacatattttatcccaagtttataatggtggtctgaacaaggcacctgtaaataaatcagcatttatgaccagaagaaaaataatctggtcttggactttttatttttatatggaaaagttttaaggacttgggccaactaagtctacccacacgaaaaaagaaatttgccttgtccctttgtgtacaaccatgcaaaactgtttgttggctcacagaagttctgacaataaaagatactagctaaca

SEQ ID NO: 324120 - DNA, 7980 bp, Homo sapiens
gagctggctgagccgcggcgcgggactgctcacctccaagcgctcgcgcggggatcgcggctcctgctcactttgcggcccgctgtcctcctgcccgccccgagggcccccggccggagcgcagagggagggggccgcgctcgccagcaccccgccgccttcccccgcctgggggaagaatgtgccaccagctgttctccgcttgcgagcgctgcgcccagtagtgaggaacttggaggaagaagagacaaaggctgccgtcgggacgggcgagttagggacttgggtttgggcgaacaaaaggtgagaaggacaagaagggaccgggcgatggcagcaggggagccccgcgggcgcgcgtcctcgggagtggcgccgtgacacgcatggtttccccggacccgcggcggcgctgacttccgcgagtcggagcggcactcggcgagtccgggactgcgctggaacaatggataacttcttcaccgagggaacacgggtctggctgagagaaaatggccagcattttccaagtactgtaaattcctgtgcagaaggcatcgtcgtcttccggacagactatggtcaggtattcacttacaagcagagcacaattacccaccagaaggtgactgctatgcaccccacgaacgaggagggcgtggatgacatggcgtccttgacagagctccatggcggctccatcatgtataacttattccagcggtataagagaaatcaaatatatacctacatcggctccatcctggcctccgtgaacccctaccagcccatcgccgggctgtacgagcctgccaccatggagcagtacagccggcgccacctgggcgagctgcccccgcacatcttcgccatcgccaacgagtgctaccgctgcctgtggaagcgccacgacaaccagtgcatcctcatcagtggtgaaagtggggcaggtaaaaccgaaagcactaaattgatcctcaagtttctgtcagtcatcagtcaacagtctttggaattgtccttaaaggagaagacatcctgtgttgaacgagctattcttgaaagcagccccatcatggaagctttcggcaatgcgaagaccgtgtacaacaacaactctagtcgctttgggaagtttgttcagctgaacatctgtcagaaaggaaatattcagggcgggagaattgtagattatttattagaaaaaaaccgagtagtaaggcaaaatcccggggaaaggaattatcacatattttatgcactgctggcagggctggaacatgaagaaagagaagaattttatttatctacgccagaaaactaccactacttgaatcagtctggatgtgtagaagacaagacaatcagtgaccaggaatcctttagggaagttattacggcaatggacgtgatgcagttcagcaaggaggaagtttgggaagtgtcgaggctgcttgctggtatactgcatcttgggaacatagaatttatcactgctggtggggcacaggtttccttcaaaacagctttgggcagatctgcggagttacttgggctggacccaacacagctcacagatgctttgacccagagatcaatgttcctcaggggagaagagatcctcacgcctctcaatgttcaacaggcagtagacagcagggactccctggccatggctctgtatgcgtgctgctttgagtgggtaatcaagaagatcaacagcaggatcaaaggcaatgaggacttcaagtctattggcatcctcgacatctttggatttgaaaactttgaggttaatcactttgaacagttcaatataaactatgcaaacgagaaacttcaggagtacttcaacaagcatattttttctttagaacaactagaatatagccgggaaggattagtgtgggaagatattgactggatagacaatggagaatgcctggacttgattgagaagaaacttggcctcctagcccttatcaatgaagaaagccattttcctcaagccacagacagcaccttattggagaagctacacagtcagcatgcgaataaccacttttatgtgaagcccagagttgcagttaacaattttggagtgaagcactatgctggagaggtgcaatatgatgtccgaggtatcttggagaagaacagagatacatttcgagatgaccttctcaatttgctaagagaaagccgatttgactttatctacgatctttttgaacatgtttcaagccgcaacaaccaggataccttgaaatgtggaagcaaacatcggcggcctacagtcagctcacagttcaaggactcactgcattccttaatggcaacgctaagctcctctaatcctttctttgttcgctgtatcaagccaaacatgcagaagatgccagaccagtttgaccaggcggttgtgctgaaccagctgcggtactcagggatgctggagactgtgagaatccgcaaagctgggtatgcggtccgaagaccctttcaggacttttacaaaaggtataaagtgctgatgaggaatctggctctgcctgaggacgtccgagggaagtgcacgagcctgctgcagctctatgatgcctccaacagcgagtggcagctggggaagaccaaggtctttcttcgagaatccttggaacagaaactggagaagcggagggaagaggaagtgagccacgcggccatggtgattcgggcccatgtcttgggcttcttagcacgaaaacaatacagaaaggtcctttattgtgtggtgataatacagaagaattacagagcattccttctgaggaggagatttttgcacctgaaaaaggcagccatagttttccagaagcaactcagaggtcagattgctcggagagtttacagacaattgctggcagagaaaagggagcaagaagaaaagaagaaacaggaagaggaagaaaagaagaaacgggaggaagaagaaagagaaagagagagagagcgaagagaagccgagctccgcgcccagcaggaagaagaaacgaggaagcagcaagaactcgaagccttgcagaagagccagaaggaagctgaactgacccgtgaactggagaaacagaaggaaaataagcaggtggaagagatcctccgtctggagaaagaaatcgaggacctgcagcgcatgaaggagcagcaggagctgtcgctgaccgaggcttccctgcagaagctgcaggagcggcgggaccaggagctccgcaggctggaggaggaagcgtgcagggcggcccaggagttcctcgagtccctcaatttcgacgagatcgacgagtgtgtccggaatatcgagcggtccctgtcggtgggaagcgaattttccagcgagctggctgagagcgcatgcgaggagaagcccaacttcaacttcagccagccctacccagaggaggaggtcgatgagggcttcgaagccgacgacgacgccttcaaggactcccccaaccccagcgagcacggccactcagaccagcgaacaagtggcatccggaccagcgatgactcttcagaggaggacccatacatgaacgacacggtggtgcccaccagccccagtgcggacagcacggtgctgctcgccccatcagtgcaggactccgggagcctacacaactcctccagcggcgagtccacctactgcatgccccagaacgctggggacttgccctccccagacggcgactacgactacgaccaggatgactatgaggacggtgccatcacttccggcagcagcgtgaccttctccaactcctacggcagccagtggtcccccgactaccgctgctctgtggggacctacaacagctcgggtgcctaccggttcagctctgagggggcgcagtcctcgtttgaagatagtgaagaggactttgattccaggtttgatacagatgatgagctttcataccggcgtgactctgtgtacagctgtgtcactctgccgtatttccacagctttctgtacatgaaaggtggcctgatgaactcttggaaacgccgctggtgcgtcctcaaggatgaaaccttcttgtggttccgctccaagcaggaggccctcaagcaaggctggctccacaaaaaaggggggggctcctccacgctgtccaggagaaattggaagaagcgctggtttgtcctccgccagtccaagctgatgtactttgaaaacgacagcgaggagaagctcaagggcaccgtagaagtgcgaacggcaaaagagatcatagataacaccaccaaggagaatgggatcgacatcattatggccgataggactttccacctgattgcagagtccccagaagatgccagccagtggttcagcgtgctgagtcaggtccacgcgtccacggaccaggagatccaggagatgcatgatgagcaggcaaacccacagaatgctgtgggcaccttggatgtggggctgattgattctgtgtgtgcctctgacagccctgatagacccaactcgtttgtgatcatcacggccaaccgggtgctgcactgcaacgccgacacgccggaggagatgcaccactggataaccctgctgcagaggtccaaaggggacaccagagtggagggccaggaattcatcgtgagaggatggttgcacaaagaggtgaagaacagtccaaagatgtcttcactgaaactgaagaaacggtggtttgtactcacccacaattccctggattactacaagagttcagagaagaacgcgctcaaactggggaccctggtcctcaacagcctctgctctgtcgtccccccagatgagaagatattcaaagagacaggctactggaacgtcaccgtgtacgggcgcaagcactgttaccggctctacaccaagctgctcaacgaggccacccggtggtccagtgccattcaaaacgtgactgacaccaaggccccgatcgacacccccacccagcagctgattcaagatatcaaggagaactgcctgaactcggatgtggtggaacagatttacaagcggaacccgatccttcgatacacccatcaccccttgcactccccgctcctgccccttccgtatggggacataaatctcaacttgctcaaagacaaaggctataccacccttcaggatgaggccatcaagatattcaattccctgcagcaactggagtccatgtctgacccaattccaataatccagggcatcctacagacagggcatgacctgcgacctctgcgggacgagctgtactgccagcttatcaaacagaccaacaaagtgccccaccccggcagtgtgggcaacctgtacagctggcagatcctgacatgcctgagctgcaccttcctgccgagtcgagggattctcaagtatctcaagttccatctgaaaaggatacgggaacagtttccaggaaccgagatggaaaaatacgctctcttcacttacgaatctcttaagaaaaccaaatgccgagagtttgtgccttcccgagatgaaatagaagctctgatccacaggcaggaaatgacatccacggtctattgccatggcggcggctcctgcaagatcaccatcaactcccacaccaccgctggggaggtggtggagaagctgatccgaggcctggccatggaggacagcaggaacatgtttgctttgtttgaatacaacggccacgtcgacaaagccattgaaagtcgaaccgtcgtagctgatgtcttagccaagtttgaaaagctggctgccacatccgaggttggggacctgccatggaaattctacttcaaactttactgcttcctggacacagacaacgtgccaaaagacagtgtggagtttgcatttatgtttgaacaggcccacgaagcggttatccatggccaccatccagccccggaagaaaacctccaggttcttgctgccctgcgactccagtatctgcagggggattatactctgcacgctgccatcccacctctcgaagaggtttattccctgcagagactcaaggcccgcatcagccagtcaaccaaaaccttcaccccttgtgaacggctggagaagaggcggacgagcttcctagaggggaccctgaggcggagcttccggacaggatccgtggtccggcagaaggtcgaggaggagcagatgctggacatgtggattaaggaagaagtctcctctgctcgagccagtatcattgacaagtggaggaaatttcagggaatgaaccaggaacaggccatggccaagtacatggccttgatcaaggagtggcctggctatggctcgacgctgtttgatgtggagtgcaaggaaggtggcttccctcaggaactctggttgggtgtcagcgcggacgccgtctccgtctacaagcgtggagagggaagaccactggaagtcttccagtatgaacacatcctctcttttggggcacccctggcgaatacgtataagatcgtggtcgatgagagggagctgctctttgaaaccagtgaggtggtggatgtggccaagctcatgaaagcctacatcagcatgatcgtgaagaagcgctacagcacgacacgctccgccagcagccagggcagctccaggtgaaggcgggacagagcccacctgtctttgctacctgaacgcaccaccctctggcctaggctggctccagtgtgccatgcccagccaaaacaaacacagagctgcccaggctttctggaagcttctggtctgagggaggtgtctccgaggatccttttgcctgccgccttcattgatcctgtattaagctgtcaactttaacagtctgcacagtttccaaagctttactactcttagaggacacatgccttaaaaaaggaggggaggaaccacgctgccaccaaagcagccggaagtgccttaacttgtggaaccaacactaatcgaccgtaactgtgctactgaagggaactgcctttcccccttctgggggagacttaacagagcgtggaaggggggcattctctgtcaatgatgcactaacctcccaacctgatttccccgaatctgagggaaggtgagggagtgggaagggggatggagagctcgaggggacagtgtgtttgagctggagtgctgcgggcagcctttctcatggaatgacatgaatcaacttttttctttgtttcatcttttaagtgtacgtgcttgcctgttcgtgcatgtgttcataaactcaacactttaatcatggtttcatgagcattaaaaagcaaagggaaaaaggatgtgtaatggtgtacacagtctgtatattttaataatgcagagctatagtctcaattgttactttataaggtggttttattaacaaacccaaatcctggattttcctgtctttgctgtattttgaaaaacacgtgttgactccattgttttacatgtagcaaagtctgccatctgtgtctgctgtattataaacagataagcagcctacaagataactgtatttataaaccactcttcaacagctggctccagtgctggttttagaacaagaatgaagtcattttggagtctttcatgtctaaaagatttaagttaaaaacaaacatgttgactatgggggagagacgctgcattccagaaacgtcttaacacttgagtgaatcttcaaaggaccctgacattaaatgctgaggctttaatacacacatattttatcccaagtttataatggtggtctgaacaaggcacctgtaaataaatcagcatttatgaccagaagaaaaataatctggtcttggactttttatttttatatggaaaagttttaaggacttgggccaactaagtctacccacacgaaaaaagaaatttgccttgtccctttgtgtacaaccatgcaaaactgtttgttggctcacagaagttctgacaataaaagatactagctaaca

SEQ ID NO: 324121 - DNA, 2295 bp, Homo sapiens
gaaattctacttcaaactttactgcttcctggacacatccatggcaggtccccaacctcggatgtggcatggaaattctacttcaaactttactgcttcctggacacagacaacgtgccaaaagacagtgtggagtttgcatttatgtttgaacaggcccacgaagcggttatccatggccaccatccagccccggaagaaaacctccaggttcttgctgccctgcgactccagtatctgcagggggattatactctgcacgctgccatcccacctctcgaagaggtttattccctgcagagactcaaggcccgcatcagccagtcaaccaaaaccttcaccccttgtgaacggctggagaagaggcggacgagcttcctagaggggaccctgaggcggagcttccggacaggatccgtggtccggcagaaggtcgaggaggagcagatgctggacatgtggattaaggaagaagtctcctctgctcgagccagtatcattgacaagtggaggaaatttcagggaatgaaccaggaacaggccatggccaagtacatggccttgatcaaggagtggcctggctatggctcgacgctgtttgatgtggagtgcaaggaaggtggcttccctcaggaactctggttgggtgtcagcgcggacgccgtctccgtctacaagcgtggagagggaagaccactggaagtcttccagtatgaacacatcctctcttttggggcacccctggcgaatacgtataagatcgtggtcgatgagagggagctgctctttgaaaccagtgaggtggtggatgtggccaagctcatgaaagcctacatcagcatgatcgtgaagaagcgctacagcacgacacgctccgccagcagccagggcagctccaggtgaaggcgggacagagcccacctgtctttgctacctgaacgcaccaccctctggcctaggctggctccagtgtgccatgcccagccaaaacaaacacagagctgcccaggctttctggaagcttctggtctgagggaggtgtctccgaggatccttttgcctgccgccttcattgatcctgtattaagctgtcaactttaacagtctgcacagtttccaaagctttactactcttagaggacacatgccttaaaaaaggaggggaggaaccacgctgccaccaaagcagccggaagtgccttaacttgtggaaccaacactaatcgaccgtaactgtgctactgaagggaactgcctttcccccttctgggggagacttaacagagcgtggaaggggggcattctctgtcaatgatgcactaacctcccaacctgatttccccgaatctgagggaaggtgagggagtgggaagggggatggagagctcgaggggacagtgtgtttgagctggagtgctgcgggcagcctttctcatggaatgacatgaatcaacttttttctttgtttcatcttttaagtgtacgtgcttgcctgttcgtgcatgtgttcataaactcaacactttaatcatggtttcatgagcattaaaaagcaaagggaaaaaggatgtgtaatggtgtacacagtctgtatattttaataatgcagagctatagtctcaattgttactttataaggtggttttattaacaaacccaaatcctggattttcctgtctttgctgtattttgaaaaacacgtgttgactccattgttttacatgtagcaaagtctgccatctgtgtctgctgtattataaacagataagcagcctacaagataactgtatttataaaccactcttcaacagctggctccagtgctggttttagaacaagaatgaagtcattttggagtctttcatgtctaaaagatttaagttaaaaacaaagtgttacttggaaggttagcttctatcattctggatagattacagatataataaccatgttgactatgggggagagacgctgcattccagaaacgtcttaacacttgagtgaatcttcaaaggaccctgacattaaatgctgaggctttaatacacacatattttatcccaagtttataatggtggtctgaacaaggcacctgtaaataaatcagcatttatgaccagaagaaaaataatctggtcttggactttttatttttatatggaaaagttttaaggacttgggccaactaagtctacccacacgaaaaaagaaatttgccttgtccctttgtgtacaaccatgcaaaactgtttgttggctcacagaagttctgacaataaaagatactagctaaca

SEQ ID NO: 324122 - DNA, 4837 bp, Homo sapiens
gagctggctgagccgcggcgcgggactgctcacctccaagcgctcgcgcggggatcgcggctcctgctcactttgcggcccgctgtcctcctgcccgccccgagggcccccggccggagcgcagagggagggggccgcgctcgccagcaccccgccgccttcccccgcctgggggaagaatgtgccaccagctgttctccgcttgcgagcgctgcgcccagtagtgaggaacttggaggaagaagagacaaaggctgccgtcgggacgggcgagttagggacttgggtttgggcgaacaaaaggtgagaaggacaagaagggaccgggcgatggcagcaggggagccccgcgggcgcgcgtcctcgggagtggcgccgtgacacgcatggtttccccggacccgcggcggcgctgacttccgcgagtcggagcggcactcggcgagtccgggactgcgctggaacaatggataacttcttcaccgagggaacacgggtctggctgagagaaaatggccagcattttccaagtactgtaaattcctgtgcagaaggcatcgtcgtcttccggacagactatggtcaggtattcacttacaagcagagcacaattacccaccagaaggtgactgctatgcaccccacgaacgaggagggcgtggatgacatggcgtccttgacagagctccatggcggctccatcatgtataacttattccagcggtataagagaaatcaaatatatacctacatcggctccatcctggcctccgtgaacccctaccagcccatcgccgggctgtacgagcctgccaccatggagcagtacagccggcgccacctgggcgagctgcccccgcacatcttcgccatcgccaacgagtgctaccgctgcctgtggaagcgccacgacaaccagtgcatcctcatcagtggtgaaagtggggcaggtaaaaccgaaagcactaaattgatcctcaagtttctgtcagtcatcagtcaacagtctttggaattgtccttaaaggagaagacatcctgtgttgaacgagctattcttgaaagcagccccatcatggaagctttcggcaatgcgaagaccgtgtacaacaacaactctagtcgctttgggaagtttgttcagctgaacatctgtcagaaaggaaatattcagggcgggagaattgtagattatttattagaaaaaaaccgagtagtaaggcaaaatcccggggaaaggaattatcacatattttatgcactgctggcagggctggaacatgaagaaagagaagaattttatttatctacgccagaaaactaccactacttgaatcagtctggatgtgtagaagacaagacaatcagtgaccaggaatcctttagggaagttattacggcaatggacgtgatgcagttcagcaaggaggaagtttgggaagtgtcgaggctgcttgctggtatactgcatcttgggaacatagaatttatcactgctggtggggcacaggtttccttcaaaacagctttgggcagatctgcggagttacttgggctggacccaacacagctcacagatgctttgacccagagatcaatgttcctcaggggagaagagatcctcacgcctctcaatgttcaacaggcagtagacagcagggactccctggccatggctctgtatgcgtgctgctttgagtgggtaatcaagaagatcaacagcaggatcaaaggcaatgaggacttcaagtctattggcatcctcgacatctttggatttgaaaactttgaggttaatcactttgaacagttcaatataaactatgcaaacgagaaacttcaggagtacttcaacaagcatattttttctttagaacaactagaatatagccgggaaggattagtgtgggaagatattgactggatagacaatggagaatgcctggacttgattgagaagaaacttggcctcctagcccttatcaatgaagaaagccattttcctcaagccacagacagcaccttattggagaagctacacagtcagcatgcgaataaccacttttatgtgaagcccagagttgcagttaacaattttggagtgaagcactatgctggagaggtgcaatatgatgtccgaggtatcttggagaagaacagagatacatttcgagatgaccttctcaatttgctaagagaaagccgatttgactttatctacgatctttttgaacatgtttcaagccgcaacaaccaggataccttgaaatgtggaagcaaacatcggcggcctacagtcagctcacagttcaaggactcactgcattccttaatggcaacgctaagctcctctaatcctttctttgttcgctgtatcaagccaaacatgcagaagatgccagaccagtttgaccaggcggttgtgctgaaccagctgcggtactcagggatgctggagactgtgagaatccgcaaagctgggtatgcggtccgaagaccctttcaggacttttacaaaaggtataaagtgctgatgaggaatctggctctgcctgaggacgtccgagggaagtgcacgagcctgctgcagctctatgatgcctccaacagcgagtggcagctggggaagaccaaggtctttcttcgagaatccttggaacagaaactggagaagcggagggaagaggaagtgagccacgcggccatggtgattcgggcccatgtcttgggcttcttagcacgaaaacaatacagaaaggtcctttattgtgtggtgataatacagaagaattacagagcattccttctgaggaggagatttttgcacctgaaaaaggcagccatagttttccagaagcaactcagaggtcagattgctcggagagtttacagacaattgctggcagagaaaagggagcaagaagaaaagaagaaacaggaagaggaagaaaagaagaaacgggaggaagaagaaagagaaagagagagagagcgaagagaagccgagctccgcgcccagcaggaagaagaaacgaggaagcagcaagaactcgaagccttgcagaagagccagaaggaagctgaactgacccgtgaactggagaaacagaaggaaaataagcaggtggaagagatcctccgtctggagaaagaaatcgaggacctgcagcgcatgaaggagcagcaggagctgtcgctgaccgaggcttccctgcagaagctgcaggagcggcgggaccaggagctccgcaggctggaggaggaagcgtgcagggcggcccaggagttcctcgagtccctcaatttcgacgagatcgacgagtgtgtccggaatatcgagcggtccctgtcggtgggaagcgaattttccagcgagctggctgagagcgcatgcgaggagaagcccaacttcaacttcagccagccctacccagaggaggaggtcgatgagggcttcgaagccgacgacgacgccttcaaggactcccccaaccccagcgagcacggccactcagaccagcgaacaagtggcatccggaccagcgatgactcttcagaggaggacccatacatgaacgacacggtggtgcccaccagccccagtgcggacagcacggtgctgctcgccccatcagtgcaggactccgggagcctacacaactcctccagcggcgagtccacctactgcatgccccagaacgctggggacttgccctccccagacggcgactacgactacgaccaggatgactatgaggacggtgccatcacttccggcagcagcgtgaccttctccaactcctacggcagccagtggtcccccgactaccgctgctctgtggggacctacaacagctcgggtgcctaccggttcagctctgagggggcgcagtcctcgtttgaagatagtgaagaggactttgattccaggtttgatacagatgatgagctttcataccggcgtgactctgtgtacagctgtgtcactctgccgtatttccacagctttctgtacatgaaaggtggcctgatgaactcttggaaacgccgctggtgcgtcctcaaggatgaaaccttcttgtggttccgctccaagcaggaggccctcaagcaaggctggctccacaaaaaaggggggggctcctccacgctgtccaggagaaattggaagaagcgctggtttgtcctccgccagtccaagctgatgtactttgaaaacgacagcgaggagaagctcaagggcaccgtagaagtgcgaacggcaaaatgccagaccagtttgaccaggcggttgtgctgaaccagctgcggtactcagggatgctggagactgtgagaatccgcaaagctgggtatgcggtccgaagaccctttcaggacttttacaaaaggtataaagtgctgatgaggaatctggctctgcctgaggacgtccgagggaagtgcacgagcctgctgcagctctatgatgcctccaacagcgagtggcagctggggaagaccaaggtctttcttcgagaatccttggaacagaaactggagaagcggagggaagaggaagtgagccacgcggccatggtgattcgggcccatgtcttgggcttcttagcacgaaaacaatacagaaaggtcctttattgtgtggtgataatacagaagaattacagagcattccttctgaggaggagatttttgcacctgaaaaaggcagccatagttttccagaagcaactcagaggtcagattgctcggagagtttacagacaattgctggcagagaaaagggagcaagaagaaaagaagaaacaggaagaggaagaaaagaagaaacgggagg

SEQ ID NO: 324123 - DNA, 4275 bp, Homo sapiens
gagctggctgagccgcggcgcgggactgctcacctccaagcgctcgcgcggggatcgcggctcctgctcactttgcggcccgctgtcctcctgcccgccccgagggcccccggccggagcgcagagggagggggccgcgctcgccagcaccccgccgccttcccccgcctgggggaagaatgtgccaccagctgttctccgcttgcgagcgctgcgcccagtagtgaggaacttggaggaagaagagacaaaggctgccgtcgggacgggcgagttagggacttgggtttgggcgaacaaaaggtgagaaggacaagaagggaccgggcgatggcagcaggggagccccgcgggcgcgcgtcctcgggagtggcgccgtgacacgcatggtttccccggacccgcggcggcgctgacttccgcgagtcggagcggcactcggcgagtccgggactgcgctggaacaatggataacttcttcaccgagggaacacgggtctggctgagagaaaatggccagcattttccaagtactgtaaattcctgtgcagaaggcatcgtcgtcttccggacagactatggtcaggtattcacttacaagcagagcacaattacccaccagaaggtgactgctatgcaccccacgaacgaggagggcgtggatgacatggcgtccttgacagagctccatggcggctccatcatgtataacttattccagcggtataagagaaatcaaatatatacctacatcggctccatcctggcctccgtgaacccctaccagcccatcgccgggctgtacgagcctgccaccatggagcagtacagccggcgccacctgggcgagctgcccccgcacatcttcgccatcgccaacgagtgctaccgctgcctgtggaagcgccacgacaaccagtgcatcctcatcagtggtgaaagtggggcaggtaaaaccgaaagcactaaattgatcctcaagtttctgtcagtcatcagtcaacagtctttggaattgtccttaaaggagaagacatcctgtgttgaacgagctattcttgaaagcagccccatcatggaagctttcggcaatgcgaagaccgtgtacaacaacaactctagtcgctttgggaagtttgttcagctgaacatctgtcagaaaggaaatattcagggcgggagaattgtagattatttattagaaaaaaaccgagtagtaaggcaaaatcccggggaaaggaattatcacatattttatgcactgctggcagggctggaacatgaagaaagagaagaattttatttatctacgccagaaaactaccactacttgaatcagtctggatgtgtagaagacaagacaatcagtgaccaggaatcctttagggaagttattacggcaatggacgtgatgcagttcagcaaggaggaagtttgggaagtgtcgaggctgcttgctggtatactgcatcttgggaacatagaatttatcactgctggtggggcacaggtttccttcaaaacagctttgggcagatctgcggagttacttgggctggacccaacacagctcacagatgctttgacccagagatcaatgttcctcaggggagaagagatcctcacgcctctcaatgttcaacaggcagtagacagcagggactccctggccatggctctgtatgcgtgctgctttgagtgggtaatcaagaagatcaacagcaggatcaaaggcaatgaggacttcaagtctattggcatcctcgacatctttggatttgaaaactttgaggttaatcactttgaacagttcaatataaactatgcaaacgagaaacttcaggagtacttcaacaagcatattttttctttagaacaactagaatatagccgggaaggattagtgtgggaagatattgactggatagacaatggagaatgcctggacttgattgagaagaaacttggcctcctagcccttatcaatgaagaaagccattttcctcaagccacagacagcaccttattggagaagctacacagtcagcatgcgaataaccacttttatgtgaagcccagagttgcagttaacaattttggagtgaagcactatgctggagaggtgcaatatgatgtccgaggtatcttggagaagaacagagatacatttcgagatgaccttctcaatttgctaagagaaagccgatttgactttatctacgatctttttgaacatgtttcaagccgcaacaaccaggataccttgaaatgtggaagcaaacatcggcggcctacagtcagctcacagttcaaggactcactgcattccttaatggcaacgctaagctcctctaatcctttctttgttcgctgtatcaagccaaacatgcagaagatgccagaccagtttgaccaggcggttgtgctgaaccagctgcggtactcagggatgctggagactgtgagaatccgcaaagctgggtatgcggtccgaagaccctttcaggacttttacaaaaggtataaagtgctgatgaggaatctggctctgcctgaggacgtccgagggaagtgcacgagcctgctgcagctctatgatgcctccaacagcgagtggcagctggggaagaccaaggtctttcttcgagaatccttggaacagaaactggagaagcggagggaagaggaagtgagccacgcggccatggtgattcgggcccatgtcttgggcttcttagcacgaaaacaatacagaaaggtcctttattgtgtggtgataatacagaagaattacagagcattccttctgaggaggagatttttgcacctgaaaaaggcagccatagttttccagaagcaactcagaggtcagattgctcggagagtttacagacaattgctggcagagaaaagggagcaagaagaaaagaagaaacaggaagaggaagaaaagaagaaacgggaggaagaagaaagagaaagagagagagagcgaagagaagccgagctccgcgcccagcaggaagaagaaacgaggaagcagcaagaactcgaagccttgcagaagagccagaaggaagctgaactgacccgtgaactggagaaacagaaggaaaataagcaggtggaagagatcctccgtctggagaaagaaatcgaggacctgcagcgcatgaaggagcagcaggagctgtcgctgaccgaggcttccctgcagaagctgcaggagcggcgggaccaggagctccgcaggctggaggaggaagcgtgcagggcggcccaggagttcctcgagtccctcaatttcgacgagatcgacgagtgtgtccggaatatcgagcggtccctgtcggtgggaagcgaattttccagcgagctggctgagagcgcatgcgaggagaagcccaacttcaacttcagccagccctacccagaggaggaggtcgatgagggcttcgaagccgacgacgacgccttcaaggactcccccaaccccagcgagcacggccactcagaccagcgaacaagtggcatccggaccagcgatgactcttcagaggaggacccatacatgaacgacacggtggtgcccaccagccccagtgcggacagcacggtgctgctcgccccatcagtgcaggactccgggagcctacacaactcctccagcggcgagtccacctactgcatgccccagaacgctggggacttgccctccccagacggcgactacgactacgaccaggatgactatgaggacggtgccatcacttccggcagcagcgtgaccttctccaactcctacggcagccagtggtcccccgactaccgctgctctgtggggacctacaacagctcgggtgcctaccggttcagctctgagggggcgcagtcctcgtttgaagatagtgaagaggactttgattccaggtttgatacagatgatgagctttcataccggcgtgactctgtgtacagctgtgtcactctgccgtatttccacagctttctgtacatgaaaggtggcctgatgaactcttggaaacgccgctggtgcgtcctcaaggatgaaaccttcttgtggttccgctccaagcaggaggccctcaagcaaggctggctccacaaaaaaggggggggctcctccacgctgtccaggtgctgtttgagatacccgagtacgactttacacaggccacggccgagggacatggttaccgattctcgagcggtcgttttaggacgtcgtgtagggatagcggatacaatgttaca

SEQ ID NO: 324124 - DNA, 3294 bp, Homo sapiens
gagctggctgagccgcggcgcgggactgctcacctccaagcgctcgcgcggggatcgcggctcctgctcactttgcggcccgctgtcctcctgcccgccccgagggcccccggccggagcgcagagggagggggccgcgctcgccagcaccccgccgccttcccccgcctgggggaagaatgtgccaccagctgttctccgcttgcgagcgctgcgcccagtagtgaggaacttggaggaagaagagacaaaggctgccgtcgggacgggcgagttagggacttgggtttgggcgaacaaaaggtgagaaggacaagaagggaccgggcgatggcagcaggggagccccgcgggcgcgcgtcctcgggagtggcgccgtgacacgcatggtttccccggacccgcggcggcgctgacttccgcgagtcggagcggcactcggcgagtccgggactgcgctggaacaatggataacttcttcaccgagggaacacgggtctggctgagagaaaatggccagcattttccaagtactgtaaattcctgtgcagaaggcatcgtcgtcttccggacagactatggtcaggtattcacttacaagcagagcacaattacccaccagaaggtgactgctatgcaccccacgaacgaggagggcgtggatgacatggcgtccttgacagagctccatggcggctccatcatgtataacttattccagcggtataagagaaatcaaatatatacctacatcggctccatcctggcctccgtgaacccctaccagcccatcgccgggctgtacgagcctgccaccatggagcagtacagccggcgccacctgggcgagctgcccccgcacatcttcgccatcgccaacgagtgctaccgctgcctgtggaagcgccacgacaaccagtgcatcctcatcagtggtgaaagtggggcaggtaaaaccgaaagcactaaattgatcctcaagtttctgtcagtcatcagtcaacagtctttggaattgtccttaaaggagaagacatcctgtgttgaacgagctattcttgaaagcagccccatcatggaagctttcggcaatgcgaagaccgtgtacaacaacaactctagtcgctttgggaagtttgttcagctgaacatctgtcagaaaggaaatattcagggcgggagaattgtagattatttattagaaaaaaaccgagtagtaaggcaaaatcccggggaaaggaattatcacatattttatgcactgctggcagggctggaacatgaagaaagagaagaattttatttatctacgccagaaaactaccactacttgaatcagtctggatgtgtagaagacaagacaatcagtgaccaggaatcctttagggaagttattacggcaatggacgtgatgcagttcagcaaggaggaagtttgggaagtgtcgaggctgcttgctggtatactgcatcttgggaacatagaatttatcactgctggtggggcacaggtttccttcaaaacagctttgggcagatctgcggagttacttgggctggacccaacacagctcacagatgctttgacccagagatcaatgttcctcaggggagaagagatcctcacgcctctcaatgttcaacaggcagtagacagcagggactccctggccatggctctgtatgcgtgctgctttgagtgggtaatcaagaagatcaacagcaggatcaaaggcaatgaggacttcaagtctattggcatcctcgacatctttggatttgaaaactttgaggttaatcactttgaacagttcaatataaactatgcaaacgagaaacttcaggagtacttcaacaagcatattttttctttagaacaactagaatatagccgggaaggattagtgtgggaagatattgactggatagacaatggagaatgcctggacttgattgagaagaaacttggcctcctagcccttatcaatgaagaaagccattttcctcaagccacagacagcaccttattggagaagctacacagtcagcatgcgaataaccacttttatgtgaagcccagagttgcagttaacaattttggagtgaagcactatgctggagaggtgcaatatgatgtccgaggtatcttggagaagaacagagatacatttcgagatgaccttctcaatttgctaagagaaagccgatttgactttatctacgatctttttgaacatgtttcaagccgcaacaaccaggataccttgaaatgtggaagcaaacatcggcggcctacagtcagctcacagttcaaggactcactgcattccttaatggcaacgctaagctcctctaatcctttctttgttcgctgtatcaagccaaacatgcagaagatgccagaccagtttgaccaggcggttgtgctgaaccagctgcggtactcagggatgctggagactgtgagaatccgcaaagctgggtatgcggtccgaagaccctttcaggacttttacaaaaggtataaagtgctgatgaggaatctggctctgcctgaggacgtccgagggaagtgcacgagcctgctgcagctctatgatgcctccaacagcgagtggcagctggggaagaccaaggtctttcttcgagaatccttggaacagaaactggagaagcggagggaagaggaagtgagccacgcggccatggtgattcgggcccatgtcttgggcttcttagcacgaaaacaatacagaaaggtcctttattgtgtggtgataatacagaagaattacagagcattccttctgaggaggagatttttgcacctgaaaaaggcagccatagttttccagaagcaactcagaggtcagattgctcggagagtttacagacaattgctggcagagaaaagggagcaagaagaaaagaagaaacaggaagaggaagaaaagaagaaacgggaggaagaagaaagagaaagagagagagagcgaagagaagccgagctccgcgcccagcaggaagaagaaacgaggaagcagcaagaactcgaagccttgcagaagagccagaaggaagctgaactgacccgtgaactggagaaacagaaggaaaataagctgatggggagcaagatgcgcagtcttctcccatcagctgtggaataatggcaacagaaagactggctaactacaccggaggcatctatgccgaataccaggacaccacatatataaaccatgtgtttccgtggctgggtgggcatcactgatgacgcagcttcggtccgcta

SEQ ID NO: 324125 - DNA, 2109 bp, Homo sapiens
gagctggctgagccgcggcgcgggactgctcacctccaagcgctcgcgcggggatcgcggctcctgctcactttgcggcccgctgtcctcctgcccgccccgagggcccccggccggagcgcagagggagggggccgcgctcgccagcaccccgccgccttcccccgcctgggggaagaatgtgccaccagctgttctccgcttgcgagcgctgcgcccagtagtgaggaacttggaggaagaagagacaaaggctgccgtcgggacgggcgagttagggacttgggtttgggcgaacaaaaggtgagaaggacaagaagggaccgggcgatggcagcaggggagccccgcgggcgcgcgtcctcgggagtggcgccgtgacacgcatggtttccccggacccgcggcggcgctgacttccgcgagtcggagcggcactcggcgagtccgggactgcgctggaacaatggataacttcttcaccgagggaacacgggtctggctgagagaaaatggccagcattttccaagtactgtaaattcctgtgcagaaggcatcgtcgtcttccggacagactatggtcaggtattcacttacaagcagagcacaattacccaccagaaggtgactgctatgcaccccacgaacgaggagggcgtggatgacatggcgtccttgacagagctccatggcggctccatcatgtataacttattccagcggtataagagaaatcaaatatatacctacatcggctccatcctggcctccgtgaacccctaccagcccatcgccgggctgtacgagcctgccaccatggagcagtacagccggcgccacctgggcgagctgcccccgcacatcttcgccatcgccaacgagtgctaccgctgcctgtggaagcgccacgacaaccagtgcatcctcatcagtggtgaaagtggggcaggtaaaaccgaaagcactaaattgatcctcaagtttctgtcagtcatcagtcaacagtctttggaattgtccttaaaggagaagacatcctgtgttgaacgagctattcttgaaagcagccccatcatggaagctttcggcaatgcgaagaccgtgtacaacaacaactctagtcgctttgggaagtttgttcagctgaacatctgtcagaaaggaaatattcagggcgggagaattgtagattatttattagaaaaaaaccgagtagtaaggcaaaatcccggggaaaggaattatcacatattttatgcactgctggcagggctggaacatgaagaaagagaagaattttatttatctacgccagaaaactaccactacttgaatcagtctggatgtgtagaagacaagacaatcagtgaccaggaatcctttagggaagttattacggcaatggacgtgatgcagttcagcaaggaggaagtttgggaagtgtcgaggctgcttgctggtatactgcatcttgggaacatagaatttatcactgctggtggggcacaggtttccttcaaaacagctttgggcagatctgcggagttacttgggctggacccaacacagctcacagatgctttgacccagagatcaatgttcctcaggggagaagagatcctcacgcctctcaatgttcaacaggcagtagacagcagggactccctggccatggctctgtatgcgtgctgctttgagtgggtaatcaagaagatcaacagcaggatcaaaggcaatgaggacttcaagtctattggcatcctcgacatctttggatttgaaaactttgaggttaatcactttgaacagttcaatataaactatgcaaacgagaaacttcaggagtacttcaacaagcatattttttctttagaacaactagaatatagccgggaaggattagtgttgggcgatcagacattttaggcttcttcttctgcttctcagtattccgggtcaaagcatctggtggagtggtgttattttcagtaggtgaaatgggagatgtagccacgtcccgagttggagtgacaggaagtggttcaatcacagaccgtgtgatacagattttgtgtgctctgggcgtggagcaatcactggtgttgtgt

SEQ ID NO: 324126 - DNA, 383 bp, Homo sapiens
ttgaacgagctattcttgaaagcaggtatttattgattttcttgtttccaactaataggattcactttccttatggtatggcttatttaaagaagagttaaaattagttggtcgcgtttctctttttcttgacttctcttttacaattccttaagaaaaggtcttgccatgcacatagtaatatctcatgaacccagcaacaactccttctgcctcctgccccttcatcgtcaggccaggtctgagatggggactgagtggcgcccaatggctgtctgcagagcctttgactccagcttcatgtgtttttgaagcacctgcatcagataaggcacttgtattggagtttatggagaagaataaacttgactagttttctggag

SEQ ID NO: 324127 - DNA, 340 bp, Homo sapiens
tccagcctgggcgacagagcgagactccgtctcaaaaaaaaggagttgcaaatctctgacaggatcttggggacacccataggattcccagaccacacttcgtccaagcacgaggctctatgctactaatctaggattcactaagggaatgagtaacttagcaataacatgcaatctctaaactctgtgtgagggattcaggtgtgttctctgcgttaaggtatcgctaagcctggttagcttcttgggggcggtgggttcattcacctttgtcttattctctgcagctttgggcagatctgcggagttacttgggctggacccaacacagctcacagat

SEQ ID NO: 324128 - DNA, 10091 bp, Homo sapiens
gagctggctgagccgcggcgcgggactgctcacctccaagcgctcgcgcggggatcgcggctcctgctcactttgcggcccgctgtcctcctgcccgccccgagggcccccggccggagcgcagagggagggggccgcgctcgccagcaccccgccgccttcccccgcctgggggaagaatgtgccaccagctgttctccgcttgcgagcgctgcgcccagtagtgaggaacttggaggaagaagagacaaaggctgccgtcgggacgggcgagttagggacttgggtttgggcgaacaaaaggtgagaaggacaagaagggaccgggcgatggcagcaggggagccccgcgggcgcgcgtcctcgggagtggcgccgtgacacgcatggtttccccggacccgcggcggcgctgacttccgcgagtcggagcggcactcggcgagtccgggactgcgctggaacaatggataacttcttcaccgagggaacacgggtctggctgagagaaaatggccagcattttccaagtactgtaaattcctgtgcagaaggcatcgtcgtcttccggacagactatggtcaggtattcacttacaagcagagcacaattacccaccagaaggtgactgctatgcaccccacgaacgaggagggcgtggatgacatggcgtccttgacagagctccatggcggctccatcatgtataacttattccagcggtataagagaaatcaaatatatacctacatcggctccatcctggcctccgtgaacccctaccagcccatcgccgggctgtacgagcctgccaccatggagcagtacagccggcgccacctgggcgagctgcccccgcacatcttcgccatcgccaacgagtgctaccgctgcctgtggaagcgccacgacaaccagtgcatcctcatcagtggtgaaagtggggcaggtaaaaccgaaagcactaaattgatcctcaagtttctgtcagtcatcagtcaacagtctttggaattgtccttaaaggagaagacatcctgtgttgaacgagctattcttgaaagcagccccatcatggaagctttcggcaatgcgaagaccgtgtacaacaacaactctagtcgctttgggaagtttgttcagctgaacatctgtcagaaaggaaatattcagggcgggagaattgtagattatttattagaaaaaaaccgagtagtaaggcaaaatcccggggaaaggaattatcacatattttatgcactgctggcagggctggaacatgaagaaagagaagaattttatttatctacgccagaaaactaccactacttgaatcagtctggatgtgtagaagacaagacaatcagtgaccaggaatcctttagggaagttattacggcaatggacgtgatgcagttcagcaaggaggaagtttgggaagtgtcgaggctgcttgctggtatactgcatcttgggaacatagaatttatcactgctggtggggcacaggtttccttcaaaacagctttgggcagatctgcggagttacttgggctggacccaacacagctcacagatgctttgacccagagatcaatgttcctcaggggagaagagatcctcacgcctctcaatgttcaacaggcagtagacagcagggactccctggccatggctctgtatgcgtgctgctttgagtgggtaatcaagaagatcaacagcaggatcaaaggcaatgaggacttcaagtctattggcatcctcgacatctttggatttgaaaactttgaggttaatcactttgaacagttcaatataaactatgcaaacgagaaacttcaggagtacttcaacaagcatattttttctttagaacaactagaatatagccgggaaggattagtgtgggaagatattgactggatagacaatggagaatgcctggacttgattgagaagaaacttggcctcctagcccttatcaatgaagaaagccattttcctcaagccacagacagcaccttattggagaagctacacagtcagcatgcgaataaccacttttatgtgaagcccagagttgcagttaacaattttggagtgaagcactatgctggagaggtgcaatatgatgtccgaggtatcttggagaagaacagagatacatttcgagatgaccttctcaatttgctaagagaaagccgatttgactttatctacgatctttttgaacatgtttcaagccgcaacaaccaggataccttgaaatgtggaagcaaacatcggcggcctacagtcagctcacagttcaaggactcactgcattccttaatggcaacgctaagctcctctaatcctttctttgttcgctgtatcaagccaaacatgcagaagatgccagaccagtttgaccaggcggttgtgctgaaccagctgcggtactcagggatgctggagactgtgagaatccgcaaagctgggtatgcggtccgaagaccctttcaggacttttacaaaaggtataaagtgctgatgaggaatctggctctgcctgaggacgtccgagggaagtgcacgagcctgctgcagctctatgatgcctccaacagcgagtggcagctggggaagaccaaggtctttcttcgagaatccttggaacagaaactggagaagcggagggaagaggaagtgagccacgcggccatggtgattcgggcccatgtcttgggcttcttagcacgaaaacaatacagaaaggtcctttattgtgtggtgataatacagaagaattacagagcattccttctgaggaggagatttttgcacctgaaaaaggcagccatagttttccagaagcaactcagaggtcagattgctcggagagtttacagacaattgctggcagagaaaagggagcaagaagaaaagaagaaacaggaagaggaagaaaagaagaaacgggaggaagaagaaagagaaagagagagagagcgaagagaagccgagctccgcgcccagcaggaagaagaaacgaggaagcagcaagaactcgaagccttgcagaagagccagaaggaagctgaactgacccgtgaactggagaaacagaaggaaaataagcaggtggaagagatcctccgtctggagaaagaaatcgaggacctgcagcgcatgaaggagcagcaggagctgtcgctgaccgaggcttccctgcagaagctgcaggagcggcgggaccaggagctccgcaggctggaggaggaagcgtgcagggcggcccaggagttcctcgagtccctcaatttcgacgagatcgacgagtgtgtccggaatatcgagcggtccctgtcggtgggaagcgaattttccagcgagctggctgagagcgcatgcgaggagaagcccaacttcaacttcagccagccctacccagaggaggaggtcgatgagggcttcgaagccgacgacgacgccttcaaggactcccccaaccccagcgagcacggccactcagaccagcgaacaagtggcatccggaccagcgatgactcttcagaggaggacccatacatgaacgacacggtggtgcccaccagccccagtgcggacagcacggtgctgctcgccccatcagtgcaggactccgggagcctacacaactcctccagcggcgagtccacctactgcatgccccagaacgctggggacttgccctccccagacggcgactacgactacgaccaggatgactatgaggacggtgccatcacttccggcagcagcgtgaccttctccaactcctacggcagccagtggtcccccgactaccgctgctctgtggggacctacaacagctcgggtgcctaccggttcagctctgagggggcgcagtcctcgtttgaagatagtgaagaggactttgattccaggtttgatacagatgatgagctttcataccggcgtgactctgtgtacagctgtgtcactctgccgtatttccacagctttctgtacatgaaaggtggcctgatgaactcttggaaacgccgctggtgcgtcctcaaggatgaaaccttcttgtggttccgctccaagcaggaggccctcaagcaaggctggctccacaaaaaaggggggggctcctccacgctgtccaggagaaattggaagaagcgctggtttgtcctccgccagtccaagctgatgtactttgaaaacgacagcgaggagaagctcaagggcaccgtagaagtgcgaacggcaaaagagatcatagataacaccaccaaggagaatgggatcgacatcattatggccgataggactttccacctgattgcagagtccccagaagatgccagccagtggttcagcgtgctgagtcaggtccacgcgtccacggaccaggagatccaggagatgcatgatgagcaggcaaacccacagaatgctgtgggcaccttggatgtggggctgattgattctgtgtgtgcctctgacagccctgatagacccaactcgtttgtgatcatcacggccaaccgggtgctgcactgcaacgccgacacgccggaggagatgcaccactggataaccctgctgcagaggtccaaaggggacaccagagtggagggccaggaattcatcgtgagaggatggttgcacaaagaggtgaagaacagtccaaagatgtcttcactgaaactgaagaaacggtggtttgtactcacccacaattccctggattactacaagagttcagagaagaacgcgctcaaactggggaccctggtcctcaacagcctctgctctgtcgtccccccagatgagaagatattcaaagagacaggctactggaacgtcaccgtgtacgggcgcaagcactgttaccggctctacaccaagctgctcaacgaggccacccggtggtccagtgccattcaaaacgtgactgacaccaaggccccgatcgacacccccacccagcagctgattcaagatatcaaggagaactgcctgaactcggatgtggtggaacagatttacaagcggaacccgatccttcgatacacccatcaccccttgcactccccgctcctgccccttccgtatggggacataaatctcaacttgctcaaagacaaaggctataccacccttcaggatgaggccatcaagatattcaattccctgcagcaactggagtccatgtctgacccaattccaataatccagggcatcctacagacagggcatgacctgcgacctctgcgggacgagctgtactgccagcttatcaaacagaccaacaaagtgccccaccccggcagtgtgggcaacctgtacagctggcagatcctgacatgcctgagctgcaccttcctgccgagtcgagggattctcaagtatctcaagttccatctgaaaaggatacgggaacagtttccaggaaccgagatggaaaaatacgctctcttcacttacgaatctcttaagaaaaccaaatgccgagagtttgtgccttcccgagatgaaatagaagctctgatccacaggcaggaaatgacatccacggtctattgccatggcggcggctcctgcaagatcaccatcaactcccacaccaccgctggggaggtggtggagaagctgatccgaggcctggccatggaggacagcaggaacatgtttgctttgtttgaatacaacggccacgtcgacaaagccattgaaagtcgaaccgtcgtagctgatgtcttagccaagtttgaaaagctggctgccacatccgaggttggggacctgccatggaaattctacttcaaactttactgcttcctggacacagacaacgtgccaaaagacagtgtggagtttgcatttatgtttgaacaggcccacgaagcggttatccatggccaccatccagccccggaagaaaacctccaggttcttgctgccctgcgactccagtatctgcagggggattatactctgcacgctgccatcccacctctcgaagaggtttattccctgcagagactcaaggcccgcatcagccagtcaaccaaaaccttcaccccttgtgaacggctggagaagaggcggacgagcttcctagaggggaccctgaggcggagcttccggacaggatccgtggtccggcagaaggtcgaggaggagcagatgctggacatgtggattaaggaagaagtctcctctgctcgagccagtatcattgacaagtggaggaaatttcagggaatgaaccaggaacaggccatggccaagtacatggccttgatcaaggagtggcctggctatggctcgacgctgtttgatgtggaggtgagaactggctgccatgtgttggggtgggctgggtgctggcatctgagaacatggatcacggccaagttcatgtggagagaagacaagatggagcattttgctctctcaacctctttttttcgagcccccaaaattgtaccattaacgcctcccttctcctcacagtttctcttctcctgtgtagtaaatgcatctgtaatattaggaatgaatgcaaaattaagatgtcatctattcttctacccttccttagggaagctatagatctaattttttaaacactgataaaaatctacatttaaaaaaatgttatagctgtatatacaaattagaaactttggatatacttgcattttactttgttttttctttacagccatctgtttgaaaggaagaatgtctatctcgtaatggaatttagccattggcatcaacccagtactgatttttgttttgttttaagtagaccgcttattgaaaagaaatcttactaattgtctagatgagagtttggcaaactggtctgtgggtcagatcttgcctgcctccttttttctaaacaaagttttattggaacacagccaagctcattcctttagatatattccctggctgtttttgtacagagttgagtagttgtgacagagaccatgtgatccacaaagtctaaaaatctttactatgcagcccttaacagataagtgtgccagctcatcgtctagattagcttccattttttatgatcacagtaattcagcgtatatctgatgactttatattgaggctgtataaaattctaaatattataaattctagaatccgtgggtggcttttcattaggtgatgtttttgattggtttggttggttcaattatgcctgtttttaagtataaaaaaatcaggtgctttgtacaaagccataattccatttctccctgacaaggaatagataatagcagttaaactcttggcttcctgcaaaacgtgagctgtgaattagcatagaaagctactggcttggccgggcgcggtggctcatgcctgtaatcccagcgctttgggaggccaaggcgggcggatcatgaggtcaggagatcgagaccatcctggctaacacggtgaaaccccatctctgcaaaaaattagctgggcgtggtggcatgcacctgtaatcccagctactcgagaggctgagacaggagaatcgcttgaactcaggaggtggaggttgcagtgagccaggatcacgccactgcactccagcctgggcgacagagtgagactccgtcaaaaaaaaaagaaaaaagaaagctactggcttttgcatggaggatgcagagaatgtctggttattagggatataaactagagactcttttcagcgtctccaatttatagccctcctgcttgtccaggtttggatcagccctgtgttgttagccccttcatatggggtcttattttcttccaccaatctgtacaggaaagtctacagttaaactggtaaagtccctgttcccactctgcatatggaaggccattgctgctccttgtgaagaggagccagaactgctcagcatgcgtgatttggagaattttcctctgtgatcctagattttgtatttgaagactaaccatccgcaaagaggattggaggcagaactggagatattaatacaagagtagacttggcttgggttgcagggaagcttccttaagtcccccggccaagcatgtacgtttccaggccacttccacgtagctaatccaaacagctagtagaataatgctgagaagtggagagtcaaagcaagatgttagactctgccagttagtgaggttttcccaaaagcgtgagattaactagttagaaatcaagatagccagagaggtgccatttttcatatttcaggcccctccatgcatgtatgcacatcgaatatatttaatcttctgcacagaggacttcactcaaagcctgtcttatggtttagatgctttctgttgccaaccacttcatgacttaactcttctgttgactcttgcccaccagtgcaaggaaggtggcttccctcaggaactctggttgggtgtcagcgcggacgccgtctccgtctacaagcgtggagagggaagaccactggaagtcttccagtatgaacacatcctctcttttggggcacccctggcgaatacgtataagatcgtggtcgatgagagggagctgctctttgaaaccagtgaggtggtggatgtggccaagctcatgaaagcctacatcagcatgatcgtgaagaagcgctacagcacgacacgctccgccagcagccagggcagctccaggtgaaggcgggacagagcccacctgtctttgctacctgaacgcaccaccctctggcctaggctggctccagtgtgccatgcccagccaaaacaaacacagagctgcccaggctttctggaagcttctggtctgagggaggtgtctccgaggatccttttgcctgccgccttcattgatcctgtattaagctgtcaactttaacagtctgcacagtttccaaagctttactactcttagaggacacatgccttaaaaaaggaggggaggaaccacgctgccaccaaagcagccggaagtgccttaacttgtggaaccaacactaatcgaccgtaactgtgctactgaagggaactgcctttcccccttctgggggagacttaacagagcgtggaaggggggcattctctgtcaatgatgcactaacctcccaacctgatttccccgaatctgagggaaggtgagggagtgggaagggggatggagagctcgaggggacagtgtgtttgagctggagtgctgcgggcagcctttctcatggaatgacatgaatcaacttttttctttgtttcatcttttaagtgtacgtgcttgcctgttcgtgcatgtgttcataaactcaacactttaatcatggtttcatgagcattaaaaagcaaagggaaaaaggatgtgtaatggtgtacacagtctgtatattttaataatgcagagctatagtctcaattgttactttataaggtggttttattaacaaacccaaatcctggattttcctgtctttgctgtattttgaaaaacacgtgttgactccattgttttacatgtagcaaagtctgccatctgtgtctgctgtattataaacagataagcagcctacaagataactgtatttataaaccactcttcaacagctggctccagtgctggttttagaacaagaatgaagtcattttggagtctttcatgtctaaaagatttaagttaaaaacaaagtgttacttggaaggttagcttctatcattctggatagattacagatataataaccatgttgactatgggggagagacgctgcattccagaaacgtcttaacacttgagtgaatcttcaaaggaccctgacattaaatgctgaggctttaatacacacatattttatcccaagtttataatggtggtctgaacaaggcacctgtaaataaatcagcatttatgaccagaagaaaaataatctggtcttggactttttatttttatatggaaaagttttaaggacttgggccaactaagtctacccacacgaaaaaagaaatttgccttgtccctttgtgtacaaccatgcaaaactgtttgttggctcacagaagttctgacaataaaagatactagctaaca

SEQ ID NO: 324129 - DNA, 7965 bp, Homo sapiens
  misc_feature (1237)..(1237): n is a, c, g, or t
gagctggctgagccgcggcgcgggactgctcacctccaagcgctcgcgcggggatcgcggctcctgctcactttgcggcccgctgtcctcctgcccgccccgagggcccccggccggagcgcagagggagggggccgcgctcgccagcaccccgccgccttcccccgcctgggggaagaatgtgccaccagctgttctccgcttgcgagcgctgcgcccagtagtgaggaacttggaggaagaagagacaaaggctgccgtcgggacgggcgagttagggacttgggtttgggcgaacaaaaggtgagaaggacaagaagggaccgggcgatggcagcaggggagccccgcgggcgcgcgtcctcgggagtggcgccgtgacacgcatggtttccccggacccgcggcggcgctgacttccgcgagtcggagcggcactcggcgagtccgggactgcgctggaacaatggataacttcttcaccgagggaacacgggtctggctgagagaaaatggccagcattttccaagtactgtaaattcctgtgcagaaggcatcgtcgtcttccggacagactatggtcaggtattcacttacaagcagagcacaattacccaccagaaggtgactgctatgcaccccacgaacgaggagggcgtggatgacatggcgtccttgacagagctccatggcggctccatcatgtataacttattccagcggtataagagaaatcaaatatatacctacatcggctccatcctggcctccgtgaacccctaccagcccatcgccgggctgtacgagcctgccaccatggagcagtacagccggcgccacctgggcgagctgcccccgcacatcttcgccatcgccaacgagtgctaccgctgcctgtggaagcgccacgacaaccagtgcatcctcatcagtggtgaaagtggggcaggtaaaaccgaaagcactaaattgatcctcaagtttctgtcagtcatcagtcaacagtctttggaattgtccttaaaggagaagacatcctgtgttgaacgagctattcttgaaagcagccccatcatggaagctttcggcaatgcgaagaccgtgtacaacaacaactctagtcgctttgggaagtttgttcagctgaacatctgtcagaaaggaaatattcagggcgggagaattgtagattcttttcacatgaagatttattagaaaaaaaccgagtagtaagcnacgagatatatgaatattatctacgccagaactaaatatatttagaagacaagacaatcagtgaccaggaatcctttagggaagttattacggcaatggacgtgatgcagttcagcaaggaggaagtttgggaagtgtcgaggctgcttgctggtatactgcatcttgggaacatagaatttatcactgctggtggggcacaggtttccttcaaaacagctttgggcagatctgcggagttacttgggctggacccaacacagctcacagatgctttgacccagagatcaatgttcctcaggggagaagagatcctcacgcctctcaatgttcaacaggcagtagacagcagggactccctggccatggctctgtatgcgtgctgctttgagtgggtaatcaagaagatcaacagcaggatcaaaggcaatgaggacttcaagtctattggcatcctcgacatctttggatttgaaaactttgaggttaatcactttgaacagttcaatataaactatgcaaacgagaaacttcaggagtacttcaacaagcatattttttctttagaacaactagaatatagccgggaaggattagtgtgggaagatattgactggatagacaatggagaatgcctggacttgattgagaagaaacttggcctcctagcccttatcaatgaagaaagccattttcctcaagccacagacagcaccttattggagaagctacacagtcagcatgcgaataaccacttttatgtgaagcccagagttgcagttaacaattttggagtgaagcactatgctggagaggtgcaatatgatgtccgaggtatcttggagaagaacagagatacatttcgagatgaccttctcaatttgctaagagaaagccgatttgactttatctacgatctttttgaacatgtttcaagccgcaacaaccaggataccttgaaatgtggaagcaaacatcggcggcctacagtcagctcacagttcaaggactcactgcattccttaatggcaacgctaagctcctctaatcctttctttgttcgctgtatcaagccaaacatgcagaagatgccagaccagtttgaccaggcggttgtgctgaaccagctgcggtactcagggatgctggagactgtgagaatccgcaaagctgggtatgcggtccgaagaccctttcaggacttttacaaaaggtataaagtgctgatgaggaatctggctctgcctgaggacgtccgagggaagtgcacgagcctgctgcagctctatgatgcctccaacagcgagtggcagctggggaagaccaaggtctttcttcgagaatccttggaacagaaactggagaagcggagggaagaggaagtgagccacgcggccatggtgattcgggcccatgtcttgggcttcttagcacgaaaacaatacagaaaggtcctttattgtgtggtgataatacagaagaattacagagcattccttctgaggaggagatttttgcacctgaaaaaggcagccatagttttccagaagcaactcagaggtcagattgctcggagagtttacagacaattgctggcagagaaaagggagcaagaagaaaagaagaaacaggaagaggaagaaaagaagaaacgggaggaagaagaaagagaaagagagagagagcgaagagaagccgagctccgcgcccagcaggaagaagaaacgaggaagcagcaagaactcgaagccttgcagaagagccagaaggaagctgaactgacccgtgaactggagaaacagaaggaaaataagcaggtggaagagatcctccgtctggagaaagaaatcgaggacctgcagcgcatgaaggagcagcaggagctgtcgctgaccgaggcttccctgcagaagctgcaggagcggcgggaccaggagctccgcaggctggaggaggaagcgtgcagggcggcccaggagttcctcgagtccctcaatttcgacgagatcgacgagtgtgtccggaatatcgagcggtccctgtcggtgggaagcgaattttccagcgagctggctgagagcgcatgcgaggagaagcccaacttcaacttcagccagccctacccagaggaggaggtcgatgagggcttcgaagccgacgacgacgccttcaaggactcccccaaccccagcgagcacggccactcagaccagcgaacaagtggcatccggaccagcgatgactcttcagaggaggacccatacatgaacgacacggtggtgcccaccagccccagtgcggacagcacggtgctgctcgccccatcagtgcaggactccgggagcctacacaactcctccagcggcgagtccacctactgcatgccccagaacgctggggacttgccctccccagacggcgactacgactacgaccaggatgactatgaggacggtgccatcacttccggcagcagcgtgaccttctccaactcctacggcagccagtggtcccccgactaccgctgctctgtggggacctacaacagctcgggtgcctaccggttcagctctgagggggcgcagtcctcgtttgaagatagtgaagaggactttgattccaggtttgatacagatgatgagctttcataccggcgtgactctgtgtacagctgtgtcactctgccgtatttccacagctttctgtacatgaaaggtggcctgatgaactcttggaaacgccgctggtgcgtcctcaaggatgaaaccttcttgtggttccgctccaagcaggaggccctcaagcaaggctggctccacaaaaaaggggggggctcctccacgctgtccaggagaaattggaagaagcgctggtttgtcctccgccagtccaagctgatgtactttgaaaacgacagcgaggagaagctcaagggcaccgtagaagtgcgaacggcaaaagagatcatagataacaccaccaaggagaatgggatcgacatcattatggccgataggactttccacctgattgcagagtccccagaagatgccagccagtggttcagcgtgctgagtcaggtccacgcgtccacggaccaggagatccaggagatgcatgatgagcaggcaaacccacagaatgctgtgggcaccttggatgtggggctgattgattctgtgtgtgcctctgacagccctgatagacccaactcgtttgtgatcatcacggccaaccgggtgctgcactgcaacgccgacacgccggaggagatgcaccactggataaccctgctgcagaggtccaaaggggacaccagagtggagggccaggaattcatcgtgagaggatggttgcacaaagaggtgaagaacagtccaaagatgtcttcactgaaactgaagaaacggtggtttgtactcacccacaattccctggattactacaagagttcagagaagaacgcgctcaaactggggaccctggtcctcaacagcctctgctctgtcgtccccccagatgagaagatattcaaagagacaggctactggaacgtcaccgtgtacgggcgcaagcactgttaccggctctacaccaagctgctcaacgaggccacccggtggtccagtgccattcaaaacgtgactgacaccaaggccccgatcgacacccccacccagcagctgattcaagatatcaaggagaactgcctgaactcggatgtggtggaacagatttacaagcggaacccgatccttcgatacacccatcaccccttgcactccccgctcctgccccttccgtatggggacataaatctcaacttgctcaaagacaaaggctataccacccttcaggatgaggccatcaagatattcaattccctgcagcaactggagtccatgtctgacccaattccaataatccagggcatcctacagacagggcatgacctgcgacctctgcgggacgagctgtactgccagcttatcaaacagaccaacaaagtgccccaccccggcagtgtgggcaacctgtacagctggcagatcctgacatgcctgagctgcaccttcctgccgagtcgagggattctcaagtatctcaagttccatctgaaaaggatacgggaacagtttccaggaaccgagatggaaaaatacgctctcttcacttacgaatctcttaagaaaaccaaatgccgagagtttgtgccttcccgagatgaaatagaagctctgatccacaggcaggaaatgacatccacggtctattgccatggcggcggctcctgcaagatcaccatcaactcccacaccaccgctggggaggtggtggagaagctgatccgaggcctggccatggaggacagcaggaacatgtttgctttgtttgaatacaacggccacgtcgacaaagccattgaaagtcgaaccgtcgtagctgatgtcttagccaagtttgaaaagctggctgccacatccgaggttggggacctgccatggaaattctacttcaaactttactgcttcctggacacagacaacgtgccaaaagacagtgtggagtttgcatttatgtttgaacaggcccacgaagcggttatccatggccaccatccagccccggaagaaaacctccaggttcttgctgccctgcgactccagtatctgcagggggattatactctgcacgctgccatcccacctctcgaagaggtttattccctgcagagactcaaggcccgcatcagccagtcaaccaaaaccttcaccccttgtgaacggctggagaagaggcggacgagcttcctagaggggaccctgaggcggagcttccggacaggatccgtggtccggcagaaggtcgaggaggagcagatgctggacatgtggattaaggaagaagtctcctctgctcgagccagtatcattgacaagtggaggaaatttcagggaatgaaccaggaacaggccatggccaagtacatggccttgatcaaggagtggcctggctatggctcgacgctgtttgatgtggagtgcaaggaaggtggcttccctcaggaactctggttgggtgtcagcgcggacgccgtctccgtctacaagcgtggagagggaagaccactggaagtcttccagtatgaacacatcctctcttttggggcacccctggcgaatacgtataagatcgtggtcgatgagagggagctgctctttgaaaccagtgaggtggtggatgtggccaagctcatgaaagcctacatcagcatgatcgtgaagaagcgctacagcacgacacgctccgccagcagccagggcagctccaggtgaaggcgggacagagcccacctgtctttgctacctgaacgcaccaccctctggcctaggctggctccagtgtgccatgcccagccaaaacaaacacagagctgcccaggctttctggaagcttctggtctgagggaggtgtctccgaggatccttttgcctgccgccttcattgatcctgtattaagctgtcaactttaacagtctgcacagtttccaaagctttactactcttagaggacacatgccttaaaaaaggaggggaggaaccacgctgccaccaaagcagccggaagtgccttaacttgtggaaccaacactaatcgaccgtaactgtgctactgaagggaactgcctttcccccttctgggggagacttaacagagcgtggaaggggggcattctctgtcaatgatgcactaacctcccaacctgatttccccgaatctgagggaaggtgagggagtgggaagggggatggagagctcgaggggacagtgtgtttgagctggagtgctgcgggcagcctttctcatggaatgacatgaatcaacttttttctttgtttcatcttttaagtgtacgtgcttgcctgttcgtgcatgtgttcataaactcaacactttaatcatggtttcatgagcattaaaaagcaaagggaaaaaggatgtgtaatggtgtacacagtctgtatattttaataatgcagagctatagtctcaattgttactttataaggtggttttattaacaaacccaaatcctggattttcctgtctttgctgtattttgaaaaacacgtgttgactccattgttttacatgtagcaaagtctgccatctgtgtctgctgtattataaacagataagcagcctacaagataactgtatttataaaccactcttcaacagctggctccagtgctggttttagaacaagaatgaagtcattttggagtctttcatgtctaaaagatttaagttaaaaacaaagtgttacttggaaggttagcttctatcattctggatagattacagatataataaccatgttgactatgggggagagacgctgcattccagaaacgtcttaacacttgagtgaatcttcaaaggaccctgacattaaatgctgaggctttaatacacacatattttatcccaagtttataatggtggtctgaacaaggcacctgtaaataaatcagcatttatgaccagaagaaaaataatctggtcttggactttttatttttatatggaaaagttttaaggacttgggccaactaagtctacccacacgaaaaaagaaatttgccttgtccctttgtgtacaaccatgcaaaactgtttgttggctcacagaagttctgacaataaaagatactagctaaca

SEQ ID NO: 324130 - DNA, 3619 bp, Homo sapiens
agaagccaggaagaaggcactgagtctcggttcacacagaggtgatgctgacggtagggctaaggggctttgtttccttctcatcttgtggctcagacccaactcgtttgtgatcatcacggccaaccgggtgctgcactgcaacgccgacacgccggaggagatgcaccactggataaccctgctgcagaggtccaaaggggacaccagagtggagggccaggaattcatcgtgagaggatggttgcacaaagaggtgaagaacagtccaaagatgtcttcactgaaactgaagaaacggtggtttgtactcacccacaattccctggattactacaagagttcagagaagaacgcgctcaaactggggaccctggtcctcaacagcctctgctctgtcgtccccccagatgagaagatattcaaagagacaggctactggaacgtcaccgtgtacgggcgcaagcactgttaccggctctacaccaagctgctcaacgaggccacccggtggtccagtgccattcaaaacgtgactgacaccaaggccccgatcgacacccccacccagcagctgattcaagatatcaaggagaactgcctgaactcggatgtggtggaacagatttacaagcggaacccgatccttcgatacacccatcaccccttgcactccccgctcctgccccttccgtatggggacataaatctcaacttgctcaaagacaaaggctataccacccttcaggatgaggccatcaagatattcaattccctgcagcaactggagtccatgtctgacccaattccaataatccagggcatcctacagacagggcatgacctgcgacctctgcgggacgagctgtactgccagcttatcaaacagaccaacaaagtgccccaccccggcagtgtgggcaacctgtacagctggcagatcctgacatgcctgagctgcaccttcctgccgagtcgagggattctcaagtatctcaagttccatctgaaaaggatacgggaacagtttccaggaaccgagatggaaaaatacgctctcttcacttacgaatctcttaagaaaaccaaatgccgagagtttgtgccttcccgagatgaaatagaagctctgatccacaggcaggaaatgacatccacggtctattgccatggcggcggctcctgcaagatcaccatcaactcccacaccaccgctggggaggtggtggagaagctgatccgaggcctggccatggaggacagcaggaacatgtttgctttgtttgaatacaacggccacgtcgacaaagccattgaaagtcgaaccgtcgtagctgatgtcttagccaagtttgaaaagctggctgccacatccgaggttggggacctgccatggaaattctacttcaaactttactgcttcctggacacagacaacgtgccaaaagacagtgtggagtttgcatttatgtttgaacaggcccacgaagcggttatccatggccaccatccagccccggaagaaaacctccaggttcttgctgccctgcgactccagtatctgcagggggattatactctgcacgctgccatcccacctctcgaagaggtttattccctgcagagactcaaggcccgcatcagccagtcaaccaaaaccttcaccccttgtgaacggctggagaagaggcggacgagcttcctagaggggaccctgaggcggagcttccggacaggatccgtggtccggcagaaggtcgaggaggagcagatgctggacatgtggattaaggaagaagtctcctctgctcgagccagtatcattgacaagtggaggaaatttcagggaatgaaccaggaacaggccatggccaagtacatggccttgatcaaggagtggcctggctatggctcgacgctgtttgatgtggagtgcaaggaaggtggcttccctcaggaactctggttgggtgtcagcgcggacgccgtctccgtctacaagcgtggagagggaagaccactggaagtcttccagtatgaacacatcctctcttttggggcacccctggcgaatacgtataagatcgtggtcgatgagagggagctgctctttgaaaccagtgaggtggtggatgtggccaagctcatgaaagcctacatcagcatgatcgtgaagaagcgctacagcacgacacgctccgccagcagccagggcagctccaggtgaaggcgggacagagcccacctgtctttgctacctgaacgcaccaccctctggcctaggctggctccagtgtgccatgcccagccaaaacaaacacagagctgcccaggctttctggaagcttctggtctgagggaggtgtctccgaggatccttttgcctgccgccttcattgatcctgtattaagctgtcaactttaacagtctgcacagtttccaaagctttactactcttagaggacacatgccttaaaaaaggaggggaggaaccacgctgccaccaaagcagccggaagtgccttaacttgtggaaccaacactaatcgaccgtaactgtgctactgaagggaactgcctttcccccttctgggggagacttaacagagcgtggaaggggggcattctctgtcaatgatgcactaacctcccaacctgatttccccgaatctgagggaaggtgagggagtgggaagggggatggagagctcgaggggacagtgtgtttgagctggagtgctgcgggcagcctttctcatggaatgacatgaatcaacttttttctttgtttcatcttttaagtgtacgtgcttgcctgttcgtgcatgtgttcataaactcaacactttaatcatggtttcatgagcattaaaaagcaaagggaaaaaggatgtgtaatggtgtacacagtctgtatattttaataatgcagagctatagtctcaattgttactttataaggtggttttattaacaaacccaaatcctggattttcctgtctttgctgtattttgaaaaacacgtgttgactccattgttttacatgtagcaaagtctgccatctgtgtctgctgtattataaacagataagcagcctacaagataactgtatttataaaccactcttcaacagctggctccagtgctggttttagaacaagaatgaagtcattttggagtctttcatgtctaaaagatttaagttaaaaacaaagtgttacttggaaggttagcttctatcattctggatagattacagatataataaccatgttgactatgggggagagacgctgcattccagaaacgtcttaacacttgagtgaatcttcaaaggaccctgacattaaatgctgaggctttaatacacacatattttatcccaagtttataatggtggtctgaacaaggcacctgtaaataaatcagcatttatgaccagaagaaaaataatctggtcttggactttttatttttatatggaaaagttttaaggacttgggccaactaagtctacccacacgaaaaaagaaatttgccttgtccctttgtgtacaaccatgcaaaactgtttgttggctcacagaagttctgacaataaaagatactagctaaca

SEQ ID NO: 324131 - DNA, 6327 bp, Homo sapiens
gagctggctgagccgcggcgcgggactgctcacctccaagcgctcgcgcggggatcgcggctcctgctcactttgcggcccgctgtcctcctgcccgccccgagggcccccggccggagcgcagagggagggggccgcgctcgccagcaccccgccgccttcccccgcctgggggaagaatgtgccaccagctgttctccgcttgcgagcgctgcgcccagtagtgaggaacttggaggaagaagagacaaaggctgccgtcgggacgggcgagttagggacttgggtttgggcgaacaaaaggtgagaaggacaagaagggaccgggcgatggcagcaggggagccccgcgggcgcgcgtcctcgggagtggcgccgtgacacgcatggtttccccggacccgcggcggcgctgacttccgcgagtcggagcggcactcggcgagtccgggactgcgctggaacaatggataacttcttcaccgagggaacacgggtctggctgagagaaaatggccagcattttccaagtactgtaaattcctgtgcagaaggcatcgtcgtcttccggacagactatggtcaggtattcacttacaagcagagcacaattacccaccagaaggtgactgctatgcaccccacgaacgaggagggcgtggatgacatggcgtccttgacagagctccatggcggctccatcatgtataacttattccagcggtataagagaaatcaaatatatacctacatcggctccatcctggcctccgtgaacccctaccagcccatcgccgggctgtacgagcctgccaccatggagcagtacagccggcgccacctgggcgagctgcccccgcacatcttcgccatcgccaacgagtgctaccgctgcctgtggaagcgccacgacaaccagtgcatcctcatcagtggtgaaagtggggcaggtaaaaccgaaagcactaaattgatcctcaagtttctgtcagtcatcagtcaacagtctttggaattgtccttaaaggagaagacatcctgtgttgaacgagctattcttgaaagcagccccatcatggaagctttcggcaatgcgaagaccgtgtacaacaacaactctagtcgctttgggaagtttgttcagctgaacatctgtcagaaaggaaatattcagggcgggagaattgtagattatttattagaaaaaaaccgagtagtaaggcaaaatcccggggaaaggaattatcacatattttatgcactgctggcagggctggaacatgaagaaagagaagaattttatttatctacgccagaaaactaccactacttgaatcagtctggatgtgtagaagacaagacaatcagtgaccaggaatcctttagggaagttattacggcaatggacgtgatgcagttcagcaaggaggaagtttgggaagtgtcgaggctgcttgctggtatactgcatcttgggaacatagaatttatcactgctggtggggcacaggtttccttcaaaacagctttgggcagatctgcggagttacttgggctggacccaacacagctcacagatgctttgacccagagatcaatgttcctcaggggagaagagatcctcacgcctctcaatgttcaacaggcagtagacagcagggactccctggccatggctctgtatgcgtgctgctttgagtgggtaatcaagaagatcaacagcaggatcaaaggcaatgaggacttcaagtctattggcatcctcgacatctttggatttgaaaactttgaggttaatcactttgaacagttcaatataaactatgcaaacgagaaacttcaggagtacttcaacaagcatattttttctttagaacaactagaatatagccgggaaggattagtgtgggaagatattgactggatagacaatggagaatgcctggacttgattgagaagaaacttggcctcctagcccttatcaatgaagaaagccattttcctcaagccacagacagcaccttattggagaagctacacagtcagcatgcgaataaccacttttatgtgaagcccagagttgcagttaacaattttggagtgaagcactatgctggagaggtgcaatatgatgtccgaggtatcttggagaagaacagagatacatttcgagatgaccttctcaatttgctaagagaaagccgatttgactttatctacgatctttttgaacatgtttcaagccgcaacaaccaggataccttgaaatgtggaagcaaacatcggcggcctacagtcagctcacagttcaaggactcactgcattccttaatggcaacgctaagctcctctaatcctttctttgttcgctgtatcaagccaaacatgcagaagatgccagaccagtttgaccaggcggttgtgctgaaccagctgcggtactcagggatgctggagactgtgagaatccgcaaagctgggtatgcggtccgaagaccctttcaggacttttacaaaaggtataaagtgctgatgaggaatctggctctgcctgaggacgtccgagggaagtgcacgagcctgctgcagctctatgatgcctccaacagcgagtggcagctggggaagaccaaggtctttcttcgagaatccttggaacagaaactggagaagcggagggaagaggaagtgagccacgcggccatggtgattcgggcccatgtcttgggcttcttagcacgaaaacaatacagaaaggtcctttattgtgtggtgataatacagaagaattacagagcattccttctgaggaggagatttttgcacctgaaaaaggcagccatagttttccagaagcaactcagaggtcagattgctcggagagtttacagacaattgctggcagagaaaagggagcaagaagaaaagaagaaacaggaagaggaagaaaagaagaaacgggaggaagaagaaagagaaagagagagagagcgaagagaagccgagctccgcgcccagcaggaagaagaaacgaggaagcagcaagaactcgaagccttgcagaagagccagaaggaagctgaactgacccgtgaactggagaaacagaaggaaaataagcaggtggaagagatcctccgtctggagaaagaaatcgaggacctgcagcgcatgaaggagcagcaggagctgtcgctgaccgaggcttccctgcagaagctgcaggagcggcgggaccaggagctccgcaggctggaggaggaagcgtgcagggcggcccaggagttcctcgagtccctcaatttcgacgagatcgacgagtgtgtccggaatatcgagcggtccctgtcggtgggaagcgaattttccagcgagctggctgagagcgcatgcgaggagaagcccaacttcaacttcagccagccctacccagaggaggaggtcgatgagggcttcgaagccgacgacgacgccttcaaggactcccccaaccccagcgagcacggccactcagaccagcgaacaagtggcatccggaccagcgatgactcttcagaggaggacccatacatgaacgacacggtggtgcccaccagccccagtgcggacagcacggtgctgctcgccccatcagtgcaggactccgggagcctacacaactcctccagcggcgagtccacctactgcatgccccagaacgctggggacttgccctccccagacggcgactacgactacgaccaggatgactatgaggacggtgccatcacttccggcagcagcgtgaccttctccaactcctacggcagccagtggtcccccgactaccgctgctctgtggggacctacaacagctcgggtgcctaccggttcagctctgagggggcgcagtcctcgtttgaagatagtgaagaggactttgattccaggtttgatacagatgatgagctttcataccggcgtgactctgtgtacagctgtgtcactctgccgtatttccacagctttctgtacatgaaaggtggcctgatgaactcttggaaacgccgctggtgcgtcctcaaggatgaaaccttcttgtggttccgctccaagcaggaggccctcaagcaaggctggctccacaaaaaaggggggggctcctccacgctgtccaggagaaattggaagaagcgctggtttgtcctccgccagtccaagctgatgtactttgaaaacgacagcgaggagaagctcaagggcaccgtagaagtgcgaacggcaaaagagatcatagataacaccaccaaggagaatgggatcgacatcattatggccgataggactttccacctgattgcagagtccccagaagatgccagccagtggttcagcgtgctgagtcaggtccacgcgtccacggaccaggagatccaggagatgcatgatgagcaggcaaacccacagaatgctgtgggcaccttggatgtggggctgattgattctgtgtgtgcctctgacagccctgatagacccaactcgtttgtgatcatcacggccaaccgggtgctgcactgcaacgccgacacgccggaggagatgcaccactggataaccctgctgcagaggtccaaaggggacaccagagtggagggccaggaattcatcgtgagaggatggttgcacaaagaggtgaagaacagtccaaagatgtcttcactgaaactgaagaaacggtggtttgtactcacccacaattccctggattactacaagagttcagagaagaacgcgctcaaactggggaccctggtcctcaacagcctctgctctgtcgtccccccagatgagaagatattcaaagagacaggctactggaacgtcaccgtgtacgggcgcaagcactgttaccggctctacaccaagctgctcaacgaggccacccggtggtccagtgccattcaaaacgtgactgacaccaaggccccgatcgacacccccacccagcagctgattcaagatatcaaggagaactgcctgaactcggatgtggtggaacagatttacaagcggaacccgatccttcgatacacccatcaccccttgcactccccgctcctgccccttccgtatggggacataaatctcaacttgctcaaagacaaaggctataccacccttcaggatgaggccatcaagatattcaattccctgcagcaactggagtccatgtctgacccaattccaataatccagggcatcctacagacagggcatgacctgcgacctctgcgggacgagctgtactgccagcttatcaaacagaccaacaaagtgccccaccccggcagtgtgggcaacctgtacagctggcagatcctgacatgcctgagctgcaccttcctgccgagtcgagggattctcaagtatctcaagttccatctgaaaaggatacgggaacagtttccaggaaccgagatggaaaaatacgctctcttcacttacgaatctcttaagaaaaccaaatgccgagagtttgtgccttcccgagatgaaatagaagctctgatccacaggcaggaaatgacatccacggtctattgccatggcggcggctcctgcaagatcaccatcaactcccacaccaccgctggggaggtggtggagaagctgatccgaggcctggccatggaggacagcaggaacatgtttgctttgtttgaatacaacggccacgtcgacaaagccattgaaagtcgaaccgtcgtagctgatgtcttagccaagtttgaaaagctggctgccacatccgaggttggggacctgccatggaaattctacttcaaactttactgcttcctggacacagacaacgtgccaaaagacagtgtggagtttgcatttatgtttgaacaggcccacgaagcggttatccatggccaccatccagccccggaagaaaacctccaggttcttgctgccctgcgactccagtatctgcagggggattatactctgcacggctgcattccagaaacgtcttaacacttgagtgaatcttcaaaggaccctgacattaaatgctgaggctttaatacacacatattttatcccaagtttataatggtggtctgaacaaggcacctgtaaataaatcagcatttatgaccagaagaaaaataatctggtcttggactttttatttttatatggaaaagttttaaggacttgggccaactaagtctacccacacgaaaaaagaaatttgccttgtccctttgtgtacaaccatgcaaaactgtttgttggctcacagaagttctgacaataaaagatactagctaaca

SEQ ID NO: 324132 - DNA, 4970 bp, Homo sapiens
gagctggctgagccgcggcgcgggactgctcacctccaagcgctcgcgcggggatcgcggctcctgctcactttgcggcccgctgtcctcctgcccgccccgagggcccccggccggagcgcagagggagggggccgcgctcgccagcaccccgccgccttcccccgcctgggggaagaatgtgccaccagctgttctccgcttgcgagcgctgcgcccagtagtgaggaacttggaggaagaagagacaaaggctgccgtcgggacgggcgagttagggacttgggtttgggcgaacaaaaggtgagaaggacaagaagggaccgggcgatggcagcaggggagccccgcgggcgcgcgtcctcgggagtggcgccgtgacacgcatggtttccccggacccgcggcggcgctgacttccgcgagtcggagcggcactcggcgagtccgggactgcgctggaacaatggataacttcttcaccgagggaacacgggtctggctgagagaaaatggccagcattttccaagtactgtaaattcctgtgcagaaggcatcgtcgtcttccggacagactatggtcaggtattcacttacaagcagagcacaattacccaccagaaggtgactgctatgcaccccacgaacgaggagggcgtggatgacatggcgtccttgacagagctccatggcggctccatcatgtataacttattccagcggtataagagaaatcaaatatatacctacatcggctccatcctggcctccgtgaacccctaccagcccatcgccgggctgtacgagcctgccaccatggagcagtacagccggcgccacctgggcgagctgcccccgcacatcttcgccatcgccaacgagtgctaccgctgcctgtggaagcgccacgacaaccagtgcatcctcatcagtggtgaaagtggggcaggtaaaaccgaaagcactaaattgatcctcaagtttctgtcagtcatcagtcaacagtctttggaattgtccttaaaggagaagacatcctgtgttgaacgagctattcttgaaagcagccccatcatggaagctttcggcaatgcgaagaccgtgtacaacaacaactctagtcgctttgggaagtttgttcagctgaacatctgtcagaaaggaaatattcagggcgggagaattgtagattatttattagaaaaaaaccgagtagtaaggcaaaatcccggggaaaggaattatcacatattttatgcactgctggcagggctggaacatgaagaaagagaagaattttatttatctacgccagaaaactaccactacttgaatcagtctggatgtgtagaagacaagacaatcagtgaccaggaatcctttagggaagttattacggcaatggacgtgatgcagttcagcaaggaggaagtttgggaagtgtcgaggctgcttgctggtatactgcatcttgggaacatagaatttatcactgctggtggggcacaggtttccttcaaaacagctttgggcagatctgcggagttacttgggctggacccaacacagctcacagatgctttgacccagagatcaatgttcctcaggggagaagagatcctcacgcctctcaatgttcaacaggcagtagacagcagggactccctggccatggctctgtatgcgtgctgctttgagtgggtaatcaagaagatcaacagcaggatcaaaggcaatgaggacttcaagtctattggcatcctcgacatctttggatttgaaaactttgaggttaatcactttgaacagttcaatataaactatgcaaacgagaaacttcaggagtacttcaacaagcatattttttctttagaacaactagaatatagccgggaaggattagtgtgggaagatattgactggatagacaatggagaatgcctggacttgattgagaagaaacttggcctcctagcccttatcaatgaagaaagccattttcctcaagccacagacagcaccttattggagaagctacacagtcagcatgcgaataaccacttttatgtgaagcccagagttgcagttaacaattttggagtgaagcactatgctggagaggtgcaatatgatgtccgaggtatcttggagaagaacagagatacatttcgagatgaccttctcaatttgctaagagaaagccgatttgactttatctacgatctttttgaacatgtttcaagccgcaacaaccaggataccttgaaatgtggaagcaaacatcggcggcctacagtcagctcacagttcaaggactcactgcattccttaatggcaacgctaagctcctctaatcctttctttgttcgctgtatcaagccaaacatgcagaagatgccagaccagtttgaccaggcggttgtgctgaaccagctgcggtactcagggatgctggagactgtgagaatccgcaaagctgggtatgcggtccgaagaccctttcaggacttttacaaaaggtataaagtgctgatgaggaatctggctctgcctgaggacgtccgagggaagtgcacgagcctgctgcagctctatgatgcctccaacagcgagtggcagctggggaagaccaaggtctttcttcgagaatccttggaacagaaactggagaagcggagggaagaggaagtgagccacgcggccatggtgattcgggcccatgtcttgggcttcttagcacgaaaacaatacagaaaggtcctttattgtgtggtgataatacagaagaattacagagcattccttctgaggaggagatttttgcacctgaaaaaggcagccatagttttccagaagcaactcagaggtcagattgctcggagagtttacagacaattgctggcagagaaaagggagcaagaagaaaagaagaaacaggaagaggaagaaaagaagaaacgggaggaagaagaaagagaaagagagagagagcgaagagaagccgagctccgcgcccagcaggaagaagaaacgaggaagcagcaagaactcgaagccttgcagaagagccagaaggaagctgaactgacccgtgaactggagaaacagaaggaaaataagcaggtggaagagatcctccgtctggagaaagaaatcgaggacctgcagcgcatgaaggagcagcaggagctgtcgctgaccgaggcttccctgcagaagctgcaggagcggcgggaccaggagctccgcaggctggaggaggaagcgtgcagggcggcccaggagttcctcgagtccctcaatttcgacgagatcgacgagtgtgtccggaatatcgagcggtccctgtcggtgggaagcgaattttccagcgagctggctgagagcgcatgcgaggagaagcccaacttcaacttcagccagccctacccagaggaggaggtcgatgagggcttcgaagccgacgacgacgccttcaaggactcccccaaccccagcgagcacggccactcagaccagcgaacaagtggcatccggaccagcgatgactcttcagaggaggacccatacatgaacgacacggtggtgcccaccagccccagtgcggacagcacggtgctgctcgccccatcagtgcaggactccgggagcctacacaactcctccagcggcgagtccacctactgcatgccccagaacgctggggacttgccctccccagacggcgactacgactacgaccaggatgactatgaggacggtgccatcacttccggcagcagcgtgaccttctccaactcctacggcagccagtggtcccccgactaccgctgctctgtggggacctacaacagctcgggtgcctaccggttcagctctgagggggcgcagtcctcgtttgaagatagtgaagaggactttgattccaggtttgatacagatgatgagctttcataccggcgtgactctgtgtacagctgtgtcactctgccgtatttccacagctttctgtacatgaaaggtggcctgatgaactcttggaaacgccgctggtgcgtcctcaaggatgaaaccttcttgtggttccgctccaagcaggaggccctcaagcaaggctggctccacaaaaaaggggggggctcctccacgctgtccaggagaaattggaagaagcgctggtttgtcctccgccagtccaagctgatgtactttgaaaacgacagcgaggagaagctcaagggcaccgtagaagtgcgaacggcaaaagagatcatagataacaccaccaaggagaatgggatcgacatcattatggccgataggactttccacctgattgcagagtccccagaagatgccagccagtggttcagcgtgctgagtcaggtccacgcgtccacggaccaggagatccaggagatgcatgatgagcaggcaaacccacagaatgctgtgggcaccttggatgtggggctgattgattctgtgtgtgcctctgacagccctgataggtaagctcagatgtggctcttaacaaaaacagctcatcacctgtgtgtgtccacaggtgtctgtgctgctgggtcacgaccctcttcacagggctgtgaaatcacgcaaggctgtgtgttcccaccttgtcaaccccagcaatccagtcttccttcttggtacccaattttacatcacctggaagtctccttctctgggtatctttggagtcctggggaaaaccgtgggaacctggacaattttaaaaagcatgaggaatatttttaatgtgtatacagggacaaacttgggatttatacaggaagaaaatgcctgtttaggaaaatgatattccagcaaaggggaagggagtcattctcctttctgaacttaacgataaacttgaaaaggattttgatgataatgtatatgtagagtattaataaaccacaaacattgattttccttgacatttctt

SEQ ID NO: 324133 - DNA, 3414 bp, Homo sapiens
gagctggctgagccgcggcgcgggactgctcacctccaagcgctcgcgcggggatcgcggctcctgctcactttgcggcccgctgtcctcctgcccgccccgagggcccccggccggagcgcagagggagggggccgcgctcgccagcaccccgccgccttcccccgcctgggggaagaatgtgccaccagctgttctccgcttgcgagcgctgcgcccagtagtgaggaacttggaggaagaagagacaaaggctgccgtcgggacgggcgagttagggacttgggtttgggcgaacaaaaggtgagaaggacaagaagggaccgggcgatggcagcaggggagccccgcgggcgcgcgtcctcgggagtggcgccgtgacacgcatggtttccccggacccgcggcggcgctgacttccgcgagtcggagcggcactcggcgagtccgggactgcgctggaacaatggataacttcttcaccgagggaacacgggtctggctgagagaaaatggccagcattttccaagtactgtaaattcctgtgcagaaggcatcgtcgtcttccggacagactatggtcaggtattcacttacaagcagagcacaattacccaccagaaggtgactgctatgcaccccacgaacgaggagggcgtggatgacatggcgtccttgacagagctccatggcggctccatcatgtataacttattccagcggtataagagaaatcaaatatatacctacatcggctccatcctggcctccgtgaacccctaccagcccatcgccgggctgtacgagcctgccaccatggagcagtacagccggcgccacctgggcgagctgcccccgcacatcttcgccatcgccaacgagtgctaccgctgcctgtggaagcgccacgacaaccagtgcatcctcatcagtggtgaaagtggggcaggtaaaaccgaaagcactaaattgatcctcaagtttctgtcagtcatcagtcaacagtctttggaattgtccttaaaggagaagacatcctgtgttgaacgagctattcttgaaagcagccccatcatggaagctttcggcaatgcgaagaccgtgtacaacaacaactctagtcgctttgggaagtttgttcagctgaacatctgtcagaaaggaaatattcagggcgggagaattgtagattatttattagaaaaaaaccgagtagtaaggcaaaatcccggggaaaggaattatcacatattttatgcactgctggcagggctggaacatgaagaaagagaagaattttatttatctacgccagaaaactaccactacttgaatcagtctggatgtgtagaagacaagacaatcagtgaccaggaatcctttagggaagttattacggcaatggacgtgatgcagttcagcaaggaggaagtttgggaagtgtcgaggctgcttgctggtatactgcatcttgggaacatagaatttatcactgctggtggggcacaggtttccttcaaaacagctttgggcagatctgcggagttacttgggctggacccaacacagctcacagatgctttgacccagagatcaatgttcctcaggggagaagagatcctcacgcctctcaatgttcaacaggcagtagacagcagggactccctggccatggctctgtatgcgtgctgctttgagtgggtaatcaagaagatcaacagcaggatcaaaggcaatgaggacttcaagtctattggcatcctcgacatctttggatttgaaaactttgaggttaatcactttgaacagttcaatataaactatgcaaacgagaaacttcaggagtacttcaacaagcatattttttctttagaacaactagaatatagccgggaaggattagtgtgggaagatattgactggatagacaatggagaatgcctggacttgattgagaagaaacttggcctcctagcccttatcaatgaagaaagccattttcctcaagccacagacagcaccttattggagaagctacacagtcagcatgcgaataaccacttttatgtgaagcccagagttgcagttaacaattttggagtgaagcactatgctggagaggtgcaatatgatgtccgaggtatcttggagaagaacagagatacatttcgagatgaccttctcaatttgctaagagaaagccgatttgactttatctacgatctttttgaacatgtttcaagccgcaacaaccaggataccttgaaatgtggaagcaaacatcggcggcctacagtcagctcacagttcaaggactcactgcattccttaatggcaacgctaagctcctctaatcctttctttgttcgctgtatcaagccaaacatgcagaagatgccagaccagtttgaccaggcggttgtgctgaaccagctgcggtactcagggatgctggagactgtgagaatccgcaaagctgggtatgcggtccgaagaccctttcaggacttttacaaaaggtataaagtgctgatgaggaatctggctctgcctgaggacgtccgagggaagtgcacgagcctgctgcagctctatgatgcctccaacagcgagtggcagctggggaagaccaaggtctttcttcgagaatccttggaacagaaactggagaagcggagggaagaggaagtgagccacgcggccatggtgattcgggcccatgtcttgggcttcttagcacgaaaacaatacagaaaggtcctttattgtgtggtgataatacagaagaattacagagcattccttctgaggaggagatttttgcacctgaaaaaggcagccatagttttccagaagcaactcagaggtcagattgctcggagagtttacagacaattgctggcagagaaaagggagcaagaagaaaagaagaaacaggaagaggaagaaaagaagaaacgggaggaagaagaaagagaaagagagagagagcgaagagaagccgagctccgcgcccagcaggaagaagaaacgaggaagcagcaagaactcgaagccttgcagaagagccagaaggaagctgaactgacccgtgaactggagaaacagaaggaaaataagcaggtggaagagatcctccgtctggagaaagaaatcgaggacctgcagcgcatgaaggagcagcaggagctgtcgctgaccgaggcttccctgcagaagctgcaggagcggcgggaccaggagctccgcaggctggaggaggagatttttgcacctgaaaaaggcagccatagttttccagaagcaactcagaggtcagattgctcggagagtttacagacaattgctggcagagaaaagggagcaagaagaaaagaagaaacaggaagaggaagaaaagaagaaacgggagg

SEQ ID NO: 324134 - DNA, 914 bp, Homo sapiens
gagctggctgagccgcggcgcgggactgctcacctccaagcgctcgcgcggggatcgcggctcctgctcactttgcggcccgctgtcctcctgcccgccccgagggcccccggccggagcgcagagggagggggccgcgctcgccagcaccccgccgccttcccccgcctgggggaagaatgtgccaccagctgttctccgcttgcgagcgctgcgcccagtagtgaggaacttggaggaagaagagacaaaggctgccgtcgggacgggcgagttagggacttgggtttgggcgaacaaaaggtgagaaggacaagaagggaccgggcgatggcagcaggggagccccgcgggcgcgcgtcctcgggagtggcgccgtgacacgcatggtttccccggacccgcggcggcgctgacttccgcgagtcggagcggcactcggcgagtccgggactgcgctggaacaatggataacttcttcaccgagggaacacgggtctggctgagagaaaatggccagcattttccaagtactgtaaattcctgtgcagaaggcatcgtcgtcttccggacagactatggtcaggtattcacttacaagcagagcacaattacccaccagaaggtgactgctatgcaccccacgaacgaggagggcgtggatgacatggcgtccttgacagagctccatggcggctccatcatgtataacttattccagcggtataagagaaatcaaatatatccattcaccggagatgtcagcgtctgttggactccgctcacatcgagacaagaccgccacctgtcagaacagccactgcttctccacatttgatcctggctcggagcaatgcctgtctatatctttaaaagagaaaaaaaataaaatgacttgaattgttccaaagatg

SEQ ID NO: 324135 - DNA, 496 bp, Homo sapiens
atttttaaatgtttcatttcagaatggcatcttgagtctgaaacacaatgacttttctctaagtttaccctgctcaaatagaaatatttgtgtaacatgtaagtgtctgtctggatggcagaaactagcaactgattttctgatattcctaagccagtctcagtgagattttttatcacctttgaatttgtatatgaatccaccaatagtggcgacagttgttatatttttagctgataaatcatagttgaggttcttaagatattcatttggataatcaggatagcttactaggagatattaaattgcgcattccatgtggactataatacccacacacaccaggcaagtattcccatctatgtgagggcagagatgtttcattatgccacctgcccaccagggactgccaacaaggaactgaaggacatttttttttcttagagacagggtcttgctctgtcgcccaggccagagtgcagtgacactgcagcct

SEQ ID NO: 324136 - DNA, 291 bp, Homo sapiens
tgtgcaacatttggtatggtatctggtgtgatctttcagggtaaaagtaggtaaattaattgctgtccttatttggcccttactacacacaacacacaaatctcttccaccattgcaaaatgttagaagatgtatgtgctgtggccggacgcggtggctgacacctgtaatcccagcactctgagaagctgaggcaggcggatcacttgagtttaggagtttgaaactagcctggccaacatggtgaagtcccgtctctactaaaaacacaaaattagctgggcgtgatgg

SEQ ID NO: 324137 - DNA, 161 bp, Homo sapiens
gtcatttgtatatcttctttggagagatttcaagtctattgtccatttttaattagattttttatttttgttgtaaaaattctggatattaatcctttgtcagatatataacttgcaaataccattccgtgggttgaattttatctgttgatattttcttt

SEQ ID NO: 324138 - DNA, 296 bp, Homo sapiens
ccaaataaaatttactaagcacctacctccatactaatcaccctgatgagtcaaaggaatagcctgggcccttgacctcgagaggcttctgagggtccattatttctgtcattgactgcatgtgatacaatactgaccaacaagataccaggaggctcccggggaaggttttcttcctaaagagacccccaaggaataggagcccttttctgcccttggatgcaacgtttatagacggtaatatctgcaacagttgtggccacccttggaccaacaggagacaagcttgaagagaa

SEQ ID NO: 324139 - DNA, 214 bp, Homo sapiens
ctagagtatcccctcggaacgtgttatcctccagtaaatcagaaacaaaacagctttttctggagggctctctgcacccctgcaatgtcctaatgtgcccccacacctgcgtcacaaacttgcctaagcctcgacagaagcagccaggtatgtgcaccacttgggcagcttgtgaggtgcgggagttcccttggggctgcacggcactgggagg

SEQ ID NO: 324140 - DNA, 7132 bp, Homo sapiens
attctgcacctcctgacgtaaccacgtacacctcagagcactcgatacaggtggagagaccgcagggttccacggggtcccggacagcgcccaagtacggcaacgccgagctcatggagaccggggatggagtaccagtaagtagccgggtgtcagcaaaaatccagcagcttgtcaataccctcaaacgaccgaaacgaccacctttacgagaattctttgtcgatgactttgaagaattattagaagttcaacaaccggatccgaaccaaccaaagccggagggggcccagatgctggccatgcgcggagagcagctgggcgtggtcacgaactggccgccgtcgctggaggccgcactgcagaggtggggcaccatctcgcccaaggcgccctgcctgaccaccatggacaccaacgggaagcccctctacatcctcacttacggcaagctgtggacaagaagtatgaaggtcgcttacagcattctacacaaattaggcacaaagcaggaacccatggtccggcctggagatagggtggcactggtgttccccaacaatgatccggctgccttcatggcggctttctacggctgcctgctggccgaggtggtccccgtgcccatcgaggtgccactcaccaggaaggacgcagggagccagcagataggtttcttgcttggaagctgtggagttactgtagccttgactagtgacgcctgccataaaggacttccaaaaagcccaacgggagagatcccacagtttaaaggttggccaaagctgctgtggtttgtcacagagtctaaacatctctccaaaccgccccgagactggttcccacacattaaagatgccaataacgacactgcgtatattgagtacaagacgtgtaaggatggcagtgtgctgggtgtgacggtgacgaggactgcgctgctgacacactgccaggccctgacgcaggcgtgtggctacacggaagctgaaaccattgtgaatgtgctggatttcaagaaggacgtcgggctctggcatggcatcctgacaagcgtcatgaacatgatgcatgtgatcagcatcccgtactcgctgatgaaggtgaaccctctctcctggatccagaaggtctgccagtacaaagcaaaagtggcgtgtgtgaaatcgagggatatgcattgggcattagtagcacacagagatcagagagacatcaacctctcctctctgcgaatgctgatagtggcggacggcgcgaacccctggtctatttcttcttgcgatgcatttctcaatgtcttccaaagtaaaggccttcgacaggaggtcatctgtccttgtgccagctcgccagaggccctcactgtggccatccggaggcccacggatgacagtaaccagcccccgggccggggtgtcctctccatgcatggactgacctatggggtcattcgtgtggactcggaagagaagctgtccgtgctcaccgtgcaggatgtcggcctcgtgatgcctggagccatcatgtgttcagtgaagccagacggggttcctcagctgtgcagaacggatgagatcggggagctgtgtgtgtgtgcagttgcgacgggcacgtcctactatggcctctctggcatgaccaagaacacctttgaggtgtttcccatgacaagctccggggctccgatcagtgaatacccattcataaggacaggcttgctggggttcgtgggtcccggaggcctcgtcttcgtggtgggcaagatggatggcctcatggtggtcagcgggcgcaggcacaacgccgacgacatcgtggccactgcgctggccgtagaacccatgaagtttgtctaccggggaaggatagccgtgttctcggtgaccgtgctgcacgacgagaggatcgtgatcgtggctgagcagaggcctgactccacggaagaggacagtttccagtggatgagccgtgtgctgcaggcgattgacagtatacatcaagttggagtttattgcctggccttggtgccagcaaacaccctccccaaaaccccgcttggtgggatccatttatcagaaacaaaacagctttttctggagggctctctgcacccctgcaatgtcctaatgtgcccccacacctgcgtcacaaacttgcctaagcctcgacagaagcagccagaaatcggccctgcctctgtgatggtggggaacctggtctctgggaagagaatcgcccaggccagtggcagagacctgggtcagatcgaagataacgaccaggcacgcaagttcctgttcctctcagaggtcttgcagtggagagcacagaccaccccggaccacatcctctacacgctgctcaactgtcggggtgcgatagcgaactcgctgacctgcgtgcagctgcacaagagagctgagaagatcgccgtgatgctgatggagaggggccaccttcaggacggcgaccacgtggccttggtctaccccccaggaatagacctgatagcagcgttttatggttgcctgtacgcaggctgtgtgccaataaccgtccgtcccccgcacccacagaacatcgcgacgacgttgcctaccgtcaagatgattgtggaggtgagtcgctctgcctgtctgatgacgacacagctgatctgtaagttgctgcggtccagggaggcggcggcggctgtggacgtcaggacgtggcccctcatcctggacacagatgatttgccaaagaagcggcctgcccagatctgcaaaccttgcaacccagacactcttgcatatctcgacttcagcgtgtccacaactgggatgctagctggcgtaaagatgtctcacgcagccaccagtgccttctgccgttccattaagctgcagtgtgaactttacccctctagagaagtggccatctgcctggacccttactgtggactgggatttgtcctctggtgcctctgcagtgtgtattctgggcaccagtccatcctgatcccgccctctgagctggaaaccaaccccgccttgtggcttcttgccgtgagtcagtacaaagtccgagacacgttttgctcctactccgtgatggagctgtgcaccaaggggctgggctcgcaaacagagtccctcaaggcgcgagggctggacttgtcccgagtgaggacctgcgtggttgtggcggaagagaggcctcggatcgcactcacacagtcgttctcaaagctgtttaaggacctgggccttcacccgcgggccgtcagcacctcgttcggttgcagggtgaacctggcgatttgcttgcagggaacctcaggacctgacccaaccactgtctacgtggacatgagagccctgagacacgacagagtccgcttagtggaaagaggatcccctcatagtctgcccctgatggaatcgggaaagatacttccaggggttcggattataattgccaacccagaaacaaaaggaccgctgggggactcacaccttggagagatttgggttcacagtgcccacaatgccagcggttatttcactatttacggagacgaatccctccagtcagatcacttcaactcaagactaagttttggagacacccagaccatctgggcacgcacaggctacttggggttcctgcggagaactgagctcacagatgcaaatggagagcgccatgatgccctctacgtggtaggggcactggacgaagccatggagctgcggggcatgcggtaccacccaatcgacattgagacctcggtcatcagagcccataaaagcgttacggaatgtgctgtgtttacctggacaaatttgttggtggttgtggttgagctggatgggtcggaacaagaagccttggacctggttcccttggtgaccaacgtggtcctggaggagcactacctgatcgtcggagtggtggtcgtggtggacatcggcgtcatccccatcaactcccgtggggagaagcagcgcatgcacctgcgagacgggtttttggcagaccagctagaccccatctatgtggcctacaacatgtagtctcgtctcttggcttccatggacttttctagagatgtagacattgttctccgtgtccactgaagcgtgcagacacagggcaacactcaccagaatacagccatttgtggtgagagtggaggaggaagaggaggaggaagaggacttctcacagcagccacgattggcatgggggtgaaatgtgaatttaccactgaatttcgctcagaaggactttggattactgccttcagtttgttggaaaagcccatttcaaaaactttcttttcttttctttcttttttaattattggataataagtgctttcttcgtaaatgtggtattttgttaagccgaaatagcaattaaaaaaatatcctgccctccagatgggttcttttaaacaatttatgtagtgtgacaaagaattgttttctctgttttaatgtgtcatgaaatcttaatgacatggatctgttactaatttaagccattgctagatctcatccttttaggaaagtttgaggtacgagaaaaccttccaaatagcaccttccaattagataatagcagctttctttgtcagaaatgtgctgaagaaacaaaggctggtatacggccttcgaagttagtatagaatgagaagaaattataaataaggtgtatttcggcaattatcttgcaaatatctttgtactaaactaaaaagataaaataagttaacttcctcaatatgtaattatgtacaaaacgtttaatttattttgatctctttagaactataaaagagaaaaacattcaagaatattaaagtcttgtaatgtttgctaatataaaaaagtgttgtattatcttgcgtggatagtatcacaacaaatatatatatatgaaatataaattcactaatgaacaaaggagattttaaagtttaagatgcagaacttgtcacttgcatggtgtgccccccgtactcacatacactctgctgttgccagcagtcgcagaccgcaggagccctgtctaaaagtttcttctagaaccagagaccagcaagtgaaattattgccatctcaaggatggcaaaagaattcaaagctcaatgtgcactatttttttctttgctgtgggacaacagtgaatgtgtttatgccagcgtgtgctgatgatactgaggggctttaggttggcaaatagcactgttttcttagctgcaagaattcattgcacaatgtttttcatcatttttgttaatgtcatctttttttggtccttgctacgaaaaggaatgcgattctgtggtcattcgcactgggttgcattgattccccctctgatggccaatgtggagtggacaaagtgtccggaactcacatcggtgatcgtcccctcgtcttaagacccagcccgctctgtgtgagcctctggggctccctcgctcagtgagcacagttccccgggggttcatgccagagctccggctgaagcaagaagtcctccagctgcgtcgtttgccgcctgtggacgagtgcgccccagtttctgccctggcagctcctggccacaccttctcagagctcacctgtgcacttctaaattgaattggcccacggtgtccaaccaagaaggagcatctgcactccgagaaagatgtgttctgtaactgccccagtgtgaccccgcagtggctctcggtgctagatatgcatgactaagattgatgctgggcaaaatgtagatgatctttcattatgttgtgggcagcgtctttctctgcctttgctatatgcagtcagcagtaagccttttgctaaaagagttttgtttgacttctgagatccaaggctgattgttgttaaaaaaaaaaaaaaaaaaaagtggcacatttaaaaaaattgtgtctgcatatgtggtgcatccttccatctccacaaaccatttgattcttgaaatattgtttgacctcattgctgtgtgtgaatatttctccacatgcttcagatgcacattcctagtctctgcttcctaaggggggaaccaccacacattggggggaaaaaagacattttcctacacccacccaccttgttgaaagggaggtaggtttggggcttcaggccaggcactgactatgaaacattagctgcagtgtgcaggacagctttgaggtccagctgaagtcaggaagctctacattcaaggagtgtggacgctgcagtgcagttgtgagggcagttagcagccgcctcttctgcatcctgtcaactctgattagttagagtttaggctcaaaagagttggtggactgagattgaaatttggttgtgcaagagaaaggaaaggagacacttagtaccaccagtttcagcaataaagaagggtcattctgtattcaaaattgtactgtagataaatcattcatgagattgtaaaaaatgtttgtcttgtgaccttgtgcttttgaagtcagacaaaaccgtgtaatcaacttgcacaaaaagagggtacacagtgaacatataaacacagacctaatcaaacaggagcagattcctcatggtgcttgtttattatatatatttaatcctgcttgacactttacccaagggagatggtcccttttatcagttgaatgttagcagcgttatttcagagtgtggtgactggttagagaaactcatgtactcaaccagccacagtttcaaacaaaatttttatgtgcaaaggacagcaaccttcttgtatgttaaaccaccagtacgctttgtacatctgtgataacgcctgttttatattcaaatgaacaaataaaagcttttatttttgttgctctgaaaatagcagtttcttaattggtcccctggaaagatgtctgggacagctttaatcccgggaaggaagtgactcctacagggaaatgtatctgactctgtttacataatttgttgcattacttagtacagataatcatactttgaaaaatgtttaaattttgatgtgggcatttattgctaaaaataattcctatggcaacaaatgttttgtgaaatgttttttttaattcttttaaatatatctaaatatatttgttcac

SEQ ID NO: 324141 - DNA, 7131 bp, Homo sapiens
attctgcacctcctgacgtaaccacgtacacctcagagcactcgatacaggtggagagaccgcagggttccacggggtcccggacagcgcccaagtacggcaacgccgagctcatggagaccggggatggagtaccagtaagtagccgggtgtcagcaaaaatccagcagcttgtcaataccctcaaacgaccgaaacgaccacctttacgagaattctttgtcgatgactttgaagaattattagaagttcaacaaccggatccgaaccaaccaaagccggagggggcccagatgctggccatgcgcggagagcagctgggcgtggtcacgaactggccgccgtcgctggaggccgcactgcagaggtggggcaccatctcgcccaaggcgccctgcctgaccaccatggacaccaacgggaagcccctctacatcctcacttacggcaagctgtggacaagaagtatgaaggtcgcttacagcattctacacaaattaggcacaaagcaggaacccatggtccggcctggagatagggtggcactggtgttccccaacaatgatccggctgccttcatggcggctttctacggctgcctgctggccgaggtggtccccgtgcccatcgaggtgccactcaccaggaaggacgcagggagccagcagataggtttcttgcttggaagctgtggagttactgtagccttgactagtgacgcctgccataaaggacttccaaaaagcccaacgggagagatcccacagtttaaaggttggccaaagctgctgtggtttgtcacagagtctaaacatctctccaaaccgccccgagactggttcccacacattaaagatgccaataacgacactgcgtatattgagtacaagacgtgtaaggatggcagtgtgctgggtgtgacggtgacgaggactgcgctgctgacacactgccaggccctgacgcaggcgtgtggctacacggaagctgaaaccattgtgaatgtgctggatttcaagaaggacgtcgggctctggcatggcatcctgacaagcgtcatgaacatgatgcatgtgatcagcatcccgtactcgctgatgaaggtgaaccctctctcctggatccagaaggtctgccagtacaaagcaaaagtggcgtgtgtgaaatcgagggatatgcattgggcattagtagcacacagagatcagagagacatcaacctctcctctctgcgaatgctgatagtggcggacggcgcgaacccctggtctatttcttcttgcgatgcatttctcaatgtcttccaaagtaaaggccttcgacaggaggtcatctgtccttgtgccagctcgccagaggccctcactgtggccatccggaggcccacggatgacagtaaccagcccccgggccggggtgtcctctccatgcatggactgacctatggggtcattcgtgtggactcggaagagaagctgtccgtgctcaccgtgcaggatgtcggcctcgtgatgcctggagccatcatgtgttcagtgaagccagacggggttcctcagctgtgcagaacggatgagatcggggagctgtgtgtgtgtgcagttgcgacgggcacgtcctactatggcctctctggcatgaccaagaacacctttgaggtgtttcccatgacaagctccggggctccgatcagtgaatacccattcataaggacaggcttgctggggttcgtgggtcccggaggcctcgtcttcgtggtgggcaagatggatggcctcatggtggtcagcgggcgcaggcacaacgccgacgacatcgtggccactgcgctggccgtagaacccatgaagtttgtctaccggggaaggatagccgtgttctcggtgaccgtgctgcacgacgagaggatcgtgatcgtggctgagcagaggcctgactccacggaagaggacagtttccagtggatgagccgtgtgctgcaggcgattgacagtatacatcaagttggagtttattgcctggccttggtgccagcaaacaccctccccaaaaccccgcttggtgggatccatttatcagaaacaaaacagctttttctggagggctctctgcacccctgcaatgtcctaatgtgcccccacacctgcgtcacaaacttgcctaagcctcgacagaagcagccagaaatcggccctgcctctgtgatggtggggaacctggtctctgggaagagaatcgcccaggccagtggcagagacctgggtcagatcgaagataacgaccaggcacgcaagttcctgttcctctcagaggtcttgcagtggagagcacagaccaccccggaccacatcctctacacgctgctcaactgtcggggtgcgatagcgaactcgctgacctgcgtgcagctgcacaagagagctgagaagatcgccgtgatgctgatggagaggggccaccttcaggacggcgaccacgtggccttggtctaccccccaggaatagacctgatagcagcgttttatggttgcctgtacgcaggctgtgtgccaataaccgtccgtcccccgcacccacagaacatcgcgacgacgttgcctaccgtcaagatgattgtggaggtgagtcgctctgcctgtctgatgacgacacagctgatctgtaagttgctgcggtccagggaggcggcggcggctgtggacgtcaggacgtggcccctcatcctggacacagatgatttgccaaagaagcggcctgcccagatctgcaaaccttgcaacccagacactcttgcatatctcgacttcagcgtgtccacaactgggatgctagctggcgtaaagatgtctcacgcagccaccagtgccttctgccgttccattaagctgcagtgtgaactttacccctctagagaagtggccatctgcctggacccttactgtggactgggatttgtcctctggtgcctctgcagtgtgtattctgggcaccagtccatcctgatcccgccctctgagctggaaaccaaccccgccttgtggcttcttgccgtgagtcagtacaaagtccgagacacgttttgctcctactccgtgatggagctgtgcaccaaggggctgggctcgcaaacagagtccctcaaggcgcgagggctggacttgtcccgagtgaggacctgcgtggttgtggcggaagagaggcctcggatcgcactcacacagtcgttctcaaagctgtttaaggacctgggccttcacccgcgggccgtcagcacctcgttcggttgcagggtgaacctggcgatttgcttgcagggaacctcaggacctgacccaaccactgtctacgtggacatgagagccctgagacacgacagagtccgcttagtggaaagaggatcccctcatagtctgcccctgatggaatcgggaaagatacttccaggggttcggattataattgccaacccagaaacaaaaggaccgctgggggactcacaccttggagagatttgggttcacagtgcccacaatgccagcggttatttcactatttacggagacgaatccctccagtcagatcacttcaactcaagactaagttttggagacacccagaccatctgggcacgcacaggctacttggggttcctgcggagaactgagctcacagatgcaaatggagagcgccatgatgccctctacgtggtaggggcactggacgaagccatggagctgcggggcatgcggtaccacccaatcgacattgagacctcggtcatcagagcccataaaagcgttacggaatgtgctgtgtttacctggacaaatttgttggtggttgtggttgagctggatgggtcggaacaagaagccttggacctggttcccttggtgaccaacgtggtcctggaggagcactacctgatcgtcggagtggtggtcgtggtggacatcggcgtcatccccatcaactcccgtggggagaagcagcgcatgcacctgcgagacgggtttttggcagaccagctagaccccatctatgtggcctacaacatgtagtctcgtctcttggcttccatggacttttctagagatgtagacattgttctccgtgtccactgaagcgtgcagacacagggcaacactcaccagaatacagccatttgtggtgagagtggaggaggaagaggaggaggaagaggacttctcacagcagccacgattggcatgggggtgaaatgtgaatttaccactgaatttcgctcagaaggactttggattactgccttcagtttgttggaaaagcccatttcaaaaactttcttttcttttctttcttttttaattattggataataagtgctttcttcgtaaatgtggtattttgttaagccgaaatagcaattaaaaaaatatcctgccctccagatgggttcttttaaacaatttatgtagtgtgacaaagaattgttttctctgttttaatgtgtcatgaaatcttaatgacatggatctgttactaatttaagccattgctagatctcatccttttaggaaagtttgaggtacgagaaaaccttccaaatagcaccttccaattagataatagcagctttctttgtcagaaatgtgctgaagaaacaaaggctggtatacggccttcgaagttagtatagaatgagaagaaattataaataaggtgtatttcggcaattatcttgcaaatatctttgtactaaactaaaaagataaaataagttaacttcctcaatatgtaattatgtacaaaacgtttaatttattttgatctctttagaactataaaagagaaaaacattcaagaatattaaagtcttgtaatgtttgctaatataaaaaagtgttgtattatcttgcgtggatagtatcacaacaaatatatatatatgaaatataaattcactaatgaacaaaggagattttaaagtttaagatgcagaacttgtcacttgcatggtgtgccccccgtactcacatacactctgctgttgccagcagtcgcagaccgcaggagccctgtctaaaagtttcttctagaaccagagaccagcaagtgaaattattgccatctcaaggatggcaaaagaattcaaagctcaatgtgcactatttttttctttgctgtgggacaacagtgaatgtgtttatgccagcgtgtgctgatgatactgaggggctttaggttggcaaatagcactgttttcttagctgcaagaattcattgcacaatgtttttcatcatttttgttaatgtcatctttttttggtccttgctacgaaaaggaatgcgattctgtggtcattcgcactgggttgcattgattccccctctgatggccaatgtggagtggacaaagtgtccggaactcacatcggtgatcgtcccctcgtcttaagacccagcccgctctgtgtgagcctctggggctccctcgctcagtgagcacagttccccgggggttcatgccagagctccggctgaagcaagaagtcctccagctgcgtcgtttgccgcctgtggacgagtgcgccccagtttctgccctggcagctcctggccacaccttctcagagctcacctgtgcacttctaaattgaattggcccacggtgtccaaccaagaaggagcatctgcactccgagaaagatgtgttctgtaactgccccagtgtgaccccgcagtggctctcggtgctagatatgcatgactaagattgatgctgggcaaaatgtagatgatctttcattatgttgtgggcagcgtctttctctgcctttgctatatgcagtcagcagtaagccttttgctaaaagagttttgtttgacttctgagatccaaggctgattgttgttaaaaaaaaaaaaaaaaaaaagtggcacatttaaaaaaattgtgtctgcatatgtggtgcatccttccatctccacaaaccatttgattcttgaaatattgtttgacctcattgctgtgtgtgaatatttctccacatgcttcagatgcacattcctagtctctgcttcctaaggggggaaccaccacacattggggggaaaaaagacattttcctacacccacccaccttgttgaaagggaggtaggtttggggcttcaggccaggcactgactatgaaacattagctgcagtgtgcaggacagctttgaggtccagctgaagtcaggaagcaaaacaaatgtagatgtcacttcaaacataatttcaactgtcaccagatcaactctacattcaaggagtgtggacgctgcagtgcagttgtgagggcagttagcagccgcctcttctgcatcctgtcaactctgattagttagagtttaggctcaaaagagttggtggactgagattgaaatttggttgtgcaagagaaaggaaaggagacacttagtaccaccagtttcagcaataaagaagggtcattctgtattcaaaattgtactgtagataaatcattcatgagattgtaaaaaatgtttgtcttgtgaccttgtgcttttgaagtcagacaaaacctaatcaaacaggagcagattcctcatggtgcttgtttattatatatatttaatcctgcttgacactttacccaagggagatggtcccttttatcagttgaatgttagcagcgttatttcagagtgtggtgactggttagagaaactcatgtactcaaccagccacagtttcaaacaaaatttttatgtgcaaaggacagcaaccttcttgtatgttaaaccaccagtacgctttgtacatctgtgataacgcctgttttatattcaaatgaacaaataaaagcttttatttttgttgctctgaaaatagcagtttcttaattggtcccctggaaagatgtctgggacagctttaatcccgggaaggaagtgactcctacagggaaatgtatctgactctgtttacataatttgttgcattacttagtacagataatcatactttgaaaaatgtttaaattttgatgtgggcatttattgctaaaaataattcctatggcaacaaatgttttgtgaaatgttttttttaattcttttaaatatatctaaatatatttgttcac

SEQ ID NO: 324142 - DNA, 6025 bp, Homo sapiens
gtcaagttgcaccacgttgctgatgtctggtgtggcaggtggtcctgatgttagttctgaggttcctccccatatctaaatggcagatgatgtcacgcccctaaatacaacttgcgcattaacattaaagcaattgaaatatttattgatgtttcaactatgaaatttgacatgttgctgcaacaggaaaactcatggctctttagggaaaatgagtgcctggctgactaccatccgtgcagttttgctccagaccccattcctgttcactggtgtcgttcatattcgcgtcttccctgtttcctttattctccccacctgccccctctcacactgcatgtgctttcctgtttgcttttagccatcatgtgttcagtgaagccagacggggttcctcagctgtgcagaacggatgagatcggggagctgtgtgtgtgtgcagttgcgacgggcacgtcctactatggcctctctggcatgaccaagaacacctttgaggtgtttcccatgacaagctccggggctccgatcagtgaatacccattcataaggacaggcttgctggggttcgtgggtcccggaggcctcgtcttcgtggtgggcaagatggatggcctcatggtggtcagcgggcgcaggcacaacgccgacgacatcgtggccactgcgctggccgtagaacccatgaagtttgtctaccggggaaggatagccgtgttctcggtgaccgtgctgcacgacgagaggatcgtgatcgtggctgagcagaggcctgactccacggaagaggacagtttccagtggatgagccgtgtgctgcaggcgattgacagtatacatcaagttggagtttattgcctggccttggtgccagcaaacaccctccccaaaaccccgcttggtgggatccatttatcagaaacaaaacagctttttctggagggctctctgcacccctgcaatgtcctaatgtgcccccacacctgcgtcacaaacttgcctaagcctcgacagaagcagccagaaatcggccctgcctctgtgatggtggggaacctggtctctgggaagagaatcgcccaggccagtggcagagacctgggtcagatcgaagataacgaccaggcacgcaagttcctgttcctctcagaggtcttgcagtggagagcacagaccaccccggaccacatcctctacacgctgctcaactgtcggggtgcgatagcgaactcgctgacctgcgtgcagctgcacaagagagctgagaagatcgccgtgatgctgatggagaggggccaccttcaggacggcgaccacgtggccttggtctaccccccaggaatagacctgatagcagcgttttatggttgcctgtacgcaggctgtgtgccaataaccgtccgtcccccgcacccacagaacatcgcgacgacgttgcctaccgtcaagatgattgtggaggtgagtcgctctgcctgtctgatgacgacacagctgatctgtaagttgctgcggtccagggaggcggcggcggctgtggacgtcaggacgtggcccctcatcctggacacagatgatttgccaaagaagcggcctgcccagatctgcaaaccttgcaacccagacactcttgcatatctcgacttcagcgtgtccacaactgggatgctagctggcgtaaagatgtctcacgcagccaccagtgccttctgccgttccattaagctgcagtgtgaactttacccctctagagaagtggccatctgcctggacccttactgtggactgggatttgtcctctggtgcctctgcagtgtgtattctgggcaccagtccatcctgatcccgccctctgagctggaaaccaaccccgccttgtggcttcttgccgtgagtcagtacaaagtccgagacacgttttgctcctactccgtgatggagctgtgcaccaaggggctgggctcgcaaacagagtccctcaaggcgcgagggctggacttgtcccgagtgaggacctgcgtggttgtggcggaagagaggcctcggatcgcactcacacagtcgttctcaaagctgtttaaggacctgggccttcacccgcgggccgtcagcacctcgttcggttgcagggtgaacctggcgatttgcttgcagggaacctcaggacctgacccaaccactgtctacgtggacatgagagccctgagacacgacagagtccgcttagtggaaagaggatcccctcatagtctgcccctgatggaatcgggaaagatacttccaggggttcggattataattgccaacccagaaacaaaaggaccgctgggggactcacaccttggagagatttgggttcacagtgcccacaatgccagcggttatttcactatttacggagacgaatccctccagtcagatcacttcaactcaagactaagttttggagacacccagaccatctgggcacgcacaggctacttggggttcctgcggagaactgagctcacagatgcaaatggagagcgccatgatgccctctacgtggtaggggcactggacgaagccatggagctgcggggcatgcggtaccacccaatcgacattgagacctcggtcatcagagcccataaaagcgttacggaatgtgctgtgtttacctggacaaatttgttggtggttgtggttgagctggatgggtcggaacaagaagccttggacctggttcccttggtgaccaacgtggtcctggaggagcactacctgatcgtcggagtggtggtcgtggtggacatcggcgtcatccccatcaactcccgtggggagaagcagcgcatgcacctgcgagacgggtttttggcagaccagctagaccccatctatgtggcctacaacatgtagtctcgtctcttggcttccatggacttttctagagatgtagacattgttctccgtgtccactgaagcgtgcagacacagggcaacactcaccagaatacagccatttgtggtgagagtggaggaggaagaggaggaggaagaggacttctcacagcagccacgattggcatgggggtgaaatgtgaatttaccactgaatttcgctcagaaggactttggattactgccttcagtttgttggaaaagcccatttcaaaaactttcttttcttttctttcttttttaattattggataataagtgctttcttcgtaaatgtggtattttgttaagccgaaatagcaattaaaaaaatatcctgccctccagatgggttcttttaaacaatttatgtagtgtgacaaagaattgttttctctgttttaatgtgtcatgaaatcttaatgacatggatctgttactaatttaagccattgctagatctcatccttttaggaaagtttgaggtacgagaaaaccttccaaatagcaccttccaattagataatagcagctttctttgtcagaaatgtgctgaagaaacaaaggctggtatacggccttcgaagttagtatagaatgagaagaaattataaataaggtgtatttcggcaattatcttgcaaatatctttgtactaaactaaaaagataaaataagttaacttcctcaatatgtaattatgtacaaaacgtttaatttattttgatctctttagaactataaaagagaaaaacattcaagaatattaaagtcttgtaatgtttgctaatataaaaaagtgttgtattatcttgcgtggatagtatcacaacaaatatatatatatgaaatataaattcactaatgaacaaaggagattttaaagtttaagatgcagaacttgtcacttgcatggtgtgccccccgtactcacatacactctgctgttgccagcagtcgcagaccgcaggagccctgtctaaaagtttcttctagaaccagagaccagcaagtgaaattattgccatctcaaggatggcaaaagaattcaaagctcaatgtgcactatttttttctttgctgtgggacaacagtgaatgtgtttatgccagcgtgtgctgatgatactgaggggctttaggttggcaaatagcactgttttcttagctgcaagaattcattgcacaatgtttttcatcatttttgttaatgtcatctttttttggtccttgctacgaaaaggaatgcgattctgtggtcattcgcactgggttgcattgattccccctctgatggccaatgtggagtggacaaagtgtccggaactcacatcggtgatcgtcccctcgtcttaagacccagcccgctctgtgtgagcctctggggctccctcgctcagtgagcacagttccccgggggttcatgccagagctccggctgaagcaagaagtcctccagctgcgtcgtttgccgcctgtggacgagtgcgccccagtttctgccctggcagctcctggccacaccttctcagagctcacctgtgcacttctaaattgaattggcccacggtgtccaaccaagaaggagcatctgcactccgagaaagatgtgttctgtaactgccccagtgtgaccccgcagtggctctcggtgctagatatgcatgactaagattgatgctgggcaaaatgtagatgatctttcattatgttgtgggcagcgtctttctctgcctttgctatatgcagtcagcagtaagccttttgctaaaagagttttgtttgacttctgagatccaaggctgattgttgttaaaaaaaaaaaaaaaaaaaagtggcacatttaaaaaaattgtgtctgcatatgtggtgcatccttccatctccacaaaccatttgattcttgaaatattgtttgacctcattgctgtgtgtgaatatttctccacatgcttcagatgcacattcctagtctctgcttcctaaggggggaaccaccacacattggggggaaaaaagacattttcctacacccacccaccttgttgaaagggaggtaggtttggggcttcaggccaggcactgactatgaaacattagctgcagtgtgcaggacagctttgaggtccagctgaagtcaggaagcaaaacaaatgtagatgtcacttcaaacataatttcaactgtcaccagatcaactctacattcaaggagtgtggacgctgcagtgcagttgtgagggcagttagcagccgcctcttctgcatcctgtcaactctgattagttagagtttaggctcaaaagagttggtggactgagattgaaatttggttgtgcaagagaaaggaaaggagacacttagtaccaccagtttcagcaataaagaagggtcattctgtattcaaaattgtactgtagataaatcattcatgagattgtaaaaaatgtttgtcttgtgaccttgtgcttttgaagtcagacaaaaccgtgtaatcaacttgcacaaaaagagggtacacagtgaacatataaacacagacctaatcaaacaggagcagattcctcatggtgcttgtttattatatatatttaatcctgcttgacactttacccaagggagatggtcccttttatcagttgaatgttagcagcgttatttcagagtgtggtgactggttagagaaactcatgtactcaaccagccacagtttcaaacaaaatttttatgtgcaaaggacagcaaccttcttgtatgttaaaccaccagtacgctttgtacatctgtgataacgcctgttttatattcaaatgaacaaataaaagcttttatttttgttgctctgaaaatagcagtttcttaattggtcccctggaaagatgtctgggacagctttaatcccgggaaggaagtgactcctacagggaaatgtatctgactctgtttacataatttgttgcattacttagtacagataatcatactttgaaaaatgtttaaattttgatgtgggcatttattgctaaaaataattcctatggcaacaaatgttttgtgaaatgttttttttaattcttttaaatatatctaaatatatttgttcac

SEQ ID NO: 324143 - DNA, 272 bp, Homo sapiens
ttgctttctaaacagtcttgaaaggaaatggcataaagatgagattgaggttggcttgtgtgtagtctctccctgtattcctcccattgacaagagacttttcctctcccaaatagatacttccaggggttcggattataattgccaacccagaaacaaaaggaccgctgggggactcacaccttggagaggtgagttgagtgtcctccgagatccaggttacttttctgttatgtatccttggcttgccttgacaccatcagaactgctca

SEQ ID NO: 324144 - DNA, 209 bp, Homo sapiens
ttggttgcacaggtctgtgcttgttctaaaaaccagtgatgtatgctttgcgccagtgagttgtatgacgcgtgcgcgctctctgcaagctgctctgctgaaggaatcttatgtgcttgtccctgtgatcggcccgcagggtgcgatagcgaactcgctgacctgcgtgcagctgcacaagagagctgagaagatcgccgtgatgctga

SEQ ID NO: 324145 - DNA, 7185 bp, Homo sapiens
attctgcacctcctgacgtaaccacgtacacctcagagcactcgatacaggtggagagaccgcagggttccacggggtcccggacagcgcccaagtacggcaacgccgagctcatggagaccggggatggagtaccagtaagtagccgggtgtcagcaaaaatccagcagcttgtcaataccctcaaacgaccgaaacgaccacctttacgagaattctttgtcgatgactttgaagaattattagaagttcaacaaccggatccgaaccaaccaaagccggagggggcccagatgctggccatgcgcggagagcagctgggcgtggtcacgaactggccgccgtcgctggaggccgcactgcagaggtggggcaccatctcgcccaaggcgccctgcctgaccaccatggacaccaacgggaagcccctctacatcctcacttacggcaagctgtggacaagaagtatgaaggtcgcttacagcattctacacaaattaggcacaaagcaggaacccatggtccggcctggagatagggtggcactggtgttccccaacaatgatccggctgccttcatggcggctttctacggctgcctgctggccgaggtggtccccgtgcccatcgaggtgccactcaccaggaaggacgcagggagccagcagataggtttcttgcttggaagctgtggagttactgtagccttgactagtgacgcctgccataaaggacttccaaaaagcccaacgggagagatcccacagtttaaaggttggccaaagctgctgtggtttgtcacagagtctaaacatctctccaaaccgccccgagactggttcccacacattaaagatgccaataacgacactgcgtatattgagtacaagacgtgtaaggatggcagtgtgctgggtgtgacggtgacgaggactgcgctgctgacacactgccaggccctgacgcaggcgtgtggctacacggaagctgaaaccattgtgaatgtgctggatttcaagaaggacgtcgggctctggcatggcatcctgacaagcgtcatgaacatgatgcatgtgatcagcatcccgtactcgctgatgaaggtgaaccctctctcctggatccagaaggtctgccagtacaaagcaaaagtggcgtgtgtgaaatcgagggatatgcattgggcattagtagcacacagagatcagagagacatcaacctctcctctctgcgaatgctgatagtggcggacggcgcgaacccctggtctatttcttcttgcgatgcatttctcaatgtcttccaaagtaaaggccttcgacaggaggtcatctgtccttgtgccagctcgccagaggccctcactgtggccatccggaggcccacggatgacagtaaccagcccccgggccggggtgtcctctccatgcatggactgacctatggggtcattcgtgtggactcggaagagaagctgtccgtgctcaccgtgcaggatgtcggcctcgtgatgcctggagccatcatgtgttcagtgaagccagacggggttcctcagctgtgcagaacggatgagatcggggagctgtgtgtgtgtgcagttgcgacgggcacgtcctactatggcctctctggcatgaccaagaacacctttgaggtgtttcccatgacaagctccggggctccgatcagtgaatacccattcataaggacaggcttgctggggttcgtgggtcccggaggcctcgtcttcgtggtgggcaagatggatggcctcatggtggtcagcgggcgcaggcacaacgccgacgacatcgtggccactgcgctggccgtagaacccatgaagtttgtctaccggggaaggatagccgtgttctcggtgaccgtgctgcacgacgagaggatcgtgatcgtggctgagcagaggcctgactccacggaagaggacagtttccagtggatgagccgtgtgctgcaggcgattgacagtatacatcaagttggagtttattgcctggccttggtgccagcaaacaccctccccaaaaccccgcttggtgggatccatttatcagaaacaaaacagctttttctggagggctctctgcacccctgcaatgtcctaatgtgcccccacacctgcgtcacaaacttgcctaagcctcgacagaagcagccagaaatcggccctgcctctgtgatggtggggaacctggtctctgggaagagaatcgcccaggccagtggcagagacctgggtcagatcgaagataacgaccaggcacgcaagttcctgttcctctcagaggtcttgcagtggagagcacagaccaccccggaccacatcctctacacgctgctcaactgtcggggtgcgatagcgaactcgctgacctgcgtgcagctgcacaagagagctgagaagatcgccgtgatgctgatggagaggggccaccttcaggacggcgaccacgtggccttggtctaccccccaggaatagacctgatagcagcgttttatggttgcctgtacgcaggctgtgtgccaataaccgtccgtcccccgcacccacagaacatcgcgacgacgttgcctaccgtcaagatgattgtggaggtgagtcgctctgcctgtctgatgacgacacagctgatctgtaagttgctgcggtccagggaggcggcggcggctgtggacgtcaggacgtggcccctcatcctggacacagatgatttgccaaagaagcggcctgcccagatctgcaaaccttgcaacccagacactcttgcatatctcgacttcagcgtgtccacaactgggatgctagctggcgtaaagatgtctcacgcagccaccagtgccttctgccgttccattaagctgcagtgtgaactttacccctctagagaagtggccatctgcctggacccttactgtggactgggatttgtcctctggtgcctctgcagtgtgtattctgggcaccagtccatcctgatcccgccctctgagctggaaaccaaccccgccttgtggcttcttgccgtgagtcagtacaaagtccgagacacgttttgctcctactccgtgatggagctgtgcaccaaggggctgggctcgcaaacagagtccctcaaggcgcgagggctggacttgtcccgagtgaggacctgcgtggttgtggcggaagagaggcctcggatcgcactcacacagtcgttctcaaagctgtttaaggacctgggccttcacccgcgggccgtcagcacctcgttcggttgcagggtgaacctggcgatttgcttgcagggaacctcaggacctgacccaaccactgtctacgtggacatgagagccctgagacacgacagagtccgcttagtggaaagaggatcccctcatagtctgcccctgatggaatcgggaaagatacttccaggggttcggattataattgccaacccagaaacaaaaggaccgctgggggactcacaccttggagagatttgggttcacagtgcccacaatgccagcggttatttcactatttacggagacgaatccctccagtcagatcacttcaactcaagactaagttttggagacacccagaccatctgggcacgcacaggctacttggggttcctgcggagaactgagctcacagatgcaaatggagagcgccatgatgccctctacgtggtaggggcactggacgaagccatggagctgcggggcatgcggtaccacccaatcgacattgagacctcggtcatcagagcccataaaagcgttacggaatgtgctgtgtttacctggacaaatttgttggtggttgtggttgagctggatgggtcggaacaagaagccttggacctggttcccttggtgaccaacgtggtcctggaggagcactacctgatcgtcggagtggtggtcgtggtggacatcggcgtcatccccatcaactcccgtggggagaagcagcgcatgcacctgcgagacgggtttttggcagaccagctagaccccatctatgtggcctacaacatgtagtctcgtctcttggcttccatggacttttctagagatgtagacattgttctccgtgtccactgaagcgtgcagacacagggcaacactcaccagaatacagccatttgtggtgagagtggaggaggaagaggaggaggaagaggacttctcacagcagccacgattggcatgggggtgaaatgtgaatttaccactgaatttcgctcagaaggactttggattactgccttcagtttgttggaaaagcccatttcaaaaactttcttttcttttctttcttttttaattattggataataagtgctttcttcgtaaatgtggtattttgttaagccgaaatagcaattaaaaaaatatcctgccctccagatgggttcttttaaacaatttatgtagtgtgacaaagaattgttttctctgttttaatgtgtcatgaaatcttaatgacatggatctgttactaatttaagccattgctagatctcatccttttaggaaagtttgaggtacgagaaaaccttccaaatagcaccttccaattagataatagcagctttctttgtcagaaatgtgctgaagaaacaaaggctggtatacggccttcgaagttagtatagaatgagaagaaattataaataaggtgtatttcggcaattatcttgcaaatatctttgtactaaactaaaaagataaaataagttaacttcctcaatatgtaattatgtacaaaacgtttaatttattttgatctctttagaactataaaagagaaaaacattcaagaatattaaagtcttgtaatgtttgctaatataaaaaagtgttgtattatcttgcgtggatagtatcacaacaaatatatatatatgaaatataaattcactaatgaacaaaggagattttaaagtttaagatgcagaacttgtcacttgcatggtgtgccccccgtactcacatacactctgctgttgccagcagtcgcagaccgcaggagccctgtctaaaagtttcttctagaaccagagaccagcaagtgaaattattgccatctcaaggatggcaaaagaattcaaagctcaatgtgcactatttttttctttgctgtgggacaacagtgaatgtgtttatgccagcgtgtgctgatgatactgaggggctttaggttggcaaatagcactgttttcttagctgcaagaattcattgcacaatgtttttcatcatttttgttaatgtcatctttttttggtccttgctacgaaaaggaatgcgattctgtggtcattcgcactgggttgcattgattccccctctgatggccaatgtggagtggacaaagtgtccggaactcacatcggtgatcgtcccctcgtcttaagacccagcccgctctgtgtgagcctctggggctccctcgctcagtgagcacagttccccgggggttcatgccagagctccggctgaagcaagaagtcctccagctgcgtcgtttgccgcctgtggacgagtgcgccccagtttctgccctggcagctcctggccacaccttctcagagctcacctgtgcacttctaaattgaattggcccacggtgtccaaccaagaaggagcatctgcactccgagaaagatgtgttctgtaactgccccagtgtgaccccgcagtggctctcggtgctagatatgcatgactaagattgatgctgggcaaaatgtagatgatctttcattatgttgtgggcagcgtctttctctgcctttgctatatgcagtcagcagtaagccttttgctaaaagagttttgtttgacttctgagatccaaggctgattgttgttaaaaaaaaaaaaaaaaaaaagtggcacatttaaaaaaattgtgtctgcatatgtggtgcatccttccatctccacaaaccatttgattcttgaaatattgtttgacctcattgctgtgtgtgaatatttctccacatgcttcagatgcacattcctagtctctgcttcctaaggggggaaccaccacacattggggggaaaaaagacattttcctacacccacccaccttgttgaaagggaggtaggtttggggcttcaggccaggcactgactatgaaacattagctgcagtgtgcaggacagctttgaggtccagctgaagtcaggaagcaaaacaaatgtagatgtcacttcaaacataatttcaactgtcaccagatcaactctacattcaaggagtgtggacgctgcagtgcagttgtgagggcagttagcagccgcctcttctgcatcctgtcaactctgattagttagagtttaggctcaaaagagttggtggactgagattgaaatttggttgtgcaagagaaaggaaaggagacacttagtaccaccagtttcagcaataaagaagggtcattctgtattcaaaattgtactgtagataaatcattcatgagattgtaaaaaatgtttgtcttgtgaccttgtgcttttgaagtcagacaaaaccgtgtaatcaacttgcacaaaaagagggtacacagtgaacatataaacacagacctaatcaaacaggagcagattcctcatggtgcttgtttattatatatatttaatcctgcttgacactttacccaagggagatggtcccttttatcagttgaatgttagcagcgttatttcagagtgtggtgactggttagagaaactcatgtactcaaccagccacagtttcaaacaaaatttttatgtgcaaaggacagcaaccttcttgtatgttaaaccaccagtacgctttgtacatctgtgataacgcctgttttatattcaaatgaacaaataaaagcttttatttttgttgctctgaaaatagcagtttcttaattggtcccctggaaagatgtctgggacagctttaatcccgggaaggaagtgactcctacagggaaatgtatctgactctgtttacataatttgttgcattacttagtacagataatcatactttgaaaaatgtttaaattttgatgtgggcatttattgctaaaaataattcctatggcaacaaatgttttgtgaaatgttttttttaattcttttaaatatatctaaatatatttgttcac

SEQ ID NO: 324146 - DNA, 7124 bp, Homo sapiens
attctgcacctcctgacgtaaccacgtacacctcagagcactcgatacaggtggagagaccgcagggttccacggggtcccggacagcgcccaagtacggcaacgccgagctcatggagaccggggatggagtaccagtaagtagccgggtgtcagcaaaaatccagcagcttgtcaataccctcaaacgaccgaaacgaccacctttacgagaattctttgtcgatgactttgaagaattattagaagttcaacaaccggatccgaaccaaccaaagccggagggggcccagatgctggccatgcgcggagagcagctgggcgtggtcacgaactggccgccgtcgctggaggccgcactgcagaggtggggcaccatctcgcccaaggcgccctgcctgaccaccatggacaccaacgggaagcccctctacatcctcacttacggcaagctgtggacaagaagtatgaaggtcgcttacagcattctacacaaattaggcacaaagcaggaacccatggtccggcctggagatagggtggcactggtgttccccaacaatgatccggctgccttcatggcggctttctacggctgcctgctggccgaggtggtccccgtgcccatcgaggtgccactcaccaggaaggacgcagggagccagcagataggtttcttgcttggaagctgtggagttactgtagccttgactagtgacgcctgccataaaggacttccaaaaagcccaacgggagagatcccacagtttaaaggttggccaaagctgctgtggtttgtcacagagtctaaacatctctccaaaccgccccgagactggttcccacacattaaagatgccaataacgacactgcgtatattgagtacaagacgtgtaaggatggcagtgtgctgggtgtgacggtgacgaggactgcgctgctgacacactgccaggccctgacgcaggcgtgtggctacacggaagctgaaaccattgtgaatgtgctggatttcaagaaggacgtcgggctctggcatggcatcctgacaagcgtcatgaacatgatgcatgtgatcagcatcccgtactcgctgatgaaggtgaaccctctctcctggatccagaaggtctgccagtacaaagcaaaagtggcgtgtgtgaaatcgagggatatgcattgggcattagtagcacacagagatcagagagacatcaacctctcctctctgcgaatgctgatagtggcggacggcgcgaacccctggtctatttcttcttgcgatgcatttctcaatgtcttccaaagtaaaggccttcgacaggaggtcatctgtccttgtgccagctcgccagaggccctcactgtggccatccggaggcccacggatgacagtaaccagcccccgggccggggtgtcctctccatgcatggactgacctatggggtcattcgtgtggactcggaagagaagctgtccgtgctcaccgtgcaggatgtcggcctcgtgatgcctggagccatcatgtgttcagtgaagccagacggggttcctcagctgtgcagaacggatgagatcggggagctgtgtgtgtgtgcagttgcgacgggcacgtcctactatggcctctctggcatgaccaagaacacctttgaggtgtttcccatgacaagctccggggctccgatcagtgaatacccattcataaggacaggcttgctggggttcgtgggtcccggaggcctcgtcttcgtggtgggcaagatggatggcctcatggtggtcagcgggcgcaggcacaacgccgacgacatcgtggccactgcgctggccgtagaacccatgaagtttgtctaccggggaaggatagccgtgttctcggtgaccgtgctgcacgacgagaggatcgtgatcgtggctgagcagaggcctgactccacggaagaggacagtttccagtggatgagccgtgtgctgcaggcgattgacagtatacatcaagttggagtttattgcctggccttggtgccagcaaacaccctccccaaaaccccgcttggtgggatccatttatcagaaacaaaacagctttttctggagggctctctgcacccctgcaatgtcctaatgtgcccccacacctgcgtcacaaacttgcctaagcctcgacagaagcagccagaaatcggccctgcctctgtgatggtggggaacctggtctctgggaagagaatcgcccaggccagtggcagagacctgggtcagatcgaagataacgaccaggcacgcaagttcctgttcctctcagaggtcttgcagtggagagcacagaccaccccggaccacatcctctacacgctgctcaactgtcggggtgcgatagcgaactcgctgacctgcgtgcagctgcacaagagagctgagaagatcgccgtgatgctgatggagaggggccaccttcaggacggcgaccacgtggccttggtctaccccccaggaatagacctgatagcagcgttttatggttgcctgtacgcaggctgtgtgccaataaccgtccgtcccccgcacccacagaacatcgcgacgacgttgcctaccgtcaagatgattgtggaggtgagtcgctctgcctgtctgatgacgacacagctgatctgtaagttgctgcggtccagggaggcggcggcggctgtggacgtcaggacgtggcccctcatcctggacacagatgatttgccaaagaagcggcctgcccagatctgcaaaccttgcaacccagacactcttgcatatctcgacttcagcgtgtccacaactgggatgctagctggcgtaaagatgtctcacgcagccaccagtgccttctgccgttccattaagctgcagtgtgaactttacccctctagagaagtggccatctgcctggacccttactgtggactgggatttgtcctctggtgcctctgcagtgtgtattctgggcaccagtccatcctgatcccgccctctgagctggaaaccaaccccgccttgtggcttcttgccgtgagtcagtacaaagtccgagacacgttttgctcctactccgtgatggagctgtgcaccaaggggctgggctcgcaaacagagtccctcaaggcgcgagggctggacttgtcccgagtgaggacctgcgtggttgtggcggaagagaggcctcggatcgcactcacacagtcgttctcaaagctgtttaaggacctgggccttcacccgcgggccgtcagcacctcgttcggttgcagggtgaacctggcgatttgcttgcagggaacctcaggacctgacccaaccactgtctacgtggacatgagagccctgagacacgacagagtccgcttagtggaaagaggatcccctcatagtctgcccctgatggaatcgggaaagatacttccaggggttcggattataattgccaacccagaaacaaaaggaccgctgggggactcacaccttggagagatttgggttcacagtgcccacaatgccagcggttatttcactatttacggagacgaatccctccagtcagatcacttcaactcaagactaagttttggagacacccagaccatctgggcacgcacaggctacttggggttcctgcggagaactgagctcacagatgcaaatggagagcgccatgatgccctctacgtggtaggggcactggacgaagccatggagctgcggggcatgcggtaccacccaatcgacattgagacctcggtcatcagagcccataaaagcgttacggaatgtgctgtgtttacctggacaaatttgttggtggttgtggttgagctggatgggtcggaacaagaagccttggacctggttcccttggtgaccaacgtggtcctggaggagcactacctgatcgtcggagtggtggtcgtggtggacatcggcgtcatccccatcaactcccgtggggagaagcagcgcatgcacctgcgagacgggtttttggcagaccagctagaccccatctatgtggcctacaacatgtagtctcgtctcttggcttccatggacttttctagagatgtagacattgttctccgtgtccactgaagcgtgcagacacagggcaacactcaccagaatacagccatttgtggtgagagtggaggaggaagaggaggaggaagaggacttctcacagcagccacgattggcatgggggtgaaatgtgaatttaccactgaatttcgctcagaaggactttggattactgccttcagtttgttggaaaagcccatttcaaaaactttcttttcttttctttcttttttaattattggataataagtgctttcttcgtaaatgtggtattttgttaagccgaaatagcaattaaaaaaatatcctgccctccagatgggttcttttaaacaatttatgtagtgtgacaaagaattgttttctctgttttaatgtgtcatgaaatcttaatgacatggatctgttactaatttaagccattgctagatctcatccttttaggaaagtttgaggtacgagaaaaccttccaaatagcaccttccaattagataatagcagctttctttgtcagaaatgtgctgaagaaacaaaggctggtatacggccttcgaagttagtatagaatgagaagaaattataaataaggtgtatttcggcaattatcttgcaaatatctttgtactaaactaaaaagataaaataagttaacttcctcaatatgtaattatgtacaaaacgtttaatttattttgatctctttagaactataaaagagaaaaacattcaagaatattaaagtcttgtaatgtttgctaatataaaaaagtgttgtattatcttgcgtggatagtatcacaacaaatatatatatatgaaatataaattcactaatgaacaaaggagattttaaagtttaagatgcagaacttgtcacttgcatggtgtgccccccgtactcacatacactctgctgttgccagcagtcgcagaccgcaggagccctgtctaaaagtttcttctagaaccagagaccagcaagtgaaattattgccatctcaaggatggcaaaagaattcaaagctcaatgtgcactatttttttctttgctgtgggacaacagtgaatgtgtttatgccagcgtgtgctgatgatactgaggggctttaggttggcaaatagcactgttttcttagctgcaagaattcattgcacaatgtttttcatcatttttgttaatgtcatctttttttggtccttgctacgaaaaggaatgcgattctgtggtcattcgcactgggttgcattgattccccctctgatggccaatgtggagtggacaaagtgtccggaactcacatcggtgatcgtcccctcgtcttaagacccagcccgctctgtgtgagcctctggggctccctcgctcagtgagcacagttccccgggggttcatgccagagctccggctgaagcaagaagtcctccagctgcgtcgtttgccgcctgtggacgagtgcgccccagtttctgccctggcagctcctggccacaccttctcagagctcacctgtgcacttctaaattgaattggcccacggtgtccaaccaagaaggagcatctgcactccgagaaagatgtgttctgtaactgccccagtgtgaccccgcagtggctctcggtgctagatatgcatgactaagattgatgctgggcaaaatgtagatgatctttcattatgttgtgggcagcgtctttctctgcctttgctatatgcagtcagcagtaagccttttgctaaaagagttttgtttgacttctgagatccaaggctgattgttgttaaaaaaaaaaaaaaaaaaaagtggcacatttaaaaaaattgtgtctgcatatgtggtgcatccttccatctccacaaaccatttgattcttgaaatattgtttgacctcattgctgtgtgtgaatatttctccacatgcttcagatgcacattcctagtctctgcttcctaaggggggaaccaccacacattggggggaaaaaagacattttcctacacccacccaccttgttgaaagggaggtaggtttggggcttcaggccaggcactgactatgaaacattagctgcagtgtgcaggacagctttgaggtccagctgaagtcaggaagcaaaacaaatgtagatgtcacttcaaacataatttcaactgtcaccagatcaactctacattcaaggagtgtggacgctgcagtgcagttgtgagggcagttagcagccgcctcttctgcatcctgtcaactctgattagttagagtttaggctcaaaagagttggtggactgagattgaaatttggttgtgcaagagaaaggaaaggagacacttagtaccaccagtttcagcaaaaaatgtttgtcttgtgaccttgtgcttttgaagtcagacaaaaccgtgtaatcaacttgcacaaaaagagggtacacagtgaacatataaacacagacctaatcaaacaggagcagattcctcatggtgcttgtttattatatatatttaatcctgcttgacactttacccaagggagatggtcccttttatcagttgaatgttagcagcgttatttcagagtgtggtgactggttagagaaactcatgtactcaaccagccacagtttcaaacaaaatttttatgtgcaaaggacagcaaccttcttgtatgttaaaccaccagtacgctttgtacatctgtgataacgcctgttttatattcaaatgaacaaataaaagcttttatttttgttgctctgaaaatagcagtttcttaattggtcccctggaaagatgtctgggacagctttaatcccgggaaggaagtgactcctacagggaaatgtatctgactctgtttacataatttgttgcattacttagtacagataatcatactttgaaaaatgtttaaattttgatgtgggcatttattgctaaaaataattcctatggcaacaaatgttttgtgaaatgttttttttaattcttttaaatatatctaaatatatttgttcac

SEQ ID NO: 324147 - DNA, 6160 bp, Homo sapiens
attctgcacctcctgacgtaaccacgtacacctcagagcactcgatacaggtggagagaccgcagggttccacggggtcccggacagcgcccaagtacggcaacgccgagctcatggagaccggggatggagtaccagtaagtagccgggtgtcagcaaaaatccagcagcttgtcaataccctcaaacgaccgaaacgaccacctttacgagaattctttgtcgatgactttgaagaattattagaagttcaacaaccggatccgaaccaaccaaagccggagggggcccagatgctggccatgcgcggagagcagctgggcgtggtcacgaactggccgccgtcgctggaggccgcactgcagaggtggggcaccatctcgcccaaggcgccctgcctgaccaccatggacaccaacgggaagcccctctacatcctcacttacggcaagctgtggacaagaagtatgaaggtcgcttacagcattctacacaaattaggcacaaagcaggaacccatggtccggcctggagatagggtggcactggtgttccccaacaatgatccggctgccttcatggcggctttctacggctgcctgctggccgaggtggtccccgtgcccatcgaggtgccactcaccaggaaggacgcagggagccagcagataggtttcttgcttggaagctgtggagttactgtagccttgactagtgacgcctgccataaaggacttccaaaaagcccaacgggagagatcccacagtttaaaggttggccaaagctgctgtggtttgtcacagagtctaaacatctctccaaaccgccccgagactggttcccacacattaaagatgccaataacgacactgcgtatattgagtacaagacgtgtaaggatggcagtgtgctgggtgtgacggtgacgaggactgcgctgctgacacactgccaggccctgacgcaggcgtgtggctacacggaagctgaaaccattgtgaatgtgctggatttcaagaaggacgtcgggctctggcatggcatcctgacaagcgtcatgaacatgatgcatgtgatcagcatcccgtactcgctgatgaaggtgaaccctctctcctggatccagaaggtctgccagtacaaagcaaaagtggcgtgtgtgaaatcgagggatatgcattgggcattagtagcacacagagatcagagagacatcaacctctcctctctgcgaatgctgatagtggcggacggcgcgaacccctggtctatttcttcttgcgatgcatttctcaatgtcttccaaagtaaaggccttcgacaggaggtcatctgtccttgtgccagctcgccagaggccctcactgtggccatccggaggcccacggatgacagtaaccagcccccgggccggggtgtcctctccatgcatggactgacctatggggtcattcgtgtggactcggaagagaagctgtccgtgctcaccgtgcaggatgtcggcctcgtgatgcctggagccatcatgtgttcagtgaagccagacggggttcctcagctgtgcagaacggatgagatcggggagctgtgtgtgtgtgcagttgcgacgggcacgtcctactatggcctctctggcatgaccaagaacacctttgaggtgtttcccatgacaagctccggggctccgatcagtgaatacccattcataaggacaggcttgctggggttcgtgggtcccggaggcctcgtcttcgtggtgggcaagatggatggcctcatggtggtcagcgggcgcaggcacaacgccgacgacatcgtggccactgcgctggccgtagaacccatgaagtttgtctaccggggaaggatagccgtgttctcggtgaccgtgctgcacgacgagaggatcgtgatcgtggctgagcagaggcctgactccacggaagaggacagtttccagtggatgagccgtgtgctgcaggcgattgacagtatacatcaagttggagtttattgcctggccttggtgccagcaaacaccctccccaaaaccccgcttggtgggatccatttatcagaaacaaaacagctttttctggagggctctctgcacccctgcaatgtcctaatgtgcccccacacctgcgtcacaaacttgcctaagcctcgacagaagcagccagaaatcggccctgcctctgtgatggtggggaacctggtctctgggaagagaatcgcccaggccagtggcagagacctgggtcagatcgaagataacgaccaggcacgcaagttcctgttcctctcagaggtcttgcagtggagagcacagaccaccccggaccacatcctctacacgctgctcaactgtcggggtgcgatagcgaactcgctgacctgcgtgcagctgcacaagagagctgagaagatcgccgtgatgctgatggagaggggccaccttcaggacggcgaccacgtggccttggtctaccccccaggaatagacctgatagcagcgttttatggttgcctgtacgcaggctgtgtgccaataaccgtccgtcccccgcacccacagaacatcgcgacgacgttgcctaccgtcaagatgattgtggaggtgagtcgctctgcctgtctgatgacgacacagctgatctgtaagttgctgcggtccagggaggcggcggcggctgtggacgtcaggacgtggcccctcatcctggacacagatgatttgccaaagaagcggcctgcccagatctgcaaaccttgcaacccagacactcttgcatatctcgacttcagcgtgtccacaactgggatgctagctggcgtaaagatgtctcacgcagccaccagtgccttctgccgttccattaagctgcagtgtgaactttacccctctagagaagtggccatctgcctggacccttactgtggactgggatttgtcctctggtgcctctgcagtgtgtattctgggcaccagtccatcctgatcccgccctctgagctggaaaccaaccccgccttgtggcttcttgccgtgagtcagtacaaagtccgagacacgttttgctcctactccgtgatggagctgtgcaccaaggggctgggctcgcaaacagagtccctcaaggcgcgagggctggacttgtcccgagtgaggacctgcgtggttgtggcggaagagaggcctcggatcgcactcacacagtcgttctcaaagctgtttaaggacctgggccttcacccgcgggccgtcagcacctcgttcggttgcagggtgaacctggcgatttgcttgcagggaacctcaggacctgacccaaccactgtctacgtggacatgagagccctgagacacgacagagtccgcttagtggaaagaggatcccctcatagtctgcccctgatggaatcgggaaagatacttccaggggttcggattataattgccaacccagaaacaaaaggaccgctgggggactcacaccttggagagatttgggttcacagtgcccacaatgccagcggttatttcactatttacggagacgaatccctccagtcagatcacttcaactcaagactaagttttggagacacccagaccatctgggcacgcacaggctacttggggttcctgcggagaactgagctcacagatgcaaatggagagcgccatgatgccctctacgtggtaggggcactggacgaagccatggagctgcggggcatgcggtaccacccaatcgacattgagacctcggtcatcagagcccataaaagcgttacggaatgtgctgtgtttacctggacaaatttgttggtggttgtggttgagctggatgggtcggaacaagaagccttggacctggttcccttggtgaccaacgtggtcctggaggagcactacctgatcgtcggagtggtggtcgtggtggacatcggcgtcatccccatcaactcccgtggggagaagcagcgcatgcacctgcgagacgggtttttggcagaccagctagaccccatctatgtggcctacaacatgtagtctcgtctcttggcttccatggacttttctagagatgtagacattgttctccgtgtccactgaagcgtgcagacacagggcaacactcaccagaatacagccatttgtggtgagagtggaggaggaagaggaggaggaagaggacttctcacagcagccacgattggcatgggggtgaaatgtgaatttaccactgaatttcgctcagaaggactttggattactgccttcagtttgttggaaaagcccatttcaaaaactttcttttcttttctttcttttttaattattggataataagtgctttcttcgtaaatgtggtattttgttaagccgaaatagcaattaaaaaaatatcctgccctccagatgggttcttttaaacaatttatgtagtgtgacaaagaattgttttctctgttttaatgtgtcatgaaatcttaatgacatggatctgttactaatttaagccattgctagatctcatccttttaggaaagtttgaggtacgagaaaaccttccaaatagcaccttccaattagataatagcagctttctttgtcagaaatgtgctgaagaaacaaaggctggtatacggccttcgaagttagtatagaatgagaagaaattataaataaggtgtatttcggcaattatcttgcaaatatctttgtactaaactaaaaagataaaataagttaacttcctcaatatgtaattatgtacaaaacgtttaatttattttgatctctttagaactataaaagagaaaaacattcaagaatattaaagtcttgtaatgtttgctaatataaaaaagtgttgtattatcttgcgtggatagtatcacaacaaatatatatatatgaaatataaattcactaatgaacaaaggagattttaaagtttaagatgcagaacttgtcacttgcatggtgtgccccccgtactcacatacactctgctgttgccagcagtcgcagaccgcaggagccctgtctaaaagtttcttctagaaccagagaccagcaagtgaaattattgccatctcaaggatggcaaaagaattcaaagctcaatgtgcactatttttttctttgctgtgggacaacagtgaatgtgtttatgccagcgtgtgctgatgatactgaggggctttaggttggcaaatagcactgttttcttagctgcaagaattcattgcacaatgtttttcatcatttttgttaatgtcatctttttttggtccttgctacgaaaaggaatgcgattctgtggtcattcgcactgggttgcattgattccccctctgatggccaatgtggagtggacaaagtgtccggaactcacatcggtgatcgtcccctcgtcttaagacccagcccgctctgtgtgagcctctggggctccctcgctcagtgagcacagttccccgggggttcatgccagagctccggctgaagcaagaagtcctccagctgcgtcgtttgccgcctgtggacgagtgcgccccagtttctgccctggcagctcctggccacaccttctcagagctcacctgtgcacttctaaattgaattggcccacggtgtccaaccaagaaggagcatctgcactccgagaaagatgtgttctgtaactgccccagtgtgaccccgcagtggctctcggtgctagatatgcatgactaagattgatgctgggcaaaatgtagatgatctttcattatgttgtgggcagcgtctttctctgcctttgctatatgcagtcagcagtaagccttttgctaaaagagttttgtttgacttctgagatccaaggctgattgttgttaaaaaaaaaaaaaaaaaaaagtggcacatttaaaaaaattgtgtctgcatatgtggtgcatccttccatctccacaaaccatttgattcttgaaatattgtttgacctcattgctgtgtgtgaatatttctccacatgcttcagatgcacattcctagtctctgcttcctaaggggggatgagcataagaagggataaggagggatgagcataaggagggatgagcataaggagggatgagcatactggatgggatgagcataag

SEQ ID NO: 324148 - DNA, 225 bp, Homo sapiens
cacaccttcctgtgaattaaacagattgtattggtctgggttataatgataaactgttcagtttcaggctgggcatggtggctcatgcttgtaatcccagcactttgggaggtcgaggtgggcagatcgcttaagctcaggagtacaagagcagcttgggcaacatggtgaaaacccatctctactaaaatacaaaaaaaaattagccgggtgtggtggtgcctg

SEQ ID NO: 324149 - DNA, 1954 bp, Homo sapiens
  misc_feature (3)..(4): n is a, c, g, or t
ggnnttccttgaaaattttccttggataggaaaggacttagcactcaggcctgtgaatcaggagatacaaagacctccaaaaaaggaccagttcctcggatgtgccccctcacagagagatgaaggggcagcagaaaacagctgaaacggaagaggggacagtgcagattcaggaaggtgcagtggctactggggaagacccaaccagtgtggctattgccagcatccagtcagctgccaccttccctgaccccaacgtcaagtacgtcttccgaactgagaatgggggccaggtgatgtacagggtgatccaggtgtctgaggggcagctggatggccaaactgagggaactggcgccatcagtggctaccctgccactcaatccatgacccaggcggtgatccagggtgctttcaccagtgatgatgcagttgacacggaggggacagctgctgagacgcactatacttacttccccagcacggcagtgggagatggggcagggggtaccacatcggggagtacagctgctgttgttactacccagggctcagaggcactgctggggcaggcgacccctcctggcactggtcaattctttgtgatgatgtcaccacaagaagtactgcagggaggaagccagcgctcaattgcccctaggactcacccttattccccgaagtcagaagctccccggacgactcgggatgagaaacgcagggctcagcataatgaagtggagcgtcgccgccgagacaagatcaacaactggatcgtgcagctctccaagataatcccagactgctctatggagagcaccaagtctggccagagtaaaggtgggattctatccaaagcttgtgattatatccaggagcttcggcagagtaaccaccgcttgtctgaagaactgcagggacttgaccaactgcagctggacaatgacgtgcttcgacaacaggtggaagatcttaaaaacaagaatctgctgcttcgagctcagttgcggcaccacggattagaggtcgtcatcaagaatgacagcaactaactatggggattcaggggctttgggcccaagaactgcagatagcccaggagcaacagcctaatcccgtgcccctttccttcactgccccacttctggcatgggacagggggaagttcagaaggtgtgtccttgaactgaggccctgtgatatggcggcctgcagtggtgtgaaacacacaatgtggacgtgcactgacagccttgcccacccccaccatgcagcccctgggcccttgtgctcctctcgcacaatgcatgtgctgtctccatgctggatactggacacactaaactctggggcttgtcctgtgcttgcttagagtgcccagcagaggtttgctgacaggtgatgctctggcttgccccaggactctggcacttccattggttcttcctttccctggagctgaggtttagatgtgcaacctgtggctcaggggagcaagcttacacaagaagtgagggaaggatgtttagcagtggctggtgcccatgaagaggagattggccagtgagaagctgaggcctatgcagacatctctggagccagagagaacaacaggcaggggcccacttggggccttcccccttgtggggggtcgttttttttttttcttttctttttttttttttttttttttttttttaagataaaattgttcaaagccacagttgtctgtttttcttccttttgtgggccacgggctggaagggaggggcacattgctcttcgaccagtaagggctgtgccaagttcagggtggggtgctgctcctgcatttattacccggagtcctggttcctgggccagaccggtgtgtcgtttttggcccaagctagagaatgttaagggcttctgcggtgggttggtgctagaggcgccgcgaacaggtgctgcgggg

SEQ ID NO: 324150 - DNA, 2040 bp, Homo sapiens
gcccctcaccaacatggccgcgggctggaagtgcgcatgagcagctgtctatggagatacctaggccgggagagggagaacacagttggagaaaatcggcagctgagacggccttggccggacttagcactcaggcctgtgaatcaggagatacaaagacctccaaaaaaggaccagttcctcggatgtgccccctcacagagagatgaaggggcagcagaaaacagctgaaacggaagaggggacagtgcagattcaggaaggtgcagtggctactggggaagacccaaccagtgtggctattgccagcatccagtcagctgccaccttccctgaccccaacgtcaagtacgtcttccgaactgagaatgggggccaggtgatgtacagggtgatccaggtgtctgaggggcagctggatggccaaactgagggaactggcgccatcagtggctaccctgccactcaatccatgacccaggcggtgatccagggtgctttcaccagtgatgatgcagttgacacggaggggacagctgctgagacgcactatacttacttccccagcacggcagtgggagatggggcagggggtaccacatcggggagtacagctgctgttgttactacccagggctcagaggcactgctggggcaggcgacccctcctggcactggtcaattctttgtgatgatgtcaccacaagaagtactgcagggaggaagccagcgctcaattgcccctaggactcacccttattccccgaagtcagaagctccccggacgactcgggatgagaaacgcagggctcagcataatgaagtggagcgtcgccgccgagacaagatcaacaactggatcgtgcagctctccaagataatcccagactgctctatggagagcaccaagtctggccagagtaaaggtgggattctatccaaagcttgtgattatatccaggagcttcggcagagtaaccaccgcttgtctgaagaactgcagggacttgaccaactgcagctggacaatgacgtgcttcgacaacaggtggaagatcttaaaaacaagaatctgctgcttcgagctcagttgcggcaccacggattagaggtcgtcatcaagaatgacagcaactaactatggggattcaggggctttgggcccaagaactgcagatagcccaggagcaacagcctaatcccgtgcccctttccttcactgccccacttctggcatgggacagggggaagttcagaaggtgtgtccttgaactgaggccctgtgatatggcggcctgcagtggtgtgaaacacacaatgtggacgtgcactgacagccttgcccacccccaccatgcagcccctgggcccttgtgctcctctcgcacaatgcatgtgctgtctccatgctggatactggacacactaaactctggggcttgtcctgtgcttgcttagagtgcccagcagaggtttgctgacaggtgatgctctggcttgccccaggactctggcacttccattggttcttcctttccctggagctgaggtttagatgtgcaacctgtggctcaggggagcaagcttacacaagaagtgagggaaggatgtttagcagtggctggtgcccatgaagaggagattggccagtgagaagctgaggcctatgcagacatctctggagccagagagaacaacaggcaggggcccacttggggccttcccccttgtggggggtcgttttttttttttcttttctttttttttttttttttttttttttttaagataaaattgttcaaagccacagttgtctgtttttcttccttttgtgggccacgggctggaagggaggggcacattgctcttcgaccagtaagggctgtgccaagttcagggtggggtgctgctcctgcatttattacccggagtcctggttcctgggccagaccggtgtgtcgtttttggcccaagctagagaatgttaagggcttctgcggtgggttggtgctagaggcgccgcgaacaggtgctgcgggg

SEQ ID NO: 324151 - DNA, 2524 bp, Homo sapiens
gcccctcaccaacatggccgcgggctggaagtgcgcatgagcagctgtctatggagatacctaggccgggagagggagaacacagttggagaaaatcggcagctgagacggccttggccggacttagcactcaggcctgtgaatcaggagatacaaagacctccaaaaaaggaccagttcctcggatgtgccccctcacagagagatgaaggggcagcagaaaacagctgaaacggaagaggggacagtgcagattcaggaaggtgcagtggctactggggaagacccaaccagtgtggctattgccagcatccagtcagctgccaccttccctgaccccaacgtcaagtacgtcttccgaactgagaatgggggccaggtgatgtacagggtgatccaggtgtctgaggggcagctggatggccaaactgagggaactggcgccatcagtggctaccctgccactcaatccatgacccaggcggtgatccagggtgctttcaccagtgatgatgcagttgacacggaggggacagctgctgagacgcactatacttacttccccagcacggcagtgggagatggggcagggggtaccacatcggggagtacagctgctgttgttactacccagggctcagaggcactgctggggcaggcgacccctcctggcactggtgagatattgcatgaggatgctggctgaaagggctagaataggctgtgggacatgactggtaggcagtgagccttcactcatgactcttagtgatcattaagacctggacaggcagtgagtctggggctgctcttctattagcatgttctttttagaggaggggaccagggtcttcacctcagggcttggtgaggttcctacccatgtcctgacagaacctaccctgcatcttcacaggtcaattctttgtgatgatgtcaccacaagaagtactgcagggaggaagccagcgctcaattgcccctaggactcacccttattccccgaagtcagaagctccccggacgactcgggatgagaaacgcagggctcagcataatgaagtggagcgtcgccgccgagacaagatcaacaactggatcgtgcagctctccaagataatcccagactgctctatggagagcaccaagtctggccaggtcatggaaagaccctggtagtgggcaggatgcctgaattctgcctcctggtattgtttccagaaatggtagagagaggggcacacatgacagtagtcttatctctccctgaggttcctgtatccctgggagatattataccaccttccttagatgaaaatgaggtccaaagtgtgaacctacttttggaaagcaagctgggtatctgaaatcctagttctcattttgttgaccttatcttgcagagtaaaggtgggattctatccaaagcttgtgattatatccaggagcttcggcagagtaaccaccgcttgtctgaagaactgcagggacttgaccaactgcagctggacaatgacgtgcttcgacaacaggtggaagatcttaaaaacaagaatctgctgcttcgagctcagttgcggcaccacggattagaggtcgtcatcaagaatgacagcaactaactatggggattcaggggctttgggcccaagaactgcagatagcccaggagcaacagcctaatcccgtgcccctttccttcactgccccacttctggcatgggacagggggaagttcagaaggtgtgtccttgaactgaggccctgtgatatggcggcctgcagtggtgtgaaacacacaatgtggacgtgcactgacagccttgcccacccccaccatgcagcccctgggcccttgtgctcctctcgcacaatgcatgtgctgtctccatgctggatactggacacactaaactctggggcttgtcctgtgcttgcttagagtgcccagcagaggtttgctgacaggtgatgctctggcttgccccaggactctggcacttccattggttcttcctttccctggagctgaggtttagatgtgcaacctgtggctcaggggagcaagcttacacaagaagtgagggaaggatgtttagcagtggctggtgcccatgaagaggagattggccagtgagaagctgaggcctatgcagacatctctggagccagagagaacaacaggcaggggcccacttggggccttcccccttgtggggggtcgttttttttttttcttttctttttttttttttttttttttttttttaagataaaattgttcaaagccacagttgtctgtttttcttccttttgtgggccacgggctggaagggaggggcacattgctcttcgaccagtaagggctgtgccaagttcagggtggggtgctgctcctgcatttattacccggagtcctggttcctgggccagaccggtgtgtcgtttttggcccaagctagagaatgttaagggcttctgcggtgggttggtgctagaggcgccgcgaacaggtgctgcgggg

SEQ ID NO: 324152 - DNA, 761 bp, Homo sapiens
  misc_feature (136)..(136): n is a, c, g, or t
  misc_feature (138)..(138): n is a, c, g, or t
gtgtgtgagttttttttctctctgttcttaatattatccccccctattttttttttaaaaaaaaaaaaaaaaaaaaaaaaaataaaaaaaaaaaaaaaaaaaaaaaaaaaaaaaaaaaaaaaaaaaaaaaaaaaananaaaaaaaaaaaaaaaaaaaaaacgacccccacaagggggaaggccccaagtgggcccctgctgacaggtgatgctctggcttgccccaggactctggcacttccattggttcttcctttccctggagctgaggtttagatgtgcaacctgtggctcaggggagcaagcttacacaagaagtgagggaaggatgtttagcagtggctggtgcccatgaagaggagattggccagtgagaagctgaggcctatgcagacatctctggagccagagagaacaacaggcaggggcccacttggggccttcccccttgtggggggtcgttttttttttttcttttctttttttttttttttttttttttttttaagataaaattgttcaaagccacagttgtctgtttttcttccttttgtgggccacgggctggaagggaggggcacattgctcttcgaccagtaagggctgtgccaagttcagggtggggtgctgctcctgcatttattacccggagtcctggttcctgggccagaccggtgtgtcgtttttggcccaagctagagaatgttaagggcttctgcggtgggttggtgctagaggcgccgcgaacaggtgctgcgggg

SEQ ID NO: 324153 - DNA, 613 bp, Homo sapiens
acccccacaagggggaaggccccaagtgggcccctgcctgttgttctctgctgacaggtgatgctctggcttgccccaggactctggcacttccattggttcttcctttccctggagctgaggtttagatgtgcaacctgtggctcaggggagcaagcttacacaagaagtgagggaaggatgtttagcagtggctggtgcccatgaagaggagattggccagtgagaagctgaggcctatgcagacatctctggagccagagagaacaacaggcaggggcccacttggggccttcccccttgtggggggtcgttttttttttttcttttctttttttttttttttttttttttttttaagataaaattgttcaaagccacagttgtctgtttttcttccttttgtgggccacgggctggaagggaggggcacattgctcttcgaccagtaagggctgtgccaagttcagggtggggtgctgctcctgcatttattacccggagtcctggttcctgggccagaccggtgtgtcgtttttggcccaagctagagaatgttaagggcttctgcggtgggttggtgctagaggcgccgcgaacaggtgctgcgggg

SEQ ID NO: 324154 - DNA, 579 bp, Homo sapiens
acccccacaagggggaaggccccaagtgggcccctgcctgttgttctctctggcacttccattggttcttcctttccctggagctgaggtttagatgtgcaacctgtggctcaggggagcaagcttacacaagaagtgagggaaggatgtttagcagtggctggtgcccatgaagaggagattggccagtgagaagctgaggcctatgcagacatctctggagccagagagaacaacaggcaggggcccacttggggccttcccccttgtggggggtcgttttttttttttcttttctttttttttttttttttttttttttttaagataaaattgttcaaagccacagttgtctgtttttcttccttttgtgggccacgggctggaagggaggggcacattgctcttcgaccagtaagggctgtgccaagttcagggtggggtgctgctcctgcatttattacccggagtcctggttcctgggccagaccggtgtgtcgtttttggcccaagctagagaatgttaagggcttctgcggtgggttggtgctagaggcgccgcgaacaggtgctgcgggg

SEQ ID NO: 324155 - DNA, 374 bp, Homo sapiens
ttctgctagccactgacccagtttgacaccctctactttgttctccatggagaaggcttcatcttttccccctcaccagtggatgtctgaatacattcaggggcttggaagtgccagctttactacccattccctttactgcctccttcccatgtcaggtggaagatcttaaaaacaagaatctgctgcttcgagctcagttgcggcaccacggattagaggtcgtcatcaagaatgacagcaactaactatggggattcaggggctttgggcccaagaactgcagatagcccaggagcaacagcctaatcccgtgcccctttccttcactgccccacttctggcatgggacagggggaagttcagaaggtgtg

SEQ ID NO: 324156 - DNA, 2285 bp, Homo sapiens
gcccctcaccaacatggccgcgggctggaagtgcgcatgagcagctgtctatggagatacctaggccgggagagggagaacacagttggagaaaatcggcagctgagacggccttggccggacttagcactcaggcctgtgaatcaggagatacaaagacctccaaaaaaggaccagttcctcggatgtgccccctcacagagagatgaaggggcagcagaaaacagctgaaacggaagaggggacagtgcagattcaggaaggtgcagtggctactggggaagacccaaccagtgtggctattgccagcatccagtcagctgccaccttccctgaccccaacgtcaagtacgtcttccgaactgagaatgggggccaggtgatgtacagggtgatccaggtgtctgaggggcagctggatggccaaactgagggaactggcgccatcagtggctaccctgccactcaatccatgacccaggcggtgatccagggtgctttcaccagtgatgatgcagttgacacggaggggacagctgctgagacgcactatacttacttccccagcacggcagtgggagatggggcagggggtaccacatcggggagtacagctgctgttgttactacccagggctcagaggcactgctggggcaggcgacccctcctggcactggtcaattctttgtgatgatgtcaccacaagaagtactgcagggaggaagccagcgctcaattgcccctaggactcacccttattccccgaagtcagaagctccccggacgactcgggatgagaaacgcagggctcagcataatgaagtggagcgtcgccgccgagacaagatcaacaactggatcgtgcagctctccaagataatcccagactgctctatggagagcaccaagtctggccaggtcatggaaagaccctggtagtgggcaggatgcctgaattctgcctcctggtattgtttccagaaatggtagagagaggggcacacatgacagtagtcttatctctccctgaggttcctgtatccctgggagatattataccaccttccttagatgaaaatgaggtccaaagtgtgaacctacttttggaaagcaagctgggtatctgaaatcctagttctcattttgttgaccttatcttgcagagtaaaggtgggattctatccaaagcttgtgattatatccaggagcttcggcagagtaaccaccgcttgtctgaagaactgcagggacttgaccaactgcagctggacaatgacgtgcttcgacaacaggtggaagatcttaaaaacaagaatctgctgcttcgagctcagttgcggcaccacggattagaggtcgtcatcaagaatgacagcaactaactatggggattcaggggctttgggcccaagaactgcagatagcccaggagcaacagcctaatcccgtgcccctttccttcactgccccacttctggcatgggacagggggaagttcagaaggtgtgtccttgaactgaggccctgtgatatggcggcctgcagtggtgtgaaacacacaatgtggacgtgcactgacagccttgcccacccccaccatgcagcccctgggcccttgtgctcctctcgcacaatgcatgtgctgtctccatgctggatactggacacactaaactctggggcttgtcctgtgcttgcttagagtgcccagcagaggtttgctgacaggtgatgctctggcttgccccaggactctggcacttccattggttcttcctttccctggagctgaggtttagatgtgcaacctgtggctcaggggagcaagcttacacaagaagtgagggaaggatgtttagcagtggctggtgcccatgaagaggagattggccagtgagaagctgaggcctatgcagacatctctggagccagagagaacaacaggcaggggcccacttggggccttcccccttgtggggggtcgttttttttttttcttttctttttttttttttttttttttttttttaagataaaattgttcaaagccacagttgtctgtttttcttccttttgtgggccacgggctggaagggaggggcacattgctcttcgaccagtaagggctgtgccaagttcagggtggggtgctgctcctgcatttattacccggagtcctggttcctgggccagaccggtgtgtcgtttttggcccaagctagagaatgttaagggcttctgcggtgggttggtgctagaggcgccgcgaacaggtgctgcgggg

SEQ ID NO: 324157 - DNA, 2009 bp, Homo sapiens
gcccctcaccaacatggccgcgggctggaagtgcgcatgagcagctgtctatggagatacctaggccgggagagggagaacacagttggagaaaatcggcagctgagacggccttggccggacttagcactcaggcctgtgaatcaggagatacaaagacctccaaaaaaggaccagttcctcggatgtgccccctcacagagagatgaaggggcagcagaaaacagctgaaacggaagaggggacagtgcagattcaggaaggtgcagtggctactggggaagacccaaccagtgtggctattgccagcatccagtcagctgccaccttccctgaccccaacgtcaagtgatgtacagggtgatccaggtgtctgaggggcagctggatggccaaactgagggaactggcgccatcagtggctaccctgccactcaatccatgacccaggcggtgatccagggtgctttcaccagtgatgatgcagttgacacggaggggacagctgctgagacgcactatacttacttccccagcacggcagtgggagatggggcagggggtaccacatcggggagtacagctgctgttgttactacccagggctcagaggcactgctggggcaggcgacccctcctggcactggtcaattctttgtgatgatgtcaccacaagaagtactgcagggaggaagccagcgctcaattgcccctaggactcacccttattccccgaagtcagaagctccccggacgactcgggatgagaaacgcagggctcagcataatgaagtggagcgtcgccgccgagacaagatcaacaactggatcgtgcagctctccaagataatcccagactgctctatggagagcaccaagtctggccagagtaaaggtgggattctatccaaagcttgtgattatatccaggagcttcggcagagtaaccaccgcttgtctgaagaactgcagggacttgaccaactgcagctggacaatgacgtgcttcgacaacaggtggaagatcttaaaaacaagaatctgctgcttcgagctcagttgcggcaccacggattagaggtcgtcatcaagaatgacagcaactaactatggggattcaggggctttgggcccaagaactgcagatagcccaggagcaacagcctaatcccgtgcccctttccttcactgccccacttctggcatgggacagggggaagttcagaaggtgtgtccttgaactgaggccctgtgatatggcggcctgcagtggtgtgaaacacacaatgtggacgtgcactgacagccttgcccacccccaccatgcagcccctgggcccttgtgctcctctcgcacaatgcatgtgctgtctccatgctggatactggacacactaaactctggggcttgtcctgtgcttgcttagagtgcccagcagaggtttgctgacaggtgatgctctggcttgccccaggactctggcacttccattggttcttcctttccctggagctgaggtttagatgtgcaacctgtggctcaggggagcaagcttacacaagaagtgagggaaggatgtttagcagtggctggtgcccatgaagaggagattggccagtgagaagctgaggcctatgcagacatctctggagccagagagaacaacaggcaggggcccacttggggccttcccccttgtggggggtcgttttttttttttcttttctttttttttttttttttttttttttttaagataaaattgttcaaagccacagttgtctgtttttcttccttttgtgggccacgggctggaagggaggggcacattgctcttcgaccagtaagggctgtgccaagttcagggtggggtgctgctcctgcatttattacccggagtcctggttcctgggccagaccggtgtgtcgtttttggcccaagctagagaatgttaagggcttctgcggtgggttggtgctagaggcgccgcgaacaggtgctgcgggg

SEQ ID NO: 324158 - DNA, 2686 bp, Homo sapiens
gcgagacgaaggtgcgcaggccgatgcccgagagcgggatgatgaccgtgaagacgagccagccggcgatgagggtgaaggccacccagcgccacttgcccagcggcaccgcttctggcgcgcgcccttgcccttgatggcgacgaacttgttggccgagcgcacgagccagcgctgcagcatcaccagcggcatggtcaccgccaccaggcacacggccaccgccgccatcaggtgatacgaaggcgtacccagcttgttggtgagcttgtagagataggtcggcagcaccaggtggccttccggatcacccagcaccagcaccaggccgaacacttcaaagccgaggaagaacaccagcacgccggagtaggccagcgccggggtgatcatcggcagcgacacgttcaacgccacctgcagcggcgaacgaccggccacgcgggccgcttcttccacatccgaacccaggctgcgcagggccgccgaggcatacaggtagacgtgcggcacgtgggtcaggccggcgatgatgacgatgctggtgaaggaatagatgttccacgggtcgccctcgaaaccgacgaccgacagcaggttcttgacccacaccgtgtagaagccgaccggccccatcgagaccacgtagccgaagccgatcaccagtgggcgagacgaagatgggcaccatcagtggcgggggcggatcgaacgctgcgacccggcaggtcggctgcgcaccatcaggaaggccaagcactcggccgagcggcacggcgatcagggccaggccggtcgccagcgtcaagccgattgacgaaggcctggcggaagtccgggtcatcgaagatgaagcgataggaatcgaaggtgagcgtcttgaccggcgcaaagaacggcgccgacaggaagctttgatagaagatcagcagcagcggcagcgaagatggccagggctgccagcagcacgaccaggccgcgcggccagttcagccggaatcggcgggcggcagggcttgctcgcgcgcggcacgttgggtggctgagcagcggcctggtgcgctcgcttagcgggcgacggaatcagacggacgtggacgcccccggagtggaagccgaagcaggagttgttgttgctgaggggctgccgcagccgccgcgagcctccggacagacgccagagcgaggagggcgctacgcgacttggcaagatgacccagttcctgccgcccaaccttctggccctctttgccccccgtgaccctattccatacctgccacccctggagaaactgccacatgaaaaacaccacaatcaaccttattgtggcattgcgccgtacattcgagagtttgaggaccctcgagatgcccctcctccaactcgtgctgaaacccgagaggagcgcatggagaggaaaagacgggaaaagattgagcggcgacagcaagaagtggagacagagcttaaaatgtgggaccctcacaatgatcccaatgctcagggggatgccttcaagactctcttcgtggcgagagtgaattatgacacaacagaatccaagctccggagagagtttgaggtgtacggacctatcaaaagaatacacatggtctacagtaagcggtcaggaaagccccgtggctatgccttcatcgagtacgaacacgagcgagacatgcactccgcttacaaacacgcagatggcaagaagattgatggcaggagggtccttgtggacgtggagaggggccgaaccgtgaagggctggaggccccggcggctaggaggaggcctcggtggtaccagaagaggaggggctgatgtgaacatccggcattcaggccgcgatgacacctcccgctacgatgagaggcccggcccctccccgcttccgcacagggaccgggaccgggaccgtgagcgggagcgcagagagcggagccgggagcgagacaaggagcgagaacggcgacgctcccgctcccgggaccggcggaggcgctcacggagtcgcgacaaggaggagcggaggcgctccagggagcggagcaaggacaaggaccgggaccggaagcggcgaagcagccggagtcgggagcgggcccggcgggagcgggagcgcaaggaggagctgcgtggcggcggtggcgacatggcggagccctccgaggcgggtgacgcgccccctgatgatgggcctccaggggagctcgggcctgacggccctgacggtccagaggaaaagggccgggatcgtgaccgggagcgacggcggagccaccggagcgagcgcgagcggcgccgggaccgggatcgtgaccgtgaccgtgaccgcgagcacaaacggggggagcggggcagtgagcggggcagggatgaggcccgaggtgggggcggtggccaggacaacgggctggagggtctgggcaacgacagccgagacatgtacatggagtctgagggcggcgacggctacctggctccggagaatgggtatttgatggaggctgcgccggagtgaagaggtcgtcctctccatctgctgtgtttggacgcgttcctgcccagccccttgctgtcatcccctcccccaaccttggccacttgagtttgtcctccaagggtaggtgtctcatttgttctggccccttggatttaaaaataaaattaatttcctgttga

SEQ ID NO: 324159 - DNA, 1212 bp, Homo sapiens
gcagaagccagccccccgcggctgaggtactcaaggtgcccaaaggcggggtagtgacctcgcgcgtgcgctgtgcccgcggcagcgccgggtcctagtgtgtgggttgttgttggcaccgcacggcgcgtgcgcagtgaggacggcggagggatttgcggccgggacccaccccctgctccagtcgctatcggaggccgcgcgggtggctgagcagcggcctggtgcgctcgcttagcgggcgacggaatcagacggacgtggacgcccccggagtggaagccgaagcaggagttgttgttgctgaggggctgccgcagccgccgcgagcctccggacagacgccagagcgaggagggcgctacgcgacttggcaagatgacccagttcctgccgcccaaccttctggccctctttgccccccgtgaccctattccatacctgccacccctggagaaactgccacatgaaaaacaccacaatcaaccttattgtggcattgcgccgtacattcgagagtttgaggaccctcgagatgcccctcctccaactcgtgctgaaacccgagaggagcgcatggagaggaaaagacgggaaaagattgagcggcgacagcaagaagtggagacagagcttaaaatgtgggaccctcacaatgatcccaatgctcagggggatgccttcaagactctcttcgtggcgagagtgaattatgacacaacagaatccaagctccggagagagtttgaggtgtacggacctatcaaaagaatacacatggtctacagtaagcggtcaggaaagccccgtggctatgccttcatcgagtacgaacacgagcgagacatgcactccgcttacaaacacgcagatggcaagaagattgatggcaggagggtccttgtggacgtggagaggggccgaaccgtgaagggctggaggccccggcggctaggaggaggcctcggtggtaccagaagaggaggggctgatgtgaacatccggcattcaggccgcgatgaactccgtagataaaggccggcctcccgttcgcaggacggccggacgttaggaccaaaacggcggccggacaggcgaaggacccgacgaccgggagccgaccgaaagaggggcccgggagagaaagcgagaggaaacctgggcccgcacaaaacgggaacacagggccttgacagccaaaataggcaccgc

SEQ ID NO: 324160 - DNA, 1103 bp, Homo sapiens
gatgtcagcggcgaggtggcaggaacaccgagggcagggctccaggccagggctccactggagcccttcagccttccctccctgcccccgtgctttctatggggctgctactgtgctggccctggagagtctttttggctgctagttttggggtgctctgccccctttctgtcttccttactgtggttgaggcctcccgagggggctggctgtggtgtccagcagctctccagaggtggtcaggagctccctaaagtgcatggaattggggcttggggtgtgggagggaccaaggggtaggctgctagcagctgaaggtgtcgtaggtttttactaaagaaccttccactgtctagagacttgagagagggaaagagagagagaggcctagacgaacacaatcacatgttttctttgctgttcctcccgggatgggcctgttttggggtttgggactctgaacccgagcggggttccttcgcttgactttgatcctggtccttaaatgcctttccccactcccctcccgtgggttcaggggccaagcggcccctcctcagagcacgggcagcaccgtctcctggacccctgtgtgccagcctctgcagacgcagctggtgggagggagcatggatttggaggtggagaagtcactcctggtcctcggagggggtgggctgtgtgcctagttcagtgtgactcggggattggtgagggcggacaggtttctgaggcctccctagccttctttgtaaattcacacgagatagtccagggctttccagcgcccagagggatgaggcccgaggtgggggcggtggccaggacaacgggctggagggtctgggcaacgacagccgagacatgtacatggagtctgagggcggcgacggctacctggctccggagaatgggtatttgatggaggctgcgccggagtgaagaggtcgtcctctccatctgctgtgtttggacgcgttcctgcccagccccttgctgtcatcccctcccccaaccttggccacttgagtttgtcctccaagggtaggtgtctcatttgttctggccccttggatttaaaaataaaattaatttcctgttga

SEQ ID NO: 324161 - DNA, 2489 bp, Homo sapiens
  misc_feature (1964)..(1964): n is a, c, g, or t
  misc_feature (2035)..(2035): n is a, c, g, or t
caagtacctattggatcaccagctgtgtgccgggcttctagttgagcaacacagaggcagcctctgccctctgagcctcctgcattcggtctcctcattgtcatttgctgtctcaggcaaggtcagtttggctgcaagtatcagaaataaacttgagcttcctgaaacataaagggccctgttgatgtagaatcatgggcatcctttggagttcggaggtatgtgatgtccgtggacctgagaacctggtagctgacgctgttaagagctggggcaaccaggccaggcgtggtggctcgcctgtaatcccagcactttgggaggccgaggcgggtggatcatgaggtcaggagttcgagaccagcctggccaagatgttgaaaccgcatctctactaaaaatacaaaaattaactgggcgtggtggcgggtgcctgtaatcccatctactcgggaggctgaggcagagaattgcttaaacctgggaggcagaggttgcagtgagccaagatagagtcactgcattccatccagcctgggtgccagagcaagactctgtctcaaaaaaaaaaacaaaaaacaaaaaaactggggcgacccacctgtgatgtgtgacagcccacagcttgcttctgcctcgtttgcctccatgcagctaggtcggtcccatgcctctttgcactggcccagtgcagcaggccacaggccccagctttacactcagtcctggatgagtctcttgtttcggggtgggcacatttgattgactcagtgttgggcctggggtcctgttgctcaggcatgcttattgaggactgaatcctgcaaagctgagtgacagttgtcagagaagatgatggtccctgggcagacacccaggcagtagtagccacttggggctcctgtcctgcctcccagccctgtgtcctggctctggactcgcctgtgctagggagaccacgctctcagctgctgagcctcggagcttaccaggcatgttcttaccttactctggtctctctggggtggagtgggttcttatagctctgctgtttcctgttggggcgggaaaatgctagaatctcagtctttccagaatctcagaatcttctagttcaattgccattcaaactttttgttggtgttagccaataacatcttgactcggtgcacccgcagaaatactgtaacctaaagtttgaggaaacagttttttctatgtagtaagtatatagttgtattctgctgttttgtttcttaagatgttggttgcaacccatcagattgatgatgggactcatttctgggtcatgacctgaatataggaaaggctagtctagctgccctgtgcctgtgacatggcaggtgcctggtccgctgcctgcttctataagaatgtctccctgcagcctcttttctatacagaactcagccctgcctcacggaagcttttccaggcagtgcgagatagaggagcgcttgagaaggcaggttttgcagcagacggcagtgacagcccagttctgcaccttctttgctgagtcactgtgggccagtgacttgatctgagattgtttccccatcagaaccatgaggttatcatctgtgccttggggctgttcatctatctattcacttgacacacacacatccacctttctataccagctgcagcgccacctgctggtaccgtgagcaagagctgggcatgcccacggttccggtgccctgcagtctggtgggagaggcaggtaggggtcgactcaggtagcaaacctgaaactccaggggaaggaagcgtttctgcaactgtgagtacataggactgtgaggagagacttcccgagaaaggatgttcgggctagcgttaagggtgagcgtgagttcaccagagaaggaaggggagaccagtccagggcaaggagaatgcacagacactggcaggaaggtgagcgtggggacacngggaaaggcctgggacacgcagccaagagccgcggctcagacgctagcagggcccgctcttgctgcctctnccaccagttgacgaggagtttggaccttaggctgggggacgccagcaaaggcttctaagcagatcacatttttgggtggaaagatcattggcttcgggtttctgtgagggcgaggatgattggaagggagggttttgaggaggctgtgaagtgcgctatggttaagatgatgcgctttggggccagacatgggttccagtaacggctgttgcctagcgaacgctttgtgtgagttaattagagaagacctggctccggagaatgggtatttgatggaggctgcgccggagtgaagaggtcgtcctctccatctgctgtgtttggacgcgttcctgcccagccccttgctgtcatcccctcccccaaccttggccacttgagtttgtcctccaagggtaggtgtctcatttgttctggccccttggatttaaaaataaaattaatttcctgttga

SEQ ID NO: 324162 - DNA, 1826 bp, Homo sapiens
gcagaagccagccccccgcggctgaggtactcaaggtgcccaaaggcggggtagtgacctcgcgcgtgcgctgtgcccgcggcagcgccgggtcctagtgtgtgggttgttgttggcaccgcacggcgcgtgcgcagtgaggacggcggagggatttgcggccgggacccaccccctgctccagtcgctatcggaggccgcgcgggtggctgagcagcggcctggtgcgctcgcttagcgggcgacggaatcagacggacgtggacgcccccggagtggaagccgaagcaggagttgttgttgctgaggggctgccgcagccgccgcgagcctccggacagacgccagagcgaggagggcgctacgcgacttggcaagatgacccagttcctgccgcccaaccttctggccctctttgccccccgtgaccctattccatacctgccacccctggagaaactgccacatgaaaaacaccacaatcaaccttattgtggcattgcgccgtacattcgagagtttgaggaccctcgagatgcccctcctccaactcgtgctgaaacccgagaggagcgcatggagaggaaaagacgggaaaagattgagcggcgacagcaagaagtggagacagagcttaaaatgtgggaccctcacaatgatcccaatgctcagggggatgccttcaagactctcttcgtggcgagagtgaattatgacacaacagaatccaagctccggagagagtttgaggtgtacggacctatcaaaagaatacacatggtctacagtaagcggtcaggaaagccccgtggctatgccttcatcgagtacgaacacgagcgagacatgcactccgcttacaaacacgcagatggcaagaagattgatggcaggagggtccttgtggacgtggagaggggccgaaccgtgaagggctggaggccccggcggctaggaggaggcctcggtggtaccagaagaggaggggctgatgtgaacatccggcattcaggccgcgatgacacctcccgctacgatgagagggaccgggaccgggaccgtgagcgggagcgcagagagcggagccgggagcgagacaaggagcgagaacggcgacgctcccgctcccgggaccggcggaggcgctcacggagtcgcgacaaggaggagcggaggcgctccagggagcggagcaaggacaaggaccgggaccggaagcggcgaagcagccggagtcgggagcgggcccggcgggagcgggagcgcaaggaggagctgcgtggcggcggtggcgacatggcggagccctccgaggcgggtgacgcgccccctgatgatgggcctccaggggagctcgggcctgacggccctgacggtccagaggaaaagggccgggatcgtgaccgggagcgacggcggagccaccggagcgagcgcgagcggcgccgggaccgggatcgtgaccgtgaccgtgaccgcgagcacaaacggggggagcggggcagtgagcggggcagggatgaggcccgaggtgggggcggtggccaggacaacgggctggagggtctgggcaacgacagccgagacatgtacatggagtctgagggcggcgacggctacctggctccggagaatgggtatttgatggaggctgcgccggagtgaagaggtcgtcctctccatctgctgtgtttggacgcgttcctgcccagccccttgctgtcatcccctcccccaaccttggccacttgagtttgtcctccaagggtaggtgtctcatttgttctggccccttggatttaaaaataaaattaatttcctgttga

SEQ ID NO: 324163 - DNA, 1744 bp, Homo sapiens
gcagaagccagccccccgcggctgaggtactcaaggtgcccaaaggcggggtagtgacctcgcgcgtgcgctgtgcccgcggcagcgccgggtcctagtgtgtgggttgttgttggcaccgcacggcgcgtgcgcagtgaggacggcggagggatttgcggccgggacccaccccctgctccagtcgctatcggaggccgcgcgggtggctgagcagcggcctggtgcgctcgcttagcgggcgacggaatcagacggacgtggacgcccccggagtggaagccgaagcaggagttgttgttgctgaggggctgccgcagccgccgcgagcctccggacagacgccagagcgaggagggcgctacgcgacttggcaagatgacccagttcctgccgcccaaccttctggccctctttgccccccgtgaccctattccatacctgccacccctggagaaactgccacatgaaaaacaccacaatcaaccttattgtggcattgcgccgtacattcgagagtttgaggaccctcgagatgcccctcctccaactcgtgctgaaacccgagaggagcgcatggagaggaaaagacgggaaaagattgagcggcgacagcaagaagtggagacagagcttaaaatgtgggaccctcacaatgatcccaatgctcagggggatgccttcaagactctcttcgtggcgagagtgaattatgacacaacagaatccaagctccggagagagtttgaggtgtacggacctatcaaaagaatacacatggtctacagtaagcggtcaggaaagccccgtggctatgccttcatcgagtacgaacacgagcgagacatgcactccgcttacaaacacgcagatggcaagaagattgatggcaggagggtccttgtggacgtggagaggggccgaaccgtgaagggctggaggccccggcggctaggaggaggcctcggtggtaccagaagaggaggggctgatgtgaacatccggcattcaggccgcgatgacacctcccgctacgatgagaggcccggcccctccccgcttccgcacagggaccgggaccgggaccgtgagcgggagcgcagagagcggagccgggagcgagacaaggagcgagaacggcgaccagccggagtcgggagcgggcccggcgggagcgggagcgcaaggaggagctgcgtggcggcggtggcgacatggcggagccctccgaggcgggtgacgcgccccctgatgatgggcctccaggggagctcgggcctgacggccctgacggtccagaggaaaagggccgggatcgtgaccgggagcgacggcggagccaccggagcgagcgcgagcggcgccgggaccgggatcgtgaccgtgaccgtgaccgcgagcacaaacggggggagcggggcagtgagcggggcagggatgaggcccgaggtgggggcggtggccaggacaacgggctggagggtctgggcaacgacagccgagacatgtacatggagtctgagggcggcgacggctacctggctccggagaatgggtatttgatggaggctgcgccggagtgaagaggtcgtcctctccatctgctgtgtttggacgcgttcctgcccagccccttgctgtcatcccctcccccaaccttggccacttgagtttgtcctccaagggtaggtgtctcatttgttctggccccttggatttaaaaataaaattaatttcctgttga

SEQ ID NO: 324164 - DNA, 1874 bp, Homo sapiens
gcagaagccagccccccgcggctgaggtactcaaggtgcccaaaggcggggtagtgacctcgcgcgtgcgctgtgcccgcggcagcgccgggtcctagtgtgtgggttgttgttggcaccgcacggcgcgtgcgcagtgaggacggcggagggatttgcggccgggacccaccccctgctccagtcgctatcggaggccgcgcgggtggctgagcagcggcctggtgcgctcgcttagcgggcgacggaatcagacggacgtggacgcccccggagtggaagccgaagcaggagttgttgttgctgaggggctgccgcagccgccgcgagcctccggacagacgccagagcgaggagggcgctacgcgacttggcaagatgacccagttcctgccgcccaaccttctggccctctttgccccccgtgaccctattccatacctgccacccctggagaaactgccacatgaaaaacaccacaatcaaccttattgtggcattgcgccgtacattcgagagtttgaggaccctcgagatgcccctcctccaactcgtgctgaaacccgagaggagcgcatggagaggaaaagacgggaaaagattgagcggcgacagcaagaagtggagacagagcttaaaatgtgggaccctcacaatgatcccaatgctcagggggatgccttcaagactctcttcgtggcgagagtgaattatgacacaacagaatccaagctccggagagagtttgaggtgtacggacctatcaaaagaatacacatggtctacagtaagcggtcaggaaagccccgtggctatgccttcatcgagtacgaacacgagcgagacatgcactccgcttacaaacacgcagatggcaagaagattgatggcaggagggtccttgtggacgtggagaggggccgaaccgtgaagggctggaggccccggcggctaggaggaggcctcggtggtaccagaagaggaggggctgatgtgaacatccggcattcaggccgcgatgacacctcccgctacgatgagaggcccggcccctccccgcttccgcacagggaccgggaccgggaccgtgagcgggagcgcagagagcggagccgggagcgagacaaggagcgagaacggcgacgctcccgctcccgggaccggcggaggcgctcacggagtcgcgacaaggaggagcggaggcgctccagggagcggagcaaggacaaggaccgggaccggaagcggcgaagcagccggagtcgggagcgggcccggcgggagcgggagcgcaaggaggagctgcgtggcggcggtggcgacatggcggagccctccgaggcgggtgacgcgccccctgatgatgggcctccaggggagctcgggcctgacggccctgacggtccagaggaaaagggccgggatcgtgaccgggagcgacggcggagccaccggagcgagcgcgagcggcgccgggaccgggatcgtgaccgtgaccgtgaccgcgagcacaaacggggggagcggggcagtgagcggggcagggatgaggcccgaggtgggggcggtggccaggacaacgggctggagggtctgggcaacgacagccgagacatgtacatggagtctgagggcggcgacggctacctggctccggagaatgggtatttgatggaggctgcgccggagtgaagaggtcgtcctctccatctgctgtgtttggacgcgttcctgcccagccccttgctgtcatcccctcccccaaccttggccacttgagtttgtcctccaagggtaggtgtctcatttgttctggccccttggatttaaaaataaaattaatttcctgttgagatagtgggcaaatcggtttc

SEQ ID NO: 324165 - DNA, 1916 bp, Homo sapiens
gcagaagccagccccccgcggctgaggtactcaaggtgcccaaaggcggggtagtgacctcgcgcgtgcgctgtgcccgcggcagcgccgggtcctagtgtgtgggttgttgttggcaccgcacggcgcgtgcgcagtgaggacggcggagggatttgcggccgggacccaccccctgctccagtcgctatcggaggccgcgcgggtggctgagcagcggcctggtgcgctcgcttagcgggcgacggaatcagacggacgtggacgcccccggagtggaagccgaagcaggagttgttgttgctgaggggctgccgcagccgccgcgagcctccggacagacgccagagcgaggagggcgctacgcgacttggcaagatgacccagttcctgccgcccaaccttctggccctctttgccccccgtgaccctattccatacctgccacccctggagaaactgccacatgaaaaacaccacaatcaaccttattgtggcattgcgccgtacattcgagagtttgaggaccctcgagatgcccctcctccaactcgtgctgaaacccgagaggagcgcatggagaggaaaagacgggaaaagattgagcggcgacagcaagaagtggagacagagcttaaaatgtgggaccctcacaatgatcccaatgctcagggggatgccttcaagactctcttcgtggcgagagtgaattatgacacaacagaatccaagctccggagagagtttgaggtgtacggacctatcaaaagaatacacatggtctacagtaagcggtcaggaaagccccgtggctatgccttcatcgagtacgaacacgagcgagacatgcactccaccacgcagctggcttgcagctgatgcttacgctccccttacaacacctcagtgtatggttccgcttacaaacacgcagatggcaagaagattgatggcaggagggtccttgtggacgtggagaggggccgaaccgtgaagggctggaggccccggcggctaggaggaggcctcggtggtaccagaagaggaggggctgatgtgaacatccggcattcaggccgcgatgacacctcccgctacgatgagaggcccggcccctccccgcttccgcacagggaccgggaccgggaccgtgagcgggagcgcagagagcggagccgggagcgagacaaggagcgagaacggcgacgctcccgctcccgggaccggcggaggcgctcacggagtcgcgacaaggaggagcggaggcgctccagggagcggagcaaggacaaggaccgggaccggaagcggcgaagcagccggagtcgggagcgggcccggcgggagcgggagcgcaaggaggagctgcgtggcggcggtggcgacatggcggagccctccgaggcgggtgacgcgccccctgatgatgggcctccaggggagctcgggcctgacggccctgacggtccagaggaaaagggccgggatcgtgaccgggagcgacggcggagccaccggagcgagcgcgagcggcgccgggaccgggatcgtgaccgtgaccgtgaccgcgagcacaaacggggggagcggggcagtgagcggggcagggatgaggcccgaggtgggggcggtggccaggacaacgggctggagggtctgggcaacgacagccgagacatgtacatggagtctgagggcggcgacggctacctggctccggagaatgggtatttgatggaggctgcgccggagtgaagaggtcgtcctctccatctgctgtgtttggacgcgttcctgcccagccccttgctgtcatcccctcccccaaccttggccacttgagtttgtcctccaagggtaggtgtctcatttgttctggccccttggatttaaaaataaaattaatttcctgttga

SEQ ID NO: 324166 - DNA, 1889 bp, Homo sapiens
gcagaagccagccccccgcggctgaggtactcaaggtgcccaaaggcggggtagtgacctcgcgcgtgcgctgtgcccgcggcagcgccgggtcctagtgtgtgggttgttgttggcaccgcacggcgcgtgcgcagtgaggacggcggagggatttgcggccgggacccaccccctgctccagtcgctatcggaggccgcgcgggtggctgagcagcggcctggtgcgctcgcttagcgggcgacggaatcagacggacgtggacgcccccggagtggaagccgaagcaggagttgttgttgctgaggggctgccgcagccgccgcgagcctccggacagacgccagagcgaggagggcgctacgcgacttggcaagatgacccagttcctgccgcccaaccttctggccctctttgccccccgtgaccctattccatacctgccacccctggagaaactgccacatgaaaaacaccacaatcaaccttattgtggcattgcgccgtacattcgagagtttgaggaccctcgagatgcccctcctccaactcgtgctgaaacccgagaggagcgcatggagaggaaaagacgggaaaagattgagcggcgacagcaagaagtggagacagagcttaaaatgtgggaccctcacaatgatcccaatgctcagggggatgccttcaagactctcttcgtggcgagagtgaattatgacacaacagaatccaagctccggagagagtttgaggtgtacggacctatcaaaagaatacacatggtctacagtaagcggtcaggaaagccccgtggctatgccttcatcgagtacgaacacgagcgagacatgcactccaccacgcagctggcttgcagctgatgcttacgctccccttacaacacctcagtgtatggttccgcttacaaacacgcagatggcaagaagattgatggcaggagggtccttgtggacgtggagaggggccgaaccgtgaagggctggaggccccggcggctaggaggaggcctcggtggtaccagaagaggaggggctgatgtgaacatccggcattcaggccgcgatgacacctcccgctacgatgagagggaccgggaccgggaccgtgagcgggagcgcagagagcggagccgggagcgagacaaggagcgagaacggcgacgctcccgctcccgggaccggcggaggcgctcacggagtcgcgacaaggaggagcggaggcgctccagggagcggagcaaggacaaggaccgggaccggaagcggcgaagcagccggagtcgggagcgggcccggcgggagcgggagcgcaaggaggagctgcgtggcggcggtggcgacatggcggagccctccgaggcgggtgacgcgccccctgatgatgggcctccaggggagctcgggcctgacggccctgacggtccagaggaaaagggccgggatcgtgaccgggagcgacggcggagccaccggagcgagcgcgagcggcgccgggaccgggatcgtgaccgtgaccgtgaccgcgagcacaaacggggggagcggggcagtgagcggggcagggatgaggcccgaggtgggggcggtggccaggacaacgggctggagggtctgggcaacgacagccgagacatgtacatggagtctgagggcggcgacggctacctggctccggagaatgggtatttgatggaggctgcgccggagtgaagaggtcgtcctctccatctgctgtgtttggacgcgttcctgcccagccccttgctgtcatcccctcccccaaccttggccacttgagtttgtcctccaagggtaggtgtctcatttgttctggccccttggatttaaaaataaaattaatttcctgttga

SEQ ID NO: 324167 - DNA, 3170 bp, Homo sapiens
gatgtcagcggcgaggtggcaggaacaccgagggcagggctccaggccagggctccactggagcccttcagccttccctccctgcccccgtgctttctatggggctgctactgtgctggccctggagagtctttttggctgctagttttggggtgctctgccccctttctgtcttccttactgtggttgaggcctcccgagggggctggctgtggtgtccagcagctctccagaggtggtcaggagctccctaaagtgcatggaattggggcttggggtgtgggagggaccaaggggtaggctgctagcagctgaaggtgtcgtaggtttttactaaagaaccttccactgtctagagacttgagagagggaaagagagagagaggcctagacgaacacaatcacatgttttctttgctgttcctcccgggatgggcctgttttggggtttgggactctgaacccgagcggggttccttcgcttgactttgatcctggtccttaaatgcctttccccactcccctcccgtgggttcaggggccaagcggcccctcctcagagcacgggcagcaccgtctcctggacccctgtgtgccagcctctgcagacgcagctggtgggagggagcatggatttggaggtggagaagtcactcctggtcctcggagggggtgggctgtgtgcctagttcagtgtgactcggggattggtgagggcggacaggtttctgaggcctccctagccttctttgtaaattcacacgagatagtccagggctttccagcgcccagcttggatgataatcctcgtctcccccactctaaggcctccttgagatttctttggggtctaccacgtcctctgcctgtctccaggtggtacaggagatgtggttcctctccctctcctggctccctagaaccccccacttcccctccctgtagctttagctgaccccgtggtggtgggtgtggggtctgtgcgcgtgctcaggtaagcttgggggctccaggtaagcggtcccgtgtcccccccccgggaagcccgcctcctcgccaggcccccaggagttgccgagccccccccatcccgctcggtttggacacccgcaaggccggcatcggtaaatggcacctttttctcttcctctggttgttatttgggggggagcgggctggggcggggcagggtattacggttggttgaggacagccccctaggccagggctgggtgggggaacggggactttttggccttcatgacagccccacgttgatcacaggccagggcctcaggcttgccttctgctacgcgctgcccgagagcagcagtgagcctctcccccgtctcccctctacgactcccctttcctggcaggctcaggctggggtgcgctcccagcacgtgttgagccgggggtgtggagggcgagatggggcagggctggggggaggcagagtcagtcgtctcaggtaaggcagggattttcagtagcaccgcacggctccccatgcttcctccactgcccctctcccctgctgcaggggccccgccaggccccctgggagtgtataacccgcctctctgctccctgccatttcctgaagatttctcccacccccttctggttcattttctgttctgatgtctgttccccccacactcacccccctccaaaaaaaacaaaaacagaaaaaaccggtgtggtctggggtgcggagcgtcccagctgggcctcctgccccggcttggtgtctcagggtgcatgcttggggttgtggaggagccccctcccccacagcagagtccagcgtggagttaaccttcagtttctttgcagcgattttggccgccctggcgggagggggctgttccatcatgtgggagaggaagggccggggagcctagggggtggcgggtgagggtggacgtctcccccgaccaggagtggttggggcgctgagaggaagcagacgctgagatggagcaggcccttcaccggtttgggagagggttggtctggctgtcagttgcctggctgtctgttgggcgtgtgcgtgtgcgtgatgatggggacacggggcggggattctgtagagctgggcctgtcctgactagaggaccctctggggactcctctcccctccccctccccacatctgttacagccgcttacaaacacgcagatggcaagaagattgatggcaggagggtccttgtggacgtggagaggggccgaaccgtgaagggctggaggccccggcggctaggaggaggcctcggtggtaccagaagaggaggggctgatgtgaacatccggcattcaggccgcgatgacacctcccgctacgatgagaggcccggcccctccccgcttccgcacagggaccgggaccgggaccgtgagcgggagcgcagagagcggagccgggagcgagacaaggagcgagaacggcgacgctcccgctcccgggaccggcggaggcgctcacggagtcgcgacaaggaggagcggaggcgctccagggagcggagcaaggacaaggaccgggaccggaagcggcgaagcagccggagtcgggagcgggcccggcgggagcgggagcgcaaggaggagctgcgtggcggcggtggcgacatggcggagccctccgaggcgggtgacgcgccccctgatgatgggcctccaggggagctcgggcctgacggccctgacggtccagaggaaaagggccgggatcgtgaccgggagcgacggcggagccaccggagcgagcgcgagcggcgccgggaccgggatcgtgaccgtgaccgtgaccgcgagcacaaacggggggagcggggcagtgagcggggcagggatgaggcccgaggtgggggcggtggccaggacaacgggctggagggtctgggcaacgacagccgagacatgtacatggagtctgagggcggcgacggctacctggctccggagaatgggtatttgatggaggctgcgccggagtgaagaggtcgtcctctccatctgctgtgtttggacgcgttcctgcccagccccttgctgtcatcccctcccccaaccttggccacttgagtttgtcctccaagggtaggtgtctcatttgttctggccccttggatttaaaaataaaattaatttcctgttga

SEQ ID NO: 324168 - DNA, 1715 bp, Homo sapiens
gcagaagccagccccccgcggctgaggtactcaaggtgcccaaaggcggggtagtgacctcgcgcgtgcgctgtgcccgcggcagcgccgggtcctagtgtgtgggttgttgttggcaccgcacggcgcgtgcgcagtgaggacggcggagggatttgcggccgggacccaccccctgctccagtcgctatcggaggccgcgcgggtggctgagcagcggcctggtgcgctcgcttagcgggcgacggaatcagacggacgtggacgcccccggagtggaagccgaagcaggagttgttgttgctgaggggctgccgcagccgccgcgagcctccggacagacgccagagcgaggagggcgctacgcgacttggcaagatgacccagttcctgccgcccaaccttctggccctctttgccccccgtgaccctattccatacctgccacccctggagaaactgccacatgaaaaacaccacaatcaaccttattgtggcattgcgccgtacattcgagagtttgaggaccctcgagatgcccctcctccaactcgtgctgaaacccgagaggagcgcatggagaggaaaagacgggaaaagattgagcggcgacagcaagaagtggagacagagcttaaaatgtgggaccctcacaatgatcccaatgctcagggggatgccttcaagactctcttcgtggcgagagtgaattatgacacaacagaatccaagctccggagagagtttgaggtgtacggacctatcaaaagaatacacatggtctacagtaagcggtcaggaaagccccgtggctatgccttcatcgagtacgaacacgagcgagacatgcactccgcttacaaacacgcagatggcaagaagattgatggcaggagggtccttgtggacgtggagaggggccgaaccgtgaagggctggaggccccggcggctaggaggaggcctcggtggtaccagaagaggaggggctgatgtgaacatccggcattcaggccgcgatgacacctcccgctacgatgagaggcccggcccctccccgcttccgcacagggaccgggaccgggaccgtgagcgggagcgcagagagcggagccgggagcgagacaaggagcgagaacggcgacgctcccgctcccgggaccggcggaggcgctcacggagtcgcgacaaggaggagcggaggcgctccagggagcggagcaaggacaaggaccgggaccggaagcggcgaagcagccggagtcgggagcgggcccggcgggagcgggagcgcaaggaggagctgcgtggcggcggtggcgacatggcggagccctccgaggcgggtgacgcgccccctgatgatgggcctccaggggagctcgggcctgacggccctgacggtccagaggaaaagggccgggatcgtgaccgccaggacaacgggctggagggtctgggcaacgacagccgagacatgtacatggagtctgagggcggcgacggctacctggctccggagaatgggtatttgatggaggctgcgccggagtgaagaggtcgtcctctccatctgctgtgtttggacgcgttcctgcccagccccttgctgtcatcccctcccccaaccttggccacttgagtttgtcctccaagggtaggtgtctcatttgttctggccccttggatttaaaaataaaattaatttcctgttga

SEQ ID NO: 324169 - DNA, 3143 bp, Homo sapiens
gatgtcagcggcgaggtggcaggaacaccgagggcagggctccaggccagggctccactggagcccttcagccttccctccctgcccccgtgctttctatggggctgctactgtgctggccctggagagtctttttggctgctagttttggggtgctctgccccctttctgtcttccttactgtggttgaggcctcccgagggggctggctgtggtgtccagcagctctccagaggtggtcaggagctccctaaagtgcatggaattggggcttggggtgtgggagggaccaaggggtaggctgctagcagctgaaggtgtcgtaggtttttactaaagaaccttccactgtctagagacttgagagagggaaagagagagagaggcctagacgaacacaatcacatgttttctttgctgttcctcccgggatgggcctgttttggggtttgggactctgaacccgagcggggttccttcgcttgactttgatcctggtccttaaatgcctttccccactcccctcccgtgggttcaggggccaagcggcccctcctcagagcacgggcagcaccgtctcctggacccctgtgtgccagcctctgcagacgcagctggtgggagggagcatggatttggaggtggagaagtcactcctggtcctcggagggggtgggctgtgtgcctagttcagtgtgactcggggattggtgagggcggacaggtttctgaggcctccctagccttctttgtaaattcacacgagatagtccagggctttccagcgcccagcttggatgataatcctcgtctcccccactctaaggcctccttgagatttctttggggtctaccacgtcctctgcctgtctccaggtggtacaggagatgtggttcctctccctctcctggctccctagaaccccccacttcccctccctgtagctttagctgaccccgtggtggtgggtgtggggtctgtgcgcgtgctcaggtaagcttgggggctccaggtaagcggtcccgtgtcccccccccgggaagcccgcctcctcgccaggcccccaggagttgccgagccccccccatcccgctcggtttggacacccgcaaggccggcatcggtaaatggcacctttttctcttcctctggttgttatttgggggggagcgggctggggcggggcagggtattacggttggttgaggacagccccctaggccagggctgggtgggggaacggggactttttggccttcatgacagccccacgttgatcacaggccagggcctcaggcttgccttctgctacgcgctgcccgagagcagcagtgagcctctcccccgtctcccctctacgactcccctttcctggcaggctcaggctggggtgcgctcccagcacgtgttgagccgggggtgtggagggcgagatggggcagggctggggggaggcagagtcagtcgtctcaggtaaggcagggattttcagtagcaccgcacggctccccatgcttcctccactgcccctctcccctgctgcaggggccccgccaggccccctgggagtgtataacccgcctctctgctccctgccatttcctgaagatttctcccacccccttctggttcattttctgttctgatgtctgttccccccacactcacccccctccaaaaaaaacaaaaacagaaaaaaccggtgtggtctggggtgcggagcgtcccagctgggcctcctgccccggcttggtgtctcagggtgcatgcttggggttgtggaggagccccctcccccacagcagagtccagcgtggagttaaccttcagtttctttgcagcgattttggccgccctggcgggagggggctgttccatcatgtgggagaggaagggccggggagcctagggggtggcgggtgagggtggacgtctcccccgaccaggagtggttggggcgctgagaggaagcagacgctgagatggagcaggcccttcaccggtttgggagagggttggtctggctgtcagttgcctggctgtctgttgggcgtgtgcgtgtgcgtgatgatggggacacggggcggggattctgtagagctgggcctgtcctgactagaggaccctctggggactcctctcccctccccctccccacatctgttacagccgcttacaaacacgcagatggcaagaagattgatggcaggagggtccttgtggacgtggagaggggccgaaccgtgaagggctggaggccccggcggctaggaggaggcctcggtggtaccagaagaggaggggctgatgtgaacatccggcattcaggccgcgatgacacctcccgctacgatgagagggaccgggaccgggaccgtgagcgggagcgcagagagcggagccgggagcgagacaaggagcgagaacggcgacgctcccgctcccgggaccggcggaggcgctcacggagtcgcgacaaggaggagcggaggcgctccagggagcggagcaaggacaaggaccgggaccggaagcggcgaagcagccggagtcgggagcgggcccggcgggagcgggagcgcaaggaggagctgcgtggcggcggtggcgacatggcggagccctccgaggcgggtgacgcgccccctgatgatgggcctccaggggagctcgggcctgacggccctgacggtccagaggaaaagggccgggatcgtgaccgggagcgacggcggagccaccggagcgagcgcgagcggcgccgggaccgggatcgtgaccgtgaccgtgaccgcgagcacaaacggggggagcggggcagtgagcggggcagggatgaggcccgaggtgggggcggtggccaggacaacgggctggagggtctgggcaacgacagccgagacatgtacatggagtctgagggcggcgacggctacctggctccggagaatgggtatttgatggaggctgcgccggagtgaagaggtcgtcctctccatctgctgtgtttggacgcgttcctgcccagccccttgctgtcatcccctcccccaaccttggccacttgagtttgtcctccaagggtaggtgtctcatttgttctggccccttggatttaaaaataaaattaatttcctgttga

SEQ ID NO: 324170 - DNA, 950 bp, Homo sapiens
tacagctggtcggtcccgagtccctttgatggctggaggccccggcggctaggaggaggcctcggtggtaccagaagaggaggggctgatgtgaacatccggcattcaggccgcgatgacacctcccgctacgatgagaggcccggcccctccccgcttccgcacagggaccgggaccgggaccgtgagcgggagcgcagagagcggagccgggagcgagacaaggagcgagaacggcgacgctcccgctcccgggaccggcggaggcgctcacggagtcgcgacaaggaggagcggaggcgctccagggagcggagcaaggacaaggaccgggaccggaagcggcgaagcagccggagtcgggagcgggcccggcgggagcgggagcgcaaggaggagctgcgtggcggcggtggcgacatggcggagccctccgaggcgggtgacgcgccccctgatgatgggcctccaggggagctcgggcctgacggccctgacggtccagaggaaaagggccgggatcgtgaccgggagcgacggcggagccaccggagcgagcgcgagcggcgccgggaccgggatcgtgaccgtgaccgtgaccgcgagcacaaacggggggagcggggcagtgagcggggcagggatgaggcccgaggtgggggcggtggccaggacaacgggctggagggtctgggcaacgacagccgagacatgtacatggagtctgagggcggcgacggctacctggctccggagaatgggtatttgatggaggctgcgccggagtgaagaggtcgtcctctccatctgctgtgtttggacgcgttcctgcccagccccttgctgtcatcccctcccccaaccttggccacttgagtttgtcctccaagggtaggtgtctcatttgttctggccccttggatttaaaaataaaattaatttcctgttga

SEQ ID NO: 324171 - DNA, 1352 bp, Homo sapiens
  misc_feature (1305)..(1305): n is a, c, g, or t
gcagaagccagccccccgcggctgaggtactcaaggtgcccaaaggcggggtagtgacctcgcgcgtgcgctgtgcccgcggcagcgccgggtcctagtgtgtgggttgttgttggcaccgcacggcgcgtgcgcagtgaggacggcggagggatttgcggccgggacccaccccctgctccagtcgctatcggaggccgcgcgggtggctgagcagcggcctggtgcgctcgcttagcgggcgacggaatcagacggacgtggacgcccccggagtggaagccgaagcaggagttgttgttgctgaggggctgccgcagccgccgcgagcctccggacagacgccagagcgaggagggcgctacgcgacttggcaagatgacccagttcctgccgcccaaccttctggccctctttgccccccgtgaccctattccatacctgccacccctggagaaactgccacatgaaaaacaccacaatcaaccttattgtggcattgcgccgtacattcgagagtttgaggaccctcgagatgcccctcctccaactcgtgctgaaacccgagaggagcgcatggagaggaaaagacgggaaaagattgagcggcgacagcaagaagtggagacagagcttaaaatgtgggaccctcacaatgatcccaatgctcagggggatgccttcaagactctcttcgtggcgagagtgaattatgacacaacagaatccaagctccggagagagtttgaggtgtacggacctatcaaaagaatacacatggtctacagtaagcggtcaggaaagccccgtggctatgccttcatcgagtacgaacacgagcgagacatgcactccgcttacaaacacgcagatggcaagaagattgatggcaggagggtccttgtggacgtggagaggggccgaaccgtgaagggctggaggccccggcggctaggaggaggcctcggtggtaccagaagaggaggggctgatgtgaacatccggcattcaggccgcgatgacacctcccgctacgatgagaggcccggcccctccccgcttccgcacagggaccgggaccgggaccgtgagcgggagcgcagagagcggagccgggagcgagacaaggagcgagaacggcgacgctcccgctcccgggaccggcggaggcgctcacggagtcgcgacaaggaggagcggaggcgctccagggagcggagcaaggacaaggaccgggaccggaagcggcgaagcagccggagtcgggagcgggcccggcgggagcggacccaagagagcgcttgngcgttgcaaaagcgacctccaagcggttagcgccctaaaaaggctta

SEQ ID NO: 324172 - DNA, 3752 bp, Homo sapiens
gatgtcagcggcgaggtggcaggaacaccgagggcagggctccaggccagggctccactggagcccttcagccttccctccctgcccccgtgctttctatggggctgctactgtgctggccctggagagtctttttggctgctagttttggggtgctctgccccctttctgtcttccttactgtggttgaggcctcccgagggggctggctgtggtgtccagcagctctccagaggtggtcaggagctccctaaagtgcatggaattggggcttggggtgtgggagggaccaaggggtaggctgctagcagctgaaggtgtcgtaggtttttactaaagaaccttccactgtctagagacttgagagagggaaagagagagagaggcctagacgaacacaatcacatgttttctttgctgttcctcccgggatgggcctgttttggggtttgggactctgaacccgagcggggttccttcgcttgactttgatcctggtccttaaatgcctttccccactcccctcccgtgggttcaggggccaagcggcccctcctcagagcacgggcagcaccgtctcctggacccctgtgtgccagcctctgcagacgcagctggtgggagggagcatggatttggaggtggagaagtcactcctggtcctcggagggggtgggctgtgtgcctagttcagtgtgactcggggattggtgagggcggacaggtttctgaggcctccctagccttctttgtaaattcacacgagatagtccagggctttccagcgcccagcttggatgataatcctcgtctcccccactctaaggcctccttgagatttctttggggtctaccacgtcctctgcctgtctccaggtggtacaggagatgtggttcctctccctctcctggctccctagaaccccccacttcccctccctgtagctttagctgaccccgtggtggtgggtgtggggtctgtgcgcgtgctcaggtaagcttgggggctccaggtaagcggtcccgtgtcccccccccgggaagcccgcctcctcgccaggcccccaggagttgccgagccccccccatcccgctcggtttggacacccgcaaggccggcatcggtaaatggcacctttttctcttcctctggttgttatttgggggggagcgggctggggcggggcagggtattacggttggttgaggacagccccctaggccagggctgggtgggggaacggggactttttggccttcatgacagccccacgttgatcacaggccagggcctcaggcttgccttctgctacgcgctgcccgagagcagcagtgagcctctcccccgtctcccctctacgactcccctttcctggcaggctcaggctggggtgcgctcccagcacgtgttgagccgggggtgtggagggcgagatggggcagggctggggggaggcagagtcagtcgtctcaggtaaggcagggattttcagtagcaccgcacggctccccatgcttcctccactgcccctctcccctgctgcaggggccccgccaggccccctgggagtgtataacccgcctctctgctccctgccatttcctgaagatttctcccacccccttctggttcattttctgttctgatgtctgttccccccacactcacccccctccaaaaaaaacaaaaacagaaaaaaccggtgtggtctggggtgcggagcgtcccagctgggcctcctgccccggcttggtgtctcagggtgcatgcttggggttgtggaggagccccctcccccacagcagagtccagcgtggagttaaccttcagtttctttgcagcgattttggccgccctggcgggagggggctgttccatcatgtgggagaggaagggccggggagcctagggggtggcgggtgagggtggacgtctcccccgaccaggagtggttggggcgctgagaggaagcagacgctgagatggagcaggcccttcaccggtttgggagagggttggtctggctgtcagttgcctggctgtctgttgggcgtgtgcgtgtgcgtgatgatggggacacggggcggggattctgtagagctgggcctgtcctgactagaggaccctctggggactcctctcccctccccctccccacatctgttacagccgcttacaaacacgcagatggcaagaagattgatggcaggagggtccttgtggacgtggagaggggccgaaccgtgaagggctggaggccccggcggctaggaggaggcctcggtggtaccagaagaggaggggctgatgtgaacatccggcattcaggccgcgatgacacctcccgctacgatgagaggcccggcccctccccgcttccgcacagggaccgggaccgggaccgtgagcgggagcgcagagagcggagccgggagcgagacaaggagcgagaacggcgacgctcccgctcccgggaccggcggaggcgctcacggagtcgcgacaaggaggagcggaggcgctccagggagcggagcaaggacaaggaccgggaccggaagcggcgaagcagccggagtcgggagcgggcccggcgggagcgggagcgcaaggaggagctgcgtggcggcggtggcgacatggcggagccctccgaggcgggtgacgcgccccctgatgatgggcctccaggggagctcgggcctgacggccctgacggtccagaggaaaagggccgggatcgtgaccgggagcgacggcggagccaccggagcgagcgcgagcggcgccgggaccgggatcgtgaccgtgaccgtgaccgcgagcacaaacggggggagcggggcagtgagcggggcagggatgaggcccgaggtgggggcggtggccaggacaacgggctggagggtctgggcaacgacagccgagacatgtacatggagtctgagggcggcgacggctacctggctccggagaatgggtatttgatggaggctgcgccggagtgaagaggtcgtcctctccatctgctgtgtttggacgcgttcctgcccagccccttgctgtcatcccctcccccaaccttggccacttgagtttgtcctccaagggtaggtgtctcatttgttctggccccttggatttaaaaataaaattaatttcctgttgaaaaaaaaaacaaagaaaaaaaaaaaaaaaaagggggggcgcgcaccagagagagaaatctcccccgagaggggccccactgtcaagagcggatccccgcgcaaccgggagcaacaagggggcccaaggcggagaggagccacacacaaccggccagggccacgtggccgcgggcgcttaaaccaccgcccgcggcacgggggacaacaagcgggaacaccagggagaacacaagcggaaaagagaacccaaacacaacaggcggaggcgcacgaccctagacacggcgcggcccacgcacccgccccccaccccgcagacaccaacacacgcacacaacaagcgcgacccacctcctccacaaaggccacaacagccgcagtcccctacccgcgggcgggcccacccccaccacacccgcggcgccgactacgacacaaagagcccgaagcacgggagcgacaaccgaacatacacgggcgacacacccccgggggccgcactcgcgcaccgcccagagcgcacgacacccgcgaaataccaaccagacgagggcgcacacccgcacacagcgccgcaaccc

SEQ ID NO: 324173 - DNA, 1324 bp, Homo sapiens
gcagaagccagccccccgcggctgaggtactcaaggtgcccaaaggcggggtagtgacctcgcgcgtgcgctgtgcccgcggcagcgccgggtcctagtgtgtgggttgttgttggcaccgcacggcgcgtgcgcagtgaggacggcggagggatttgcggccgggacccaccccctgctccagtcgctatcggaggccgcgcgggtggctgagcagcggcctggtgcgctcgcttagcgggcgacggaatcagacggacgtggacgcccccggagtggaagccgaagcaggagttgttgttgctgaggggctgccgcagccgccgcgagcctccggacagacgccagagcgaggagggcgctacgcgacttggcaagatgacccagttcctgccgcccaaccttctggccctctttgccccccgtgaccctattccatacctgccacccctggagaaactgccacatgaaaaacaccacaatcaaccttattgtggcattgcgccgtacattcgagagtttgaggaccctcgagatgcccctcctccaactcgtgctgaaacccgagaggagcgcatggagaggaaaagacgggaaaagattgagcggcgacagcaagaagtggagacagagcttaaaatgtgggaccctcacaatgatcccaatgctcagggggatgccttcaagactctcttcgtggcgagagtgaattatgacacaacagaatccaagctccggagagagtttgaggtgtacggacctatcaaaagaatacacatggtctacagtaagcggtcaggaaagccccgtggctatgccttcatcgagtacgaacacgagcgagacatgcactccgcttacaaacacgcagatggcaagaagattgatggcaggagggtccttgggagcgacggcggagccaccggagcgagcgcgagcggcgccgggaccgggatcgtgaccgtgaccgtgaccgcgagcacaaacggggggagcggggcagtgagcggggcagggatgaggcccgaggtgggggcggtggccaggacaacgggctggagggtctgggcaacgacagccgagacatgtacatggagtctgagggcggcgacggctacctggctccggagaatgggtatttgatggaggctgcgccggagtgaagaggtcgtcctctccatctgctgtgtttggacgcgttcctgcccagccccttgctgtcatcccctcccccaaccttggccacttgagtttgtcctccaagggtaggtgtctcatttgttctggccccttggatttaaaaataaaattaatttcctgttga

SEQ ID NO: 324174 - DNA, 1365 bp, Homo sapiens
gcagaagccagccccccgcggctgaggtactcaaggtgcccaaaggcggggtagtgacctcgcgcgtgcgctgtgcccgcggcagcgccgggtcctagtgtgtgggttgttgttggcaccgcacggcgcgtgcgcagtgaggacggcggagggatttgcggccgggacccaccccctgctccagtcgctatcggaggccgcgcgggtggctgagcagcggcctggtgcgctcgcttagcgggcgacggaatcagacggacgtggacgcccccggagtggaagccgaagcaggagttgttgttgctgaggggctgccgcagccgccgcgagcctccggacagacgccagagcgaggagggcgctacgcgacttggcaagatgacccagttcctgccgcccaaccttctggccctctttgccccccgtgaccctattccatacctgccacccctggagaaactgccacatgaaaaacaccacaatcaaccttattgtggcattgcgccgtacattcgagagtttgaggaccctcgagatgcccctcctccaactcgtgctgaaacccgagaggagcgcatggagaggaaaagacgggaaaagattgagcggcgacagcaagaagtggagacagagcttaaaatgtgggaccctcacaatgatcccaatgctcagggggatgccttcaagactctcttcgtggcgagagtgaattatgacacaacagaatccaagctccggagagagtttgaggtgtacggacctatcaaaagaatacacatggtctacagtaagcggtcaggaaagccccgtggctatgccttcatcgagtacgaacacgagcgagacatgcactccaccacgcagctggcttgcagctgatgcttacgctccccttacaacacctcagtgtatggttccgcttacaaacacgcagatggcaagaagggagcgacggcggagccaccggagcgagcgcgagcggcgccgggaccgggatcgtgaccgtgaccgtgaccgcgagcacaaacggggggagcggggcagtgagcggggcagggatgaggcccgaggtgggggcggtggccaggacaacgggctggagggtctgggcaacgacagccgagacatgtacatggagtctgagggcggcgacggctacctggctccggagaatgggtatttgatggaggctgcgccggagtgaagaggtcgtcctctccatctgctgtgtttggacgcgttcctgcccagccccttgctgtcatcccctcccccaaccttggccacttgagtttgtcctccaagggtaggtgtctcatttgttctggccccttggatttaaaaataaaattaatttcctgttga

SEQ ID NO: 324175 - DNA, 989 bp, Homo sapiens
gcagaagccagccccccgcggctgaggtactcaaggtgcccaaaggcggggtagtgacctcgcgcgtgcgctgtgcccgcggcagcgccgggtcctagtgtgtgggttgttgttggcaccgcacggcgcgtgcgcagtgaggacggcggagggatttgcggccgggacccaccccctgctccagtcgctatcggaggccgcgcgggtggctgagcagcggcctggtgcgctcgcttagcgggcgacggaatcagacggacgtggacgcccccggagtggaagccgaagcaggagttgttgttgctgaggggctgccgcagccgccgcgagcctccggacagacgccagagcgaggagggcgctacgcgacttggcaagatgacccagttcctgccgcccaaccttctggccctctttgccccccgtgaccctattccatacctgccaccccttggcgacatggcggagccctccgaggcgggtgacgcgccccctgatgatgggcctccaggggagctcgggcctgacggccctgacggtccagaggaaaagggccgggatcgtgaccgggagcgacggcggagccaccggagcgagcgcgagcggcgccgggaccgggatcgtgaccgtgaccgtgaccgcgagcacaaacggggggagcggggcagtgagcggggcagggatgaggcccgaggtgggggcggtggccaggacaacgggctggagggtctgggcaacgacagccgagacatgtacatggagtctgagggcggcgacggctacctggctccggagaatgggtatttgatggaggctgcgccggagtgaagaggtcgtcctctccatctgctgtgtttggacgcgttcctgcccagccccttgctgtcatcccctcccccaaccttggccacttgagtttgtcctccaagggtaggtgtctcatttgttctggccccttggatttaaaaataaaattaatttcctgttga

SEQ ID NO: 324176 - DNA, 948 bp, Homo sapiens
gcagaagccagccccccgcggctgaggtactcaaggtgcccaaaggcggggtagtgacctcgcgcgtgcgctgtgcccgcggcagcgccgggtcctagtgtgtgggttgttgttggcaccgcacggcgcgtgcgcagtgaggacggcggagggatttgcggccgggacccaccccctgctccagtcgctatcggaggccgcgcgggtggctgagcagcggcctggtgcgctcgcttagcgggcgacggaatcagacggacgtggacgcccccggagtggaagccgaagcaggagttgttgttgctgaggggctgccgcagccgccgcgagcctccggacagacgccagagcgaggagggcgctacgcgacttggcaagatgacccagttcctgccgcccaaccttctggccctctttgccccccgtgaccctattccatacctgccacccctctgatgatgggcctccaggggagctcgggcctgacggccctgacggtccagaggaaaagggccgggatcgtgaccgggagcgacggcggagccaccggagcgagcgcgagcggcgccgggaccgggatcgtgaccgtgaccgtgaccgcgagcacaaacggggggagcggggcagtgagcggggcagggatgaggcccgaggtgggggcggtggccaggacaacgggctggagggtctgggcaacgacagccgagacatgtacatggagtctgagggcggcgacggctacctggctccggagaatgggtatttgatggaggctgcgccggagtgaagaggtcgtcctctccatctgctgtgtttggacgcgttcctgcccagccccttgctgtcatcccctcccccaaccttggccacttgagtttgtcctccaagggtaggtgtctcatttgttctggccccttggatttaaaaataaaattaatttcctgttga

SEQ ID NO: 324177 - DNA, 1041 bp, Homo sapiens
gcagaagccagccccccgcggctgaggtactcaaggtgcccaaaggcggggtagtgacctcgcgcgtgcgctgtgcccgcggcagcgccgggtcctagtgtgtgggttgttgttggcaccgcacggcgcgtgcgcagtgaggacggcggagggatttgcggccgggacccaccccctgctccagtcgctatcggaggccgcgcgggtggctgagcagcggcctggtgcgctcgcttagcgggcgacggaatcagacggacgtggacgcccccggagtggaagccgaagcaggagttgttgttgctgaggggctgccgcagccgccgcgagcctccggacagacgccagagcgaggagggcgctacgcgacttggcaagatgacccagttcctgccgcccaaccttctggccctctttgccccccgtgaccctattccatacctgccacccctggagaaactgccacatgaaaaacaccacaatcaaccttattgtggcattgcgccgtacattcgagagtttgaggaccctcgagatgcccctcctccaactcgtgctgaaacccgagaggagcgcatggagaggaaaagacgggaaaagattgagcggcgacagcaagaagtggagacagagcttaaaatgtgggaccctcacaatgatcccaatgctcagggggatgccttcaagactctcttcgtggcgagagtgaattatgacacaacagaatccaagctccggagagagtttgaggtgtacggacctatcaaaagaatacacatggtctacagtaagcggtcaggaaagccccgtggctatgccttcatcgagtacgaacacgagcgagacatgcactccaccacgcagctggcttgcagctgatgcttacgctccccttacaacacctcagtgtatggttggtataagggtttgtatcatgggtaagatcactcagcaccgcacaccagcccagcttagccaggcagctcaggagcagcgaggcgcccctcctcccaccccagtcgcccccgtagcctccccgca

SEQ ID NO: 324178 - DNA, 1040 bp, Homo sapiens
gcagaagccagccccccgcggctgaggtactcaaggtgcccaaaggcggggtagtgacctcgcgcgtgcgctgtgcccgcggcagcgccgggtcctagtgtgtgggttgttgttggcaccgcacggcgcgtgcgcagtgaggacggcggagggatttgcggccgggacccaccccctgctccagtcgctatcggaggccgcgcgggtggctgagcagcggcctggtgcgctcgcttagcgggcgacggaatcagacggacgtggacgcccccggagtggaagccgaagcaggagttgttgttgctgaggggctgccgcagccgccgcgagcctccggacagacgccagagcgaggagggcgctacgcgacttggcaagatgacccagttcctgccgcccaaccttctggccctctttgccccccgtgaccctattccatacctgccacccctggagaaactgccacatgaaaaacaccacaatcaaccttattgtggcattgcgccgtacattcgagagtttgaggaccctcgagatgcccctcctccaactcgtgctgaaacccgagaggagcgcatggagaggaaaagacgggaaaagattgagcggcgacagcaagaagtggagacagagcttaaaatgtgggaccctcacaatgatcccaatgctcagggggatgccttcaagactctcttcgtggcgagagtgaattatgacacaacagaatccaagctccggagagagtttgaggtgtacggacctatcaaaagaatacacatggtctacagtaagcggtcaggaaagccccgtggctatgccttcatcgagtacgaacacgagcgagacatgcactccaccacgcagctggcttgcagctgatgcttacgctccccttacaacacctcagtgtatggttggtataagggtttgtatcatgggtaagatcactcagcaccgcacacctttactcgtacacacagcaaaaaaacacctaaaatcagtttaaatgtttccgcattgatctgatgtaaagataactt

SEQ ID NO: 324179 - DNA, 364 bp, Homo sapiens
atcaacaggaaattaattttatttttaaatccaaggggccagaacaaatgagacacctacccttggaggacaaactcaagtgccaggacaacgggctggagggtctgggcaacgacagccgagacatgtacatggagtctgagggcggcgacggctacctggctccggagaatgggtatttgatggaggctgcgccggagtgaagaggtcgtcctctccatctgctgtgtttggacgcgttcctgcccagccccttgctgtcatcccctcccccaaccttggccacttgagtttgtcctccaagggtaggtgtctcatttgttctggccccttggatttaaaaataaaattaatttcctgttga

SEQ ID NO: 324180 - DNA, 823 bp, Homo sapiens
gcagaagccagccccccgcggctgaggtactcaaggtgcccaaaggcggggtagtgacctcgcgcgtgcgctgtgcccgcggcagcgccgggtcctagtgtgtgggttgttgttggcaccgcacggcgcgtgcgcagtgaggacggcggagggatttgcggccgggacccaccccctgctccagtcgctatcggaggccgcgcgggtggctgagcagcggcctggtgcgctcgcttagcgggcgacggaatcagacggacgtggacgcccccggagtggaagccgaagcaggagttgttgttgctgaggggctgccgcagccgccgcgagcctccggacagacgccagagcgaggagggcgctacgcgacttggcaagatgacccagttcctgccgcccaaccttctggccctctttgccccccgtgaccctattccatacctgccacccctggagaaactgccacatgaaaaacaccacaatcaaccttattgtggcattgcgccgtacattcgagagtttgagggtcatctcttaggtgcatcagagcacacctgagaaaagctggcacacagtcggaagttacaagaagaacgttctagcattgggtaggtaagggcagctggaggcgagggagttgcagagcagaatttcgtagataacagaaaggaccctcgagatgcccctcctccaactcgtgctgaaacccgagaggagcgcatggagaggaaaagacgggaaaagattgagcggcgacagcaagaagtggagacagagcttaaaatgtgggacccccacaatgatcccaattccacagggggcc

SEQ ID NO: 324181 - DNA, 292 bp, Homo sapiens
cttcctgaccccctgttttaccactgtctccagatgatccttgacactagggcacttctatctgcattcacttctccacctcccctttctcctgacagagacgggaaaagattgagcggcgacagcaagaagtggagacagagcttaaaatgtgtaagtctctcatccaccatttggctctctcctctcccaaaccctctgtattcttcccaggtcatacccaggaccctgctgtctccctaaggcctgtgttgtggggaacagggttgttagttcatttgtttagcccctg

SEQ ID NO: 324182 - DNA, 1853 bp, Homo sapiens
gcagaagccagccccccgcggctgaggtactcaaggtgcccaaaggcggggtagtgacctcgcgcgtgcgctgtgcccgcggcagcgccgggtcctagtgtgtgggttgttgttggcaccgcacggcgcgtgcgcagtgaggacggcggagggatttgcggccgggacccaccccctgctccagtcgctatcggaggccgcgcgggtggctgagcagcggcctggtgcgctcgcttagcgggcgacggaatcagacggacgtggacgcccccggagtggaagccgaagcaggagttgttgttgctgaggggctgccgcagccgccgcgagcctccggacagacgccagagcgaggagggcgctacgcgacttggcaagatgacccagttcctgccgcccaaccttctggccctctttgccccccgtgaccctattccatacctgccacccctggagaaactgccacatgaaaaacaccacaatcaaccttattgtggcattgcgccgtacattcgagagtttgaggaccctcgagatgcccctcctccaactcgtgctgaaacccgagaggagcgcatggagaggaaaagacgggaaaagattgagcggcgacagcaagaagtggagacagagcttaaaatgtgggaccctcacaatgatcccaatgctcagggggatgccttcaagactctcttcgtggcgagagtgaattatgacacaacagaatccaagctccggagagagtttgaggtgtacggacctatcaaaagaatacacatggtctacagtaagcggtcaggaaagccccgtggctatgccttcatcgagtacgaacacgagcgagacatgcactccgcttacaaacacgcagatggcaagaagattgatggcaggagggtccttgtggacgtggagaggggccgaaccgtgaagggctggaggccccggcggctaggaggaggcctcggtggtaccagaagaggaggggctgatgtgaacatccggcattcaggccgcgatgacacctcccgctacgatgagaggcccggcccctccccgcttccgcacagggaccgggaccgggaccgtgagcgggagcgcagagagcggagccgggagcgagacaaggagcgagaacggcgacgctcccgctcccgggaccggcggaggcgctcacggagtcgcgacaaggaggagcggaggcgctccagggagcggagcaaggacaaggaccgggaccggaagcggcgaagcagccggagtcgggagcgggcccggcgggagcgggagcgcaaggaggagctgcgtggcggcggtggcgacatggcggagccctccgaggcgggtgacgcgccccctgatgatgggcctccaggggagctcgggcctgacggccctgacggtccagaggaaaagggccgggatcgtgaccgggagcgacggcggagccaccggagcgagcgcgagcggcgccgggaccgggatcgtgaccgtgaccgtgaccgcgagcacaaacggggggagcggggcagtgagcggggcagggatgaggcccgaggtgggggcggtggccaggacaacgggctggagggtctgggcaacgacagccgagacatgtacatggagtctgagggcggcgacggctacctggctccggagaatgggtatttgatggaggctgcgccggagtgaagaggtcgtcctctccatctgctgtgtttggacgcgttcctgcccagccccttgctgtcatcccctcccccaaccttggccacttgagtttgtcctccaagggtaggtgtctcatttgttctggccccttggatttaaaaataaaattaatttcctgttga

SEQ ID NO: 324183 - DNA, 3936 bp, Homo sapiens
  misc_feature (1964)..(1964): n is a, c, g, or t
  misc_feature (2035)..(2035): n is a, c, g, or t
caagtacctattggatcaccagctgtgtgccgggcttctagttgagcaacacagaggcagcctctgccctctgagcctcctgcattcggtctcctcattgtcatttgctgtctcaggcaaggtcagtttggctgcaagtatcagaaataaacttgagcttcctgaaacataaagggccctgttgatgtagaatcatgggcatcctttggagttcggaggtatgtgatgtccgtggacctgagaacctggtagctgacgctgttaagagctggggcaaccaggccaggcgtggtggctcgcctgtaatcccagcactttgggaggccgaggcgggtggatcatgaggtcaggagttcgagaccagcctggccaagatgttgaaaccgcatctctactaaaaatacaaaaattaactgggcgtggtggcgggtgcctgtaatcccatctactcgggaggctgaggcagagaattgcttaaacctgggaggcagaggttgcagtgagccaagatagagtcactgcattccatccagcctgggtgccagagcaagactctgtctcaaaaaaaaaaacaaaaaacaaaaaaactggggcgacccacctgtgatgtgtgacagcccacagcttgcttctgcctcgtttgcctccatgcagctaggtcggtcccatgcctctttgcactggcccagtgcagcaggccacaggccccagctttacactcagtcctggatgagtctcttgtttcggggtgggcacatttgattgactcagtgttgggcctggggtcctgttgctcaggcatgcttattgaggactgaatcctgcaaagctgagtgacagttgtcagagaagatgatggtccctgggcagacacccaggcagtagtagccacttggggctcctgtcctgcctcccagccctgtgtcctggctctggactcgcctgtgctagggagaccacgctctcagctgctgagcctcggagcttaccaggcatgttcttaccttactctggtctctctggggtggagtgggttcttatagctctgctgtttcctgttggggcgggaaaatgctagaatctcagtctttccagaatctcagaatcttctagttcaattgccattcaaactttttgttggtgttagccaataacatcttgactcggtgcacccgcagaaatactgtaacctaaagtttgaggaaacagttttttctatgtagtaagtatatagttgtattctgctgttttgtttcttaagatgttggttgcaacccatcagattgatgatgggactcatttctgggtcatgacctgaatataggaaaggctagtctagctgccctgtgcctgtgacatggcaggtgcctggtccgctgcctgcttctataagaatgtctccctgcagcctcttttctatacagaactcagccctgcctcacggaagcttttccaggcagtgcgagatagaggagcgcttgagaaggcaggttttgcagcagacggcagtgacagcccagttctgcaccttctttgctgagtcactgtgggccagtgacttgatctgagattgtttccccatcagaaccatgaggttatcatctgtgccttggggctgttcatctatctattcacttgacacacacacatccacctttctataccagctgcagcgccacctgctggtaccgtgagcaagagctgggcatgcccacggttccggtgccctgcagtctggtgggagaggcaggtaggggtcgactcaggtagcaaacctgaaactccaggggaaggaagcgtttctgcaactgtgagtacataggactgtgaggagagacttcccgagaaaggatgttcgggctagcgttaagggtgagcgtgagttcaccagagaaggaaggggagaccagtccagggcaaggagaatgcacagacactggcaggaaggtgagcgtggggacacngggaaaggcctgggacacgcagccaagagccgcggctcagacgctagcagggcccgctcttgctgcctctnccaccagttgacgaggagtttggaccttaggctgggggacgccagcaaaggcttctaagcagatcacatttttgggtggaaagatcattggcttcgggtttctgtgagggcgaggatgattggaagggagggttttgaggaggctgtgaagtgcgctatggttaagatgatgcgctttggggccagacatgggttccagtaacggctgttgcctagcgaacgctttgtgtgagttaattagagaagacgtggctgtcttgtgatgggagtgcgcgggatgaactgcacggggggacccggccctgtgaacactaagccaggggctgccttcctgccctttgctcttggagtcggctcatttctgctcctccgggccctgtccctgcccagattcaccctctgtccgtctgccctgccccaggaggaggcctcggtggtaccagaagaggaggggctgatgtgaacatccggcattcaggccgcgatgacacctcccgctacgatgagaggcccggcccctccccgcttccgcacagggaccgggaccgggaccgtgagcgggagcgcagagagcggagccgggagcgagacaaggagcgagaacggcgacgctcccgctcccgggaccggcggaggcgctcacggagtcgcgacaaggaggagcggaggcgctccagggagcggagcaaggacaaggaccgggaccggaagcggcgaagcagccggagtcgggagcgggcccggcgggagcgggagcgcaaggaggagctgcgtggcggcggtggcgacatggcggagccctccgaggcgggtgacgcgccccctgatgatgggcctccaggggagctcgggcctgacggccctgacggtccagaggaaaagggccgggatcgtgaccgggagcgacggcggagccaccggagcgagcgcgagcggcgccgggaccgggatcgtgaccgtgaccgtgaccgcgagcacaaacggggggagcggggcagtgagcggggcagggatgaggcccgaggtgggggcggtggccaggacaacgggctggagggtctgggcaacgacagccgagacatgtacatggagtctgagggcggcgacggctacctggctccggagaatgggtatttgatggaggctgcgccggagtgaagaggtcgtcctctccatctgctgtgtttggacgcgttcctgcccagccccttgctgtcatcccctcccccaaccttggccacttgagtttgtcctccaagggtaggtgtctcatttgttctggccccttggatttaaaaataaaattaatttcctgttgaaaaaaaaaacaaagaaaaaaaaaaaaaaaaagggggggcgcgcaccagagagagaaatctcccccgagaggggccccactgtcaagagcggatccccgcgcaaccgggagcaacaagggggcccaaggcggagaggagccacacacaaccggccagggccacgtggccgcgggcgcttaaaccaccgcccgcggcacgggggacaacaagcgggaacaccagggagaacacaagcggaaaagagaacccaaacacaacaggcggaggcgcacgaccctagacacggcgcggcccacgcacccgccccccaccccgcagacaccaacacacgcacacaacaagcgcgacccacctcctccacaaaggccacaacagccgcagtcccctacccgcgggcgggcccacccccaccacacccgcggcgccgactacgacacaaagagcccgaagcacgggagcgacaaccgaacatacacgggcgacacacccccgggggccgcactcgcgcaccgcccagagcgcacgacacccgcgaaataccaaccagacgagggcgcacacccgcacacagcgccgcaaccc

SEQ ID NO: 324184 - DNA, 2435 bp, Homo sapiens
gcagaagccagccccccgcggctgaggtactcaaggtgcccaaaggcggggtagtgacctcgcgcgtgcgctgtgcccgcggcagcgccgggtcctagtgtgtgggttgttgttggcaccgcacggcgcgtgcgcagtgaggacggcggagggatttgcggccgggacccaccccctgctccagtcgctatcggaggccgcgcgggtggctgagcagcggcctggtgcgctcgcttagcgggcgacggaatcagacggacgtggacgcccccggagtggaagccgaagcaggagttgttgttgctgaggggctgccgcagccgccgcgagcctccggacagacgccagagcgaggagggcgctacgcgacttggcaagatgacccagttcctgccgcccaaccttctggccctctttgccccccgtgaccctattccatacctgccacccctggagaaactgccacatgaaaaacaccacaatcaaccttattgtggcattgcgccgtacattcgagagtttgaggaccctcgagatgcccctcctccaactcgtgctgaaacccgagaggagcgcatggagaggaaaagacgggaaaagattgagcggcgacagcaagaagtggagacagagcttaaaatgtgggaccctcacaatgatcccaatgctcagggggatgccttcaagactctcttcgtggcgagagtgaattatgacacaacagaatccaagctccggagagagtttgaggtgtacggacctatcaaaagaatacacatggtctacagtaagcggtcaggaaagccccgtggctatgccttcatcgagtacgaacacgagcgagacatgcactccgcttacaaacacgcagatggcaagaagattgatggcaggagggtccttgtggacgtggagaggggccgaaccgtgaagggctggaggccccggcggctaggaggaggcctcggtggtaccagaagaggaggggctgatgtgaacatccggcattcaggccgcgatgacacctcccgctacgatgagaggcccggcccctccccgcttccgcacagggaccgggaccgggaccgtgagcgggagcgcagagagcggagccgggagcgagacaaggagcgagaacggcgacgctcccgctcccgggaccggcggaggcgctcacggagtcgcgacaaggaggagcggaggcgctccagggagcggagcaaggacaaggaccgggaccggaagcggcgaagcagccggagtcgggagcgggcccggcgggagcgggagcgcaaggaggagctgcgtggcggcggtggcgacatggcggagccctccgaggcgggtgacgcgccccctgatgatgggcctccaggggagctcgggcctgacggccctgacggtccagaggaaaagggccgggatcgtgaccgggagcgacggcggagccaccggagcgagcgcgagcggcgccgggaccgggatcgtgaccgtgaccgtgaccgcgagcacaaacggggggagcggggcagtgagcggggcagggatgaggcccgaggtgggggcggtggccaggacaacgggctggagggtctgggcaacgacagccgagacatgtacatggagtctgagggcggcgacggctacctggctccggagaatgggtatttgatggaggctgcgccggagtgaagaggtcgtcctctccatctgctgtgtttggacgcgttcctgcccagccccttgctgtcatcccctcccccaaccttggccacttgagtttgtcctccaagggtaggtgtctcatttgttctggccccttggatttaaaaataaaattaatttcctgttgaaaaaaaaaacaaagaaaaaaaaaaaaaaaaagggggggcgcgcaccagagagagaaatctcccccgagaggggccccactgtcaagagcggatccccgcgcaaccgggagcaacaagggggcccaaggcggagaggagccacacacaaccggccagggccacgtggccgcgggcgcttaaaccaccgcccgcggcacgggggacaacaagcgggaacaccagggagaacacaagcggaaaagagaacccaaacacaacaggcggaggcgcacgaccctagacacggcgcggcccacgcacccgccccccaccccgcagacaccaacacacgcacacaacaagcgcgacccacctcctccacaaaggccacaacagccgcagtcccctacccgcgggcgggcccacccccaccacacccgcggcgccgactacgacacaaagagcccgaagcacgggagcgacaaccgaacatacacgggcgacacacccccgggggccgcactcgcgcaccgcccagagcgcacgacacccgcgaaataccaaccagacgagggcgcacacccgcacacagcgccgcaaccc

SEQ ID NO: 324185 - DNA, 1691 bp, Homo sapiens
cctcagtagacacaggcgcctggtgtattagtacgtgctgcggtttgcttacatcgttgctggctctcgttcttagcgggcgacggaatcagacggacgtggacgcccccggagtggaagccgaagcaggagttgttgttgctgaggggctgccgcagccgccgcgagcctccggacagacgccagagcgaggagggcgctacgcgacttggcaagatgacccagttcctgccgcccaaccttctggccctctttgccccccgtgaccctattccatacctgccacccctggagaaactgccacatgaaaaacaccacaatcaaccttattgtggcattgcgccgtacattcgagagtttgaggaccctcgagatgcccctcctccaactcgtgctgaaacccgagaggagcgcatggagaggaaaagacgggaaaagattgagcggcgacagcaagaagtggagacagagcttaaaatgtgggaccctcacaatgatcccaatgctcagggggatgccttcaagactctcttcgtggcgagagtgaattatgacacaacagaatccaagctccggagagagtttgaggtgtacggacctatcaaaagaatacacatggtctacagtaagcggtcaggaaagccccgtggctatgccttcatcgagtacgaacacgagcgagacatgcactccgcttacaaacacgcagatggcaagaagattgatggcaggagggtccttgtggacgtggagaggggccgaaccgtgaagggctggaggccccggcggctaggaggaggcctcggtggtaccagaagaggaggggctgatgtgaacatccggcattcaggccgcgatgacacctcccgctacgatgagaggcccggcccctccccgcttccgcacagggaccgggaccgggaccgtgagcgggagcgcagagagcggagccgggagcgagacaaggagcgagaacggcgacgctcccgctcccgggaccggcggaggcgctcacggagtcgcgacaaggaggagcggaggcgctccagggagcggagcaaggacaaggaccgggaccggaagcggcgaagcagccggagtcgggagcgggcccggcgggagcgggagcgcaaggaggagctgcgtggcggcggtggcgacatggcggagccctccgaggcgggtgacgcgccccctgatgatgggcctccaggggagctcgggcctgacggccctgacggtccagaggaaaagggccgggatcgtgaccgggagcgacggcggagccaccggagcgagcgcgagcggcgccgggaccgggatcgtgaccgtgaccgtgaccgcgagcacaaacggggggagcggggcagtgagcggggcagggatgaggcccgaggtgggggcggtggccaggacaacgggctggagggtctgggcaacgacagccgagacatgtacatggagtctgagggcggcgacggctacctggctccggagaatgggtatttgatggaggctgcgccggagtgaagaggtcgtcctctccatctgctgtgtttggacgcgttcctgcccagccccttgctgtcatcccctcccccaaccttggccacttgagtttgtcctccaagggtaggtgtctcatttgttctggccccttggatttaaaaataaaattaatttcctgttga

SEQ ID NO: 324186 - DNA, 1927 bp, Homo sapiens
gcagaagccagccccccgcggctgaggtactcaaggtgcccaaaggcggggtagtgacctcgcgcgtgcgctgtgcccgcggcagcgccgggtcctagtgtgtgggttgttgttggcaccgcacggcgcgtgcgcagtgaggacggcggagggatttgcggccgggacccaccccctgctccagtcgctatcggaggccgcgcgggtggctgagcagcggcctggtgcgctcgcttagcgggcgacggaatcagacggacgtggacgcccccggagtggaagccgaagcaggagttgttgttgctgaggggctgccgcagccgccgcgagcctccggacagacgccagagcgaggagggcgctacgcgacttggcaagatgacccagttcctgccgcccaaccttctggccctctttgccccccgtgaccctattccatacctgccacccctggagaaactgccacatgaaaaacaccacaatcaaccttattgtggcattgcgccgtacattcgagagtttgaggaccctcgagatgcccctcctccaactcgtgctgaaacccgagaggagcgcatggagaggaaaagacgggaaaagattgagcggcgacagcaagaagtggagacagagcttaaaatgtgggaccctcacaatgatcccaatgctcagggggatgccttcaagactctcttcgtggcgagagtgaattatgacacaacagaatccaagctccggagagagtttgaggtgtacggacctatcaaaagaatacacatggtctacagtaagcggtcaggaaagccccgtggctatgccttcatcgagtacgaacacgagcgagacatgcactccgcttacaaacacgcagatggcaagaagattgatggcaggagggtccttgtggacgtggagaggggccgaaccgtgaagggctggaggccccggcggctaggaggaggcctcggtggtaccagaagaggaggggctgatgtgaacatccggcattcaggccgcgatgacacctcccgctacgatgagaggcccggcccctccccgcttccgcacagggaccgggaccgggaccgtgagcgggagcgcagagagcggagccgggagcgagacaaggagcgagaacggcgacgctcccgctcccgggaccggcggaggcgctcacggagtcgcgacaaggaggagcggaggcgctccagggagcggagcaaggacaaggaccgggaccggaagcggcgaagcagccggagtcgggagcgggcccggcgggagcgggagcgcaaggaggagctgcgtggcggcggtggcgacatggcggagccctccgaggcgggtgacgcgccccctgatgatgggcctccaggggagctcgggcctgacggccctgacggtccagaggaaaagggccgggatcgtgaccgggagcgacggcggagccaccggagcgagcgcgagcggcgccgggaccgggatcgtgaccgtgaccgtgaccgcgagcacaaacggggggagcggggcagtgagcggggcagggatgaggcccgaggtgggggcggtggccaggacaacgggctggagggtctgggcaacgacagccgagacatgtacatggagtctgagggcggcgacggctacctggctccggagaatgggtatttgatggaggctgcgccggagtgaagaggtcgtcctctccatctgctgtgtttggacgcgttcctgcccagccccttgctgtcatcccctcccccaaccttggccacttgagtttgtcctccaagggtaggtgtctcatttgttctggccccttggatttaaaaataaaattaatttcctgttgattacaatcaactggccgtcgtttcaaccgttggatgggcctggcgttcccaactaatgccttgcagctcccctt

SEQ ID NO: 324187 - DNA, 1775 bp, Homo sapiens
gcagaagccagccccccgcggctgaggtactcaaggtgcccaaaggcggggtagtgacctcgcgcgtgcgctgtgcccgcggcagcgccgggtcctagtgtgtgggttgttgttggcaccgcacggcgcgtgcgcagtgaggacggcggagggatttgcggccgggacccaccccctgctccagtcgctatcggaggccgcgcgggtggctgagcagcggcctggtgcgctcgcttagcgggcgacggaatcagacggacgtggacgcccccggagtggaagccgaagcaggagttgttgttgctgaggggctgccgcagccgccgcgagcctccggacagacgccagagcgaggagggcgctacgcgacttggcaagatgacccagttcctgccgcccaaccttctggccctctttgccccccgtgaccctattccatacctgccacccctggagaaactgccacatgaaaaacaccacaatcaaccttattgtggcattgcgccgtacattcgagagtttgaggaccctcgagatgcccctcctccaactcgtgctgaaacccgagaggagcgcatggagaggaaaagacgggaaaagattgagcggcgacagcaagaagtggagacagagcttaaaatgtgggaccctcacaatgatcccaatgctcagggggatgccttcaagactctcttcgtggcgagagtgaattatgacacaacagaatccaagctccggagagagtttgaggtgtacggacctatcaaaagaatacacatggtctacagtaagcggtcaggaaagccccgtggctatgccttcatcgagtacgaacacgagcgagacatgcactccgcttacaaacacgcagatggcaagaagattgatggcaggagggtccttgtggacgtggagaggggccgaaccgtgaagggctggaggccccggcggctaggaggaggcctcggtggtaccagaagaggaggggctgatgtgaacatccggcattcaggccgcgatgacacctcccgctacgatgagaggcccggcccctccccgcttccgcacagggaccgggaccgggaccgtgagcgggagcgcagagagcggagccgggagcgagacaaggagcgagaacggcgacgctcccgctcccgggaccggcggaggcgctcacggagtcgcgacaaggaggagcggaggcgctccagggagcggagcaaggacaaggaccgggaccggaagcggcgaagcagccggagtcgggagcgggcccggcgggagcgggagcgcaaggaggagctgcgtggcggcggtggcgacatggcggagccctccgaggcgggtgacgcgccccctgatgatgggcctccaggggagctcgggcctgacggccctgacggtccagaggaaaagggccgggatcgtgaccgggagcgacggcggagccaccggagcgagcgcgagcggcgccgggaccgggatcgtgaccgtgaccgtgaccgcgagcacaaacggggggagcggggcagtgagcggggcagggatgaggcccgaggtgggggcggtggccaggacaacgggctggagggtctgggcaacgacagccgagacatgtacatggagtctgagggcggcgacggctacctggctccggagaatgggtatttgatggaggctgcgccggagtgaagaggtcgtcctctccatctgctgtgtttggacgcgttcctgcccagccccttgctgtcgggctagtcgggggggtaccgggc

SEQ ID NO: 324188 - DNA, 1681 bp, Homo sapiens
  misc_feature (192)..(193): n is a, c, g, or t
  misc_feature (198)..(198): n is a, c, g, or t
ggtggaccacatgatgctcaccgctctggaggcccggcggctagaggaggctcggtggtccagaagaggaggggctgatgtgaacatccggcattcaggccgcgatgacacctcccgctacgatgagaggcccggcccctccccgcttccgcacagggaccgggaccgggaccgtgagcgggagcgcagagnncgganccgggagcgatacaaggagcgagaacggcgacgctcccgctcccgggaccggcggaggcgctcacggagtcgcgacaaggagggagaaactgccacatgaaaaacaccacaatcaaccttattgtggcattgcgccgtacattcgagagtttgaggaccctcgagatgcccctcctccaactcgtgctgaaacccgagaggagcgcatggagaggaaaagacgggaaaagattgagcggcgacagcaagaagtggagacagagcttaaaatgtgggaccctcacaatgatcccaatgctcagggggatgccttcaagactctcttcgtggcgagagtgaattatgacacaacagaatccaagctccggagagagtttgaggtgtacggacctatcaaaagaatacacatggtctacagtaagcggtcaggaaagccccgtggctatgccttcatcgagtacgaacacgagcgagacatgcactccgcttacaaacacgcagatggcaagaagattgatggcaggagggtccttgtggacgtggagaggggccgaaccgtgaagggctggaggccccggcggctaggaggaggcctcggtggtaccagaagaggaggggctgatgtgaacatccggcattcaggccgcgatgacacctcccgctacgatgagaggcccggcccctccccgcttccgcacagggaccgggaccgggaccgtgagcgggagcgcagagagcggagccgggagcgagacaaggagcgagaacggcgacgctcccgctcccgggaccggcggaggcgctcacggagtcgcgacaaggaggagcggaggcgctccagggagcggagcaaggacaaggaccgggaccggaagcggcgaagcagccggagtcgggagcgggcccggcgggagcgggagcgcaaggaggagctgcgtggcggcggtggcgacatggcggagccctccgaggcgggtgacgcgccccctgatgatgggcctccaggggagctcgggcctgacggccctgacggtccagaggaaaagggccgggatcgtgaccgggagcgacggcggagccaccggagcgagcgcgagcggcgccgggaccgggatcgtgaccgtgaccgtgaccgcgagcacaaacggggggagcggggcagtgagcggggcagggatgaggcccgaggtgggggcggtggccaggacaacgggctggagggtctgggcaacgacagccgagacatgtacatggagtctgagggcggcgacggctacctggctccggagaatgggtatttgatggaggctgcgccggagtgaagaggtcgtcctctccatctgctgtgtttggacgcgttcctgcccagccccttgctgtcatcccctcccccaaccttggccacttgagtttgtcctccaagggtaggtgtctcatttgttctggccccttggatttaaaaataaaattaatttcctgttga

SEQ ID NO: 324189 - DNA, 1357 bp, Homo sapiens
ctcggtacccagttcgacggagactctccgaccctcgagatgcccctcctccaactcgtgctgaaacccgagaggagcgcatggagaggaaaagacgggaaaagattgagcggcgacagcaagaagtggagacagagcttaaaatgtgggaccctcacaatgatcccaatgctcagggggatgccttcaagactctcttcgtggcgagagtgaattatgacacaacagaatccaagctccggagagagtttgaggtgtacggacctatcaaaagaatacacatggtctacagtaagcggtcaggaaagccccgtggctatgccttcatcgagtacgaacacgagcgagacatgcactccgcttacaaacacgcagatggcaagaagattgatggcaggagggtccttgtggacgtggagaggggccgaaccgtgaagggctggaggccccggcggctaggaggaggcctcggtggtaccagaagaggaggggctgatgtgaacatccggcattcaggccgcgatgacacctcccgctacgatgagaggcccggcccctccccgcttccgcacagggaccgggaccgggaccgtgagcgggagcgcagagagcggagccgggagcgagacaaggagcgagaacggcgacgctcccgctcccgggaccggcggaggcgctcacggagtcgcgacaaggaggagcggaggcgctccagggagcggagcaaggacaaggaccgggaccggaagcggcgaagcagccggagtcgggagcgggcccggcgggagcgggagcgcaaggaggagctgcgtggcggcggtggcgacatggcggagccctccgaggcgggtgacgcgccccctgatgatgggcctccaggggagctcgggcctgacggccctgacggtccagaggaaaagggccgggatcgtgaccgggagcgacggcggagccaccggagcgagcgcgagcggcgccgggaccgggatcgtgaccgtgaccgtgaccgcgagcacaaacggggggagcggggcagtgagcggggcagggatgaggcccgaggtgggggcggtggccaggacaacgggctggagggtctgggcaacgacagccgagacatgtacatggagtctgagggcggcgacggctacctggctccggagaatgggtatttgatggaggctgcgccggagtgaagaggtcgtcctctccatctgctgtgtttggacgcgttcctgcccagccccttgctgtcatcccctcccccaaccttggccacttgagtttgtcctccaagggtaggtgtctcatttgttctggccccttggatttaaaaataaaattaatttcctgttga

SEQ ID NO: 324190 - DNA, 1404 bp, Homo sapiens
actgtctccagatgatccttgacactagggcacttctatctgcattcacttctccacctcccctttctcctgacagagacgggaaaagattgagcggcgacagcaagaagtggagacagagcttaaaatgtgggaccctcacaatgatcccaatgctcagggggatgccttcaagactctcttcgtggcgagagtgaattatgacacaacagaatccaagctccggagagagtttgaggtgtacggacctatcaaaagaatacacatggtctacagtaagcggtcaggaaagccccgtggctatgccttcatcgagtacgaacacgagcgagacatgcactccaccacgcagctggcttgcagctgatgcttacgctccccttacaacacctcagtgtatggttccgcttacaaacacgcagatggcaagaagattgatggcaggagggtccttgtggacgtggagaggggccgaaccgtgaagggctggaggccccggcggctaggaggaggcctcggtggtaccagaagaggaggggctgatgtgaacatccggcattcaggccgcgatgacacctcccgctacgatgagaggcccggcccctccccgcttccgcacagggaccgggaccgggaccgtgagcgggagcgcagagagcggagccgggagcgagacaaggagcgagaacggcgacgctcccgctcccgggaccggcggaggcgctcacggagtcgcgacaaggaggagcggaggcgctccagggagcggagcaaggacaaggaccgggaccggaagcggcgaagcagccggagtcgggagcgggcccggcgggagcgggagcgcaaggaggagctgcgtggcggcggtggcgacatggcggagccctccgaggcgggtgacgcgccccctgatgatgggcctccaggggagctcgggcctgacggccctgacggtccagaggaaaagggccgggatcgtgaccgggagcgacggcggagccaccggagcgagcgcgagcggcgccgggaccgggatcgtgaccgtgaccgtgaccgcgagcacaaacggggggagcggggcagtgagcggggcagggatgaggcccgaggtgggggcggtggccaggacaacgggctggagggtctgggcaacgacagccgagacatgtacatggagtctgagggcggcgacggctacctggctccggagaatgggtatttgatggaggctgcgccggagtgaagaggtcgtcctctccatctgctgtgtttggacgcgttcctgcccagccccttgctgtcatcccctcccccaaccttggccacttgagtttgtcctccaagggtaggtgtctcatttgttctggccccttggatttaaaaataaaattaatttcctgttga

SEQ ID NO: 324191 - DNA, 3354 bp, Homo sapiens
  misc_feature (1964)..(1964): n is a, c, g, or t
  misc_feature (2035)..(2035): n is a, c, g, or t
caagtacctattggatcaccagctgtgtgccgggcttctagttgagcaacacagaggcagcctctgccctctgagcctcctgcattcggtctcctcattgtcatttgctgtctcaggcaaggtcagtttggctgcaagtatcagaaataaacttgagcttcctgaaacataaagggccctgttgatgtagaatcatgggcatcctttggagttcggaggtatgtgatgtccgtggacctgagaacctggtagctgacgctgttaagagctggggcaaccaggccaggcgtggtggctcgcctgtaatcccagcactttgggaggccgaggcgggtggatcatgaggtcaggagttcgagaccagcctggccaagatgttgaaaccgcatctctactaaaaatacaaaaattaactgggcgtggtggcgggtgcctgtaatcccatctactcgggaggctgaggcagagaattgcttaaacctgggaggcagaggttgcagtgagccaagatagagtcactgcattccatccagcctgggtgccagagcaagactctgtctcaaaaaaaaaaacaaaaaacaaaaaaactggggcgacccacctgtgatgtgtgacagcccacagcttgcttctgcctcgtttgcctccatgcagctaggtcggtcccatgcctctttgcactggcccagtgcagcaggccacaggccccagctttacactcagtcctggatgagtctcttgtttcggggtgggcacatttgattgactcagtgttgggcctggggtcctgttgctcaggcatgcttattgaggactgaatcctgcaaagctgagtgacagttgtcagagaagatgatggtccctgggcagacacccaggcagtagtagccacttggggctcctgtcctgcctcccagccctgtgtcctggctctggactcgcctgtgctagggagaccacgctctcagctgctgagcctcggagcttaccaggcatgttcttaccttactctggtctctctggggtggagtgggttcttatagctctgctgtttcctgttggggcgggaaaatgctagaatctcagtctttccagaatctcagaatcttctagttcaattgccattcaaactttttgttggtgttagccaataacatcttgactcggtgcacccgcagaaatactgtaacctaaagtttgaggaaacagttttttctatgtagtaagtatatagttgtattctgctgttttgtttcttaagatgttggttgcaacccatcagattgatgatgggactcatttctgggtcatgacctgaatataggaaaggctagtctagctgccctgtgcctgtgacatggcaggtgcctggtccgctgcctgcttctataagaatgtctccctgcagcctcttttctatacagaactcagccctgcctcacggaagcttttccaggcagtgcgagatagaggagcgcttgagaaggcaggttttgcagcagacggcagtgacagcccagttctgcaccttctttgctgagtcactgtgggccagtgacttgatctgagattgtttccccatcagaaccatgaggttatcatctgtgccttggggctgttcatctatctattcacttgacacacacacatccacctttctataccagctgcagcgccacctgctggtaccgtgagcaagagctgggcatgcccacggttccggtgccctgcagtctggtgggagaggcaggtaggggtcgactcaggtagcaaacctgaaactccaggggaaggaagcgtttctgcaactgtgagtacataggactgtgaggagagacttcccgagaaaggatgttcgggctagcgttaagggtgagcgtgagttcaccagagaaggaaggggagaccagtccagggcaaggagaatgcacagacactggcaggaaggtgagcgtggggacacngggaaaggcctgggacacgcagccaagagccgcggctcagacgctagcagggcccgctcttgctgcctctnccaccagttgacgaggagtttggaccttaggctgggggacgccagcaaaggcttctaagcagatcacatttttgggtggaaagatcattggcttcgggtttctgtgagggcgaggatgattggaagggagggttttgaggaggctgtgaagtgcgctatggttaagatgatgcgctttggggccagacatgggttccagtaacggctgttgcctagcgaacgctttgtgtgagttaattagagaagacgtggctgtcttgtgatgggagtgcgcgggatgaactgcacggggggacccggccctgtgaacactaagccaggggctgccttcctgccctttgctcttggagtcggctcatttctgctcctccgggccctgtccctgcccagattcaccctctgtccgtctgccctgccccaggaggaggcctcggtggtaccagaagaggaggggctgatgtgaacatccggcattcaggccgcgatgacacctcccgctacgatgagaggcccggcccctccccgcttccgcacagggaccgggaccgggaccgtgagcgggagcgcagagagcggagccgggagcgagacaaggagcgagaacggcgacgctcccgctcccgggaccggcggaggcgctcacggagtcgcgacaaggaggagcggaggcgctccagggagcggagcaaggacaaggaccgggaccggaagcggcgaagcagccggagtcgggagcgggcccggcgggagcgggagcgcaaggaggagctgcgtggcggcggtggcgacatggcggagccctccgaggcgggtgacgcgccccctgatgatgggcctccaggggagctcgggcctgacggccctgacggtccagaggaaaagggccgggatcgtgaccgggagcgacggcggagccaccggagcgagcgcgagcggcgccgggaccgggatcgtgaccgtgaccgtgaccgcgagcacaaacggggggagcggggcagtgagcggggcagggatgaggcccgaggtgggggcggtggccaggacaacgggctggagggtctgggcaacgacagccgagacatgtacatggagtctgagggcggcgacggctacctggctccggagaatgggtatttgatggaggctgcgccggagtgaagaggtcgtcctctccatctgctgtgtttggacgcgttcctgcccagccccttgctgtcatcccctcccccaaccttggccacttgagtttgtcctccaagggtaggtgtctcatttgttctggccccttggatttaaaaataaaattaatttcctgttga

SEQ ID NO: 324192 - DNA, 3327 bp, Homo sapiens
  misc_feature (1964)..(1964): n is a, c, g, or t
  misc_feature (2035)..(2035): n is a, c, g, or t
caagtacctattggatcaccagctgtgtgccgggcttctagttgagcaacacagaggcagcctctgccctctgagcctcctgcattcggtctcctcattgtcatttgctgtctcaggcaaggtcagtttggctgcaagtatcagaaataaacttgagcttcctgaaacataaagggccctgttgatgtagaatcatgggcatcctttggagttcggaggtatgtgatgtccgtggacctgagaacctggtagctgacgctgttaagagctggggcaaccaggccaggcgtggtggctcgcctgtaatcccagcactttgggaggccgaggcgggtggatcatgaggtcaggagttcgagaccagcctggccaagatgttgaaaccgcatctctactaaaaatacaaaaattaactgggcgtggtggcgggtgcctgtaatcccatctactcgggaggctgaggcagagaattgcttaaacctgggaggcagaggttgcagtgagccaagatagagtcactgcattccatccagcctgggtgccagagcaagactctgtctcaaaaaaaaaaacaaaaaacaaaaaaactggggcgacccacctgtgatgtgtgacagcccacagcttgcttctgcctcgtttgcctccatgcagctaggtcggtcccatgcctctttgcactggcccagtgcagcaggccacaggccccagctttacactcagtcctggatgagtctcttgtttcggggtgggcacatttgattgactcagtgttgggcctggggtcctgttgctcaggcatgcttattgaggactgaatcctgcaaagctgagtgacagttgtcagagaagatgatggtccctgggcagacacccaggcagtagtagccacttggggctcctgtcctgcctcccagccctgtgtcctggctctggactcgcctgtgctagggagaccacgctctcagctgctgagcctcggagcttaccaggcatgttcttaccttactctggtctctctggggtggagtgggttcttatagctctgctgtttcctgttggggcgggaaaatgctagaatctcagtctttccagaatctcagaatcttctagttcaattgccattcaaactttttgttggtgttagccaataacatcttgactcggtgcacccgcagaaatactgtaacctaaagtttgaggaaacagttttttctatgtagtaagtatatagttgtattctgctgttttgtttcttaagatgttggttgcaacccatcagattgatgatgggactcatttctgggtcatgacctgaatataggaaaggctagtctagctgccctgtgcctgtgacatggcaggtgcctggtccgctgcctgcttctataagaatgtctccctgcagcctcttttctatacagaactcagccctgcctcacggaagcttttccaggcagtgcgagatagaggagcgcttgagaaggcaggttttgcagcagacggcagtgacagcccagttctgcaccttctttgctgagtcactgtgggccagtgacttgatctgagattgtttccccatcagaaccatgaggttatcatctgtgccttggggctgttcatctatctattcacttgacacacacacatccacctttctataccagctgcagcgccacctgctggtaccgtgagcaagagctgggcatgcccacggttccggtgccctgcagtctggtgggagaggcaggtaggggtcgactcaggtagcaaacctgaaactccaggggaaggaagcgtttctgcaactgtgagtacataggactgtgaggagagacttcccgagaaaggatgttcgggctagcgttaagggtgagcgtgagttcaccagagaaggaaggggagaccagtccagggcaaggagaatgcacagacactggcaggaaggtgagcgtggggacacngggaaaggcctgggacacgcagccaagagccgcggctcagacgctagcagggcccgctcttgctgcctctnccaccagttgacgaggagtttggaccttaggctgggggacgccagcaaaggcttctaagcagatcacatttttgggtggaaagatcattggcttcgggtttctgtgagggcgaggatgattggaagggagggttttgaggaggctgtgaagtgcgctatggttaagatgatgcgctttggggccagacatgggttccagtaacggctgttgcctagcgaacgctttgtgtgagttaattagagaagacgtggctgtcttgtgatgggagtgcgcgggatgaactgcacggggggacccggccctgtgaacactaagccaggggctgccttcctgccctttgctcttggagtcggctcatttctgctcctccgggccctgtccctgcccagattcaccctctgtccgtctgccctgccccaggaggaggcctcggtggtaccagaagaggaggggctgatgtgaacatccggcattcaggccgcgatgacacctcccgctacgatgagagggaccgggaccgggaccgtgagcgggagcgcagagagcggagccgggagcgagacaaggagcgagaacggcgacgctcccgctcccgggaccggcggaggcgctcacggagtcgcgacaaggaggagcggaggcgctccagggagcggagcaaggacaaggaccgggaccggaagcggcgaagcagccggagtcgggagcgggcccggcgggagcgggagcgcaaggaggagctgcgtggcggcggtggcgacatggcggagccctccgaggcgggtgacgcgccccctgatgatgggcctccaggggagctcgggcctgacggccctgacggtccagaggaaaagggccgggatcgtgaccgggagcgacggcggagccaccggagcgagcgcgagcggcgccgggaccgggatcgtgaccgtgaccgtgaccgcgagcacaaacggggggagcggggcagtgagcggggcagggatgaggcccgaggtgggggcggtggccaggacaacgggctggagggtctgggcaacgacagccgagacatgtacatggagtctgagggcggcgacggctacctggctccggagaatgggtatttgatggaggctgcgccggagtgaagaggtcgtcctctccatctgctgtgtttggacgcgttcctgcccagccccttgctgtcatcccctcccccaaccttggccacttgagtttgtcctccaagggtaggtgtctcatttgttctggccccttggatttaaaaataaaattaatttcctgttga

SEQ ID NO: 324193 - DNA, 866 bp, Homo sapiens
ggacgcgtgggtcgacccacgcgtcgcggacgcgtgggctcccgctacgatgagaggcccggcccctccccgcttccgcacagggaccgggaccgggaccgtgagcgggagcgcagagagcggagccgggagcgagacaaggagcgagaacggcgacgctcccgctcccgggaccggcggaggcgctcacggagtcgcgacaaggaggagcggaggcgctccagggagcggagcaaggacaaggaccgggaccggaagcggcgaagcagccggagtcgggagcgggcccggcgggagcgggagcgcaaggaggagctgcgtggcggcggtggcgacatggcggagccctccgaggcgggtgacgcgccccctgatgatgggcctccaggggagctcgggcctgacggccctgacggtccagaggaaaagggccgggatcgtgaccgggagcgacggcggagccaccggagcgagcgcgagcggcgccgggaccgggatcgtgaccgtgaccgtgaccgcgagcacaaacggggggagcggggcagtgagcggggcagggatgaggcccgaggtgggggcggtggccaggacaacgggctggagggtctgggcaacgacagccgagacatgtacatggagtctgagggcggcgacggctacctggctccggagaatgggtatttgatggaggctgcgccggagtgaagaggtcgtcctctccatctgctgtgtttggacgcgttcctgcccagccccttgctgtcatcccctcccccaaccttggccacttgagtttgtcctccaagggtaggtgtctcatttgttctggccccttggatttaaaaataaaattaatttcctgttga

SEQ ID NO: 324194 - DNA, 1070 bp, Homo sapiens
gcagaagccagccccccgcggctgaggtactcaaggtgcccaaaggcggggtagtgacctcgcgcgtgcgctgtgcccgcggcagcgccgggtcctagtgtgtgggttgttgttggcaccgcacggcgcgtgcgcagtgaggacggcggagggatttgcggccgggacccaccccctgctccagtcgctatcggaggccgcgcgggtggctgagcagcggcctggtgcgctcgcttagcgggcgacggaatcagacggacgtggacgcccccggagtggaagccgaagcaggagttgttgttgctgaggggctgccgcagccgccgcgagcctccggacagacgccagagcgaggagggcgctacgcgacttggcaagatgacccagttcctgccgcccaaccttctggccctctttgccccccgtgaccctattccatacctgccacccctggagaaactgccacatgaaaaacaccacaatcaaccttattgtggcattgcgccgtacattcgagagtttgaggaccctcgagatgcccctcctccaactcgtgctgaaacccgagaggagcgcatggagaggaaaagacgggaaaagattgagcggcgacagcaagaagtggagacagagcttaaaatgtgggaccctcacaatgatcccaatgctcagggggatgccttcaagactctcttcgtggcgagagtgaattatgacacaacagaatccaagctccggagagagtttgaggtgtacggacctatcaaaagaatacacatggtctacagtaagcggtcaggaaagccccgtggctatgccttcatcgagtacgaacacgagcgagacatgcactccgcttacaaacacgcagatggcaagaagattgatggcaggagggtccttgtggacgtggagaggggccgaaccgtgaagggctggaggccccggcggctaggaggaggcctcggtggtaccagaagaggaggggctgatgtgaacatccggcattcaggccgcgatgacacctcccgctacgatgagagcccgcacatccgacagcccggacagca

SEQ ID NO: 324195 - DNA, 1059 bp, Homo sapiens
gcagaagccagccccccgcggctgaggtactcaaggtgcccaaaggcggggtagtgacctcgcgcgtgcgctgtgcccgcggcagcgccgggtcctagtgtgtgggttgttgttggcaccgcacggcgcgtgcgcagtgaggacggcggagggatttgcggccgggacccaccccctgctccagtcgctatcggaggccgcgcgggtggctgagcagcggcctggtgcgctcgcttagcgggcgacggaatcagacggacgtggacgcccccggagtggaagccgaagcaggagttgttgttgctgaggggctgccgcagccgccgcgagcctccggacagacgccagagcgaggagggcgctacgcgacttggcaagatgacccagttcctgccgcccaaccttctggccctctttgccccccgtgaccctattccatacctgccacccctggagaaactgccacatgaaaaacaccacaatcaaccttattgtggcattgcgccgtacattcgagagtttgaggaccctcgagatgcccctcctccaactcgtgctgaaacccgagaggagcgcatggagaggaaaagacgggaaaagattgagcggcgacagcaagaagtggagacagagcttaaaatgtgggaccctcacaatgatcccaatgctcagggggatgccttcaagactctcttcgtggcgagagtgaattatgacacaacagaatccaagctccggagagagtttgaggtgtacggacctatcaaaagaatacacatggtctacagtaagcggtcaggaaagccccgtggctatgccttcatcgagtacgaacacgagcgagacatgcactccaccacgcagctggcttgcagctgatgcttacgctccccttacaacacctcagtgtatggttggtataagggtttgtatcatgggtaagatcactcagcaccgcacaccagcccagcttagccaggcagctcaggagcagcgaggcgcccctcctttaagccccatggtcccgctagcgcatgtccataagggatcagctgaacg

SEQ ID NO: 324196 - DNA, 1187 bp, Homo sapiens
gcagaagccagccccccgcggctgaggtactcaaggtgcccaaaggcggggtagtgacctcgcgcgtgcgctgtgcccgcggcagcgccgggtcctagtgtgtgggttgttgttggcaccgcacggcgcgtgcgcagtgaggacggcggagggatttgcggccgggacccaccccctgctccagtcgctatcggaggccgcgcgggtggctgagcagcggcctggtgcgctcgcttagcgggcgacggaatcagacggacgtggacgcccccggagtggaagccgaagcaggagttgttgttgctgaggggctgccgcagccgccgcgagcctccggacagacgccagagcgaggagggcgctacgcgacttggcaagatgacccagttcctgccgcccaaccttctggccctctttgccccccgtgaccctattccatacctgccacccctggagaaactgccacatgaaaaacaccacaatcaaccttattgtggcattgcgccgtacattcgagagtttgaggaccctcgagatgcccctcctccaactcgtgctgaaacccgagaggagcgcatggagaggaaaagacgggaaaagattgagcggcgacagcaagaagtggagacagagcttaaaatgtgggaccctcacaatgatcccaatgctcagggggatgccttcaagactctcttcgtggcgagagtgaattatgacacaacagaatccaagctccggagagagtttgaggtgtacggacctatcaaaagaatacacatggtctacagtaagcggtcaggaaagccccgtggctatgccttcatcgagtacgaacacgagcgagacatgcactccaccacgcagctggcttgcagctgatgcttacgctccccttacaacacctcagtgtatggttccgcttacaaacacgcagatggcaagaagattgatggcaggagggtccttgtggacgtggagaggggccgaaccgtgaagggctggaggccccggcggctaggaggaggcctcggtggtaccagaagaggaggggctgatgtgaacatccggcattcaggccgcgatgaatcccctcccccaaccttggccacttgagtttgtcctccaagggtaggtgtctcatttgttctggccccttggatttaaaaataaaattaatttcctgttga

SEQ ID NO: 324197 - DNA, 2322 bp, Homo sapiens
gatgtcagcggcgaggtggcaggaacaccgagggcagggctccaggccagggctccactggagcccttcagccttccctccctgcccccgtgctttctatggggctgctactgtgctggccctggagagtctttttggctgctagttttggggtgctctgccccctttctgtcttccttactgtggttgaggcctcccgagggggctggctgtggtgtccagcagctctccagaggtggtcaggagctccctaaagtgcatggaattggggcttggggtgtgggagggaccaaggggtaggctgctagcagctgaaggtgtcgtaggtttttactaaagaaccttccactgtctagagacttgagagagggaaagagagagagaggcctagacgaacacaatcacatgttttctttgctgttcctcccgggatgggcctgttttggggtttgggactctgaacccgagcggggttccttcgcttgactttgatcctggtccttaaatgcctttccccactcccctcccgtgggttcaggggccaagcggcccctcctcagagcacgggcagcaccgtctcctggacccctgtgtgccagcctctgcagacgcagctggtgggagggagcatggatttggaggtggagaagtcactcctggtcctcggagggggtgggctgtgtgcctagttcagtgtgactcggggattggtgagggcggacaggtttctgaggcctccctagccttctttgtaaattcacacgagatagtccagggctttccagcgcccagcttggatgataatcctcgtctcccccactctaaggcctccttgagatttctttggggtctaccacgtcctctgcctgtctccaggtggtacaggagatgtggttcctctccctctcctggctccctagaaccccccacttcccctccctgtagctttagctgaccccgtggtggtgggtgtggggtctgtgcgcgtgctcaggtaagcttgggggctccaggtaagcggtcccgtgtcccccccccgggaagcccgcctcctcgccaggcccccaggagttgccgagccccccccatcccgctcggtttggacacccgcaaggccggcatcggtaaatggcacctttttctcttcctctggttgttatttgggggggagcgggctggggcggggcagggtattacggttggttgaggacagccccctaggccagggctgggtgggggaacggggactttttggccttcatgacagccccacgttgatcacaggccagggcctcaggcttgccttctgctacgcgctgcccgagagcagcagtgagcctctcccccgtctcccctctacgactcccctttcctggcaggctcaggctggggtgcgctcccagcacgtgttgagccgggggtgtggagggcgagatggggcagggctggggggaggcagagtcagtcgtctcaggtaaggcagggattttcagtagcaccgcacggctccccatgcttcctccactgcccctctcccctgctgcaggggccccgccaggccccctgggagtgtataacccgcctctctgctccctgccatttcctgaagatttctcccacccccttctggttcattttctgttctgatgtctgttccccccacactcacccccctccaaaaaaaacaaaaacagaaaaaaccggtgtggtctggggtgcggagcgtcccagctgggcctcctgccccggcttggtgtctcagggtgcatgcttggggttgtggaggagccccctcccccacagcagagtccagcgtggagttaaccttcagtttctttgcagcgattttggccgccctggcgggagggggctgttccatcatgtgggagaggaagggccggggagcctagggggtggcgggtgagggtggacgtctcccccgaccaggagtggttggggcgctgagaggaagcagacgctgagatggagcaggcccttcaccggtttgggagagggttggtctggctgtcagttgcctggctgtctgttgggcgtgtgcgtgtgcgtgatgatggggacacggggcggggattctgtagagctgggcctgtcctgactagaggaccctctggggactcctctcccctccccctccccacatctgttacagccgcttacaaacacgcagatggcaagaagattgatggcaggagggtccttgtggacgtggagaggggccgaaccgtgaagggctggaggccccggcggctaggaggagcctcggtgtaccagaagaggtgggaggagggaaggtaccgagcc

SEQ ID NO: 324198 - DNA, 1135 bp, Homo sapiens
taaaataatttttttctttcactgttctggggaagtctgtgagcctgtaagggatcaaatgttatagaggtctaaatatgtgatgccagggcagaaagtaaggataaaaagtttcagggaaaggaaagcaaagaaaatcaggaacaaatgagaataaagattagttaaaaatgattactgcatatcttatgcacatatacccattttaattaagcatctggtgactttccttttaaggtacggcggcgaagtgctaaaagggaacggcgatgaacaaatgtaattaataactttctctgtgaaagctttggaaaaatcttttttttttttttttttttttggtcaagcttgaggctgaataaagcctttgatgcacaaaatgggactgctgaagagtggacagttggaccttactttggtgaccccatacgtttgtggtcacatgctttagccatacacatggtaacattgactatggagtcttgtgaaagtgtaatgtgcgatggctatgtagacataaagaagaaacttgtaaatatcttttttcttttttttaatgtttctgatttctgaagtgcttgtatagcttttatctgcggctttaaactgacagtacccgactgtttattggatctattgatttgaaaagaatttgttaggatagatcttaagcagtaatctgtcagtgtttgtatttgtattctctgcaattttactgtgaaaaaaaatttgttttcaacaattggtgtcattttcttgatgtcactatttgttggagagttaaatggtctcttccctttgtgtatcttacctagtgtttactcctgggcacccttaatcttcagaggtgctaaattgtctgccattacaccagaaggatgcctctgataggaggacaaccatgcaaattgtgaaatagtcctgaagttcttggattactttacacctcagtattgatttgtcccagaattttctggcctttcatggcaatgaaaattttaagaagaaagatttaaagtattttaattttaaagagtgtgttataaaataatgtactgaattctttatcccattttatcatcctttcagtttttattaatctactgtatcaataaaattctgtaatttgaatgag

SEQ ID NO: 324199 - DNA, 7424 bp, Homo sapiens
  misc_feature (498)..(498): n is a, c, g, or t
gctggctgcggaaggggagggggggggagaaggcgattggatgcggcggcggcggcggatcccggagagccccggagtgagcggagtagcgagtcggcaacccggaggggtagaaatatttctgtcatggctcattcaaagactaggaccaatgatggaaaaattacatatccgcctggggtcaaggaaatatcagataaaatatctaaagaggagatggtgagacgattaaagatggttgtgaaaacttttatggatatggaccaggactctgaagaagaaaaggagctttatttaaacctagctttacatcttgcttcagatttttttctcaagcatcctgataaagatgttcgcttactggtagcctgctgccttgctgatattttcaggatttatgctcctgaagctccttacacatcccctgataaactaaaggatatatttatgtttataacaagacagttgaaggggctagaggatacaaagagcccacanttcaataggtatttttatttacttgagaacattgcttgggtcaagtcatataacatatgctttgagttagaagatagcaatgaaattttcacccagctatacagaaccttattttcagttataaacaatggccacaatcagaaagtccatatgcacatggtagaccttatgagctctattatttgtgaaggtgatacagtgtctcaggagcttttggatacggttttagtaaatctggtacctgctcataagaatttaaacaagcaagcatatgatttggcaaaggctttactgaagaggacagctcaagctattgagccatatattaccaatttttttaatcaggttctgatgcttgggaaaacatctatcagcgatttgtcagagcatgtctttgacttaattttggagctctacaatattgatagtcatttgctgctctctgttttaccccagcttgaatttaaattaaagagcaatgataatgaggagcgcctacaagttgttaaactactggcaaaaatgtttggggcaaaggattcagaattggcttctcaaaacaagccactttggcagtgctacttgggcaggtttaatgatatccatgtaccaatccgcctggaatgtgtgaaatttgctagccattgtctcatgaaccatcctgatttagcaaaagacttaacagagtatcttaaagtgaggtcacatgaccctgaggaagctattagacatgatgttattgtgtcaatagttacagctgctaaaaaggatattcttctggtcaatgatcacttacttaattttgtgagagagagaacattagacaaacgatggagagtacgcaaagaagccatgatgggacttgcccaaatttataagaaatatgctttacagtcagcagctggaaaagatgctgcaaaacagatagcatggatcaaagacaaattgctacatatatattatcaaaatagtattgatgatcgactacttgttgaacggatctttgctcaatacatggttcctcacaatttagaaactacagaacggatgaaatgcttatattacttgtatgccacactggatttaaatgctgtgaaagcattgaatgaaatgtggaaatgtcaaaatctgctccgacatcaagtaaaggatttgcttgacttgattaagcaacccaaaacagatgccagtgtcaaggccatattttcaaaagtgatggttattacaagaaatttacctgatcctggtaaggctcaggatttcatgaagaaattcacacaggtgttagaagatgatgagaaaataagaaagcagttagaagtacttgttagtccaacatgctcctgcaagcaggctgaaggttgtgtgcgtgaaataactaagaagttgggcaaccccaaacagcctacaaatcctttcctggaaatgatcaagtttctcttggagaggatagcacctgtgcacatagataccgaatctatcagtgctcttattaaacaagtgaacaaatcaatagatggaacagcagatgatgaagatgagggtgttccaactgatcaagccatcagagcaggtcttgaactgcttaaggtactctcatttacacatcccatctcatttcattctgctgaaacatttgaatcattactggcttgtctgaaaatggatgatgaaaaagtagcagaagctgcactacaaattttcaaaaacacaggaagcaaaattgaagaggattttccacacatcagatcagccttgcttcctgttttacatcacaaatctaaaaaaggacccccccgtcaagccaaatatgccattcattgtatccatgcgatattttctagtaaagagacccagtttgcacagatatttgagcctctgcataagagcctagatccaagcaacctggaacatctcataacaccattggttactattggtcatattgctctccttgcacctgatcaatttgctgctcctttgaaatctttggtagctactttcattgtgaaagatcttctcatgaatgatcggcttccagggaaaaagacaactaaactttgggttccagatgaagaagtatctcctgagacaatggtcaaaattcaggctattaaaatgatggttcgatggctacttggaatgaaaaataatcacagtaaatcaggaacttctaccttaagattgctaacaacaatattgcatagtgatggagacttgacagaacaggggaaaattagtaaaccagatatgtcacgtctgagacttgctgctgggagtgctattgtgaagctggcacaagaaccctgttaccatgaaatcatcacattagaacaatatcagctatgtgcattagctatcaacgatgaatgctatcaagtaagacaagtgtttgcccagaaacttcacaaaggcctttcccgtttacggcttccacttgagtatatggcaatctgtgccctttgtgcaaaagatcctgtaaaggagagaagagctcatgctaggcaatgtttggtgaaaaatataaatgtaaggcgggagtatctgaagcagcatgcagctgttagtgaaaaattattgtctcttctaccagagtatgttgttccatatacaattcaccttttggcacatgacccagattatgtcaaagtacaggatattgaacaacttaaagatgttaaagaatgtctttggtttgttctggaaatattaatggctaaaaatgaaaataacagtcacgcttttatcagaaagatggtagaaaatattaaacaaacaaaagatgcccaaggaccagatgatgcaaaaatgaatgaaaaactgtacactgtgtgtgatgttgccatgaatatcatcatgtcaaagagtactacatacagtttggaatctcctaaagacccggtactaccagctcgtttcttcactcaacctgacaagaatttcagtaacaccaaaaattatctgcctcctgaaatgaaatcatttttcactcctggaaaacctaaaacaaccaatgttctaggagctgttaacaagccactttcatcagcaggcaagcaatctcagaccaaatcatcacgaatggaaactgtaagcaatgcaagcagcagctcaaatccaagctctcctggaagaataaaggggaggcttgatagttctgaaatggatcacagtgaaaatgaagattacacaatgtcttcacctttgccggggaaaaaaagtgacaagagagacgactctgatcttgtaaggtctgaattggagaagcctagaggcaggaaaaaaacgcccgtcacagaacaggaggagaaattaggtatggatgacttgactaagttggtacaggaacagaaacctaaaggcagtcagcgaagtcggaaaagaggccatacggcttcagaatctgatgaacagcagtggcctgaggaaaagaggctcaaagaagatatattagaaaatgaagatgaacagaatagtccgccaaaaaagggtaaaagaggccgaccaccaaaacctcttggtggaggtacaccaaaagaagagccaacaatgaaaacttctaaaaaaggaagcaaaaaaaaatctggacctccagcaccagaggaggaggaagaagaagaaagacaaagtggaaatacggaacagaagtccaaaagcaaacagcaccgagtgtcaaggagagcacagcagagagcagaatctcctgaatctagtgcaattgaatccacacagtccacaccacagaaaggacgaggaagaccatcaaaaacgccatcaccatcacaaccaaaaaaaaatgtgtaagttgtaaatattacatttcaaaccaatttcaaattattttgcaaaagttcctaaatttgtaaacatacatattgctgtatttaaattccatatatttagccccattacactaggtacggcggcgaagtgctaaaagggaacggcgatgaacaaatgtaattaataactttctctgtgaaagctttggaaaaatcttttttttttttttttttttttggtcaagcttgaggctgaataaagcctttgatgcacaaaatgggactgctgaagagtggacagttggaccttactttggtgaccccatacgtttgtggtcacatgctttagccatacacatggtaacattgactatggagtcttgtgaaagtgtaatgtgcgatggctatgtagacataaagaagaaacttgtaaatatcttttttcttttttttaatgtttctgatttctgaagtgcttgtatagcttttatctgcggctttaaactgacagtacccgactgtttattggatctattgatttgaaaagaatttgttaggatagatcttaagcagtaatctgtcagtgtttgtatttgtattctctgcaattttactgtgaaaaaaaatttgttttcaacaattggtgtcattttcttgatgtcactatttgttggagagttaaatggtctcttccctttgtgtatcttacctagtgtttactcctgggcacccttaatcttcagaggtgctaaattgtctgccattacaccagaaggatgcctctgataggaggacaaccatgcaaattgtgaaatagtcctgaagttcttggattactttacacctcagtattgatttgtcccagaattttctggcctttcatggcaatgaaaattttaagaagaaagatttaaagtattttaattttaaagagtgtgttataaaataatgtactgaattctttatcccattttatcatcctttcagtttttattaatctactgtatcaataaaattctgtaatttgaatgagtttttaatagtctagaatgttattgtgtatagatatttcctcttgaacgttatgttcagaaaatgcaaattacactataatataaaacctgatatatacacattagaaatattccagttctccgtaacagtgtaaagttaatcagaaagaaaaaattttattgatgcagtgtgtctttataaagctgttcttgaaagccaagtgtttgtattttatagtgagttgcatgtttttgaaaaaaagtgctgaaaatgggatgtgctgttttctgtaaattcatatttagccatagtatatgatagattgccccataacatagtttttcatcaagagtttattattgtactttattttggagccaaaaaattgattctggggggtgggggcagcgtagaagtggtatatccaagtatatcagctactgtagttgtcacagtcttgtgaactttgaatgaaattccactttgtccagattgggagaagtggaaatttatttggatttagagcaggtctttttttttcttcattgtaatctgcaaaatgtagaaataaattacttaaggcagtatcctttatacagttgtataaactgtattttgaaccaaaacatataggttactacttaatgcttacctaatttcattttagtattttaggtgctgttatgttttttcatggttaacaccagaggggaaaaaatcatattctaacttattaaatttatcacattgaatagtggaacattttcatatgatacaccattatgtttaagatatatttccaagattggttataatagatggggcatataataaagaagctactattttggaaaatgacattttactatttgccaatgtatattgcaattgatgtgattatttttcttttaaagatttgtttgtgtttatgaaacagccatttattttttaaaaagtgttttgaattgtgtcttaatctctccatattcaactattcttcatttacaacaatagtgacaccagtaattatgagaggctgtcatatatcaaagcagctcaggtgggatcaacatacattggttttgaaatgtttccttagctcggttctcccaaacacataatttctgtttcagcagtacaaaggcatgttttaaaatctataacataaagaataaggaatagctttgtatttttgtcattgattaaattgcaccagaaatgtttatggaaatattaagaacattttataaaacatacgaaaaagtgattgtgaaggatttttatttgcatgattatagttaagcaaatttcatttcacatttttgtaatgctgtacagcagttcacaaaaaaatgttcattgtagattttgttatgttcaatgccaatgagtctgtaattttacgacctgtctgttctttttttgggtggattacgatgtaaatttttcttttctttctttctttttttttttttttgtgtagaaaaataggtgcaataatgatcaaagttttgatgtcttgagtctccatcttaggggattatcttacgtttaagcttaacatttcatgtagtaagatttggagagccacatactttacagtaaaattaagtgtgtataaaacattaattgctaacaattgttagcaaactatttcagtgataatgttcattttgaaaatatgtactgtataacattaagaaaatatttaactccctgtaacaagttccattatgaaaatcttattcctcagtgaggttatcttgctgcactctgtagcaaatttgtttaatctacattataataaaatttcttgctgcagtgcaacaggaggctttttcagtgatcttcactgtatatgtaaattacaaatgtggctgtaaaacttattccaggtattaaaggttaaattgctttctatatcttcttataacttgtaagtctgatttttaagatttccttttgtccacttgtaagaatgtcaggaatttaagaatttgtttaaattaggcatatctctgccatcacatagtattatgtcaccataatgaacaattgctatttaaatagataaccaattttcagacacatttttggatttctgtgaagttgaataaacataaaagctaa

SEQ ID NO: 324200 - DNA, 759 bp, Homo sapiens
gctggctgcggaaggggagggggggggagaaggcgattggatgcggcggcggcggcggatcccggagagccccggagtgagcggagtagcgagtcggcaacccggaggggtagaaatatttctgtcatggctcattcaaagactaggaccaatgatggaaaaattacatatccgcctggggtcaaggaaatatcagataaaatatctaaagaggagatggtgagacgattaaagatggttgtgaaaacttttatggatatggaccaggactctgaagaagaaaaggagctttatttaaacctagctttacatcttgcttcagatttttttctcaagcatcctgataaagatgttcgcttactggtagcctgctgccttgctgatattttcaggatttatgctcctgaagctccttacacatcccctgataaactaaaggcaagtactgatttaaataactccaagattgaccgatactttgatttatctttctaactaaaatgggagttaaggtatttagatgatttccttggattctttgacattagctacagtaatcttttgctaaacttaatgtttttttttttttttagaacttatttttgaaaaactttctggtcttgaggttaagaagtagattaatacagtgtgtattttttttatatcatgtcatcattagctctgtttctttcattataattttgggggcaattccttttcacttttgaaaatccatattgaagaccatggccattattt

SEQ ID NO: 324201 - DNA, 5332 bp, Homo sapiens
  misc_feature (498)..(498): n is a, c, g, or t
gctggctgcggaaggggagggggggggagaaggcgattggatgcggcggcggcggcggatcccggagagccccggagtgagcggagtagcgagtcggcaacccggaggggtagaaatatttctgtcatggctcattcaaagactaggaccaatgatggaaaaattacatatccgcctggggtcaaggaaatatcagataaaatatctaaagaggagatggtgagacgattaaagatggttgtgaaaacttttatggatatggaccaggactctgaagaagaaaaggagctttatttaaacctagctttacatcttgcttcagatttttttctcaagcatcctgataaagatgttcgcttactggtagcctgctgccttgctgatattttcaggatttatgctcctgaagctccttacacatcccctgataaactaaaggatatatttatgtttataacaagacagttgaaggggctagaggatacaaagagcccacanttcaataggtatttttatttacttgagaacattgcttgggtcaagtcatataacatatgctttgagttagaagatagcaatgaaattttcacccagctatacagaaccttattttcagttataaacaatggccacaatcagaaagtccatatgcacatggtagaccttatgagctctattatttgtgaaggtgatacagtgtctcaggagcttttggatacggttttagtaaatctggtacctgctcataagaatttaaacaagcaagcatatgatttggcaaaggctttactgaagaggacagctcaagctattgagccatatattaccaatttttttaatcaggttctgatgcttgggaaaacatctatcagcgatttgtcagagcatgtctttgacttaattttggagctctacaatattgatagtcatttgctgctctctgttttaccccagcttgaatttaaattaaagagcaatgataatgaggagcgcctacaagttgttaaactactggcaaaaatgtttggggcaaaggattcagaattggcttctcaaaacaagccactttggcagtgctacttgggcaggtttaatgatatccatgtaccaatccgcctggaatgtgtgaaatttgctagccattgtctcatgaaccatcctgatttagcaaaagacttaacagagtatcttaaagtgaggtcacatgaccctgaggaagctattagacatgatgttattgtgtcaatagttacagctgctaaaaaggatattcttctggtcaatgatcacttacttaattttgtgagagagagaacattagacaaacgatggagagtacgcaaagaagccatgatgggacttgcccaaatttataagaaatatgctttacagtcagcagctggaaaagatgctgcaaaacagatagcatggatcaaagacaaattgctacatatatattatcaaaatagtattgatgatcgactacttgttgaacggatctttgctcaatacatggttcctcacaatttagaaactacagaacggatgaaatgcttatattacttgtatgccacactggatttaaatgctgtgaaagcattgaatgaaatgtggaaatgtcaaaatctgctccgacatcaagtaaaggatttgcttgacttgattaagcaacccaaaacagatgccagtgtcaaggccatattttcaaaagtgatggttattacaagaaatttacctgatcctggtaaggctcaggatttcatgaagaaattcacacaggtgttagaagatgatgagaaaataagaaagcagttagaagtacttgttagtccaacatgctcctgcaagcaggctgaaggttgtgtgcgtgaaataactaagaagttgggcaaccccaaacagcctacaaatcctttcctggaaatgatcaagtttctcttggagaggatagcacctgtgcacatagataccgaatctatcagtgctcttattaaacaagtgaacaaatcaatagatggaacagcagatgatgaagatgagggtgttccaactgatcaagccatcagagcaggtcttgaactgcttaaggtactctcatttacacatcccatctcatttcattctgctgaaacatttgaatcattactggcttgtctgaaaatggatgatgaaaaagtagcagaagctgcactacaaattttcaaaaacacaggaagcaaaattgaagaggattttccacacatcagatcagccttgcttcctgttttacatcacaaatctaaaaaaggacccccccgtcaagccaaatatgccattcattgtatccatgcgatattttctagtaaagagacccagtttgcacagatatttgagcctctgcataagagcctagatccaagcaacctggaacatctcataacaccattggttactattggtcatattgctctccttgcacctgatcaatttgctgctcctttgaaatctttggtagctactttcattgtgaaagatcttctcatgaatgatcggcttccagggaaaaagacaactaaactttgggttccagatgaagaagtatctcctgagacaatggtcaaaattcaggctattaaaatgatggttcgatggctacttggaatgaaaaataatcacagtaaatcaggaacttctaccttaagattgctaacaacaatattgcatagtgatggagacttgacagaacaggggaaaattagtaaaccagatatgtcacgtctgagacttgctgctgggagtgctattgtgaagctggcacaagaaccctgttaccatgaaatcatcacattagaacaatatcagctatgtgcattagctatcaacgatgaatgctatcaagtaagacaagtgtttgcccagaaacttcacaaaggcctttcccgtttacggcttccacttgagtatatggcaatctgtgccctttgtgcaaaagatcctgtaaaggagagaagagctcatgctaggcaatgtttggtgaaaaatataaatgtaaggcgggagtatctgaagcagcatgcagctgttagtgaaaaattattgtctcttctaccagagtatgttgttccatatacaattcaccttttggcacatgacccagattatgtcaaagtacaggatattgaacaacttaaagatgttaaagaatgtctttggtttgttctggaaatattaatggctaaaaatgaaaataacagtcacgcttttatcagaaagatggtagaaaatattaaacaaacaaaagatgcccaaggaccagatgatgcaaaaatgaatgaaaaactgtacactgtgtgtgatgttgccatgaatatcatcatgtcaaagagtactacatacagtttggaatctcctaaagacccggtactaccagctcgtttcttcactcaacctgacaagaatttcagtaacaccaaaaattatctgcctcctgaaatgaaatcatttttcactcctggaaaacctaaaacaaccaatgttctaggagctgttaacaagccactttcatcagcaggcaagcaatctcagaccaaatcatcacgaatggaaactgtaagcaatgcaagcagcagctcaaatccaagctctcctggaagaataaaggggaggcttgatagttctgaaatggatcacagtgaaaatgaagattacacaatgtcttcacctttgccggggaaaaaaagtgacaagagagacgactctgatcttgtaaggtctgaattggagaagcctagaggcaggaaaaaaacgcccgtcacagaacaggaggagaaattaggtatggatgacttgactaagttggtacaggaacagaaacctaaaggcagtcagcgaagtcggaaaagaggccatacggcttcagaatctgatgaacagcagtggcctgaggaaaagaggctcaaagaagatatattagaaaatgaagatgaacagaatagtccgccaaaaaagggtaaaagaggccgaccaccaaaacctcttggtggaggtacaccaaaagaagagccaacaatgaaaacttctaaaaaaggaagcaaaaaaaaatctggacctccagcaccagaggaggaggaagaagaagaaagacaaagtggaaatacggaacagaagtccaaaagcaaacagcaccgagtgtcaaggagagcacagcagagagcagaatctcctgaatctagtgcaattgaatccacacagtccacaccacagaaaggacgaggaagaccatcaaaaacgccatcaccatcacaaccaaaaaaaaatgtccgtgtaggacgctccaaacaagcagctactaaggaaaatgattcaagtgaagaagtagatgtgtttcagggtagctctcctgtcgatgatattccacaggaagaaacagaggaggaggaagtttctacagtaaatgtacggcggcgaagtgctaaaagggaacggcgatgaacaaatgtaattaataactttctctgtgaaagctttggaaaaatcttttttttttttttttttttttggtcaagcttgaggctgaataaagcctttgatgcacaaaatgggactgctgaagagtggacagttggaccttactttggtgaccccatacgtttgtggtcacatgctttagccatacacatggtaacattgactatggagtcttgtgaaagtgtaatgtgcgatggctatgtagacataaagaagaaacttgtaaatatcttttttcttttttttaatgtttctgatttctgaagtgcttgtatagcttttatctgcggctttaaactgacagtacccgactgtttattggatctattgatttgaaaagaatttgttaggatagatcttaagcagtaatctgtcagtgtttgtatttgtattctctgcaattttactgtgaaaaaaaatttgttttcaacaattggtgtcattttcttgatgtcactatttgttggagagttaaatggtctcttccctttgtgtatcttacctagtgtttactcctgggcacccttaatcttcagaggtgctaaattgtctgccattacaccagaaggatgcctctgataggaggacaaccatgcaaattgtgaaatagtcctgaagttcttggattactttacacctcagtattgatttgtcccagaattttctggcctttcatggcaatgaaaattttaagaagaaagatttaaagtattttaattttaaagagtgtgttataaaataatgtactgaattctttatcccattttatcatcctttcagtttttattaatctactgtatcaataaaattctgtaatttgaatgag

SEQ ID NO: 324202 - DNA, 7389 bp, Homo sapiens
  misc_feature (498)..(498): n is a, c, g, or t
gctggctgcggaaggggagggggggggagaaggcgattggatgcggcggcggcggcggatcccggagagccccggagtgagcggagtagcgagtcggcaacccggaggggtagaaatatttctgtcatggctcattcaaagactaggaccaatgatggaaaaattacatatccgcctggggtcaaggaaatatcagataaaatatctaaagaggagatggtgagacgattaaagatggttgtgaaaacttttatggatatggaccaggactctgaagaagaaaaggagctttatttaaacctagctttacatcttgcttcagatttttttctcaagcatcctgataaagatgttcgcttactggtagcctgctgccttgctgatattttcaggatttatgctcctgaagctccttacacatcccctgataaactaaaggatatatttatgtttataacaagacagttgaaggggctagaggatacaaagagcccacanttcaataggtatttttatttacttgagaacattgcttgggtcaagtcatataacatatgctttgagttagaagatagcaatgaaattttcacccagctatacagaaccttattttcagttataaacaatggccacaatcagaaagtccatatgcacatggtagaccttatgagctctattatttgtgaaggtgatacagtgtctcaggagcttttggatacggttttagtaaatctggtacctgctcataagaatttaaacaagcaagcatatgatttggcaaaggctttactgaagaggacagctcaagctattgagccatatattaccaatttttttaatcaggttctgatgcttgggaaaacatctatcagcgatttgtcagagcatgtctttgacttaattttggagctctacaatattgatagtcatttgctgctctctgttttaccccagcttgaatttaaattaaagagcaatgataatgaggagcgcctacaagttgttaaactactggcaaaaatgtttggggcaaaggattcagaattggcttctccaatccgcctggaatgtgtgaaatttgctagccattgtctcatgaaccatcctgatttagcaaaagacttaacagagtatcttaaagtgaggtcacatgaccctgaggaagctattagacatgatgttattgtgtcaatagttacagctgctaaaaaggatattcttctggtcaatgatcacttacttaattttgtgagagagagaacattagacaaacgatggagagtacgcaaagaagccatgatgggacttgcccaaatttataagaaatatgctttacagtcagcagctggaaaagatgctgcaaaacagatagcatggatcaaagacaaattgctacatatatattatcaaaatagtattgatgatcgactacttgttgaacggatctttgctcaatacatggttcctcacaatttagaaactacagaacggatgaaatgcttatattacttgtatgccacactggatttaaatgctgtgaaagcattgaatgaaatgtggaaatgtcaaaatctgctccgacatcaagtaaaggatttgcttgacttgattaagcaacccaaaacagatgccagtgtcaaggccatattttcaaaagtgatggttattacaagaaatttacctgatcctggtaaggctcaggatttcatgaagaaattcacacaggtgttagaagatgatgagaaaataagaaagcagttagaagtacttgttagtccaacatgctcctgcaagcaggctgaaggttgtgtgcgtgaaataactaagaagttgggcaaccccaaacagcctacaaatcctttcctggaaatgatcaagtttctcttggagaggatagcacctgtgcacatagataccgaatctatcagtgctcttattaaacaagtgaacaaatcaatagatggaacagcagatgatgaagatgagggtgttccaactgatcaagccatcagagcaggtcttgaactgcttaaggtactctcatttacacatcccatctcatttcattctgctgaaacatttgaatcattactggcttgtctgaaaatggatgatgaaaaagtagcagaagctgcactacaaattttcaaaaacacaggaagcaaaattgaagaggattttccacacatcagatcagccttgcttcctgttttacatcacaaatctaaaaaaggacccccccgtcaagccaaatatgccattcattgtatccatgcgatattttctagtaaagagacccagtttgcacagatatttgagcctctgcataagagcctagatccaagcaacctggaacatctcataacaccattggttactattggtcatattgctctccttgcacctgatcaatttgctgctcctttgaaatctttggtagctactttcattgtgaaagatcttctcatgaatgatcggcttccagggaaaaagacaactaaactttgggttccagatgaagaagtatctcctgagacaatggtcaaaattcaggctattaaaatgatggttcgatggctacttggaatgaaaaataatcacagtaaatcaggaacttctaccttaagattgctaacaacaatattgcatagtgatggagacttgacagaacaggggaaaattagtaaaccagatatgtcacgtctgagacttgctgctgggagtgctattgtgaagctggcacaagaaccctgttaccatgaaatcatcacattagaacaatatcagctatgtgcattagctatcaacgatgaatgctatcaagtaagacaagtgtttgcccagaaacttcacaaaggcctttcccgtttacggcttccacttgagtatatggcaatctgtgccctttgtgcaaaagatcctgtaaaggagagaagagctcatgctaggcaatgtttggtgaaaaatataaatgtaaggcgggagtatctgaagcagcatgcagctgttagtgaaaaattattgtctcttctaccagagtatgttgttccatatacaattcaccttttggcacatgacccagattatgtcaaagtacaggatattgaacaacttaaagatgttaaagaatgtctttggtttgttctggaaatattaatggctaaaaatgaaaataacagtcacgcttttatcagaaagatggtagaaaatattaaacaaacaaaagatgcccaaggaccagatgatgcaaaaatgaatgaaaaactgtacactgtgtgtgatgttgccatgaatatcatcatgtcaaagagtactacatacagtttggaatctcctaaagacccggtactaccagctcgtttcttcactcaacctgacaagaatttcagtaacaccaaaaattatctgcctcctgaaatgaaatcatttttcactcctggaaaacctaaaacaaccaatgttctaggagctgttaacaagccactttcatcagcaggcaagcaatctcagaccaaatcatcacgaatggaaactgtaagcaatgcaagcagcagctcaaatccaagctctcctggaagaataaaggggaggcttgatagttctgaaatggatcacagtgaaaatgaagattacacaatgtcttcacctttgccggggaaaaaaagtgacaagagagacgactctgatcttgtaaggtctgaattggagaagcctagaggcaggaaaaaaacgcccgtcacagaacaggaggagaaattaggtatggatgacttgactaagttggtacaggaacagaaacctaaaggcagtcagcgaagtcggaaaagaggccatacggcttcagaatctgatgaacagcagtggcctgaggaaaagaggctcaaagaagatatattagaaaatgaagatgaacagaatagtccgccaaaaaagggtaaaagaggccgaccaccaaaacctcttggtggaggtacaccaaaagaagagccaacaatgaaaacttctaaaaaaggaagcaaaaaaaaatctggacctccagcaccagaggaggaggaagaagaagaaagacaaagtggaaatacggaacagaagtccaaaagcaaacagcaccgagtgtcaaggagagcacagcagagagcagaatctcctgaatctagtgcaattgaatccacacagtccacaccacagaaaggacgaggaagaccatcaaaaacgccatcaccatcacaaccaaaaaaaaatgtccgtgtaggacgctccaaacaagcagctactaaggaaaatgattcaagtgaagaagtagatgtgtttcagggtagctctcctgtcgatgatattccacaggaagaaacagaggaggaggaagtttctacagtaaatgtacggcggcgaagtgctaaaagggaacggcgatgaacaaatgtaattaataactttctctgtgaaagctttggaaaaatcttttttttttttttttttttttggtcaagcttgaggctgaataaagcctttgatgcacaaaatgggactgctgaagagtggacagttggaccttactttggtgaccccatacgtttgtggtcacatgctttagccatacacatggtaacattgactatggagtcttgtgaaagtgtaatgtgcgatggctatgtagacataaagaagaaacttgtaaatatcttttttcttttttttaatgtttctgatttctgaagtgcttgtatagcttttatctgcggctttaaactgacagtacccgactgtttattggatctattgatttgaaaagaatttgttaggatagatcttaagcagtaatctgtcagtgtttgtatttgtattctctgcaattttactgtgaaaaaaaatttgttttcaacaattggtgtcattttcttgatgtcactatttgttggagagttaaatggtctcttccctttgtgtatcttacctagtgtttactcctgggcacccttaatcttcagaggtgctaaattgtctgccattacaccagaaggatgcctctgataggaggacaaccatgcaaattgtgaaatagtcctgaagttcttggattactttacacctcagtattgatttgtcccagaattttctggcctttcatggcaatgaaaattttaagaagaaagatttaaagtattttaattttaaagagtgtgttataaaataatgtactgaattctttatcccattttatcatcctttcagtttttattaatctactgtatcaataaaattctgtaatttgaatgagtttttaatagtctagaatgttattgtgtatagatatttcctcttgaacgttatgttcagaaaatgcaaattacactataatataaaacctgatatatacacattagaaatattccagttctccgtaacagtgtaaagttaatcagaaagaaaaaattttattgatgcagtgtgtctttataaagctgttcttgaaagccaagtgtttgtattttatagtgagttgcatgtttttgaaaaaaagtgctgaaaatgggatgtgctgttttctgtaaattcatatttagccatagtatatgatagattgccccataacatagtttttcatcaagagtttattattgtactttattttggagccaaaaaattgattctggggggtgggggcagcgtagaagtggtatatccaagtatatcagctactgtagttgtcacagtcttgtgaactttgaatgaaattccactttgtccagattgggagaagtggaaatttatttggatttagagcaggtctttttttttcttcattgtaatctgcaaaatgtagaaataaattacttaaggcagtatcctttatacagttgtataaactgtattttgaaccaaaacatataggttactacttaatgcttacctaatttcattttagtattttaggtgctgttatgttttttcatggttaacaccagaggggaaaaaatcatattctaacttattaaatttatcacattgaatagtggaacattttcatatgatacaccattatgtttaagatatatttccaagattggttataatagatggggcatataataaagaagctactattttggaaaatgacattttactatttgccaatgtatattgcaattgatgtgattatttttcttttaaagatttgtttgtgtttatgaaacagccatttattttttaaaaagtgttttgaattgtgtcttaatctctccatattcaactattcttcatttacaacaatagtgacaccagtaattatgagaggctgtcatatatcaaagcagctcaggtgggatcaacatacattggttttgaaatgtttccttagctcggttctcccaaacacataatttctgtttcagcagtacaaaggcatgttttaaaatctataacataaagaataaggaatagctttgtatttttgtcattgattaaattgcaccagaaatgtttatggaaatattaagaacattttataaaacatacgaaaaagtgattgtgaaggatttttatttgcatgattatagttaagcaaatttcatttcacatttttgtaatgctgtacagcagttcacaaaaaaatgttcattgtagattttgttatgttcaatgccaatgagtctgtaattttacgacctgtctgttctttttttgggtggattacgatgtaaatttttcttttctttctttctttttttttttttttgtgtagaaaaataggtgcaataatgatcaaagttttgatgtcttgagtctccatcttaggggattatcttacgtttaagcttaacatttcatgtagtaagatttggagagccacatactttacagtaaaattaagtgtgtataaaacattaattgctaacaattgttagcaaactatttcagtgataatgttcattttgaaaatatgtactgtataacattaagaaaatatttaactccctgtaacaagttccattatgaaaatcttattcctcagtgaggttatcttgctgcactctgtagcaaatttgtttaatctacattataataaaatttcttgctgcagtgcaacaggaggctttttcagtgatcttcactgtatatgtaaattacaaatgtggctgtaaaacttattccaggtattaaaggttaaattgctttctatatcttcttataacttgtaagtctgatttttaagatttccttttgtccacttgtaagaatgtcaggaatttaagaatttgtttaaattaggcatatctctgccatcacatagtattatgtcaccataatgaacaattgctatttaaatagataaccaattttcagacacatttttggatttctgtgaagttgaataaacataaaagctaa

SEQ ID NO: 324203 - DNA, 5480 bp, Homo sapiens
  misc_feature (498)..(498): n is a, c, g, or t
gctggctgcggaaggggagggggggggagaaggcgattggatgcggcggcggcggcggatcccggagagccccggagtgagcggagtagcgagtcggcaacccggaggggtagaaatatttctgtcatggctcattcaaagactaggaccaatgatggaaaaattacatatccgcctggggtcaaggaaatatcagataaaatatctaaagaggagatggtgagacgattaaagatggttgtgaaaacttttatggatatggaccaggactctgaagaagaaaaggagctttatttaaacctagctttacatcttgcttcagatttttttctcaagcatcctgataaagatgttcgcttactggtagcctgctgccttgctgatattttcaggatttatgctcctgaagctccttacacatcccctgataaactaaaggatatatttatgtttataacaagacagttgaaggggctagaggatacaaagagcccacanttcaataggtatttttatttacttgagaacattgcttgggtcaagtcatataacatatgctttgagttagaagatagcaatgaaattttcacccagctatacagaaccttattttcagttataaacaatggccacaatcagaaagtccatatgcacatggtagaccttatgagctctattatttgtgaaggtgatacagtgtctcaggagcttttggatacggttttagtaaatctggtacctgctcataagaatttaaacaagcaagcatatgatttggcaaaggctttactgaagaggacagctcaagctattgagccatatattaccaatttttttaatcaggttctgatgcttgggaaaacatctatcagcgatttgtcagagcatgtctttgacttaattttggagctctacaatattgatagtcatttgctgctctctgttttaccccagcttgaatttaaattaaagagcaatgataatgaggagcgcctacaagttgttaaactactggcaaaaatgtttggggcaaaggattcagaattggcttctcaaaacaagccactttggcagtgctacttgggcaggtttaatgatatccatgtaccaatccgcctggaatgtgtgaaatttgctagccattgtctcatgaaccatcctgatttagcaaaagacttaacagagtatcttaaagtgaggtcacatgaccctgaggaagctattagacatgatgttattgtgtcaatagttacagctgctaaaaaggatattcttctggtcaatgatcacttacttaattttgtgagagagagaacattagacaaacgatggagagtacgcaaagaagccatgatgggacttgcccaaatttataagaaatatgctttacagtcagcagctggaaaagatgctgcaaaacagatagcatggatcaaagacaaattgctacatatatattatcaaaatagtattgatgatcgactacttgttgaacggatctttgctcaatacatggttcctcacaatttagaaactacagaacggatgaaatgcttatattacttgtatgccacactggatttaaatgctgtgaaagcattgaatgaaatgtggaaatgtcaaaatctgctccgacatcaagtaaaggatttgcttgacttgattaagcaacccaaaacagatgccagtgtcaaggccatattttcaaaagtgatggttattacaagaaatttacctgatcctggtaaggctcaggatttcatgaagaaattcacacaggtgttagaagatgatgagaaaataagaaagcagttagaagtacttgttagtccaacatgctcctgcaagcaggctgaaggttgtgtgcgtgaaataactaagaagttgggcaaccccaaacagcctacaaatcctttcctggaaatgatcaagtttctcttggagaggatagcacctgtgcacatagataccgaatctatcagtgctcttattaaacaagtgaacaaatcaatagatggaacagcagatgatgaagatgagggtgttccaactgatcaagccatcagagcaggtcttgaactgcttaaggtactctcatttacacatcccatctcatttcattctgctgaaacatttgaatcattactggcttgtctgaaaatggatgatgaaaaagtagcagaagctgcactacaaattttcaaaaacacaggaagcaaaattgaagaggattttccacacatcagatcagccttgcttcctgttttacatcacaaatctaaaaaaggacccccccgtcaagccaaatatgccattcattgtatccatgcgatattttctagtaaagagacccagtttgcacagatatttgagcctctgcataagagcctagatccaagcaacctggaacatctcataacaccattggttactattggtcatattgctctccttgcacctgatcaatttgctgctcctttgaaatctttggtagctactttcattgtgaaagatcttctcatgaatgatcggcttccagggaaaaagacaactaaactttgggttccagatgaagaagtatctcctgagacaatggtcaaaattcaggctattaaaatgatggttcgatggctacttggaatgaaaaataatcacagtaaatcaggaacttctaccttaagattgctaacaacaatattgcatagtgatggagacttgacagaacaggggaaaattagtaaaccagatatgtcacgtctgagacttgctgctgggagtgctattgtgaagctggcacaagaaccctgttaccatgaaatcatcacattagaacaatatcagctatgtgcattagctatcaacgatgaatgctatcaagtaagacaagtgtttgcccagaaacttcacaaaggcctttcccgtttacggcttccacttgagtatatggcaatctgtgccctttgtgcaaaagatcctgtaaaggagagaagagctcatgctaggcaatgtttggtgaaaaatataaatgtaaggcgggagtatctgaagcagcatgcagctgttagtgaaaaattattgtctcttctaccagagtatgttgttccatatacaattcaccttttggcacatgacccagattatgtcaaagtacaggatattgaacaacttaaagatgttaaagaatgtctttggtttgttctggaaatattaatggctaaaaatgaaaataacagtcacgcttttatcagaaagatggtagaaaatattaaacaaacaaaagatgcccaaggaccagatgatgcaaaaatgaatgaaaaactgtacactgtgtgtgatgttgccatgaatatcatcatgtcaaagagtactacatacagtttggaatctcctaaagacccggtactaccagctcgtttcttcactcaacctgacaagaatttcagtaacaccaaaaattatctgcctcctgaaatgaaatcatttttcactcctggaaaacctaaaacaaccaatgttctaggagctgttaacaagccactttcatcagcaggcaagcaatctcagaccaaatcatcacgaatggaaactgtaagcaatgcaagcagcagctcaaatccaagctctcctggaagaataaaggggaggcttgatagttctgaaatggatcacagtgaaaatgaagattacacaatgtcttcacctttgccggggaaaaaaagtgacaagagagacgactctgatcttgtaaggtctgaattggagaagcctagaggcaggaaaaaaacgcccgtcacagaacaggaggagaaattaggtatggatgacttgactaagttggtacaggaacagaaacctaaaggcagtcagcgaagtcggaaaagaggccatacggcttcagaatctgatgaacagcagtggcctgaggaaaagaggctcaaagaagatatattagaaaatgaagatgaacagaatagtccgccaaaaaagggtaaaagaggccgaccaccaaaacctcttggtggaggtacaccaaaagaagagccaacaatgaaaacttctaaaaaaggaagcaaaaaaaaatctggacctccagcaccagaggaggaggaagaagaagaaagacaaagtggaaatacggaacagaagtccaaaagcaaacagcaccgagtgtcaaggagagcacagcagagagcagaatctcctgaatctagtgcaattgaatccacacagtccacaccacagaaaggacgaggaagaccatcaaaaacgccatcaccatcacaaccaaaaaaaaatgtgtaagttgtaaatattacatttcaaaccaatttcaaattattttgcaaaagttcctaaatttgtaaacatacatattgctgtatttaaattccatatatttagccccattacactaggtaagataaaatttttataaacttaccttagtgattgatatctcaataaactatcttgtacatttttacaggtgcaggcaaatctttataaatgaataccaaatagtatattatttcctatacagactttatgatatctaaagaaatcataaggtatttttaaataatcaccacacattgaccaggttgccttgtcattccacactacaatttttttttaaatgtttctcattagcaccttttcctttaaaaaaaggaaaataggtcttatgcttctgcttttattctttgaacttgtagtaggaaagtaacaggtaccattttttaaaaattatatccatagaaattaacacatgttggtctcaagtgtttgatatcttgattttgtttgttttctaacccagttcatttatctacatcaacatgtatatagttttagatgttcacacaaacacatttataagagaggtacagtaagaatctgtacctcaaattttagtgtcaccagagtatcactgctgtaatttgcagatctgacagtgttttttctccttagttatgtgagtggaaatagagtagcatgtcttctattagtcagaaatttaacactttttctgagagtaatcccacccatacataattacatcatggctcgacttttcagagttgccaatgtactgtcattaaatactcaattatcttagagattttcctattcctgtgtattccacaggaagaggaaaagttgcctgggtgtctagccagtacttcatgccatcttccatgtaatttttctatcaggttaaaagtaaaggtaagtacatttttgtggcagctttataaatgtgtttggattcaaccaaatcactatttctaaacaaaggattcttaaggaatcctttatttaataaaatacacatgaatgatgtaacaaggaaataacaaacctcataattttagtttgtttatatttggacatcataaaattcagggtttaaatgattattgtgctctcctaaaattacacaagtcctatgaatgttctaaaccaaacaagtatttctt

SEQ ID NO: 324204 - DNA, 3246 bp, Homo sapiens
taaaataatttttttctttcactgttctggggaagtctgtgagcctgtaagggatcaaatgttatagaggtctaaatatgtgatgccagggcagaaagtaaggataaaaagtttcagggaaaggaaagcaaagaaaatcaggaacaaatgagaataaagattagttaaaaatgattactgcatatcttatgcacatatacccattttaattaagcatctggtgactttccttttaaggtacggcggcgaagtgctaaaagggaacggcgatgaacaaatgtaattaataactttctctgtgaaagctttggaaaaatcttttttttttttttttttttttggtcaagcttgaggctgaataaagcctttgatgcacaaaatgggactgctgaagagtggacagttggaccttactttggtgaccccatacgtttgtggtcacatgctttagccatacacatggtaacattgactatggagtcttgtgaaagtgtaatgtgcgatggctatgtagacataaagaagaaacttgtaaatatcttttttcttttttttaatgtttctgatttctgaagtgcttgtatagcttttatctgcggctttaaactgacagtacccgactgtttattggatctattgatttgaaaagaatttgttaggatagatcttaagcagtaatctgtcagtgtttgtatttgtattctctgcaattttactgtgaaaaaaaatttgttttcaacaattggtgtcattttcttgatgtcactatttgttggagagttaaatggtctcttccctttgtgtatcttacctagtgtttactcctgggcacccttaatcttcagaggtgctaaattgtctgccattacaccagaaggatgcctctgataggaggacaaccatgcaaattgtgaaatagtcctgaagttcttggattactttacacctcagtattgatttgtcccagaattttctggcctttcatggcaatgaaaattttaagaagaaagatttaaagtattttaattttaaagagtgtgttataaaataatgtactgaattctttatcccattttatcatcctttcagtttttattaatctactgtatcaataaaattctgtaatttgaatgagtttttaatagtctagaatgttattgtgtatagatatttcctcttgaacgttatgttcagaaaatgcaaattacactataatataaaacctgatatatacacattagaaatattccagttctccgtaacagtgtaaagttaatcagaaagaaaaaattttattgatgcagtgtgtctttataaagctgttcttgaaagccaagtgtttgtattttatagtgagttgcatgtttttgaaaaaaagtgctgaaaatgggatgtgctgttttctgtaaattcatatttagccatagtatatgatagattgccccataacatagtttttcatcaagagtttattattgtactttattttggagccaaaaaattgattctggggggtgggggcagcgtagaagtggtatatccaagtatatcagctactgtagttgtcacagtcttgtgaactttgaatgaaattccactttgtccagattgggagaagtggaaatttatttggatttagagcaggtctttttttttcttcattgtaatctgcaaaatgtagaaataaattacttaaggcagtatcctttatacagttgtataaactgtattttgaaccaaaacatataggttactacttaatgcttacctaatttcattttagtattttaggtgctgttatgttttttcatggttaacaccagaggggaaaaaatcatattctaacttattaaatttatcacattgaatagtggaacattttcatatgatacaccattatgtttaagatatatttccaagattggttataatagatggggcatataataaagaagctactattttggaaaatgacattttactatttgccaatgtatattgcaattgatgtgattatttttcttttaaagatttgtttgtgtttatgaaacagccatttattttttaaaaagtgttttgaattgtgtcttaatctctccatattcaactattcttcatttacaacaatagtgacaccagtaattatgagaggctgtcatatatcaaagcagctcaggtgggatcaacatacattggttttgaaatgtttccttagctcggttctcccaaacacataatttctgtttcagcagtacaaaggcatgttttaaaatctataacataaagaataaggaatagctttgtatttttgtcattgattaaattgcaccagaaatgtttatggaaatattaagaacattttataaaacatacgaaaaagtgattgtgaaggatttttatttgcatgattatagttaagcaaatttcatttcacatttttgtaatgctgtacagcagttcacaaaaaaatgttcattgtagattttgttatgttcaatgccaatgagtctgtaattttacgacctgtctgttctttttttgggtggattacgatgtaaatttttcttttctttctttctttttttttttttttgtgtagaaaaataggtgcaataatgatcaaagttttgatgtcttgagtctccatcttaggggattatcttacgtttaagcttaacatttcatgtagtaagatttggagagccacatactttacagtaaaattaagtgtgtataaaacattaattgctaacaattgttagcaaactatttcagtgataatgttcattttgaaaatatgtactgtataacattaagaaaatatttaactccctgtaacaagttccattatgaaaatcttattcctcagtgaggttatcttgctgcactctgtagcaaatttgtttaatctacattataataaaatttcttgctgcagtgcaacaggaggctttttcagtgatcttcactgtatatgtaaattacaaatgtggctgtaaaacttattccaggtattaaaggttaaattgctttctatatcttcttataacttgtaagtctgatttttaagatttccttttgtccacttgtaagaatgtcaggaatttaagaatttgtttaaattaggcatatctctgccatcacatagtattatgtcaccataatgaacaattgctatttaaatagataaccaattttcagacacatttttggatttctgtgaagttgaataaacataaaagctaa

SEQ ID NO: 324205 - DNA, 7443 bp, Homo sapiens
  misc_feature (498)..(498): n is a, c, g, or t
gctggctgcggaaggggagggggggggagaaggcgattggatgcggcggcggcggcggatcccggagagccccggagtgagcggagtagcgagtcggcaacccggaggggtagaaatatttctgtcatggctcattcaaagactaggaccaatgatggaaaaattacatatccgcctggggtcaaggaaatatcagataaaatatctaaagaggagatggtgagacgattaaagatggttgtgaaaacttttatggatatggaccaggactctgaagaagaaaaggagctttatttaaacctagctttacatcttgcttcagatttttttctcaagcatcctgataaagatgttcgcttactggtagcctgctgccttgctgatattttcaggatttatgctcctgaagctccttacacatcccctgataaactaaaggatatatttatgtttataacaagacagttgaaggggctagaggatacaaagagcccacanttcaataggtatttttatttacttgagaacattgcttgggtcaagtcatataacatatgctttgagttagaagatagcaatgaaattttcacccagctatacagaaccttattttcagttataaacaatggccacaatcagaaagtccatatgcacatggtagaccttatgagctctattatttgtgaaggtgatacagtgtctcaggagcttttggatacggttttagtaaatctggtacctgctcataagaatttaaacaagcaagcatatgatttggcaaaggctttactgaagaggacagctcaagctattgagccatatattaccaatttttttaatcaggttctgatgcttgggaaaacatctatcagcgatttgtcagagcatgtctttgacttaattttggagctctacaatattgatagtcatttgctgctctctgttttaccccagcttgaatttaaattaaagagcaatgataatgaggagcgcctacaagttgttaaactactggcaaaaatgtttggggcaaaggattcagaattggcttctcaaaacaagccactttggcagtgctacttgggcaggtttaatgatatccatgtaccaatccgcctggaatgtgtgaaatttgctagccattgtctcatgaaccatcctgatttagcaaaagacttaacagagtatcttaaagtgaggtcacatgaccctgaggaagctattagacatgatgttattgtgtcaatagttacagctgctaaaaaggatattcttctggtcaatgatcacttacttaattttgtgagagagagaacattagacaaacgatggagagtacgcaaagaagccatgatgggacttgcccaaatttataagaaatatgctttacagtcagcagctggaaaagatgctgcaaaacagatagcatggatcaaagacaaattgctacatatatattatcaaaatagtattgatgatcgactacttgttgaacggatctttgctcaatacatggttcctcacaatttagaaactacagaacggatgaaatgcttatattacttgtatgccacactggatttaaatgctgtgaaagcattgaatgaaatgtggaaatgtcaaaatctgctccgacatcaagtaaaggatttgcttgacttgattaagcaacccaaaacagatgccagtgtcaaggccatattttcaaaagtgatggttattacaagaaatttacctgatcctggtaaggctcaggatttcatgaagaaattcacacaggtgttagaagatgatgagaaaataagaaagcagttagaagtacttgttagtccaacatgctcctgcaagcaggctgaaggttgtgtgcgtgaaataactaagaagttgggcaaccccaaacagcctacaaatcctttcctggaaatgatcaagtttctcttggagaggatagcacctgtgcacatagataccgaatctatcagtgctcttattaaacaagtgaacaaatcaatagatggaacagcagatgatgaagatgagggtgttccaactgatcaagccatcagagcaggtcttgaactgcttaaggtactctcatttacacatcccatctcatttcattctgctgaaacatttgaatcattactggcttgtctgaaaatggatgatgaaaaagtagcagaagctgcactacaaattttcaaaaacacaggaagcaaaattgaagaggattttccacacatcagatcagccttgcttcctgttttacatcacaaatctaaaaaaggacccccccgtcaagccaaatatgccattcattgtatccatgcgatattttctagtaaagagacccagtttgcacagatatttgagcctctgcataagagcctagatccaagcaacctggaacatctcataacaccattggttactattggtcatattgctctccttgcacctgatcaatttgctgctcctttgaaatctttggtagctactttcattgtgaaagatcttctcatgaatgatcggcttccagggaaaaagacaactaaactttgggttccagatgaagaagtatctcctgagacaatggtcaaaattcaggctattaaaatgatggttcgatggctacttggaatgaaaaataatcacagtaaatcaggaacttctaccttaagattgctaacaacaatattgcatagtgatggagacttgacagaacaggggaaaattagtaaaccagatatgtcacgtctgagacttgctgctgggagtgctattgtgaagctggcacaagaaccctgttaccatgaaatcatcacattagaacaatatcagctatgtgcattagctatcaacgatgaatgctatcaagtaagacaagtgtttgcccagaaacttcacaaaggcctttcccgtttacggcttccacttgagtatatggcaatctgtgccctttgtgcaaaagatcctgtaaaggagagaagagctcatgctaggcaatgtttggtgaaaaatataaatgtaaggcgggagtatctgaagcagcatgcagctgttagtgaaaaattattgtctcttctaccagagtatgttgttccatatacaattcaccttttggcacatgacccagattatgtcaaagtacaggatattgaacaacttaaagatgttaaagaatgtctttggtttgttctggaaatattaatggctaaaaatgaaaataacagtcacgcttttatcagaaagatggtagaaaatattaaacaaacaaaagatgcccaaggaccagatgatgcaaaaatgaatgaaaaactgtacactgtgtgtgatgttgccatgaatatcatcatgtcaaagagtactacatacagtttggaatctcctaaagacccggtactaccagctcgtttcttcactcaacctgacaagaatttcagtaacaccaaaaattatctgcctcctgaaatgaaatcatttttcactcctggaaaacctaaaacaaccaatgttctaggagctgttaacaagccactttcatcagcaggcaagcaatctcagaccaaatcatcacgaatggaaactgtaagcaatgcaagcagcagctcaaatccaagctctcctggaagaataaaggggaggcttgatagttctgaaatggatcacagtgaaaatgaagattacacaatgtcttcacctttgccggggaaaaaaagtgacaagagagacgactctgatcttgtaaggtctgaattggagaagcctagaggcaggaaaaaaacgcccgtcacagaacaggaggagaaattaggtatggatgacttgactaagttggtacaggaacagaaacctaaaggcagtcagcgaagtcggaaaagaggccatacggcttcagaatctgatgaacagcagtggcctgaggaaaagaggctcaaagaagatatattagaaaatgaagatgaacagaatagtccgccaaaaaagggtaaaagaggccgaccaccaaaacctcttggtggaggtacaccaaaagaagagccaacaatgaaaacttctaaaaaaggaagcaaaaaaaaatctggacctccagcaccagaggaggaggaagaagaagaaagacaaagtggaaatacggaacagaagtccaaaagcaaacagcaccgagtgtcaaggagagcacagcagagagcagaatctcctgaatctagtgcaattgaatccacacagtccacaccacagaaaggacgaggaagaccatcaaaaacgccatcaccatcacaaccaaaaaaaaatgtccgtgtaggacgctccaaacaagcagctactaaggaaaatgattcaagtgaagaagtagatgtgtttcagggtagctctcctgtcgatgatattccacaggaagaaacagaggaggaggaagtttctacagtaaatgtacggcggcgaagtgctaaaagggaacggcgatgaacaaatgtaattaataactttctctgtgaaagctttggaaaaatcttttttttttttttttttttttggtcaagcttgaggctgaataaagcctttgatgcacaaaatgggactgctgaagagtggacagttggaccttactttggtgaccccatacgtttgtggtcacatgctttagccatacacatggtaacattgactatggagtcttgtgaaagtgtaatgtgcgatggctatgtagacataaagaagaaacttgtaaatatcttttttcttttttttaatgtttctgatttctgaagtgcttgtatagcttttatctgcggctttaaactgacagtacccgactgtttattggatctattgatttgaaaagaatttgttaggatagatcttaagcagtaatctgtcagtgtttgtatttgtattctctgcaattttactgtgaaaaaaaatttgttttcaacaattggtgtcattttcttgatgtcactatttgttggagagttaaatggtctcttccctttgtgtatcttacctagtgtttactcctgggcacccttaatcttcagaggtgctaaattgtctgccattacaccagaaggatgcctctgataggaggacaaccatgcaaattgtgaaatagtcctgaagttcttggattactttacacctcagtattgatttgtcccagaattttctggcctttcatggcaatgaaaattttaagaagaaagatttaaagtattttaattttaaagagtgtgttataaaataatgtactgaattctttatcccattttatcatcctttcagtttttattaatctactgtatcaataaaattctgtaatttgaatgagtttttaatagtctagaatgttattgtgtatagatatttcctcttgaacgttatgttcagaaaatgcaaattacactataatataaaacctgatatatacacattagaaatattccagttctccgtaacagtgtaaagttaatcagaaagaaaaaattttattgatgcagtgtgtctttataaagctgttcttgaaagccaagtgtttgtattttatagtgagttgcatgtttttgaaaaaaagtgctgaaaatgggatgtgctgttttctgtaaattcatatttagccatagtatatgatagattgccccataacatagtttttcatcaagagtttattattgtactttattttggagccaaaaaattgattctggggggtgggggcagcgtagaagtggtatatccaagtatatcagctactgtagttgtcacagtcttgtgaactttgaatgaaattccactttgtccagattgggagaagtggaaatttatttggatttagagcaggtctttttttttcttcattgtaatctgcaaaatgtagaaataaattacttaaggcagtatcctttatacagttgtataaactgtattttgaaccaaaacatataggttactacttaatgcttacctaatttcattttagtattttaggtgctgttatgttttttcatggttaacaccagaggggaaaaaatcatattctaacttattaaatttatcacattgaatagtggaacattttcatatgatacaccattatgtttaagatatatttccaagattggttataatagatggggcatataataaagaagctactattttggaaaatgacattttactatttgccaatgtatattgcaattgatgtgattatttttcttttaaagatttgtttgtgtttatgaaacagccatttattttttaaaaagtgttttgaattgtgtcttaatctctccatattcaactattcttcatttacaacaatagtgacaccagtaattatgagaggctgtcatatatcaaagcagctcaggtgggatcaacatacattggttttgaaatgtttccttagctcggttctcccaaacacataatttctgtttcagcagtacaaaggcatgttttaaaatctataacataaagaataaggaatagctttgtatttttgtcattgattaaattgcaccagaaatgtttatggaaatattaagaacattttataaaacatacgaaaaagtgattgtgaaggatttttatttgcatgattatagttaagcaaatttcatttcacatttttgtaatgctgtacagcagttcacaaaaaaatgttcattgtagattttgttatgttcaatgccaatgagtctgtaattttacgacctgtctgttctttttttgggtggattacgatgtaaatttttcttttctttctttctttttttttttttttgtgtagaaaaataggtgcaataatgatcaaagttttgatgtcttgagtctccatcttaggggattatcttacgtttaagcttaacatttcatgtagtaagatttggagagccacatactttacagtaaaattaagtgtgtataaaacattaattgctaacaattgttagcaaactatttcagtgataatgttcattttgaaaatatgtactgtataacattaagaaaatatttaactccctgtaacaagttccattatgaaaatcttattcctcagtgaggttatcttgctgcactctgtagcaaatttgtttaatctacattataataaaatttcttgctgcagtgcaacaggaggctttttcagtgatcttcactgtatatgtaaattacaaatgtggctgtaaaacttattccaggtattaaaggttaaattgctttctatatcttcttataacttgtaagtctgatttttaagatttccttttgtccacttgtaagaatgtcaggaatttaagaatttgtttaaattaggcatatctctgccatcacatagtattatgtcaccataatgaacaattgctatttaaatagataaccaattttcagacacatttttggatttctgtgaagttgaataaacataaaagctaa

SEQ ID NO: 324206 - DNA, 2060 bp, Homo sapiens
ttttaagacactctagctgaaaagtaagagtgcaaatgtacccttttatcccagataagtttttaaaattaaaaactataataaaagcaaataaatacagttctggtgtatttaagagctgtatattttaggtacatatctaggacaacattagataacagatttttttgtttcattcctcaaaatatgtatactcacaatttcataaccataaattgtgatttttttttcccctagtctgaattggagaagcctagaggcaggaaaaaaacgcccgtcacagaacaggaggagaaattaggtatggatgacttgactaagttggtacaggaacagaaacctaaaggcagtcagcgaagtcggaaaagaggccatacggcttcagaatctgatgaacagcagtggcctgaggaaaagaggctcaaagaagatatattagaaaatgaagatgaacagaatagtccgccaaaaaagggtaaaagaggccgaccaccaaaacctcttggtggaggtacaccaaaagaagagccaacaatgaaaacttctaaaaaaggaagcaaaaaaaaatctggacctccagcaccagaggaggaggaagaagaagaaagacaaagtggaaatacggaacagaagtccaaaagcaaacagcaccgagtgtcaaggagagcacagcagaggtaagcatgtgtaactctaaactgcatctgtttcgttactatattataaatcataatttgatgctatccacatttgggtcttccccaaagcagagcagaatctcctgaatctagtgcaattgaatccacacagtccacaccacagaaaggacgaggaagaccatcaaaaacgccatcaccatcacaaccaaaaaaaaatgtgtaagttgtaaatattacatttcaaaccaatttcaaattattttgcaaaagttcctaaatttgtaaacatacatattgctgtatttaaattccatatatttagccccattacactaggtaagataaaatttttataaacttaccttagtgattgatatctcaataaactatcttgtacatttttacaggtgcaggcaaatctttataaatgaataccaaatagtatattatttcctatacagactttatgatatctaaagaaatcataaggtatttttaaataatcaccacacattgaccaggttgccttgtcattccacactacaatttttttttaaatgtttctcattagcaccttttcctttaaaaaaaggaaaataggtcttatgcttctgcttttattctttgaacttgtagtaggaaagtaacaggtaccattttttaaaaattatatccatagaaattaacacatgttggtctcaagtgtttgatatcttgattttgtttgttttctaacccagttcatttatctacatcaacatgtatatagttttagatgttcacacaaacacatttataagagaggtacagtaagaatctgtacctcaaattttagtgtcaccagagtatcactgctgtaatttgcagatctgacagtgttttttctccttagttatgtgagtggaaatagagtagcatgtcttctattagtcagaaatttaacactttttctgagagtaatcccacccatacataattacatcatggctcgacttttcagagttgccaatgtactgtcattaaatactcaattatcttagagattttcctattcctgtgtattccacaggaagaggaaaagttgcctgggtgtctagccagtacttcatgccatcttccatgtaatttttctatcaggttaaaagtaaaggtaagtacatttttgtggcagctttataaatgtgtttggattcaaccaaatcactatttctaaacaaaggattcttaaggaatcctttatttaataaaatacacatgaatgatgtaacaaggaaataacaaacctcataattttagtttgtttatatttggacatcataaaattcagggtttaaatgattattgtgctctcctaaaattacacaagtcctatgaatgttctaaaccaaacaagtatttctt

SEQ ID NO: 324207 - DNA, 686 bp, Homo sapiens
gctggctgcggaaggggagggggggggagaaggcgattggatgcggcggcggcggcggatcccggagagccccggagtgagcggagtagcgagtcggcaacccggaggggtagaaatatttctgtcatggctcattcaaagactaggaccaatgatggaaaaattacatatccgcctggggtcaaggaaatatcagataaaatatctaaagaggagatggtgagacgattaaaggtgagtaaaattctattcttttttacatctgtgtagggcagaggtcccctgtggaaatcacatggggctataatgtatcttgttggggtaacttaaaaaagcaaagcaaagcagcaaatggcatagaaaagatctaagggagtagagtatataaggtacagtggggattatttggctatgattaaagggacagcaattaggtgaagcttagattttctaggatctcctatacttgggtataaagaacaagtctacaatactcatattccttattgtctatacaaagttgtctcctttcttctatatagtttctaaagacaaccactttaagggagttttaggtctttatactgagtaattaggctgtgtactactttcttgtaagttattttcaaagtaggtcaaagggcttcactttaagcttcttcctctgcttctgacatgtagtaatg

SEQ ID NO: 324208 - DNA, 5818 bp, Homo sapiens
tatccagtaatttcaatacagtgtattgactagtctaccttttccctgattacttgaaatattacctttttcatatgctaaatccttaattcagtctttttttctgggcttgttcaattcttacagtttgtttattccagcgtcagtactacatggttttaattattgttggttcttaatattttaacataatgatttgtttaaatgtacttttgtaatactgaaataatctgtattacagcgtgaaataactaagaagttgggcaaccccaaacagcctacaaatcctttcctggaaatgatcaagtttctcttggagaggatagcacctgtgcacatagataccgaatctatcagtgctcttattaaacaagtgaacaaatcaatagatggaacagcagatgatgaagatgagggtgttccaactgatcaagccatcagagcaggtcttgaactgcttaaggtactctcatttacacatcccatctcatttcattctgctgaaacatttgaatcattactggcttgtctgaaaatggatgatgaaaaagtagcagaagctgcactacaaattttcaaaaacacaggaagcaaaattgaagaggattttccacacatcagatcagccttgcttcctgttttacatcacaaatctaaaaaaggacccccccgtcaagccaaatatgccattcattgtatccatgcgatattttctagtaaagagacccagtttgcacagatatttgagcctctgcataagagcctagatccaagcaacctggaacatctcataacaccattggttactattggtcatattgctctccttgcacctgatcaatttgctgctcctttgaaatctttggtagctactttcattgtgaaagatcttctcatgaatgatcggcttccagggaaaaagacaactaaactttgggttccagatgaagaagtatctcctgagacaatggtcaaaattcaggctattaaaatgatggttcgatggctacttggaatgaaaaataatcacagtaaatcaggaacttctaccttaagattgctaacaacaatattgcatagtgatggagacttgacagaacaggggaaaattagtaaaccagatatgtcacgtctgagacttgctgctgggagtgctattgtgaagctggcacaagaaccctgttaccatgaaatcatcacattagaacaatatcagctatgtgcattagctatcaacgatgaatgctatcaagtaagacaagtgtttgcccagaaacttcacaaaggcctttcccgtttacggcttccacttgagtatatggcaatctgtgccctttgtgcaaaagatcctgtaaaggagagaagagctcatgctaggcaatgtttggtgaaaaatataaatgtaaggcgggagtatctgaagcagcatgcagctgttagtgaaaaattattgtctcttctaccagagtatgttgttccatatacaattcaccttttggcacatgacccagattatgtcaaagtacaggatattgaacaacttaaagatgttaaagaatgtctttggtttgttctggaaatattaatggctaaaaatgaaaataacagtcacgcttttatcagaaagatggtagaaaatattaaacaaacaaaagatgcccaaggaccagatgatgcaaaaatgaatgaaaaactgtacactgtgtgtgatgttgccatgaatatcatcatgtcaaagagtactacatacagtttggaatctcctaaagacccggtactaccagctcgtttcttcactcaacctgacaagaatttcagtaacaccaaaaattatctgcctcctgaaatgaaatcatttttcactcctggaaaacctaaaacaaccaatgttctaggagctgttaacaagccactttcatcagcaggcaagcaatctcagaccaaatcatcacgaatggaaactgtaagcaatgcaagcagcagctcaaatccaagctctcctggaagaataaaggggaggcttgatagttctgaaatggatcacagtgaaaatgaagattacacaatgtcttcacctttgccggggaaaaaaagtgacaagagagacgactctgatcttgtaaggtctgaattggagaagcctagaggcaggaaaaaaacgcccgtcacagaacaggaggagaaattaggtatggatgacttgactaagttggtacaggaacagaaacctaaaggcagtcagcgaagtcggaaaagaggccatacggcttcagaatctgatgaacagcagtggcctgaggaaaagaggctcaaagaagatatattagaaaatgaagatgaacagaatagtccgccaaaaaagggtaaaagaggccgaccaccaaaacctcttggtggaggtacaccaaaagaagagccaacaatgaaaacttctaaaaaaggaagcaaaaaaaaatctggacctccagcaccagaggaggaggaagaagaagaaagacaaagtggaaatacggaacagaagtccaaaagcaaacagcaccgagtgtcaaggagagcacagcagagagcagaatctcctgaatctagtgcaattgaatccacacagtccacaccacagaaaggacgaggaagaccatcaaaaacgccatcaccatcacaaccaaaaaaaaatgtccgtgtaggacgctccaaacaagcagctactaaggaaaatgattcaagtgaagaagtagatgtgtttcagggtagctctcctgtcgatgatattccacaggaagaaacagaggaggaggaagtttctacagtaaatgtacggcggcgaagtgctaaaagggaacggcgatgaacaaatgtaattaataactttctctgtgaaagctttggaaaaatcttttttttttttttttttttttggtcaagcttgaggctgaataaagcctttgatgcacaaaatgggactgctgaagagtggacagttggaccttactttggtgaccccatacgtttgtggtcacatgctttagccatacacatggtaacattgactatggagtcttgtgaaagtgtaatgtgcgatggctatgtagacataaagaagaaacttgtaaatatcttttttcttttttttaatgtttctgatttctgaagtgcttgtatagcttttatctgcggctttaaactgacagtacccgactgtttattggatctattgatttgaaaagaatttgttaggatagatcttaagcagtaatctgtcagtgtttgtatttgtattctctgcaattttactgtgaaaaaaaatttgttttcaacaattggtgtcattttcttgatgtcactatttgttggagagttaaatggtctcttccctttgtgtatcttacctagtgtttactcctgggcacccttaatcttcagaggtgctaaattgtctgccattacaccagaaggatgcctctgataggaggacaaccatgcaaattgtgaaatagtcctgaagttcttggattactttacacctcagtattgatttgtcccagaattttctggcctttcatggcaatgaaaattttaagaagaaagatttaaagtattttaattttaaagagtgtgttataaaataatgtactgaattctttatcccattttatcatcctttcagtttttattaatctactgtatcaataaaattctgtaatttgaatgagtttttaatagtctagaatgttattgtgtatagatatttcctcttgaacgttatgttcagaaaatgcaaattacactataatataaaacctgatatatacacattagaaatattccagttctccgtaacagtgtaaagttaatcagaaagaaaaaattttattgatgcagtgtgtctttataaagctgttcttgaaagccaagtgtttgtattttatagtgagttgcatgtttttgaaaaaaagtgctgaaaatgggatgtgctgttttctgtaaattcatatttagccatagtatatgatagattgccccataacatagtttttcatcaagagtttattattgtactttattttggagccaaaaaattgattctggggggtgggggcagcgtagaagtggtatatccaagtatatcagctactgtagttgtcacagtcttgtgaactttgaatgaaattccactttgtccagattgggagaagtggaaatttatttggatttagagcaggtctttttttttcttcattgtaatctgcaaaatgtagaaataaattacttaaggcagtatcctttatacagttgtataaactgtattttgaaccaaaacatataggttactacttaatgcttacctaatttcattttagtattttaggtgctgttatgttttttcatggttaacaccagaggggaaaaaatcatattctaacttattaaatttatcacattgaatagtggaacattttcatatgatacaccattatgtttaagatatatttccaagattggttataatagatggggcatataataaagaagctactattttggaaaatgacattttactatttgccaatgtatattgcaattgatgtgattatttttcttttaaagatttgtttgtgtttatgaaacagccatttattttttaaaaagtgttttgaattgtgtcttaatctctccatattcaactattcttcatttacaacaatagtgacaccagtaattatgagaggctgtcatatatcaaagcagctcaggtgggatcaacatacattggttttgaaatgtttccttagctcggttctcccaaacacataatttctgtttcagcagtacaaaggcatgttttaaaatctataacataaagaataaggaatagctttgtatttttgtcattgattaaattgcaccagaaatgtttatggaaatattaagaacattttataaaacatacgaaaaagtgattgtgaaggatttttatttgcatgattatagttaagcaaatttcatttcacatttttgtaatgctgtacagcagttcacaaaaaaatgttcattgtagattttgttatgttcaatgccaatgagtctgtaattttacgacctgtctgttctttttttgggtggattacgatgtaaatttttcttttctttctttctttttttttttttttgtgtagaaaaataggtgcaataatgatcaaagttttgatgtcttgagtctccatcttaggggattatcttacgtttaagcttaacatttcatgtagtaagatttggagagccacatactttacagtaaaattaagtgtgtataaaacattaattgctaacaattgttagcaaactatttcagtgataatgttcattttgaaaatatgtactgtataacattaagaaaatatttaactccctgtaacaagttccattatgaaaatcttattcctcagtgaggttatcttgctgcactctgtagcaaatttgtttaatctacattataataaaatttcttgctgcagtgcaacaggaggctttttcagtgatcttcactgtatatgtaaattacaaatgtggctgtaaaacttattccaggtattaaaggttaaattgctttctatatcttcttataacttgtaagtctgatttttaagatttccttttgtccacttgtaagaatgtcaggaatttaagaatttgtttaaattaggcatatctctgccatcacatagtattatgtcaccataatgaacaattgctatttaaatagataaccaattttcagacacatttttggatttctgtgaagttgaataaacataaaagctaa

SEQ ID NO: 324209 - DNA, 4275 bp, Homo sapiens
  misc_feature (498)..(498): n is a, c, g, or t
gctggctgcggaaggggagggggggggagaaggcgattggatgcggcggcggcggcggatcccggagagccccggagtgagcggagtagcgagtcggcaacccggaggggtagaaatatttctgtcatggctcattcaaagactaggaccaatgatggaaaaattacatatccgcctggggtcaaggaaatatcagataaaatatctaaagaggagatggtgagacgattaaagatggttgtgaaaacttttatggatatggaccaggactctgaagaagaaaaggagctttatttaaacctagctttacatcttgcttcagatttttttctcaagcatcctgataaagatgttcgcttactggtagcctgctgccttgctgatattttcaggatttatgctcctgaagctccttacacatcccctgataaactaaaggatatatttatgtttataacaagacagttgaaggggctagaggatacaaagagcccacanttcaataggtatttttatttacttgagaacattgcttgggtcaagtcatataacatatgctttgagttagaagatagcaatgaaattttcacccagctatacagaaccttattttcagttataaacaatggccacaatcagaaagtccatatgcacatggtagaccttatgagctctattatttgtgaaggtgatacagtgtctcaggagcttttggatacggttttagtaaatctggtacctgctcataagaatttaaacaagcaagcatatgatttggcaaaggctttactgaagaggacagctcaagctattgagccatatattaccaatttttttaatcaggttctgatgcttgggaaaacatctatcagcgatttgtcagagcatgtctttgacttaattttggagctctacaatattgatagtcatttgctgctctctgttttaccccagcttgaatttaaattaaagagcaatgataatgaggagcgcctacaagttgttaaactactggcaaaaatgtttggggcaaaggattcagaattggcttctcaaaacaagccactttggcagtgctacttgggcaggtttaatgatatccatgtaccaatccgcctggaatgtgtgaaatttgctagccattgtctcatgaaccatcctgatttagcaaaagacttaacagagtatcttaaagtgaggtcacatgaccctgaggaagctattagacatgatgttattgtgtcaatagttacagctgctaaaaaggatattcttctggtcaatgatcacttacttaattttgtgagagagagaacattagacaaacgatggagagtacgcaaagaagccatgatgggacttgcccaaatttataagaaatatgctttacagtcagcagctggaaaagatgctgcaaaacagatagcatggatcaaagacaaattgctacatatatattatcaaaatagtattgatgatcgactacttgttgaacggatctttgctcaatacatggttcctcacaatttagaaactacagaacggatgaaatgcttatattacttgtatgccacactggatttaaatgctgtgaaagcattgaatgaaatgtggaaatgtcaaaatctgctccgacatcaagtaaaggatttgcttgacttgattaagcaacccaaaacagatgccagtgtcaaggccatattttcaaaagtgatggttattacaagaaatttacctgatcctggtaaggctcaggatttcatgaagaaattcacacaggtgttagaagatgatgagaaaataagaaagcagttagaagtacttgttagtccaacatgctcctgcaagcaggctgaaggttgtgtgcgtgaaataactaagaagttgggcaaccccaaacagcctacaaatcctttcctggaaatgatcaagtttctcttggagaggatagcacctgtgcacatagataccgaatctatcagtgctcttattaaacaagtgaacaaatcaatagatggaacagcagatgatgaagatgagggtgttccaactgatcaagccatcagagcaggtcttgaactgcttaaggtactctcatttacacatcccatctcatttcattctgctgaaacatttgaatcattactggcttgtctgaaaatggatgatgaaaaagtagcagaagctgcactacaaattttcaaaaacacaggaagcaaaattgaagaggattttccacacatcagatcagccttgcttcctgttttacatcacaaatctaaaaaaggacccccccgtcaagccaaatatgccattcattgtatccatgcgatattttctagtaaagagacccagtttgcacagatatttgagcctctgcataagagcctagatccaagcaacctggaacatctcataacaccattggttactattggtcatattgctctccttgcacctgatcaatttgctgctcctttgaaatctttggtagctactttcattgtgaaagatcttctcatgaatgatcggcttccagggaaaaagacaactaaactttgggttccagatgaagaagtatctcctgagacaatggtcaaaattcaggctattaaaatgatggttcgatggctacttggaatgaaaaataatcacagtaaatcaggaacttctaccttaagattgctaacaacaatattgcatagtgatggagacttgacagaacaggggaaaattagtaaaccagatatgtcacgtctgagacttgctgctgggagtgctattgtgaagctggcacaagaaccctgttaccatgaaatcatcacattagaacaatatcagctatgtgcattagctatcaacgatgaatgctatcaagtaagacaagtgtttgcccagaaacttcacaaaggcctttcccgtttacggcttccacttgagtatatggcaatctgtgccctttgtgcaaaagatcctgtaaaggagagaagagctcatgctaggcaatgtttggtgaaaaatataaatgtaaggcgggagtatctgaagcagcatgcagctgttagtgaaaaattattgtctcttctaccagagtatgttgttccatatacaattcaccttttggcacatgacccagattatgtcaaagtacaggatattgaacaacttaaagatgttaaagaatgtctttggtttgttctggaaatattaatggctaaaaatgaaaataacagtcacgcttttatcagaaagatggtagaaaatattaaacaaacaaaagatgcccaaggaccagatgatgcaaaaatgaatgaaaaactgtacactgtgtgtgatgttgccatgaatatcatcatgtcaaagagtactacatacagtttggaatctcctaaagacccggtactaccagctcgtttcttcactcaacctgacaagaatttcagtaacaccaaaaattatctgcctcctgaaatgaaatcatttttcactcctggaaaacctaaaacaaccaatgttctaggagctgttaacaagccactttcatcagcaggcaagcaatctcagaccaaatcatcacgaatggaaactgtaagcaatgcaagcagcagctcaaatccaagctctcctggaagaataaaggggaggcttgatagttctgaaatggatcacagtgaaaatgaagattacacaatgtcttcacctttgccggggaaaaaaagtgacaagagagacgactctgatcttgtaaggtctgaattggagaagcctagaggcaggaaaaaaacgcccgtcacagaacaggaggagaaattaggtatggatgacttgactaagttggtacaggaacagaaacctaaaggcagtcagcgaagtcggaaaagaggccatacggcttcagaatctgatgaacagcagtggcctgaggaaaagaggctcaaagaagatatattagaaaatgaagatgaacagaatagtccgccaaaaaagggtaaaagaggccgaccaccaaaacctcttggtggaggtacaccaaaagaagagccaacaatgaaaacttctaaaaaaggaagcaaaaaaaaatctggacctccagcaccagaggaggaggaagaagaagaaagacaaagtggaaatacggaacagaagtccaaaagcaaacagacctgctaatacttttcaaggacgattacttggccaaaaaaaatgaagaaagaaaacaaaagtaagggggaagctaaattaagagctaaacaggagcaagaagcaaaagaaaag

SEQ ID NO: 324210 - DNA, 1020 bp, Homo sapiens
caggcccatccttctgtggtcagtcactgctggttggggaaggaaggagagacacaaccgcttcagatgggcagtgaaaaagacgatggaaaggccaggacaccacggaagttctgaaggggtagtgggaaccgagggtgaatggaaagcagccctttgacagaagaaagacagagaccagtttccagtgagctcctgaggatattcaagtctgtgcttctgcttgactgaggatcatctaggaaatgaaactaaacttggcttcgacctagaccttgtgtgaccttgaggtcatcaccctctcacagtcaccctagagaatcctttacttacctgtgctgaaaaaaatgctcccatcagttaccctatgatgaggtctccagccctttcatcagaagacagagctttaaaatgcaggggctggtgagggtcagcactagtggtgagaattctggagaacattttctttacccagaaacttaaaatcatggactcttggggagaaaggaatgagaaaaggcagcatgcggaattaccagtttgttatttggttcccatctggatttaaaaccgaagatcccaaactcagattgatctggagccagaaggaagagtgtatgtgatcatcgatctctcagggtcgtcgggtgaagtgaaaatacctaactctgcattctgtgaaagggagagagttgaaatgaggcacagctgaagtttcaccactccattattctgccatcaagcatcccttcagctcccatctctcaaatgctgcagccccatcaatggaaaaaaatacattcatgggaattgcacaaagtttacaacacatgcaaattccaaggagctcagagagaggtgtgggggtgagatggtgtgactacacccccttcttctaggatgcgccgaaggattctttttcttgctcatatgctgttagaaagcctgggcgtttacgtctgctggagctggagctaatgtgatttctaactgtctaataaaattccactgcttgcaaaa

SEQ ID NO: 324211 - DNA, 489 bp, Homo sapiens
ggcggccgcccggactccgagcccgcgcggatgtgagattccgggctcctggcgcctcccgatcgccggctccggcgcggcgctgcttcgcccaggaggcggcggccccggctggccgtggggcttgtggatttttaaaaatttggctccgaggaggaccatttcctctcgacatgcatccctccggatagactgaacatccctccgttcacccccccgccccgcgcggtcagaggcaggcgctgagtgtgcgaagaggatccgggttgaaatctgcgcccccggttctcgtccccgccccgtcccaccgccccatccccctcccggagtcgaaatttcccgggattatgtttcggaaaggtaggtaagcgccgggcgcggcgcccgctttcccgcagtccggagccggagagccagcgaggcggcgaggcagcccccgcggcttgcagcggagccgacagctcgtcttctcttctggaggtgcagctg

SEQ ID NO: 324212 - DNA, 686 bp, Homo sapiens
ttttttttttgtttttgtttttttttttttttttagccatataaggtaacattcacacattcaagggttaggacctggatatcttctagaggaggattgttcaacctaccacacatataaagacaactggagccccaaaagggcagagacttgtccaagatcacacttccagatgacaacaaaaatcaaagatccaggtctcctttctgtccatttaggcttcttccactagaccgaggtgatgcccaccgaaggcggacagagaaaaagtaaaattgtgcttcataccctaatctgtgtgctttattcgtttgtcttctttatggatcaggtgctaccaggattcacccacctttgaggcttcttcccccttgagtcttggtaaccttacactgagctcacactaagctggcctgtgtgggcagctgcaatcaaatgacccaaatggcattttcttctctcctttcaggaccgcctctttttcgtcatggaatatgtaaatggtggagacctcatgtttcagattcagcgctcccgaaaattcgacgagcctcgttcacggttctatgctgcagaggtcacatcggccctcatgttcctccaccagcatggagtcatctacaggtagcctcttctctcctcctctttcctgaaagtgaagaaaataaaggatgcttcagacactt

SEQ ID NO: 324213 - DNA, 354 bp, Homo sapiens
ggcggccgcccggactccgagcccgcgcggatgtgagattccgggctcctggcgcctcccgatcgccggctccggcgcggcgctgcttcgcccaggaggcggcggccccggctggccgtggggcttgtggatttttaaaaatttggctccgaggaggaccatttcctctcgacatgcatccctccggatagactgaacatccctccgttcacccccccgccccgcgcggtcagaggcaggcgctgagtgtgcgaagaggatccgggttgaaatctgcgcccccgtttttgtcctctttttttctaccaacctatttctctttgggactcatatttttcgtcatgcatggatttg

SEQ ID NO: 324214 - DNA, 199 bp, Homo sapiens
caggcccatccttctgtggtcagtcactgctggttggggaaggaaggagagacacaaccgcttcagatgggcagtgaaaaagacgatggaaaggccaggacaccacggaagttctgaaggggtagtgggaaccgataacatgatttcttactcattttctttttcaaaatgatgtttgatgagcaccgattttacagag

SEQ ID NO: 324215 - DNA, 3579 bp, Homo sapiens
ggcggccgcccggactccgagcccgcgcggatgtgagattccgggctcctggcgcctcccgatcgccggctccggcgcggcgctgcttcgcccaggaggcggcggccccggctggccgtggggcttgtggatttttaaaaatttggctccgaggaggaccatttcctctcgacatgcatccctccggatagactgaacatccctccgttcacccccccgccccgcgcggtcagaggcaggcgctgagtgtgcgaagaggatccgggttgaaatctgcgcccccggttctcgtccccgccccgtcccaccgccccatccccctcccggagtcgaaatttcccgggattatgtttcggaaaggaacccggcgaggaaatacatgcactggctgagaatcgcccgcgccagggcgcaacgccacaaggtgtagggagtgtgcggggtggggcgaaaggggacccaagagtccctgtggctcggagtgccgggccgtcggttcttcattcctgccctcggggcagacggagtgaccccggcccccactccccgccccgaccatggtagtgttcaatggccttcttaagatcaaaatctgcgaggccgtgagcttgaagcccacagcctggtcgctgcgccatgcggtgggaccccggccgcagactttccttctcgacccctacattgccctcaatgtggacgactcgcgcatcggccaaacggccaccaagcagaagaccaacagcccggcctggcacgacgagttcgtcaccgatgtgtgcaacggacgcaagatcgagctggctgtctttcacgatgcccccataggctacgacgacttcgtggccaactgcaccatccagtttgaggagctgctgcagaacgggagccgccacttcgaggactggattgatctggagccagaaggaagagtgtatgtgatcatcgatctctcagggtcgtcgggtgaagcccctaaagacaatgaagagcgtgtgttcagggaacgcatgcggccgaggaagcggcagggggccgtcaggcgcagggtccatcaggtcaacggccacaagttcatggccacctatcttcggcagcccacctactgctcccattgcagagacttcatctggggtgtcataggaaagcagggataccagtgtcaagtctgcacctgcgtggtccacaagcggtgccacgagctcataatcacaaagtgtgctgggttaaagaagcaggagacccccgaccaggtgggctcccagcggttcagcgtcaacatgccccacaagttcggtatccacaactacaaggtccctaccttctgcgatcactgtgggtccctgctctggggactcttgcggcagggtttgcagtgtaaagtctgcaaaatgaatgttcaccgtcgatgtgagaccaacgtggctcccaactgtggagtggatgccagaggaatcgccaaagtactggccgacctgggcgttaccccagacaaaatcaccaacagcggccagagaaggaaaaagctcattgctggtgccgagtccccgcagcctgcttctggaagctcaccatctgaggaagatcgatccaagtcagcacccacctccccttgtgaccaggaaataaaagaacttgagaacaacattcggaaagccttgtcatttgacaaccgaggagaggagcaccgggcagcatcgtctcctgatggccagctgatgagccccggtgagaatggcgaagtccggcaaggccaggccaagcgcctgggcctggatgagttcaacttcatcaaggtgttgggcaaaggcagctttggcaaggtcatgttggcagaactcaagggcaaagatgaagtatatgctgtgaaggtcttaaagaaggacgtcatccttcaggatgatgacgtggactgcacaatgacagagaagaggattttggctctggcacggaaacacccgtaccttacccaactctactgctgcttccagaccaaggaccgcctctttttcgtcatggaatatgtaaatggtggagacctcatgtttcagattcagcgctcccgaaaattcgacgagcctcgttcacggttctatgctgcagaggtcacatcggccctcatgttcctccaccagcatggagtcatctacagggatttgaaactggacaacatccttctggatgcagaaggtcactgcaagctggctgacttcgggatgtgcaaggaagggattctgaatggtgtgacgaccaccacgttctgtgggactcctgactacatagctcctgagatcctgcaggagttggagtatggcccctccgtggactggtgggccctgggggtgctgatgtacgagatgatggctggacagcctccctttgaggccgacaatgaggacgacctatttgagtccatcctccatgacgacgtgctgtacccagtctggctcagcaaggaggctgtcagcatcttgaaagctttcatgacgaagaatccccacaagcgcctgggctgtgtggcatcgcagaatggcgaggacgccatcaagcagcacccattcttcaaagagattgactgggtgctcctggagcagaagaagatcaagccacccttcaaaccacgcattaaaaccaaaagagacgtcaataattttgaccaagactttacccgggaagagccggtactcacccttgtggacgaagcaattgtaaagcagatcaaccaggaggaattcaaaggtttctcctactttggtgaagacctgatgccctgagagcccactgcagttggactttgccgatgctgcaagaaggggtgcagagaagactcctgtgttggagacactcagcaggtcttgaactacttctcctcctcggagccccagtcccatgtccactgtctatttattgcattcccttgccccaggccacctcctccccctcccacctggtgaccagaaggcgctctcggttcttgtctcaccagtaatgcagactcattgggtcagcaattagctgtatacactgccgtgtttggaccattggcaagcctggttccactcctcaggggctcctggcagtgaagcaacttcagttcttttactgcaaagaacagaaaaaagaaagaaagcaaacaagaagactccggctctgctatcggacacagatcctgatccctcttgcttcttttccctcctgcaccgcagcttgccatccctgcccttctgtcctggagaagagactggtgcttctccgcacacacgagggagggcgcccttgaggcatgccctctgagggagggagaccagagatgcagggattggccagctgggttggtttgctctggaatggctaactcttgcctgctttggttttagcttttcagcatgccaaagtcatgtaagtttgtgtcttgtggaagaaatcctctttgtggaaaaagaaacagggttttgaactctgttaacatttgaaaaatatattttcaaattcactttctaattggccaaaagagatgagttccagtctgaatacaggtagatattaaagggctaataaaaaatgagaaaccggtcgtccaag

SEQ ID NO: 324216 - DNA, 1757 bp, Homo sapiens
ggcggccgcccggactccgagcccgcgcggatgtgagattccgggctcctggcgcctcccgatcgccggctccggcgcggcgctgcttcgcccaggaggcggcggccccggctggccgtggggcttgtggatttttaaaaatttggctccgaggaggaccatttcctctcgacatgcatccctccggatagactgaacatccctccgttcacccccccgccccgcgcggtcagaggcaggcgctgagtgtgcgaagaggatccgggttgaaatctgcgcccccggttctcgtccccgccccgtcccaccgccccatccccctcccggagtcgaaatttcccgggattatgtttcggaaaggaacccggcgaggaaatacatgcactggctgagaatcgcccgcgccagggcgcaacgccacaaggtgtagggagtgtgcggggtggggcgaaaggggacccaagagtccctgtggctcggagtgccgggccgtcggttcttcattcctgccctcggggcagacggagtgaccccggcccccactccccgccccgaccatggtagtgttcaatggccttcttaagatcaaaatctgcgaggccgtgagcttgaagcccacagcctggtcgctgcgccatgcggtgggaccccggccgcagactttccttctcgacccctacattgccctcaatgtggacgactcgcgcatcggccaaacggccaccaagcagaagaccaacagcccggcctggcacgacgagttcgtcaccgatgtgtgcaacggacgcaagatcgagctggctgtctttcacgatgcccccataggctacgacgacttcgtggccaactgcaccatccagtttgaggagctgctgcagaacgggagccgccacttcgaggactggatattcaagtctgtgcttctgcttgactgaggatcatctaggaaatgaaactaaacttggcttcgacctagaccttgtgtgaccttgaggtcatcaccctctcacagtcaccctagagaatcctttacttacctgtgctgaaaaaaatgctcccatcagttaccctatgatgaggtctccagccctttcatcagaagacagagctttaaaatgcaggtgggtaacagtgacctgaagacatactaacaggggctggtgagggtcagcactagtggtgagaattctggagaacattttctttacccagaaacttaaaatcatggactcttggggagaaaggaatgagaaaaggcagcatgcggaattaccagtttgttatttggttcccatctggatttaaaaccgaagatcccaaactcagattgatctggagccagaaggaagagtgtatgtgatcatcgatctctcagggtcgtcgggtgaagtgaaaatacctaactctgcattctgtgaaagggagagagttgaaatgaggcacagctgaagtttcaccactccattattctgccatcaagcatcccttcagctcccatctctcaaatgctgcagccccatcaatggaaaaaaatacattcatgggaattgcacaaagtttacaacacatgcaaattccaaggagctcagagagaggtgtgggggtgagatggtgtgactacacccccttcttctaggatgcgccgaaggattctttttcttgctcatatgctgttagaaagcctgggcgtttacgtctgctggagctggagctaatgtgatttctaactgtctaataaaattccactgcttgcaaaa

SEQ ID NO: 324217 - DNA, 2660 bp, Homo sapiens
ggcggccgcccggactccgagcccgcgcggatgtgagattccgggctcctggcgcctcccgatcgccggctccggcgcggcgctgcttcgcccaggaggcggcggccccggctggccgtggggcttgtggatttttaaaaatttggctccgaggaggaccatttcctctcgacatgcatccctccggatagactgaacatccctccgttcacccccccgccccgcgcggtcagaggcaggcgctgagtgtgcgaagaggatccgggttgaaatctgcgcccccggttctcgtccccgccccgtcccaccgccccatccccctcccggagtcgaaatttcccgggattatgtttcggaaaggaacccggcgaggaaatacatgcactggctgagaatcgcccgcgccagggcgcaacgccacaaggtgtagggagtgtgcggggtggggcgaaaggggacccaagagtccctgtggctcggagtgccgggccgtcggttcttcattcctgccctcggggcagacggagtgaccccggcccccactccccgccccgaccatggtagtgttcaatggccttcttaagatcaaaatctgcgaggccgtgagcttgaagcccacagcctggtcgctgcgccatgcggtgggaccccggccgcagactttccttctcgacccctacattgccctcaatgtggacgactcgcgcatcggccaaacggccaccaagcagaagaccaacagcccggcctggcacgacgagttcgtcaccgatgtgtgcaacggacgcaagatcgagctggctgtctttcacgatgcccccataggctacgacgacttcgtggccaactgcaccatccagtttgaggagctgctgcagaacgggagccgccacttcgaggactggatattcaagtctgtgcttctgcttgactgaggatcatctaggaaatgaaactaaacttggcttcgacctagaccttgtgtgaccttgaggtcatcaccctctcacagtcaccctagagaatcctttacttacctgtgctgaaaaaaatgctcccatcagttaccctatgatgaggtctccagccctttcatcagaagacagagctttaaaatgcaggtgggtaacagtgacctgaagacatactaacaggggctggtgagggtcagcactagtggtgagaattctggagaacattttctttacccagaaacttaaaatcatggactcttggggagaaaggaatgagaaaaggcagcatgcggaattaccagtttgttatttggttcccatctggatttaaaaccgaagatcccaaactcagattgatctggagccagaaggaagagtgtatgtgatcatcgatctctcagggtcgtcgggtgaagcccctaaagacaatgaagagcgtgtgttcagggaacgcatgcggccgaggaagcggcagggggccgtcaggcgcagggtccatcaggtcaacggccacaagttcatggccacctatcttcggcagcccacctactgctcccattgcagagacttcatctggggtgtcataggaaagcagggataccagtgtcaagtctgcacctgcgtggtccacaagcggtgccacgagctcataatcacaaagtgtgctgggttaaagaagcaggagacccccgaccaggtgggctcccagcggttcagcgtcaacatgccccacaagttcggtatccacaactacaaggtccctaccttctgcgatcactgtgggtccctgctctggggactcttgcggcagggtttgcagtgtaaagtctgcaaaatgaatgttcaccgtcgatgtgagaccaacgtggctcccaactgtggagtggatgccagaggaatcgccaaagtactggccgacctgggcgttaccccagacaaaatcaccaacagcggccagagaaggaaaaagctcattgctggtgccgagtccccgcagcctgcttctggaagctcaccatctgaggaagatcgatccaagtcagcacccacctccccttgtgaccaggaaataaaagaacttgagaacaacattcggaaagccttgtcatttgacaaccgaggagaggagcaccgggcagcatcgtctcctgatggccagctgatgagccccggtgagaatggcgaagtccggcaaggccaggccaagcgcctgggcctggatgagttcaacttcatcaaggtgttgggcaaaggcagctttggcaaggtcatgttggcagaactcaagggcaaagatgaagtatatgctgtgaaggtcttaaagaaggacgtcatccttcaggatgatgacgtggactgcacaatgacagagaagaggattttggctctggcacggaaacacccgtaccttacccaactctactgctgcttccagaccaagggcacaggattttccattcaaggttgtgcttgtgaagggatgagagagctgtagaattctttgcagccagagttggacaaagccaaatggctaaactcactgtttgctcattggaaaaaccaacaagtgtggttagtccttgctctgctcctaactttctatcactaatcaaatcacttaacttctaagttattttcatgtcatatgaaaaagagtaaaggccaccttaatctcttctaatctgt

SEQ ID NO: 324218 - DNA, 3446 bp, Homo sapiens
ttcagaggctgttgaaataatccaggtgtgagataatagtgacttggaccaggtgaggtcagcaaaggtatggaaaggatgtgatctgagatatattttgaaggcagaaagggcagatgttgctgatggataagatatggggcacctgagaattacaggcgtcaaggatggcccctcagggtttttgagctggtctaggaggtcagagagggctccttggtcggtatgcttgagctgagaggccaaggaggacaggattggttcggtgaggaagggagagaagtctgaagcagaaggaacagtagaagcagcccggcactgtcattctttgatgtaataaatttcctccagatattcaagtctgtgcttctgcttgactgaggatcatctaggaaatgaaactaaacttggcttcgacctagaccttgtgtgaccttgaggtcatcaccctctcacagtcaccctagagaatcctttacttacctgtgctgaaaaaaatgctcccatcagttaccctatgatgaggtctccagccctttcatcagaagacagagctttaaaatgcaggtgggtaacagtgacctgaagacatactaacaggggctggtgagggtcagcactagtggtgagaattctggagaacattttctttacccagaaacttaaaatcatggactcttggggagaaaggaatgagaaaaggcagcatgcggaattaccagtttgttatttggttcccatctggatttaaaaccgaagatcccaaactcagattgatctggagccagaaggaagagtgtatgtgatcatcgatctctcagggtcgtcgggtgaagcccctaaagacaatgaagagcgtgtgttcagggaacgcatgcggccgaggaagcggcagggggccgtcaggcgcagggtccatcaggtcaacggccacaagttcatggccacctatcttcggcagcccacctactgctcccattgcagagacttcatctggggtgtcataggaaagcagggataccagtgtcaagtctgcacctgcgtggtccacaagcggtgccacgagctcataatcacaaagtgtgctgggttaaagaagcaggagacccccgaccaggtgggctcccagcggttcagcgtcaacatgccccacaagttcggtatccacaactacaaggtccctaccttctgcgatcactgtgggtccctgctctggggactcttgcggcagggtttgcagtgtaaagtctgcaaaatgaatgttcaccgtcgatgtgagaccaacgtggctcccaactgtggagtggatgccagaggaatcgccaaagtactggccgacctgggcgttaccccagacaaaatcaccaacagcggccagagaaggaaaaagctcattgctggtgccgagtccccgcagcctgcttctggaagctcaccatctgaggaagatcgatccaagtcagcacccacctccccttgtgaccaggaaataaaagaacttgagaacaacattcggaaagccttgtcatttgacaaccgaggagaggagcaccgggcagcatcgtctcctgatggccagctgatgagccccggtgagaatggcgaagtccggcaaggccaggccaagcgcctgggcctggatgagttcaacttcatcaaggtgttgggcaaaggcagctttggcaaggtcatgttggcagaactcaagggcaaagatgaagtatatgctgtgaaggtcttaaagaaggacgtcatccttcaggatgatgacgtggactgcacaatgacagagaagaggattttggctctggcacggaaacacccgtaccttacccaactctactgctgcttccagaccaaggaccgcctctttttcgtcatggaatatgtaaatggtggagacctcatgtttcagattcagcgctcccgaaaattcgacgagcctcgttcacggttctatgctgcagaggtcacatcggccctcatgttcctccaccagcatggagtcatctacagggatttgaaactggacaacatccttctggatgcagaaggtcactgcaagctggctgacttcgggatgtgcaaggaagggattctgaatggtgtgacgaccaccacgttctgtgggactcctgactacatagctcctgagatcctgcaggagttggagtatggcccctccgtggactggtgggccctgggggtgctgatgtacgagatgatggctggacagcctccctttgaggccgacaatgaggacgacctatttgagtccatcctccatgacgacgtgctgtacccagtctggctcagcaaggaggctgtcagcatcttgaaagctttcatgacgaagaatccccacaagcgcctgggctgtgtggcatcgcagaatggcgaggacgccatcaagcagcacccattcttcaaagagattgactgggtgctcctggagcagaagaagatcaagccacccttcaaaccacgcattaaaaccaaaagagacgtcaataattttgaccaagactttacccgggaagagccggtactcacccttgtggacgaagcaattgtaaagcagatcaaccaggaggaattcaaaggtttctcctactttggtgaagacctgatgccctgagagcccactgcagttggactttgccgatgctgcaagaaggggtgcagagaagactcctgtgttggagacactcagcaggtcttgaactacttctcctcctcggagccccagtcccatgtccactgtctatttattgcattcccttgccccaggccacctcctccccctcccacctggtgaccagaaggcgctctcggttcttgtctcaccagtaatgcagactcattgggtcagcaattagctgtatacactgccgtgtttggaccattggcaagcctggttccactcctcaggggctcctggcagtgaagcaacttcagttcttttactgcaaagaacagaaaaaagaaagaaagcaaacaagaagactccggctctgctatcggacacagatcctgatccctcttgcttcttttccctcctgcaccgcagcttgccatccctgcccttctgtcctggagaagagactggtgcttctccgcacacacgagggagggcgcccttgaggcatgccctctgagggagggagaccagagatgcagggattggccagctgggttggtttgctctggaatggctaactcttgcctgctttggttttagcttttcagcatgccaaagtcatgtaagtttgtgtcttgtggaagaaatcctctttgtggaaaaagaaacagggttttgaactctgttaacatttgaaaaatatattttcaaattcactttctaattggccaaaagagatgagttccagtctgaatacaggtagatattaaagggctaataaaaaatgagaaaccggtcgtccaag

SEQ ID NO: 324219 - DNA, 2472 bp, Homo sapiens
ggcattgcagagacttcatctggggtgtcataggaaagcagagataccagtgtcaagtctgcacctgcgtggtccacaagcggtgccacgagctcataatcacaaagtgtgctgggttaaagaagcaggagacccccgaccaggtgggctcccagcggttcagcgtcaacatgccccacaagttcggtatccacaactacaaggtccctaccttctgcgatcactgtgggtccctgctctggggactcttgcggcagggtttgcagtgtaaagtctgcaaaatgaatgttcaccgtcgatgtgagaccaacgtggctcccaactgtggagtggatgccagaggaatcgccaaagtactggccgacctgggcgttaccccagacaaaatcaccaacagcggccagagaaggaaaaagctcattgctggtgccgagtccccgcagcctgcttctggaagctcaccatctgaggaagatcgatccaagtcagcacccacctccccttgtgaccaggaaataaaagaacttgagaacaacattcggaaagccttgtcatttgacaaccgaggagaggagcaccgggcagcatcgtctcctgatggccagctgatgagccccggtgagaatggcgaagtccggcaaggccaggccaagcgcctgggcctggatgagttcaacttcatcaaggtgttgggcaaaggcagctttggcaaggtcatgttggcagaactcaagggcaaagatgaagtatatgctgtgaaggtcttaaagaaggacgtcatccttcaggatgatgacgtggactgcacaatgacagagaagaggattttggctctggcacggaaacacccgtaccttacccaactctactgctgcttccagaccaaggaccgcctctttttcgtcatggaatatgtaaatggtggagacctcatgtttcagattcagcgctcccgaaaattcgacgagcctcgttcacggttctatgctgcagaggtcacatcggccctcatgttcctccaccagcatggagtcatctacagggatttgaaactggacaacatccttctggatgcagaaggtcactgcaagctggctgacttcgggatgtgcaaggaagggattctgaatggtgtgacgaccaccacgttctgtgggactcctgactacatagctcctgagatcctgcaggagttggagtatggcccctccgtggactggtgggccctgggggtgctgatgtacgagatgatggctggacagcctccctttgaggccgacaatgaggacgacctatttgagtccatcctccatgacgacgtgctgtacccagtctggctcagcaaggaggctgtcagcatcttgaaagctttcatgacgaagaatccccacaagcgcctgggctgtgtggcatcgcagaatggcgaggacgccatcaagcagcacccattcttcaaagagattgactgggtgctcctggagcagaagaagatcaagccacccttcaaaccacgcattaaaaccaaaagagacgtcaataattttgaccaagactttacccgggaagagccggtactcacccttgtggacgaagcaattgtaaagcagatcaaccaggaggaattcaaaggtttctcctactttggtgaagacctgatgccctgagagcccactgcagttggactttgccgatgctgcaagaaggggtgcagagaagactcctgtgttggagacactcagcaggtcttgaactacttctcctcctcggagccccagtcccatgtccactgtctatttattgcattcccttgccccaggccacctcctccccctcccacctggtgaccagaaggcgctctcggttcttgtctcaccagtaatgcagactcattgggtcagcaattagctgtatacactgccgtgtttggaccattggcaagcctggttccactcctcaggggctcctggcagtgaagcaacttcagttcttttactgcaaagaacagaaaaaagaaagaaagcaaacaagaagactccggctctgctatcggacacagatcctgatccctcttgcttcttttccctcctgcaccgcagcttgccatccctgcccttctgtcctggagaagagactggtgcttctccgcacacacgagggagggcgcccttgaggcatgccctctgagggagggagaccagagatgcagggattggccagctgggttggtttgctctggaatggctaactcttgcctgctttggttttagcttttcagcatgccaaagtcatgtaagtttgtgtcttgtggaagaaatcctctttgtggaaaaagaaacagggttttgaactctgttaacatttgaaaaatatattttcaaattcactttctaattggccaaaagagatgagttccagtctgaatacaggtagatattaaagggctaataaaaaatgagaaaccggtcgtccaag

SEQ ID NO: 324220 - DNA, 1552 bp, Homo sapiens
ggcggccgcccggactccgagcccgcgcggatgtgagattccgggctcctggcgcctcccgatcgccggctccggcgcggcgctgcttcgcccaggaggcggcggccccggctggccgtggggcttgtggatttttaaaaatttggctccgaggaggaccatttcctctcgacatgcatccctccggatagactgaacatccctccgttcacccccccgccccgcgcggtcagaggcaggcgctgagtgtgcgaagaggatccgggttgaaatctgcgcccccggttctcgtccccgccccgtcccaccgccccatccccctcccggagtcgaaatttcccgggattatgtttcggaaaggaacccggcgaggaaatacatgcactggctgagaatcgcccgcgccagggcgcaacgccacaaggtgtagggagtgtgcggggtggggcgaaaggggacccaagagtccctgtggctcggagtgccgggccgtcggttcttcattcctgccctcggggcagacggagtgaccccggcccccactccccgccccgaccatggtagtgttcaatggccttcttaagatcaaaatctgcgaggccgtgagcttgaagcccacagcctggtcgctgcgccatgcggtgggaccccggccgcagactttccttctcgacccctacattgccctcaatgtggacgactcgcgcatcggccaaacggccaccaagcagaagaccaacagcccggcctggcacgacgagttcgtcaccgatgtgtgcaacggacgcaagatcgagctggctgtctttcacgatgcccccataggctacgacgacttcgtggccaactgcaccatccagtttgaggagctgctgcagaacgggagccgccacttcgaggactggatattcaagtctgtgcttctgcttgactgaggatcatctaggaaatgaaactaaacttggcttcgacctagaccttgtgtgaccttgaggtcatcaccctctcacagtcaccctagagaatcctttacttacctgtgctgaaaaaaatgctcccatcagttaccctatgatgaggtctccagccctttcatcagaagacagagctttaaaatgcagattgatctggagccagaaggaagagtgtatgtgatcatcgatctctcagggtcgtcgggtgaagtgaaaatacctaactctgcattctgtgaaagggagagagttgaaatgaggcacagctgaagtttcaccactccattattctgccatcaagcatcccttcagctcccatctctcaaatgctgcagccccatcaatggaaaaaaatacattcatgggaattgcacaaagtttacaacacatgcaaattccaaggagctcagagagaggtgtgggggtgagatggtgtgactacacccccttcttctaggatgcgccgaaggattctttttcttgctcatatgctgttagaaagcctgggcgtttacgtctgctggagctggagctaatgtgatttctaactgtctaataaaattccactgcttgcaaaa

SEQ ID NO: 324221 - DNA, 921 bp, Homo sapiens
caggcccatccttctgtggtcagtcactgctggttggggaaggaaggagagacacaaccgcttcagatgggcagtgaaaaagacgatggaaaggccaggacaccacggaagttctgaaggggtagtgggaaccgagggtgaatggaaagcagccctttgacagaagaaagacagagaccagtttccagtgagctcctgaggtcaccctagagaatcctttacttacctgtgctgaaaaaaatgctcccatcagttaccctatgatgaggtctccagccctttcatcagaagacagagctttaaaatgcaggtgggtaacagtgacctgaagacatactaacaggggctggtgagggtcagcactagtggtgagaattctggagaacattttctttacccagaaacttaaaatcatggactcttggggagaaaggaatgagaaaaggcagcatgcggaattaccagtttgttatttggttcccatctggatttaaaaccgaagatcccaaactcagattgatctggagccagaaggaagagtgtatgtgatcatcgatctctcagggtcgtcgggtgaagagtgacttgcccatggccagaggctacaagaggctccagcaaaccctgccagagaggagtgactcactgaatccacagaccacgtctaatggcagggaactccacaaagaatgctctccgttcatttattgcttgatagacacctctaatgtataaagggctatgttgaaatttaggattccctcgggctatgcctgtcaccgaggactgagtgctcctgccatggagaggcaggtgggccaggtggcctgggctcccgcaaaatgggtgaggcaagaccccctcagagcagtaactccaggaaccacttgcctccacctgccagccctgcctgcacctcgc

SEQ ID NO: 324222 - DNA, 464 bp, Homo sapiens
attcaccatttttctgtgggcactagctgatgcacttggacaaaagagaaaaagagggtgaatggaaagcagccctttgacagaagaaagacagagaccagtttccagtgagctcctgaggatattcaagtctgtgcttctgcttgactgaggatcatctaggaaatgaaactaaacttggcttcgacctagaccttgtgtgaccttgaggtcatcaccctctcacagtcaccctagagaatcctttacttacctgtgctgaaaaaaatgctcccatcagttaccctatgatgaggtctccagccctttcatcagaagacagagctttaaaatgcagcaccagtactggccccatctgcagcggattatttcttccttcctaaaaatccaggctgcttcttgccatgtggagacaatgagctccttaaccaagggtgaaaaagaccaaccaaatcaaaacaaaa

SEQ ID NO: 324223 - DNA, 424 bp, Homo sapiens
ttgcctgtttcattcttgactggacatacatattgccccattgtgatgaaaggttgtgataatgaagagagtaatagaaggctcagctcaggttctaaggagggagcgagtaaaggccatgcaggcccatccttctgtggtcagtcactgctggttggggaaggaaggaggtatcaagtgtctccattctttcctcttttcttcatagtttctagatcattcatttaataaatcattagggagcccctgccatcaagctaggtcttgggatataaccaggaacatgcctagataggtaccctaatctcagagggctcatgctccaattgggggacagatactcaaacaggcaattatgacatagttcataaagccctgtgatgtatgccaccagagtacccaaaagggccccaaactagacatg

SEQ ID NO: 324224 - DNA, 4000 bp, Homo sapiens
ggcggccgcccggactccgagcccgcgcggatgtgagattccgggctcctggcgcctcccgatcgccggctccggcgcggcgctgcttcgcccaggaggcggcggccccggctggccgtggggcttgtggatttttaaaaatttggctccgaggaggaccatttcctctcgacatgcatccctccggatagactgaacatccctccgttcacccccccgccccgcgcggtcagaggcaggcgctgagtgtgcgaagaggatccgggttgaaatctgcgcccccggttctcgtccccgccccgtcccaccgccccatccccctcccggagtcgaaatttcccgggattatgtttcggaaaggaacccggcgaggaaatacatgcactggctgagaatcgcccgcgccagggcgcaacgccacaaggtgtagggagtgtgcggggtggggcgaaaggggacccaagagtccctgtggctcggagtgccgggccgtcggttcttcattcctgccctcggggcagacggagtgaccccggcccccactccccgccccgaccatggtagtgttcaatggccttcttaagatcaaaatctgcgaggccgtgagcttgaagcccacagcctggtcgctgcgccatgcggtgggaccccggccgcagactttccttctcgacccctacattgccctcaatgtggacgactcgcgcatcggccaaacggccaccaagcagaagaccaacagcccggcctggcacgacgagttcgtcaccgatgtgtgcaacggacgcaagatcgagctggctgtctttcacgatgcccccataggctacgacgacttcgtggccaactgcaccatccagtttgaggagctgctgcagaacgggagccgccacttcgaggactggatattcaagtctgtgcttctgcttgactgaggatcatctaggaaatgaaactaaacttggcttcgacctagaccttgtgtgaccttgaggtcatcaccctctcacagtcaccctagagaatcctttacttacctgtgctgaaaaaaatgctcccatcagttaccctatgatgaggtctccagccctttcatcagaagacagagctttaaaatgcaggtgggtaacagtgacctgaagacatactaacaggggctggtgagggtcagcactagtggtgagaattctggagaacattttctttacccagaaacttaaaatcatggactcttggggagaaaggaatgagaaaaggcagcatgcggaattaccagtttgttatttggttcccatctggatttaaaaccgaagatcccaaactcagattgatctggagccagaaggaagagtgtatgtgatcatcgatctctcagggtcgtcgggtgaagcccctaaagacaatgaagagcgtgtgttcagggaacgcatgcggccgaggaagcggcagggggccgtcaggcgcagggtccatcaggtcaacggccacaagttcatggccacctatcttcggcagcccacctactgctcccattgcagagacttcatctggggtgtcataggaaagcagggataccagtgtcaagtctgcacctgcgtggtccacaagcggtgccacgagctcataatcacaaagtgtgctgggttaaagaagcaggagacccccgaccaggtgggctcccagcggttcagcgtcaacatgccccacaagttcggtatccacaactacaaggtccctaccttctgcgatcactgtgggtccctgctctggggactcttgcggcagggtttgcagtgtaaagtctgcaaaatgaatgttcaccgtcgatgtgagaccaacgtggctcccaactgtggagtggatgccagaggaatcgccaaagtactggccgacctgggcgttaccccagacaaaatcaccaacagcggccagagaaggaaaaagctcattgctggtgccgagtccccgcagcctgcttctggaagctcaccatctgaggaagatcgatccaagtcagcacccacctccccttgtgaccaggaaataaaagaacttgagaacaacattcggaaagccttgtcatttgacaaccgaggagaggagcaccgggcagcatcgtctcctgatggccagctgatgagccccggtgagaatggcgaagtccggcaaggccaggccaagcgcctgggcctggatgagttcaacttcatcaaggtgttgggcaaaggcagctttggcaaggtcatgttggcagaactcaagggcaaagatgaagtatatgctgtgaaggtcttaaagaaggacgtcatccttcaggatgatgacgtggactgcacaatgacagagaagaggattttggctctggcacggaaacacccgtaccttacccaactctactgctgcttccagaccaaggaccgcctctttttcgtcatggaatatgtaaatggtggagacctcatgtttcagattcagcgctcccgaaaattcgacgagcctcgttcacggttctatgctgcagaggtcacatcggccctcatgttcctccaccagcatggagtcatctacagggatttgaaactggacaacatccttctggatgcagaaggtcactgcaagctggctgacttcgggatgtgcaaggaagggattctgaatggtgtgacgaccaccacgttctgtgggactcctgactacatagctcctgagatcctgcaggagttggagtatggcccctccgtggactggtgggccctgggggtgctgatgtacgagatgatggctggacagcctccctttgaggccgacaatgaggacgacctatttgagtccatcctccatgacgacgtgctgtacccagtctggctcagcaaggaggctgtcagcatcttgaaagctttcatgacgaagaatccccacaagcgcctgggctgtgtggcatcgcagaatggcgaggacgccatcaagcagcacccattcttcaaagagattgactgggtgctcctggagcagaagaagatcaagccacccttcaaaccacgcattaaaaccaaaagagacgtcaataattttgaccaagactttacccgggaagagccggtactcacccttgtggacgaagcaattgtaaagcagatcaaccaggaggaattcaaaggtttctcctactttggtgaagacctgatgccctgagagcccactgcagttggactttgccgatgctgcaagaaggggtgcagagaagactcctgtgttggagacactcagcaggtcttgaactacttctcctcctcggagccccagtcccatgtccactgtctatttattgcattcccttgccccaggccacctcctccccctcccacctggtgaccagaaggcgctctcggttcttgtctcaccagtaatgcagactcattgggtcagcaattagctgtatacactgccgtgtttggaccattggcaagcctggttccactcctcaggggctcctggcagtgaagcaacttcagttcttttactgcaaagaacagaaaaaagaaagaaagcaaacaagaagactccggctctgctatcggacacagatcctgatccctcttgcttcttttccctcctgcaccgcagcttgccatccctgcccttctgtcctggagaagagactggtgcttctccgcacacacgagggagggcgcccttgaggcatgccctctgagggagggagaccagagatgcagggattggccagctgggttggtttgctctggaatggctaactcttgcctgctttggttttagcttttcagcatgccaaagtcatgtaagtttgtgtcttgtggaagaaatcctctttgtggaaaaagaaacagggttttgaactctgttaacatttgaaaaatatattttcaaattcactttctaattggccaaaagagatgagttccagtctgaatacaggtagatattaaagggctaataaaaaatgagaaaccggtcgtccaag

SEQ ID NO: 324225 - DNA, 1367 bp, Homo sapiens
ggcggccgcccggactccgagcccgcgcggatgtgagattccgggctcctggcgcctcccgatcgccggctccggcgcggcgctgcttcgcccaggaggcggcggccccggctggccgtggggcttgtggatttttaaaaatttggctccgaggaggaccatttcctctcgacatgcatccctccggatagactgaacatccctccgttcacccccccgccccgcgcggtcagaggcaggcgctgagtgtgcgaagaggatccgggttgaaatctgcgcccccggttctcgtccccgccccgtcccaccgccccatccccctcccggagtcgaaatttcccgggattatgtttcggaaaggaacccggcgaggaaatacatgcactggctgagaatcgcccgcgccagggcgcaacgccacaaggtgtagggagtgtgcggggtggggcgaaaggggacccaagagtccctgtggctcggagtgccgggccgtcggttcttcattcctgccctcggggcagacggagtgaccccggcccccactccccgccccgaccatggtagtgttcaatggccttcttaagatcaaaatctgcgaggccgtgagcttgaagcccacagcctggtcgctgcgccatgcggtgggaccccggccgcagactttccttctcgacccctacattgccctcaatgtggacgactcgcgcatcggccaaacggccaccaagcagaagaccaacagcccggcctggcacgacgagttcgtcaccgatgtgtgcaacggacgcaagatcgagctggctgtctttcacgatgcccccataggctacgacgacttcgtggccaactgcaccatccagtttgaggagctgctgcagaacgggagccgccacttcgaggactggatattcaagtctgtgcttctgcttgactgaggatcatctaggaaatgaaactaaacttggcttcgacctagaccttgtgtgaccttgaggtcatcaccctctcacagtcaccctagagaatcctttacttacctgtgctgaaaaaaatgctcccatcagttaccctatgatgaggtctccagccctttcatcagaagacagagctttaaaatgcagcctctctaattctctgagacaaaatgatattgaaatcaggccacttaataaccctacaatgacctctaagtgttccagtgaaaggaagtctcagagctctcacttgaaatcaaaactagaaatgatgaagcttagtgaggaaggcatgttgaaagctgagacagctgaaagctaggcctcttgcaccagacggccaagttgtgaatgcaaaggaaaagttcttgaaggaaattaaaagtattgctc

SEQ ID NO: 324226 - DNA, 3216 bp, Homo sapiens
attcaccatttttctgtgggcactagctgatgcacttggacaaaagagaaaaagagggtgaatggaaagcagccctttgacagaagaaagacagagaccagtttccagtgagctcctgaggatattcaagtctgtgcttctgcttgactgaggatcatctaggaaatgaaactaaacttggcttcgacctagaccttgtgtgaccttgaggtcatcaccctctcacagtcaccctagagaatcctttacttacctgtgctgaaaaaaatgctcccatcagttaccctatgatgaggtctccagccctttcatcagaagacagagctttaaaatgcaggtgggtaacagtgacctgaagacatactaacaggggctggtgagggtcagcactagtggtgagaattctggagaacattttctttacccagaaacttaaaatcatggactcttggggagaaaggaatgagaaaaggcagcatgcggaattaccagtttgttatttggttcccatctggatttaaaaccgaagatcccaaactcagattgatctggagccagaaggaagagtgtatgtgatcatcgatctctcagggtcgtcgggtgaagcccctaaagacaatgaagagcgtgtgttcagggaacgcatgcggccgaggaagcggcagggggccgtcaggcgcagggtccatcaggtcaacggccacaagttcatggccacctatcttcggcagcccacctactgctcccattgcagagacttcatctggggtgtcataggaaagcagggataccagtgtcaagtctgcacctgcgtggtccacaagcggtgccacgagctcataatcacaaagtgtgctgggttaaagaagcaggagacccccgaccaggtgggctcccagcggttcagcgtcaacatgccccacaagttcggtatccacaactacaaggtccctaccttctgcgatcactgtgggtccctgctctggggactcttgcggcagggtttgcagtgtaaagtctgcaaaatgaatgttcaccgtcgatgtgagaccaacgtggctcccaactgtggagtggatgccagaggaatcgccaaagtactggccgacctgggcgttaccccagacaaaatcaccaacagcggccagagaaggaaaaagctcattgctggtgccgagtccccgcagcctgcttctggaagctcaccatctgaggaagatcgatccaagtcagcacccacctccccttgtgaccaggaaataaaagaacttgagaacaacattcggaaagccttgtcatttgacaaccgaggagaggagcaccgggcagcatcgtctcctgatggccagctgatgagccccggtgagaatggcgaagtccggcaaggccaggccaagcgcctgggcctggatgagttcaacttcatcaaggtgttgggcaaaggcagctttggcaaggtcatgttggcagaactcaagggcaaagatgaagtatatgctgtgaaggtcttaaagaaggacgtcatccttcaggatgatgacgtggactgcacaatgacagagaagaggattttggctctggcacggaaacacccgtaccttacccaactctactgctgcttccagaccaaggaccgcctctttttcgtcatggaatatgtaaatggtggagacctcatgtttcagattcagcgctcccgaaaattcgacgagcctcgttcacggttctatgctgcagaggtcacatcggccctcatgttcctccaccagcatggagtcatctacagggatttgaaactggacaacatccttctggatgcagaaggtcactgcaagctggctgacttcgggatgtgcaaggaagggattctgaatggtgtgacgaccaccacgttctgtgggactcctgactacatagctcctgagatcctgcaggagttggagtatggcccctccgtggactggtgggccctgggggtgctgatgtacgagatgatggctggacagcctccctttgaggccgacaatgaggacgacctatttgagtccatcctccatgacgacgtgctgtacccagtctggctcagcaaggaggctgtcagcatcttgaaagctttcatgacgaagaatccccacaagcgcctgggctgtgtggcatcgcagaatggcgaggacgccatcaagcagcacccattcttcaaagagattgactgggtgctcctggagcagaagaagatcaagccacccttcaaaccacgcattaaaaccaaaagagacgtcaataattttgaccaagactttacccgggaagagccggtactcacccttgtggacgaagcaattgtaaagcagatcaaccaggaggaattcaaaggtttctcctactttggtgaagacctgatgccctgagagcccactgcagttggactttgccgatgctgcaagaaggggtgcagagaagactcctgtgttggagacactcagcaggtcttgaactacttctcctcctcggagccccagtcccatgtccactgtctatttattgcattcccttgccccaggccacctcctccccctcccacctggtgaccagaaggcgctctcggttcttgtctcaccagtaatgcagactcattgggtcagcaattagctgtatacactgccgtgtttggaccattggcaagcctggttccactcctcaggggctcctggcagtgaagcaacttcagttcttttactgcaaagaacagaaaaaagaaagaaagcaaacaagaagactccggctctgctatcggacacagatcctgatccctcttgcttcttttccctcctgcaccgcagcttgccatccctgcccttctgtcctggagaagagactggtgcttctccgcacacacgagggagggcgcccttgaggcatgccctctgagggagggagaccagagatgcagggattggccagctgggttggtttgctctggaatggctaactcttgcctgctttggttttagcttttcagcatgccaaagtcatgtaagtttgtgtcttgtggaagaaatcctctttgtggaaaaagaaacagggttttgaactctgttaacatttgaaaaatatattttcaaattcactttctaattggccaaaagagatgagttccagtctgaatacaggtagatattaaagggctaataaaaaatgagaaaccggtcgtccaag

SEQ ID NO: 324227 - DNA, 704 bp, Homo sapiens
acgcgcagtgacgcgccggccatgccggcggctgttgtcgggcctccagcgggcggggccgttggcggagcagagcggaggcgcagccgggcggagggcccacgagggctcagccttcccggtcagcggtggtgacggtatcccagagtgccagagaaccgttgcttttccgagttgctcttcttccaggctccgttggtggtcggcatggcccgtggaaatcaacgagaacttgcccgccagaaaaacatgaagaaaacccaggaaattagcaagggaaagaggaaagaggatagcttgactgcctctcagagaaagcagagggactctgagatcatgcaagaaaagcagaaggcagctaatgagaagaagtctatgcagacaagagaaaagtgatgactggctatttggaaaacctgggtgctactgccaactgggtgtatcataagctctaagatcaagattttgtagagtggacagtcattacatatgttataacttatcctttaaaaactattttaaactttatcctttcagctttacttagtgcgatgttttagaagcagtcttcaaagaataaaacactaaccatgcatgtgacatattggtgaacattatttttattattgaacattcatatataatttattaggtaatatgatcagataataggatctcttatataataaagaatctttgtcatc

SEQ ID NO: 324228 - DNA, 600 bp, Homo sapiens
acgcgcagtgacgcgccggccatgccggcggctgttgtcgggcctccagcgggcggggccgttggcggagcagagcggaggcgcagccgggcggagggcccacgagggctcagccttcccggtcagcggtggtgacggtatcccagagtgccagagaaccgttgcttttccgagttgctcttcttccaggctccgttggtggtcggcatggcccgtggaaatcaacgagaacttgcccgccagaaaaacatgaagaaaacccaggaaattagcaagggaaagaggaaagaggatagcttgactgcctctcagagaaagcagagggactctgagatcatgcaagaaaagcagaaggcagctaatgagaagaagtctatgcagacaagagaaaagtgatgactggctatttggaaaacctgggtgctactgccaactgggtgtatcataagctctaagatcaagattttgtagagtggacagtcattacatatgttataacttatcctttaaaaactattttaaactttatcctttcagctttacttagtgcgatgttttagaagcagtcttcaaagaataaaacactaaccatgcatgtga

SEQ ID NO: 324229 - DNA, 472 bp, Homo sapiens
cctgcccctcaggtgcgagtttgtgcggtaaagaacacaccccggagatgtggacacggccgccccaggagggtccttgtttggaggtggaaatcaacgagaacttgcccgccagaaaaacatgaagaaaacccaggaaattagcaagggaaagaggaaagaggatagcttgactgcctctcagagaaagcagagggactctgagatcatgcaagaaaagcagaaggcagctaatgagaagaagtctatgcagacaagagaaaagtgatgactggctatttggaaaacctgggtgctactgccaactgggtgtatcataagctctaagatcaagattttgtagagtggacagtcattacatatgttataacttatcctttaaaaactattttaaactttatcctttcagctttacttagtgcgatgttttagaagcagtcttcaaagaataaaacactaaccatgcatgtga

SEQ ID NO: 324230 - DNA, 469 bp, Homo sapiens
taatctactcatggtatgtggataggaattaaattgtaggggcattcacttgatggcattcattcttagaacatttacctatgtctagcttttggagtaaagtcacataacctctaaccaggtaagtttcctgtggctttatttaggattttaaatactcattttcagtgtaattttgttatgtgtggattaagatgactcttggtactaacatacattttctgattaaacctatctgaacatgagttgtttttatttcttaccctttccagagcgatgattctgacatttgggatgatacagcactgataaaagcatatgataaagctgtggcttcatttaaggtatgaaatgcttgcttagtcgttttcttattttctcgttattcatttggaaaggaattgataacatacgataaagtgttaaagtacatgttattcagttttcattttgaagattaaggatagag

SEQ ID NO: 324231 - DNA, 296 bp, Homo sapiens
ggacggggccccacgctgcgcacccgcgggtttgctatggcgatgagcagcggcggcagtggtggcggcgtcccggagcaggaggattccgtgctgttccggcgcggcacaggccaggtgaggtcgcagccagtgcagtctccctattagcgctctcagcacccttcttccggcccaactctccttccgcagcctcgggacagcatcaagtcgatccgctcactggagttgtggtccgcgtttttctacgtcttttcccactccgttccctgcgaaccacatccgcaagctccttc

SEQ ID NO: 324232 - DNA, 1815 bp, Homo sapiens
acgcgcagtgacgcgccggccatgccggcggctgttgtcgggcctccagcgggcggggccgttggcggagcagagcggaggcgcagccgggcggagggcccacgagggctcagccttcccggtcagcggtggtgacggtatcccagagtgccagagaaccgttgcttttccgagttgctcttcttccaggctccgttggtggtcggcatggcccgtggaaatcaacgagaacttgcccgccagaaaaacatgaagaaaacccaggaaattagcaagggaaagaggaaagaggatagcttgactgcctctcagagaaagcagagttctggaggccagaaatctgagagcaagatgtcagctgggccacacctccctctgaaggctccaagggagaatccttgctttcctcttccagctgctggtggctccagagcgatgattctgacatttgggatgatacagcactgataaaagcatatgataaagctgtggcttcatttaagcatgctctaaagaatggtgacatttgtgaaacttcgggtaaaccaaaaaccacacctaaaagaaaacctgctaagaagaataaaagccaaaagaagaatactgcagcttccttacaacagtggaaagttggggacaaatgttctgccatttggtcagaagacggttgcatttacccagctaccattgcttcaattgattttaagagagaaacctgtgttgtggtttacactggatatggaaatagagaggagcaaaatctgtccgatctactttccccaatctgtgaagtagctaataatatagaacaaaatgctcaagagaatgaaaatgaaagccaagtttcaacagatgaaagtgagaactccaggtctcctggaaataaatcagataacatcaagcccaaatctgctccatggaactcttttctccctccaccaccccccatgccagggccaagactgggaccaggaaagccaggtctaaaattcaatggcccaccaccgccaccgccaccaccaccaccccacttactatcatgctggctgcctccatttccttctggaccaccaataattcccccaccacctcccatatgtccagattctcttgatgatgctgatgctttgggaagtatgttaatttcatggtacatgagtggctatcatactggctattatatgggtttcagacaaaatcaaaaagaaggaaggtgctcacattccttaaattaaggagaaatgctggcatagagcagcactaaatgacaccactaaagaaacgatcagacagatctggaatgtgaagcgttatagaagataactggcctcatttcttcaaaatatcaagtgttgggaaagaaaaaaggaagtggaatgggtaactcttcttgattaaaagttatgtaataaccaaatgcaatgtgaaatattttactggactctattttgaaaaaccatctgtaaaagactggggtgggggtgggaggccagcacggtggtgaggcagttgagaaaatttgaatgtggattagattttgaatgatattggataattattggtaattttatgagctgtgagaagggtgttgtagtttataaaagactgtcttaatttgcatacttaagcatttaggaatgaagtgttagagtgtcttaaaatgtttcaaatggtttaacaaaatgtatgtgaggcgtatgtggcaaaatgttacagaatctaactggtggacatggctgttcattgtactgtttttttctatcttctatatgtttaaaagtatataataaaaatatttaatttttttttaaatta

SEQ ID NO: 324233 - DNA, 1687 bp, Homo sapiens
cctgcccctcaggtgcgagtttgtgcggtaaagaacacaccccggagatgtggacacggccgccccaggagggtccttgtttggaggtggaaatcaacgagaacttgcccgccagaaaaacatgaagaaaacccaggaaattagcaagggaaagaggaaagaggatagcttgactgcctctcagagaaagcagagttctggaggccagaaatctgagagcaagatgtcagctgggccacacctccctctgaaggctccaagggagaatccttgctttcctcttccagctgctggtggctccagagcgatgattctgacatttgggatgatacagcactgataaaagcatatgataaagctgtggcttcatttaagcatgctctaaagaatggtgacatttgtgaaacttcgggtaaaccaaaaaccacacctaaaagaaaacctgctaagaagaataaaagccaaaagaagaatactgcagcttccttacaacagtggaaagttggggacaaatgttctgccatttggtcagaagacggttgcatttacccagctaccattgcttcaattgattttaagagagaaacctgtgttgtggtttacactggatatggaaatagagaggagcaaaatctgtccgatctactttccccaatctgtgaagtagctaataatatagaacaaaatgctcaagagaatgaaaatgaaagccaagtttcaacagatgaaagtgagaactccaggtctcctggaaataaatcagataacatcaagcccaaatctgctccatggaactcttttctccctccaccaccccccatgccagggccaagactgggaccaggaaagccaggtctaaaattcaatggcccaccaccgccaccgccaccaccaccaccccacttactatcatgctggctgcctccatttccttctggaccaccaataattcccccaccacctcccatatgtccagattctcttgatgatgctgatgctttgggaagtatgttaatttcatggtacatgagtggctatcatactggctattatatgggtttcagacaaaatcaaaaagaaggaaggtgctcacattccttaaattaaggagaaatgctggcatagagcagcactaaatgacaccactaaagaaacgatcagacagatctggaatgtgaagcgttatagaagataactggcctcatttcttcaaaatatcaagtgttgggaaagaaaaaaggaagtggaatgggtaactcttcttgattaaaagttatgtaataaccaaatgcaatgtgaaatattttactggactctattttgaaaaaccatctgtaaaagactggggtgggggtgggaggccagcacggtggtgaggcagttgagaaaatttgaatgtggattagattttgaatgatattggataattattggtaattttatgagctgtgagaagggtgttgtagtttataaaagactgtcttaatttgcatacttaagcatttaggaatgaagtgttagagtgtcttaaaatgtttcaaatggtttaacaaaatgtatgtgaggcgtatgtggcaaaatgttacagaatctaactggtggacatggctgttcattgtactgtttttttctatcttctatatgtttaaaagtatataataaaaatatttaatttttttttaaatta

SEQ ID NO: 324234 - DNA, 1945 bp, Homo sapiens
ggacggggccccacgctgcgcacccgcgggtttgctatggcgatgagcagcggcggcagtggtggcggcgtcccggagcaggaggattccgtgctgttccggcgcggcacaggccagagcgatgattctgacatttgggatgatacagcactgataaaagcatatgataaagctgtggcttcatttaagcatgctctaaagaatggtgacatttgtgaaacttcgggtaaaccaaaaaccacacctaaaagaaaacctgctaagaagaataaaagccaaaagaagaatactgcagcttccttacaacagtggaaagttggggacaaatgttctgccatttggtcagaagacggttgcatttacccagctaccattgcttcaattgattttaagagagaaacctgtgttgtggtttacactggatatggaaatagagaggagcaaaatctgtccgatctactttccccaatctgtgaagtagctaataatatagaacaaaatgctcaagagaatgaaaatgaaagccaagtttcaacagatgaaagtgagaactccaggtctcctggaaataaatcagataacatcaagcccaaatctgctccatggaactcttttctccctccaccaccccccatgccagggccaagactgggaccaggaaagccaggtctaaaattcaatggcccaccaccgccaccgccaccaccaccaccccacttactatcatgctggctgcctccatttccttctggaccaccaataattcccccaccacctcccatatgtccagattctcttgatgatgctgatgctttgggaagtatgttaatttcatggtacatgagtggctatcatactggctattatatgggtttcagacaaaatcaaaaagaaggaaggtgctcacattccttaaattaaggagtaagtctgccagcattatgaaagtgaatcttacttttgtaaaactttatggtttgtggaaaacaaatgtttttgaacatttaaaaagttcagatgttaaaaagttgaaaggttaatgtaaaacaatcaatattaaagaattttgatgccaaaactattagataaaaggttaatctacatccctactagaattctcatacttaactggttggttatgtggaagaaacatactttcacaataaagagctttaggatatgatgccattttatatcactagtaggcagaccagcagacttttttttattgtgatatgggataacctaggcatactgcactgtacactctgacatatgaagtgctctagtcaagtttaactggtgtccacagaggacatggtttaactggaattcgtcaagcctctggttctaatttctcatttgcaggaaatgctggcatagagcagcactaaatgacaccactaaagaaacgatcagacagatctggaatgtgaagcgttatagaagataactggcctcatttcttcaaaatatcaagtgttgggaaagaaaaaaggaagtggaatgggtaactcttcttgattaaaagttatgtaataaccaaatgcaatgtgaaatattttactggactctattttgaaaaaccatctgtaaaagactggggtgggggtgggaggccagcacggtggtgaggcagttgagaaaatttgaatgtggattagattttgaatgatattggataattattggtaattttatgagctgtgagaagggtgttgtagtttataaaagactgtcttaatttgcatacttaagcatttaggaatgaagtgttagagtgtcttaaaatgtttcaaatggtttaacaaaatgtatgtgaggcgtatgtggcaaaatgttacagaatctaactggtggacatggctgttcattgtactgtttttttctatcttctatatgtttaaaagtatataataaaaatatttaatttttttttaaatta

SEQ ID NO: 324235 - DNA, 1459 bp, Homo sapiens
ggacggggccccacgctgcgcacccgcgggtttgctatggcgatgagcagcggcggcagtggtggcggcgtcccggagcaggaggattccgtgctgttccggcgcggcacaggccagagcgatgattctgacatttgggatgatacagcactgataaaagcatatgataaagctgtggcttcatttaagcatgctctaaagaatggtgacatttgtgaaacttcgggtaaaccaaaaaccacacctaaaagaaaacctgctaagaagtggaaagttggggacaaatgttctgccatttggtcagaagacggttgcatttacccagctaccattgcttcaattgattttaagagagaaacctgtgttgtggtttacactggatatggaaatagagaggagcaaaatctgtccgatctactttccccaatctgtgaagtagctaataatatagaacaaaatgctcaagagaatgaaaatgaaagccaagtttcaacagatgaaagtgagaactccaggtctcctggaaataaatcagataacatcaagcccaaatctgctccatggaactcttttctccctccaccaccccccatgccagggccaagactgggaccaggaaagccaggtctaaaattcaatggcccaccaccgccaccgccaccaccaccaccccacttactatcatgctggctgcctccatttccttctggaccaccaataattcccccaccacctcccatatgtccagattctcttgatgatgctgatgctttgggaagtatgttaatttcatggtacatgagtggctatcatactggctattatatgggtttcagacaaaatcaaaaagaaggaaggtgctcacattccttaaattaaggagaaatgctggcatagagcagcactaaatgacaccactaaagaaacgatcagacagatctggaatgtgaagcgttatagaagataactggcctcatttcttcaaaatatcaagtgttgggaaagaaaaaaggaagtggaatgggtaactcttcttgattaaaagttatgtaataaccaaatgcaatgtgaaatattttactggactctattttgaaaaaccatctgtaaaagactggggtgggggtgggaggccagcacggtggtgaggcagttgagaaaatttgaatgtggattagattttgaatgatattggataattattggtaattttatgagctgtgagaagggtgttgtagtttataaaagactgtcttaatttgcatacttaagcatttaggaatgaagtgttagagtgtcttaaaatgtttcaaatggtttaacaaaatgtatgtgaggcgtatgtggcaaaatgttacagaatctaactggtggacatggctgttcattgtactgtttttttctatcttctatatgtttaaaagtatataataaaaatatttaatttttttttaaatta

SEQ ID NO: 324236 - DNA, 1188 bp, Homo sapiens
gcgaaatcgtggtctggcatacttctctgacaactcaagggccagacacattcctgtagcagtgaccaagcccgatctgggcccatggccttagctaacagaagtgccacattctccacattgatgggggaaggcccatcactgaggctcccatttagtgactcctggggggctggcctcgtgctcttgctcaagagaatgaaaatgaaagccaagtttcaacagatgaaagtgagaactccaggtctcctggaaataaatcagataacatcaagcccaaatctgctccatggaactcttttctccctccaccaccccccatgccagggccaagactgggaccaggaaagccaggtctaaaattcaatggcccaccaccgccaccgccaccaccaccaccccacttactatcatgctggctgcctccatttccttctggaccaccaataattcccccaccacctcccatatgtccagattctcttgatgatgctgatgctttgggaagtatgttaatttcatggtacatgagtggctatcatactggctattatatgggtttcagacaaaatcaaaaagaaggaaggtgctcacattccttaaattaaggagaaatgctggcatagagcagcactaaatgacaccactaaagaaacgatcagacagatctggaatgtgaagcgttatagaagataactggcctcatttcttcaaaatatcaagtgttgggaaagaaaaaaggaagtggaatgggtaactcttcttgattaaaagttatgtaataaccaaatgcaatgtgaaatattttactggactctattttgaaaaaccatctgtaaaagactggggtgggggtgggaggccagcacggtggtgaggcagttgagaaaatttgaatgtggattagattttgaatgatattggataattattggtaattttatgagctgtgagaagggtgttgtagtttataaaagactgtcttaatttgcatacttaagcatttaggaatgaagtgttagagtgtcttaaaatgtttcaaatggtttaacaaaatgtatgtgaggcgtatgtggcaaaatgttacagaatctaactggtggacatggctgttcattgtactgtttttttctatcttctatatgtttaaaagtatataataaaaatatttaatttttttttaaatta

SEQ ID NO: 324237 - DNA, 875 bp, Homo sapiens
  misc_feature (8)..(8): n is a, c, g, or t
actcgtcnaccggactgcggcggtgtggagattcggcgtgtgcagtttggattttcggcgtgtgcatgcacacgccgagtacccagcccacttactatcatgctggctgcctccatttccttctggaccaccaataattcccccaccacctcccatatgtccagattctcttgatgatgctgatgctttgggaagtatgttaatttcatggtacatgagtggctatcatactggctattatatgggtttcagacaaaatcaaaaagaaggaaggtgctcacattccttaaattaaggagaaatgctggcatagagcagcactaaatgacaccactaaagaaacgatcagacagatctggaatgtgaagcgttatagaagataactggcctcatttcttcaaaatatcaagtgttgggaaagaaaaaaggaagtggaatgggtaactcttcttgattaaaagttatgtaataaccaaatgcaatgtgaaatattttactggactctattttgaaaaaccatctgtaaaagactggggtgggggtgggaggccagcacggtggtgaggcagttgagaaaatttgaatgtggattagattttgaatgatattggataattattggtaattttatgagctgtgagaagggtgttgtagtttataaaagactgtcttaatttgcatacttaagcatttaggaatgaagtgttagagtgtcttaaaatgtttcaaatggtttaacaaaatgtatgtgaggcgtatgtggcaaaatgttacagaatctaactggtggacatggctgttcattgtactgtttttttctatcttctatatgtttaaaagtatataataaaaatatttaatttttttttaaatta

SEQ ID NO: 324238 - DNA, 1318 bp, Homo sapiens
tgactgtgggccttatgcagcaaaagcctatactcattagttcccagaaaatttagcatcttaatggtattttaatctgaatctcttttggtggagctagttaccaataagtcatccatgtgttggataatcgtgtcttatttaattgtaacattcttaattctctagccaatgcatttccagacaaatgagggctatccctaaacccttggggaagaaaccgtccaagttaatgactaccagaatcagtctattcaaaagcaacgatgaattgtgaatcagggtgtactggaatgcacaaaaaacggcatcctttgccaggtacagtggctcatgcctgtaatcccggcattttagaaggctgaggcaggaggatcacttgagctcaggagtttgagaccagtctgggcaacatagcaagacctcgtctttgtttaggggaaaaaaaagaaatttaagtaggagattatataagcaaaaatacaattaatttccagcattcactatataatataaatctccagactttacttttttgtttactggatataaacaatatctttttctgtctccagaataattcccccaccacctcccatatgtccagattctcttgatgatgctgatgctttgggaagtatgttaatttcatggtacatgagtggctatcatactggctattatatgggtttcagacaaaatcaaaaagaaggaaggtgctcacattccttaaattaaggagaaatgctggcatagagcagcactaaatgacaccactaaagaaacgatcagacagatctggaatgtgaagcgttatagaagataactggcctcatttcttcaaaatatcaagtgttgggaaagaaaaaaggaagtggaatgggtaactcttcttgattaaaagttatgtaataaccaaatgcaatgtgaaatattttactggactctattttgaaaaaccatctgtaaaagactggggtgggggtgggaggccagcacggtggtgaggcagttgagaaaatttgaatgtggattagattttgaatgatattggataattattggtaattttatgagctgtgagaagggtgttgtagtttataaaagactgtcttaatttgcatacttaagcatttaggaatgaagtgttagagtgtcttaaaatgtttcaaatggtttaacaaaatgtatgtgaggcgtatgtggcaaaatgttacagaatctaactggtggacatggctgttcattgtactgtttttttctatcttctatatgtttaaaagtatataataaaaatatttaatttttttttaaatta

SEQ ID NO: 324239 - DNA, 862 bp, Homo sapiens
gtaaccacgttctcctgatcaaatatcactctcctacttacaggactcaacatactagtcacagccctatactccctctacatatttaccacaacacaatggggctcactcacccaccacatttacaacataaaaccctcattcacacgagtaaacaccctcatgttcatacacataattcccccaccacctcccatatgtccagattctcttgatgatgctgatgctttgggaagtatgttaatttcatggtacatgagtggctatcatactggctattatatggaaatgctggcatagagcagcactaaatgacaccactaaagaaacgatcagacagatctggaatgtgaagcgttatagaagataactggcctcatttcttcaaaatatcaagtgttgggaaagaaaaaaggaagtggaatgggtaactcttcttgattaaaagttatgtaataaccaaatgcaatgtgaaatattttactggactctattttgaaaaaccatctgtaaaagactggggtgggggtgggaggccagcacggtggtgaggcagttgagaaaatttgaatgtggattagattttgaatgatattggataattattggtaattttatgagctgtgagaagggtgttgtagtttataaaagactgtcttaatttgcatacttaagcatttaggaatgaagtgttagagtgtcttaaaatgtttcaaatggtttaacaaaatgtatgtgaggcgtatgtggcaaaatgttacagaatctaactggtggacatggctgttcattgtactgtttttttctatcttctatatgtttaaaagtatataataaaaatatttaatttttttttaaatta

SEQ ID NO: 324240 - DNA, 1144 bp, Homo sapiens
aagctatctatatatagctatctatgtctatatagctattttttttaacttcctttattttccttacagggtttcagacaaaatcaaaaagaaggaaggtgctcacattccttaaattaaggagtaagtctgccagcattatgaaagtgaatcttacttttgtaaaactttatggtttgtggaaaacaaatgtttttgaacatttaaaaagttcagatgttaaaaagttgaaaggttaatgtaaaacaatcaatattaaagaattttgatgccaaaactattagataaaaggttaatctacatccctactagaattctcatacttaactggttggttatgtggaagaaacatactttcacaataaagagctttaggatatgatgccattttatatcactagtaggcagaccagcagacttttttttattgtgatatgggataacctaggcatactgcactgtacactctgacatatgaagtgctctagtcaagtttaactggtgtccacagaggacatggtttaactggaattcgtcaagcctctggttctaatttctcatttgcaggaaatgctggcatagagcagcactaaatgacaccactaaagaaacgatcagacagatctggaatgtgaagcgttatagaagataactggcctcatttcttcaaaatatcaagtgttgggaaagaaaaaaggaagtggaatgggtaactcttcttgattaaaagttatgtaataaccaaatgcaatgtgaaatattttactggactctattttgaaaaaccatctgtaaaagactggggtgggggtgggaggccagcacggtggtgaggcagttgagaaaatttgaatgtggattagattttgaatgatattggataattattggtaattttatgagctgtgagaagggtgttgtagtttataaaagactgtcttaatttgcatacttaagcatttaggaatgaagtgttagagtgtcttaaaatgtttcaaatggtttaacaaaatgtatgtgaggcgtatgtggcaaaatgttacagaatctaactggtggacatggctgttcattgtactgtttttttctatcttctatatgtttaaaagtatataataaaaatatttaatttttttttaaatta

SEQ ID NO: 324241 - DNA, 1988 bp, Homo sapiens
ggacggggccccacgctgcgcacccgcgggtttgctatggcgatgagcagcggcggcagtggtggcggcgtcccggagcaggaggattccgtgctgttccggcgcggcacaggccagagcgatgattctgacatttgggatgatacagcactgataaaagcatatgataaagctgtggcttcatttaagcatgctctaaagaatggtgacatttgtgaaacttcgggtaaaccaaaaaccacacctaaaagaaaacctgctaagaagaataaaagccaaaagaagaatactgcagcttccttacaacagtggaaagttggggacaaatgttctgccatttggtcagaagacggttgcatttacccagctaccattgcttcaattgattttaagagagaaacctgtgttgtggtttacactggatatggaaatagagaggagcaaaatctgtccgatctactttccccaatctgtgaagtagctaataatatagaacaaaatgctcaagagaatgaaaatgaaagccaagtttcaacagatgaaagtgagaactccaggtctcctggaaataaatcagataacatcaagcccaaatctgctccatggaactcttttctccctccaccaccccccatgccagggccaagactgggaccaggaaagccaggtctaaaattcaatggcccaccaccgccaccgccaccaccaccaccccacttactatcatgctggctgcctccatttccttctggaccaccaataattcccccaccacctcccatatgtccagattctcttgatgatgctgatgctttgggaagtatgttaatttcatggtacatgagtggctatcatactggctattatatgggtttcagacaaaatcaaaaagaaggaaggtgctcacattccttaaattaaggagaaatgctggcatagagcagcactaaatgacaccactaaagaaacgatcagacagatctggaatgtgaagcgttatagaagataactggcctcatttcttcaaaatatcaagtgttgggaaagaaaaaaggaagtggaatgggtaactcttcttgattaaaagttatgtaataaccaaatgcaatgtgaaatattttactggactctattttgaaaaaccatctgtaaaagactggggtgggggtgggaggccagcacggtggtgaggcagttgagaaaatttgaatgtggattagattttgaatgatattggataattattggtaattttatgagctgtgagaagggtgttgtagtttataaaagactgtcttaatttgcatacttaagcatttaggaatgaagtgttagagtgtcttaaaatgtttcaaatggtttaacaaaatgtatgtgaggcgtatgtggcaaaatgttacagaatctaactggtggacatggctgttcattgtactgtttttttctatcttctatatgtttaaaagtatataataaaaatatttaatttttttttaaattaacacacacaaaaaaaaaaaaaaaaacgcacccaaaaagaacagatcaaacaagaacaaagcaaaagaaacaacacaggagggggcgcgcgtcaaaagatatcacccgagaggggcgaccatgttgagcgtgcgccaccacagtattgtgtcaacaagggggccccacaaggaggaggcgcatcattatacacacgacacaggggcgcgcatataaaaaaacacgaccgggggacgggggagaaaacaggcgtggcccgagaaacaactcgggggagaagaacccccccaacaccatcggggggagggcaaacaaaaaggggagcaacaacaccacaagaagaaagaaataaaaaagcccccggaggggaaataacagacagacagagagacaataacatgcggcgaacaacacgggacgataagcggcgggcgatagaaaaatgtcgccgcaacggcagaagtaagagaaaaaaagaaataacgcgg

SEQ ID NO: 324242 - DNA, 1356 bp, Homo sapiens
  misc_feature (1356)..(1356): n is a, c, g, or t
ggacggggccccacgctgcgcacccgcgggtttgctatggcgatgagcagcggcggcagtggtggcggcgtcccggagcaggaggattccgtgctgttccggcgcggcacaggccagagcgatgattctgacatttgggatgatacagcactgataaaagcatatgataaagctgtggcttcatttaagcatgctctaaagaatggtgacatttgtgaaacttcgggtaaaccaaaaaccacacctaaaagaaaacctgctaagaagaataaaagccaaaagaagaatactgcagcttccttacaacagtggaaagttggggacaaatgttctgccatttggtcagaagacggttgcatttacccagctaccattgcttcaattgattttaagagagaaacctgtgttgtggtttacactggatatggaaatagagaggagcaaaatctgtccgatctactttccccaatctgtgaagtagctaataatatagaacaaaatgctcaagagaatgaaaatgaaagccaagtttcaacagatgaaagtgagaactccaggtctcctggaaataaatcagataacatcaagcccaaatctgctccatggaactcttttctccctccaccaccccccatgccagggccaagactgggaccaggaaagccaggtctaaaattcaatggcccaccaccgccaccgccaccaccaccaccccacttactatcatgctggctgcctccatttccttctggaccaccaataattcccccaccacctcccatatgtccagattctcttgatgatgctgatgctttgggaagtatgttaatttcatggtacatgagtggctatcatactggctattatatgggtttcagacaaaatcaaaaagaaggaaggtgctcacattccttaaattaaggagaaatgctggcatagagcagcactaaatgacaccactaaagaaacgatcagacagatctggaatgtgaagcgttatagaagataactggcctcatttcttcaaaatatcaagtgttgggaaagaaaaaaggaagtggaatgggtaactcttcttgattaaaagttatgtaataaccaaatgcaatgtgaaatattttactggactctattttgaaaaaccatctgtaaaagactggggtgggggtgggaggccagcacggtggtgaggcagttgagaaaatttgaatgtggattagattttgaatgatattggataattattggtaattttatgagctgtgagaagggtgttgtagtttataaaagactgtcttaatttgcatacttaagcatttaggaatgaagaaagagtgctggcggtaccgagccgan

SEQ ID NO: 324243 - DNA, 973 bp, Homo sapiens
ggacggggccccacgctgcgcacccgcgggtttgctatggcgatgagcagcggcggcagtggtggcggcgtcccggagcaggaggattccgtgctgttccggcgcggcacaggccagagcgatgattctgacatttgggatgatacagcactgataaaagcatatgataaagctgtggcttcatttaagcatgctctaaagaatggtgacatttgtgaaacttcgggtaaaccaaaaaccacacctaaaagaaaacctgctaagaagaataaaagccaaaagaagaatactgcagcttccttacaacagtggaaagttggggacaaatgttctgccatttggtcagaagacggttgcatttacccagctaccattgcttcaattgattttaagagagaaacctgtgttgtggtttacactggatatggaaatagagaggagcaaaatctgtccgatctactttccccaatctgtgaagtagctaataatatagaacaaaatgctcaagagaatgaaaatgaaagccaagtttcaacagatgaaagtgagaactccaggtctcctggaaataaatcagataacatcaagcccaaatctgctccatggaactcttttctccctccaccaccccccatgccagggccaagactgggaccaggaaagccaggtctaaaattcaatggcccaccaccgccaccgccaccaccaccaccccacttactatcatgctggctgcctccatttccttctggaccaccaataattcccccaccacctcccatatgtccagattctcttgatgatgctgatgctttgggaagtatgttaatttcatggtacatgagtggctatcatactggctattatatggtaagtaatcactcagcatcttttcctgacaatttttttgtagttatgtgactttgttttgtaaatttataaaatactacttgcttctctctttatattacta

SEQ ID NO: 324244 - DNA, 790 bp, Homo sapiens
tgactgtgggccttatgcagcaaaagcctatactcattagttcccagaaaatttagcatcttaatggtattttaatctgaatctcttttggtggagctagttaccaataagtcatccatgtgttggataatcgtgtcttatttaattgtaacattcttaattctctagccaatgcatttccagacaaatgagggctatccctaaacccttggggaagaaaccgtccaagttaatgactaccagaatcagtctattcaaaagcaacgatgaattgtgaatcagggtgtactggaatgcacaaaaaacggcatcctttgccaggtacagtggctcatgcctgtaatcccggcattttagaaggctgaggcaggaggatcacttgagctcaggagtttgagaccagtctgggcaacatagcaagacctcgtctttgtttaggggaaaaaaaagaaatttaagtaggagattatataagcaaaaatacaattaatttccagcattcactatataatataaatctccagactttacttttttgtttactggatataaacaatatctttttctgtctccagaataattcccccaccacctcccatatgtccagattctcttgatgatgctgatgctttgggaagtatgttaatttcatggtacatgagtggctatcatactggctattatatggtaagtaatcactcagcatcttttcctgacaatttttttgtagttatgtgactttgttttgtaaatttataaaatactacttgcttctctctttatattacta

SEQ ID NO: 324245 - DNA, 252 bp, Homo sapiens
ccctccaccaccccccatgccagggccaagactgggaccaggaaaggtaaaccttctatgaaagttttccagaaaatagttaatgtcgggacatttaacctctctgttaactaatttgtagctctcccatgaaacttttgtagcttaaatacacaagaattttttgaaaaggaaataagataatgatgcaaaatagttaattttttaaaaaaatgttagacactgcagtggatgcaacaaaatactttatat

SEQ ID NO: 324246 - DNA, 510 bp, Homo sapiens
tgtttattggaattattaataattttggagatgggaaaagagcatgactgtttgactttgtaggtggaaatcaacgagaacttgcccgccagaaaaacatgaagaaaacccaggaaattagcaagggaaagaggaaagaggatagcttgactgcctctcagagaaagcagaggtacgtggtactaatttaattctaaagtcactgacgttgtgattgaagcaacattttgggctgggtgtgttgcctcatgcctgtaatcccggcagtttgggagagtcgggagaactgcttgaagccaagagtttgagaccaacttggacaacatagccagcccctgtatctacaaaatatttttttaaattggccaggcatggtagcacatggctgtggtctcggctactctggaggctgaggcgggagaatcgcttgagcccaggaggttaaggccgcagtaagctgcgattgcaccactgcactccagcctggatggcagagttagaccctgtctc

SEQ ID NO: 324247 - DNA, 963 bp, Homo sapiens
acgcgcagtgacgcgccggccatgccggcggctgttgtcgggcctccagcgggcggggccgttggcggagcagagcggaggcgcagccgggcggagggcccacgagggctcagccttcccggtcagcggtggtgacggtatcccagagtgccagagaaccgttgcttttccgagttgctcttcttccaggctccgttggtggtcggcatggcccgtggaaatcaacgagaacttgcccgccagaaaaacatgaagaaaacccaggaaattagcaagggaaagaggaaagaggatagcttgactgcctctcagagaaagcagagggactctgagatcatgcaagaaaagcagaaggcagctaatgagaagaagtctatgcagacaagagaaaagtgatgactggctatttggaaaacctgggtgctactgccaactgggtgtatcataagctctaagatcaagattttgtagagtggacagtcattacatatgttataacttatcctttaaaaactattttaaactttatcctttcagctttacttagtgcgatgttttagaagcagtcttcaaagaataaaacactaaccatgcatgtgacatattggtgaacattatttttattattgaacattcatatataatttattaggtaatatgatcagataataggatctcttatataataaagaatctttgtcatcagctttgttaacatagtttttttttcctcacagtttctaaggataaggataaagtagatctttgaagtaaacttaaatatataatagaagttagggtccatttgtataattttgctttgaaatcaagttaaagggccaggtgcggtggcttatgcccacaatcccagcactttgggaggccgaggcgggcggatcacttgaggtcaggagtttgagaccagcctgaccaacatgatgaaacctcatctttactaaaaat

SEQ ID NO: 324248 - DNA, 1501 bp, Homo sapiens
ggacggggccccacgctgcgcacccgcgggtttgctatggcgatgagcagcggcggcagtggtggcggcgtcccggagcaggaggattccgtgctgttccggcgcggcacaggccagagcgatgattctgacatttgggatgatacagcactgataaaagcatatgataaagctgtggcttcatttaagcatgctctaaagaatggtgacatttgtgaaacttcgggtaaaccaaaaaccacacctaaaagaaaacctgctaagaagaataaaagccaaaagaagaatactgcagcttccttacaacagtggaaagttggggacaaatgttctgccatttggtcagaagacggttgcatttacccagctaccattgcttcaattgattttaagagagaaacctgtgttgtggtttacactggatatggaaatagagaggagcaaaatctgtccgatctactttccccaatctgtgaagtagctaataatatagaacaaaatgctcaagagaatgaaaatgaaagccaagtttcaacagatgaaagtgagaactccaggtctcctggaaataaatcagataacatcaagcccaaatctgctccatggaactcttttctccctccaccaccccccatgccagggccaagactgggaccaggaaagccaggtctaaaattcaatggcccaccaccgccaccgccaccaccaccaccccacttactatcatgctggctgcctccatttccttctggaccaccaataattcccccaccacctcccatatgtccagattctcttgatgatgctgatgctttgggaagtatgttaatttcatggtacatgagtggctatcatactggctattatatgggtttcagacaaaatcaaaaagaaggaaggtgctcacattccttaaattaaggagaaatgctggcatagagcagcactaaatgacaccactaaagaaacgatcagacagatctggaatgtgaagcgttatagaagataactggcctcatttcttcaaaatatcaagtgttgggaaagaaaaaaggaagtggaatgggtaactcttcttgattaaaagttatgtaataaccaaatgcaatgtgaaatattttactggactctattttgaaaaaccatctgtaaaagactggggtgggggtgggaggccagcacggtggtgaggcagttgagaaaatttgaatgtggattagattttgaatgatattggataattattggtaattttatgagctgtgagaagggtgttgtagtttataaaagactgtcttaatttgcatacttaagcatttaggaatgaagtgttagagtgtcttaaaatgtttcaaatggtttaacaaaatgtatgtgaggcgtatgtggcaaaatgttacagaatctaactggtggacatggctgttcattgtactgtttttttctatcttctatatgtttaaaagtatataataaaaatatttaatttttttttaaatta

SEQ ID NO: 324249 - DNA, 1447 bp, Homo sapiens
ggacggggccccacgctgcgcacccgcgggtttgctatggcgatgagcagcggcggcagtggtggcggcgtcccggagcaggaggattccgtgctgttccggcgcggcacaggccagagcgatgattctgacatttgggatgatacagcactgataaaagcatatgataaagctgtggcttcatttaagcatgctctaaagaatggtgacatttgtgaaacttcgggtaaaccaaaaaccacacctaaaagaaaacctgctaagaagaataaaagccaaaagaagaatactgcagcttccttacaacagtggaaagttggggacaaatgttctgccatttggtcagaagacggttgcatttacccagctaccattgcttcaattgattttaagagagaaacctgtgttgtggtttacactggatatggaaatagagaggagcaaaatctgtccgatctactttccccaatctgtgaagtagctaataatatagaacaaaatgctcaagagaatgaaaatgaaagccaagtttcaacagatgaaagtgagaactccaggtctcctggaaataaatcagataacatcaagcccaaatctgctccatggaactcttttctccctccaccaccccccatgccagggccaagactgggaccaggaaagccaggtctaaaattcaatggcccaccaccgccaccgccaccaccaccaccccacttactatcatgctggctgcctccatttccttctggaccaccaataattcccccaccacctcccatatgtccagattctcttgatgatgctgatgctttgggaagtatgttaatttcatggtacatgagtggctatcatactggctattatatggaaatgctggcatagagcagcactaaatgacaccactaaagaaacgatcagacagatctggaatgtgaagcgttatagaagataactggcctcatttcttcaaaatatcaagtgttgggaaagaaaaaaggaagtggaatgggtaactcttcttgattaaaagttatgtaataaccaaatgcaatgtgaaatattttactggactctattttgaaaaaccatctgtaaaagactggggtgggggtgggaggccagcacggtggtgaggcagttgagaaaatttgaatgtggattagattttgaatgatattggataattattggtaattttatgagctgtgagaagggtgttgtagtttataaaagactgtcttaatttgcatacttaagcatttaggaatgaagtgttagagtgtcttaaaatgtttcaaatggtttaacaaaatgtatgtgaggcgtatgtggcaaaatgttacagaatctaactggtggacatggctgttcattgtactgtttttttctatcttctatatgtttaaaagtatataataaaaatatttaatttttttttaaatta

SEQ ID NO: 324250 - DNA, 1414 bp, Homo sapiens
acgcgcagtgacgcgccggccatgccggcggctgttgtcgggcctccagcgggcggggccgttggcggagcagagcggaggcgcagccgggcggagggcccacgagggctcagccttcccggtcagcggtggtgacggtatcccagagtgccagagaaccgttgcttttccgagttgctcttcttccaggctccgttggtggtcggcatggcccgtggaaatcaacgagaacttgcccgccagaaaaacatgaagaaaacccaggaaattagcaagggaaagaggaaagaggatagcttgactgcctctcagagaaagcagagttctggaggccagaaatctgagagcaagatgtcagctgggccacacctccctctgaaggctccaagggagaatccttgctttcctcttccagctgctggtggctccagagcgatgattctgacatttgggatgatacagcactgataaaagcatatgataaagctgtggcttcatttaagcatgctctaaagaatggtgacatttgtgaaacttcgggtaaaccaaaaaccacacctaaaagaaaacctgctaagaagaataaaagccaaaagaagaatactgcagcttccttacaacagtggaaagttggggacaaatgttctgcctccatttccttctggaccaccaataattcccccaccacctcccatatgtccagattctcttgatgatgctgatgctttgggaagtatgttaatttcatggtacatgagtggctatcatactggctattatatgggtttcagacaaaatcaaaaagaaggaaggtgctcacattccttaaattaaggagaaatgctggcatagagcagcactaaatgacaccactaaagaaacgatcagacagatctggaatgtgaagcgttatagaagataactggcctcatttcttcaaaatatcaagtgttgggaaagaaaaaaggaagtggaatgggtaactcttcttgattaaaagttatgtaataaccaaatgcaatgtgaaatattttactggactctattttgaaaaaccatctgtaaaagactggggtgggggtgggaggccagcacggtggtgaggcagttgagaaaatttgaatgtggattagattttgaatgatattggataattattggtaattttatgagctgtgagaagggtgttgtagtttataaaagactgtcttaatttgcatacttaagcatttaggaatgaagtgttagagtgtcttaaaatgtttcaaatggtttaacaaaatgtatgtgaggcgtatgtggcaaaatgttacagaatctaactggtggacatggctgttcattgtactgtttttttctatcttctatatgtttaaaagtatataataaaaatatttaatttttttttaaatta

SEQ ID NO: 324251 - DNA, 1360 bp, Homo sapiens
acgcgcagtgacgcgccggccatgccggcggctgttgtcgggcctccagcgggcggggccgttggcggagcagagcggaggcgcagccgggcggagggcccacgagggctcagccttcccggtcagcggtggtgacggtatcccagagtgccagagaaccgttgcttttccgagttgctcttcttccaggctccgttggtggtcggcatggcccgtggaaatcaacgagaacttgcccgccagaaaaacatgaagaaaacccaggaaattagcaagggaaagaggaaagaggatagcttgactgcctctcagagaaagcagagttctggaggccagaaatctgagagcaagatgtcagctgggccacacctccctctgaaggctccaagggagaatccttgctttcctcttccagctgctggtggctccagagcgatgattctgacatttgggatgatacagcactgataaaagcatatgataaagctgtggcttcatttaagcatgctctaaagaatggtgacatttgtgaaacttcgggtaaaccaaaaaccacacctaaaagaaaacctgctaagaagaataaaagccaaaagaagaatactgcagcttccttacaacagtggaaagttggggacaaatgttctgcctccatttccttctggaccaccaataattcccccaccacctcccatatgtccagattctcttgatgatgctgatgctttgggaagtatgttaatttcatggtacatgagtggctatcatactggctattatatggaaatgctggcatagagcagcactaaatgacaccactaaagaaacgatcagacagatctggaatgtgaagcgttatagaagataactggcctcatttcttcaaaatatcaagtgttgggaaagaaaaaaggaagtggaatgggtaactcttcttgattaaaagttatgtaataaccaaatgcaatgtgaaatattttactggactctattttgaaaaaccatctgtaaaagactggggtgggggtgggaggccagcacggtggtgaggcagttgagaaaatttgaatgtggattagattttgaatgatattggataattattggtaattttatgagctgtgagaagggtgttgtagtttataaaagactgtcttaatttgcatacttaagcatttaggaatgaagtgttagagtgtcttaaaatgtttcaaatggtttaacaaaatgtatgtgaggcgtatgtggcaaaatgttacagaatctaactggtggacatggctgttcattgtactgtttttttctatcttctatatgtttaaaagtatataataaaaatatttaatttttttttaaatta

SEQ ID NO: 324252 - DNA, 1274 bp, Homo sapiens
ggacggggccccacgctgcgcacccgcgggtttgctatggcgatgagcagcggcggcagtggtggcggcgtcccggagcaggaggattccgtgctgttccggcgcggcacaggccagagcgatgattctgacatttgggatgatacagcactgataaaagcatatgataaagctgtggcttcatttaagcatgctctaaagaatggtgacatttgtgaaacttcgggtaaaccaaaaaccacacctaaaagaaaacctgctaagaagaataaaagccaaaagaagaatactgcagcttccttacaacagtggaaagttggggacaaatgttctgccatttggtcagaagacggttgcatttacccagctaccattgcttcaattgattttaagagagaaacctgtgttgtggtttacactggatatggaaatagagaggagcaaaatctgtccgatctactttccccaatctgtgaagtagctaataatatagaacaaaatgctcaagagaatgaaaatgaaagccaagtttcaacagatgaaagtgagaactccaggtctcctggaaataaatcagataacatcaagcccaaatctgctccatggaactcttttctccctccaccaccccccatgccagggccaagactgggaccaggaaagccaggtctaaaattcaatggcccaccaccgccaccgccaccaccaccaccccacttactatcatgctggctgcctccatttccttctggaccaccaataattcccccaccacctcccatatgtccagattctcttgatgatgctgatgctttgggaagtatgttaatttcatggtacatgagtggctatcatactggctattatatgggtttcagacaaaatcaaaaagaaggaaggtgctcacattccttaaattaaggagtaagtctgccagcattatgaaagccagcacggtggtgaggcagttgagaaaatttgaatgtggattagattttgaatgatattggataattattggtaattttatgagctgtgagaagggtgttgtagtttataaaagactgtcttaatttgcatacttaagcatttaggaatgaagtgttagagtgtcttaaaatgtttcaaatggtttaacaaaatgtatgtgaggcgtatgtggcaaaatgttacagaatctaactggtggacatggctgttcattgtactgtttttttctatcttctatatgtttaaaagtatataataaaaatatttaatttttttttaaatta

SEQ ID NO: 324253 - DNA, 659 bp, Homo sapiens
acgcgcagtgacgcgccggccatgccggcggctgttgtcgggcctccagcgggcggggccgttggcggagcagagcggaggcgcagccgggcggagggcccacgagggctcagccttcccggtcagcggtggtgacggtatcccagagtgccagagaaccgttgcttttccgagttgctcttcttccaggctccgttggtggtcggcatggcccgtggaaatcaacgagaacttgcccgccagaaaaacatgaagaaaacccaggaaattagcaagggaaagaggaaagaggatagcttgactgcctctcagagaaagcagaggtacgtggtactaatttaattctaaagtcactgacgttgtgattgaagcaacattttgggctgggtgtgttgcctcatgcctgtaatcccggcagtttgggagagtcgggagaactgcttgaagccaagagtttgagaccaacttggacaacatagccagcccctgtatctacaaaatatttttttaaattggccaggcatggtagcacatggctgtggtctcggctactctggaggctgaggcgggagaatcgcttgagcccaggaggttaaggccgcagtaagctgcgattgcaccactgcactccagcctggatggcagagttagaccctgtc

SEQ ID NO: 324254 - DNA, 6234 bp, Homo sapiens
agctgcggctcggggacccacagacacagccggggtcgggagccgcccggggcagggctcgggagagcgggccacaccatgaggccccagccccaccagaggccccgcgctgccctggcccccggtgcaccgtgctagcccccagccagggcgtttggggagggcggtggccatggccagtcacgtggacctgctgacggagctgcagctgctggagaaggtgcccacgctggagcggctgcgggctgcccagaagcgccgggcccagcagctgaagaaatgggcacagtacgagcaggacttgcagcaccgcaagcgaaagcatgagcggaagcgcagcacgggcggccgccgcaagaaagtgtccttcgaggccagcgtggccctgctggaggcctcgctgaggaacgacgccgaggaagtacgctacttcctgaagaataaggtcagccctgatttgtgcaatgaggacggactcacagccctacaccagtgctgcatcgacaactttgaggaaattgtgaagctgctcctctcccatggtgccaatgtgaacgccaaggacaacgagctgtggacacctctccatgctgcagccacctgcggccacatcaacctggtgaagatcctcgttcagtatggggccgacttgcttgctgtcaactcggatgggaacatgccatatgacctctgcgaggatgaacccaccctggatgtcatcgagacctgcatggcataccagggcatcacccaagagaaaatcaacgagatgcgggtggctcctgagcagcagatgattgcggacatccactgcatgatcgcagcgggccaggacctggactggatagatgcccagggtgccacactgctgcacatagctggagccaatggatacctgcgggcagctgagctcctcctggaccatggagtgcgtgtggatgtgaaggactgggatggctgggagcccctgcatgcagctgccttctggggacagatgcagatggcagagctattggtgtcccatggagctagtctcagtgcaaggacatccatggatgagatgccaatagacctgtgcgaggaggaagagttcaaggtcctgctgctggagctaaaacacaagcatgatgtgatcatgaagtcacagctgaggcacaagtcatccttgagccggaggacctccagcgcaggcagccgtgggaaggtggtgcggcgagccagcctgtcggacaggaccaacctgtataggaaggagtatgagggagaggccatcctgtggcagcggagtgcagctgaggatcagcggacctccacctacaacggggacatcagggagaccaggacagaccaagagaataaggaccctaaccccaggctggagaagcccgtgctactctccgaatttcctaccaagatcccacgaggtgaactggacatgcctgttgagaatggcctccgggctccggtcagtgcctaccagtatgcgctggccaacggggatgtctggaaggtgcatgaggtgcctgactacagcatggcctatggcaaccctggcgtggccgacgccaccccgccctggagcagctacaaggaacagagccctcagacgcttctggagctgaagcggcagcgggctgcagccaagctgctcagccaccccttccttagcacacacctgggcagcagcatggccaggacgggcgagagtagcagtgaaggcaaggctcccttgatcggaggcagaacttcaccgtacagcagcaatgggacctcggtatattacacggtcaccagcggagatcccccactcttaaagttcaaggcccccatagaggagatggaggagaaggtgcatggctgttgccgtatctcctagtctccgtgtgatggaggagggagatgcctggggaggggctcctggaatccaggccagcccaacaaccctggctggggaggtgtcagggcagctggggagaggtgggctctgcttttcagaggaactcagaccccagccctcagctggctgcccatagcatcccatgtcccacgtcccgtggttctgcttcctgctgcatcgtctgccatctgacacaaggcctgtcgtggcctcctggttcactctgctgtctgatcttgggagggtgggcttgagatcccagctctattcttggtataaaggcttctccggatcagtacatgcatgtcacattaacacacacacacacacacatatacacacacacacaagctcgatcagtgtgtgtaggaatgacatacctgggctcaggggaagcaagggggcttagaatttgtggggtattcccaaaaggatggaagttaagactcagagtctcattaccactgccaatgtggttttagcaggggaggggacctgctaagctgagacccatagtcctgctcagagttatcccaaagtctgagccaccagccacacctgacaggggtgagaagtcctcgctgtgttcagagggagccaggaatctacatgggtagatgagatagacacagacctgctccccgcagccttgttgagagccacacttctgcccatgccaggagccagctgtgtgaccatccaggggtggagggggaaaaccaggcaatttcgttcctggaatcaaccaaatcatgttttcctcttggatggaagtgtcaaaggcagaagggtgtgggagggggacaaggtcagtatttaccaaagtgtatctgattttaaaaattcctttagtctgtaaaactcctagagggagggaggtaactgaattcacttctttttgtggatcgtatcaaggtcactgggttttactggctggtgctgggaaaatgaagctaagtgaggagcttccattggaatgcttttccagggagagaggccagttaatttaaaaaaaacagtcgctagttaacagcgacagagcccagcaccctggggtctttgtgaatatccagactgtttcagcccagcccatctcagccaaccctccttagactgagctgtcagagcaagcaattaggggccagcctgcctccacctcccacccccttccacctccatcagtcatgtgtgcagagtcagtgctcgggatcccgggcccagcttttgcctttttggggatgcttggtgagacagatttgccagtcagcccttttgagttcccgcctcacccaggggctcccagcctgcacttgcaggagtggtgatgccccaagtctgcgaatccagggtgcacgtggtcaatatcccctcctgcattcaggagagccatggtagggctggagttgggtcttgcccagccctgcagtttcatagtcccagccttcctggtgctggggagggaggactgtgaatggctgttctcccctcactgctgagtctcccaggaccccctttggagatgcccatggcatgggcactgcccacaggctcagccagaacctcttggtgtacccgataagctgcaggttatcccttgctctgtgcgccttttatttgtccttaaactacctccttagagctctgaaggggtctcctagttccagattttaatttggggaacagatctgggttctttttaaccctcttctttctcagtctatgagaaacttgccctgaggggcacctgggctaggggcttgggactggaagaccatccccgccttgtgccacaactttggtcatgggatctgctctttgtcattcttagccccctactgtggcccccatagccccataacccagagagggagctggacttcagggagcctgagtgatgctttcccaggagcagggcagctggctggaccagaaagtagagggcccatgggagtgactgcacccttggtggctgctggaaggggagaggttctcagcatcaggccacctccaccccaatgccaggatagatgtattctagagtaggggtggaggcggcccaggaggctgaagacaggtgcacagatgcttcccacgaccttgccatttggggtgggctcttcaacatctcaggctgtggctggaacaggacaggatgatctaaaacacacgtaccattggctgtaaaacagtatgagcccagactgacgctgaaatccctcatgagccaaccttagctacaaggtagggagttctgagggaagccgcgtgctcctcaggagagagctgtttaggttttccgatctttttgctcaggggccaaacactgaaggcacgtactgcccaacccactgagcgcctgaggccattccctccttttccgcatgcctcctgcctcctgggctattcctctccacccagaaggctgggaatcccagctgattccctgacaggagccgacttcacacacaggtgactctcaggcattggctcatgttttcagccagggataaaccatcccttcttggggctttaagtccctggggagctttccctgtaggtctcctgggtgttgagagacaagttggagaccaacctccaatgaatgagccgcggtcattcattaattcactcacgtaatttactgagtagctgcaacatgccagcctctacgttaggttctgcggataaaggaggaataagacagagtcaggagaactgttccttgtggtttccgtcccttggggaccacaggcatcagcagtcccattcaagtcacctgaggcaaagtgtctgcatcttcgtccagcgaccctttgcttttcggctcctagaatccttagagtctgaattcctttagctgggaacagctgtcatggtcacccctggataacatttgccaccaagtatagatgctggatcttgggttccaggcagacatcatccaggtccatctggaactttcagtgatagctgccttcagccagcatctttgggggactctataatagcagcttgagatcagtgtctagaagactgttctgcaatttgctgccaaatgcatctcaggtttttaaagtcattgtttcttgctcatggtggctcatttattacatagtcccctcaccccactaatggataatgggaggaaaagttgctgcttccttcagcatcaaagcctttccttgggaatctgcctccctccatggcaggggtggattcgggagctgggagtaaccaggcaaagtcaaccagatgcctagctcctgctgagacccaggtcctatggcagctcctcattagattaaaggagaccacttccaaagcaggtgctgcatggctcaccatcatatgccccaaacaactgaaagttggcggttatcaccagactgtgagtttctggcaagtagcttggggaagctgaataaactctaggcccagggctactaaagacttcaggatagaattctccatcaaatatacagcataagtaaaactgctctgcactgtttaatccatttccaaggggcttagaaaagctaacaagggtgtgtcccctgtcctgccccaccggtttgctggctttgtaataacataagaccattgtggttgttggtgtcagataccttcccatcctgagctctctcacctacctgctctctctcctagagcaggatactggggtacttttaagaagggtgctccttttaagatgcccagaaaagctgtatttaactcttgctatttgtaacttggggatggtctcccctgccccagggcacataagagcaaaggctccaatggtcagtggatgactctgcaaaagtgaccccctgtgccagaagctatagccctctccccaacaggtctctcttgttggccagagggcctgcttcccatgggcattgcaagtgccaccgtgcggggcctggctctgcacacccaggaaaagtctgcagacccccagccctccgcaataattcaccagaccagaagccactggtgtacagagaacacttaaaaaaatgtattttatgtgaaaaaaaattaaaactctgtatactgtatcagcagctttgtgtaaaaatggcaatcaagagagtctaatatatttaaaacttttttaaaaaaaatcttcgcagatctttgatatcgtactgaggtaacttccacgtagccccttgccacgcggcaccggtgggccttgggtccaaaactgtggctcagccacatcccaaagggggcacatgtccctggagttgcttccagctgccaaggcctgtgacagaattcgctgttaagagtttttaattaaaattattaaattccttttaataaca

SEQ ID NO: 324255 - DNA, 6320 bp, Homo sapiens
agctgcggctcggggacccacagacacagccggggtcgggagccgcccggggcagggctcgggagagcgggccacaccatgaggccccagccccaccagaggccccgcgctgccctggcccccggtgcaccgtgctagcccccagccagggcgtttggggagggcggtggccatggccagtcacgtggacctgctgacggagctgcagctgctggagaaggtgcccacgctggagcggctgcgggctgcccagaagcgccgggcccagcagctgaagaaatgggcacagtacgagcaggacttgcagcaccgcaagcgaaagcatgagcggaagcgcagcacgggcggccgccgcaagaaagtgtccttcgaggccagcgtggccctgctggaggcctcgctgaggaacgacgccgaggaaggaatgaatggagaatccatgatgtaaccacagcccccttccctgggcttgttcagaggcggtctcgcctgctcattgtgagccaagtacgctacttcctgaagaataaggtcagccctgatttgtgcaatgaggacggactcacagccctacaccagtgctgcatcgacaactttgaggaaattgtgaagctgctcctctcccatggtgccaatgtgaacgccaaggacaacgagctgtggacacctctccatgctgcagccacctgcggccacatcaacctggtgaagatcctcgttcagtatggggccgacttgcttgctgtcaactcggatgggaacatgccatatgacctctgcgaggatgaacccaccctggatgtcatcgagacctgcatggcataccagggcatcacccaagagaaaatcaacgagatgcgggtggctcctgagcagcagatgattgcggacatccactgcatgatcgcagcgggccaggacctggactggatagatgcccagggtgccacactgctgcacatagctggagccaatggatacctgcgggcagctgagctcctcctggaccatggagtgcgtgtggatgtgaaggactgggatggctgggagcccctgcatgcagctgccttctggggacagatgcagatggcagagctattggtgtcccatggagctagtctcagtgcaaggacatccatggatgagatgccaatagacctgtgcgaggaggaagagttcaaggtcctgctgctggagctaaaacacaagcatgatgtgatcatgaagtcacagctgaggcacaagtcatccttgagccggaggacctccagcgcaggcagccgtgggaaggtggtgcggcgagccagcctgtcggacaggaccaacctgtataggaaggagtatgagggagaggccatcctgtggcagcggagtgcagctgaggatcagcggacctccacctacaacggggacatcagggagaccaggacagaccaagagaataaggaccctaaccccaggctggagaagcccgtgctactctccgaatttcctaccaagatcccacgaggtgaactggacatgcctgttgagaatggcctccgggctccggtcagtgcctaccagtatgcgctggccaacggggatgtctggaaggtgcatgaggtgcctgactacagcatggcctatggcaaccctggcgtggccgacgccaccccgccctggagcagctacaaggaacagagccctcagacgcttctggagctgaagcggcagcgggctgcagccaagctgctcagccaccccttccttagcacacacctgggcagcagcatggccaggacgggcgagagtagcagtgaaggcaaggctcccttgatcggaggcagaacttcaccgtacagcagcaatgggacctcggtatattacacggtcaccagcggagatcccccactcttaaagttcaaggcccccatagaggagatggaggagaaggtgcatggctgttgccgtatctcctagtctccgtgtgatggaggagggagatgcctggggaggggctcctggaatccaggccagcccaacaaccctggctggggaggtgtcagggcagctggggagaggtgggctctgcttttcagaggaactcagaccccagccctcagctggctgcccatagcatcccatgtcccacgtcccgtggttctgcttcctgctgcatcgtctgccatctgacacaaggcctgtcgtggcctcctggttcactctgctgtctgatcttgggagggtgggcttgagatcccagctctattcttggtataaaggcttctccggatcagtacatgcatgtcacattaacacacacacacacacacatatacacacacacacaagctcgatcagtgtgtgtaggaatgacatacctgggctcaggggaagcaagggggcttagaatttgtggggtattcccaaaaggatggaagttaagactcagagtctcattaccactgccaatgtggttttagcaggggaggggacctgctaagctgagacccatagtcctgctcagagttatcccaaagtctgagccaccagccacacctgacaggggtgagaagtcctcgctgtgttcagagggagccaggaatctacatgggtagatgagatagacacagacctgctccccgcagccttgttgagagccacacttctgcccatgccaggagccagctgtgtgaccatccaggggtggagggggaaaaccaggcaatttcgttcctggaatcaaccaaatcatgttttcctcttggatggaagtgtcaaaggcagaagggtgtgggagggggacaaggtcagtatttaccaaagtgtatctgattttaaaaattcctttagtctgtaaaactcctagagggagggaggtaactgaattcacttctttttgtggatcgtatcaaggtcactgggttttactggctggtgctgggaaaatgaagctaagtgaggagcttccattggaatgcttttccagggagagaggccagttaatttaaaaaaaacagtcgctagttaacagcgacagagcccagcaccctggggtctttgtgaatatccagactgtttcagcccagcccatctcagccaaccctccttagactgagctgtcagagcaagcaattaggggccagcctgcctccacctcccacccccttccacctccatcagtcatgtgtgcagagtcagtgctcgggatcccgggcccagcttttgcctttttggggatgcttggtgagacagatttgccagtcagcccttttgagttcccgcctcacccaggggctcccagcctgcacttgcaggagtggtgatgccccaagtctgcgaatccagggtgcacgtggtcaatatcccctcctgcattcaggagagccatggtagggctggagttgggtcttgcccagccctgcagtttcatagtcccagccttcctggtgctggggagggaggactgtgaatggctgttctcccctcactgctgagtctcccaggaccccctttggagatgcccatggcatgggcactgcccacaggctcagccagaacctcttggtgtacccgataagctgcaggttatcccttgctctgtgcgccttttatttgtccttaaactacctccttagagctctgaaggggtctcctagttccagattttaatttggggaacagatctgggttctttttaaccctcttctttctcagtctatgagaaacttgccctgaggggcacctgggctaggggcttgggactggaagaccatccccgccttgtgccacaactttggtcatgggatctgctctttgtcattcttagccccctactgtggcccccatagccccataacccagagagggagctggacttcagggagcctgagtgatgctttcccaggagcagggcagctggctggaccagaaagtagagggcccatgggagtgactgcacccttggtggctgctggaaggggagaggttctcagcatcaggccacctccaccccaatgccaggatagatgtattctagagtaggggtggaggcggcccaggaggctgaagacaggtgcacagatgcttcccacgaccttgccatttggggtgggctcttcaacatctcaggctgtggctggaacaggacaggatgatctaaaacacacgtaccattggctgtaaaacagtatgagcccagactgacgctgaaatccctcatgagccaaccttagctacaaggtagggagttctgagggaagccgcgtgctcctcaggagagagctgtttaggttttccgatctttttgctcaggggccaaacactgaaggcacgtactgcccaacccactgagcgcctgaggccattccctccttttccgcatgcctcctgcctcctgggctattcctctccacccagaaggctgggaatcccagctgattccctgacaggagccgacttcacacacaggtgactctcaggcattggctcatgttttcagccagggataaaccatcccttcttggggctttaagtccctggggagctttccctgtaggtctcctgggtgttgagagacaagttggagaccaacctccaatgaatgagccgcggtcattcattaattcactcacgtaatttactgagtagctgcaacatgccagcctctacgttaggttctgcggataaaggaggaataagacagagtcaggagaactgttccttgtggtttccgtcccttggggaccacaggcatcagcagtcccattcaagtcacctgaggcaaagtgtctgcatcttcgtccagcgaccctttgcttttcggctcctagaatccttagagtctgaattcctttagctgggaacagctgtcatggtcacccctggataacatttgccaccaagtatagatgctggatcttgggttccaggcagacatcatccaggtccatctggaactttcagtgatagctgccttcagccagcatctttgggggactctataatagcagcttgagatcagtgtctagaagactgttctgcaatttgctgccaaatgcatctcaggtttttaaagtcattgtttcttgctcatggtggctcatttattacatagtcccctcaccccactaatggataatgggaggaaaagttgctgcttccttcagcatcaaagcctttccttgggaatctgcctccctccatggcaggggtggattcgggagctgggagtaaccaggcaaagtcaaccagatgcctagctcctgctgagacccaggtcctatggcagctcctcattagattaaaggagaccacttccaaagcaggtgctgcatggctcaccatcatatgccccaaacaactgaaagttggcggttatcaccagactgtgagtttctggcaagtagcttggggaagctgaataaactctaggcccagggctactaaagacttcaggatagaattctccatcaaatatacagcataagtaaaactgctctgcactgtttaatccatttccaaggggcttagaaaagctaacaagggtgtgtcccctgtcctgccccaccggtttgctggctttgtaataacataagaccattgtggttgttggtgtcagataccttcccatcctgagctctctcacctacctgctctctctcctagagcaggatactggggtacttttaagaagggtgctccttttaagatgcccagaaaagctgtatttaactcttgctatttgtaacttggggatggtctcccctgccccagggcacataagagcaaaggctccaatggtcagtggatgactctgcaaaagtgaccccctgtgccagaagctatagccctctccccaacaggtctctcttgttggccagagggcctgcttcccatgggcattgcaagtgccaccgtgcggggcctggctctgcacacccaggaaaagtctgcagacccccagccctccgcaataattcaccagaccagaagccactggtgtacagagaacacttaaaaaaatgtattttatgtgaaaaaaaattaaaactctgtatactgtatcagcagctttgtgtaaaaatggcaatcaagagagtctaatatatttaaaacttttttaaaaaaaatcttcgcagatctttgatatcgtactgaggtaacttccacgtagccccttgccacgcggcaccggtgggccttgggtccaaaactgtggctcagccacatcccaaagggggcacatgtccctggagttgcttccagctgccaaggcctgtgacagaattcgctgttaagagtttttaattaaaattattaaattccttttaataaca

SEQ ID NO: 324256 - DNA, 5944 bp, Homo sapiens
tcgaatcgtaaccgttcgtacgagaatcgctgtcctctccttgctcgagatccattgtgctctaaagaggaaacgagccaagaggcatccctggaaccactctgctgggagctgctccgctgaaagcctgggtacgctacttcctgaagaataaggtcagccctgatttgtgcaatgaggacggactcacagccctacaccagtgctgcatcgacaactttgaggaaattgtgaagctgctcctctcccatggtgccaatgtgaacgccaaggacaacgagctgtggacacctctccatgctgcagccacctgcggccacatcaacctggtgaagatcctcgttcagtatggggccgacttgcttgctgtcaactcggatgggaacatgccatatgacctctgcgaggatgaacccaccctggatgtcatcgagacctgcatggcataccagggcatcacccaagagaaaatcaacgagatgcgggtggctcctgagcagcagatgattgcggacatccactgcatgatcgcagcgggccaggacctggactggatagatgcccagggtgccacactgctgcacatagctggagccaatggatacctgcgggcagctgagctcctcctggaccatggagtgcgtgtggatgtgaaggactgggatggctgggagcccctgcatgcagctgccttctggggacagatgcagatggcagagctattggtgtcccatggagctagtctcagtgcaaggacatccatggatgagatgccaatagacctgtgcgaggaggaagagttcaaggtcctgctgctggagctaaaacacaagcatgatgtgatcatgaagtcacagctgaggcacaagtcatccttgagccggaggacctccagcgcaggcagccgtgggaaggtggtgcggcgagccagcctgtcggacaggaccaacctgtataggaaggagtatgagggagaggccatcctgtggcagcggagtgcagctgaggatcagcggacctccacctacaacggggacatcagggagaccaggacagaccaagagaataaggaccctaaccccaggctggagaagcccgtgctactctccgaatttcctaccaagatcccacgaggtgaactggacatgcctgttgagaatggcctccgggctccggtcagtgcctaccagtatgcgctggccaacggggatgtctggaaggtgcatgaggtgcctgactacagcatggcctatggcaaccctggcgtggccgacgccaccccgccctggagcagctacaaggaacagagccctcagacgcttctggagctgaagcggcagcgggctgcagccaagctgctcagccaccccttccttagcacacacctgggcagcagcatggccaggacgggcgagagtagcagtgaaggcaaggctcccttgatcggaggcagaacttcaccgtacagcagcaatgggacctcggtatattacacggtcaccagcggagatcccccactcttaaagttcaaggcccccatagaggagatggaggagaaggtgcatggctgttgccgtatctcctagtctccgtgtgatggaggagggagatgcctggggaggggctcctggaatccaggccagcccaacaaccctggctggggaggtgtcagggcagctggggagaggtgggctctgcttttcagaggaactcagaccccagccctcagctggctgcccatagcatcccatgtcccacgtcccgtggttctgcttcctgctgcatcgtctgccatctgacacaaggcctgtcgtggcctcctggttcactctgctgtctgatcttgggagggtgggcttgagatcccagctctattcttggtataaaggcttctccggatcagtacatgcatgtcacattaacacacacacacacacacatatacacacacacacaagctcgatcagtgtgtgtaggaatgacatacctgggctcaggggaagcaagggggcttagaatttgtggggtattcccaaaaggatggaagttaagactcagagtctcattaccactgccaatgtggttttagcaggggaggggacctgctaagctgagacccatagtcctgctcagagttatcccaaagtctgagccaccagccacacctgacaggggtgagaagtcctcgctgtgttcagagggagccaggaatctacatgggtagatgagatagacacagacctgctccccgcagccttgttgagagccacacttctgcccatgccaggagccagctgtgtgaccatccaggggtggagggggaaaaccaggcaatttcgttcctggaatcaaccaaatcatgttttcctcttggatggaagtgtcaaaggcagaagggtgtgggagggggacaaggtcagtatttaccaaagtgtatctgattttaaaaattcctttagtctgtaaaactcctagagggagggaggtaactgaattcacttctttttgtggatcgtatcaaggtcactgggttttactggctggtgctgggaaaatgaagctaagtgaggagcttccattggaatgcttttccagggagagaggccagttaatttaaaaaaaacagtcgctagttaacagcgacagagcccagcaccctggggtctttgtgaatatccagactgtttcagcccagcccatctcagccaaccctccttagactgagctgtcagagcaagcaattaggggccagcctgcctccacctcccacccccttccacctccatcagtcatgtgtgcagagtcagtgctcgggatcccgggcccagcttttgcctttttggggatgcttggtgagacagatttgccagtcagcccttttgagttcccgcctcacccaggggctcccagcctgcacttgcaggagtggtgatgccccaagtctgcgaatccagggtgcacgtggtcaatatcccctcctgcattcaggagagccatggtagggctggagttgggtcttgcccagccctgcagtttcatagtcccagccttcctggtgctggggagggaggactgtgaatggctgttctcccctcactgctgagtctcccaggaccccctttggagatgcccatggcatgggcactgcccacaggctcagccagaacctcttggtgtacccgataagctgcaggttatcccttgctctgtgcgccttttatttgtccttaaactacctccttagagctctgaaggggtctcctagttccagattttaatttggggaacagatctgggttctttttaaccctcttctttctcagtctatgagaaacttgccctgaggggcacctgggctaggggcttgggactggaagaccatccccgccttgtgccacaactttggtcatgggatctgctctttgtcattcttagccccctactgtggcccccatagccccataacccagagagggagctggacttcagggagcctgagtgatgctttcccaggagcagggcagctggctggaccagaaagtagagggcccatgggagtgactgcacccttggtggctgctggaaggggagaggttctcagcatcaggccacctccaccccaatgccaggatagatgtattctagagtaggggtggaggcggcccaggaggctgaagacaggtgcacagatgcttcccacgaccttgccatttggggtgggctcttcaacatctcaggctgtggctggaacaggacaggatgatctaaaacacacgtaccattggctgtaaaacagtatgagcccagactgacgctgaaatccctcatgagccaaccttagctacaaggtagggagttctgagggaagccgcgtgctcctcaggagagagctgtttaggttttccgatctttttgctcaggggccaaacactgaaggcacgtactgcccaacccactgagcgcctgaggccattccctccttttccgcatgcctcctgcctcctgggctattcctctccacccagaaggctgggaatcccagctgattccctgacaggagccgacttcacacacaggtgactctcaggcattggctcatgttttcagccagggataaaccatcccttcttggggctttaagtccctggggagctttccctgtaggtctcctgggtgttgagagacaagttggagaccaacctccaatgaatgagccgcggtcattcattaattcactcacgtaatttactgagtagctgcaacatgccagcctctacgttaggttctgcggataaaggaggaataagacagagtcaggagaactgttccttgtggtttccgtcccttggggaccacaggcatcagcagtcccattcaagtcacctgaggcaaagtgtctgcatcttcgtccagcgaccctttgcttttcggctcctagaatccttagagtctgaattcctttagctgggaacagctgtcatggtcacccctggataacatttgccaccaagtatagatgctggatcttgggttccaggcagacatcatccaggtccatctggaactttcagtgatagctgccttcagccagcatctttgggggactctataatagcagcttgagatcagtgtctagaagactgttctgcaatttgctgccaaatgcatctcaggtttttaaagtcattgtttcttgctcatggtggctcatttattacatagtcccctcaccccactaatggataatgggaggaaaagttgctgcttccttcagcatcaaagcctttccttgggaatctgcctccctccatggcaggggtggattcgggagctgggagtaaccaggcaaagtcaaccagatgcctagctcctgctgagacccaggtcctatggcagctcctcattagattaaaggagaccacttccaaagcaggtgctgcatggctcaccatcatatgccccaaacaactgaaagttggcggttatcaccagactgtgagtttctggcaagtagcttggggaagctgaataaactctaggcccagggctactaaagacttcaggatagaattctccatcaaatatacagcataagtaaaactgctctgcactgtttaatccatttccaaggggcttagaaaagctaacaagggtgtgtcccctgtcctgccccaccggtttgctggctttgtaataacataagaccattgtggttgttggtgtcagataccttcccatcctgagctctctcacctacctgctctctctcctagagcaggatactggggtacttttaagaagggtgctccttttaagatgcccagaaaagctgtatttaactcttgctatttgtaacttggggatggtctcccctgccccagggcacataagagcaaaggctccaatggtcagtggatgactctgcaaaagtgaccccctgtgccagaagctatagccctctccccaacaggtctctcttgttggccagagggcctgcttcccatgggcattgcaagtgccaccgtgcggggcctggctctgcacacccaggaaaagtctgcagacccccagccctccgcaataattcaccagaccagaagccactggtgtacagagaacacttaaaaaaatgtattttatgtgaaaaaaaattaaaactctgtatactgtatcagcagctttgtgtaaaaatggcaatcaagagagtctaatatatttaaaacttttttaaaaaaaatcttcgcagatctttgatatcgtactgaggtaacttccacgtagccccttgccacgcggcaccggtgggccttgggtccaaaactgtggctcagccacatcccaaagggggcacatgtccctggagttgcttccagctgccaaggcctgtgacagaattcgctgttaagagtttttaattaaaattattaaattccttttaataaca

SEQ ID NO: 324257 - DNA, 5930 bp, Homo sapiens
agctgcggctcggggacccacagacacagccggggtcgggagccgcccggggcagggctcgggagagcgggccacaccatgaggccccagccccaccagaggccccgcgctgccctggcccccggtgcaccgtgctagcccccagccagggcgtttggggagggcggtggccatggccagtcacgtggacctgctgacggagctgcagctgctggagaaggtgcccacgctggagcggctgcgggctgcccagaagcgccgggcccagcagctgaagaaatgggcacagtacgagcaggacttgcagcaccgcaagcgaaagcatgagcggaagcgcagcacgggcggccgccgcaagaaagtgtccttcgaggccagcgtggccctgctggaggcctcgctgaggaacgacgccgaggaagtacgctacttcctgaagaataaggtcagccctgatttgtgcaatgaggacggactcacagccctacaccagtgctgcatcgacaactttgaggaaattgtgaagctgctcctctcccatggtgccaatgtgaacgccaaggacaacgagctgtggacacctctccatgctgcagccacctgcggccacatcaacctggtgaagatcctcgttcagtatggggccgacttgcttgctgtcaactcggatgggaacatgccatatgacctctgcgaggatgaacccaccctggatgtcatcgagacctgcatggcataccagggcatcacccaagagaaaatcaacgagatgcgggtggctcctgagcagcagatgattgcggacatccactgcatgatcgcagcgggccaggacctggactggatagatgcccagggtgccacactgctgcacatagctggagccaatggatacctgcgggcagctgagctcctcctggaccatggagtgcgtgtggatgtgaaggactgggatggctgggagcccctgcatgcagctgccttctggggacagatgcagatggcagagctattggtgtcccatggagctagtctcagtgcaaggacatccatggatgagatgccaatagacctgtgcgaggaggaagagttcaaggtcctgctgctggagctaaaacacaagcatgatgtgatcatgaagtcacagctgaggcacaagtcatccttgagccggaggacctccagcgcaggcagccgtgggaaggtggtgcggcgagccagcctgtcggacaggaccaacctgtataggaaggagtatgagggagaggccatcctgtggcagcggagtgcagctgaggatcagcggacctccacctacaacggggacatcagggagaccaggacagaccaagagaataaggaccctaaccccaggctggagaagcccgtgctactctccgaatttcctaccaagatcccacgaggtgaactggacatgcctgttgagaatggcctccgggctccggtcagtgcctaccagtatgcgctggccaacggggatgtctggaaggtgcatgaggtgcctgactacagcatggcctatggcaaccctggcgtggccgacgccaccccgccctggagcagctacaaggaacagagccctcagacgcttctggagctgaagcggcagcgggctgcagccaagctgctcagccaccccttccttagcacacacctgggcagcagcatggccaggacgggcgagagtagcagtgaaggcaaggctcccttgatcggaggcagaacttcaccgtacagcagcaatgggacctcggtatattacacggtcaccagcggagatcccccactcttaaagttcaaggcccccatagaggagatggaggagaaggtgcatggctgttgccgtatctcctagtctccgtgtgatggaggagggagatgcctggggaggggctcctggaatccaggccagcccaacaaccctggctggggaggtgtcagggcagctggggagaggtgggctctgcttttcagaggaactcagaccccagccctcagctggctgcccatagcatcccatgtcccacgtcccgtggttctgcttcctgctgcatcgtctgccatctgacacaaggcctgtcgtggcctcctggttcactctgctgtctgatcttgggagggtgggcttgagatcccagctctattcttggtataaaggcttctccggatcagtacatgcatgtcacattaacacacacacacacacacatatacacacacacacaagctcgatcagtgtgtgtaggaatgacatacctgggctcaggggaagcaagggggcttagaatttgtggggtattcccaaaaggatggaagttaagactcagagtctcattaccactgccaatgtggttttagcaggggaggggacctgctaagctgagacccatagtcctgctcagagttatcccaaagtctgagccaccagccacacctgacaggggtgagaagtcctcgctgtgttcagagggagccaggaatctacatgggtagatgagatagacacagacctgctccccgcagccttgttgagagccacacttctgcccatgccaggagccagctgtgtgaccatccaggggtggagggggaaaaccaggcaatttcgttcctggaatcaaccaaatcatgttttcctcttggatggaagtgtcaaaggcagaagggtgtgggagggggacaaggtcagtatttaccaaagtgtatctgattttaaaaattcctttagtctgtaaaactcctagagggagggaggtaactgaattcacttctttttgtggatcgtatcaaggtcactgggttttactggctggtgctgggaaaatgaagctaagtgaggagcttccattggaatgcttttccagggagagaggccagttaatttaaaaaaaacagtcgctagttaacagcgacagagcccagcaccctggggtctttgtgaatatccagactgtttcagcccagcccatctcagccaaccctccttagactgagctgtcagagcaagcaattaggggccagcctgcctccacctcccacccccttccacctccatcagtcatgtgtgcagagtcagtgctcgggatcccgggcccagcttttgcctttttggggatgcttggtgagacagatttgccagtcagcccttttgagttcccgcctcacccaggggctcccagcctgcacttgcaggagtggtgatgccccaagtctgcgaatccagggtgcacgtggtcaatatcccctcctgcattcaggagagccatggtagggctggagttgggtcttgcccagccctgcagtttcatagtcccagccttcctggtgctggggagggaggactgtgaatggctgttctcccctcactgctgagtctcccaggaccccctttggagatgcccatggcatgggcactgcccacaggctcagccagaacctcttggtgtacccgataagctgcaggttatcccttgctctgtgcgccttttatttgtccttaaactacctccttagagctctgaaggggtctcctagttccagattttaatttggggaacagatctgggttctttttaaccctcttctttctcagtctatgagaaacttgccctgaggggcacctgggctaggggcttgggactggaagaccatccccgccttgtgccacaactttggtcatgggatctgctctttgtcattcttagccccctactgtggcccccatagccccataacccagagagggagctggacttcagggagcctgagtgatgctttcccaggagcagggcagctggctggaccagaaagtagagggcccatgggagtgactgcacccttggtggctgctggaaggggagaggttctcagcatcaggccacctccaccccaatgccaggatagatgtattctagagtaggggtggaggcggcccaggaggctgaagacaggtgcacagatgcttcccacgaccttgccatttggggtgggctcttcaacatctcaggctgtggctggaacaggacaggatgatctaaaacacacgtaccattggctgtaaaacagtatgagcccagactgacgctgaaatccctcatgagccaaccttagctacaaggtagggagttctgagggaagccgcgtgctcctcaggagagagctgtttaggttttccgatctttttgctcaggggccaaacactgaaggcacgtactgcccaacccactgagcgcctgaggccattccctccttttccgcatgcctcctgcctcctgggctattcctctccacccagaaggctgggaatcccagctgattccctgacaggagccgacttcacacacaggtgactctcaggcattggctcatgttttcagccagggataaaccatcccttcttggggctttaagtccctggggagctttccctgtaggtctcctgggtgttgagagacaagttggagaccaacctccaatgaatgagccgcggtcattcattaattcactcacgtaatttactgagtagctgcaacatgccagcctctacgttaggttctgcggataaaggaggaataagacagagtcaggagaactgttccttgtggtttccgtcccttggggaccacaggcatcagcagtcccattcaagtcacctgaggcaaagtgtctgcatcttcgtccagcgaccctttgcttttcggctcctagaatccttagagtctgaattcctttagctgggaacagctgtcatggtcacccctggataacatttgccaccaagtatagatgctggatcttgggttccaggcagacatcatccaggtccatctggaactttcagtgatagctgccttcagccagcatctttgggggactctataatagcagcttgagatcagtgtctagaagactgttctgcaatttgctgccaaatgcatctcaggtttttaaagtcattgtttcttgctcatggtggctcatttattacatagtcccctcaccccactaatggataatgggaggaaaagttgctgcttccttcagcatcaaagcctttccttgggaatctgcctccctccatggcaggggtggattcgggagctgggagtaaccaggcaaagtcaaccagatgcctagctcctgctgagacccaggtcctatggcagctcctcattagattaaaggagaccacttccaaagcaggtgctgcatggctcacctacctgctctctctcctagagcaggatactggggtacttttaagaagggtgctccttttaagatgcccagaaaagctgtatttaactcttgctatttgtaacttggggatggtctcccctgccccagggcacataagagcaaaggctccaatggtcagtggatgactctgcaaaagtgaccccctgtgccagaagctatagccctctccccaacaggtctctcttgttggccagagggcctgcttcccatgggcattgcaagtgccaccgtgcggggcctggctctgcacacccaggaaaagtctgcagacccccagccctccgcaataattcaccagaccagaagccactggtgtacagagaacacttaaaaaaatgtattttatgtgaaaaaaaattaaaactctgtatactgtatcagcagctttgtgtaaaaatggcaatcaagagagtctaatatatttaaaacttttttaaaaaaaatcttcgcagatctttgatatcgtactgaggtaacttccacgtagccccttgccacgcggcaccggtgggccttgggtccaaaactgtggctcagccacatcccaaagggggcacatgtccctggagttgcttccagctgccaaggcctgtgacagaattcgctgttaagagtttttaattaaaattattaaattccttttaataaca

SEQ ID NO: 324258 - DNA, 889 bp, Homo sapiens
gagctcggtacctaatctgtactcattgcgacagcataagtaaaactgctctgcactgtttaatccatttccaaggggcttagaaaagctaacaagggtgtgtcccctgtcctgccccaccggtttgctggctttgtaataacataagaccattgtggttgttggtgtcagataccttcccatcctgagctctctcacctacctgctctctctcctagagcaggatactggggtacttttaagaagggtgctccttttaagatgcccagaaaagctgtatttaactcttgctatttgtaacttggggatggtctcccctgccccagggcacataagagcaaaggctccaatggtcagtggatgactctgcaaaagtgaccccctgtgccagaagctatagccctctccccaacaggtctctcttgttggccagagggcctgcttcccatgggcattgcaagtgccaccgtgcggggcctggctctgcacacccaggaaaagtctgcagacccccagccctccgcaataattcaccagaccagaagccactggtgtacagagaacacttaaaaaaatgtattttatgtgaaaaaaaattaaaactctgtatactgtatcagcagctttgtgtaaaaatggcaatcaagagagtctaatatatttaaaacttttttaaaaaaaatcttcgcagatctttgatatcgtactgaggtaacttccacgtagccccttgccacgcggcaccggtgggccttgggtccaaaactgtggctcagccacatcccaaagggggcacatgtccctggagttgcttccagctgccaaggcctgtgacagaattcgctgttaagagtttttaattaaaattattaaattccttttaataaca

SEQ ID NO: 324259 - DNA, 4245 bp, Homo sapiens
agctgcggctcggggacccacagacacagccggggtcgggagccgcccggggcagggctcgggagagcgggccacaccatgaggccccagccccaccagaggccccgcgctgccctggcccccggtgcaccgtgctagcccccagccagggcgtttggggagggcggtggccatggccagtcacgtggacctgctgacggagctgcagctgctggagaaggtgcccacgctggagcggctgcgggctgcccagaagcgccgggcccagcagctgaagaaatgggcacagtacgagcaggacttgcagcaccgcaagcgaaagcatgagcggaagcgcagcacgggcggccgccgcaagaaagtgtccttcgaggccagcgtggccctgctggaggcctcgctgaggaacgacgccgaggaagtacgctacttcctgaagaataaggtcagccctgatttgtgcaatgaggacggactcacagccctacaccagtgctgcatcgacaactttgaggaaattgtgaagctgctcctctcccatggtgccaatgtgaacgccaaggacaacgagctgtggacacctctccatgctgcagccacctgcggccacatcaacctggtgaagatcctcgttcagtatggggccgacttgcttgctgtcaactcggatgggaacatgccatatgacctctgcgaggatgaacccaccctggatgtcatcgagacctgcatggcataccagggcatcacccaagagaaaatcaacgagatgcgggtggctcctgagcagcagatgattgcggacatccactgcatgatcgcagcgggccaggacctggactggatagatgcccagggtgccacactgctgcacatagctggagccaatggatacctgcgggcagctgagctcctcctggaccatggagtgcgtgtggatgtgaaggactgggatggctgggagcccctgcatgcagctgccttctggggacagatgcagatggcagagctattggtgtcccatggagctagtctcagtgcaaggacatccatggatgagatgccaatagacctgtgcgaggaggaagagttcaaggtcctgctgctggagctaaaacacaagcatgatgtgatcatgaagtcacagctgaggcacaagtcatccttgagccggaggacctccagcgcaggcagccgtgggaaggtggtgcggcgagccagcctgtcggacaggaccaacctgtataggaaggagtatgagggagaggccatcctgtggcagcggagtgcagctgaggatcagcggacctccacctacaacggggacatcagggagaccaggacagaccaagagaataaggaccctaaccccaggctggagaagcccgtgctactctccgaatttcctaccaagatcccacgaggtgaactggacatgcctgttgagaatggcctccgggctccggtcagtgcctaccagtatgcgctggccaacggggatgtctggaaggtgcatgaggtgcctgactacagcatggcctatggcaaccctggcgtggccgacgccaccccgccctggagcagctacaaggaacagagccctcagacgcttctggagctgaagcggcagcgggctgcagccaagctgctcagccaccccttccttagcacacacctgggcagcagcatggccaggacgggcgagagtagcagtgaaggcaaggctcccttgatcggaggcagaacttcaccgtacagcagcaatgggacctcggtatattacacggtcaccagcggagatcccccactcttaaagttcaaggcccccatagaggagatggaggagaaggtgcatggctgttgccgtatctcctagtctccgtgtgatggaggagggagatgcctggggaggggctcctggaatccaggccagcccaacaaccctggctggggaggtgtcagggcagctggggagaggtgggctctgcttttcagaggaactcagaccccagccctcagctggctgcccatagcatcccatgtcccacgtcccgtggttctgcttcctgctgcatcgtctgccatctgacacaaggcctgtcgtggcctcctggttcactctgctgtctgatcttgggagggtgggcttgagatcccagctctattcttggtataaaggcttctccggatcagtacatgcatgtcacattaacacacacacacacacacatatacacacacacacaagctcgatcagtgtgtgtaggaatgacatacctgggctcaggggaagcaagggggcttagaatttgtggggtattcccaaaaggatggaagttaagactcagagtctcattaccactgccaatgtggttttagcaggggaggggacctgctaagctgagacccatagtcctgctcagagttatcccaaagtctgagccaccagccacacctgacaggggtgagaagtcctcgctgtgttcagagggagccaggaatctacatgggtagatgagatagacacagacctgctccccgcagccttgttgagagccacacttctgcccatgccaggagccagctgtgtgaccatccaggggtggagggggaaaaccaggcaatttcgttcctggaatcaaccaaatcatgttttcctcttggatggaagtgtcaaaggcagaagggtgtgggagggggacaaggtcagtatttaccaaagtgtatctgattttaaaaattcctttagtctgtaaaactcctagagggagggaggtaactgaattcacttctttttgtggatcgtatcaaggtcactgggttttactggctggtgctgggaaaatgaagctaagtgaggagcttccattggaatgcttttccagggagagaggccagttaatttaaaaaaaacagtcgctagttaacagcgacagagcccagcaccctggggtctttgtgaatatccagactgtttcagcccagcccatctcagccaaccctccttagactgagctgtcagagcaagcaattaggggccagcctgcctccacctcccacccccttccacctccatcagtcatgtgtgcagagtcagtgctcgggatcccgggcccagcttttgcctttttggggatgcttggtgagacagatttgccagtcagcccttttgagttcccgcctcacccaggggctcccagcctgcacttgcaggagtggtgatgccccaagtctgcgaatccagggtgcacgtggtcaatatcccctcctgcattcaggagagccatggtagggctggagttgggtcttgcccagccctgcagtttcatagtcccagccttcctggtgctggggagggaggactgtgaatggctgttctcccctcactgctgagtctcccaggaccccctttggagatgcccatggcatgggcactgcccacaggctcagccagaacctcttggtgtacccgataagctgcaggttatcccttgctctgtgcgccttttatttgtccttaaactacctccttagagctctgaaggggtctcctagttccagattttaatttggggaacagatctgggttctttttaaccctcttctttctcagtctatgagaaacttgccctgaggggcacctgggctaggggcttgggactggaagaccatccccgccttgtgccacaactttggtcatgggatctgctctttgtcattcttagccccctactgtggcccccatagccccataacccagagagggagctggacttcagggagcctgagtgatgctttcccaggagcagggcagctggctggaccagaaagtagagggcccatgggagtgactgcacccttggtggctgctggaaggggagaggttctcagcatcaggccacctccaccccaatgccaggatagatgtattctagagtaggggtggaggcggcccaggaggctgaagacaggtgcacagatgcttcccacgaccttgccatttggggtgggctcttcaacatctcaggctgtggctggaacaggacaggatgatctaaaacacacgtaccattggctgtaaaacagtatgagcccagactgacgctgaaatccctcatgagtagctgggattacaggcatgcgccactatgcccagctaattttgtatttttactagatacggggtttctctatgttggtcaggctggtctcaaacttctgaccttgggtgatccgcccgcctca

SEQ ID NO: 324260 - DNA, 849 bp, Homo sapiens
agctgcggctcggggacccacagacacagccggggtcgggagccgcccggggcagggctcgggagagcgggccacaccatgaggccccagccccaccagaggccccgcgctgccctggcccccggtgcaccgtgctagcccccagccagggcgtttggggagggcggtggccatggccagtcacgtggacctgctgacggagctgcagctgctggagaaggtgcccacgctggagcggctgcgggctgcccagaagcgccgggcccagcagctgaagaaatgggcacagtacgagcaggacttgcagcaccgcaagcgaaagcatgagcggaagcgcagcacgggcggccgccgcaagaaagtgtccttcgaggccagcgtggccctgctggaggcctcgctgaggaacgacgccgaggaagaggaggagcaggagccacgcctatggtcgcatgttgctaaccatctcgaggtcaggaagatgctctgtgagacggagtgggtcagatgccaaagaaaacacaagcttgtcagcggtgatgtctccctgcaaaggcagccgccaccagcttcctgccgagatgggccggctcagcctcacttgctacagctggagatggagaggaccagatggccctgtttggcccagattccagccagattgccagggaggtgtaggcggagcagcggggtcggcgccaggagcagggatacgtgagtgaggagggcgggagccacctctttgccatctcagtagggccctgcctgtgtagggggtggcggggcaccgactgtggccttacagtggtctgtgaaccagcatatgctcagagctccctggagggagac

SEQ ID NO: 324261 - DNA, 303 bp, Homo sapiens
tgaggaacgacgccgaggaaggtaggcccctctgtgccttggcggccacgcagctgccttggcctctgatcagggtttggaatccaggttctgtgcagtagacgtgtgggcaaggcaggtctgcagacccacttccaagttccagcagccccattcctcttaggaagtggacgttcctaggaacttcgaatttatcttagacttcttttttttctaagacagggtctcgctctgtctcccaggctggagtatagtggcgcgatctcagctcgctgcaacctctgccacccaggctcaagtgat

SEQ ID NO: 324262 - DNA, 407 bp, Homo sapiens
caggtggctactggctgctgcattaggcagcatagccagaccttgctgatacttacagggccactgtaaggatttgcacttctcttgaggagcaatggaaggaaaacctcaaaagcgtttcgaacacggggcgttgggggacgatcagatctgagttgtggagtctgacacatgtgttcatctgtgtctccctccctgccacaggccacaccatgaggccccagccccaccagaggccccgcgctgccctggcccccggtgcaccgtgctagcccccagccagggcgtttggggagggcggtggccatggccagtcacgtggacctgctgacggagctgcagctgctggagaaggtgcccacgctggagcggctgcgggctgcccagaagcgccgggcccagcagct

SEQ ID NO: 324263 - DNA, 729 bp, Homo sapiens
gtggctgaaccagtgagggattcagggagggatttccaggtaaggcaggtgtggagcaggcagggactagatcatgcaatgccttggaggcagtgggaggatgaggcctcattgctgggcactgggcaggaaaggaaggaagagagataggagggcaggccttgtgagtgaacctgaccctgcaagtcacatggcgaggtggcagcagctcagccccagggcaccccccggggagatgcagcttgcccaaggtccacctccactgggcagacacctctgcctggctgtctccgtttccccagaggaggagcaggagccacgcctatggtcgcatgttgctaaccatctcgaggtcaggaagatgctctgtgagacggagtgggtcagatgccaaagaaaacacaagcttgtcagcggtgatgtctccctgcaaaggcagccgccaccagcttcctgccgagatgggccggctcagcctcacttgctacagctggagatggagaggaccagatggccctgtttggcccagattccagccagattgccagggaggtgtaggcggagcagcggggtcggcgccaggagcagggatacgtgagtgaggagggcgggagccacctctttgccatctcagtagggccctgcctgtgtagggggtggcggggcaccgactgtggccttacagtggtctgtgaaccagcatatgctcagagctccctggagggagac

SEQ ID NO: 324264 - DNA, 6632 bp, Homo sapiens
agctgcggctcggggacccacagacacagccggggtcgggagccgcccggggcagggctcgggagagcgggccacaccatgaggccccagccccaccagaggccccgcgctgccctggcccccggtgcaccgtgctagcccccagccagggcgtttggggagggcggtggccatggccagtcacgtggacctgctgacggagctgcagctgctggagaaggtgcccacgctggagcggctgcgggctgcccagaagcgccgggcccagcagctgaagaaatgggcacagtacgagcaggacttgcagcaccgcaagcgaaagcatgagcggaagcgcagcacgggcggccgccgcaagaaagtgtccttcgaggccagcgtggccctgctggaggcctcgctgaggaacgacgccgaggaaggaatgaatggagaatccatgatgtaaccacagcccccttccctgggcttgttcagaggcggtctcgcctgctcattgtgagccaaggtctgtgcacctccctgttccccttggcgcccatggcccatccctgtataataagccttcctggctgtccctggagaggcctagccatgcttcctgggtccctgcacacaccttccagtcaatgaaagagcagagaggtgtggcacttctggcccaagagggtgctgggttttagtcaccttgctcttcaggttctagaaccctctgagaagtgtaattccacttccaccttgctgcacagggctctaggaaacgagccaagaggcatccctggaaccactctgctgggagctgctccgctgaaagcctgggtacgctacttcctgaagaataaggtcagccctgatttgtgcaatgaggacggactcacagccctacaccagtgctgcatcgacaactttgaggaaattgtgaagctgctcctctcccatggtgccaatgtgaacgccaaggacaacgagctgtggacacctctccatgctgcagccacctgcggccacatcaacctggtgaagatcctcgttcagtatggggccgacttgcttgctgtcaactcggatgggaacatgccatatgacctctgcgaggatgaacccaccctggatgtcatcgagacctgcatggcataccagggcatcacccaagagaaaatcaacgagatgcgggtggctcctgagcagcagatgattgcggacatccactgcatgatcgcagcgggccaggacctggactggatagatgcccagggtgccacactgctgcacatagctggagccaatggatacctgcgggcagctgagctcctcctggaccatggagtgcgtgtggatgtgaaggactgggatggctgggagcccctgcatgcagctgccttctggggacagatgcagatggcagagctattggtgtcccatggagctagtctcagtgcaaggacatccatggatgagatgccaatagacctgtgcgaggaggaagagttcaaggtcctgctgctggagctaaaacacaagcatgatgtgatcatgaagtcacagctgaggcacaagtcatccttgagccggaggacctccagcgcaggcagccgtgggaaggtggtgcggcgagccagcctgtcggacaggaccaacctgtataggaaggagtatgagggagaggccatcctgtggcagcggagtgcagctgaggatcagcggacctccacctacaacggggacatcagggagaccaggacagaccaagagaataaggaccctaaccccaggctggagaagcccgtgctactctccgaatttcctaccaagatcccacgaggtgaactggacatgcctgttgagaatggcctccgggctccggtcagtgcctaccagtatgcgctggccaacggggatgtctggaaggtgcatgaggtgcctgactacagcatggcctatggcaaccctggcgtggccgacgccaccccgccctggagcagctacaaggaacagagccctcagacgcttctggagctgaagcggcagcgggctgcagccaagctgctcagccaccccttccttagcacacacctgggcagcagcatggccaggacgggcgagagtagcagtgaaggcaaggctcccttgatcggaggcagaacttcaccgtacagcagcaatgggacctcggtatattacacggtcaccagcggagatcccccactcttaaagttcaaggcccccatagaggagatggaggagaaggtgcatggctgttgccgtatctcctagtctccgtgtgatggaggagggagatgcctggggaggggctcctggaatccaggccagcccaacaaccctggctggggaggtgtcagggcagctggggagaggtgggctctgcttttcagaggaactcagaccccagccctcagctggctgcccatagcatcccatgtcccacgtcccgtggttctgcttcctgctgcatcgtctgccatctgacacaaggcctgtcgtggcctcctggttcactctgctgtctgatcttgggagggtgggcttgagatcccagctctattcttggtataaaggcttctccggatcagtacatgcatgtcacattaacacacacacacacacacatatacacacacacacaagctcgatcagtgtgtgtaggaatgacatacctgggctcaggggaagcaagggggcttagaatttgtggggtattcccaaaaggatggaagttaagactcagagtctcattaccactgccaatgtggttttagcaggggaggggacctgctaagctgagacccatagtcctgctcagagttatcccaaagtctgagccaccagccacacctgacaggggtgagaagtcctcgctgtgttcagagggagccaggaatctacatgggtagatgagatagacacagacctgctccccgcagccttgttgagagccacacttctgcccatgccaggagccagctgtgtgaccatccaggggtggagggggaaaaccaggcaatttcgttcctggaatcaaccaaatcatgttttcctcttggatggaagtgtcaaaggcagaagggtgtgggagggggacaaggtcagtatttaccaaagtgtatctgattttaaaaattcctttagtctgtaaaactcctagagggagggaggtaactgaattcacttctttttgtggatcgtatcaaggtcactgggttttactggctggtgctgggaaaatgaagctaagtgaggagcttccattggaatgcttttccagggagagaggccagttaatttaaaaaaaacagtcgctagttaacagcgacagagcccagcaccctggggtctttgtgaatatccagactgtttcagcccagcccatctcagccaaccctccttagactgagctgtcagagcaagcaattaggggccagcctgcctccacctcccacccccttccacctccatcagtcatgtgtgcagagtcagtgctcgggatcccgggcccagcttttgcctttttggggatgcttggtgagacagatttgccagtcagcccttttgagttcccgcctcacccaggggctcccagcctgcacttgcaggagtggtgatgccccaagtctgcgaatccagggtgcacgtggtcaatatcccctcctgcattcaggagagccatggtagggctggagttgggtcttgcccagccctgcagtttcatagtcccagccttcctggtgctggggagggaggactgtgaatggctgttctcccctcactgctgagtctcccaggaccccctttggagatgcccatggcatgggcactgcccacaggctcagccagaacctcttggtgtacccgataagctgcaggttatcccttgctctgtgcgccttttatttgtccttaaactacctccttagagctctgaaggggtctcctagttccagattttaatttggggaacagatctgggttctttttaaccctcttctttctcagtctatgagaaacttgccctgaggggcacctgggctaggggcttgggactggaagaccatccccgccttgtgccacaactttggtcatgggatctgctctttgtcattcttagccccctactgtggcccccatagccccataacccagagagggagctggacttcagggagcctgagtgatgctttcccaggagcagggcagctggctggaccagaaagtagagggcccatgggagtgactgcacccttggtggctgctggaaggggagaggttctcagcatcaggccacctccaccccaatgccaggatagatgtattctagagtaggggtggaggcggcccaggaggctgaagacaggtgcacagatgcttcccacgaccttgccatttggggtgggctcttcaacatctcaggctgtggctggaacaggacaggatgatctaaaacacacgtaccattggctgtaaaacagtatgagcccagactgacgctgaaatccctcatgagccaaccttagctacaaggtagggagttctgagggaagccgcgtgctcctcaggagagagctgtttaggttttccgatctttttgctcaggggccaaacactgaaggcacgtactgcccaacccactgagcgcctgaggccattccctccttttccgcatgcctcctgcctcctgggctattcctctccacccagaaggctgggaatcccagctgattccctgacaggagccgacttcacacacaggtgactctcaggcattggctcatgttttcagccagggataaaccatcccttcttggggctttaagtccctggggagctttccctgtaggtctcctgggtgttgagagacaagttggagaccaacctccaatgaatgagccgcggtcattcattaattcactcacgtaatttactgagtagctgcaacatgccagcctctacgttaggttctgcggataaaggaggaataagacagagtcaggagaactgttccttgtggtttccgtcccttggggaccacaggcatcagcagtcccattcaagtcacctgaggcaaagtgtctgcatcttcgtccagcgaccctttgcttttcggctcctagaatccttagagtctgaattcctttagctgggaacagctgtcatggtcacccctggataacatttgccaccaagtatagatgctggatcttgggttccaggcagacatcatccaggtccatctggaactttcagtgatagctgccttcagccagcatctttgggggactctataatagcagcttgagatcagtgtctagaagactgttctgcaatttgctgccaaatgcatctcaggtttttaaagtcattgtttcttgctcatggtggctcatttattacatagtcccctcaccccactaatggataatgggaggaaaagttgctgcttccttcagcatcaaagcctttccttgggaatctgcctccctccatggcaggggtggattcgggagctgggagtaaccaggcaaagtcaaccagatgcctagctcctgctgagacccaggtcctatggcagctcctcattagattaaaggagaccacttccaaagcaggtgctgcatggctcaccatcatatgccccaaacaactgaaagttggcggttatcaccagactgtgagtttctggcaagtagcttggggaagctgaataaactctaggcccagggctactaaagacttcaggatagaattctccatcaaatatacagcataagtaaaactgctctgcactgtttaatccatttccaaggggcttagaaaagctaacaagggtgtgtcccctgtcctgccccaccggtttgctggctttgtaataacataagaccattgtggttgttggtgtcagataccttcccatcctgagctctctcacctacctgctctctctcctagagcaggatactggggtacttttaagaagggtgctccttttaagatgcccagaaaagctgtatttaactcttgctatttgtaacttggggatggtctcccctgccccagggcacataagagcaaaggctccaatggtcagtggatgactctgcaaaagtgaccccctgtgccagaagctatagccctctccccaacaggtctctcttgttggccagagggcctgcttcccatgggcattgcaagtgccaccgtgcggggcctggctctgcacacccaggaaaagtctgcagacccccagccctccgcaataattcaccagaccagaagccactggtgtacagagaacacttaaaaaaatgtattttatgtgaaaaaaaattaaaactctgtatactgtatcagcagctttgtgtaaaaatggcaatcaagagagtctaatatatttaaaacttttttaaaaaaaatcttcgcagatctttgatatcgtactgaggtaacttccacgtagccccttgccacgcggcaccggtgggccttgggtccaaaactgtggctcagccacatcccaaagggggcacatgtccctggagttgcttccagctgccaaggcctgtgacagaattcgctgttaagagtttttaattaaaattattaaattccttttaataaca

SEQ ID NO: 324265 - DNA, 6489 bp, Homo sapiens
agctgcggctcggggacccacagacacagccggggtcgggagccgcccggggcagggctcgggagagcgggccacaccatgaggccccagccccaccagaggccccgcgctgccctggcccccggtgcaccgtgctagcccccagccagggcgtttggggagggcggtggccatggccagtcacgtggacctgctgacggagctgcagctgctggagaaggtgcccacgctggagcggctgcgggctgcccagaagcgccgggcccagcagctgaagaaatgggcacagtacgagcaggacttgcagcaccgcaagcgaaagcatgagcggaagcgcagcacgggcggccgccgcaagaaagtgtccttcgaggccagcgtggccctgctggaggcctcgctgaggaacgacgccgaggaagtacgctacttcctgaagaataaggtcagccctgatttgtgcaatgaggacggactcacagccctacaccagtgctgcatcgacaactttgaggaaattgtgaagctgctcctctcccatggtgccaatgtgaacgccaaggacaacgagctgtggacacctctccatgctgcagccacctgcggccacatcaacctggtgaagatcctcgttcagtatggggccgacttgcttgctgtcaactcggatgggaacatgccatatgacctctgcgaggatgaacccaccctggatgtcatcgagacctgcatggcataccagggcatcacccaagagaaaatcaacgagatgcgggtggctcctgagcagcagatgattgcggacatccactgcatgatcgcagcgggccaggacctggactggatagatgcccagggtgccacactgctgcacatagctggagccaatggatacctgcgggcagctgagctcctcctggaccatggagtgcgtgtggatgtgaaggactgggatggctgggagcccctgcatgcagctgccttctggggacagatgcagatggcagagctattggtgtcccatggagctagtctcagtgcaaggacatccatggatgagatgccaatagacctgtgcgaggaggaagagttcaaggtcctgctgctggagctaaaacacaagcatgatgtgatcatgaagtcacagctgaggcacaagtcatccttgagccggaggacctccagcgcaggcagccgtgggaaggtggtgcggcgagccagcctgtcggacaggaccaacctgtataggaaggagtatgagggagaggccatcctgtggcagcggagtgcagctgaggatcagcggacctccacctacaacggggacatcagggagaccaggacagaccaagagaataaggaccctaaccccaggctggagaagcccgtgctactctccgaatttcctaccaagatcccacgaggtgaactggacatgcctgttgagaatggcctccgggctccggtcagtgcctaccagtatgcgctggccaacggggatgtctggaaggtgcatgaggtgcctgactacagcatggcctatggcaaccctggcgtggccgacgccaccccgccctggagcagctacaaggaacagagccctcagacgcttctggagctgaagcggcagcgggctgcagccaagctgctcagccaccccttccttagcacacacctgggcagcagcatggccaggacgggcgagagtagcagtgaaggcaaggctcccttgatcggaggcagaacttcaccgtacagcagcaatgggacctcggtatattacacggtcaccagcggagatcccccactcttaaagttcaaggcccccatagaggagatggaggagaaggtgcatggctgttgccgtatctcctagtctccgtgtgatggaggagggagatgcctggggaggggctcctggaatccaggccagcccaacaaccctggctggggaggtgtcagggcagctggggagaggtgggctctgcttttcagaggaactcagaccccagccctcagctggctgcccatagcatcccatgtcccacgtcccgtggttctgcttcctgctgcatcgtctgccatctgacacaaggcctgtcgtggcctcctggttcactctgctgtctgatcttgggagggtgggcttgagatcccagctctattcttggtataaaggcttctccggatcagtacatgcatgtcacattaacacacacacacacacacatatacacacacacacaagctcgatcagtgtgtgtaggaatgacatacctgggctcaggggaagcaagggggcttagaatttgtggggtattcccaaaaggatggaagttaagactcagagtctcattaccactgccaatgtggttttagcaggggaggggacctgctaagctgagacccatagtcctgctcagagttatcccaaagtctgagccaccagccacacctgacaggggtgagaagtcctcgctgtgttcagagggagccaggaatctacatgggtagatgagatagacacagacctgctccccgcagccttgttgagagccacacttctgcccatgccaggagccagctgtgtgaccatccaggggtggagggggaaaaccaggcaatttcgttcctggaatcaaccaaatcatgttttcctcttggatggaagtgtcaaaggcagaagggtgtgggagggggacaaggtcagtatttaccaaagtgtatctgattttaaaaattcctttagtctgtaaaactcctagagggagggaggtaactgaattcacttctttttgtggatcgtatcaaggtcactgggttttactggctggtgctgggaaaatgaagctaagtgaggagcttccattggaatgcttttccagggagagaggccagttaatttaaaaaaaacagtcgctagttaacagcgacagagcccagcaccctggggtctttgtgaatatccagactgtttcagcccagcccatctcagccaaccctccttagactgagctgtcagagcaagcaattaggggccagcctgcctccacctcccacccccttccacctccatcagtcatgtgtgcagagtcagtgctcgggatcccgggcccagcttttgcctttttggggatgcttggtgagacagatttgccagtcagcccttttgagttcccgcctcacccaggggctcccagcctgcacttgcaggagtggtgatgccccaagtctgcgaatccagggtgcacgtggtcaatatcccctcctgcattcaggagagccatggtagggctggagttgggtcttgcccagccctgcagtttcatagtcccagccttcctggtgctggggagggaggactgtgaatggctgttctcccctcactgctgagtctcccaggaccccctttggagatgcccatggcatgggcactgcccacaggctcagccagaacctcttggtgtacccgataagctgcaggttatcccttgctctgtgcgccttttatttgtccttaaactacctccttagagctctgaaggggtctcctagttccagattttaatttggggaacagatctgggttctttttaaccctcttctttctcagtctatgagaaacttgccctgaggggcacctgggctaggggcttgggactggaagaccatccccgccttgtgccacaactttggtcatgggatctgctctttgtcattcttagccccctactgtggcccccatagccccataacccagagagggagctggacttcagggagcctgagtgatgctttcccaggagcagggcagctggctggaccagaaagtagagggcccatgggagtgactgcacccttggtggctgctggaaggggagaggttctcagcatcaggccacctccaccccaatgccaggatagatgtattctagagtaggggtggaggcggcccaggaggctgaagacaggtgcacagatgcttcccacgaccttgccatttggggtgggctcttcaacatctcaggctgtggctggaacaggacaggatgatctaaaacacacgtaccattggctgtaaaacagtatgagcccagactgacgctgaaatccctcatgagccaaccttagctacaaggtagggagttctgagggaagccgcgtgctcctcaggagagagctgtttaggttttccgatctttttgctcaggggccaaacactgaaggcacgtactgcccaacccactgagcgcctgaggccattccctccttttccgcatgcctcctgcctcctgggctattcctctccacccagaaggctgggaatcccagctgattccctgacaggagccgacttcacacacaggtgactctcaggcattggctcatgttttcagccagggataaaccatcccttcttggggctttaagtccctggggagctttccctgtaggtctcctgggtgttgagagacaagttggagaccaacctccaatgaatgagccgcggtcattcattaattcactcacgtaatttactgagtagctgcaacatgccagcctctacgttaggttctgcggataaaggaggaataagacagagtcaggagaactgttccttgtggtttccgtcccttggggaccacaggcatcagcagtcccattcaagtcacctgaggcaaagtgtctgcatcttcgtccagcgaccctttgcttttcggctcctagaatccttagagtctgaattcctttagctgggaacagctgtcatggtcacccctggataacatttgccaccaagtatagatgctggatcttgggttccaggcagacatcatccaggtccatctggaactttcagtgatagctgccttcagccagcatctttgggggactctataatagcagcttgagatcagtgtctagaagactgttctgcaatttgctgccaaatgcatctcaggtttttaaagtcattgtttcttgctcatggtggctcatttattacatagtcccctcaccccactaatggataatgggaggaaaagttgctgcttccttcagcatcaaagcctttccttgggaatctgcctccctccatggcaggggtggattcgggagctgggagtaaccaggcaaagtcaaccagatgcctagctcctgctgagacccaggtcctatggcagctcctcattagattaaaggagaccacttccaaagcaggtgctgcatggctcaccatcatatgccccaaacaactgaaagttggcggttatcaccagactgtgagtttctggcaagtagcttggggaagctgaataaactctaggcccagggctactaaagacttcaggatagaattctccatcaaatatacagcataagtaaaactgctctgcactgtttaatccatttccaaggggcttagaaaagctaacaagggtgtgtcccctgtcctgccccaccggtttgctggctttgtaataacataagaccattgtggttgttggtgtcagataccttcccatcctgagctctctcacctacctgctctctctcctagagcaggatactggggtacttttaagaagggtgctccttttaagatgcccagaaaagctgtatttaactcttgctatttgtaacttggggatggtctcccctgccccagggcacataagagcaaaggctccaatggtcagtggatgactctgcaaaagtgaccccctgtgccagaagctatagccctctccccaacaggtctctcttgttggccagagggcctgcttcccatgggcattgcaagtgccaccgtgcggggcctggctctgcacacccaggaaaagtctgcagacccccagccctccgcaataattcaccagaccagaagccactggtgtacagagaacacttaaaaaaatgtattttatgtgaaaaaaaattaaaactctgtatactgtatcagcagctttgtgtaaaaatggcaatcaagagagtctaatatatttaaaacttttttaaaaaaaatcttcgcagatctttgatatcgtactgaggtaacttccacgtagccccttgccacgcggcaccggtgggccttgggtccaaaactgtggctcagccacatcccaaagggggcacatgtccctggagttgcttccagctgccaaggcctgtgacagaattcgctgttaagagtttttaattaaaattattaaattccttttaataacaaaaaaaaagaacacaacccaagaacgaacgagcaaacaacaccgcgggcgacacaactacggcgtcgccgcgaaaaccaagcggagacacgacagcgggcggccacgggcgcacacacgcgagggcctcgacaacagcacgaggagcacgtgcacacagggggagggaacaccccgccgggggcccccaaaaagggcgccccgtaaagcagcgcaaaaggcaggcgtcacacccgggtaaggcggcgccgcacac

SEQ ID NO: 324266 - DNA, 4482 bp, Homo sapiens
agctgcggctcggggacccacagacacagccggggtcgggagccgcccggggcagggctcgggagagcgggccacaccatgaggccccagccccaccagaggccccgcgctgccctggcccccggtgcaccgtgctagcccccagccagggcgtttggggagggcggtggccatggccagtcacgtggacctgctgacggagctgcagctgctggagaaggtgcccacgctggagcggctgcgggctgcccagaagcgccgggcccagcagctgaagaaatgggcacagtacgagcaggacttgcagcaccgcaagcgaaagcatgagcggaagcgcagcacgggcggccgccgcaagaaagtgtccttcgaggccagcgtggccctgctggaggcctcgctgaggaacgacgccgaggaagtacgctacttcctgaagaataaggtcagccctgatttgtgcaatgaggacggactcacagccctacaccagtgctgcatcgacaactttgaggaaattgtgaagctgctcctctcccatggtgccaatgtgaacgccaaggacaacgagctgtggacacctctccatgctgcagccacctgcggccacatcaacctggtgaagatcctcgttcagtatggggccgacttgcttgctgtcaactcggatgggaacatgccatatgacctctgcgaggatgaacccaccctggatgtcatcgagacctgcatggcataccagggcatcacccaagagaaaatcaacgagatgcgggtggctcctgagcagcagatgattgcggacatccactgcatgatcgcagcgggccaggacctggactggatagatgcccagggtgccacactgctgcacatagctggagccaatggatacctgcgggcagctgagctcctcctggaccatggagtgcgtgtggatgtgaaggactgggatggctgggagcccctgcatgcagctgccttctggggacagatgcagatggcagagctattggtgtcccatggagctagtctcagtgcaaggacatccatggatgagatgccaatagacctgtgcgaggaggaagagttcaaggtcctgctgctggagctaaaacacaagcatgatgtgatcatgaagtcacagctgaggcacaagtcatccttgagccggaggacctccagcgcaggcagccgtgggaaggtggtgcggcgagccagcctgtcggacaggaccaacctgtataggaaggagtatgagggagaggccatcctgtggcagcggagtgcagctgaggatcagcggacctccacctacaacggggacatcagggagaccaggacagaccaagagaataaggaccctaaccccaggctggagaagcccgtgctactctccgaatttcctaccaagatcccacgaggtgaactggacatgcctgttgagaatggcctccgggctccggtcagtgcctaccagtatgcgctggccaacggggatgtctggaaggtgcatgaggtgcctgactacagcatggcctatggcaaccctggcgtggccgacgccaccccgccctggagcagctacaaggaacagagccctcagacgcttctggagctgaagcggcagcgggctgcagccaagctgctcagccaccccttccttagcacacacctgggcagcagcatggccaggacgggcgagagtagcagtgaaggcaaggctcccttgatcggaggcagaacttcaccgtacagcagcaatgggacctcggtatattacacggtcaccagcggagatcccccactcttaaagttcaaggcccccatagaggagatggaggagaaggtgcatggctgttgccgtatctcctagtctccgtgtgatggaggagggagatgcctggggaggggctcctggaatccaggccagcccaacaaccctggctggggaggtgtcagggcagctggggagaggtgggctctgcttttcagaggaactcagaccccagccctcagctggctgcccatagcatcccatgtcccacgtcccgtggttctgcttcctgctgcatcgtctgccatctgacacaaggcctgtcgtggcctcctggttcactctgctgtctgatcttgggagggtgggcttgagatcccagctctattcttggtataaaggcttctccggatcagtacatgcatgtcacattaacacacacacacacacacatatacacacacacacaagctcgatcagtgtgtgtaggaatgacatacctgggctcaggggaagcaagggggcttagaatttgtggggtattcccaaaaggatggaagttaagactcagagtctcattaccactgccaatgtggttttagcaggggaggggacctgctaagctgagacccatagtcctgctcagagttatcccaaagtctgagccaccagccacacctgacaggggtgagaagtcctcgctgtgttcagagggagccaggaatctacatgggtagatgagatagacacagacctgctccccgcagccttgttgagagccacacttctgcccatgccaggagccagctgtgtgaccatccaggggtggagggggaaaaccaggcaatttcgttcctggaatcaaccaaatcatgttttcctcttggatggaagtgtcaaaggcagaagggtgtgggagggggacaaggtcagtatttaccaaagtgtatctgattttaaaaattcctttagtctgtaaaactcctagagggagggaggtaactgaattcacttctttttgtggatcgtatcaaggtcactgggttttactggctggtgctgggaaaatgaagctaagtgaggagcttccattggaatgcttttccagggagagaggccagttaatttaaaaaaaacagtcgctagttaacagcgacagagcccagcaccctggggtctttgtgaatatccagactgtttcagcccagcccatctcagccaaccctccttagactgagctgtcagagcaagcaattaggggccagcctgcctccacctcccacccccttccacctccatcagtcatgtgtgcagagtcagtgctcgggatcccgggcccagcttttgcctttttggggatgcttggtgagacagatttgccagtcagcccttttgagttcccgcctcacccaggggctcccagcctgcacttgcaggagtggtgatgccccaagtctgcgaatccagggtgcacgtggtcaatatcccctcctgcattcaggagagccatggtagggctggagttgggtcttgcccagccctgcagtttcatagtcccagccttcctggtgctggggagggaggactgtgaatggctgttctcccctcactgctgagtctcccaggaccccctttggagatgcccatggcatgggcactgcccacaggctcagccagaacctcttggtgtacccgataagctgcaggttatcccttgctctgtgcgccttttatttgtccttaaactacctccttagagctctgaaggggtctcctagttccagattttaatttggggaacagatctgggttctttttaaccctcttctttctcagtctatgagaaacttgccctgaggggcacctgggctaggggcttgggactggaagaccatccccgccttgtgccacaactttggtcatgggatctgctctttgtcattcttagccccctactgtggcccccatagccccataacccagagagggagctggacttcagggagcctgagtgatgctttcccaggagcagggcagctggctggaccagaaagtagagggcccatgggagtgactgcacccttggtggctgctggaaggggagaggttctcagcatcaggccacctccaccccaatgccaggatagatgtattctagagtaggggtggaggcggcccaggaggctgaagacaggtgcacagatgcttcccacgaccttgccatttggggtgggctcttcaacatctcaggctgtggctggaacaggacaggatgatctaaaacacacgtaccattggtctgcacacccaggaaaagtctgcagacccccagccctccgcaataattcaccagaccagaagccactggtgtacagagaacacttaaaaaaatgtattttatgtgaaaaaaaattaaaactctgtatactgtatcagcagctttgtgtaaaaatggcaatcaagagagtctaatatatttaaaacttttttaaaaaaaatcttcgcagatctttgatatcgtactgaggtaacttccacgtagccccttgccacgcggcaccggtgggccttgggtccaaaactgtggctcagccacatcccaaagggggcacatgtccctggagttgcttccagctgccaaggcctgtgacagaattcgctgttaagagtttttaattaaaattattaaattccttttaataaca

SEQ ID NO: 324267 - DNA, 897 bp, Homo sapiens
agctgcggctcggggacccacagacacagccggggtcgggagccgcccggggcagggctcgggagagcgggccacaccatgaggccccagccccaccagaggccccgcgctgccctggcccccggtgcaccgtgctagcccccagccagggcgtttggggagggcggtggccatggccagtcacgtggacctgctgacggagctgcagctgctggagaaggtgcccacgctggagcggctgcgggctgcccagaagcgccgggcccagcagctgaagaaatgggcacagtacgagcaggacttgcagcaccgcaagcgaaagcatgagcggaagcgcagcacgggcggccgccgcaagaaagtgtccttcgaggccagcgtggccctgctggaggcctcgctgaggaacgacgccgaggaaggaatgaatggagaatccatgatgtaaccacagcccccttccctgggcttgttcagaggcggtctcgcctgctcattgtgagccaaggtctgtgcacctccctgttccccttggcgcccatggcccatccctgtataataagccttcctggctgtccctggagaggcctagccatgcttcctgggtccctgcacacaccttccagtcaatgaaagagcagagaggtgtggcacttctggcccaagagggtgctgggttttagtcaccttgctcttcaggttctagaaccctctgagaagtgtaattccacttccaccttgctgcacagggctctaggaaacgagccaagaggcatccctggaaccactctgctgggagctgctccgctgaaagcctggggtgagcagcctgggtgaaaagagaggtggaatcttgggcttggggacatggccccgaggctccttcccacgtgcagt

SEQ ID NO: 324268 - DNA, 387 bp, Homo sapiens
gagaggttaagtggcttgctcaaggtcaagggcaatgcttacagtgtgaacatcatggagctggattcaaacaggccttccacagtcttcctcatggcctcttgcggggaacctggtgtgtcctgaccagggcccggggcccagtgccctgcctggagctgactctgcctgtgtgtctctcccagtgctgcatcgacaactttgaggaaattgtgaagctgctcctctcccatggtgccaatgtgaacgccaaggacaacgagctgtggacacctctccatgctgcagccacctgcggccacatcaacctggtgaagatcctcgttcagtagtacgtgcccctccctgccccagagcagcctccctccacctcttgtctttttccaa

SEQ ID NO: 324269 - DNA, 238 bp, Homo sapiens
atccaggcccaatgaaaactagatatactatgatcaaggtttcaaatatttttaggcctgatataaaaatgtagaggcctaatggaaccagaatgaaactacgtatctaccttttgataactagattctaaatataaccattggtaatcttgtatacctgcaatgaaaatgcaaatggtatgtgcagacagattactatgtaggaaaaagatggggtggtcttttacaccaatccctg

SEQ ID NO: 324270 - DNA, 991 bp, Homo sapiens
cttgcttccggctgacgtgtctttcaggaagaggagctggtgagaagacagcgaaatggcgcctccggcccccggcccggcctccggcggctccggggaggtagacgagctgttcgacgtaaagaacgccttctacatcggcagctaccagcagtgcataaacgaggcgcagcgggtgaagctatcaagcccagagagagacgtggagagggacgtcttcctgtatagagcgtacctggcgcagaggaagttcggtgtggtcctggatgagatcaagccctcctcggcccctgagctccaggccgtgcgcatgtttgctgactacctcgcccacgagagtcggagggacagcatcgtggccgagctggaccgagagatgagcaggagcgtggacgtgaccaacaccaccttcctgctcatggccgcctccatctatctccacgaccagaacccggatgccgccctgcgtgcgctgcaccagggggacagcctggagtgcacagccatgacagtgcagatcctgctgaagctggaccgcctggacctcgcccggaaggagctgaagagaatgcaggacctggacgaggatgccaccctcacccagctcgccactgcctgggtcagcctggccacggatagtggctacccggagacgctggtcaacctcatcgtcctgtcccagcacctgggcaagccccctgaggtgacaaaccgatacctgtcccagctgaaggatgcccacaggtcccatcccttcatcaaggagtaccaggccaaggagaacgactttgacaggctggtgctacagtacgctcccagcgcctgaggctggcccagagctgtcaggaccatgaagccaggacagaggccaggagccagccctgcagccctccccacccggcatccacctgcatcccctctgggggcaggagcccacccccagcacccccatctgttaataaatatctcaactccagggtgttccacctga

SEQ ID NO: 324271 - DNA, 575 bp, Homo sapiens
ttccggagatgaaggatcagaattgaggggtccacttaccagttccatgttgttagttgccaggtggtgagaagctgcaggatgcctactacatcttccaggagatggctgacaagtgctcgcccaccctgctgctgctcaatgggcaggcggcctgccacatggcccagggccgctgggaggccgctgagggcctgctgcaggaggcgctagacaaggatagtggctacccggagacgctggtcaacctcatcgtcctgtcccagcacctgggcaagccccctgaggtgacaaaccgatacctgtcccagctgaaggatgcccacaggtcccatcccttcatcaaggagtaccaggccaaggagaacgactttgacaggctggtgctacagtacgctcccagcgcctgaggctggcccagagctgtcaggaccatgaagccaggacagaggccaggagccagccctgcagccctccccacccggcatccacctgcatcccctctgggggcaggagcccacccccagcacccccatctgttaataaatatctcaactccagggtgttccacctga

SEQ ID NO: 324272 - DNA, 1584 bp, Homo sapiens
cttgcttccggctgacgtgtctttcaggaagaggagctggtgagaagacagcgaaatggcgcctccggcccccggcccggcctccggcggctccggggaggtagacgagctgttcgacgtaaagaacgccttctacatcggcagctaccagcagtgcataaacgaggcgcagcgggtgaagctatcaagcccagagagagacgtggagagggacgtcttcctgtatagagcgtacctggcgcagaggaagttcggtgtggtcctggatgagatcaagccctcctcggcccctgagctccaggccgtgcgcatgtttgctgactacctcgcccacgagagtcggagggacagcatcgtggccgagctggaccgagagatgagcaggagcgtggacgtgaccaacaccaccttcctgctcatggccgcctccatctatctccacgaccagaacccggatgccgccctgcgtgcgctgcaccagggggacagcctggagtgcacagccatgacagtgcagatcctgctgaagctggaccgcctggacctcgcccggaaggagctgaagagaatgcaggacctggacgaggatgccaccctcacccagctcgccactgcctgggtcagcctggccacgggtggtgagaagctgcaggatgcctactacatcttccaggagatggctgacaagtgctcgcccaccctgctgctgctcaatgggcaggcggcctgccacatggcccagggccgctgggaggccgctgagggcctgctgcaggaggcgctagacaaggatagtggctacccggagacgctggtcaacctcatcgtcctgtcccagcacctgggcaagccccctgaggtgacaaaccgatacctgtcccagctgaaggatgcccacaggtcccatcccttcatcaaggagtaccaggccaaggagaacgactttgacaggctggtgctacagtacgctcccagcgcctgaggctggcccagagctgtcaggaccatgaagccaggacagaggccaggagccagccctgcagccctccccacccggcatccacctgcatcccctctgggggcaggagcccacccccagcacccccatctgttaataaatatctcaactccagggtgttccacctgaaaaaaaaaaaaaaaaaacaaaaaaaaaaaaaaaaaaaaaaaaaaaaaaacaaaaaaaagagactcgaaacacaaaaatccatataattagccgtattacaaataactaaaaaaaaaaacttcgggggggggcccgggaccaaatttgccttattgggggtgaatttcacaataattggccgccgtttaaaaacgttgagcctgggaacaccttggcgtaccaaacttaattccctggaatacaacccctttttgccggttggcgaaattcaaaaaagccccgcaccttaagccctttccaaaaattggccagccctgaagggcaaaggggaaatttggaggccgtaaatgtctggaaaaaatctcggtaaatcttgggtaaataagttcttttttaacccattggcccgaattgggaaaaaccccttttaaatcttt

SEQ ID NO: 324273 - DNA, 1888 bp, Homo sapiens
cttgcttccggctgacgtgtctttcaggaagaggagctggtgagaagacagcgaaatggcgcctccggcccccggcccggcctccggcggctccggggaggtagacgagctgttcgacgtaaagaacgccttctacatcggcagctaccagcagtgcataaacgaggcgcagcgggtgaagctatcaagcccagagagagacgtggagagggacgtcttcctgtatagagcgtacctggcgcagaggaagttcggtgtggtcctggatgagatcaagccctcctcggcccctgagctccaggccgtgcgcatgtttgctgactacctcgcccacgagagtcggagggacagcatcgtggccgagctggaccgagagatgagcaggagcgtggacgtgaccaacaccaccttcctgctcatggccgcctccatctatctccacgaccagaacccggatgccgccctgcgtgcgctgcaccagggggacagcctggagtgcacagccatgacagtgcagatcctgctgaagctggaccgcctggacctcgcccggaaggagctgaagagaatgcaggacctggacgaggatgccaccctcacccagctcgccactgcctgggtcagcctggccacgggtggtgagaagctgcaggatgcctactacatcttccaggagatggctgacaagtgctcgcccaccctgctgctgctcaatgggcaggcggcctgccacatggcccagggccgctgggaggccgctgagggcctgctgcaggaggcgctagacaaggatagtggctacccggagacgctggtcaacctcatcgtcctgtcccagcacctgggcaagccccctgaggtgacaaaccgatacctgtcccagctgaaggatgcccacaggtcccatcccttcatcaaggagtaccaggccaaggagaacgactttgacaggctggtgctacagtacgctcccagcgcctgaggctggcccagagctgtcaggaccatgaagccaggacagaggccaggagccagccctgcagccctccccacccggcatccacctgcatcccctctgggggcaggagcccacccccagcacccccatctgttaataaatatctcaactccagggtgttccacctgaaaaaaaaaaaaaaaaaaccccttaggccattcatttctttaactatattcaagcatttactataattaagggggcctccttttaaaccttcttccacccttttattcacaacaaaaagaacaccttctgtgattatacttcctgtggcacattaattgacccttggggaccattaattcattgatttttattcctccacaattaggcaagaagaccaaacccgagaacccccgtttcggacctctgccgggaaggggagaggtccgaggaacataggtcctcagggcttcaacaattcgagaaatacggccggaagggccccttctcggcccttatttccttcattaggccgagaattacaccagaacccttttttattaattaaagcacccttcacaatttaacagattctttccgtagggaacacaacattattagacggcacttcttccccttgaagttcttaccaccaacgattattttgggtcaccaaagagacccttattttttaaaccttccctggcttctttagtagaaatttccgagaacaagggatataccccccgggattcccgggtataagagacccaaatttcattaacacccttctttattagaaaaaaaaagtttccttaaccaatttcaccctataagaattaacataatattgaaatatgtctccaatacccctttacaatctccaggaattccccgctagagccttaaaaaaaaacaacgaaa

SEQ ID NO: 324274 - DNA, 1553 bp, Homo sapiens
cttgcttccggctgacgtgtctttcaggaagaggagctggtgagaagacagcgaaatggcgcctccggcccccggcccggcctccggcggctccggggaggtagacgagctgttcgacgtaaagaacgccttctacatcggcagctaccagcagtgcataaacgaggcgcagcgggtgaagctatcaagcccagagagagacgtggagagggacgtcttcctgtatagagcgtacctggcgcagaggaagttcggtgtggtcctggatgagatcaagccctcctcggcccctgagctccaggccgtgcgcatgtttgctgactacctcgcccacgagagtcggagggacagcatcgtggccgagctggaccgagagatgagcaggagcgtggacgtgaccaacaccaccttcctgctcatggccgcctccatctatctccacgaccagaacccggatgccgccctgcgtgcgctgcaccagggggacagcctggagtgcacagccatgacagtgcagatcctgctgaagctggaccgcctggacctcgcccggaaggagctgaagagaatgcaggacctggacgaggatgccaccctcacccagctcgccactgcctgggtcagcctggccacgggtggtgagaagctgcaggatgcctactacatcttccaggagatggctgacaagtgctcgcccaccctgctgctgctcaatgggcaggcggcctgccacatggcccagggccgctgggaggccgctgagggcctgctgcaggaggcgctagacaaggatagtggctacccggagacgctggtcaacctcatcgtcctgtcccagcacctgggcaagccccctgaggtgacaaaccgatacctgtcccagctgaaggatgcccacaggtcccatcccttcatcaaggagtaccaggccaaggagaacgactttgacaggctggtgctacagtacgctcccagcgcctgaggctggcccagagctgtcaggaccatgaagccaggacagaggccaggagccagccctgcagccctccccacccggcatccacctgcatcccctctgggggcaggagcccacccccagcacccccatctgttaataaatatctcaactccagggtgttccacctgaaaaaaaaaaaaaaaaaaacaaaaaaaagagactcgaaacacaaaaatccatataattagccgtattacaaataactaaaaaaaaaaacttcgggggggggcccgggaccaaatttgccttattgggggtgaatttcacaataattggccgccgtttaaaaacgttgagcctgggaacaccttggcgtaccaaacttaattccctggaatacaacccctttttgccggttggcgaaattcaaaaaagccccgcaccttaagccctttccaaaaattggccagccctgaagggcaaaggggaaatttggaggccgtaaatgtctggaaaaaatctcggtaaatcttgggtaaataagttcttttttaacccattggcccgaattgggaaaaaccccttttaaatcttt

SEQ ID NO: 324275 - DNA, 1074 bp, Homo sapiens
  misc_feature (913)..(913): n is a, c, g, or t
  misc_feature (915)..(915): n is a, c, g, or t
  misc_feature (922)..(922): n is a, c, g, or t
  misc_feature (934)..(934): n is a, c, g, or t
cttgcttccggctgacgtgtctttcaggaagaggagctggtgagaagacagcgaaatggcgcctccggcccccggcccggcctccggcggctccggggaggtagacgagctgttcgacgtaaagaacgccttctacatcggcagctaccagcagtgcataaacgaggcgcagcgggtgaagctatcaagcccagagagagacgtggagagggacgtcttcctgtatagagcgtacctggcgcagaggaagttcggtgtggtcctggatgagatcaagccctcctcggcccctgagctccaggccgtgcgcatgtttgctgactacctcgcccacgagagtcggagggacagcatcgtggccgagctggaccgagagatgagcaggagcgtggacgtgaccaacaccaccttcctgctcatggccgcctccatctatctccacgaccagaacccggatgccgccctgcgtgcgctgcaccagggggacagcctggagtgcacagccatgacagtgcagatcctgctgaagctggaccgcctggacctcgcccggaaggagctgaagagaatgcaggacctggacgaggatgccaccctcacccagctcgccactgcctgggtcagcctggccacgggtggtgagaagctgcaggatgcctactacatcttccaggagatggctgacaagtgctcgcccaccctgctgctgctcaatgggcaggcggcctgccacatggcccagggccgctgggaggccgctgagggcctgctgcaggaggcgctagacaaggatagtggctacccggagacgctggtcaacctcatcgtcctgtcccagcacctgggcaagccccctgaggtgacaacgatactgtccagtgaaggtgccaaggtccatccttcatcaggagtncngccaggngacggattgaangggcggggctcagagaggcccccaagccggagggtggacaaaatgtggaccgtaacggaaagacggacgacactgagacgatgacagcgaaaagaacaccgggaggaagacaccgaccaggaagagaaacaggagagaag

SEQ ID NO: 324276 - DNA, 960 bp, Homo sapiens
  misc_feature (911)..(911): n is a, c, g, or t
cttgcttccggctgacgtgtctttcaggaagaggagctggtgagaagacagcgaaatggcgcctccggcccccggcccggcctccggcggctccggggaggtagacgagctgttcgacgtaaagaacgccttctacatcggcagctaccagcagtgcataaacgaggcgcagcgggtgaagctatcaagcccagagagagacgtggagagggacgtcttcctgtatagagcgtacctggcgcagaggaagttcggtgtggtcctggatgagatcaagccctcctcggcccctgagctccaggccgtgcgcatgtttgctgactacctcgcccacgagagtcggagggacagcatcgtggccgagctggaccgagagatgagcaggagcgtggacgtgaccaacaccaccttcctgctcatggccgcctccatctatctccacgaccagaacccggatgccgccctgcgtgcgctgcaccagggggacagcctggagtgcacagccatgacagtgcagatcctgctgaagctggaccgcctggacctcgcccggaaggagctgaagagaatgcaggacctggacgaggatgccaccctcacccagctcgccactgcctgggtcagcctggccacgggtggtgagaagctgcaggatgcctactacatcttccaggagatggctgacaagtgctcgcccaccctgctgctgctcaatgggcaggcggcctgccacatggcccagggccgctgggaggccgctgagggcctgctgcaggaggcgctagacaaggatagtggctacccggagacgctggtcaacctcatcgtcctgtcccagcacctgggcaagccccctgaggtggcaaacgttctgtccctgaggtgcccggtccctcctctcagagtccgcngggaaatgagtgggtccgcccccggtgccattttgctacgggcgctttc

SEQ ID NO: 324277 - DNA, 4551 bp, Homo sapiens
cttgcttccggctgacgtgtctttcaggaagaggagctggtgagaagacagcgaaatggcgcctccggcccccggcccggcctccggcggctccggggaggtagacgagctgttcgacgtaaagaacgccttctacatcggcagctaccagcagtgcataaacgaggcgcagcgggtgaagctatcaagcccagagagagacgtggagagggacgtcttcctgtatagagcgtacctggcgcagaggaagttcggtgtggtcctggatgagatcaagccctcctcggcccctgagctccaggccgtgcgcatgtttgctgactacctcgcccacgagagtcggaggtgaggccccagagaatgggttggcctgaggcgcggggccatcttcaaggcctgttggttatgaacctgggtgggtgggggcatggcgtgcagcgcacagcatccctcagattaggcgcctctcccctctgctcccctgctgctttgtgcctcagtttccctcacctgcacagcagtggggggctggtgatggatcctgcttcaaaggggagggtcagagacagtgctgtgtgtgcacacgccctcatggaccacaaggcactctctgaacctagaactgaaaatatcaattaccgagcagccctctgcaacacccagagccccaagacagcccagggcgcagcgggggcagggccctcccatcagttttcttatttatttatttagagatggagtctcactctgtcaccaggctggagttgcagtgagccaagatcgcactagtgcactccagcctgggtgacagcgggagactgtcttaaaaaacaaaaaaaaaaaaggaaagaggcccacagagttaagcccatgtgacaacagactggagtgacatgtctgctagccaaggagcaccacgagtggccagcagccaccagagctgggagagaggcctgggacggccttgccctccagcctccagctggagccagccctgccgccaccttgacttcagacttacggcctccagagctgtgaggaacgaatccctgttgtccttaactgcccgggctgtggtgctttgccacagcagctccaggacattgagacaggtgacctcccagggccactgtttctcccaccctgcacttacttcaccagctggagtgaaggcagggaaccctgggtcccccaggagcagcagctgctgtgagcatcacagaaaagcagccccggagagcaggcggtccaggcaggggcttgtggtccgttcatctggctgcacagccgcgacctcattggcaggacgccccggggacaaggagcatccattagtaattggttttggttttgattttgttttcttgagatacggtcttgctctgtcgttcagcctggcatgcagtggcacaatcttggcttactgcagccttgatctcccaggctcaggtgatcatcccacctcggcctcccgaatagctgggactgcaggcacgcatcaccatgcctggctagtttgtatattttttagagatggggttttgcctggccgggcgcagtggctcacacctgtaatcccaaagcgctggggttacaggtgtgagccacagtacccggccccattggtaattgtaacaccttaggatgacaacattacagtaccaacgctacgacaactggcagtgtttatacacccttgtgtgctggagcctcaggaagctttgtaagatggtcttgggagctccttgctcctcccctgcatgatccctgtaacatggtccctcagcacggggaaacagactcagacctgaagtcacttgtctgttggacctggcactgtggcgagccctcagtggagcctggttggtatcagacatgccatgccctcagtgacacctcagacacgggccctgggcagacagcccccagatgcgcgtggatgcttacggggtcacagagccacgtttgaacccagaagaacaccagctttggtctagggtggccccctcacctgccttctctttttagctgctcaatagccatggggaatggagggtctgggtccagttagggacatggaggcatgggtgacctgtgccctcggagctgagccggtcctcagccttgcctgggctcaagcctggccctggcccgcagcacactggccatcttcagggtgcagccagcaccctgggctctcagggactgagggcagctgccctggcagtgggggtgccccagggctcccatccttctgcacggcccctcggcacccaggccgacctcctgctagaagacgtggccttgaagcccacagggttgatgggttatggtcaggagtcccagctgggcccaccagcctcctcaggaaggcgggtgaggttggtgtgagactgacggtgcctcctcatgtccccttggagcgccccaccccacatctcccggcctcgggtccttgcctggcccagcatgagaggtgcttcataggaacggagggaggacatgtcgggacagctcgatgctcggcctgctgctgctctgcacccccagggcctggctcaccctctctggacctgtctgcttccaaggaaggggaccctctgaggtcccacagaggccaccccagctgtgggtcgtgagcatctctgtcttgcagggacagcatcgtggccgagctggaccgagagatgagcaggagcgtggacgtgaccaacaccaccttcctgctcatggccgcctccatctatctccacgaccagaacccggatgccgccctgcgtgcgctgcaccagggggacagcctggagtggtgagtggcctccctgctctggggccagcccagggaggcaagtgccccctgccacatctccaggctgcgcacggcctcgctggctgtcgtcatgggagcagagaaaggtggtgctgaaatgaggccctggcctgctgtccaggctccagctcccctgcccagtgtgggaggcactcccatctgcgcaccaggctgcagatccaaggacacggtgcccaggctgcaaccctctgttcccaagggcagagcagaaagcggctttgtctctgctcggtttctgtgtccccaccccccacgaagccttctgtgtctcggccctgggcccagtctctcaggcctccccgggccccccataccggccctcctccagggccctctggggttggggtgctgaagccctgcaaggttggtgcccccctccaccctaggatgtgactccgggccatgtccagggcactggtcacagaaagtgtgtcagttcttccccgtgagctgtccctgcagtgcctgccttccactgtgagttgcaagctgggcatttcatggtcgctgtggatctgctcccatcccacctccatccacagagggcttagaattgcagggcgagccaggcatggtgacatgcacctatgtttccagctacttgggaggcggaagcaggagtatcccttgagtctgggaggtggaggctgcagtgagccgtgatggtgccactgcactccagcctgggtggcagagccagaccctgactcacacacaaaaaagaaaataaatagggatgtcacactgtcggcgagccggccgactcggtgctggtccaggtgctggctcctgttggcaggaaaacaagaacaagaggcctcacgagtaattcgtggtcacagccacctggggctgagagggatgaggggacgagggggcctgcagagagtgggtggccccagggctctgctgcaggtgcaggtgcaggggcgggtgcgtggccctcctctagggccttgttcctgagtgttgatgcctccagggtgtcgagtccgggcagggccctccatctggaagcacagcccatggaggctgcttctccagatgggcgcacagccatgacagtgcagatcctgctgaagctggaccgcctggacctcgcccggaaggagctgaagagaatgcaggacctggacgaggatgccaccctcacccagctcgccactgcctgggtcagcctggccacgggtggtgagaagctgcaggatgcctactacatcttccaggagatggctgacaagtgctcgcccaccctgctgctgctcaatgggcaggcggcctgccacatggcccagggccgctgggaggccgctgagggcctgctgcaggaggcgctagacaaggatagtggctacccggagacgctggtcaacctcatcgtcctgtcccagcacctgggcaagccccctgaggtgacaaaccgatacctgtcccagctgaaggatgcccacaggtcccatcccttcatcaaggagtaccaggccaaggagaacgactttgacaggctggtgctacagtacgctcccagcgcctgaggctggcccagagctgtcaggaccatgaagccaggacagaggccaggagccagccctgcagccctccccacccggcatccacctgcatcccctctgggggcaggagcccacccccagcacccccatctgttaataaatatctcaactccagggtgttccacctga

SEQ ID NO: 324278 - DNA, 4932 bp, Homo sapiens
cttgcttccggctgacgtgtctttcaggaagaggagctggtgagaagacagcgaaatggcgcctccggcccccggcccggcctccggcggctccggggaggtagacgagctgttcgacgtaaagaacgccttctacatcggcagctaccagcagtgcataaacgaggcgcagcgggtgaagctatcaagcccagagagagacgtggagagggacgtcttcctgtatagagcgtacctggcgcagtgtactgcagtggaggtggcccatgctgggctgaggggtccctggtggggcagggacttcctgtctggggctctccctgccaagctgaagacatggaaatcctctggggtggacgggtgcagctgacgcctcgtccctactgcaaggaagttcggtgtggtcctggatgagatcaagccctcctcggcccctgagctccaggccgtgcgcatgtttgctgactacctcgcccacgagagtcggaggtgaggccccagagaatgggttggcctgaggcgcggggccatcttcaaggcctgttggttatgaacctgggtgggtgggggcatggcgtgcagcgcacagcatccctcagattaggcgcctctcccctctgctcccctgctgctttgtgcctcagtttccctcacctgcacagcagtggggggctggtgatggatcctgcttcaaaggggagggtcagagacagtgctgtgtgtgcacacgccctcatggaccacaaggcactctctgaacctagaactgaaaatatcaattaccgagcagccctctgcaacacccagagccccaagacagcccagggcgcagcgggggcagggccctcccatcagttttcttatttatttatttagagatggagtctcactctgtcaccaggctggagttgcagtgagccaagatcgcactagtgcactccagcctgggtgacagcgggagactgtcttaaaaaacaaaaaaaaaaaaggaaagaggcccacagagttaagcccatgtgacaacagactggagtgacatgtctgctagccaaggagcaccacgagtggccagcagccaccagagctgggagagaggcctgggacggccttgccctccagcctccagctggagccagccctgccgccaccttgacttcagacttacggcctccagagctgtgaggaacgaatccctgttgtccttaactgcccgggctgtggtgctttgccacagcagctccaggacattgagacaggtgacctcccagggccactgtttctcccaccctgcacttacttcaccagctggagtgaaggcagggaaccctgggtcccccaggagcagcagctgctgtgagcatcacagaaaagcagccccggagagcaggcggtccaggcaggggcttgtggtccgttcatctggctgcacagccgcgacctcattggcaggacgccccggggacaaggagcatccattagtaattggttttggttttgattttgttttcttgagatacggtcttgctctgtcgttcagcctggcatgcagtggcacaatcttggcttactgcagccttgatctcccaggctcaggtgatcatcccacctcggcctcccgaatagctgggactgcaggcacgcatcaccatgcctggctagtttgtatattttttagagatggggttttgcctggccgggcgcagtggctcacacctgtaatcccaaagcgctggggttacaggtgtgagccacagtacccggccccattggtaattgtaacaccttaggatgacaacattacagtaccaacgctacgacaactggcagtgtttatacacccttgtgtgctggagcctcaggaagctttgtaagatggtcttgggagctccttgctcctcccctgcatgatccctgtaacatggtccctcagcacggggaaacagactcagacctgaagtcacttgtctgttggacctggcactgtggcgagccctcagtggagcctggttggtatcagacatgccatgccctcagtgacacctcagacacgggccctgggcagacagcccccagatgcgcgtggatgcttacggggtcacagagccacgtttgaacccagaagaacaccagctttggtctagggtggccccctcacctgccttctctttttagctgctcaatagccatggggaatggagggtctgggtccagttagggacatggaggcatgggtgacctgtgccctcggagctgagccggtcctcagccttgcctgggctcaagcctggccctggcccgcagcacactggccatcttcagggtgcagccagcaccctgggctctcagggactgagggcagctgccctggcagtgggggtgccccagggctcccatccttctgcacggcccctcggcacccaggccgacctcctgctagaagacgtggccttgaagcccacagggttgatgggttatggtcaggagtcccagctgggcccaccagcctcctcaggaaggcgggtgaggttggtgtgagactgacggtgcctcctcatgtccccttggagcgccccaccccacatctcccggcctcgggtccttgcctggcccagcatgagaggtgcttcataggaacggagggaggacatgtcgggacagctcgatgctcggcctgctgctgctctgcacccccagggcctggctcaccctctctggacctgtctgcttccaaggaaggggaccctctgaggtcccacagaggccaccccagctgtgggtcgtgagcatctctgtcttgcagggacagcatcgtggccgagctggaccgagagatgagcaggagcgtggacgtgaccaacaccaccttcctgctcatggccgcctccatctatctccacgaccagaacccggatgccgccctgcgtgcgctgcaccagggggacagcctggagtggtgagtggcctccctgctctggggccagcccagggaggcaagtgccccctgccacatctccaggctgcgcacggcctcgctggctgtcgtcatgggagcagagaaaggtggtgctgaaatgaggccctggcctgctgtccaggctccagctcccctgcccagtgtgggaggcactcccatctgcgcaccaggctgcagatccaaggacacggtgcccaggctgcaaccctctgttcccaagggcagagcagaaagcggctttgtctctgctcggtttctgtgtccccaccccccacgaagccttctgtgtctcggccctgggcccagtctctcaggcctccccgggccccccataccggccctcctccagggccctctggggttggggtgctgaagccctgcaaggttggtgcccccctccaccctaggatgtgactccgggccatgtccagggcactggtcacagaaagtgtgtcagttcttccccgtgagctgtccctgcagtgcctgccttccactgtgagttgcaagctgggcatttcatggtcgctgtggatctgctcccatcccacctccatccacagagggcttagaattgcagggcgagccaggcatggtgacatgcacctatgtttccagctacttgggaggcggaagcaggagtatcccttgagtctgggaggtggaggctgcagtgagccgtgatggtgccactgcactccagcctgggtggcagagccagaccctgactcacacacaaaaaagaaaataaatagggatgtcacactgtcggcgagccggccgactcggtgctggtccaggtgctggctcctgttggcaggaaaacaagaacaagaggcctcacgagtaattcgtggtcacagccacctggggctgagagggatgaggggacgagggggcctgcagagagtgggtggccccagggctctgctgcaggtgcaggtgcaggggcgggtgcgtggccctcctctagggccttgttcctgagtgttgatgcctccagggtgtcgagtccgggcagggccctccatctggaagcacagcccatggaggctgcttctccagatgggcggtgagtgggccggggcctgaaaccccatcctgggtacctcccccagagctcctgggcctgaggaagctgagcggtgaaatgtgggagtgagggtgtcctcctctgctgggcggggctggtggtcctaagcacaggacttaggaacatcccagacacacacagtgagccctgggtgtggagcggccatgcaatgtgtctgtggcgacccgctgaccgccccctcgccctgtcctgcagcacagccatgacagtgcagatcctgctgaagctggaccgcctggacctcgcccggaaggagctgaagagaatgcaggacctggacgaggatgccaccctcacccagctcgccactgcctgggtcagcctggccacgggtggtgagaagctgcaggatgcctactacatcttccaggagatggctgacaagtgctcgcccaccctgctgctgctcaatgggcaggcggcctgccacatggcccagggccgctgggaggccgctgagggcctgctgcaggaggcgctagacaaggatagtggctacccggagacgctggtcaacctcatcgtcctgtcccagcacctgggcaagccccctgaggtgacaaaccgatacctgtcccagctgaaggatgcccacaggtcccatcccttcatcaaggagtaccaggccaaggagaacgactttgacaggctggtgctacagtacgctcccagcgcctgaggctggcccagagctgtcaggaccatgaagccaggacagaggccaggagccagccctgcagccctccccacccggcatccacctgcatcccctctgggggcaggagcccacccccagcacccccatctgttaataaatatctcaactccagggtgttccacctga

SEQ ID NO: 324279 - DNA, 1165 bp, Homo sapiens
gacgacagtgaattggtgcctcctcgtacccgggccgcgtgctctcgtgcggatcgctgagggagatagagcgaggctgttcgacagctatacacgcaacgtcgcgtactagcatacgcggcgagactatccaggcgatgtcgcagtaaaaccgaagcgcagccacccgcgagtgagacgtcataatcgagcgcctacggagaggagaccagtggaagagcgcgagcgtacgttgcgctggtagtagcagccgtaccttggcaggaagttcggtgtggtcctggatgagatcaagccctcctcggcccctgagctccaggccgtgcgcatgtttgctgactacctcgcccacgagagtcggagggacagcatcgtggccgagctggaccgagagatgagcaggagcgtggacgtgaccaacaccaccttcctgctcatggccgcctccatctatctccacgaccagaacccggatgccgccctgcgtgcgctgcaccagggggacagcctggagtgcacagccatgacagtgcagatcctgctgaagctggaccgcctggacctcgcccggaaggagctgaagagaatgcaggacctggacgaggatgccaccctcacccagctcgccactgcctgggtcagcctggccacgggtggtgagaagctgcaggatgcctactacatcttccaggagatggctgacaagtgctcgcccaccctgctgctgctcaatgggcaggcggcctgccacatggcccagggccgctgggaggccgctgagggcctgctgcaggaggcgctagacaaggatagtggctacccggagacgctggtcaacctcatcgtcctgtcccagcacctgggcaagccccctgaggtgacaaaccgatacctgtcccagctgaaggatgcccacaggtcccatcccttcatcaaggagtaccaggccaaggagaacgactttgacaggctggtgctacagtacgctcccagcgcctgaggctggcccagagctgtcaggaccatgaagccaggacagaggccaggagccagccctgcagccctccccacccggcatccacctgcatcccctctgggggcaggagcccacccccagcacccccatctgttaataaatatctcaactccagggtgttccacctga

SEQ ID NO: 324280 - DNA, 918 bp, Homo sapiens
cttgcttccggctgacgtgtctttcaggaagaggagctggtgagaagacagcgaaatggcgcctccggcccccggcccggcctccggcggctccggggaggtagacgagctgttcgacgtaaagaacgccttctacatcggcagctaccagcagtgcataaacgaggcgcagcgggtgaagctatcaagcccagagagagacgtggagagggacgtcttcctgtatagagcgtacctggcgcagaggaagttcggtgtggtcctggatgagatcaagccctcctcggcccctgagctccaggccgtgcgcatgtttgctgactacctcgcccacgagagtcggagggacagcatcgtggccgagctggaccgagagatgagcaggagcgtggacgtgaccaacaccaccttcctgctcatggccgcctccatctatctccacgaccagaacccggatgccgccctgcgtgcgctgcaccagggggacagcctggagtgcacagccatgacagtgcagatcctgctgaagctggaccgcctggacctcgcccggaaggagctgaagagaatgcaggacctggacgaggatgccaccctcacccagctcgccactgcctgggtcagcctggccacgggtggtgagaagctgcaggatgcctactacatcttccaggagatggctgacaagtgctcgcccaccctgctgctgctcaatgggcaggcggcctgccacatggcccagggccgctgggaggccgctgagggcctgctgcaggaggcgctagacaagagaggccaggagccagccctgcagccctccccacccggcatccacctgcatcccctctgggggcaggagcccacccccagcacccccatctgttaataaatatctcaactccagggtgttccacctga

SEQ ID NO: 324281 - DNA, 2023 bp, Homo sapiens
cttgcttccggctgacgtgtctttcaggaagaggagctggtgagaagacagcgaaatggcgcctccggcccccggcccggcctccggcggctccggggaggtagacgagctgttcgacgtaaagaacgccttctacatcggcagctaccagcagtgcataaacgaggcgcagcgggtgaagctatcaagcccagagagagacgtggagagggacgtcttcctgtatagagcgtacctggcgcagaggaagttcggtgtggtcctggatgagatcaagccctcctcggcccctgagctccaggccgtgcgcatgtttgctgactacctcgcccacgagagtcggaggtgaggccccagagaatgggttggcctgaggcgcggggccatcttcaaggcctgttggttatgaacctgggtgggtgggggcatggcgtgcagcgcacagcatccctcagattaggcgcctctcccctctgctcccctgctgctttgtgcctcagtttccctcacctgcacagcagtggggggctggtgatggatcctgcttcaaaggggagggtcagagacagtgctgtgtgtgcacacgccctcatggaccacaaggcactctctgaacctagaactgaaaatatcaattaccgagcagccctctgcaacacccagagccccaagacagcccagggcgcagcgggggcagggccctcccatcagttttcttatttatttatttagagatggagtctcactctgtcaccaggctggatccagcctgggtggcagagccagaccctgactcacacacaaaaaagaaaataaatagggatgtcacactgtcggcgagccggccgactcggtgctggtccaggtgctggctcctgttggcaggaaaacaagaacaagaggcctcacgagtaattcgtggtcacagccacctggggctgagagggatgaggggacgagggggcctgcagagagtgggtggccccagggctctgctgcaggtgcaggtgcaggggcgggtgcgtggccctcctctagggccttgttcctgagtgttgatgcctccagggtgtcgagtccgggcagggccctccatctggaagcacagcccatggaggctgcttctccagatgggcggtgagtgggccggggcctgaaaccccatcctgggtacctcccccagagctcctgggcctgaggaagctgagcggtgaaatgtgggagtgagggtgtcctcctctgctgggcggggctggtggtcctaagcacaggacttaggaacatcccagacacacacagtgagccctgggtgtggagcggccatgcaatgtgtctgtggcgacccgctgaccgccccctcgccctgtcctgcagcacagccatgacagtgcagatcctgctgaagctggaccgcctggacctcgcccggaaggagctgaagagaatgcaggacctggacgaggatgccaccctcacccagctcgccactgcctgggtcagcctggccacgggtggtgagaagctgcaggatgcctactacatcttccaggagatggctgacaagtgctcgcccaccctgctgctgctcaatgggcaggcggcctgccacatggcccagggccgctgggaggccgctgagggcctgctgcaggaggcgctagacaaggatagtggctacccggagacgctggtcaacctcatcgtcctgtcccagcacctgggcaagccccctgaggtgacaaaccgatacctgtcccagctgaaggatgcccacaggtcccatcccttcatcaaggagtaccaggccaaggagaacgactttgacaggctggtgctacagtacgctcccagcgcctgaggctggcccagagctgtcaggaccatgaagccaggacagaggccaggagccagccctgcagccctccccacccggcatccacctgcatcccctctgggggcaggagcccacccccagcacccccatctgttaataaatatctcaactccagggtgttccacctga

SEQ ID NO: 324282 - DNA, 1065 bp, Homo sapiens
cttgcttccggctgacgtgtctttcaggaagaggagctggtgagaagacagcgaaatggcgcctccggcccccggcccggcctccggcggctccggggaggtagacgagctgttcgacgtaaagaacgccttctacatcggcagctaccagcagtgcataaacgaggcgcagcgggtgaagctatcaagcccagagagagacgtggagagggacgtcttcctgtatagagcgtacctggcgcagaggaagttcggtgtggtcctggatgagatcaagccctcctcggcccctgagctccaggccgtgcgcatgtttgctgactacctcgcccacgagagtcggagggacagcatcgtggccgagctggaccgagagatgagcaggagcgtggacgtgaccaacaccaccttcctgctcatggccgcctccatctatctccacgaccagaacccggatgccgccctgcgtgcgctgcaccagggggacagcctggagtgcacagccatgacagtgcagatcctgctgaagctggaccgcctggacctcgcccgggtggtgagaagctgcaggatgcctactacatcttccaggagatggctgacaagtgctcgcccaccctgctgctgctcaatgggcaggcggcctgccacatggcccagggccgctgggaggccgctgagggcctgctgcaggaggcgctagacaaggatagtggctacccggagacgctggtcaacctcatcgtcctgtcccagcacctgggcaagccccctgaggtgacaaaccgatacctgtcccagctgaaggatgcccacaggtcccatcccttcatcaaggagtaccaggccaaggagaacgactttgacaggctggtgctacagtacgctcccagcgcctgaggctggcccagagctgtcaggaccatgaagccaggacagaggccaggagccagccctgcagccctccccacccggcatccacctgcatcccctctgggggcaggagcccacccccagcacccccatctgttaataaatatctcaactccagggtgttccacctga

SEQ ID NO: 324283 - DNA, 1105 bp, Homo sapiens
cttgcttccggctgacgtgtctttcaggaagaggagctggtgagaagacagcgaaatggcgcctccggcccccggcccggcctccggcggctccggggaggtagacgagctgttcgacgtaaagaacgccttctacatcggcagctaccagcagtgcataaacgaggcgcagcgggtgaagctatcaagcccagagagagacgtggagagggacgtcttcctgtatagagcgtacctggcgcagaggaagttcggtgtggtcctggatgagatcaagccctcctcggcccctgagctccaggccgtgcgcatgtttgctgactacctcgcccacgagagtcggagggacagcatcgtggccgagctggaccgagagatgagcaggagcgtggacgtgaccaacaccaccttcctgctcatggccgcctccatctatctccacgaccagaacccggatgccgccctgcgtgcgctgcaccagggggacagcctggagtgcacagccatgacagtgcagatcctgctgaagctggaccgcctggacctcgcccggaaggagctgaagagaatgcaggacctggacgaggatgccaccctcacccagctcgccactgcctactacatcttccaggagatggctgacaagtgctcgcccaccctgctgctgctcaatgggcaggcggcctgccacatggcccagggccgctgggaggccgctgagggcctgctgcaggaggcgctagacaaggatagtggctacccggagacgctggtcaacctcatcgtcctgtcccagcacctgggcaagccccctgaggtgacaaaccgatacctgtcccagctgaaggatgcccacaggtcccatcccttcatcaaggagtaccaggccaaggagaacgactttgacaggctggtgctacagtacgctcccagcgcctgaggctggcccagagctgtcaggaccatgaagccaggacagaggccaggagccagccctgcagccctccccacccggcatccacctgcatcccctctgggggcaggagcccacccccagcacccccatctgttaataaatatctcaactccagggtgttccacctga

SEQ ID NO: 324284 - DNA, 1083 bp, Homo sapiens
cttgcttccggctgacgtgtctttcaggaagaggagctggtgagaagacagcgaaatggcgcctccggcccccggcccggcctccggcggctccggggaggtagacgagctgttcgacgtaaagaacgccttctacatcggcagctaccagcagtgcataaacgaggcgcagcgggtgaagctatcaagcccagagagagacgtggagagggacgtcttcctgtatagagcgtacctggcgcagaggaagttcggtgtggtcctggatgagatcaagccctcctcggcccctgagctccaggccgtgcgcatgtttgctgactacctcgcccacgagagtcggagggacagcatcgtggccgagctggaccgagagatgagcaggagcgtggacgtgaccaacaccaccttcctgctcatggccgcctccatctatctccacgaccagaacccggatgccgccctgcgtgcgctgcaccagggggacagcctggagtgcacagccatgacagtgcagatcctgctgaagctggaccgcctggacctcgcccggaaggagctgaagagaatgcaggacctggacgaggatgccaccctcacccagctcgccactgcctgggtcagcctggccacgggtggtgagaagctgcaggatgcctactacatcttccaggagatggctgacaagtgctcgcccaccctgctgctgctcaatgggcaggcggcgatagtggctacccggagacgctggtcaacctcatcgtcctgtcccagcacctgggcaagccccctgaggtgacaaaccgatacctgtcccagctgaaggatgcccacaggtcccatcccttcatcaaggagtaccaggccaaggagaacgactttgacaggctggtgctacagtacgctcccagcgcctgaggctggcccagagctgtcaggaccatgaagccaggacagaggccaggagccagccctgcagccctccccacccggcatccacctgcatcccctctgggggcaggagcccacccccagcacccccatctgttaataaatatctcaactccagggtgttccacctga

SEQ ID NO: 324285 - DNA, 937 bp, Homo sapiens
cttgcttccggctgacgtgtctttcaggaagaggagctggtgagaagacagcgaaatggcgcctccggcccccggcccggcctccggcggctccggggaggtagacgagctgttcgacgtaaagaacgccttctacatcggcagctaccagcagtgcataaacgaggcgcagcgggtgaagctatcaagcccagagagagacgtggagagggacgtcttcctgtatagagcgtacctggcgcagaggaagttcggtgtggtcctggatgagatcaagccctcctcggcccctgagctccaggccgtgcgcatgtttgctgactacctcgcccacgagagtcggagggacagcatcgtggccgagctggaccgagagatgagcaggagcgtggacgtgaccaacaccaccttcctgctcatggccgcctccatctatctccacgaccagaacccggatgccgccctgcgtgcgctgcaccagggggacagcctggagtggaaggagctgaagagaatgcaggacctggacgaggatgccaccctcacccagctcgccactgcctgggtcagcctggccacggatagtggctacccggagacgctggtcaacctcatcgtcctgtcccagcacctgggcaagccccctgaggtgacaaaccgatacctgtcccagctgaaggatgcccacaggtcccatcccttcatcaaggagtaccaggccaaggagaacgactttgacaggctggtgctacagtacgctcccagcgcctgaggctggcccagagctgtcaggaccatgaagccaggacagaggccaggagccagccctgcagccctccccacccggcatccacctgcatcccctctgggggcaggagcccacccccagcacccccatctgttaataaatatctcaactccagggtgttccacctga

SEQ ID NO: 324286 - DNA, 249 bp, Homo sapiens
cctgcccccaccctgtgttgccatgtgtcttgctaaaggagagaacgactttgacaggctggtgctacagtacgctcccagcgcctgaggctggcccagagctgtcaggaccatgaagccaggacagaggccaggagccagccctgcagccctccccacccggcatccacctgcatcccctctgggggcaggagcccacccccagcacccccatctgttaataaatatctcaactccagggtgttccac

SEQ ID NO: 324287 - DNA, 763 bp, Homo sapiens
tcccaagtagttgggactacaggcgccaccaggcccagctgactttcttacttttttgtagaaaaaggggtcctactatgttgcccagggtggtcttgaactcctgggcttaagcgatcctgccttggcctcccaaagcgctggggttacaggtgtgagccacagtacccggccccattggtaattgtaacaccttaggatgacaacattacagtaccaacgctacgacaactggcagtgtttatacacccttgtgtgctggagcctcaggaagctttgtaagatggtcttgggagctccttgctcctcccctgcatgatccctgtaacatggtccctcagcacggggaaacagactcagacctgaagtcacttgtctgttggacctggcactgtggcgagccctcagtggagcctggttggtatcagacatgccatgccctcagtgacacctcagacacgggccctgggcagacagcccccagatgcgcgtggatgcttacggggtcacagagccacgtttgaacccagaagaacaccagctttggtctagggtggccccctcacctgccttctctttttagctgctcaatagccatggggaatggagggtctgggtccagttagggacatggaggcatgggtgacctgtgccctcggagctgagccggtcctcagccttgcctgggctcaagcctggccctggcccgcagcacactggccatcttcagggtgcagccagcaccctgggctctcagggactg

SEQ ID NO: 324288 - DNA, 1147 bp, Homo sapiens
cttgcttccggctgacgtgtctttcaggaagaggagctggtgagaagacagcgaaatggcgcctccggcccccggcccggcctccggcggctccggggaggtagacgagctgttcgacgtaaagaacgccttctacatcggcagctaccagcagtgcataaacgaggcgcagcgggtgaagctatcaagcccagagagagacgtggagagggacgtcttcctgtatagagcgtacctggcgcagaggaagttcggtgtggtcctggatgagatcaagccctcctcggcccctgagctccaggccgtgcgcatgtttgctgactacctcgcccacgagagtcggagggacagcatcgtggccgagctggaccgagagatgagcaggagcgtggacgtgaccaacaccaccttcctgctcatggccgcctccatctatctccacgaccagaacccggatgccgccctgcgtgcgctgcaccagggggacagcctggagtgcacagccatgacagtgcagatcctgctgaagctggaccgcctggacctcgcccggaaggagctgaagagaatgcaggacctggacgaggatgccaccctcacccagctcgccactgcctgggtcagcctggccacgggtggtgagaagctgcaggatgcctactacatcttccaggagatggctgacaagtgctcgcccaccctgctgctgctcaatgggcaggcggcctgccacatggcccagggccgctgggaggccgctgagggcctgctgcaggaggcgctagacaaggatagtggctacccggagacgctggtcaacctcatcgtcctgtcccagcacctgggcaagccccctgaggtgacaaaccgatacctgtcccagctgaaggatgcccacaggtcccatcccttcatcaaggagtaccaggccaaggagaacgactttgacaggctggtgctacagtacgctcccagcgcctgaggctggcccagagctgtcaggaccatgaagccaggacagaggccaggagccagccctgcagccctccccacccggcatccacctgcatcccctctgggggcaggagcccacccccagcacccccatctgttaataaatatctcaactccagggtgttccacctga

SEQ ID NO: 324289 - DNA, 1561 bp, Homo sapiens
cttgcttccggctgacgtgtctttcaggaagaggagctggtgagaagacagcgaaatggcgcctccggcccccggcccggcctccggcggctccggggaggtagacgagctgttcgacgtaaagaacgccttctacatcggcagctaccagcagtgcataaacgaggcgcagcgggtgaagctatcaagcccagagagagacgtggagagggacgtcttcctgtatagagcgtacctggcgcagaggaagttcggtgtggtcctggatgagatcaagccctcctcggcccctgagctccaggccgtgcgcatgtttgctgactacctcgcccacgagagtcggagggacagcatcgtggccgagctggaccgagagatgagcaggagcgtggacgtgaccaacaccaccttcctgctcatggccgcctccatctatctccacgaccagaacccggatgccgccctgcgtgcgctgcaccagggggacagcctggagtgcacagccatgacagtgcagatcctgctgaagctggaccgcctggacctcgcccggaaggagctgaagagaatgcaggacctggacgaggatgccaccctcacccagctcgccactgcctgggtcagcctggccacgggtggtgagaagctgcaggatgcctactacatcttccaggagatggctgacaagtgctcgcccaccctgctgctgctcaatgggcaggcggcctgccacatggcccagggccgctgggaggccgctgagggcctgctgcaggaggcgctagacaaggatagtggctacccggagacgctggtcaacctcatcgtcctgtcccagcacctgggcaagccccctgaggtgacaaaccgatacctgtcccagctgaaggatgcccacaggtcccatcccttcatcaaggagtaccaggccaaggagaacgactttgacaggctggtgctacagtacgctcccagcgcctgaggctggcccagagctgtcaggaccatgaagccaggacagaggccaggagccagccctgcagccctccccacccggcatccacctgcatcccctctgggggcaggagcccacccccagcacccccatctgttaataaatatctcaactccagggtgttccacctgaaaaaaaaaataaagaaaaaaaattccggaagattagttttttcccttggggcgcggatttcgggcacagaggggaccggggtccgcccggggagcataggagccttcgctttggcgaggatcaaggccggccacggtcaaaagccgcggccggcaaggttcgaccatgggattgacgagttgtcgcgccggcggcatacggtcagtcggaaaacgggccccgggaactgtgtgcaaggcgccggagctcacagaggggcgagaagaattggcccccccggtggcagggctataccgccttcataattgggggggagccgcccaaggcgaaccaaggggggtgaatgggctggggcattgggtcccaccaggggttcccataggtgggggagaagcagcgcccaaacgaagaggg

SEQ ID NO: 324290 - DNA, 1130 bp, Homo sapiens
  misc_feature (1053)..(1053): n is a, c, g, or t
cttgcttccggctgacgtgtctttcaggaagaggagctggtgagaagacagcgaaatggcgcctccggcccccggcccggcctccggcggctccggggaggtagacgagctgttcgacgtaaagaacgccttctacatcggcagctaccagcagtgcataaacgaggcgcagcgggtgaagctatcaagcccagagagagacgtggagagggacgtcttcctgtatagagcgtacctggcgcagaggaagttcggtgtggtcctggatgagatcaagccctcctcggcccctgagctccaggccgtgcgcatgtttgctgactacctcgcccacgagagtcggagggacagcatcgtggccgagctggaccgagagatgagcaggagcgtggacgtgaccaacaccaccttcctgctcatggccgcctccatctatctccacgaccagaacccggatgccgccctgcgtgcgctgcaccagggggacagcctggagtgcacagccatgacagtgcagatcctgctgaagctggaccgcctggacctcgcccggaaggagctgaagagaatgcaggacctggacgaggatgccaccctcacccagctcgccactgcctgggtcagcctggccacgggtggtgagaagctgcaggatgcctactacatcttccaggagatggctgacaagtgctcgcccaccctgctgctgctcaatgggcaggcggcctgccacatggcccagggccgctgggaggccgctgagggcctgctgcaggaggcgctagacaaggatagtggctacccggagacgctggtcaacctcatcgtcctgtcccagcacctgggcaagccccctgaggtgacaaaccgatacctgtcccagctgaaggatgcccacaggtcccatcccttcatcaaggagtaccaggccaaggagaacgactttgacaggctggtgctacagtacgctcccagcgcctgaggctggcccagagctgtcaggaccatgaagccaggacagaggccaggagccagccctgcagccctccccanccaccctcgtgcgattaccgcgttcgtctgtactctttttgtttgtttggtgctcttgtttgtgcgttgttgttgtt

SEQ ID NO: 324291 - DNA, 978 bp, Homo sapiens
  misc_feature (884)..(884): n is a, c, g, or t
  misc_feature (895)..(895): n is a, c, g, or t
  misc_feature (908)..(908): n is a, c, g, or t
cttgcttccggctgacgtgtctttcaggaagaggagctggtgagaagacagcgaaatggcgcctccggcccccggcccggcctccggcggctccggggaggtagacgagctgttcgacgtaaagaacgccttctacatcggcagctaccagcagtgcataaacgaggcgcagcgggtgaagctatcaagcccagagagagacgtggagagggacgtcttcctgtatagagcgtacctggcgcagaggaagttcggtgtggtcctggatgagatcaagccctcctcggcccctgagctccaggccgtgcgcatgtttgctgactacctcgcccacgagagtcggagggacagcatcgtggccgagctggaccgagagatgagcaggagcgtggacgtgaccaacaccaccttcctgctcatggccgcctccatctatctccacgaccagaacccggatgccgccctgcgtgcgctgcaccagggggacagcctggagtgcacagccatgacagtgcagatcctgctgaagctggaccgcctggacctcgcccggaaggagctgaagagaatgcaggacctggacgaggatgccaccctcacccagctcgccactgcctgggtcagcctggccacgggtggtgagaagctgcaggatgcctactacatcttccaggagatggctgacaagtgctcgcccaccctgctgctgctcaatgggcaggcggcctgccacatggcccagggccgctgggaggccgctgagggcctgctgcaggaggcgctagacaaggatagtggctacccggagacgctggtcaacctcatcgtcctgtcccagcacctgggcaagccccctgaggtgacaacgatactgtccagtgagntgcccagtccntccttctcaggancagcagagacgcttgacggggggtaagcccagctggtggcatgtgactaacgagaggggacccaaaaacg

SEQ ID NO: 324292 - DNA, 4788 bp, Homo sapiens
cttgcttccggctgacgtgtctttcaggaagaggagctggtgagaagacagcgaaatggcgcctccggcccccggcccggcctccggcggctccggggaggtagacgagctgttcgacgtaaagaacgccttctacatcggcagctaccagcagtgcataaacgaggcgcagcgggtgaagctatcaagcccagagagagacgtggagagggacgtcttcctgtatagagcgtacctggcgcagaggaagttcggtgtggtcctggatgagatcaagccctcctcggcccctgagctccaggccgtgcgcatgtttgctgactacctcgcccacgagagtcggaggtgaggccccagagaatgggttggcctgaggcgcggggccatcttcaaggcctgttggttatgaacctgggtgggtgggggcatggcgtgcagcgcacagcatccctcagattaggcgcctctcccctctgctcccctgctgctttgtgcctcagtttccctcacctgcacagcagtggggggctggtgatggatcctgcttcaaaggggagggtcagagacagtgctgtgtgtgcacacgccctcatggaccacaaggcactctctgaacctagaactgaaaatatcaattaccgagcagccctctgcaacacccagagccccaagacagcccagggcgcagcgggggcagggccctcccatcagttttcttatttatttatttagagatggagtctcactctgtcaccaggctggagttgcagtgagccaagatcgcactagtgcactccagcctgggtgacagcgggagactgtcttaaaaaacaaaaaaaaaaaaggaaagaggcccacagagttaagcccatgtgacaacagactggagtgacatgtctgctagccaaggagcaccacgagtggccagcagccaccagagctgggagagaggcctgggacggccttgccctccagcctccagctggagccagccctgccgccaccttgacttcagacttacggcctccagagctgtgaggaacgaatccctgttgtccttaactgcccgggctgtggtgctttgccacagcagctccaggacattgagacaggtgacctcccagggccactgtttctcccaccctgcacttacttcaccagctggagtgaaggcagggaaccctgggtcccccaggagcagcagctgctgtgagcatcacagaaaagcagccccggagagcaggcggtccaggcaggggcttgtggtccgttcatctggctgcacagccgcgacctcattggcaggacgccccggggacaaggagcatccattagtaattggttttggttttgattttgttttcttgagatacggtcttgctctgtcgttcagcctggcatgcagtggcacaatcttggcttactgcagccttgatctcccaggctcaggtgatcatcccacctcggcctcccgaatagctgggactgcaggcacgcatcaccatgcctggctagtttgtatattttttagagatggggttttgcctggccgggcgcagtggctcacacctgtaatcccaaagcgctggggttacaggtgtgagccacagtacccggccccattggtaattgtaacaccttaggatgacaacattacagtaccaacgctacgacaactggcagtgtttatacacccttgtgtgctggagcctcaggaagctttgtaagatggtcttgggagctccttgctcctcccctgcatgatccctgtaacatggtccctcagcacggggaaacagactcagacctgaagtcacttgtctgttggacctggcactgtggcgagccctcagtggagcctggttggtatcagacatgccatgccctcagtgacacctcagacacgggccctgggcagacagcccccagatgcgcgtggatgcttacggggtcacagagccacgtttgaacccagaagaacaccagctttggtctagggtggccccctcacctgccttctctttttagctgctcaatagccatggggaatggagggtctgggtccagttagggacatggaggcatgggtgacctgtgccctcggagctgagccggtcctcagccttgcctgggctcaagcctggccctggcccgcagcacactggccatcttcagggtgcagccagcaccctgggctctcagggactgagggcagctgccctggcagtgggggtgccccagggctcccatccttctgcacggcccctcggcacccaggccgacctcctgctagaagacgtggccttgaagcccacagggttgatgggttatggtcaggagtcccagctgggcccaccagcctcctcaggaaggcgggtgaggttggtgtgagactgacggtgcctcctcatgtccccttggagcgccccaccccacatctcccggcctcgggtccttgcctggcccagcatgagaggtgcttcataggaacggagggaggacatgtcgggacagctcgatgctcggcctgctgctgctctgcacccccagggcctggctcaccctctctggacctgtctgcttccaaggaaggggaccctctgaggtcccacagaggccaccccagctgtgggtcgtgagcatctctgtcttgcagggacagcatcgtggccgagctggaccgagagatgagcaggagcgtggacgtgaccaacaccaccttcctgctcatggccgcctccatctatctccacgaccagaacccggatgccgccctgcgtgcgctgcaccagggggacagcctggagtggtgagtggcctccctgctctggggccagcccagggaggcaagtgccccctgccacatctccaggctgcgcacggcctcgctggctgtcgtcatgggagcagagaaaggtggtgctgaaatgaggccctggcctgctgtccaggctccagctcccctgcccagtgtgggaggcactcccatctgcgcaccaggctgcagatccaaggacacggtgcccaggctgcaaccctctgttcccaagggcagagcagaaagcggctttgtctctgctcggtttctgtgtccccaccccccacgaagccttctgtgtctcggccctgggcccagtctctcaggcctccccgggccccccataccggccctcctccagggccctctggggttggggtgctgaagccctgcaaggttggtgcccccctccaccctaggatgtgactccgggccatgtccagggcactggtcacagaaagtgtgtcagttcttccccgtgagctgtccctgcagtgcctgccttccactgtgagttgcaagctgggcatttcatggtcgctgtggatctgctcccatcccacctccatccacagagggcttagaattgcagggcgagccaggcatggtgacatgcacctatgtttccagctacttgggaggcggaagcaggagtatcccttgagtctgggaggtggaggctgcagtgagccgtgatggtgccactgcactccagcctgggtggcagagccagaccctgactcacacacaaaaaagaaaataaatagggatgtcacactgtcggcgagccggccgactcggtgctggtccaggtgctggctcctgttggcaggaaaacaagaacaagaggcctcacgagtaattcgtggtcacagccacctggggctgagagggatgaggggacgagggggcctgcagagagtgggtggccccagggctctgctgcaggtgcaggtgcaggggcgggtgcgtggccctcctctagggccttgttcctgagtgttgatgcctccagggtgtcgagtccgggcagggccctccatctggaagcacagcccatggaggctgcttctccagatgggcggtgagtgggccggggcctgaaaccccatcctgggtacctcccccagagctcctgggcctgaggaagctgagcggtgaaatgtgggagtgagggtgtcctcctctgctgggcggggctggtggtcctaagcacaggacttaggaacatcccagacacacacagtgagccctgggtgtggagcggccatgcaatgtgtctgtggcgacccgctgaccgccccctcgccctgtcctgcagcacagccatgacagtgcagatcctgctgaagctggaccgcctggacctcgcccggaaggagctgaagagaatgcaggacctggacgaggatgccaccctcacccagctcgccactgcctgggtcagcctggccacgggtggtgagaagctgcaggatgcctactacatcttccaggagatggctgacaagtgctcgcccaccctgctgctgctcaatgggcaggcggcctgccacatggcccagggccgctgggaggccgctgagggcctgctgcaggaggcgctagacaaggatagtggctacccggagacgctggtcaacctcatcgtcctgtcccagcacctgggcaagccccctgaggtgacaaaccgatacctgtcccagctgaaggatgcccacaggtcccatcccttcatcaaggagtaccaggccaaggagaacgactttgacaggctggtgctacagtacgctcccagcgcctgaggctggcccagagctgtcaggaccatgaagccaggacagaggccaggagccagccctgcagccctccccacccggcatccacctgcatcccctctgggggcaggagcccacccccagcacccccatctgttaataaatatctcaactccagggtgttccacctga

SEQ ID NO: 324293 - DNA, 1219 bp, Homo sapiens
cttgcttccggctgacgtgtctttcaggaagaggagctggtgagaagacagcgaaatggcgcctccggcccccggcccggcctccggcggctccggggaggtagacgagctgttcgacgtaaagaacgccttctacatcggcagctaccagcagtgcataaacgaggcgcagcgggtgaagctatcaagcccagagagagacgtggagagggacgtcttcctgtatagagcgtacctggcgcagaggaagttcggtgtggtcctggatgagatcaagccctcctcggcccctgagctccaggccgtgcgcatgtttgctgactacctcgcccacgagagtcggagggacagcatcgtggccgagctggaccgagagatgagcaggagcgtggacgtgaccaacaccaccttcctgctcatggccgcctccatctatctccacgaccagaacccggatgccgccctgcgtgcgctgcaccagggggacagcctggagtgcagggtgtcgagtccgggcagggccctccatctggaagcacagcccatggaggctgcttctccagatgggcgcacagccatgacagtgcagatcctgctgaagctggaccgcctggacctcgcccggaaggagctgaagagaatgcaggacctggacgaggatgccaccctcacccagctcgccactgcctgggtcagcctggccacgggtggtgagaagctgcaggatgcctactacatcttccaggagatggctgacaagtgctcgcccaccctgctgctgctcaatgggcaggcggcctgccacatggcccagggccgctgggaggccgctgagggcctgctgcaggaggcgctagacaaggatagtggctacccggagacgctggtcaacctcatcgtcctgtcccagcacctgggcaagccccctgaggtgacaaaccgatacctgtcccagctgaaggatgcccacaggtcccatcccttcatcaaggagtaccaggccaaggagaacgactttgacaggctggtgctacagtacgctcccagcgcctgaggctggcccagagctgtcaggaccatgaagccaggacagaggccaggagccagccctgcagccctccccacccggcatccacctgcatcccctctgggggcaggagcccacccccagcacccccatctgttaataaatatctcaactccagggtgttccacctga

SEQ ID NO: 324294 - DNA, 4382 bp, Homo sapiens
tcctatcccacatgcttgtgaatatgatatcatttggaaaaagggtctttgccgatcagattaagagataaggagatgaagacatgctggatttagggtgggccccaaagccaaggacttgtgtccttttaagagataaaaggagggctgggtgcagtggctcatacttgtaatcccagcactttgggaggacgaggtgggcagatcacctgaggtcaggagttttcaagaccagcctggccaacgtggtgaaaccccatttctattaaaaatacagaattaacaggatgtgatgtctgtgattccagctacttgggaggctgaggcaggagaatcgcttgaacctggcaggcagaggttgcagtgagccaagatcgcactagtgcactccagcctgggtgacagcgggagactgtcttaaaaaacaaaaaaaaaaaaggaaagaggcccacagagttaagcccatgtgacaacagactggagtgacatgtctgctagccaaggagcaccacgagtggccagcagccaccagagctgggagagaggcctgggacggccttgccctccagcctccagctggagccagccctgccgccaccttgacttcagacttacggcctccagagctgtgaggaacgaatccctgttgtccttaactgcccgggctgtggtgctttgccacagcagctccaggacattgagacaggtgacctcccagggccactgtttctcccaccctgcacttacttcaccagctggagtgaaggcagggaaccctgggtcccccaggagcagcagctgctgtgagcatcacagaaaagcagccccggagagcaggcggtccaggcaggggcttgtggtccgttcatctggctgcacagccgcgacctcattggcaggacgccccggggacaaggagcatccattagtaattggttttggttttgattttgttttcttgagatacggtcttgctctgtcgttcagcctggcatgcagtggcacaatcttggcttactgcagccttgatctcccaggctcaggtgatcatcccacctcggcctcccgaatagctgggactgcaggcacgcatcaccatgcctggctagtttgtatattttttagagatggggttttgcctggccgggcgcagtggctcacacctgtaatcccaaagcgctggggttacaggtgtgagccacagtacccggccccattggtaattgtaacaccttaggatgacaacattacagtaccaacgctacgacaactggcagtgtttatacacccttgtgtgctggagcctcaggaagctttgtaagatggtcttgggagctccttgctcctcccctgcatgatccctgtaacatggtccctcagcacggggaaacagactcagacctgaagtcacttgtctgttggacctggcactgtggcgagccctcagtggagcctggttggtatcagacatgccatgccctcagtgacacctcagacacgggccctgggcagacagcccccagatgcgcgtggatgcttacggggtcacagagccacgtttgaacccagaagaacaccagctttggtctagggtggccccctcacctgccttctctttttagctgctcaatagccatggggaatggagggtctgggtccagttagggacatggaggcatgggtgacctgtgccctcggagctgagccggtcctcagccttgcctgggctcaagcctggccctggcccgcagcacactggccatcttcagggtgcagccagcaccctgggctctcagggactgagggcagctgccctggcagtgggggtgccccagggctcccatccttctgcacggcccctcggcacccaggccgacctcctgctagaagacgtggccttgaagcccacagggttgatgggttatggtcaggagtcccagctgggcccaccagcctcctcaggaaggcgggtgaggttggtgtgagactgacggtgcctcctcatgtccccttggagcgccccaccccacatctcccggcctcgggtccttgcctggcccagcatgagaggtgcttcataggaacggagggaggacatgtcgggacagctcgatgctcggcctgctgctgctctgcacccccagggcctggctcaccctctctggacctgtctgcttccaaggaaggggaccctctgaggtcccacagaggccaccccagctgtgggtcgtgagcatctctgtcttgcagggacagcatcgtggccgagctggaccgagagatgagcaggagcgtggacgtgaccaacaccaccttcctgctcatggccgcctccatctatctccacgaccagaacccggatgccgccctgcgtgcgctgcaccagggggacagcctggagtggtgagtggcctccctgctctggggccagcccagggaggcaagtgccccctgccacatctccaggctgcgcacggcctcgctggctgtcgtcatgggagcagagaaaggtggtgctgaaatgaggccctggcctgctgtccaggctccagctcccctgcccagtgtgggaggcactcccatctgcgcaccaggctgcagatccaaggacacggtgcccaggctgcaaccctctgttcccaagggcagagcagaaagcggctttgtctctgctcggtttctgtgtccccaccccccacgaagccttctgtgtctcggccctgggcccagtctctcaggcctccccgggccccccataccggccctcctccagggccctctggggttggggtgctgaagccctgcaaggttggtgcccccctccaccctaggatgtgactccgggccatgtccagggcactggtcacagaaagtgtgtcagttcttccccgtgagctgtccctgcagtgcctgccttccactgtgagttgcaagctgggcatttcatggtcgctgtggatctgctcccatcccacctccatccacagagggcttagaattgcagggcgagccaggcatggtgacatgcacctatgtttccagctacttgggaggcggaagcaggagtatcccttgagtctgggaggtggaggctgcagtgagccgtgatggtgccactgcactccagcctgggtggcagagccagaccctgactcacacacaaaaaagaaaataaatagggatgtcacactgtcggcgagccggccgactcggtgctggtccaggtgctggctcctgttggcaggaaaacaagaacaagaggcctcacgagtaattcgtggtcacagccacctggggctgagagggatgaggggacgagggggcctgcagagagtgggtggccccagggctctgctgcaggtgcaggtgcaggggcgggtgcgtggccctcctctagggccttgttcctgagtgttgatgcctccagggtgtcgagtccgggcagggccctccatctggaagcacagcccatggaggctgcttctccagatgggcggtgagtgggccggggcctgaaaccccatcctgggtacctcccccagagctcctgggcctgaggaagctgagcggtgaaatgtgggagtgagggtgtcctcctctgctgggcggggctggtggtcctaagcacaggacttaggaacatcccagacacacacagtgagccctgggtgtggagcggccatgcaatgtgtctgtggcgacccgctgaccgccccctcgccctgtcctgcagcacagccatgacagtgcagatcctgctgaagctggaccgcctggacctcgcccggaaggagctgaagagaatgcaggacctggacgaggatgccaccctcacccagctcgccactgcctgggtcagcctggccacgggtggtgagaagctgcaggatgcctactacatcttccaggagatggctgacaagtgctcgcccaccctgctgctgctcaatgggcaggcggcctgccacatggcccagggccgctgggaggccgctgagggcctgctgcaggaggcgctagacaaggatagtggctacccggagacgctggtcaacctcatcgtcctgtcccagcacctgggcaagccccctgaggtgacaaaccgatacctgtcccagctgaaggatgcccacaggtcccatcccttcatcaaggagtaccaggccaaggagaacgactttgacaggctggtgctacagtacgctcccagcgcctgaggctggcccagagctgtcaggaccatgaagccaggacagaggccaggagccagccctgcagccctccccacccggcatccacctgcatcccctctgggggcaggagcccacccccagcacccccatctgttaataaatatctcaactccagggtgttccacctga

SEQ ID NO: 324295 - DNA, 1218 bp, Homo sapiens
cttgcttccggctgacgtgtctttcaggaagaggagctggtgagaagacagcgaaatggcgcctccggcccccggcccggcctccggcggctccggggaggtagacgagctgttcgacgtaaagaacgccttctacatcggcagctaccagcagtgcataaacgaggcgcagcgggtgaagctatcaagcccagagagagacgtggagagggacgtcttcctgtatagagcgtacctggcgcagaggaagttcggtgtggtcctggatgagatcaagccctcctcggcccctgagctccaggccgtgcgcatgtttgctgactacctcgcccacgagagtcggagaaacctggggttcctgggagctgactcctgtgcagaggcagcatggtggggtgaatggtgtcccccaaaagggacagcatcgtggccgagctggaccgagagatgagcaggagcgtggacgtgaccaacaccaccttcctgctcatggccgcctccatctatctccacgaccagaacccggatgccgccctgcgtgcgctgcaccagggggacagcctggagtgcacagccatgacagtgcagatcctgctgaagctggaccgcctggacctcgcccggaaggagctgaagagaatgcaggacctggacgaggatgccaccctcacccagctcgccactgcctgggtcagcctggccacgggtggtgagaagctgcaggatgcctactacatcttccaggagatggctgacaagtgctcgcccaccctgctgctgctcaatgggcaggcggcctgccacatggcccagggccgctgggaggccgctgagggcctgctgcaggaggcgctagacaaggatagtggctacccggagacgctggtcaacctcatcgtcctgtcccagcacctgggcaagccccctgaggtgacaaaccgatacctgtcccagctgaaggatgcccacaggtcccatcccttcatcaaggagtaccaggccaaggagaacgactttgacaggctggtgctacagtacgctcccagcgcctgaggctggcccagagctgtcaggaccatgaagccaggacagaggccaggagccagccctgcagccctccccacccggcatccacctgcatcccctctgggggcaggagcccacccccagcacccccatctgttaataaatatctcaactccagggtgttccacctga

SEQ ID NO: 324296 - DNA, 994 bp, Homo sapiens
cttgcttccggctgacgtgtctttcaggaagaggagctggtgagaagacagcgaaatggcgcctccggcccccggcccggcctccggcggctccggggaggtagacgagctgttcgacgtaaagaacgccttctacatcggcagctaccagcagtgcataaacgaggcgcagcgggtgaagctatcaagcccagagagagacgtggagagggacgtcttcctgtatagagcgtacctggcgcagaggaagttcggtgtggtcctggatgagatcaagccctcctcggcccctgagctccaggccgtgcgcatgtttgctgactacctcgcccacgagagtcggagcacagccatgacagtgcagatcctgctgaagctggaccgcctggacctcgcccggaaggagctgaagagaatgcaggacctggacgaggatgccaccctcacccagctcgccactgcctgggtcagcctggccacgggtggtgagaagctgcaggatgcctactacatcttccaggagatggctgacaagtgctcgcccaccctgctgctgctcaatgggcaggcggcctgccacatggcccagggccgctgggaggccgctgagggcctgctgcaggaggcgctagacaaggatagtggctacccggagacgctggtcaacctcatcgtcctgtcccagcacctgggcaagccccctgaggtgacaaaccgatacctgtcccagctgaaggatgcccacaggtcccatcccttcatcaaggagtaccaggccaaggagaacgactttgacaggctggtgctacagtacgctcccagcgcctgaggctggcccagagctgtcaggaccatgaagccaggacagaggccaggagccagccctgcagccctccccacccggcatccacctgcatcccctctgggggcaggagcccacccccagcacccccatctgttaataaatatctcaactccagggtgttccacctga

SEQ ID NO: 324297 - DNA, 1405 bp, Homo sapiens
cttgcttccggctgacgtgtctttcaggaagaggagctggtgagaagacagcgaaatggcgcctccggcccccggcccggcctccggcggctccggggaggtagacgagctgttcgacgtaaagaacgccttctacatcggcagctaccagcagtgcataaacgaggcgcagcgggtgaagctatcaagcccagagagagacgtggagagggacgtcttcctgtatagagcgtacctggcgcagaggaagttcggtgtggtcctggatgagatcaagccctcctcggcccctgagctccaggccgtgcgcatgtttgctgactacctcgcccacgagagtcggagggacagcatcgtggccgagctggaccgagagatgagcaggagcgtggacgtgaccaacaccaccttcctgctcatggccgcctccatctatctccacgaccagaacccggatgccgccctgcgtgcgctgcaccagggggacagcctggagtgcacagccatgacagtgcagatcctgctgaagctggaccgcctggacctcgcccggaaggagctgaagagaatgcaggacctggacgaggatgccaccctcacccagctcgccactgcctgggtcagcctggccacggatagtggctacccggagacgctggtcaacctcatcgtcctgtcccagcacctgggcaagccccctgaggtgacaaaccgatacctgtcccagctgaaggatgcccacaggtcccatcccttcatcaaggagtaccaggccaaggagaacgactttgacaggctggtgctacagtacgctcccagcgcctgaggctggcccagagctgtcaggaccatgaagccaggacagaggccaggagccagccctgcagccctccccacccggcatccacctgcatcccctctgggggcaggagcccacccccagcacccccatctgttaataaatatctcaactccagggtgttccacctgaaaaaaaaaataaagaaaaaaaattccggaagattagttttttcccttggggcgcggatttcgggcacagaggggaccggggtccgcccggggagcataggagccttcgctttggcgaggatcaaggccggccacggtcaaaagccgcggccggcaaggttcgaccatgggattgacgagttgtcgcgccggcggcatacggtcagtcggaaaacgggccccgggaactgtgtgcaaggcgccggagctcacagaggggcgagaagaattggcccccccggtggcagggctataccgccttcataattgggggggagccgcccaaggcgaaccaaggggggtgaatgggctggggcattgggtcccaccaggggttcccataggtgggggagaagcagcgcccaaacgaagaggg

SEQ ID NO: 324298 - DNA, 4520 bp, Homo sapiens
cttgcttccggctgacgtgtctttcaggaagaggagctggtgagaagacagcgaaatggcgcctccggcccccggcccggcctccggcggctccggggaggtagacgagctgttcgacgtaaagaacgccttctacatcggcagctaccagcagtgcataaacgaggcgcagcgggtgaagctatcaagcccagagagagacgtggagagggacgtcttcctgtatagagcgtacctggcgcagaggaagttcggtgtggtcctggatgagatcaagccctcctcggcccctgagctccaggccgtgcgcatgtttgctgactacctcgcccacgagagtcggaggtgaggccccagagaatgggttggcctgaggcgcggggccatcttcaaggcctgttggttatgaacctgggtgggtgggggcatggcgtgcagcgcacagcatccctcagattaggcgcctctcccctctgctcccctgctgctttgtgcctcagtttccctcacctgcacagcagtggggggctggtgatggatcctgcttcaaaggggagggtcagagacagtgctgtgtgtgcacacgccctcatggaccacaaggcactctctgaacctagaactgaaaatatcaattaccgagcagccctctgcaacacccagagccccaagacagcccagggcgcagcgggggcagggccctcccatcagttttcttatttatttatttagagatggagtctcactctgtcaccaggctggagttgcagtgagccaagatcgcactagtgcactccagcctgggtgacagcgggagactgtcttaaaaaacaaaaaaaaaaaaggaaagaggcccacagagttaagcccatgtgacaacagactggagtgacatgtctgctagccaaggagcaccacgagtggccagcagccaccagagctgggagagaggcctgggacggccttgccctccagcctccagctggagccagccctgccgccaccttgacttcagacttacggcctccagagctgtgaggaacgaatccctgttgtccttaactgcccgggctgtggtgctttgccacagcagctccaggacattgagacaggtgacctcccagggccactgtttctcccaccctgcacttacttcaccagctggagtgaaggcagggaaccctgggtcccccaggagcagcagctgctgtgagcatcacagaaaagcagccccggagagcaggcggtccaggcaggggcttgtggtccgttcatctggctgcacagccgcgacctcattggcaggacgccccggggacaaggagcatccattagtaattggttttggttttgattttgttttcttgagatacggtcttgctctgtcgttcagcctggcatgcagtggcacaatcttggcttactgcagccttgatctcccaggctcaggtgatcatcccacctcggcctcccgaatagctgggactgcaggcacgcatcaccatgcctggctagtttgtatattttttagagatggggttttgcctggccgggcgcagtggctcacacctgtaatcccaaagcgctggggttacaggtgtgagccacagtacccggccccattggtaattgtaacaccttaggatgacaacattacagtaccaacgctacgacaactggcagtgtttatacacccttgtgtgctggagcctcaggaagctttgtaagatggtcttgggagctccttgctcctcccctgcatgatccctgtaacatggtccctcagcacggggaaacagactcagacctgaagtcacttgtctgttggacctggcactgtggcgagccctcagtggagcctggttggtatcagacatgccatgccctcagtgacacctcagacacgggccctgggcagacagcccccagatgcgcgtggatgcttacggggtcacagagccacgtttgaacccagaagaacaccagctttggtctagggtggccccctcacctgccttctctttttagctgctcaatagccatggggaatggagggtctgggtccagttagggacatggaggcatgggtgacctgtgccctcggagctgagccggtcctcagccttgcctgggctcaagcctggccctggcccgcagcacactggccatcttcagggtgcagccagcaccctgggctctcagggactgagggcagctgccctggcagtgggggtgccccagggctcccatccttctgcacggcccctcggcacccaggccgacctcctgctagaagacgtggccttgaagcccacagggttgatgggttatggtcaggagtcccagctgggcccaccagcctcctcaggaaggcgggtgaggttggtgtgagactgacggtgcctcctcatgtccccttggagcgccccaccccacatctcccggcctcgggtccttgcctggcccagcatgagaggtgcttcataggaacggagggaggacatgtcgggacagctcgatgctcggcctgctgctgctctgcacccccagggcctggctcaccctctctggacctgtctgcttccaaggaaggggaccctctgaggtcccacagaggccaccccagctgtgggtcgtgagcatctctgtcttgcagggacagcatcgtggccgagctggaccgagagatgagcaggagcgtggacgtgaccaacaccaccttcctgctcatggccgcctccatctatctccacgaccagaacccggatgccgccctgcgtgcgctgcaccagggggacagcctggagtggtgagtggcctccctgctctggggccagcccagggaggcaagtgccccctgccacatctccaggctgcgcacggcctcgctggctgtcgtcatgggagcagagaaaggtggtgctgaaatgaggccctggcctgctgtccaggctccagctcccctgcccagtgtgggaggcactcccatctgcgcaccaggctgcagatccaaggacacggtgcccaggctgcaaccctctgttcccaagggcagagcagaaagcggctttgtctctgctcggtttctgtgtccccaccccccacgaagccttctgtgtctcggccctgggcccagtctctcaggcctccccgggccccccataccggccctcctccagggccctctggggttggggtgctgaagccctgcaaggttggtgcccccctccaccctaggatgtgactccgggccatgtccagggcactggtcacagaaagtgtgtcagttcttccccgtgagctgtccctgcagtgcctgccttccactgtgagttgcaagctgggcatttcatggtcgctgtggatctgctcccatcccacctccatccacagagggcttagaattgcagggcgagccaggcatggtgacatgcacctatgtttccagctacttgggaggcggaagcaggagtatcccttgagtctgggaggtggaggctgcagtgagccgtgatggtgccactgcactccagcctgggtggcagagccagaccctgactcacacacaaaaaagaaaataaatagggatgtcacactgtcggcgagccggccgactcggtgctggtccaggtgctggctcctgttggcaggaaaacaagaacaagaggcctcacgagtaattcgtggtcacagccacctggggctgagagggatgaggggacgagggggcctgcagagagtgggtggccccagggctctgctgcaggtgcaggtgcaggggcgggtgcgtggccctcctctagggccttgttcctgagtgttgatgcctcccacaggtcccatcccttcatcaaggagtaccaggccaaggagaacgactttgacaggctggtgctacagtacgctcccagcgcctgaggctggcccagagctgtcaggaccatgaagccaggacagaggccaggagccagccctgcagccctccccacccggcatccacctgcatcccctctgggggcaggagcccacccccagcacccccatctgttaataaatatctcaactccagggtgttccacctgaaaaaaaaaaaaaaaaaacaaaaaaaaaaaaaaaaaaaaaaaaaaaaaaacaaaaaaaagagactcgaaacacaaaaatccatataattagccgtattacaaataactaaaaaaaaaaacttcgggggggggcccgggaccaaatttgccttattgggggtgaatttcacaataattggccgccgtttaaaaacgttgagcctgggaacaccttggcgtaccaaacttaattccctggaatacaacccctttttgccggttggcgaaattcaaaaaagccccgcaccttaagccctttccaaaaattggccagccctgaagggcaaaggggaaatttggaggccgtaaatgtctggaaaaaatctcggtaaatcttgggtaaataagttcttttttaacccattggcccgaattgggaaaaaccccttttaaatcttt

SEQ ID NO: 324299 - DNA, 3324 bp, Homo sapiens
ttagatattctaaagcggcgacaacatgatgtcaaactggaaaaacttaaggaacggattagaaaacagtgggaacactcagaagaaacaaatggccggggccagaagctgggtcatattgaccatccagtaatggttgttaatgttgataactcagtaacagcaaaagtcagaaaagtggcaacagcaccacctgctccagcatataaaggtttcaacccttcagagaccaagattcgaacacctgatgggaaagtgtggcaggaggctgagtttcaaaacatgagtagagaactgtatcgagatttagcacttcactttgcagatgatatttctataaaggagaaacctgctgaaaaaagtaaagagaagaaagtagtcaagccagtacgaaaagtccaaaaagtagcacagttatcaagtacagaatgcagaacaggtagtagtcatcttataagtacatcttcttggcgagatggacaaaaattagtaaagaagattctgggacctgctcccagaatggagccaaaagagcaaagaacagcatcaagtgacagaggtggaagagaaagaactgctaaatctgggggtcacattggaagagcagaatctgatcccaggttggacgttttacatagacatcttcaaagaaactcagaacgttcgagaagtaaatctcggtctgaaaataatataaagaaactagcttcatctcttccagataataagcaggaggaaaatactgccttaaataaggactttttacctattgaaattcgtggcattcttgatgacctacagctggattctacagctcacactgcaaagcaagatactgtagagttacagaaccagaagtcatcagcaccagtacatgctcctaggagtcacagcccagtaaaaagaaaacctgacaaaataacagctaatgaagatccccctgttatttccaaaaggcgccactatgacacagatgaggtacgacagtacattgttaggcagcaggaggaaaggaagagaaagcaaaatgaagagaagaaggctcaaaaggaggctacagaacagaaaaacaaacgattacaagagctctaccggaagcagaaggaagcctttactaaagtaaaaaatgtccctccttctgagccatcagcaactaggcgactacaggaaacttactccaaattgctactagaaaagaccttgcttgaagagccatctcatcaacatgttacgcaggaaacacaggccaaaccagggtatcagccatctggagaatctgacaaagaaaacaaagtacaggaacgtcccccaagtgcatcttccagtagtgacatgtctctctcagaacctccacagcctcttgcaagaaaagacttgatggaatctacatggatgcagcctgaaagattgagcccacaagttcaccattctcaaccacagccttttgctggaacagctggaagtttactctcccatctcttgagtttagagcatgtaggaattttgcataaggattttgaatctattttaccaaccaggaagaatcataatatggcttcaaggccattaacttttacacctcaaccatatgtgacctcaccagctgcttatacagatgccttgttaaaacctagtgccagccaatataagagtaaactggatcgtattgaagccttgaaagcaacagctgcttctttgtccagcagaattgaaagtgaagccaagaaattagctggggccagcattaactatgggtcagcatggaacactgagtatgatgtgcagcaggcacctcaagaagatggaccttggaccaaggctgtaactccacctgtgaaagatgataatgaagatgttttctctgccagaattcagaagatgctgggaagctgtgtatctcatgcaacttttgatgatgatcttcctggtgtaggcaatcttagtgaatttaaaaagcttcctgagatgataagaccacagagtgccatatcaagctttagagtgagatcccctggtcccaaaccagaagggctactggcacagttatgtaaaaggcagactgactcttctagctctgatatgcaagcctgttctcaagacaaagccaaaatatctcttggttccagcatagattcagtcagtgaagggcctcttcttagtgaggggagtctctctgaagaagagggagaccaggatggacagccccttttgaaagtagcagaaattttaaaagaaaaggaattttgtcctggagaaagaaatagttatgaacccatcaaagagtttcagaaagaagctgaaaaattcttgccactttttgggcacataggtggtacacaaagcaaaggaccatgggaagaattggcaaagggaagtccacatagcgtcattaatatttttacaaaatcctatcagttatatggaaaagggtttgaagacaagttggacagaggaacatcaacatcacggcctttgaatgccaccgcaactcctctaagtggtgtttcatatgaagatgattttgtctcctctccagggactgggacttcgacagaaaaaaaatcaactcttgaacctcatagcactttaagccctcaggaggaccattctaacagaaagtctgcctatgatccttcctctgtggatgttacctcccagcattcatcaggagcccagtctgctgcatcgtctcgttcatctacttcttctaaaggaaagaaaggaaaaaaggaaaagacagaatggttggattcattcactggaaatgttcagaactcacttcttgatgaggaaaaagcagaacgtggctcccatcaaggaaagaaatctgggaccagcagcaaactttctgttaaagattttgagcagactcttgatacagatagcactttggaggatctttctggacattctgtgagtgtctcatcagataagggaagatctcagaaaactccaacttctcccctgtcaccaagttcccagaaatcattgcagtttgacgttgcaggaacttcttcagaaagatctaagtcgtcagtaatgcctccaactataacaggatttaagcctaatgcacctctcactgatctgaacccggcagccagcagaacaacgacagagaacatggctccaataccaggttctaagcgcttttctcctgctggcctccatcatcgtatggcagcagaactcagttatctgaacgccattgaggagtcggtgcgccaactgtcagatgtagaaagagttagaggcatttcacttgctcagcaggagagtgtgtctctagctcagataataaaggtatttttggagttttttagc

SEQ ID NO: 324300 - DNA, 7606 bp, Homo sapiens
agagaggcccagtgatgagacgtaaagacagagaagaagtagtgaacaggagagcagtgttcttcatcccaaattccagctgtatatctacaaccagttggtcaggtttctgacaaagcgggagcaaaaattaatgcaacggcgacaacatgcagaggagctcctagagtggaagcgacgtttagatgcagaagaagcagaaattcgtcaaatggaaaaacaagctttggctgcctgggacaaagaattaataaaacccaaaactcctaagaaagaactggaggaccagagaacagaacagaaagaaatagcaagtgaagaggaatctccagtacctctgtactctcatctaaacagtgaaagctccattccagaagaattaggcagccctgctgttgaatatgtaccatccgagtctataggacaggagcagccagggagtccagatcacagtatacttactgaagaaatgatttgttcacaggaactagaatcttctacctctcctagtaaacattcacttcccaaaagctgcacatctgtgtcaaagcaggagtctagcaaaggaagtcataggactggaggacaatgtcacctgcctatcaagtcccatcagcactgttatagttggtcagatgagtcattatctatgacacagtcagaaactacatctgaccagagtgatattgaaggtaggatcagagctctgaaggatgagttgcggaaaagaaaatcagttgtgaaccagctgaagaaggaacagaaaaaaaggcaaaaggaaagactgaaagcccaagaagccagtctgatcaagcagttagagtcatatgatgaatttattaagaaaactgaagccgagcttagccaagatttggaaacatcaccaacagccaagcctcagattaaaacgctctcctcagcttctgaaaaacccaagatcaaacccctcacaccactacacagatctgaaacggcaaagaattggaaatcactaacagagtcagaacgttccagaggatccctggagtctattgctgaacatgttgatgcttcactgtctggttctgagagatcagtatcagaaaggtctttatctgcatatgcaaagagagtaaatgaatgggacagtcgaacagaagattttcagaccccatctccagttctcagatcatcaaggaaaatcagagaagaatctggagattctctagaaaatgtacctgcattacatcttctcaaagaattaaatgccactagtagaattcttgatatgtcagatggcaaggttggagaatctagtaaaaaatcagaaataaaagaaatagagtatacaaaattgaagaagagtaagattgaagatgccttttctaaagaaggtaaatctgatgtcttactgaaattagtcctagaacagggagattcatctgaaattctttcaaagaaagatcttcctttagattctgaaaatgttcagaaagacctagttggattagctattgaaaatctccataaaagtgaggaaatgttgaaagagagacagtcagatcaagatatgaatcatagtccaaacatccaatcaggaaaagacattcacgaacaaaagaacacaaaggaaaaagatttgtcttggtcagaacatctttttgctcctaaagagataccatactctgaagattttgaagtgtcttctttcaagaaagaaatttcagctgaattgtacaaagatgattttgaggtgtcatctttgctgtcactcaggaaagactctcagtcttgcagagataagccacagccaatgaggagctctacaagtggagccactagctttggtagtaatgaggaaatcagtgagtgcctaagtgagaaaagcctttctatccatagcaatgttcattctgacaggctgttggaactcaagtcccctactgagctgatgaaaagtaaggagcgcagtgatgtggagcatgaacagcaagttactgaatccccttccttggcttcagttcctactgcagacgagttatttgatttccacattggtgatagggtgttgattggaaatgttcagccaggaattcttcgattcaaaggtgagactagttttgctaaaggattttgggccggagtggagttagataaacctgaaggaaataacaatggaacatatgatggtattgcatattttgagtgcaaagaaaagcatggtatttttgctcctcctcaaaaaatatctcacattccagaaaactttgatgactatgtagacattaatgaagatgaagactgttactcagatgaacgatatcagtgctataatcaagagcaaaatgatacagagggtccaaaagacagagaaaaggatgtcagtgaatatttttatgagaaatccctacctagtgtgaatgatatagaagcctcagttaatagaagtagaagccttaaaatagaaacagacaatgtacaggacatttctggggtacttgaagcccatgttcaccagcagtcttcagtggattcacagatttcttcaaaggaaaacaaagacctcatttctgatgccacagaaaaggtttccatcgctgcagaagatgacactttagacaataccttttccgaagaattggagaagcaacagcagtttacagaagaggaagacaacctatatgctgaagcttcagaaaagctttgtacaccacttctggatcttttaacaagagaaaaaaaccaactggaagcccagctgaagtcatcactaaatgaggaaaaaaagtcaaaacaacaactggaaaaaatcagcttactgacagacagtttactaaaagtctttgtaaaggacacagtcaatcaactacaacaaatcaaaaaaaccagggatgagaaaatccagcttagcaatcaggagcttcttggtgatgaccaaaagaaagtaacaccccaagacctatcccaaaatgttgaggaacagtcgccaagtatttcaggttgcttcttaagttctgaattggaagatgaaaaagaagagatttcctctccagatatgtgtcccagaccggagagcccagtatttggtgccagtgggcaggaagaacttgctaagagacttgctgaacttgaactcagccgggagttcctgagcgcgttaggagatgatcaagactggtttgatgaagactttggtttgagctcttctcacaagatccaaaaaaataaggcagaagaaaccattgtacctctaatggcagaacctaaaagagtaacccaacaaccatgtgaaacattattggcagtcccccatactgcagaagaagtagagattcttgtacataatgcagcagaagaactttggaaatggaaagaattaggccacgatcttcatagcatcagtattcctacaaaactgcttggctgtgccagtaaaggtctagatatagaaagcactagtaaaagggtctacaaacaggcggtttttgatttaacaaaagagatttttgaggaaatatttgctgaggatcccaacttaaatcaacctgtctggatgaagccatgtagaatcaactctagttatttccgacgagtgaaaaatccaaataaccttgatgaaatcaagagcttcatagcaagtgaagtactcaagttgttcagtcttaaaaaggagccaaaccacaaaacagattggcagaaaatgatgaaatttggaagaaagaaaagagaccgagtggatcatatcctggttcaggagctccatgaggaggaggcacagtgggtgaactatgatgaggatgagttgtgtgtgaaaatgcagctagccgacgggatctttgagaccctgatcaaagatactattgatgttctgaatcagatcagtgaaaagcaggggagaatgctacttgtgtgacatcttgcaaataaatcgaacgctgagtgctaatgtgagtcctgggcctttctgcctcctgatgtacacccatcgccatcatagcaagagtgcttctggaccttgtacttattcttaaagactaccagtatggagttcataggacaatgtggtacacctggtattacagcctttgcctttcgagactatccactggattaatgggttattttcagtgggcagggttgcacagtgtaatcctacaccttttgctaacacccctactaggtcccagagggccagaaacacctgacttacctctgagtttagactagggtatcacttctttgagtctgaagtcaagtgagagaggtatagataaatgcatcacatcacttttgaaatgtaattctggtctataccatggaagtcataaatggacattatagtctctaaacagtattaaacccttaaccacttctaaaataggcaagctcaataatgtctgccaacttcacattctggagtttatttcatttctttttgaagaccattttcttccattattgtagttgagcagcaccaagtggactgtcaggctaacaggaataagtggtagccttgctttctgagcaccatctaaagaattttaaacctctgcattatgtttagtgttctctgtgtgggcatgaaaacaaagaaatgcccctactgaagactgggctcaaaggaccaatgcagggctggttcttttaccccttggtttactcctgcacttgtcttactcattctgaatctctaccagctgctcccagaatcacagatactcaggaccatctcaggcatccaggcatggcaaagtggaaataattcattttggcctgcaaaccttcaactcccatctttccccaagaagtcagagatgctgttacttgaatgatttaggaaatgagtgtgtgcaccaaagacaaaaagatattgtctattgtttgtgtgcttgttttgcgctatggaacattttttaatttattttaagataaattattaagttgaaaatgtgtgtccctattcagaagtgaaagattcatcttgtaatagttaaacctccatcttgaagcttctatggttcatagtctttgcacaggaacctgtggttttaacaaaccaatacacatattgaagaagtcattttaattcagtgaaacgaagatgggcttttccagatcacctgcaatagcagcagtgggataaaatgatttaaaaacactgtacaatttaactctgcctctcttgcagcattgcttctcacaactattacctgcatctgaaaaaaaatctatagactccagctgctacattagagcataagagatgctctcctgggacctcagtaccctgccttcttgactggtttccgttcatcagtcctgtccctcttcaagtaatctagaagaatgtggatactcttaggcgtgaatgtaaatgccttaatattgaaggtcctggttagaagcatgatacaagacatctactggattcatatttacaaatatcctggaatgttatagcttcaaagtatattagaaaaaccccaaagatggtataatctttaagtgtgcacgttcgtttatttctgcatcttccctccaaacttgcctttgcatcttaaatatttcactatgcacactcccattcctcttgggtttcatcttgtcgtttaagaaatgtactgaaataatcattggaatatttgcattttgcacaatgactggtatgatagctcttgacaaataaggaaagcactgaaatgttgtgattgggtctcgggaaatgctcagattgatgtcttaccagcatttcttctgggcttgtgatgttgagctgtagtcttgtagccataatgagcaaattgactaagagaagcaaaggtttcttggggttattaaccagtagtgtggaaatactagttttatgtggccaaggaaaagcaaaggcttttcttttcagtttgtgttatttggaagacagaaaaacatcttgtctacatcctttggctgtttgtaggatcacgttgtccttacgatactgaaactttacagctgctgtaaattttttataaatgaatttcaaaatgttataatgggactgtaggttgtttttctacatcttcattatttggacctaaaaccagtttttaataagaaagtttatctttactctttctgaaattatgactccagaaaaagaaaaaaaaaatacaagtcatggaatcagcaatctggtaagaaatgctgccaagaatgtggcagtagctgtcctgacagactccaactgtctttactatctgaagaatcctaggctccacatgagaggcagaaatggatcagtcttattcttttctagaaatggttatctgtagtttggtagcaaaaaaaaagaaaaaagaatccataattagcagatttcttattaactatttggatctaattgaaatggctttattcttaggattaagaaagatagatgtggatacccagccactcgttccatattggtatctttttaaatcagctctgcctcttaatcaagaacctaaatattccctctttctaatctttgttccttctccctacaccctcatcctctttcactcttccttcataattcctctaagaaaaatatctttgcatcagcagtaatatcttttagaatagcactatcagaatttagcagtaaaccaacatacaggcttcagatttacttctgagtccaaaacaatttgtgctatccagggtagttaactctgggttaaacaagtacagggtatagattccctcttcaggtctacacaggaatttttaccatagggaaaagtggggagagctcaaacgtagttaataaggaaggtaatttgtttttcttttacctaaaagaaaagaaaattccttctgtgactacaggtctctgagaaattatctttcaaaagagatttcattgctcataagagtgttgtggcctattgataaaaacaattttgttcagtttcttgtcttgaaaaaaaagtggccttagctttttgcaatacttgaataaagtgtgtactcgcaaaagaatttctgtagcacagcattagagactcataacttttctgcaagaaatacaaacttacatcttccttttactaccttaagaatactagtgaataaaacattaattcaaagagcaaattatagaaactacaatgacatttaatgcaaattgtaggaatttacatgtttacaaatcatcttcaactggttgtgcagcaattcaataaaatatctttgtattataaaaatgtgaagaaaaaatgtaaactgatgtaaaggaggtactgtcattttaattaacctatgtttaatagcttttccttctggactttgcaaagccttcttggcaaacacattgcaaagcattctctgggaggttcagcctccttgtgtgtactgtactgtgcagacatgaaaaaataaacccgtttactgtgtgcgtgtaaatagcctggtcatcaggccattttcagccaatagtcacatccagtgcaattttgcaccgaacacttaagggtgtggtttgtaagtacgatctgtaaaataactgggatgaattcccatgtatacctgtgtaaatagatttgttaactgaaatatactttaagaaagataaaatctgtaaataaactgatttataaattaa

SEQ ID NO: 324301 - DNA, 7960 bp, Homo sapiens
agagaggcccagtgatgagacgtaaagacagagaagaagtagtgaacaggagagcagtgttcttcatcccaaattccagctgtatatctacaaccagttggtcaggtttctgacaaagcgggagcaaaaattaatgcaacggcgacaacatgcagaggagctcctagagtggaagcgacgtttagatgcagaagaagcagaaattcgtcaaatggaaaaacaagctttggctgcctgggacaaagaattaataaaacccaaaactcctaagaaagaactggaggaccagagaacagaacagaaagaaatagcaagtgaagaggaatctccagtacctctgtactctcatctaaacagtgaaagctccattccagaagaattaggcagccctgctgttgaatatgtaccatccgagtctataggacaggagcagccagggagtccagatcacagtatacttactgaagaaatgatttgttcacaggaactagaatcttctacctctcctagtaaacattcacttcccaaaagctgcacatctgtgtcaaagcaggagtctagcaaaggaagtcataggactggaggacaatgtcacctgcctatcaagtcccatcagcactgttatagttggtcagatgagtcattatctatgacacagtcagaaactacatctgaccagagtgatattgaaggtaggatcagagctctgaaggatgagttgcggaaaagaaaatcagttgtgaaccagctgaagaaggaacagaaaaaaaggcaaaaggaaagactgaaagcccaagaagccagtctgatcaagcagttagagtcatatgatgaatttattaagaaaactgaagccgagcttagccaagatttggaaacatcaccaacagccaagcctcagattaaaacgctctcctcagcttctgaaaaacccaagatcaaacccctcacaccactacacagatctgaaacggcaaagaattggaaatcactaacagagtcagaacgttccagaggatccctggagtctattgctgaacatgttgatgcttcactgtctggttctgagagatcagtatcagaaaggtctttatctgcatatgcaaagagagtaaatgaatgggacagtcgaacagaagattttcagaccccatctccagttctcagatcatcaaggaaaatcagagaagaatctggagattctctagaaaatgtacctgcattacatcttctcaaagaattaaatgccactagtagaattcttgatatgtcagatggcaaggttggagaatctagtaaaaaatcagaaataaaagaaatagagtatacaaaattgaagaagagtaagattgaagatgccttttctaaagaaggtaaatctgatgtcttactgaaattagtcctagaacagggagattcatctgaaattctttcaaagaaagatcttcctttagattctgaaaatgttcagaaagacctagttggattagctattgaaaatctccataaaagtgaggaaatgttgaaagagagacagtcagatcaagatatgaatcatagtccaaacatccaatcaggaaaagacattcacgaacaaaagaacacaaaggaaaaagatttgtcttggtcagaacatctttttgctcctaaagagataccatactctgaagattttgaagtgtcttctttcaagaaagaaatttcagctgaattgtacaaagatgattttgaggtgtcatctttgctgtcactcaggaaagactctcagtcttgcagagataagccacagccaatgaggagctctacaagtggagccactagctttggtagtaatgaggaaatcagtgagtgcctaagtgagaaaagcctttctatccatagcaatgttcattctgacaggctgttggaactcaagtcccctactgagctgatgaaaagtaaggagcgcagtgatgtggagcatgaacagcaagttactgaatccccttccttggcttcagttcctactgcagacgagttatttgatttccacattggtgatagggtgttgattggaaatgttcagccaggaattcttcgattcaaaggtgagactagttttgctaaaggattttgggccggagtggagttagataaacctgaaggaaataacaatggaacatatgatggtattgcatattttgagtgcaaagaaaagcatggtatttttgctcctcctcaaaaaatatctcacattccagaaaactttgatgactatgtagacattaatgaagatgaagactgttactcagatgaacgatatcagtgctataatcaagagcaaaatgatacagagggtccaaaagacagagaaaaggatgtcagtgaatatttttatgagaaatccctacctagtgtgaatgatatagaagcctcagttaatagaagtagaagccttaaaatagaaacagacaatgtacaggacatttctggggtacttgaagcccatgttcaccagcagtcttcagtggattcacagatttcttcaaaggaaaacaaagacctcatttctgatgccacagaaaaggtttccatcgctgcagaagatgacactttagacaataccttttccgaagaattggagaagcaacagcagtttacagaagaggaagacaacctatatgctgaagcttcagaaaagctttgtacaccacttctggatcttttaacaagagaaaaaaaccaactggaagcccagctgaagtcatcactaaatgaggaaaaaaagtcaaaacaacaactggaaaaaatcagcttactgacagacagtttactaaaagtctttgtaaaggacacagtcaatcaactacaacaaatcaaaaaaaccagggatgagaaaatccagcttagcaatcaggagcttcttggtgatgaccaaaagaaagtaacaccccaagacctatcccaaaatgttgaggaacagtcgccaagtatttcaggttgcttcttaagttctgaattggaagatgaaaaagaagagatttcctctccagatatgtgtcccagaccggagagcccagtatttggtgccagtgggcaggaagaacttgctaagagacttgctgaacttgaactcagccgggagttcctgagcgcgttaggagatgatcaagactggtttgatgaagactttggtttgagctcttctcacaagatccaaaaaaataaggcagaagaaaccattgtacctctaatggcagaacctaaaagagtaacccaacaaccatgtgaaacattattggcagtcccccatactgcagaagaagtagagattcttgtacataatgcagcagaagaactttggaaatggaaagaattaggccacgatcttcatagcatcagtattcctacaaaactgcttggctgtgccagtaaaggtctagatatagaaagcactagtaaaagggtctacaaacaggcggtttttgatttaacaaaagagatttttgaggaaatatttgctgaggatcccaacttaaatcaacctgtctggatgaagccatgtagaatcaactctagttatttccgacgagtgaaaaatccaaataaccttgatgaaatcaagagcttcatagcaagtgaagtactcaagttgttcagtcttaaaaaggagccaaaccacaaaacagattggcagaaaatgatgaaatttggaagaaagaaaagagaccgagtggatcatatcctggttcaggagctccatgaggaggaggcacagtgggtgaactatgatgaggatgagttgtgtgtgaaaatgcagctagccgacgggatctttgagaccctgatcaaagatactattgatgttctgaatcagatcagtgaaaagcaggggagaatgctacttgtgtgacatcttgcaaataaatcgaacgctgagtgctaatgtgagtcctgggcctttctgcctcctgatgtacacccatcgccatcatagcaagagtgcttctggaccttgtacttattcttaaagactaccagtatggagttcataggacaatgtggtacacctggtattacagcctttgcctttcgagactatccactggattaatgggttattttcagtgggcagggttgcacagtgtaatcctacaccttttgctaacacccctactaggtcccagagggccagaaacacctgacttacctctgagtttagactagggtatcacttctttgagtctgaagtcaagtgagagaggtatagataaatgcatcacatcacttttgaaatgtaattctggtctataccatggaagtcataaatggacattatagtctctaaacagtattaaacccttaaccacttctaaaataggcaagctcaataatgtctgccaacttcacattctggagtttatttcatttctttttgaagaccattttcttccattattgtagttgagcagcaccaagtggactgtcaggctaacaggaataagtggtagccttgctttctgagcaccatctaaagaattttaaacctctgcattatgtttagtgttctctgtgtgggcatgaaaacaaagaaatgcccctactgaagactgggctcaaaggaccaatgcagggctggttcttttaccccttggtttactcctgcacttgtcttactcattctgaatctctaccagctgctcccagaatcacagatactcaggaccatctcaggcatccaggcatggcaaagtggaaataattcattttggcctgcaaaccttcaactcccatctttccccaagaagtcagagatgctgttacttgaatgatttaggaaatgagtgtgtgcaccaaagacaaaaagatattgtctattgtttgtgtgcttgttttgcgctatggaacattttttaatttattttaagataaattattaagttgaaaatgtgtgtccctattcagaagtgaaagattcatcttgtaatagttaaacctccatcttgaagcttctatggttcatagtctttgcacaggaacctgtggttttaacaaaccaatacacatattgaagaagtcattttaattcagtgaaacgaagatgggcttttccagatcacctgcaatagcagcagtgggataaaatgatttaaaaacactgtacaatttaactctgcctctcttgcagcattgcttctcacaactattacctgcatctgaaaaaaaatctatagactccagctgctacattagagcataagagatgctctcctgggacctcagtaccctgccttcttgactggtttccgttcatcagtcctgtccctcttcaagtaatctagaagaatgtggatactcttaggcgtgaatgtaaatgccttaatattgaaggtcctggttagaagcatgatacaagacatctactggattcatatttacaaatatcctggaatgttatagcttcaaagtatattagaaaaaccccaaagatggtataatctttaagtgtgcacgttcgtttatttctgcatcttccctccaaacttgcctttgcatcttaaatatttcactatgcacactcccattcctcttgggtttcatcttgtcgtttaagaaatgtactgaaataatcattggaatatttgcattttgcacaatgactggtatgatagctcttgacaaataaggaaagcactgaaatgttgtgattgggtctcgggaaatgctcagattgatgtcttaccagcatttcttctgggcttgtgatgttgagctgtagtcttgtagccataatgagcaaattgactaagagaagcaaaggtttcttggggttattaaccagtagtgtggaaatactagttttatgtggccaaggaaaagcaaaggcttttcttttcagtttgtgttatttggaagacagaaaaacatcttgtctacatcctttggctgtttgtaggatcacgttgtccttacgatactgaaactttacagctgctgtaaattttttataaatgaatttcaaaatgttataatgggactgtaggttgtttttctacatcttcattatttggacctaaaaccagtttttaataagaaagtttatctttactctttctgaaattatgactccagaaaaagaaaaaaaaaatacaagtcatggaatcagcaatctggtaagaaatgctgccaagaatgtggcagtagctgtcctgacagactccaactgtctttactatctgaagaatcctaggctccacatgagaggcagaaatggatcagtcttattcttttctagaaatggttatctgtagtttggtagcaaaaaaaaagaaaaaagaatccataattagcagatttcttattaactatttggatctaattgaaatggctttattcttaggattaagaaagatagatgtggatacccagccactcgttccatattggtatctttttaaatcagctctgcctcttaatcaagaacctaaatattccctctttctaatctttgttccttctccctacaccctcatcctctttcactcttccttcataattcctctaagaaaaatatctttgcatcagcagtaatatcttttagaatagcactatcagaatttagcagtaaaccaacatacaggcttcagatttacttctgagtccaaaacaatttgtgctatccagggtagttaactctgggttaaacaagtacagggtatagattccctcttcaggtctacacaggaatttttaccatagggaaaagtggggagagctcaaacgtagttaataaggaaggtaatttgtttttcttttacctaaaagaaaagaaaattccttctgtgactacaggtctctgagaaattatctttcaaaagagatttcattgctcataagagtgttgtggcctattgataaaaacaattttgttcagtttcttgtcttgaaaaaaaagtggccttagctttttgcaatacttgaataaagtgtgtactcgcaaaagaatttctgtagcacagcattagagactcataacttttctgcaagaaatacaaacttacatcttccttttactaccttaagaatactagtgaataaaacattaattcaaagagcaaattatagaaactacaatgacatttaatgcaaattgtaggaatttacatgtttacaaatcatcttcaactggttgtgcagcaattcaataaaatatctttgtattataaaaatgtgaagaaaaaatgtaaactgatgtaaaggaggtactgtcattttaattaacctatgtttaatagcttttccttctggactttgcaaagccttcttggcaaacacattgcaaagcattctctgggaggttcagcctccttgtgtgtactgtactgtgcagacatgaaaaaataaacccgtttactgtgtgcgtgtaaatagcctggtcatcaggccattttcagccaatagtcacatccagtgcaattttgcaccgaacacttaagggtgtggtttgtaagtacgatctgtaaaataactgggatgaattcccatgtatacctgtgtaaatagatttgttaactgaaatatactttaagaaagataaaatctgtaaataaactgatttataaattaaaaaaaaaaaaaaaaaaaaaaaaaaaaaaaaaaaaaaaaaaaaaaaaaaaaaaaaaaaaaaaaaaaaaaaaaaaaaaaaaaaaaaaaaaaaaaaaagaaaacaaaacaaaaaaaaaaaaaaacaaaaaaagaaaaaaaaaaacaaacaacacaaacaaaacaacagaaaaaaaaaaaaaaaaacacaaaaaaaagaaaaacaacaaatagaacgggcgcggcgcgcgcacgccgcacaatcaccctccctcccggggcggcagcggcaccccatccccgcccgccgcctgctgtatagatggagccagcccctccatcgtctccctgtacaccactcggcggagcggccgcccta

SEQ ID NO: 324302 - DNA, 9128 bp, Homo sapiens
tgttaatgaagaaaagactgagagcggtaactggatgataggcaatcttagtgaatttaaaaagcttcctgagatgataagaccacagagtgccatatcaagctttagagtgagatcccctggtcccaaaccagaagggctactggcacagttatgtaaaaggcagactgactcttctagctctgatatgcaagcctgttctcaagacaaagccaaaatatctcttggttccagcatagattcagtcagtgaagggcctcttcttagtgaggggagtctctctgaagaagagggagaccaggatggacagccccttttgaaagtagcagaaattttaaaagaaaaggaattttgtcctggagaaagaaatagttatgaacccatcaaagagtttcagaaagaagctgaaaaattcttgccactttttgggcacataggtggtacacaaagcaaaggaccatgggaagaattggcaaagggaagtccacatagcgtcattaatatttttacaaaatcctatcagttatatggaaaagggtttgaagacaagttggacagaggaacatcaacatcacggcctttgaatgccaccgcaactcctctaagtggtgtttcatatgaagatgattttgtctcctctccagggactgggacttcgacagaaaaaaaatcaactcttgaacctcatagcactttaagccctcaggaggaccattctaacagaaagtctgcctatgatccttcctctgtggatgttacctcccagcattcatcaggagcccagtctgctgcatcgtctcgttcatctacttcttctaaaggaaagaaaggaaaaaaggaaaagacagaatggttggattcattcactggaaatgttcagaactcacttcttgatgaggaaaaagcagaacgtggctcccatcaaggaaagaaatctgggaccagcagcaaactttctgttaaagattttgagcagactcttgatacagatagcactttggaggatctttctggacattctgtgagtgtctcatcagataagggaagatctcagaaaactccaacttctcccctgtcaccaagttcccagaaatcattgcagtttgacgttgcaggaacttcttcagaaagatctaagtcgtcagtaatgcctccaactataacaggatttaagcctaatgcacctctcactgatctgaacccggcagccagcagaacaacgacagagaacatggctccaataccaggttctaagcgcttttctcctgctggcctccatcatcgtatggcagcagaactcagttatctgaacgccattgaggagtcggtgcgccaactgtcagatgtagaaagagttagaggcatttcacttgctcagcaggagagtgtgtctctagctcagataataaaggcacaacagcaacgccatgaaagagacttggccctcttgaaactaaaggctgaacaagaggctctggagagtcagagacaattagaagaaacccgaaacaaagcagctcaggtccatgcagaatcattacagcaggtggttcaatcacaacgggaagtaactgaagtcctgcaggaagcaacgtgtaaaatagcagctcagcagtcagaaactgctcgcctcaccacagacgcagcacgtcaaatctgtgagatggcagagttgactagaactcatatctcagatgctgtcgtggcttcaggagctccccttgcaatactgtatgaccaccaacggcagcaccttccagactttgtgaaacagctgaggaccagaactgaaacagataggaaaagtccatctgtttcactctctcagagtaaagaagggacccttgactcaaagcatcagaagtattctgcttcatatgatagttattctgagtcttcaggatacaagaatcatgatagaagaagtagcagtggtagcagccgccaagaaagtccttcagttccatcttgtaaggaaaatgagaagaaacttaatggtgaaaagatagagagttccattgatgaacaggttcagactgctgcagatgattctctacgaagtgatagtgttccatctcttcctgatgaaaaagactcaacgtctattgcaacagaatattctctgaaatttgatgaatccatgacagaagatgaaatagaagaacaatcatttcgatcattactaccttcagagagtcaccgcagatttaacatggaaaagagaagaggtcatcatgatgactctgatgaagaagcttctccagaaaaaactacactgtctactgccaaggaactgaacatgccattctcaggaggacaagatagcttttctaaatttactatggagatggttcgacagtatatgaaagaggaagaaatgagggcagctcaccagtcttcactcctgcgtctccgtgaaaaggccttgaaggagaagactaaggctgaattggcctggttagagcatcaaaaaaaacatctacgagacaaaggagaggatgataaaatgcccccgctccggaagaaacagcgtggtttgcttttaaggttgcagcaagaaaaggcagaaataaaacgtcttcaagaagccaataaggcagctcggaaggaaagacagctgattcttaaacagcaggaggagatagaaaagatccgacagaccaccataaaactacaggagaaattgaagtctgcaggggagagtaaattggactctcatagtgatgatgatacaaaggataataaggcaaccagtcctggtccaactgacttggagacccgcagtccttctcccatttcaatctccagcagtgaaactagcagcattatgcagaaactgaagaaaatgagaagccgcatggatgaaaagtttctgacaaagcgggagcaaaaattaatgcaacggcgacaacatgcagaggagctcctagagtggaagcgacgtttagatgcagaagaagcagaaattcgtcaaatggaaaaacaagctttggctgcctgggacaaagaattaataaaacccaaaactcctaagaaagaactggaggaccagagaacagaacagaaagaaatagcaagtgaagaggaatctccagtacctctgtactctcatctaaacagtgaaagctccattccagaagaattaggcagccctgctgttgaatatgtaccatccgagtctataggacaggagcagccagggagtccagatcacagtatacttactgaagaaatgatttgttcacaggaactagaatcttctacctctcctagtaaacattcacttcccaaaagctgcacatctgtgtcaaagcaggagtctagcaaaggaagtcataggactggaggacaatgtcacctgcctatcaagtcccatcagcactgttatagttggtcagatgagtcattatctatgacacagtcagaaactacatctgaccagagtgatattgaaggtaggatcagagctctgaaggatgagttgcggaaaagaaaatcagttgtgaaccagctgaagaaggaacagaaaaaaaggcaaaaggaaagactgaaagcccaagaagccagtctgatcaagcagttagagtcatatgatgaatttattaagaaaactgaagccgagcttagccaagatttggaaacatcaccaacagccaagcctcagattaaaacgctctcctcagcttctgaaaaacccaagatcaaacccctcacaccactacacagatctgaaacggcaaagaattggaaatcactaacagagtcagaacgttccagaggatccctggagtctattgctgaacatgttgatgcttcactgtctggttctgagagatcagtatcagaaaggtctttatctgcatatgcaaagagagtaaatgaatgggacagtcgaacagaagattttcagaccccatctccagttctcagatcatcaaggaaaatcagagaagaatctggagattctctagaaaatgtacctgcattacatcttctcaaagaattaaatgccactagtagaattcttgatatgtcagatggcaaggttggagaatctagtaaaaaatcagaaataaaagaaatagagtatacaaaattgaagaagagtaagattgaagatgccttttctaaagaaggtaaatctgatgtcttactgaaattagtcctagaacagggagattcatctgaaattctttcaaagaaagatcttcctttagattctgaaaatgttcagaaagacctagttggattagctattgaaaatctccataaaagtgaggaaatgttgaaagagagacagtcagatcaagatatgaatcatagtccaaacatccaatcaggaaaagacattcacgaacaaaagaacacaaaggaaaaagatttgtcttggtcagaacatctttttgctcctaaagagataccatactctgaagattttgaagtgtcttctttcaagaaagaaatttcagctgaattgtacaaagatgattttgaggtgtcatctttgctgtcactcaggaaagactctcagtcttgcagagataagccacagccaatgaggagctctacaagtggagccactagctttggtagtaatgaggaaatcagtgagtgcctaagtgagaaaagcctttctatccatagcaatgttcattctgacaggctgttggaactcaagtcccctactgagctgatgaaaagtaaggagcgcagtgatgtggagcatgaacagcaagttactgaatccccttccttggcttcagttcctactgcagacgagttatttgatttccacattggtgatagggtgttgattggaaatgttcagccaggaattcttcgattcaaaggtgagactagttttgctaaaggattttgggccggagtggagttagataaacctgaaggaaataacaatggaacatatgatggtattgcatattttgagtgcaaagaaaagcatggtatttttgctcctcctcaaaaaatatctcacattccagaaaactttgatgactatgtagacattaatgaagatgaagactgttactcagatgaacgatatcagtgctataatcaagagcaaaatgatacagagggtccaaaagacagagaaaaggatgtcagtgaatatttttatgagaaatccctacctagtgtgaatgatatagaagcctcagttaatagaagtagaagccttaaaatagaaacagacaatgtacaggacatttctggggtacttgaagcccatgttcaccagcagtcttcagtggattcacagatttcttcaaaggaaaacaaagacctcatttctgatgccacagaaaaggtttccatcgctgcagaagatgacactttagacaataccttttccgaagaattggagaagcaacagcagtttacagaagaggaagacaacctatatgctgaagcttcagaaaagctttgtacaccacttctggatcttttaacaagagaaaaaaaccaactggaagcccagctgaagtcatcactaaatgaggaaaaaaagtcaaaacaacaactggaaaaaatcagcttactgacagacagtttactaaaagtctttgtaaaggacacagtcaatcaactacaacaaatcaaaaaaaccagggatgagaaaatccagcttagcaatcaggagcttcttggtgatgaccaaaagaaagtaacaccccaagacctatcccaaaatgttgaggaacagtcgccaagtatttcaggttgcttcttaagttctgaattggaagatgaaaaagaagagatttcctctccagatatgtgtcccagaccggagagcccagtatttggtgccagtgggcaggaagaacttgctaagagacttgctgaacttgaactcagccgggagttcctgagcgcgttaggagatgatcaagactggtttgatgaagactttggtttgagctcttctcacaagatccaaaaaaataaggcagaagaaaccattgtacctctaatggcagaacctaaaagagtaacccaacaaccatgtgaaacattattggcagtcccccatactgcagaagaagtagagattcttgtacataatgcagcagaagaactttggaaatggaaagaattaggccacgatcttcatagcatcagtattcctacaaaactgcttggctgtgccagtaaaggtctagatatagaaagcactagtaaaagggtctacaaacaggcggtttttgatttaacaaaagagatttttgaggaaatatttgctgaggatcccaacttaaatcaacctgtctggatgaagccatgtagaatcaactctagttatttccgacgagtgaaaaatccaaataaccttgatgaaatcaagagcttcatagcaagtgaagtactcaagttgttcagtcttaaaaaggagccaaaccacaaaacagattggcagaaaatgatgaaatttggaagaaagaaaagagaccgagtggatcatatcctggttcaggagctccatgaggaggaggcacagtgggtgaactatgatgaggatgagttgtgtgtgaaaatgcagctagccgacgggatctttgagaccctgatcaaagatactattgatgttctgaatcagatcagtgaaaagcaggggagaatgctacttgtgtgacatcttgcaaataaatcgaacgctgagtgctaatcattgcttctcacaactattacctgcatctgaaaaaaaatctatagactccagctgctacattagagcataagagatgctctcctgggacctcagtaccctgccttcttgactggtttccgttcatcagtcctgtccctcttcaagtaatctagaagaatgtggatactcttaggcgtgaatgtaaatgccttaatattgaaggtcctggttagaagcatgatacaagacatctactggattcatatttacaaatatcctggaatgttatagcttcaaagtatattagaaaaaccccaaagatggtataatctttaagtgtgcacgttcgtttatttctgcatcttccctccaaacttgcctttgcatcttaaatatttcactatgcacactcccattcctcttgggtttcatcttgtcgtttaagaaatgtactgaaataatcattggaatatttgcattttgcacaatgactggtatgatagctcttgacaaataaggaaagcactgaaatgttgtgattgggtctcgggaaatgctcagattgatgtcttaccagcatttcttctgggcttgtgatgttgagctgtagtcttgtagccataatgagcaaattgactaagagaagcaaaggtttcttggggttattaaccagtagtgtggaaatactagttttatgtggccaaggaaaagcaaaggcttttcttttcagtttgtgttatttggaagacagaaaaacatcttgtctacatcctttggctgtttgtaggatcacgttgtccttacgatactgaaactttacagctgctgtaaattttttataaatgaatttcaaaatgttataatgggactgtaggttgtttttctacatcttcattatttggacctaaaaccagtttttaataagaaagtttatctttactctttctgaaattatgactccagaaaaagaaaaaaaaaatacaagtcatggaatcagcaatctggtaagaaatgctgccaagaatgtggcagtagctgtcctgacagactccaactgtctttactatctgaagaatcctaggctccacatgagaggcagaaatggatcagtcttattcttttctagaaatggttatctgtagtttggtagcaaaaaaaaagaaaaaagaatccataattagcagatttcttattaactatttggatctaattgaaatggctttattcttaggattaagaaagatagatgtggatacccagccactcgttccatattggtatctttttaaatcagctctgcctcttaatcaagaacctaaatattccctctttctaatctttgttccttctccctacaccctcatcctctttcactcttccttcataattcctctaagaaaaatatctttgcatcagcagtaatatcttttagaatagcactatcagaatttagcagtaaaccaacatacaggcttcagatttacttctgagtccaaaacaatttgtgctatccagggtagttaactctgggttaaacaagtacagggtatagattccctcttcaggtctacacaggaatttttaccatagggaaaagtggggagagctcaaacgtagttaataaggaaggtaatttgtttttcttttacctaaaagaaaagaaaattccttctgtgactacaggtctctgagaaattatctttcaaaagagatttcattgctcataagagtgttgtggcctattgataaaaacaattttgttcagtttcttgtcttgaaaaaaaagtggccttagctttttgcaatacttgaataaagtgtgtactcgcaaaagaatttctgtagcacagcattagagactcataacttttctgcaagaaatacaaacttacatcttccttttactaccttaagaatactagtgaataaaacattaattcaaagagcaaattatagaaactacaatgacatttaatgcaaattgtaggaatttacatgtttacaaatcatcttcaactggttgtgcagcaattcaataaaatatctttgtattataaaaatgtgaagaaaaaatgtaaactgatgtaaaggaggtactgtcattttaattaacctatgtttaatagcttttccttctggactttgcaaagccttcttggcaaacacattgcaaagcattctctgggaggttcagcctccttgtgtgtactgtactgtgcagacatgaaaaaataaacccgtttactgtgtgcgtgtaaatagcctggtcatcaggccattttcagccaatagtcacatccagtgcaattttgcaccgaacacttaagggtgtggtttgtaagtacgatctgtaaaataactgggatgaattcccatgtatacctgtgtaaatagatttgttaactgaaatatactttaagaaagataaaatctgtaaataaactgatttataaattaa

SEQ ID NO: 324303 - DNA, 11020 bp, Homo sapiens
ttagatattctaaagcggcgacaacatgatgtcaaactggaaaaacttaaggaacggattagaaaacagtgggaacactcagaagaaacaaatggccggggccagaagctgggtcatattgaccatccagtaatggttgttaatgttgataactcagtaacagcaaaagtcagaaaagtggcaacagcaccacctgctccagcatataaaggtttcaacccttcagagaccaagattcgaacacctgatgggaaagtgtggcaggaggctgagtttcaaaacatgagtagagaactgtatcgagatttagcacttcactttgcagatgatatttctataaaggagaaacctgctgaaaaaagtaaagagaagaaagtagtcaagccagtacgaaaagtccaaaaagtagcacagttatcaagtacagaatgcagaacaggtagtagtcatcttataagtacatcttcttggcgagatggacaaaaattagtaaagaagattctgggacctgctcccagaatggagccaaaagagcaaagaacagcatcaagtgacagaggtggaagagaaagaactgctaaatctgggggtcacattggaagagcagaatctgatcccaggttggacgttttacatagacatcttcaaagaaactcagaacgttcgagaagtaaatctcggtctgaaaataatataaagaaactagcttcatctcttccagataataagcaggaggaaaatactgccttaaataaggactttttacctattgaaattcgtggcattcttgatgacctacagctggattctacagctcacactgcaaagcaagatactgtagagttacagaaccagaagtcatcagcaccagtacatgctcctaggagtcacagcccagtaaaaagaaaacctgacaaaataacagctaatgaagatccccctgttatttccaaaaggcgccactatgacacagatgaggtacgacagtacattgttaggcagcaggaggaaaggaagagaaagcaaaatgaagagaagaaggctcaaaaggaggctacagaacagaaaaacaaacgattacaagagctctaccggaagcagaaggaagcctttactaaagtaaaaaatgtccctccttctgagccatcagcaactaggcgactacaggaaacttactccaaattgctactagaaaagaccttgcttgaagagccatctcatcaacatgttacgcaggaaacacaggccaaaccagggtatcagccatctggagaatctgacaaagaaaacaaagtacaggaacgtcccccaagtgcatcttccagtagtgacatgtctctctcagaacctccacagcctcttgcaagaaaagacttgatggaatctacatggatgcagcctgaaagattgagcccacaagttcaccattctcaaccacagccttttgctggaacagctggaagtttactctcccatctcttgagtttagagcatgtaggaattttgcataaggattttgaatctattttaccaaccaggaagaatcataatatggcttcaaggccattaacttttacacctcaaccatatgtgacctcaccagctgcttatacagatgccttgttaaaacctagtgccagccaatataagagtaaactggatcgtattgaagccttgaaagcaacagctgcttctttgtccagcagaattgaaagtgaagccaagaaattagctggggccagcattaactatgggtcagcatggaacactgagtatgatgtgcagcaggcacctcaagaagatggaccttggaccaaggctgtaactccacctgtgaaagatgataatgaagatgttttctctgccagaattcagaagatgctgggaagctgtgtatctcatgcaacttttgatgatgatcttcctggtgtaggcaatcttagtgaatttaaaaagcttcctgagatgataagaccacagagtgccatatcaagctttagagtgagatcccctggtcccaaaccagaagggctactggcacagttatgtaaaaggcagactgactcttctagctctgatatgcaagcctgttctcaagacaaagccaaaatatctcttggttccagcatagattcagtcagtgaagggcctcttcttagtgaggggagtctctctgaagaagagggagaccaggatggacagccccttttgaaagtagcagaaattttaaaagaaaaggaattttgtcctggagaaagaaatagttatgaacccatcaaagagtttcagaaagaagctgaaaaattcttgccactttttgggcacataggtggtacacaaagcaaaggaccatgggaagaattggcaaagggaagtccacatagcgtcattaatatttttacaaaatcctatcagttatatggaaaagggtttgaagacaagttggacagaggaacatcaacatcacggcctttgaatgccaccgcaactcctctaagtggtgtttcatatgaagatgattttgtctcctctccagggactgggacttcgacagaaaaaaaatcaactcttgaacctcatagcactttaagccctcaggaggaccattctaacagaaagtctgcctatgatccttcctctgtggatgttacctcccagcattcatcaggagcccagtctgctgcatcgtctcgttcatctacttcttctaaaggaaagaaaggaaaaaaggaaaagacagaatggttggattcattcactggaaatgttcagaactcacttcttgatgaggaaaaagcagaacgtggctcccatcaaggaaagaaatctgggaccagcagcaaactttctgttaaagattttgagcagactcttgatacagatagcactttggaggatctttctggacattctgtgagtgtctcatcagataagggaagatctcagaaaactccaacttctcccctgtcaccaagttcccagaaatcattgcagtttgacgttgcaggaacttcttcagaaagatctaagtcgtcagtaatgcctccaactataacaggatttaagcctaatgcacctctcactgatctgaacccggcagccagcagaacaacgacagagaacatggctccaataccaggttctaagcgcttttctcctgctggcctccatcatcgtatggcagcagaactcagttatctgaacgccattgaggagtcggtgcgccaactgtcagatgtagaaagagttagaggcatttcacttgctcagcaggagagtgtgtctctagctcagataataaaggcacaacagcaacgccatgaaagagacttggccctcttgaaactaaaggctgaacaagaggctctggagagtcagagacaattagaagaaacccgaaacaaagcagctcaggtccatgcagaatcattacagcaggtggttcaatcacaacgggaagtaactgaagtcctgcaggaagcaacgtgtaaaatagcagctcagcagtcagaaactgctcgcctcaccacagacgcagcacgtcaaatctgtgagatggcagagttgactagaactcatatctcagatgctgtcgtggcttcaggagctccccttgcaatactgtatgaccaccaacggcagcaccttccagactttgtgaaacagctgaggaccagaactgaaacagataggaaaagtccatctgtttcactctctcagagtaaagaagggacccttgactcaaagcatcagaagtattctgcttcatatgatagttattctgagtcttcaggatacaagaatcatgatagaagaagtagcagtggtagcagccgccaagaaagtccttcagttccatcttgtaaggaaaatgagaagaaacttaatggtgaaaagatagagagttccattgatgaacaggttcagactgctgcagatgattctctacgaagtgatagtgttccatctcttcctgatgaaaaagactcaacgtctattgcaacagaatattctctgaaatttgatgaatccatgacagaagatgaaatagaagaacaatcatttcgatcattactaccttcagagagtcaccgcagatttaacatggaaaagagaagaggtcatcatgatgactctgatgaagaagcttctccagaaaaaactacactgtctactgccaaggaactgaacatgccattctcaggaggacaagatagcttttctaaatttactatggagatggttcgacagtatatgaaagaggaagaaatgagggcagctcaccagtcttcactcctgcgtctccgtgaaaaggccttgaaggagaagactaaggctgaattggcctggttagagcatcaaaaaaaacatctacgagacaaaggagaggatgataaaatgcccccgctccggaagaaacagcgtggtttgcttttaaggttgcagcaagaaaaggcagaaataaaacgtcttcaagaagccaataaggcagctcggaaggaaagacagctgattcttaaacagcaggaggagatagaaaagatccgacagaccaccataaaactacaggagaaattgaagtctgcaggggagagtaaattggactctcatagtgatgatgatacaaaggataataaggcaaccagtcctggtccaactgacttggagacccgcagtccttctcccatttcaatctccagcagtgaaactagcagcattatgcagaaactgaagaaaatgagaagccgcatggatgaaaagtttctgacaaagcgggagcaaaaattaatgcaacggcgacaacatgcagaggagctcctagagtggaagcgacgtttagatgcagaagaagcagaaattcgtcaaatggaaaaacaagctttggctgcctgggacaaagaattaataaaacccaaaactcctaagaaagaactggaggaccagagaacagaacagaaagaaatagcaagtgaagaggaatctccagtacctctgtactctcatctaaacagtgaaagctccattccagaagaattaggcagccctgctgttgaatatgtaccatccgagtctataggacaggagcagccagggagtccagatcacagtatacttactgaagaaatgatttgttcacaggaactagaatcttctacctctcctagtaaacattcacttcccaaaagctgcacatctgtgtcaaagcaggagtctagcaaaggaagtcataggactggaggacaatgtcacctgcctatcaagtcccatcagcactgttatagttggtcagatgagtcattatctatgacacagtcagaaactacatctgaccagagtgatattgaaggtaggatcagagctctgaaggatgagttgcggaaaagaaaatcagttgtgaaccagctgaagaaggaacagaaaaaaaggcaaaaggaaagactgaaagcccaagaagccagtctgatcaagcagttagagtcatatgatgaatttattaagaaaactgaagccgagcttagccaagatttggaaacatcaccaacagccaagcctcagattaaaacgctctcctcagcttctgaaaaacccaagatcaaacccctcacaccactacacagatctgaaacggcaaagaattggaaatcactaacagagtcagaacgttccagaggatccctggagtctattgctgaacatgttgatgcttcactgtctggttctgagagatcagtatcagaaaggtctttatctgcatatgcaaagagagtaaatgaatgggacagtcgaacagaagattttcagaccccatctccagttctcagatcatcaaggaaaatcagagaagaatctggagattctctagaaaatgtacctgcattacatcttctcaaagaattaaatgccactagtagaattcttgatatgtcagatggcaaggttggagaatctagtaaaaaatcagaaataaaagaaatagagtatacaaaattgaagaagagtaagattgaagatgccttttctaaagaaggtaaatctgatgtcttactgaaattagtcctagaacagggagattcatctgaaattctttcaaagaaagatcttcctttagattctgaaaatgttcagaaagacctagttggattagctattgaaaatctccataaaagtgaggaaatgttgaaagagagacagtcagatcaagatatgaatcatagtccaaacatccaatcaggaaaagacattcacgaacaaaagaacacaaaggaaaaagatttgtcttggtcagaacatctttttgctcctaaagagataccatactctgaagattttgaagtgtcttctttcaagaaagaaatttcagctgaattgtacaaagatgattttgaggtgtcatctttgctgtcactcaggaaagactctcagtcttgcagagataagccacagccaatgaggagctctacaagtggagccactagctttggtagtaatgaggaaatcagtgagtgcctaagtgagaaaagcctttctatccatagcaatgttcattctgacaggctgttggaactcaagtcccctactgagctgatgaaaagtaaggagcgcagtgatgtggagcatgaacagcaagttactgaatccccttccttggcttcagttcctactgcagacgagttatttgatttccacattggtgatagggtgttgattggaaatgttcagccaggaattcttcgattcaaaggtgagactagttttgctaaaggattttgggccggagtggagttagataaacctgaaggaaataacaatggaacatatgatggtattgcatattttgagtgcaaagaaaagcatggtatttttgctcctcctcaaaaaatatctcacattccagaaaactttgatgactatgtagacattaatgaagatgaagactgttactcagatgaacgatatcagtgctataatcaagagcaaaatgatacagagggtccaaaagacagagaaaaggatgtcagtgaatatttttatgagaaatccctacctagtgtgaatgatatagaagcctcagttaatagaagtagaagccttaaaatagaaacagacaatgtacaggacatttctggggtacttgaagcccatgttcaccagcagtcttcagtggattcacagatttcttcaaaggaaaacaaagacctcatttctgatgccacagaaaaggtttccatcgctgcagaagatgacactttagacaataccttttccgaagaattggagaagcaacagcagtttacagaagaggaagacaacctatatgctgaagcttcagaaaagctttgtacaccacttctggatcttttaacaagagaaaaaaaccaactggaagcccagctgaagtcatcactaaatgaggaaaaaaagtcaaaacaacaactggaaaaaatcagcttactgacagacagtttactaaaagtctttgtaaaggacacagtcaatcaactacaacaaatcaaaaaaaccagggatgagaaaatccagcttagcaatcaggagcttcttggtgatgaccaaaagaaagtaacaccccaagacctatcccaaaatgttgaggaacagtcgccaagtatttcaggttgcttcttaagttctgaattggaagatgaaaaagaagagatttcctctccagatatgtgtcccagaccggagagcccagtatttggtgccagtgggcaggaagaacttgctaagagacttgctgaacttgaactcagccgggagttcctgagcgcgttaggagatgatcaagactggtttgatgaagactttggtttgagctcttctcacaagatccaaaaaaataaggcagaagaaaccattgtacctctaatggcagaacctaaaagagtaacccaacaaccatgtgaaacattattggcagtcccccatactgcagaagaagtagagattcttgtacataatgcagcagaagaactttggaaatggaaagaattaggccacgatcttcatagcatcagtattcctacaaaactgcttggctgtgccagtaaaggtctagatatagaaagcactagtaaaagggtctacaaacaggcggtttttgatttaacaaaagagatttttgaggaaatatttgctgaggatcccaacttaaatcaacctgtctggatgaagccatgtagaatcaactctagttatttccgacgagtgaaaaatccaaataaccttgatgaaatcaagagcttcatagcaagtgaagtactcaagttgttcagtcttaaaaaggagccaaaccacaaaacagattggcagaaaatgatgaaatttggaagaaagaaaagagaccgagtggatcatatcctggttcaggagctccatgaggaggaggcacagtgggtgaactatgatgaggatgagttgtgtgtgaaaatgcagctagccgacgggatctttgagaccctgatcaaagatactattgatgttctgaatcagatcagtgaaaagcaggggagaatgctacttgtgtgacatcttgcaaataaatcgaacgctgagtgctaatcattgcttctcacaactattacctgcatctgaaaaaaaatctatagactccagctgctacattagagcataagagatgctctcctgggacctcagtaccctgccttcttgactggtttccgttcatcagtcctgtccctcttcaagtaatctagaagaatgtggatactcttaggcgtgaatgtaaatgccttaatattgaaggtcctggttagaagcatgatacaagacatctactggattcatatttacaaatatcctggaatgttatagcttcaaagtatattagaaaaaccccaaagatggtataatctttaagtgtgcacgttcgtttatttctgcatcttccctccaaacttgcctttgcatcttaaatatttcactatgcacactcccattcctcttgggtttcatcttgtcgtttaagaaatgtactgaaataatcattggaatatttgcattttgcacaatgactggtatgatagctcttgacaaataaggaaagcactgaaatgttgtgattgggtctcgggaaatgctcagattgatgtcttaccagcatttcttctgggcttgtgatgttgagctgtagtcttgtagccataatgagcaaattgactaagagaagcaaaggtttcttggggttattaaccagtagtgtggaaatactagttttatgtggccaaggaaaagcaaaggcttttcttttcagtttgtgttatttggaagacagaaaaacatcttgtctacatcctttggctgtttgtaggatcacgttgtccttacgatactgaaactttacagctgctgtaaattttttataaatgaatttcaaaatgttataatgggactgtaggttgtttttctacatcttcattatttggacctaaaaccagtttttaataagaaagtttatctttactctttctgaaattatgactccagaaaaagaaaaaaaaaatacaagtcatggaatcagcaatctggtaagaaatgctgccaagaatgtggcagtagctgtcctgacagactccaactgtctttactatctgaagaatcctaggctccacatgagaggcagaaatggatcagtcttattcttttctagaaatggttatctgtagtttggtagcaaaaaaaaagaaaaaagaatccataattagcagatttcttattaactatttggatctaattgaaatggctttattcttaggattaagaaagatagatgtggatacccagccactcgttccatattggtatctttttaaatcagctctgcctcttaatcaagaacctaaatattccctctttctaatctttgttccttctccctacaccctcatcctctttcactcttccttcataattcctctaagaaaaatatctttgcatcagcagtaatatcttttagaatagcactatcagaatttagcagtaaaccaacatacaggcttcagatttacttctgagtccaaaacaatttgtgctatccagggtagttaactctgggttaaacaagtacagggtatagattccctcttcaggtctacacaggaatttttaccatagggaaaagtggggagagctcaaacgtagttaataaggaaggtaatttgtttttcttttacctaaaagaaaagaaaattccttctgtgactacaggtctctgagaaattatctttcaaaagagatttcattgctcataagagtgttgtggcctattgataaaaacaattttgttcagtttcttgtcttgaaaaaaaagtggccttagctttttgcaatacttgaataaagtgtgtactcgcaaaagaatttctgtagcacagcattagagactcataacttttctgcaagaaatacaaacttacatcttccttttactaccttaagaatactagtgaataaaacattaattcaaagagcaaattatagaaactacaatgacatttaatgcaaattgtaggaatttacatgtttacaaatcatcttcaactggttgtgcagcaattcaataaaatatctttgtattataaaaatgtgaagaaaaaatgtaaactgatgtaaaggaggtactgtcattttaattaacctatgtttaatagcttttccttctggactttgcaaagccttcttggcaaacacattgcaaagcattctctgggaggttcagcctccttgtgtgtactgtactgtgcagacatgaaaaaataaacccgtttactgtgtgcgtgtaaatagcctggtcatcaggccattttcagccaatagtcacatccagtgcaattttgcaccgaacacttaagggtgtggtttgtaagtacgatctgtaaaataactgggatgaattcccatgtatacctgtgtaaatagatttgttaactgaaatatactttaagaaagataaaatctgtaaataaactgatttataaattaa

SEQ ID NO: 324304 - DNA, 11113 bp, Homo sapiens
ttagatattctaaagcggcgacaacatgatgtcaaactggaaaaacttaaggaacggattagaaaacagtgggaacactcagaagaaacaaatggccggggccagaagctgggtcatattgaccatccagtaatggttgttaatgttgataactcagtaacagcaaaagtcagaaaagtggcaacagcaccacctgctccagcatataaaggtttcaacccttcagagaccaagattcgaacacctgatgggaaagtgtggcaggaggctgagtttcaaaacatgagtagagaactgtatcgagatttagcacttcactttgcagatgatatttctataaaggagaaacctgctgaaaaaagtaaagagaagaaagtagtcaagccagtacgaaaagtccaaaaagtagcacagttatcaagtacagaatgcagaacaggtagtagtcatcttataagtacatcttcttggcgagatggacaaaaattagtaaagaagattctgggacctgctcccagaatggagccaaaagagcaaagaacagcatcaagtgacagaggtggaagagaaagaactgctaaatctgggggtcacattggaagagcagaatctgatcccaggttggacgttttacatagacatcttcaaagaaactcagaacgttcgagaagtaaatctcggtctgaaaataatataaagaaactagcttcatctcttccagataataagcaggaggaaaatactgccttaaataaggactttttacctattgaaattcgtggcattcttgatgacctacagctggattctacagctcacactgcaaagcaagatactgtagagttacagaaccagaagtcatcagcaccagtacatgctcctaggagtcacagcccagtaaaaagaaaacctgacaaaataacagctaatgaagatccccctgttatttccaaaaggcgccactatgacacagatgaggtacgacagtacattgttaggcagcaggaggaaaggaagagaaagcaaaatgaagagaagaaggctcaaaaggaggctacagaacagaaaaacaaacgattacaagagctctaccggaagcagaaggaagcctttactaaagtaaaaaatgtccctccttctgagccatcagcaactaggcgactacaggaaacttactccaaattgctactagaaaagaccttgcttgaagagccatctcatcaacatgttacgcaggaaacacaggccaaaccagggtatcagccatctggagaatctgacaaagaaaacaaagtacaggaacgtcccccaagtgcatcttccagtagtgacatgtctctctcagaacctccacagcctcttgcaagaaaagacttgatggaatctacatggatgcagcctgaaagattgagcccacaagttcaccattctcaaccacagccttttgctggaacagctggaagtttactctcccatctcttgagtttagagcatgtaggaattttgcataaggattttgaatctattttaccaaccaggaagaatcataatatggcttcaaggccattaacttttacacctcaaccatatgtgacctcaccagctgcttatacagatgccttgttaaaacctagtgccagccaatataagagtaaactggatcgtattgaagccttgaaagcaacagctgcttctttgtccagcagaattgaaagtgaagccaagaaattagctggggccagcattaactatgggtcagcatggaacactgagtatgatgtgcagcaggcacctcaagaagatggaccttggaccaaggctgtaactccacctgtgaaagatgataatgaagatgttttctctgccagaattcagaagatgctgggaagctgtgtatctcatgcaacttttgatgatgatcttcctggtgtaggcaatcttagtgaatttaaaaagcttcctgagatgataagaccacagagtgccatatcaagctttagagtgagatcccctggtcccaaaccagaagggctactggcacagttatgtaaaaggcagactgactcttctagctctgatatgcaagcctgttctcaagacaaagccaaaatatctcttggttccagcatagattcagtcagtgaagggcctcttcttagtgaggggagtctctctgaagaagagggagaccaggatggacagccccttttgaaagtagcagaaattttaaaagaaaaggaattttgtcctggagaaagaaatagttatgaacccatcaaagagtttcagaaagaagctgaaaaattcttgccactttttgggcacataggtggtacacaaagcaaaggaccatgggaagaattggcaaagggaagtccacatagcgtcattaatatttttacaaaatcctatcagttatatggaaaagggtttgaagacaagttggacagaggaacatcaacatcacggcctttgaatgccaccgcaactcctctaagtggtgtttcatatgaagatgattttgtctcctctccagggactgggacttcgacagaaaaaaaatcaactcttgaacctcatagcactttaagccctcaggaggaccattctaacagaaagtctgcctatgatccttcctctgtggatgttacctcccagcattcatcaggagcccagtctgctgcatcgtctcgttcatctacttcttctaaaggaaagaaaggaaaaaaggaaaagacagaatggttggattcattcactggaaatgttcagaactcacttcttgatgaggaaaaagcagaacgtggctcccatcaaggaaagaaatctgggaccagcagcaaactttctgttaaagattttgagcagactcttgatacagatagcactttggaggatctttctggacattctgtgagtgtctcatcagataagggaagatctcagaaaactccaacttctcccctgtcaccaagttcccagaaatcattgcagtttgacgttgcaggaacttcttcagaaagatctaagtcgtcagtaatgcctccaactataacaggatttaagcctaatgcacctctcactgatctgaacccggcagccagcagaacaacgacagagaacatggctccaataccaggttctaagcgcttttctcctgctggcctccatcatcgtatggcagcagaactcagttatctgaacgccattgaggagtcggtgcgccaactgtcagatgtagaaagagttagaggcatttcacttgctcagcaggagagtgtgtctctagctcagataataaaggcacaacagcaacgccatgaaagagacttggccctcttgaaactaaaggctgaacaagaggctctggagagtcagagacaattagaagaaacccgaaacaaagcagctcaggtccatgcagaatcattacagcaggtggttcaatcacaacgggaagtaactgaagtcctgcaggaagcaacgtgtaaaatagcagctcagcagtcagaaactgctcgcctcaccacagacgcagcacgtcaaatctgtgagatggcagagttgactagaactcatatctcagatgctgtcgtggcttcaggagctccccttgcaatactgtatgaccaccaacggcagcaccttccagactttgtgaaacagctgaggaccagaactgaaacagataggaaaagtccatctgtttcactctctcagagtaaagaagggacccttgactcaaagcatcagaagtattctgcttcatatgatagttattctgagtcttcaggatacaagaatcatgatagaagaagtagcagtggtagcagccgccaagaaagtccttcagttccatcttgtaaggaaaatgagaagaaacttaatggtgaaaagatagagagttccattgatgaacaggttcagactgctgcagatgattctctacgaagtgatagtgttccatctcttcctgatgaaaaagagacggggtcttgctctgtcacccaggctggtctcgaactcctggcctcaagggatcctcccaccttggcatcccaaaatgctggaattacagactcaacgtctattgcaacagaatattctctgaaatttgatgaatccatgacagaagatgaaatagaagaacaatcatttcgatcattactaccttcagagagtcaccgcagatttaacatggaaaagagaagaggtcatcatgatgactctgatgaagaagcttctccagaaaaaactacactgtctactgccaaggaactgaacatgccattctcaggaggacaagatagcttttctaaatttactatggagatggttcgacagtatatgaaagaggaagaaatgagggcagctcaccagtcttcactcctgcgtctccgtgaaaaggccttgaaggagaagactaaggctgaattggcctggttagagcatcaaaaaaaacatctacgagacaaaggagaggatgataaaatgcccccgctccggaagaaacagcgtggtttgcttttaaggttgcagcaagaaaaggcagaaataaaacgtcttcaagaagccaataaggcagctcggaaggaaagacagctgattcttaaacagcaggaggagatagaaaagatccgacagaccaccataaaactacaggagaaattgaagtctgcaggggagagtaaattggactctcatagtgatgatgatacaaaggataataaggcaaccagtcctggtccaactgacttggagacccgcagtccttctcccatttcaatctccagcagtgaaactagcagcattatgcagaaactgaagaaaatgagaagccgcatggatgaaaagtttctgacaaagcgggagcaaaaattaatgcaacggcgacaacatgcagaggagctcctagagtggaagcgacgtttagatgcagaagaagcagaaattcgtcaaatggaaaaacaagctttggctgcctgggacaaagaattaataaaacccaaaactcctaagaaagaactggaggaccagagaacagaacagaaagaaatagcaagtgaagaggaatctccagtacctctgtactctcatctaaacagtgaaagctccattccagaagaattaggcagccctgctgttgaatatgtaccatccgagtctataggacaggagcagccagggagtccagatcacagtatacttactgaagaaatgatttgttcacaggaactagaatcttctacctctcctagtaaacattcacttcccaaaagctgcacatctgtgtcaaagcaggagtctagcaaaggaagtcataggactggaggacaatgtcacctgcctatcaagtcccatcagcactgttatagttggtcagatgagtcattatctatgacacagtcagaaactacatctgaccagagtgatattgaaggtaggatcagagctctgaaggatgagttgcggaaaagaaaatcagttgtgaaccagctgaagaaggaacagaaaaaaaggcaaaaggaaagactgaaagcccaagaagccagtctgatcaagcagttagagtcatatgatgaatttattaagaaaactgaagccgagcttagccaagatttggaaacatcaccaacagccaagcctcagattaaaacgctctcctcagcttctgaaaaacccaagatcaaacccctcacaccactacacagatctgaaacggcaaagaattggaaatcactaacagagtcagaacgttccagaggatccctggagtctattgctgaacatgttgatgcttcactgtctggttctgagagatcagtatcagaaaggtctttatctgcatatgcaaagagagtaaatgaatgggacagtcgaacagaagattttcagaccccatctccagttctcagatcatcaaggaaaatcagagaagaatctggagattctctagaaaatgtacctgcattacatcttctcaaagaattaaatgccactagtagaattcttgatatgtcagatggcaaggttggagaatctagtaaaaaatcagaaataaaagaaatagagtatacaaaattgaagaagagtaagattgaagatgccttttctaaagaaggtaaatctgatgtcttactgaaattagtcctagaacagggagattcatctgaaattctttcaaagaaagatcttcctttagattctgaaaatgttcagaaagacctagttggattagctattgaaaatctccataaaagtgaggaaatgttgaaagagagacagtcagatcaagatatgaatcatagtccaaacatccaatcaggaaaagacattcacgaacaaaagaacacaaaggaaaaagatttgtcttggtcagaacatctttttgctcctaaagagataccatactctgaagattttgaagtgtcttctttcaagaaagaaatttcagctgaattgtacaaagatgattttgaggtgtcatctttgctgtcactcaggaaagactctcagtcttgcagagataagccacagccaatgaggagctctacaagtggagccactagctttggtagtaatgaggaaatcagtgagtgcctaagtgagaaaagcctttctatccatagcaatgttcattctgacaggctgttggaactcaagtcccctactgagctgatgaaaagtaaggagcgcagtgatgtggagcatgaacagcaagttactgaatccccttccttggcttcagttcctactgcagacgagttatttgatttccacattggtgatagggtgttgattggaaatgttcagccaggaattcttcgattcaaaggtgagactagttttgctaaaggattttgggccggagtggagttagataaacctgaaggaaataacaatggaacatatgatggtattgcatattttgagtgcaaagaaaagcatggtatttttgctcctcctcaaaaaatatctcacattccagaaaactttgatgactatgtagacattaatgaagatgaagactgttactcagatgaacgatatcagtgctataatcaagagcaaaatgatacagagggtccaaaagacagagaaaaggatgtcagtgaatatttttatgagaaatccctacctagtgtgaatgatatagaagcctcagttaatagaagtagaagccttaaaatagaaacagacaatgtacaggacatttctggggtacttgaagcccatgttcaccagcagtcttcagtggattcacagatttcttcaaaggaaaacaaagacctcatttctgatgccacagaaaaggtttccatcgctgcagaagatgacactttagacaataccttttccgaagaattggagaagcaacagcagtttacagaagaggaagacaacctatatgctgaagcttcagaaaagctttgtacaccacttctggatcttttaacaagagaaaaaaaccaactggaagcccagctgaagtcatcactaaatgaggaaaaaaagtcaaaacaacaactggaaaaaatcagcttactgacagacagtttactaaaagtctttgtaaaggacacagtcaatcaactacaacaaatcaaaaaaaccagggatgagaaaatccagcttagcaatcaggagcttcttggtgatgaccaaaagaaagtaacaccccaagacctatcccaaaatgttgaggaacagtcgccaagtatttcaggttgcttcttaagttctgaattggaagatgaaaaagaagagatttcctctccagatatgtgtcccagaccggagagcccagtatttggtgccagtgggcaggaagaacttgctaagagacttgctgaacttgaactcagccgggagttcctgagcgcgttaggagatgatcaagactggtttgatgaagactttggtttgagctcttctcacaagatccaaaaaaataaggcagaagaaaccattgtacctctaatggcagaacctaaaagagtaacccaacaaccatgtgaaacattattggcagtcccccatactgcagaagaagtagagattcttgtacataatgcagcagaagaactttggaaatggaaagaattaggccacgatcttcatagcatcagtattcctacaaaactgcttggctgtgccagtaaaggtctagatatagaaagcactagtaaaagggtctacaaacaggcggtttttgatttaacaaaagagatttttgaggaaatatttgctgaggatcccaacttaaatcaacctgtctggatgaagccatgtagaatcaactctagttatttccgacgagtgaaaaatccaaataaccttgatgaaatcaagagcttcatagcaagtgaagtactcaagttgttcagtcttaaaaaggagccaaaccacaaaacagattggcagaaaatgatgaaatttggaagaaagaaaagagaccgagtggatcatatcctggttcaggagctccatgaggaggaggcacagtgggtgaactatgatgaggatgagttgtgtgtgaaaatgcagctagccgacgggatctttgagaccctgatcaaagatactattgatgttctgaatcagatcagtgaaaagcaggggagaatgctacttgtgtgacatcttgcaaataaatcgaacgctgagtgctaatcattgcttctcacaactattacctgcatctgaaaaaaaatctatagactccagctgctacattagagcataagagatgctctcctgggacctcagtaccctgccttcttgactggtttccgttcatcagtcctgtccctcttcaagtaatctagaagaatgtggatactcttaggcgtgaatgtaaatgccttaatattgaaggtcctggttagaagcatgatacaagacatctactggattcatatttacaaatatcctggaatgttatagcttcaaagtatattagaaaaaccccaaagatggtataatctttaagtgtgcacgttcgtttatttctgcatcttccctccaaacttgcctttgcatcttaaatatttcactatgcacactcccattcctcttgggtttcatcttgtcgtttaagaaatgtactgaaataatcattggaatatttgcattttgcacaatgactggtatgatagctcttgacaaataaggaaagcactgaaatgttgtgattgggtctcgggaaatgctcagattgatgtcttaccagcatttcttctgggcttgtgatgttgagctgtagtcttgtagccataatgagcaaattgactaagagaagcaaaggtttcttggggttattaaccagtagtgtggaaatactagttttatgtggccaaggaaaagcaaaggcttttcttttcagtttgtgttatttggaagacagaaaaacatcttgtctacatcctttggctgtttgtaggatcacgttgtccttacgatactgaaactttacagctgctgtaaattttttataaatgaatttcaaaatgttataatgggactgtaggttgtttttctacatcttcattatttggacctaaaaccagtttttaataagaaagtttatctttactctttctgaaattatgactccagaaaaagaaaaaaaaaatacaagtcatggaatcagcaatctggtaagaaatgctgccaagaatgtggcagtagctgtcctgacagactccaactgtctttactatctgaagaatcctaggctccacatgagaggcagaaatggatcagtcttattcttttctagaaatggttatctgtagtttggtagcaaaaaaaaagaaaaaagaatccataattagcagatttcttattaactatttggatctaattgaaatggctttattcttaggattaagaaagatagatgtggatacccagccactcgttccatattggtatctttttaaatcagctctgcctcttaatcaagaacctaaatattccctctttctaatctttgttccttctccctacaccctcatcctctttcactcttccttcataattcctctaagaaaaatatctttgcatcagcagtaatatcttttagaatagcactatcagaatttagcagtaaaccaacatacaggcttcagatttacttctgagtccaaaacaatttgtgctatccagggtagttaactctgggttaaacaagtacagggtatagattccctcttcaggtctacacaggaatttttaccatagggaaaagtggggagagctcaaacgtagttaataaggaaggtaatttgtttttcttttacctaaaagaaaagaaaattccttctgtgactacaggtctctgagaaattatctttcaaaagagatttcattgctcataagagtgttgtggcctattgataaaaacaattttgttcagtttcttgtcttgaaaaaaaagtggccttagctttttgcaatacttgaataaagtgtgtactcgcaaaagaatttctgtagcacagcattagagactcataacttttctgcaagaaatacaaacttacatcttccttttactaccttaagaatactagtgaataaaacattaattcaaagagcaaattatagaaactacaatgacatttaatgcaaattgtaggaatttacatgtttacaaatcatcttcaactggttgtgcagcaattcaataaaatatctttgtattataaaaatgtgaagaaaaaatgtaaactgatgtaaaggaggtactgtcattttaattaacctatgtttaatagcttttccttctggactttgcaaagccttcttggcaaacacattgcaaagcattctctgggaggttcagcctccttgtgtgtactgtactgtgcagacatgaaaaaataaacccgtttactgtgtgcgtgtaaatagcctggtcatcaggccattttcagccaatagtcacatccagtgcaattttgcaccgaacacttaagggtgtggtttgtaagtacgatctgtaaaataactgggatgaattcccatgtatacctgtgtaaatagatttgttaactgaaatatactttaagaaagataaaatctgtaaataaactgatttataaattaa

SEQ ID NO: 324305 - DNA, 11047 bp, Homo sapiens
ttagatattctaaagcggcgacaacatgatgtcaaactggaaaaacttaaggaacggattagaaaacagtgggaacactcagaagaaacaaatggccggggccagaagctgggtcatattgaccatccagtaatggttgttaatgttgataactcagtaacagcaaaagtcagaaaagtggcaacagcaccacctgctccagcatataaaggtttcaacccttcagagaccaagattcgaacacctgatgggaaagtgtggcaggaggctgagtttcaaaacatgagtagagaactgtatcgagatttagcacttcactttgcagatgatatttctataaaggagaaacctgctgaaaaaagtaaagagaagaaagtagtcaagccagtacgaaaagtccaaaaagtagcacagttatcaagtacagaatgcagaacaggtagtagtcatcttataagtacatcttcttggcgagatggacaaaaattagtaaagaagattctgggacctgctcccagaatggagccaaaagagcaaagaacagcatcaagtgacagaggtggaagagaaagaactgctaaatctgggggtcacattggaagagcagaatctgatcccaggttggacgttttacatagacatcttcaaagaaactcagaacgttcgagaagtaaatctcggtctgaaaataatataaagaaactagcttcatctcttccagataataagcaggaggaaaatactgccttaaataaggactttttacctattgaaattcgtggcattcttgatgacctacagctggattctacagctcacactgcaaagcaagatactgtagagttacagaaccagaagtcatcagcaccagtacatgctcctaggagtcacagcccagtaaaaagaaaacctgacaaaataacagctaatgaagatccccctgttatttccaaaaggcgccactatgacacagatgaggtacgacagtacattgttaggcagcaggaggaaaggaagagaaagcaaaatgaagagaagaaggctcaaaaggaggctacagaacagaaaaacaaacgattacaagagctctaccggaagcagaaggaagcctttactaaagtaaaaaatgtccctccttctgagccatcagcaactaggcgactacaggaaacttactccaaattgctactagaaaagaccttgcttgaagagccatctcatcaacatgttacgcaggaaacacaggccaaaccagggtatcagccatctggagaatctgacaaagaaaacaaagtacaggaacgtcccccaagtgcatcttccagtagtgacatgtctctctcagaacctccacagcctcttgcaagaaaagacttgatggaatctacatggatgcagcctgaaagattgagcccacaagttcaccattctcaaccacagccttttgctggaacagctggaagtttactctcccatctcttgagtttagagcatgtaggaattttgcataaggattttgaatctattttaccaaccaggaagaatcataatatggcttcaaggccattaacttttacacctcaaccatatgtgacctcaccagctgcttatacagatgccttgttaaaacctagtgccagccaatataagagtaaactggatcgtattgaagccttgaaagcaacagctgcttctttgtccagcagaattgaaagtgaagccaagaaattagctggggccagcattaactatgggtcagcatggaacactgagtatgatgtgcagcaggcacctcaagaagatggaccttggaccaaggctgtaactccacctgtgaaagatgataatgaagatgttttctctgccagaattcagaagatgctgggaagctgtgtatctcatgcaacttttgatgatgatcttcctggtgtaggcaatcttagtgaatttaaaaagcttcctgagatgataagaccacagagtgccatatcaagctttagagtgagatcccctggtcccaaaccagaagggctactggcacagttatgtaaaaggcagactgactcttctagctctgatatgcaagcctgttctcaagacaaagccaaaatatctcttggttccagcatagattcagtcagtgaagggcctcttcttagtgaggggagtctctctgaagaagagggagaccaggatggacagccccttttgaaagtagcagaaattttaaaagaaaaggaattttgtcctggagaaagaaatagttatgaacccatcaaagagtttcagaaagaagctgaaaaattcttgccactttttgggcacataggtggtacacaaagcaaaggaccatgggaagaattggcaaagggaagtccacatagcgtcattaatatttttacaaaatcctatcagttatatggaaaagggtttgaagacaagttggacagaggaacatcaacatcacggcctttgaatgccaccgcaactcctctaagtggtgtttcatatgaagatgattttgtctcctctccagggactgggacttcgacagaaaaaaaatcaactcttgaacctcatagcactttaagccctcaggaggaccattctaacagaaagtctgcctatgatccttcctctgtggatgttacctcccagcattcatcaggagcccagtctgctgcatcgtctcgttcatctacttcttctaaaggaaagaaaggaaaaaaggaaaagacagaatggttggattcattcactggaaatgttcagaactcacttcttgatgaggaaaaagcagaacgtggctcccatcaaggaaagaaatctgggaccagcagcaaactttctgttaaagattttgagcagactcttgatacagatagcactttggaggatctttctggacattctgtgagtgtctcatcagataagggaagatctcagaaaactccaacttctcccctgtcaccaagttcccagaaatcattgcagtttgacgttgcaggaacttcttcagaaagatctaagtcgtcagtaatgcctccaactataacaggatttaagcctaatgcacctctcactgatctgaacccggcagccagcagaacaacgacagagaacatggctccaataccaggttctaagcgcttttctcctgctggcctccatcatcgtatggcagcagaactcagttatctgaacgccattgaggagtcggtgcgccaactgtcagatgtagaaagagttagaggcatttcacttgctcagcaggagagtgtgtctctagctcagataataaaggcacaacagcaacgccatgaaagagacttggccctcttgaaactaaaggctgaacaagaggctctggagagtcagagacaattagaagaaacccgaaacaaagcagctcaggtccatgcagaatcattacagcaggtggttcaatcacaacgggaagtaactgaagtcctgcaggaagcaacgtgtaaaatagcagctcagcagtcagaaactgctcgcctcaccacagacgcagcacgtcaaatctgtgagatggcagagttgactagaactcatatctcagatgctgtcgtggcttcaggagctccccttgcaatactgtatgaccaccaacggcagcaccttccagactttgtgaaacagctgaggaccagaactgaaacagataggaaaagtccatctgtttcactctctcagagtaaagaagggacccttgactcaaagcatcagaagtattctgcttcatatgatagttattctgagtcttcaggatacaagaatcatgatagaagaagtagcagtggtagcagccgccaagaaagtccttcagttccatcttgtaaggaaaatgagaagaaacttaatggtgaaaagatagagagttccattgatgaacaggttcagactgctgcagatgattctctacgaagtgatagtgttccatctcttcctgatgaaaaagactcaacgtctattgcaacagaatattctctgaaatttgatgaatccatgacagaagatgaaatagaagaacaatcatttcgatcattactaccttcagagagtcaccgcagatttaacatggaaaagagaagaggtcatcatgatgactctgatgaagaagcttctccagaaaaaactacactgtctactgccaaggaactgaacatgccattctcaggaggacaagatagcttttctaaatttactatggagatggttcgacagtatatgaaagaggaagaaatgagggcagctcaccagtcttcactcctgcgtctccgtgaaaaggccttgaaggagaagactaaggctgaattggcctggttagagcatcaaaaaaaacatctacgagacaaaggagaggatgataaaatgcccccgctccggaagaaacagcgtggtttgcttttaaggttgcagcaagaaaaggcagaaataaaacgtcttcaagaagccaataaggcagctcggaaggaaagacagctgattcttaaacagcaggaggagatagaaaagatccgacagaccaccataaaactacaggagaaattgaagtctgcaggggagagtaaattggactctcatagtgatgatgatacaaaggataataaggcaaccagtcctggtccaactgacttggagacccgcagtccttctcccatttcaatctccagcagtgaaactagcagcattatgcagaaactgaagaaaatgagaagccgcatggatgaaaagtttctgacaaagcgggagcaaaaattaatgcaacggcgacaacatgcagaggagctcctagagtggaagcgacgtttagatgcagaagaagcagaaattcgtcaaatggaaaaacaagctttggctgcctgggacaaagaattaataaaacccaaaactcctaagaaagaactggaggaccagagaacagaacagaaagaaatagcaagtgaagaggaatctccagtacctctgtactctcatctaaacagtgaaagctccattccagaagaattaggcagccctgctgttgaatatgtaccatccgagtctataggacaggagcagccagggagtccagatcacagtatacttactgaagaaatgatttgttcacaggaactagaatcttctacctctcctagtaaacattttccatttggttttctgtttgaacagtcacttcccaaaagctgcacatctgtgtcaaagcaggagtctagcaaaggaagtcataggactggaggacaatgtcacctgcctatcaagtcccatcagcactgttatagttggtcagatgagtcattatctatgacacagtcagaaactacatctgaccagagtgatattgaaggtaggatcagagctctgaaggatgagttgcggaaaagaaaatcagttgtgaaccagctgaagaaggaacagaaaaaaaggcaaaaggaaagactgaaagcccaagaagccagtctgatcaagcagttagagtcatatgatgaatttattaagaaaactgaagccgagcttagccaagatttggaaacatcaccaacagccaagcctcagattaaaacgctctcctcagcttctgaaaaacccaagatcaaacccctcacaccactacacagatctgaaacggcaaagaattggaaatcactaacagagtcagaacgttccagaggatccctggagtctattgctgaacatgttgatgcttcactgtctggttctgagagatcagtatcagaaaggtctttatctgcatatgcaaagagagtaaatgaatgggacagtcgaacagaagattttcagaccccatctccagttctcagatcatcaaggaaaatcagagaagaatctggagattctctagaaaatgtacctgcattacatcttctcaaagaattaaatgccactagtagaattcttgatatgtcagatggcaaggttggagaatctagtaaaaaatcagaaataaaagaaatagagtatacaaaattgaagaagagtaagattgaagatgccttttctaaagaaggtaaatctgatgtcttactgaaattagtcctagaacagggagattcatctgaaattctttcaaagaaagatcttcctttagattctgaaaatgttcagaaagacctagttggattagctattgaaaatctccataaaagtgaggaaatgttgaaagagagacagtcagatcaagatatgaatcatagtccaaacatccaatcaggaaaagacattcacgaacaaaagaacacaaaggaaaaagatttgtcttggtcagaacatctttttgctcctaaagagataccatactctgaagattttgaagtgtcttctttcaagaaagaaatttcagctgaattgtacaaagatgattttgaggtgtcatctttgctgtcactcaggaaagactctcagtcttgcagagataagccacagccaatgaggagctctacaagtggagccactagctttggtagtaatgaggaaatcagtgagtgcctaagtgagaaaagcctttctatccatagcaatgttcattctgacaggctgttggaactcaagtcccctactgagctgatgaaaagtaaggagcgcagtgatgtggagcatgaacagcaagttactgaatccccttccttggcttcagttcctactgcagacgagttatttgatttccacattggtgatagggtgttgattggaaatgttcagccaggaattcttcgattcaaaggtgagactagttttgctaaaggattttgggccggagtggagttagataaacctgaaggaaataacaatggaacatatgatggtattgcatattttgagtgcaaagaaaagcatggtatttttgctcctcctcaaaaaatatctcacattccagaaaactttgatgactatgtagacattaatgaagatgaagactgttactcagatgaacgatatcagtgctataatcaagagcaaaatgatacagagggtccaaaagacagagaaaaggatgtcagtgaatatttttatgagaaatccctacctagtgtgaatgatatagaagcctcagttaatagaagtagaagccttaaaatagaaacagacaatgtacaggacatttctggggtacttgaagcccatgttcaccagcagtcttcagtggattcacagatttcttcaaaggaaaacaaagacctcatttctgatgccacagaaaaggtttccatcgctgcagaagatgacactttagacaataccttttccgaagaattggagaagcaacagcagtttacagaagaggaagacaacctatatgctgaagcttcagaaaagctttgtacaccacttctggatcttttaacaagagaaaaaaaccaactggaagcccagctgaagtcatcactaaatgaggaaaaaaagtcaaaacaacaactggaaaaaatcagcttactgacagacagtttactaaaagtctttgtaaaggacacagtcaatcaactacaacaaatcaaaaaaaccagggatgagaaaatccagcttagcaatcaggagcttcttggtgatgaccaaaagaaagtaacaccccaagacctatcccaaaatgttgaggaacagtcgccaagtatttcaggttgcttcttaagttctgaattggaagatgaaaaagaagagatttcctctccagatatgtgtcccagaccggagagcccagtatttggtgccagtgggcaggaagaacttgctaagagacttgctgaacttgaactcagccgggagttcctgagcgcgttaggagatgatcaagactggtttgatgaagactttggtttgagctcttctcacaagatccaaaaaaataaggcagaagaaaccattgtacctctaatggcagaacctaaaagagtaacccaacaaccatgtgaaacattattggcagtcccccatactgcagaagaagtagagattcttgtacataatgcagcagaagaactttggaaatggaaagaattaggccacgatcttcatagcatcagtattcctacaaaactgcttggctgtgccagtaaaggtctagatatagaaagcactagtaaaagggtctacaaacaggcggtttttgatttaacaaaagagatttttgaggaaatatttgctgaggatcccaacttaaatcaacctgtctggatgaagccatgtagaatcaactctagttatttccgacgagtgaaaaatccaaataaccttgatgaaatcaagagcttcatagcaagtgaagtactcaagttgttcagtcttaaaaaggagccaaaccacaaaacagattggcagaaaatgatgaaatttggaagaaagaaaagagaccgagtggatcatatcctggttcaggagctccatgaggaggaggcacagtgggtgaactatgatgaggatgagttgtgtgtgaaaatgcagctagccgacgggatctttgagaccctgatcaaagatactattgatgttctgaatcagatcagtgaaaagcaggggagaatgctacttgtgtgacatcttgcaaataaatcgaacgctgagtgctaatcattgcttctcacaactattacctgcatctgaaaaaaaatctatagactccagctgctacattagagcataagagatgctctcctgggacctcagtaccctgccttcttgactggtttccgttcatcagtcctgtccctcttcaagtaatctagaagaatgtggatactcttaggcgtgaatgtaaatgccttaatattgaaggtcctggttagaagcatgatacaagacatctactggattcatatttacaaatatcctggaatgttatagcttcaaagtatattagaaaaaccccaaagatggtataatctttaagtgtgcacgttcgtttatttctgcatcttccctccaaacttgcctttgcatcttaaatatttcactatgcacactcccattcctcttgggtttcatcttgtcgtttaagaaatgtactgaaataatcattggaatatttgcattttgcacaatgactggtatgatagctcttgacaaataaggaaagcactgaaatgttgtgattgggtctcgggaaatgctcagattgatgtcttaccagcatttcttctgggcttgtgatgttgagctgtagtcttgtagccataatgagcaaattgactaagagaagcaaaggtttcttggggttattaaccagtagtgtggaaatactagttttatgtggccaaggaaaagcaaaggcttttcttttcagtttgtgttatttggaagacagaaaaacatcttgtctacatcctttggctgtttgtaggatcacgttgtccttacgatactgaaactttacagctgctgtaaattttttataaatgaatttcaaaatgttataatgggactgtaggttgtttttctacatcttcattatttggacctaaaaccagtttttaataagaaagtttatctttactctttctgaaattatgactccagaaaaagaaaaaaaaaatacaagtcatggaatcagcaatctggtaagaaatgctgccaagaatgtggcagtagctgtcctgacagactccaactgtctttactatctgaagaatcctaggctccacatgagaggcagaaatggatcagtcttattcttttctagaaatggttatctgtagtttggtagcaaaaaaaaagaaaaaagaatccataattagcagatttcttattaactatttggatctaattgaaatggctttattcttaggattaagaaagatagatgtggatacccagccactcgttccatattggtatctttttaaatcagctctgcctcttaatcaagaacctaaatattccctctttctaatctttgttccttctccctacaccctcatcctctttcactcttccttcataattcctctaagaaaaatatctttgcatcagcagtaatatcttttagaatagcactatcagaatttagcagtaaaccaacatacaggcttcagatttacttctgagtccaaaacaatttgtgctatccagggtagttaactctgggttaaacaagtacagggtatagattccctcttcaggtctacacaggaatttttaccatagggaaaagtggggagagctcaaacgtagttaataaggaaggtaatttgtttttcttttacctaaaagaaaagaaaattccttctgtgactacaggtctctgagaaattatctttcaaaagagatttcattgctcataagagtgttgtggcctattgataaaaacaattttgttcagtttcttgtcttgaaaaaaaagtggccttagctttttgcaatacttgaataaagtgtgtactcgcaaaagaatttctgtagcacagcattagagactcataacttttctgcaagaaatacaaacttacatcttccttttactaccttaagaatactagtgaataaaacattaattcaaagagcaaattatagaaactacaatgacatttaatgcaaattgtaggaatttacatgtttacaaatcatcttcaactggttgtgcagcaattcaataaaatatctttgtattataaaaatgtgaagaaaaaatgtaaactgatgtaaaggaggtactgtcattttaattaacctatgtttaatagcttttccttctggactttgcaaagccttcttggcaaacacattgcaaagcattctctgggaggttcagcctccttgtgtgtactgtactgtgcagacatgaaaaaataaacccgtttactgtgtgcgtgtaaatagcctggtcatcaggccattttcagccaatagtcacatccagtgcaattttgcaccgaacacttaagggtgtggtttgtaagtacgatctgtaaaataactgggatgaattcccatgtatacctgtgtaaatagatttgttaactgaaatatactttaagaaagataaaatctgtaaataaactgatttataaattaa

SEQ ID NO: 324306 - DNA, 9339 bp, Homo sapiens
gtggtgcactgtgtcgtggtgcactgtgtcgtggtgaagccaagaaattagctggggccagcattaactatgggtcagcatggaacactgagtatgatgtgcagcaggcacctcaagaagatggaccttggaccaaggctgtaactccacctgtgaaagatgataatgaagatgttttctctgccagaattcagaagatgctgggaagctgtgtatctcatgcaacttttgatgatgatcttcctggtgtaggcaatcttagtgaatttaaaaagcttcctgagatgataagaccacagagtgccatatcaagctttagagtgagatcccctggtcccaaaccagaagggctactggcacagttatgtaaaaggcagactgactcttctagctctgatatgcaagcctgttctcaagacaaagccaaaatatctcttggttccagcatagattcagtcagtgaagggcctcttcttagtgaggggagtctctctgaagaagagggagaccaggatggacagccccttttgaaagtagcagaaattttaaaagaaaaggaattttgtcctggagaaagaaatagttatgaacccatcaaagagtttcagaaagaagctgaaaaattcttgccactttttgggcacataggtggtacacaaagcaaaggaccatgggaagaattggcaaagggaagtccacatagcgtcattaatatttttacaaaatcctatcagttatatggaaaagggtttgaagacaagttggacagaggaacatcaacatcacggcctttgaatgccaccgcaactcctctaagtggtgtttcatatgaagatgattttgtctcctctccagggactgggacttcgacagaaaaaaaatcaactcttgaacctcatagcactttaagccctcaggaggaccattctaacagaaagtctgcctatgatccttcctctgtggatgttacctcccagcattcatcaggagcccagtctgctgcatcgtctcgttcatctacttcttctaaaggaaagaaaggaaaaaaggaaaagacagaatggttggattcattcactggaaatgttcagaactcacttcttgatgaggaaaaagcagaacgtggctcccatcaaggaaagaaatctgggaccagcagcaaactttctgttaaagattttgagcagactcttgatacagatagcactttggaggatctttctggacattctgtgagtgtctcatcagataagggaagatctcagaaaactccaacttctcccctgtcaccaagttcccagaaatcattgcagtttgacgttgcaggaacttcttcagaaagatctaagtcgtcagtaatgcctccaactataacaggatttaagcctaatgcacctctcactgatctgaacccggcagccagcagaacaacgacagagaacatggctccaataccaggttctaagcgcttttctcctgctggcctccatcatcgtatggcagcagaactcagttatctgaacgccattgaggagtcggtgcgccaactgtcagatgtagaaagagttagaggcatttcacttgctcagcaggagagtgtgtctctagctcagataataaaggcacaacagcaacgccatgaaagagacttggccctcttgaaactaaaggctgaacaagaggctctggagagtcagagacaattagaagaaacccgaaacaaagcagctcaggtccatgcagaatcattacagcaggtggttcaatcacaacgggaagtaactgaagtcctgcaggaagcaacgtgtaaaatagcagctcagcagtcagaaactgctcgcctcaccacagacgcagcacgtcaaatctgtgagatggcagagttgactagaactcatatctcagatgctgtcgtggcttcaggagctccccttgcaatactgtatgaccaccaacggcagcaccttccagactttgtgaaacagctgaggaccagaactgaaacagataggaaaagtccatctgtttcactctctcagagtaaagaagggacccttgactcaaagcatcagaagtattctgcttcatatgatagttattctgagtcttcaggatacaagaatcatgatagaagaagtagcagtggtagcagccgccaagaaagtccttcagttccatcttgtaaggaaaatgagaagaaacttaatggtgaaaagatagagagttccattgatgaacaggttcagactgctgcagatgattctctacgaagtgatagtgttccatctcttcctgatgaaaaagactcaacgtctattgcaacagaatattctctgaaatttgatgaatccatgacagaagatgaaatagaagaacaatcatttcgatcattactaccttcagagagtcaccgcagatttaacatggaaaagagaagaggtcatcatgatgactctgatgaagaagcttctccagaaaaaactacactgtctactgccaaggaactgaacatgccattctcaggaggacaagatagcttttctaaatttactatggagatggttcgacagtatatgaaagaggaagaaatgagggcagctcaccagtcttcactcctgcgtctccgtgaaaaggccttgaaggagaagactaaggctgaattggcctggttagagcatcaaaaaaaacatctacgagacaaaggagaggatgataaaatgcccccgctccggaagaaacagcgtggtttgcttttaaggttgcagcaagaaaaggcagaaataaaacgtcttcaagaagccaataaggcagctcggaaggaaagacagctgattcttaaacagcaggaggagatagaaaagatccgacagaccaccataaaactacaggagaaattgaagtctgcaggggagagtaaattggactctcatagtgatgatgatacaaaggataataaggcaaccagtcctggtccaactgacttggagacccgcagtccttctcccatttcaatctccagcagtgaaactagcagcattatgcagaaactgaagaaaatgagaagccgcatggatgaaaagtttctgacaaagcgggagcaaaaattaatgcaacggcgacaacatgcagaggagctcctagagtggaagcgacgtttagatgcagaagaagcagaaattcgtcaaatggaaaaacaagctttggctgcctgggacaaagaattaataaaacccaaaactcctaagaaagaactggaggaccagagaacagaacagaaagaaatagcaagtgaagaggaatctccagtacctctgtactctcatctaaacagtgaaagctccattccagaagaattaggcagccctgctgttgaatatgtaccatccgagtctataggacaggagcagccagggagtccagatcacagtatacttactgaagaaatgatttgttcacaggaactagaatcttctacctctcctagtaaacattcacttcccaaaagctgcacatctgtgtcaaagcaggagtctagcaaaggaagtcataggactggaggacaatgtcacctgcctatcaagtcccatcagcactgttatagttggtcagatgagtcattatctatgacacagtcagaaactacatctgaccagagtgatattgaaggtaggatcagagctctgaaggatgagttgcggaaaagaaaatcagttgtgaaccagctgaagaaggaacagaaaaaaaggcaaaaggaaagactgaaagcccaagaagccagtctgatcaagcagttagagtcatatgatgaatttattaagaaaactgaagccgagcttagccaagatttggaaacatcaccaacagccaagcctcagattaaaacgctctcctcagcttctgaaaaacccaagatcaaacccctcacaccactacacagatctgaaacggcaaagaattggaaatcactaacagagtcagaacgttccagaggatccctggagtctattgctgaacatgttgatgcttcactgtctggttctgagagatcagtatcagaaaggtctttatctgcatatgcaaagagagtaaatgaatgggacagtcgaacagaagattttcagaccccatctccagttctcagatcatcaaggaaaatcagagaagaatctggagattctctagaaaatgtacctgcattacatcttctcaaagaattaaatgccactagtagaattcttgatatgtcagatggcaaggttggagaatctagtaaaaaatcagaaataaaagaaatagagtatacaaaattgaagaagagtaagattgaagatgccttttctaaagaaggtaaatctgatgtcttactgaaattagtcctagaacagggagattcatctgaaattctttcaaagaaagatcttcctttagattctgaaaatgttcagaaagacctagttggattagctattgaaaatctccataaaagtgaggaaatgttgaaagagagacagtcagatcaagatatgaatcatagtccaaacatccaatcaggaaaagacattcacgaacaaaagaacacaaaggaaaaagatttgtcttggtcagaacatctttttgctcctaaagagataccatactctgaagattttgaagtgtcttctttcaagaaagaaatttcagctgaattgtacaaagatgattttgaggtgtcatctttgctgtcactcaggaaagactctcagtcttgcagagataagccacagccaatgaggagctctacaagtggagccactagctttggtagtaatgaggaaatcagtgagtgcctaagtgagaaaagcctttctatccatagcaatgttcattctgacaggctgttggaactcaagtcccctactgagctgatgaaaagtaaggagcgcagtgatgtggagcatgaacagcaagttactgaatccccttccttggcttcagttcctactgcagacgagttatttgatttccacattggtgatagggtgttgattggaaatgttcagccaggaattcttcgattcaaaggtgagactagttttgctaaaggattttgggccggagtggagttagataaacctgaaggaaataacaatggaacatatgatggtattgcatattttgagtgcaaagaaaagcatggtatttttgctcctcctcaaaaaatatctcacattccagaaaactttgatgactatgtagacattaatgaagatgaagactgttactcagatgaacgatatcagtgctataatcaagagcaaaatgatacagagggtccaaaagacagagaaaaggatgtcagtgaatatttttatgagaaatccctacctagtgtgaatgatatagaagcctcagttaatagaagtagaagccttaaaatagaaacagacaatgtacaggacatttctggggtacttgaagcccatgttcaccagcagtcttcagtggattcacagatttcttcaaaggaaaacaaagacctcatttctgatgccacagaaaaggtttccatcgctgcagaagatgacactttagacaataccttttccgaagaattggagaagcaacagcagtttacagaagaggaagacaacctatatgctgaagcttcagaaaagctttgtacaccacttctggatcttttaacaagagaaaaaaaccaactggaagcccagctgaagtcatcactaaatgaggaaaaaaagtcaaaacaacaactggaaaaaatcagcttactgacagacagtttactaaaagtctttgtaaaggacacagtcaatcaactacaacaaatcaaaaaaaccagggatgagaaaatccagcttagcaatcaggagcttcttggtgatgaccaaaagaaagtaacaccccaagacctatcccaaaatgttgaggaacagtcgccaagtatttcaggttgcttcttaagttctgaattggaagatgaaaaagaagagatttcctctccagatatgtgtcccagaccggagagcccagtatttggtgccagtgggcaggaagaacttgctaagagacttgctgaacttgaactcagccgggagttcctgagcgcgttaggagatgatcaagactggtttgatgaagactttggtttgagctcttctcacaagatccaaaaaaataaggcagaagaaaccattgtacctctaatggcagaacctaaaagagtaacccaacaaccatgtgaaacattattggcagtcccccatactgcagaagaagtagagattcttgtacataatgcagcagaagaactttggaaatggaaagaattaggccacgatcttcatagcatcagtattcctacaaaactgcttggctgtgccagtaaaggtctagatatagaaagcactagtaaaagggtctacaaacaggcggtttttgatttaacaaaagagatttttgaggaaatatttgctgaggatcccaacttaaatcaacctgtctggatgaagccatgtagaatcaactctagttatttccgacgagtgaaaaatccaaataaccttgatgaaatcaagagcttcatagcaagtgaagtactcaagttgttcagtcttaaaaaggagccaaaccacaaaacagattggcagaaaatgatgaaatttggaagaaagaaaagagaccgagtggatcatatcctggttcaggagctccatgaggaggaggcacagtgggtgaactatgatgaggatgagttgtgtgtgaaaatgcagctagccgacgggatctttgagaccctgatcaaagatactattgatgttctgaatcagatcagtgaaaagcaggggagaatgctacttgtgtgacatcttgcaaataaatcgaacgctgagtgctaatcattgcttctcacaactattacctgcatctgaaaaaaaatctatagactccagctgctacattagagcataagagatgctctcctgggacctcagtaccctgccttcttgactggtttccgttcatcagtcctgtccctcttcaagtaatctagaagaatgtggatactcttaggcgtgaatgtaaatgccttaatattgaaggtcctggttagaagcatgatacaagacatctactggattcatatttacaaatatcctggaatgttatagcttcaaagtatattagaaaaaccccaaagatggtataatctttaagtgtgcacgttcgtttatttctgcatcttccctccaaacttgcctttgcatcttaaatatttcactatgcacactcccattcctcttgggtttcatcttgtcgtttaagaaatgtactgaaataatcattggaatatttgcattttgcacaatgactggtatgatagctcttgacaaataaggaaagcactgaaatgttgtgattgggtctcgggaaatgctcagattgatgtcttaccagcatttcttctgggcttgtgatgttgagctgtagtcttgtagccataatgagcaaattgactaagagaagcaaaggtttcttggggttattaaccagtagtgtggaaatactagttttatgtggccaaggaaaagcaaaggcttttcttttcagtttgtgttatttggaagacagaaaaacatcttgtctacatcctttggctgtttgtaggatcacgttgtccttacgatactgaaactttacagctgctgtaaattttttataaatgaatttcaaaatgttataatgggactgtaggttgtttttctacatcttcattatttggacctaaaaccagtttttaataagaaagtttatctttactctttctgaaattatgactccagaaaaagaaaaaaaaaatacaagtcatggaatcagcaatctggtaagaaatgctgccaagaatgtggcagtagctgtcctgacagactccaactgtctttactatctgaagaatcctaggctccacatgagaggcagaaatggatcagtcttattcttttctagaaatggttatctgtagtttggtagcaaaaaaaaagaaaaaagaatccataattagcagatttcttattaactatttggatctaattgaaatggctttattcttaggattaagaaagatagatgtggatacccagccactcgttccatattggtatctttttaaatcagctctgcctcttaatcaagaacctaaatattccctctttctaatctttgttccttctccctacaccctcatcctctttcactcttccttcataattcctctaagaaaaatatctttgcatcagcagtaatatcttttagaatagcactatcagaatttagcagtaaaccaacatacaggcttcagatttacttctgagtccaaaacaatttgtgctatccagggtagttaactctgggttaaacaagtacagggtatagattccctcttcaggtctacacaggaatttttaccatagggaaaagtggggagagctcaaacgtagttaataaggaaggtaatttgtttttcttttacctaaaagaaaagaaaattccttctgtgactacaggtctctgagaaattatctttcaaaagagatttcattgctcataagagtgttgtggcctattgataaaaacaattttgttcagtttcttgtcttgaaaaaaaagtggccttagctttttgcaatacttgaataaagtgtgtactcgcaaaagaatttctgtagcacagcattagagactcataacttttctgcaagaaatacaaacttacatcttccttttactaccttaagaatactagtgaataaaacattaattcaaagagcaaattatagaaactacaatgacatttaatgcaaattgtaggaatttacatgtttacaaatcatcttcaactggttgtgcagcaattcaataaaatatctttgtattataaaaatgtgaagaaaaaatgtaaactgatgtaaaggaggtactgtcattttaattaacctatgtttaatagcttttccttctggactttgcaaagccttcttggcaaacacattgcaaagcattctctgggaggttcagcctccttgtgtgtactgtactgtgcagacatgaaaaaataaacccgtttactgtgtgcgtgtaaatagcctggtcatcaggccattttcagccaatagtcacatccagtgcaattttgcaccgaacacttaagggtgtggtttgtaagtacgatctgtaaaataactgggatgaattcccatgtatacctgtgtaaatagatttgttaactgaaatatactttaagaaagataaaatctgtaaataaactgatttataaattaa

SEQ ID NO: 324307 - DNA, 10941 bp, Homo sapiens
ttagatattctaaagcggcgacaacatgatgtcaaactggaaaaacttaaggaacggattagaaaacagtgggaacactcagaagaaacaaatggccggggccagaagctgggtcatattgaccatccagtaatggttgttaatgttgataactcagtaacagcaaaagtcagaaaagtggcaacagcaccacctgctccagcatataaaggtttcaacccttcagagaccaagattcgaacacctgatgggaaagtgtggcaggaggctgagtttcaaaacatgagtagagaactgtatcgagatttagcacttcactttgcagatgatatttctataaaggagaaacctgctgaaaaaagtaaagagaagaaagtagtcaagccagtacgaaaagtccaaaaagtagcacagttatcaagtacagaatgcagaacaggtagtagtcatcttataagtacatcttcttggcgagatggacaaaaattagtaaagaagattctgggacctgctcccagaatggagccaaaagagcaaagaacagcatcaagtgacagaggtggaagagaaagaactgctaaatctgggggtcacattggaagagcagaatctgatcccaggttggacgttttacatagacatcttcaaagaaactcagaacgttcgagaagtaaatctcggtctgaaaataatataaagaaactagcttcatctcttccagataataagcaggaggaaaatactgccttaaataaggactttttacctattgaaattcgtggcattcttgatgacctacagctggattctacagctcacactgcaaagcaagatactgtagagttacagaaccagaagtcatcagcaccagtacatgctcctaggagtcacagcccagtaaaaagaaaacctgacaaaataacagctaatgaagatccccctgttatttccaaaaggcgccactatgacacagatgaggtacgacagtacattgttaggcagcaggaggaaaggaagagaaagcaaaatgaagagaagaaggctcaaaaggaggctacagaacagaaaaacaaacgattacaagagctctaccggaagcagaaggaagcctttactaaagtaaaaaatgtccctccttctgagccatcagcaactaggcgactacaggaaacttactccaaattgctactagaaaagaccttgcttgaagagccatctcatcaacatgttacgcaggaaacacaggccaaaccagggtatcagccatctggagaatctgacaaagaaaacaaagtacaggaacgtcccccaagtgcatcttccagtagtgacatgtctctctcagaacctccacagcctcttgcaagaaaagacttgatggaatctacatggatgcagcctgaaagattgagcccacaagttcaccattctcaaccacagccttttgctggaacagctggaagtttactctcccatctcttgagtttagagcatgtaggaattttgcataaggattttgaatctattttaccaaccaggaagaatcataatatggcttcaaggccattaacttttacacctcaaccatatgtgacctcaccagctgcttatacagatgccttgttaaaacctagtgccagccaatataagagtaaactggatcgtattgaagccttgaaagcaacagctgcttctttgtccagcagaattgaaagtgaagccaagaaattagctggggccagcattaactatgggtcagcatggaacactgagtatgatgtgcagcaggcacctcaagaagatggaccttggaccaaggctgtaactccacctgtgaaagatgataatgaagatgttttctctgccagaattcagaagatgctgggaagctgtgtatctcatgcaacttttgatgatgatcttcctggtgtaggcaatcttagtgaatttaaaaagcttcctgagatgataagaccacagagtgccatatcaagctttagagtgagatcccctggtcccaaaccagaagggctactggcacagttatgtaaaaggcagactgactcttctagctctgatatgcaagcctgttctcaagacaaagccaaaatatctcttggttccagcatagattcagtcagtgaagggcctcttcttagtgaggggagtctctctgaagaagagggagaccaggatggacagccccttttgaaagtagcagaaattttaaaagaaaaggaattttgtcctggagaaagaaatagttatgaacccatcaaagagtttcagaaagaagctgaaaaattcttgccactttttgggcacataggtggtacacaaagcaaaggaccatgggaagaattggcaaagggaagtccacatagcgtcattaatatttttacaaaatcctatcagttatatggaaaagggtttgaagacaagttggacagaggaacatcaacatcacggcctttgaatgccaccgcaactcctctaagtggtgtttcatatgaagatgattttgtctcctctccagggactgggacttcgacagaaaaaaaatcaactcttgaacctcacattcatcaggagcccagtctgctgcatcgtctcgttcatctacttcttctaaaggaaagaaaggaaaaaaggaaaagacagaatggttggattcattcactggaaatgttcagaactcacttcttgatgaggaaaaagcagaacgtggctcccatcaaggaaagaaatctgggaccagcagcaaactttctgttaaagattttgagcagactcttgatacagatagcactttggaggatctttctggacattctgtgagtgtctcatcagataagggaagatctcagaaaactccaacttctcccctgtcaccaagttcccagaaatcattgcagtttgacgttgcaggaacttcttcagaaagatctaagtcgtcagtaatgcctccaactataacaggatttaagcctaatgcacctctcactgatctgaacccggcagccagcagaacaacgacagagaacatggctccaataccaggttctaagcgcttttctcctgctggcctccatcatcgtatggcagcagaactcagttatctgaacgccattgaggagtcggtgcgccaactgtcagatgtagaaagagttagaggcatttcacttgctcagcaggagagtgtgtctctagctcagataataaaggcacaacagcaacgccatgaaagagacttggccctcttgaaactaaaggctgaacaagaggctctggagagtcagagacaattagaagaaacccgaaacaaagcagctcaggtccatgcagaatcattacagcaggtggttcaatcacaacgggaagtaactgaagtcctgcaggaagcaacgtgtaaaatagcagctcagcagtcagaaactgctcgcctcaccacagacgcagcacgtcaaatctgtgagatggcagagttgactagaactcatatctcagatgctgtcgtggcttcaggagctccccttgcaatactgtatgaccaccaacggcagcaccttccagactttgtgaaacagctgaggaccagaactgaaacagataggaaaagtccatctgtttcactctctcagagtaaagaagggacccttgactcaaagcatcagaagtattctgcttcatatgatagttattctgagtcttcaggatacaagaatcatgatagaagaagtagcagtggtagcagccgccaagaaagtccttcagttccatcttgtaaggaaaatgagaagaaacttaatggtgaaaagatagagagttccattgatgaacaggttcagactgctgcagatgattctctacgaagtgatagtgttccatctcttcctgatgaaaaagactcaacgtctattgcaacagaatattctctgaaatttgatgaatccatgacagaagatgaaatagaagaacaatcatttcgatcattactaccttcagagagtcaccgcagatttaacatggaaaagagaagaggtcatcatgatgactctgatgaagaagcttctccagaaaaaactacactgtctactgccaaggaactgaacatgccattctcaggaggacaagatagcttttctaaatttactatggagatggttcgacagtatatgaaagaggaagaaatgagggcagctcaccagtcttcactcctgcgtctccgtgaaaaggccttgaaggagaagactaaggctgaattggcctggttagagcatcaaaaaaaacatctacgagacaaaggagaggatgataaaatgcccccgctccggaagaaacagcgtggtttgcttttaaggttgcagcaagaaaaggcagaaataaaacgtcttcaagaagccaataaggcagctcggaaggaaagacagctgattcttaaacagcaggaggagatagaaaagatccgacagaccaccataaaactacaggagaaattgaagtctgcaggggagagtaaattggactctcatagtgatgatgatacaaaggataataaggcaaccagtcctggtccaactgacttggagacccgcagtccttctcccatttcaatctccagcagtgaaactagcagcattatgcagaaactgaagaaaatgagaagccgcatggatgaaaagtttctgacaaagcgggagcaaaaattaatgcaacggcgacaacatgcagaggagctcctagagtggaagcgacgtttagatgcagaagaagcagaaattcgtcaaatggaaaaacaagctttggctgcctgggacaaagaattaataaaacccaaaactcctaagaaagaactggaggaccagagaacagaacagaaagaaatagcaagtgaagaggaatctccagtacctctgtactctcatctaaacagtgaaagctccattccagaagaattaggcagccctgctgttgaatatgtaccatccgagtctataggacaggagcagccagggagtccagatcacagtatacttactgaagaaatgatttgttcacaggaactagaatcttctacctctcctagtaaacattcacttcccaaaagctgcacatctgtgtcaaagcaggagtctagcaaaggaagtcataggactggaggacaatgtcacctgcctatcaagtcccatcagcactgttatagttggtcagatgagtcattatctatgacacagtcagaaactacatctgaccagagtgatattgaaggtaggatcagagctctgaaggatgagttgcggaaaagaaaatcagttgtgaaccagctgaagaaggaacagaaaaaaaggcaaaaggaaagactgaaagcccaagaagccagtctgatcaagcagttagagtcatatgatgaatttattaagaaaactgaagccgagcttagccaagatttggaaacatcaccaacagccaagcctcagattaaaacgctctcctcagcttctgaaaaacccaagatcaaacccctcacaccactacacagatctgaaacggcaaagaattggaaatcactaacagagtcagaacgttccagaggatccctggagtctattgctgaacatgttgatgcttcactgtctggttctgagagatcagtatcagaaaggtctttatctgcatatgcaaagagagtaaatgaatgggacagtcgaacagaagattttcagaccccatctccagttctcagatcatcaaggaaaatcagagaagaatctggagattctctagaaaatgtacctgcattacatcttctcaaagaattaaatgccactagtagaattcttgatatgtcagatggcaaggttggagaatctagtaaaaaatcagaaataaaagaaatagagtatacaaaattgaagaagagtaagattgaagatgccttttctaaagaaggtaaatctgatgtcttactgaaattagtcctagaacagggagattcatctgaaattctttcaaagaaagatcttcctttagattctgaaaatgttcagaaagacctagttggattagctattgaaaatctccataaaagtgaggaaatgttgaaagagagacagtcagatcaagatatgaatcatagtccaaacatccaatcaggaaaagacattcacgaacaaaagaacacaaaggaaaaagatttgtcttggtcagaacatctttttgctcctaaagagataccatactctgaagattttgaagtgtcttctttcaagaaagaaatttcagctgaattgtacaaagatgattttgaggtgtcatctttgctgtcactcaggaaagactctcagtcttgcagagataagccacagccaatgaggagctctacaagtggagccactagctttggtagtaatgaggaaatcagtgagtgcctaagtgagaaaagcctttctatccatagcaatgttcattctgacaggctgttggaactcaagtcccctactgagctgatgaaaagtaaggagcgcagtgatgtggagcatgaacagcaagttactgaatccccttccttggcttcagttcctactgcagacgagttatttgatttccacattggtgatagggtgttgattggaaatgttcagccaggaattcttcgattcaaaggtgagactagttttgctaaaggattttgggccggagtggagttagataaacctgaaggaaataacaatggaacatatgatggtattgcatattttgagtgcaaagaaaagcatggtatttttgctcctcctcaaaaaatatctcacattccagaaaactttgatgactatgtagacattaatgaagatgaagactgttactcagatgaacgatatcagtgctataatcaagagcaaaatgatacagagggtccaaaagacagagaaaaggatgtcagtgaatatttttatgagaaatccctacctagtgtgaatgatatagaagcctcagttaatagaagtagaagccttaaaatagaaacagacaatgtacaggacatttctggggtacttgaagcccatgttcaccagcagtcttcagtggattcacagatttcttcaaaggaaaacaaagacctcatttctgatgccacagaaaaggtttccatcgctgcagaagatgacactttagacaataccttttccgaagaattggagaagcaacagcagtttacagaagaggaagacaacctatatgctgaagcttcagaaaagctttgtacaccacttctggatcttttaacaagagaaaaaaaccaactggaagcccagctgaagtcatcactaaatgaggaaaaaaagtcaaaacaacaactggaaaaaatcagcttactgacagacagtttactaaaagtctttgtaaaggacacagtcaatcaactacaacaaatcaaaaaaaccagggatgagaaaatccagcttagcaatcaggagcttcttggtgatgaccaaaagaaagtaacaccccaagacctatcccaaaatgttgaggaacagtcgccaagtatttcaggttgcttcttaagttctgaattggaagatgaaaaagaagagatttcctctccagatatgtgtcccagaccggagagcccagtatttggtgccagtgggcaggaagaacttgctaagagacttgctgaacttgaactcagccgggagttcctgagcgcgttaggagatgatcaagactggtttgatgaagactttggtttgagctcttctcacaagatccaaaaaaataaggcagaagaaaccattgtacctctaatggcagaacctaaaagagtaacccaacaaccatgtgaaacattattggcagtcccccatactgcagaagaagtagagattcttgtacataatgcagcagaagaactttggaaatggaaagaattaggccacgatcttcatagcatcagtattcctacaaaactgcttggctgtgccagtaaaggtctagatatagaaagcactagtaaaagggtctacaaacaggcggtttttgatttaacaaaagagatttttgaggaaatatttgctgaggatcccaacttaaatcaacctgtctggatgaagccatgtagaatcaactctagttatttccgacgagtgaaaaatccaaataaccttgatgaaatcaagagcttcatagcaagtgaagtactcaagttgttcagtcttaaaaaggagccaaaccacaaaacagattggcagaaaatgatgaaatttggaagaaagaaaagagaccgagtggatcatatcctggttcaggagctccatgaggaggaggcacagtgggtgaactatgatgaggatgagttgtgtgtgaaaatgcagctagccgacgggatctttgagaccctgatcaaagatactattgatgttctgaatcagatcagtgaaaagcaggggagaatgctacttgtgtgacatcttgcaaataaatcgaacgctgagtgctaatcattgcttctcacaactattacctgcatctgaaaaaaaatctatagactccagctgctacattagagcataagagatgctctcctgggacctcagtaccctgccttcttgactggtttccgttcatcagtcctgtccctcttcaagtaatctagaagaatgtggatactcttaggcgtgaatgtaaatgccttaatattgaaggtcctggttagaagcatgatacaagacatctactggattcatatttacaaatatcctggaatgttatagcttcaaagtatattagaaaaaccccaaagatggtataatctttaagtgtgcacgttcgtttatttctgcatcttccctccaaacttgcctttgcatcttaaatatttcactatgcacactcccattcctcttgggtttcatcttgtcgtttaagaaatgtactgaaataatcattggaatatttgcattttgcacaatgactggtatgatagctcttgacaaataaggaaagcactgaaatgttgtgattgggtctcgggaaatgctcagattgatgtcttaccagcatttcttctgggcttgtgatgttgagctgtagtcttgtagccataatgagcaaattgactaagagaagcaaaggtttcttggggttattaaccagtagtgtggaaatactagttttatgtggccaaggaaaagcaaaggcttttcttttcagtttgtgttatttggaagacagaaaaacatcttgtctacatcctttggctgtttgtaggatcacgttgtccttacgatactgaaactttacagctgctgtaaattttttataaatgaatttcaaaatgttataatgggactgtaggttgtttttctacatcttcattatttggacctaaaaccagtttttaataagaaagtttatctttactctttctgaaattatgactccagaaaaagaaaaaaaaaatacaagtcatggaatcagcaatctggtaagaaatgctgccaagaatgtggcagtagctgtcctgacagactccaactgtctttactatctgaagaatcctaggctccacatgagaggcagaaatggatcagtcttattcttttctagaaatggttatctgtagtttggtagcaaaaaaaaagaaaaaagaatccataattagcagatttcttattaactatttggatctaattgaaatggctttattcttaggattaagaaagatagatgtggatacccagccactcgttccatattggtatctttttaaatcagctctgcctcttaatcaagaacctaaatattccctctttctaatctttgttccttctccctacaccctcatcctctttcactcttccttcataattcctctaagaaaaatatctttgcatcagcagtaatatcttttagaatagcactatcagaatttagcagtaaaccaacatacaggcttcagatttacttctgagtccaaaacaatttgtgctatccagggtagttaactctgggttaaacaagtacagggtatagattccctcttcaggtctacacaggaatttttaccatagggaaaagtggggagagctcaaacgtagttaataaggaaggtaatttgtttttcttttacctaaaagaaaagaaaattccttctgtgactacaggtctctgagaaattatctttcaaaagagatttcattgctcataagagtgttgtggcctattgataaaaacaattttgttcagtttcttgtcttgaaaaaaaagtggccttagctttttgcaatacttgaataaagtgtgtactcgcaaaagaatttctgtagcacagcattagagactcataacttttctgcaagaaatacaaacttacatcttccttttactaccttaagaatactagtgaataaaacattaattcaaagagcaaattatagaaactacaatgacatttaatgcaaattgtaggaatttacatgtttacaaatcatcttcaactggttgtgcagcaattcaataaaatatctttgtattataaaaatgtgaagaaaaaatgtaaactgatgtaaaggaggtactgtcattttaattaacctatgtttaatagcttttccttctggactttgcaaagccttcttggcaaacacattgcaaagcattctctgggaggttcagcctccttgtgtgtactgtactgtgcagacatgaaaaaataaacccgtttactgtgtgcgtgtaaatagcctggtcatcaggccattttcagccaatagtcacatccagtgcaattttgcaccgaacacttaagggtgtggtttgtaagtacgatctgtaaaataactgggatgaattcccatgtatacctgtgtaaatagatttgttaactgaaatatactttaagaaagataaaatctgtaaataaactgatttataaattaa

SEQ ID NO: 324308 - DNA, 6350 bp, Homo sapiens
ctttacgtctcatcactgggcctctctcagtgtctgttttcccaaccttcatcccaaattccagctgtatatctacaaccagttggtcaggtttctgacaaagcgggagcaaaaattaatgcaacggcgacaacatgcagaggagctcctagagtggaagcgacgtttagatgcagaagaagcagaaattcgtcaaatggaaaaacaagctttggctgcctgggacaaagaattaataaaacccaaaactcctaagaaagaactggaggaccagagaacagaacagaaagaaatagcaagtgaagaggaatctccagtacctctgtactctcatctaaacagtgaaagctccattccagaagaattaggcagccctgctgttgaatatgtaccatccgagtctataggacaggagcagccagggagtccagatcacagtatacttactgaagaaatgatttgttcacaggaactagaatcttctacctctcctagtaaacattcacttcccaaaagctgcacatctgtgtcaaagcaggagtctagcaaaggaagtcataggactggaggacaatgtcacctgcctatcaagtcccatcagcactgttatagttggtcagatgagtcattatctatgacacagtcagaaactacatctgaccagagtgatattgaaggtaggatcagagctctgaaggatgagttgcggaaaagaaaatcagttgtgaaccagctgaagaaggaacagaaaaaaaggcaaaaggaaagactgaaagcccaagaagccagtctgatcaagcagttagagtcatatgatgaatttattaagaaaactgaagccgagcttagccaagatttggaaacatcaccaacagccaagcctcagattaaaacgctctcctcagcttctgaaaaacccaagatcaaacccctcacaccactacacagatctgaaacggcaaagaattggaaatcactaacagagtcagaacgttccagaggatccctggagtctattgctgaacatgttgatgcttcactgtctggttctgagagatcagtatcagaaaggtctttatctgcatatgcaaagagagtaaatgaatgggacagtcgaacagaagattttcagaccccatctccagttctcagatcatcaaggaaaatcagagaagaatctggagattctctagaaaatgtacctgcattacatcttctcaaagaattaaatgccactagtagaattcttgatatgtcagatggcaaggttggagaatctagtaaaaaatcagaaataaaagaaatagagtatacaaaattgaagaagagtaagattgaagatgccttttctaaagaaggtaaatctgatgtcttactgaaattagtcctagaacagggagattcatctgaaattctttcaaagaaagatcttcctttagattctgaaaatgttcagaaagacctagttggattagctattgaaaatctccataaaagtgaggaaatgttgaaagagagacagtcagatcaagatatgaatcatagtccaaacatccaatcaggaaaagacattcacgaacaaaagaacacaaaggaaaaagatttgtcttggtcagaacatctttttgctcctaaagagataccatactctgaagattttgaagtgtcttctttcaagaaagaaatttcagctgaattgtacaaagatgattttgaggtgtcatctttgctgtcactcaggaaagactctcagtcttgcagagataagccacagccaatgaggagctctacaagtggagccactagctttggtagtaatgaggaaatcagtgagtgcctaagtgagaaaagcctttctatccatagcaatgttcattctgacaggctgttggaactcaagtcccctactgagctgatgaaaagtaaggagcgcagtgatgtggagcatgaacagcaagttactgaatccccttccttggcttcagttcctactgcagacgagttatttgatttccacattggtgatagggtgttgattggaaatgttcagccaggaattcttcgattcaaaggtgagactagttttgctaaaggattttgggccggagtggagttagataaacctgaaggaaataacaatggaacatatgatggtattgcatattttgagtgcaaagaaaagcatggtatttttgctcctcctcaaaaaatatctcacattccagaaaactttgatgactatgtagacattaatgaagatgaagactgttactcagatgaacgatatcagtgctataatcaagagcaaaatgatacagagggtccaaaagacagagaaaaggatgtcagtgaatatttttatgagaaatccctacctagtgtgaatgatatagaagcctcagttaatagaagtagaagccttaaaatagaaacagacaatgtacaggacatttctggggtacttgaagcccatgttcaccagcagtcttcagtggattcacagatttcttcaaaggaaaacaaagacctcatttctgatgccacagaaaaggtttccatcgctgcagaagatgacactttagacaataccttttccgaagaattggagaagcaacagcagtttacagaagaggaagacaacctatatgctgaagcttcagaaaagctttgtacaccacttctggatcttttaacaagagaaaaaaaccaactggaagcccagctgaagtcatcactaaatgaggaaaaaaagtcaaaacaacaactggaaaaaatcagcttactgacagacagtttactaaaagtctttgtaaaggacacagtcaatcaactacaacaaatcaaaaaaaccagggatgagaaaatccagcttagcaatcaggagcttcttggtgatgaccaaaagaaagtaacaccccaagacctatcccaaaatgttgaggaacagtcgccaagtatttcaggttgcttcttaagttctgaattggaagatgaaaaagaagagatttcctctccagatatgtgtcccagaccggagagcccagtatttggtgccagtgggcaggaagaacttgctaagagacttgctgaacttgaactcagccgggagttcctgagcgcgttaggagatgatcaagactggtttgatgaagactttggtttgagctcttctcacaagatccaaaaaaataaggcagaagaaaccattgtacctctaatggcagaacctaaaagagtaacccaacaaccatgtgaaacattattggcagtcccccatactgcagaagaagtagagattcttgtacataatgcagcagaagaactttggaaatggaaagaattaggccacgatcttcatagcatcagtattcctacaaaactgcttggctgtgccagtaaaggtctagatatagaaagcactagtaaaagggtctacaaacaggcggtttttgatttaacaaaagagatttttgaggaaatatttgctgaggatcccaacttaaatcaacctgtctggatgaagccatgtagaatcaactctagttatttccgacgagtgaaaaatccaaataaccttgatgaaatcaagagcttcatagcaagtgaagtactcaagttgttcagtcttaaaaaggagccaaaccacaaaacagattggcagaaaatgatgaaatttggaagaaagaaaagagaccgagtggatcatatcctggttcaggagctccatgaggaggaggcacagtgggtgaactatgatgaggatgagttgtgtgtgaaaatgcagctagccgacgggatctttgagaccctgatcaaagatactattgatgttctgaatcagatcagtgaaaagcaggggagaatgctacttgtgtgacatcttgcaaataaatcgaacgctgagtgctaatcattgcttctcacaactattacctgcatctgaaaaaaaatctatagactccagctgctacattagagcataagagatgctctcctgggacctcagtaccctgccttcttgactggtttccgttcatcagtcctgtccctcttcaagtaatctagaagaatgtggatactcttaggcgtgaatgtaaatgccttaatattgaaggtcctggttagaagcatgatacaagacatctactggattcatatttacaaatatcctggaatgttatagcttcaaagtatattagaaaaaccccaaagatggtataatctttaagtgtgcacgttcgtttatttctgcatcttccctccaaacttgcctttgcatcttaaatatttcactatgcacactcccattcctcttgggtttcatcttgtcgtttaagaaatgtactgaaataatcattggaatatttgcattttgcacaatgactggtatgatagctcttgacaaataaggaaagcactgaaatgttgtgattgggtctcgggaaatgctcagattgatgtcttaccagcatttcttctgggcttgtgatgttgagctgtagtcttgtagccataatgagcaaattgactaagagaagcaaaggtttcttggggttattaaccagtagtgtggaaatactagttttatgtggccaaggaaaagcaaaggcttttcttttcagtttgtgttatttggaagacagaaaaacatcttgtctacatcctttggctgtttgtaggatcacgttgtccttacgatactgaaactttacagctgctgtaaattttttataaatgaatttcaaaatgttataatgggactgtaggttgtttttctacatcttcattatttggacctaaaaccagtttttaataagaaagtttatctttactctttctgaaattatgactccagaaaaagaaaaaaaaaatacaagtcatggaatcagcaatctggtaagaaatgctgccaagaatgtggcagtagctgtcctgacagactccaactgtctttactatctgaagaatcctaggctccacatgagaggcagaaatggatcagtcttattcttttctagaaatggttatctgtagtttggtagcaaaaaaaaagaaaaaagaatccataattagcagatttcttattaactatttggatctaattgaaatggctttattcttaggattaagaaagatagatgtggatacccagccactcgttccatattggtatctttttaaatcagctctgcctcttaatcaagaacctaaatattccctctttctaatctttgttccttctccctacaccctcatcctctttcactcttccttcataattcctctaagaaaaatatctttgcatcagcagtaatatcttttagaatagcactatcagaatttagcagtaaaccaacatacaggcttcagatttacttctgagtccaaaacaatttgtgctatccagggtagttaactctgggttaaacaagtacagggtatagattccctcttcaggtctacacaggaatttttaccatagggaaaagtggggagagctcaaacgtagttaataaggaaggtaatttgtttttcttttacctaaaagaaaagaaaattccttctgtgactacaggtctctgagaaattatctttcaaaagagatttcattgctcataagagtgttgtggcctattgataaaaacaattttgttcagtttcttgtcttgaaaaaaaagtggccttagctttttgcaatacttgaataaagtgtgtactcgcaaaagaatttctgtagcacagcattagagactcataacttttctgcaagaaatacaaacttacatcttccttttactaccttaagaatactagtgaataaaacattaattcaaagagcaaattatagaaactacaatgacatttaatgcaaattgtaggaatttacatgtttacaaatcatcttcaactggttgtgcagcaattcaataaaatatctttgtattataaaaatgtgaagaaaaaatgtaaactgatgtaaaggaggtactgtcattttaattaacctatgtttaatagcttttccttctggactttgcaaagccttcttggcaaacacattgcaaagcattctctgggaggttcagcctccttgtgtgtactgtactgtgcagacatgaaaaaataaacccgtttactgtgtgcgtgtaaatagcctggtcatcaggccattttcagccaatagtcacatccagtgcaattttgcaccgaacacttaagggtgtggtttgtaagtacgatctgtaaaataactgggatgaattcccatgtatacctgtgtaaatagatttgttaactgaaatatactttaagaaagataaaatctgtaaataaactgatttataaattaa

SEQ ID NO: 324309 - DNA, 5896 bp, Homo sapiens
attgtagaatcagattgaatctcctactcattgcaagaatcccttctcatctcatcaccagagaacatcattcaacttctacctgaacacttccagtaataggaattttcaaaatttcaagctaattggtttccttgttagactctaagtgctctaagtattagaagagctctttgttgtatttagccaaaatttctgtccttttaatttccacccattggtccttgttgtgtaacagcaaacacatgcttctcctactgttattaatttaatcatcaaatattcaaatgcctatttatgtgccaggagctcagctaattacacatatttttcatttaatcctcacaacaaggttcatatgatgaatttattaagaaaactgaagccgagcttagccaagatttggaaacatcaccaacagccaagcctcagattaaaacgctctcctcagcttctgaaaaacccaagatcaaacccctcacaccactacacagatctgaaacggcaaagaattggaaatcactaacagagtcagaacgttccagaggatccctggagtctattgctgaacatgttgatgcttcactgtctggttctgagagatcagtatcagaaaggtctttatctgcatatgcaaagagagtaaatgaatgggacagtcgaacagaagattttcagaccccatctccagttctcagatcatcaaggaaaatcagagaagaatctggagattctctagaaaatgtacctgcattacatcttctcaaagaattaaatgccactagtagaattcttgatatgtcagatggcaaggttggagaatctagtaaaaaatcagaaataaaagaaatagagtatacaaaattgaagaagagtaagattgaagatgccttttctaaagaaggtaaatctgatgtcttactgaaattagtcctagaacagggagattcatctgaaattctttcaaagaaagatcttcctttagattctgaaaatgttcagaaagacctagttggattagctattgaaaatctccataaaagtgaggaaatgttgaaagagagacagtcagatcaagatatgaatcatagtccaaacatccaatcaggaaaagacattcacgaacaaaagaacacaaaggaaaaagatttgtcttggtcagaacatctttttgctcctaaagagataccatactctgaagattttgaagtgtcttctttcaagaaagaaatttcagctgaattgtacaaagatgattttgaggtgtcatctttgctgtcactcaggaaagactctcagtcttgcagagataagccacagccaatgaggagctctacaagtggagccactagctttggtagtaatgaggaaatcagtgagtgcctaagtgagaaaagcctttctatccatagcaatgttcattctgacaggctgttggaactcaagtcccctactgagctgatgaaaagtaaggagcgcagtgatgtggagcatgaacagcaagttactgaatccccttccttggcttcagttcctactgcagacgagttatttgatttccacattggtgatagggtgttgattggaaatgttcagccaggaattcttcgattcaaaggtgagactagttttgctaaaggattttgggccggagtggagttagataaacctgaaggaaataacaatggaacatatgatggtattgcatattttgagtgcaaagaaaagcatggtatttttgctcctcctcaaaaaatatctcacattccagaaaactttgatgactatgtagacattaatgaagatgaagactgttactcagatgaacgatatcagtgctataatcaagagcaaaatgatacagagggtccaaaagacagagaaaaggatgtcagtgaatatttttatgagaaatccctacctagtgtgaatgatatagaagcctcagttaatagaagtagaagccttaaaatagaaacagacaatgtacaggacatttctggggtacttgaagcccatgttcaccagcagtcttcagtggattcacagatttcttcaaaggaaaacaaagacctcatttctgatgccacagaaaaggtttccatcgctgcagaagatgacactttagacaataccttttccgaagaattggagaagcaacagcagtttacagaagaggaagacaacctatatgctgaagcttcagaaaagctttgtacaccacttctggatcttttaacaagagaaaaaaaccaactggaagcccagctgaagtcatcactaaatgaggaaaaaaagtcaaaacaacaactggaaaaaatcagcttactgacagacagtttactaaaagtctttgtaaaggacacagtcaatcaactacaacaaatcaaaaaaaccagggatgagaaaatccagcttagcaatcaggagcttcttggtgatgaccaaaagaaagtaacaccccaagacctatcccaaaatgttgaggaacagtcgccaagtatttcaggttgcttcttaagttctgaattggaagatgaaaaagaagagatttcctctccagatatgtgtcccagaccggagagcccagtatttggtgccagtgggcaggaagaacttgctaagagacttgctgaacttgaactcagccgggagttcctgagcgcgttaggagatgatcaagactggtttgatgaagactttggtttgagctcttctcacaagatccaaaaaaataaggcagaagaaaccattgtacctctaatggcagaacctaaaagagtaacccaacaaccatgtgaaacattattggcagtcccccatactgcagaagaagtagagattcttgtacataatgcagcagaagaactttggaaatggaaagaattaggccacgatcttcatagcatcagtattcctacaaaactgcttggctgtgccagtaaaggtctagatatagaaagcactagtaaaagggtctacaaacaggcggtttttgatttaacaaaagagatttttgaggaaatatttgctgaggatcccaacttaaatcaacctgtctggatgaagccatgtagaatcaactctagttatttccgacgagtgaaaaatccaaataaccttgatgaaatcaagagcttcatagcaagtgaagtactcaagttgttcagtcttaaaaaggagccaaaccacaaaacagattggcagaaaatgatgaaatttggaagaaagaaaagagaccgagtggatcatatcctggttcaggagctccatgaggaggaggcacagtgggtgaactatgatgaggatgagttgtgtgtgaaaatgcagctagccgacgggatctttgagaccctgatcaaagatactattgatgttctgaatcagatcagtgaaaagcaggggagaatgctacttgtgtgacatcttgcaaataaatcgaacgctgagtgctaatcattgcttctcacaactattacctgcatctgaaaaaaaatctatagactccagctgctacattagagcataagagatgctctcctgggacctcagtaccctgccttcttgactggtttccgttcatcagtcctgtccctcttcaagtaatctagaagaatgtggatactcttaggcgtgaatgtaaatgccttaatattgaaggtcctggttagaagcatgatacaagacatctactggattcatatttacaaatatcctggaatgttatagcttcaaagtatattagaaaaaccccaaagatggtataatctttaagtgtgcacgttcgtttatttctgcatcttccctccaaacttgcctttgcatcttaaatatttcactatgcacactcccattcctcttgggtttcatcttgtcgtttaagaaatgtactgaaataatcattggaatatttgcattttgcacaatgactggtatgatagctcttgacaaataaggaaagcactgaaatgttgtgattgggtctcgggaaatgctcagattgatgtcttaccagcatttcttctgggcttgtgatgttgagctgtagtcttgtagccataatgagcaaattgactaagagaagcaaaggtttcttggggttattaaccagtagtgtggaaatactagttttatgtggccaaggaaaagcaaaggcttttcttttcagtttgtgttatttggaagacagaaaaacatcttgtctacatcctttggctgtttgtaggatcacgttgtccttacgatactgaaactttacagctgctgtaaattttttataaatgaatttcaaaatgttataatgggactgtaggttgtttttctacatcttcattatttggacctaaaaccagtttttaataagaaagtttatctttactctttctgaaattatgactccagaaaaagaaaaaaaaaatacaagtcatggaatcagcaatctggtaagaaatgctgccaagaatgtggcagtagctgtcctgacagactccaactgtctttactatctgaagaatcctaggctccacatgagaggcagaaatggatcagtcttattcttttctagaaatggttatctgtagtttggtagcaaaaaaaaagaaaaaagaatccataattagcagatttcttattaactatttggatctaattgaaatggctttattcttaggattaagaaagatagatgtggatacccagccactcgttccatattggtatctttttaaatcagctctgcctcttaatcaagaacctaaatattccctctttctaatctttgttccttctccctacaccctcatcctctttcactcttccttcataattcctctaagaaaaatatctttgcatcagcagtaatatcttttagaatagcactatcagaatttagcagtaaaccaacatacaggcttcagatttacttctgagtccaaaacaatttgtgctatccagggtagttaactctgggttaaacaagtacagggtatagattccctcttcaggtctacacaggaatttttaccatagggaaaagtggggagagctcaaacgtagttaataaggaaggtaatttgtttttcttttacctaaaagaaaagaaaattccttctgtgactacaggtctctgagaaattatctttcaaaagagatttcattgctcataagagtgttgtggcctattgataaaaacaattttgttcagtttcttgtcttgaaaaaaaagtggccttagctttttgcaatacttgaataaagtgtgtactcgcaaaagaatttctgtagcacagcattagagactcataacttttctgcaagaaatacaaacttacatcttccttttactaccttaagaatactagtgaataaaacattaattcaaagagcaaattatagaaactacaatgacatttaatgcaaattgtaggaatttacatgtttacaaatcatcttcaactggttgtgcagcaattcaataaaatatctttgtattataaaaatgtgaagaaaaaatgtaaactgatgtaaaggaggtactgtcattttaattaacctatgtttaatagcttttccttctggactttgcaaagccttcttggcaaacacattgcaaagcattctctgggaggttcagcctccttgtgtgtactgtactgtgcagacatgaaaaaataaacccgtttactgtgtgcgtgtaaatagcctggtcatcaggccattttcagccaatagtcacatccagtgcaattttgcaccgaacacttaagggtgtggtttgtaagtacgatctgtaaaataactgggatgaattcccatgtatacctgtgtaaatagatttgttaactgaaatatactttaagaaagataaaatctgtaaataaactgatttataaattaa

SEQ ID NO: 324310 - DNA, 4611 bp, Homo sapiens
acagttgagcaaaagtaatgactttgagtaacttgagccagatggtcaccagaggagagcccagtatttggtgccagtgggcaggaagaacttgctaagagacttgctgaacttgaactcagccgggagttcctgagcgcgttaggagatgatcaagactggtttgatgaagactttggtttgagctcttctcacaagatccaaaaaaataaggcagaagaaaccattgtacctctaatggcagaacctaaaagagtaacccaacaaccatgtgaaacattattggcagtcccccatactgcagaagaagtagagattcttgtacataatgcagcagaagaactttggaaatggaaagaattaggccacgatcttcatagcatcagtattcctacaaaactgcttggctgtgccagtaaaggtctagatatagaaagcactagtaaaagggtctacaaacaggcggtttttgatttaacaaaagagatttttgaggaaatatttgctgaggatcccaacttaaatcaacctgtctggatgaagccatgtagaatcaactctagttatttccgacgagtgaaaaatccaaataaccttgatgaaatcaagagcttcatagcaagtgaagtactcaagttgttcagtcttaaaaaggagccaaaccacaaaacagattggcagaaaatgatgaaatttggaagaaagaaaagagaccgagtggatcatatcctggttcaggagctccatgaggaggaggcacagtgggtgaactatgatgaggatgagttgtgtgtgaaaatgcagctagccgacgggatctttgagaccctgatcaaagatactattgatgttctgaatcagatcagtgaaaagcaggggagaatgctacttgtgtgacatcttgcaaataaatcgaacgctgagtgctaatgtgagtcctgggcctttctgcctcctgatgtacacccatcgccatcatagcaagagtgcttctggaccttgtacttattcttaaagactaccagtatggagttcataggacaatgtggtacacctggtattacagcctttgcctttcgagactatccactggattaatgggttattttcagtgggcagggttgcacagtgtaatcctacaccttttgctaacacccctactaggtcccagagggccagaaacacctgacttacctctgagtttagactagggtatcacttctttgagtctgaagtcaagtgagagaggtatagataaatgcatcacatcacttttgaaatgtaattctggtctataccatggaagtcataaatggacattatagtctctaaacagtattaaacccttaaccacttctaaaataggcaagctcaataatgtctgccaacttcacattctggagtttatttcatttctttttgaagaccattttcttccattattgtagttgagcagcaccaagtggactgtcaggctaacaggaataagtggtagccttgctttctgagcaccatctaaagaattttaaacctctgcattatgtttagtgttctctgtgtgggcatgaaaacaaagaaatgcccctactgaagactgggctcaaaggaccaatgcagggctggttcttttaccccttggtttactcctgcacttgtcttactcattctgaatctctaccagctgctcccagaatcacagatactcaggaccatctcaggcatccaggcatggcaaagtggaaataattcattttggcctgcaaaccttcaactcccatctttccccaagaagtcagagatgctgttacttgaatgatttaggaaatgagtgtgtgcaccaaagacaaaaagatattgtctattgtttgtgtgcttgttttgcgctatggaacattttttaatttattttaagataaattattaagttgaaaatgtgtgtccctattcagaagtgaaagattcatcttgtaatagttaaacctccatcttgaagcttctatggttcatagtctttgcacaggaacctgtggttttaacaaaccaatacacatattgaagaagtcattttaattcagtgaaacgaagatgggcttttccagatcacctgcaatagcagcagtgggataaaatgatttaaaaacactgtacaatttaactctgcctctcttgcagcattgcttctcacaactattacctgcatctgaaaaaaaatctatagactccagctgctacattagagcataagagatgctctcctgggacctcagtaccctgccttcttgactggtttccgttcatcagtcctgtccctcttcaagtaatctagaagaatgtggatactcttaggcgtgaatgtaaatgccttaatattgaaggtcctggttagaagcatgatacaagacatctactggattcatatttacaaatatcctggaatgttatagcttcaaagtatattagaaaaaccccaaagatggtataatctttaagtgtgcacgttcgtttatttctgcatcttccctccaaacttgcctttgcatcttaaatatttcactatgcacactcccattcctcttgggtttcatcttgtcgtttaagaaatgtactgaaataatcattggaatatttgcattttgcacaatgactggtatgatagctcttgacaaataaggaaagcactgaaatgttgtgattgggtctcgggaaatgctcagattgatgtcttaccagcatttcttctgggcttgtgatgttgagctgtagtcttgtagccataatgagcaaattgactaagagaagcaaaggtttcttggggttattaaccagtagtgtggaaatactagttttatgtggccaaggaaaagcaaaggcttttcttttcagtttgtgttatttggaagacagaaaaacatcttgtctacatcctttggctgtttgtaggatcacgttgtccttacgatactgaaactttacagctgctgtaaattttttataaatgaatttcaaaatgttataatgggactgtaggttgtttttctacatcttcattatttggacctaaaaccagtttttaataagaaagtttatctttactctttctgaaattatgactccagaaaaagaaaaaaaaaatacaagtcatggaatcagcaatctggtaagaaatgctgccaagaatgtggcagtagctgtcctgacagactccaactgtctttactatctgaagaatcctaggctccacatgagaggcagaaatggatcagtcttattcttttctagaaatggttatctgtagtttggtagcaaaaaaaaagaaaaaagaatccataattagcagatttcttattaactatttggatctaattgaaatggctttattcttaggattaagaaagatagatgtggatacccagccactcgttccatattggtatctttttaaatcagctctgcctcttaatcaagaacctaaatattccctctttctaatctttgttccttctccctacaccctcatcctctttcactcttccttcataattcctctaagaaaaatatctttgcatcagcagtaatatcttttagaatagcactatcagaatttagcagtaaaccaacatacaggcttcagatttacttctgagtccaaaacaatttgtgctatccagggtagttaactctgggttaaacaagtacagggtatagattccctcttcaggtctacacaggaatttttaccatagggaaaagtggggagagctcaaacgtagttaataaggaaggtaatttgtttttcttttacctaaaagaaaagaaaattccttctgtgactacaggtctctgagaaattatctttcaaaagagatttcattgctcataagagtgttgtggcctattgataaaaacaattttgttcagtttcttgtcttgaaaaaaaagtggccttagctttttgcaatacttgaataaagtgtgtactcgcaaaagaatttctgtagcacagcattagagactcataacttttctgcaagaaatacaaacttacatcttccttttactaccttaagaatactagtgaataaaacattaattcaaagagcaaattatagaaactacaatgacatttaatgcaaattgtaggaatttacatgtttacaaatcatcttcaactggttgtgcagcaattcaataaaatatctttgtattataaaaatgtgaagaaaaaatgtaaactgatgtaaaggaggtactgtcattttaattaacctatgtttaatagcttttccttctggactttgcaaagccttcttggcaaacacattgcaaagcattctctgggaggttcagcctccttgtgtgtactgtactgtgcagacatgaaaaaataaacccgtttactgtgtgcgtgtaaatagcctggtcatcaggccattttcagccaatagtcacatccagtgcaattttgcaccgaacacttaagggtgtggtttgtaagtacgatctgtaaaataactgggatgaattcccatgtatacctgtgtaaatagatttgttaactgaaatatactttaagaaagataaaatctgtaaataaactgatttataaattaa

SEQ ID NO: 324311 - DNA, 2180 bp, Homo sapiens
agcggccgctcgcgatctagaactagtccaaaaaccccaaagatggtataatctttaagtgtgcacgttcgtttatttctgcatcttccctccaaacttgcctttgcatcttaaatatttcactatgcacactcccattcctcttgggtttcatcttgtcgtttaagaaatgtactgaaataatcattggaatatttgcattttgcacaatgactggtatgatagctcttgacaaataaggaaagcactgaaatgttgtgattgggtctcgggaaatgctcagattgatgtcttaccagcatttcttctgggcttgtgatgttgagctgtagtcttgtagccataatgagcaaattgactaagagaagcaaaggtttcttggggttattaaccagtagtgtggaaatactagttttatgtggccaaggaaaagcaaaggcttttcttttcagtttgtgttatttggaagacagaaaaacatcttgtctacatcctttggctgtttgtaggatcacgttgtccttacgatactgaaactttacagctgctgtaaattttttataaatgaatttcaaaatgttataatgggactgtaggttgtttttctacatcttcattatttggacctaaaaccagtttttaataagaaagtttatctttactctttctgaaattatgactccagaaaaagaaaaaaaaaatacaagtcatggaatcagcaatctggtaagaaatgctgccaagaatgtggcagtagctgtcctgacagactccaactgtctttactatctgaagaatcctaggctccacatgagaggcagaaatggatcagtcttattcttttctagaaatggttatctgtagtttggtagcaaaaaaaaagaaaaaagaatccataattagcagatttcttattaactatttggatctaattgaaatggctttattcttaggattaagaaagatagatgtggatacccagccactcgttccatattggtatctttttaaatcagctctgcctcttaatcaagaacctaaatattccctctttctaatctttgttccttctccctacaccctcatcctctttcactcttccttcataattcctctaagaaaaatatctttgcatcagcagtaatatcttttagaatagcactatcagaatttagcagtaaaccaacatacaggcttcagatttacttctgagtccaaaacaatttgtgctatccagggtagttaactctgggttaaacaagtacagggtatagattccctcttcaggtctacacaggaatttttaccatagggaaaagtggggagagctcaaacgtagttaataaggaaggtaatttgtttttcttttacctaaaagaaaagaaaattccttctgtgactacaggtctctgagaaattatctttcaaaagagatttcattgctcataagagtgttgtggcctattgataaaaacaattttgttcagtttcttgtcttgaaaaaaaagtggccttagctttttgcaatacttgaataaagtgtgtactcgcaaaagaatttctgtagcacagcattagagactcataacttttctgcaagaaatacaaacttacatcttccttttactaccttaagaatactagtgaataaaacattaattcaaagagcaaattatagaaactacaatgacatttaatgcaaattgtaggaatttacatgtttacaaatcatcttcaactggttgtgcagcaattcaataaaatatctttgtattataaaaatgtgaagaaaaaatgtaaactgatgtaaaggaggtactgtcattttaattaacctatgtttaatagcttttccttctggactttgcaaagccttcttggcaaacacattgcaaagcattctctgggaggttcagcctccttgtgtgtactgtactgtgcagacatgaaaaaataaacccgtttactgtgtgcgtgtaaatagcctggtcatcaggccattttcagccaatagtcacatccagtgcaattttgcaccgaacacttaagggtgtggtttgtaagtacgatctgtaaaataactgggatgaattcccatgtatacctgtgtaaatagatttgttaactgaaatatactttaagaaagataaaatctgtaaataaactgatttataaattaa

SEQ ID NO: 324312 - DNA, 3687 bp, Homo sapiens
tgttaatgaagaaaagactgagagcggtaactggatgataggcaatcttagtgaatttaaaaagcttcctgagatgataagaccacagagtgccatatcaagctttagagtgagatcccctggtcccaaaccagaagggctactggcacagttatgtaaaaggcagactgactcttctagctctgatatgcaagcctgttctcaagacaaagccaaaatatctcttggttccagcatagattcagtcagtgaagggcctcttcttagtgaggggagtctctctgaagaagagggagaccaggatggacagccccttttgaaagtagcagaaattttaaaagaaaaggaattttgtcctggagaaagaaatagttatgaacccatcaaagagtttcagaaagaagctgaaaaattcttgccactttttgggcacataggtggtacacaaagcaaaggaccatgggaagaattggcaaagggaagtccacatagcgtcattaatatttttacaaaatcctatcagttatatggaaaagggtttgaagacaagttggacagaggaacatcaacatcacggcctttgaatgccaccgcaactcctctaagtggtgtttcatatgaagatgattttgtctcctctccagggactgggacttcgacagaaaaaaaatcaactcttgaacctcatagcactttaagccctcaggaggaccattctaacagaaagtctgcctatgatccttcctctgtggatgttacctcccagcattcatcaggagcccagtctgctgcatcgtctcgttcatctacttcttctaaaggaaagaaaggaaaaaaggaaaagacagaatggttggattcattcactggaaatgttcagaactcacttcttgatgaggaaaaagcagaacgtggctcccatcaaggaaagaaatctgggaccagcagcaaactttctgttaaagattttgagcagactcttgatacagatagcactttggaggatctttctggacattctgtgagtgtctcatcagataagggaagatctcagaaaactccaacttctcccctgtcaccaagttcccagaaatcattgcagtttgacgttgcaggaacttcttcagaaagatctaagtcgtcagtaatgcctccaactataacaggatttaagcctaatgcacctctcactgatctgaacccggcagccagcagaacaacgacagagaacatggctccaataccaggttctaagcgcttttctcctgctggcctccatcatcgtatggcagcagaactcagttatctgaacgccattgaggagtcggtgcgccaactgtcagatgtagaaagagttagaggcatttcacttgctcagcaggagagtgtgtctctagctcagataataaaggcacaacagcaacgccatgaaagagacttggccctcttgaaactaaaggctgaacaagaggctctggagagtcagagacaattagaagaaacccgaaacaaagcagctcaggtccatgcagaatcattacagcaggtggttcaatcacaacgggaagtaactgaagtcctgcaggaagcaacgtgtaaaatagcagctcagcagtcagaaactgctcgcctcaccacagacgcagcacgtcaaatctgtgagatggcagagttgactagaactcatatctcagatgctgtcgtggcttcaggagctccccttgcaatactgtatgaccaccaacggcagcaccttccagactttgtgaaacagctgaggaccagaactgaaacagataggaaaagtccatctgtttcactctctcagagtaaagaagggacccttgactcaaagcatcagaagtattctgcttcatatgatagttattctgagtcttcaggatacaagaatcatgatagaagaagtagcagtggtagcagccgccaagaaagtccttcagttccatcttgtaaggaaaatgagaagaaacttaatggtgaaaagatagagagttccattgatgaacaggttcagactgctgcagatgattctctacgaagtgatagtgttccatctcttcctgatgaaaaagactcaacgtctattgcaacagaatattctctgaaatttgatgaatccatgacagaagatgaaatagaagaacaatcatttcgatcattactaccttcagagagtcaccgcagatttaacatggaaaagagaagaggtcatcatgatgactctgatgaagaagcttctccagaaaaaactacactgtctactgccaaggaactgaacatgccattctcaggaggacaagatagcttttctaaatttactatggagatggttcgacagtatatgaaagaggaagaaatgagggcagctcaccagtcttcactcctgcgtctccgtgaaaaggccttgaaggagaagactaaggctgaattggcctggttagagcatcaaaaaaaacatctacgagacaaaggagaggatgataaaatgcccccgctccggaagaaacagcgtggtttgcttttaaggttgcagcaagaaaaggcagaaataaaacgtcttcaagaagccaataaggcagctcggaaggaaagacagctgattcttaaacagcaggaggagatagaaaagatccgacagaccaccataaaactacaggagaaattgaagtctgcaggggagagtaaattggactctcatagtgatgatgatacaaaggataataaggcaaccagtcctggtccaactgacttggagacccgcagtccttctcccatttcaatctccagcagtgaaactagcagcattatgcagaaactgaagaaaatgagaagccgcatggatgaaaagtttctgacaaagcgggagcaaaaattaatgcaacggcgacaacatgcagaggagctcctagagtggaagcgacgtttagatgcagaagaagcagaaattcgtcaaatggaaaaacaagctttggctgcctgggacaaagaattaataaaacccaaaactcctaagaaagaactggaggaccagagaacagaacagaaagaaatagcaagtgaagaggaatctccagtacctctgtactctcatctaaacagtgaaagctccattccagaagaattaggcagccctgctgttgaatatgtaccatccgagtctataggacaggagcagccagggagtccagatcacagtatacttactgaagaaatgatttgttcacaggaactagaatcttctacctctcctagtaaacattcacttcccaaaagctgcacatctgtgtcaaagcaggagtctagcaaaggaagtcataggactggaggacaatgtcacctgcctatcaagtcccatcagcactgttatagttggtcagatgagtcattatctatgacacagtcagaaactacatctgaccagagtgatattgaaggtaggatcagagctctgaaggatgagttgcggaaaagaaaatcagttgtgaaccagctgaagaaggaacagaaaaaaaggcaaaaggaaagactgaaagcccaagaagccagtctgatcaagcagttagaggttagacataggaagaagggggtttagtatcaaggctaatgtgtatgtgacgtctaaaatgtttttaatgttgttaataaagtaatggattaggattcttc

SEQ ID NO: 324313 - DNA, 1248 bp, Homo sapiens
ttagatattctaaagcggcgacaacatgatgtcaaactggaaaaacttaaggaacggattagaaaacagtgggaacactcagaagaaacaaatggccggggccagaagctgggtcatattgaccatccagtaatggttgttaatgttgataactcagtaacagcaaaagtcagaaaagtggcaacagcaccacctgctccagcatataaaggtttcaacccttcagagaccaagattcgaacacctgatgggaaagtgtggcaggaggctgagtttcaaaacatgagtagagaactgtatcgagatttagcacttcactttgcagatgatatttctataaaggagaaacctgctgaaaaaagtaaagagaagaaagtagtcaagccagtacgaaaagtccaaaaagtagcacagttatcaagtacagaatgcagaacaggtagtagtcatcttataagtacatcttcttggcgagatggacaaaaattagtaaagaagattctgggacctgctcccagaatggagccaaaagagcaaagaacagcatcaagtgacagaggtggaagagaaagaactgctaaatctgggggtcacattggaagagcagaatctgatcccaggttggacgttttacatagacatcttcaaagaaactcagaacgttcgagaagtaaatctcggtctgaaaataatataaagaaactagcttcatctcttccagataataagcaggaggaaaatactgccttaaataaggactttttacctattgaaattcgtggcattcttgatgacctacagctggattctacagctcacactgcaaagcaagatactgtagagttacagaaccagaagtcatcagcaccagtacatgctcctaggagtcacagcccagtaaaaagaaaacctgacaaaataacagctaatgaagatccccctgttatttccaaaaggcgccactatgacacagatgaggtacgacagtacattgttaggcagcaggaggaaactgaggagaaaactgtggaggaggaacacccggagggagaggaagtgtatggggaggaggcggatacaaaggaggtggtggaacaggtacaaagactggagttgctggtagtgacgggcctcgagtcctctgtgatctttcgctgtggtgtcgcccacggtttatacttctgtagcagctcctctcccctctctatttttgtttgtggtgcgagaaaccagatagccagtgtgatc

SEQ ID NO: 324314 - DNA, 573 bp, Homo sapiens
cttcatcccaaattccagctgtatatctacaaccagttggtcaggtaactttgcacctttttcagtgcactctttgatagagcatgctctgttctttttgtttgttttgtttgcttttctctctctctctctttttttttaatagcctggaggcctcttatcaaatgtcccataaattttaccttttgtttccacattaatttgacatgatgatggctcaagaagtagagtgacagctcttcttgtgctttttagtaagtgtttgtgcgatacatgtacgcatttttcttggttagctaccactatagatgtaacactagtaatgtgagcagcccacattttatttagttgtggcatctacatttgaagatggtttattagtagcctctaaactaagtaatttttcctaactcagtaatttctcctaaccctctgggcctaagatatcattggctatttaagttcagaaatcaggttaaattgagaatttgatgcatccctttactcaagtaaataaatagttacgtttatatgcataagacatggactgtggtactcagtgttctctccatg

SEQ ID NO: 324315 - DNA, 645 bp, Homo sapiens
gtttcaacccttcagagaccaagattcgaacacctgatgggaaagtgtggcaggaggctgagtttcaaaacatgagtagagaactgtatcgagatttagcacttcactttgcaggtgagaatagagctttcttatgttttgagtattttgtcatacatgctatctaatttataatatttacacataaaattgtcaccaaactaacaatattttccttctctaactgcatggcatgctgaagttgtggtggtttgaggcataaggctctcttagcctctagactcagctccagggttaaaattagcttacatggttaatgagacagaaactaggctatttttaaactgagggactttcagagttgggactgcctgatttgaaggaaacatagcagaatttagttgaagtttacttctgcttaggcctctgagatctttgaagtagtgagtaatttgtcaggcagcaggtaagatacttacatgagagcaagataccaaaagaaaaataagtattataggaagggaataagttaggaattagaaacaggaggaacccatggaagactgggagagggtaataggaaggtcatactaataatggtactacctaccgaatagtatgagcttgggcaagatgctgagtggg

SEQ ID NO: 324316 - DNA, 372 bp, Homo sapiens
gtttgtaatcagtctttatatcttcctctccctgcttctttgttcttctttctccctagggtgtatttgaatagagaggatcacctttagaacaggatgttattcttgactgcataagcacttagggaggccgaggtgggcggatcatgaggtcgggagatcaagaccatcctggctaacatggtgaaaccctgtctctactaaaaatacaaaaaaaattagccaggcgtggtggtgggcccccatagtcccaactgctcgggaggctgaggcaggagaatggtgtgaacccgggaggcggaggttacactgagccgagatctcaccactgcactccagcatggggcgacagagtgagactcggtctcaaaa

SEQ ID NO: 324317 - DNA, 675 bp, Homo sapiens
cgcccgcctcggcctcccaaagtgctgggattacaggcgtgagccaccgctcctggccggaaattgtttattttttgtagagacagggtcgcactgtgttgcccacactggtcttgaacacctggactcaagtgatcctcccactttgacctctcaaagtgcctggctctccgttggattttagatggtgttttgctattagtaatgtttgtttttaagacaaaataaattttaattggttttgtttgacaaaaaaaaaccactacattttatgatctttgtagagctgaggtgacttaatgtttaacttaggtgctacctgaatatatctttgtgacagaactcatataaatttgatgtccttttctcctaggccaaaccagggtatcagccatctggagaatctgacaaagaaaacaaagtacaggaacgtcccccaagtgcatcttccagtagtgacatgtctctctcagaacctccacagcctcttgcaaggtaaaaagggaagaatgaaagatgattaagattcttttcatgaaatttagcggagtggtctatgttcagagaattttgttgacttttgtgaacaagagggcagagaggtttatttacaaattggttcatatcttctgaaatttaggcatagtgcacatctgtacttactgtataccctag

SEQ ID NO: 324318 - DNA, 310 bp, Homo sapiens
ggcttatggtggttaaaaaaaaataataaagtgttaagccatctttgattgtagttatagtctcctagtgattacatagatttttaaatatctttaatttagctgtgttgtaagacttttctttctggaactactattatttattctttgacagttagcactttaagccctcaggaggaccattctaacagaaagtctgcctatgatccttcctctgtggatgttacctcccagcattcatcaggagcccagtctgctgcatcgtctcgttcatctacttcttctaaaggaaagaaaggaaaaaaggaaa

SEQ ID NO: 324319 - DNA, 451 bp, Homo sapiens
ttagatattctaaagcggcgacaacatgatgtcaaactggaaaaacttaaggaacggattagaaaacagtgggaacactcagaagaaacaaatggccggggccagaagctgggtcatattgaccatccagtaatggttgttaatgttgataactcagtaacagcaaaagtcagaaaagtggcaacagcaccacctgctccagcatataaaggtttgtaatcagtctttatatcttcctctccctgcttctttgttcttctttctccctagggtgtatttgaatagagaggatcacctttagaacaggatgttattcttgactgcataagcacttagggaggccgaggtgggcggatcatgaggtcgggagatcaagaccatcctggctaacatgccgccctgcctcctactattccacacattacccagccttcggtcgcgcccccccccc

SEQ ID NO: 324320 - DNA, 7552 bp, Homo sapiens
agagaggcccagtgatgagacgtaaagacagagaagaagtagtgaacaggagagcagtgttcttcatcccaaattccagctgtatatctacaaccagttggtcaggtttctgacaaagcgggagcaaaaattaatgcaacggcgacaacatgcagaggagctcctagagtggaagcgacgtttagatgcagaagaagcagaaattcgtcaaatggaaaaacaagctttggctgcctgggacaaagaattaataaaacccaaaactcctaagaaagaactggaggaccagagaacagaacagaaagaaatagcaagtgaagaggaatctccagtacctctgtactctcatctaaacagtgaaagctccattccagaagaattaggcagccctgctgttgaatatgtaccatccgagtctataggacaggagcagccagggagtccagatcacagtatacttactgaagaaatgatttgttcacaggaactagaatcttctacctctcctagtaaacattcacttcccaaaagctgcacatctgtgtcaaagcaggagtctagcaaaggaagtcataggactggaggacaatgtcacctgcctatcaagtcccatcagcactgttatagttggtcagatgagtcattatctatgacacagtcagaaactacatctgaccagagtgatattgaaggtaggatcagagctctgaaggatgagttgcggaaaagaaaatcagttgtgaaccagctgaagaaggaacagaaaaaaaggcaaaaggaaagactgaaagcccaagaagccagtctgatcaagcagttagagtcatatgatgaatttattaagaaaactgaagccgagcttagccaagatttggaaacatcaccaacagccaagcctcagattaaaacgctctcctcagcttctgaaaaacccaagatcaaacccctcacaccactacacagatctgaaacggcaaagaattggaaatcactaacagagtcagaacgttccagaggatccctggagtctattgctgaacatgttgatgcttcactgtctggttctgagagatcagtatcagaaaggtctttatctgcatatgcaaagagagtaaatgaatgggacagtcgaacagaagattttcagaccccatctccagttctcagatcatcaaggaaaatcagagaagaatctggagattctctagaaaatgtacctgcattacatcttctcaaagaattaaatgccactagtagaattcttgatatgtcagatggcaaggttggagaatctagtaaaaaatcagaaataaaagaaatagagtatacaaaattgaagaagagtaagattgaagatgccttttctaaagaaggtaaatctgatgtcttactgaaattagtcctagaacagggagattcatctgaaattctttcaaagaaagatcttcctttagattctgaaaatgttcagaaagacctagttggattagctattgaaaatctccataaaagtgaggaaatgttgaaagagagacagtcagatcaagatatgaatcatagtccaaacatccaatcaggaaaagacattcacgaacaaaagaacacaaaggaaaaagatttgtcttggtcagaacatctttttgctcctaaagagataccatactctgaagattttgaagtgtcttctttcaagaaagaaatttcagctgaattgtacaaagatgattttgaggtgtcatctttgctgtcactcaggaaagactctcagtcttgcagagataagccacagccaatgaggagctctacaagtggagccactagctttggtagtaatgaggaaatcagtgagtgcctaagtgagaaaagcctttctatccatagcaatgttcattctgacaggctgttggaactcaagtcccctactgagctgatgaaaagtaaggagcgcagtgatgtggagcatgaacagcaagttactgaatccccttccttggcttcagttcctactgcagacgagttatttgatttccacattggtgatagggtgttgattggaaatgttcagccaggaattcttcgattcaaaggtgagactagttttgctaaaggattttgggccggagtggagttagataaacctgaaggaaataacaatggaacatatgatggtattgcatattttgagtgcaaagaaaagcatggtatttttgctcctcctcaaaaaatatctcacattccagaaaactttgatgactatgtagacattaatgaagatgaagactgttactcagatgaacgatatcagtgctataatcaagagcaaaatgatacagagggtccaaaagacagagaaaaggatgtcagtgaatatttttatgagaaatccctacctagtgtgaatgatatagaagcctcagttaatagaagtagaagccttaaaatagaaacagacaatgtacaggacatttctggggtacttgaagcccatgttcaccagcagtcttcagtggattcacagatttcttcaaaggaaaacaaagacctcatttctgatgccacagaaaaggtttccatcgctgcagaagatgacactttagacaataccttttccgaagaattggagaagcaacagcagtttacagaagaggaagacaacctatatgctgaagcttcagaaaagctttgtacaccacttctggatcttttaacaagagaaaaaaaccaactggaagcccagctgaagtcatcactaaatgaggaaaaaaagtcaaaacaacaactggaaaaaatcagcttactgacagacagtttactaaaagtctttgtaaaggacacagtcaatcaactacaacaaatcaaaaaaaccagggatgagaaaatccagcttagcaatcaggagcttcttggtgatgaccaaaagaaagtaacaccccaagacctatcccaaaatgttgaggaacagtcgccaagtatttcaggttgcttcttaagttctgaattggaagatgaaaaagaagagatttcctctccagatatgtgtcccagaccggagagcccagtatttggtgccagtgggcaggaagaacttgctaagagacttgctgaacttgaactcagccgggagttcctgagcgcgttaggagatgatcaagactggtttgatgaagactttggtttgagctcttctcacaagatccaaaaaaataaggcagaagaaaccattgtacctctaatggcagaacctaaaagagtaacccaacaaccatgtgaaacattattggcagtcccccatactgcagaagaagtagagattcttgtacataatgcagcagaagaactttggaaatggaaagaattaggccacgatcttcatagcatcagtattcctacaaaactgcttggctgtgccagtaaaggtctagatatagaaagcactagtaaaagggtctacaaacaggcggtttttgatttaacaaaagagatttttgaggaaatatttgctgaggatcccaacttaaatcaacctgtctggatgaagccatgtagaatcaactctagttatttccgacgagtgaaaaatccaaataaccttgatgaaatcaagagcttcatagcaagtgaagtactcaagttgttcagtcttaaaaaggagccaaaccacaaaacagattggcagaaaatgatgaaatttggaagaaagaaaagagaccgagtggatcatatcctggttcaggagctccatgaggaggaggcacagtgggtgaactatgatgaggatgagttgtgtgtgaaaatgcagctagccgacgggatctttgagaccctgatcaaagatactattgatgttctgaatcagatcagtgaaaagcaggggagaatgctacttgtgtgacatcttgcaaataaatcgaacgctgagtgctaatgtgagtcctgggcctttctgcctcctgatgtacacccatcgccatcatagcaagagtgcttctggaccttgtacttattcttaaagactaccagtatggagttcataggacaatgtggtacacctggtattacagcctttgcctttcgagactatccactggattaatgggttattttcagtgggcagggttgcacagtgtaatcctacaccttttgctaacacccctactaggtcccagagggccagaaacacctgacttacctctgagtttagactagggtatcacttctttgagtctgaagtcaagtgagagaggtatagataaatgcatcacatcacttttgaaatgtaattctggtctataccatggaagtcataaatggacattatagtctctaaacagtattaaacccttaaccacttctaaaataggcaagctcaataatgtctgccaacttcacattctggagtttatttcatttctttttgaagaccattttcttccattattgtagttgagcagcaccaagtggactgtcaggctaacaggaataagtggtagccttgctttctgagcaccatctaaagaattttaaacctctgcattatgtttagtgttctctgtgtgggcatgaaaacaaagaaatgcccctactgaagactgggctcaaaggaccaatgcagggctggttcttttaccccttggtttactcctgcacttgtcttactcattctgaatctctaccagctgctcccagaatcacagatactcaggaccatctcaggcatccaggcatggcaaagtggaaataattcattttggcctgcaaaccttcaactcccatctttccccaagaagtcagagatgctgttacttgaatgatttaggaaatgagtgtgtgcaccaaagacaaaaagatattgtctattgtttgtgtgcttgttttgcgctatggaacattttttaatttattttaagataaattattaagttgaaaatgtgtgtccctattcagaagtgaaagattcatcttgtaatagttaaacctccatcttgaagcttctatggttcatagtctttgcacaggaacctgtggttttaacaaaccaatacacatattgaagaagtcattttaattcagtgaaacgaagatgggcttttccagatcacctgcaatagcagcagtgggataaaatgatttaaaaacactgtacaatttaactctgcctctcttgcagcattgcttctcacaactattacctgcatctgaaaaaaaatctatagactccagctgctacattagagcataagagatgctctcctgggacctcagtaccctgccttcttgactggtttccgttcatcagtcctgtccctcttcaagtaatctagaagaatgtggatactcttaggcgtgaatgtaaatgccttaatattgaaggtcctggttagaagcatgatacaagacatctactggattcatatttacaaatatcctggaatgttatagcttcaaagtatattagaaaaaccccaaagatggtataatctttaagtgtgcacgttcgtttatttctgcatcttccctccaaacttgcctttgcatcttaaatatttcactatgcacactcccattcctcttgggtttcatcttgtcgtttaagaaatgtactgaaataatcattggaatatttgcattttgcacaatgactggtatgatagctcttgacaaataaggaaagcactgaaatgttgtgattgggtctcgggaaatgctcagattgatgtcttaccagcatttcttctgggcttgtgatgttgagctgtagtcttgtagccataatgagcaaattgactaagagaagcaaaggtttcttggggttattaaccagtagtgtggaaatactagttttatgtggccaaggaaaagcaaaggcttttcttttcagtttgtgttatttggaagacagaaaaacatcttgtctacatcctttggctgtttgtaggatcacgttgtccttacgatactgaaactttacagctgctgtaaattttttataaatgaatttcaaaatgttataatgggactgtaggttgtttttctacatcttcattatttggacctaaaaccagtttttaataagaaagtttatctttactctttctgaaattatgactccagaaaaagaaaaaaaaaatacaagtcatggaatcagcaatctggtaagaaatgctgccaagaatgtggcagtagctgtcctgacagactccaactgtctttactatctgaagaatcctaggctccacatgagaggcagaaatggatcagtcttattcttttctagaaatggttatctgtagtttggtagcaaaaaaaaagaaaaaagaatccataattagcagatttcttattaactatttggatctaattgaaatggctttattcttaggattaagaaagatagatgtggatacccagccactcgttccatattggtatctttttaaatcagctctgcctcttaatcaagaacctaaatattccctctttctaatctttgttccttctccctacaccctcatcctctttcactcttccttcataattcctctaagaaaaatatctttgcatcagcagtaatatcttttagaatagcactatcagaatttagcagtaaaccaacatacaggcttcagatttacttctgagtccaaaacaatttgtgctatccagggtagttaactctgggttaaacaagtacagggtatagattccctcttcaggtctacacaggaatttttaccatagggaaaagtggggagagctcaaacgtagttaataaggaaggtaatttgtttttcttttacctaaaagaaaagaaaattccttctgtgactacaggtctctgagaaattatctttcaaaagagatttcattgctcataagagtgttgtggcctattgataaaaacaattttgttcagtttcttgtcttgaaaaaaaagtggccttagctttttgcaatacttgaataaagtgtgtactcgcaaaagaatttctgtagcacagcattagagactcataacttttctgcaagaaatacaaacttacatcttccttttactaccttaagaatactagtgaataaaacattaattcaaagagcaaattatagaaactacaatgacatttaatgcaaattgtaggaatttacatgtttacaaatcatcttcaactggttgtgcagcaattcaataaaatatctttgtattataaaaatgtgaagaatagcttttccttctggactttgcaaagccttcttggcaaacacattgcaaagcattctctgggaggttcagcctccttgtgtgtactgtactgtgcagacatgaaaaaataaacccgtttactgtgtgcgtgtaaatagcctggtcatcaggccattttcagccaatagtcacatccagtgcaattttgcaccgaacacttaagggtgtggtttgtaagtacgatctgtaaaataactgggatgaattcccatgtatacctgtgtaaatagatttgttaactgaaatatactttaagaaagataaaatctgtaaataaactgatttataaattaa

SEQ ID NO: 324321 - DNA, 10316 bp, Homo sapiens
tgttaatgaagaaaagactgagagcggtaactggatgataggcaatcttagtgaatttaaaaagcttcctgagatgataagaccacagagtgccatatcaagctttagagtgagatcccctggtcccaaaccagaagggctactggcacagttatgtaaaaggcagactgactcttctagctctgatatgcaagcctgttctcaagacaaagccaaaatatctcttggttccagcatagattcagtcagtgaagggcctcttcttagtgaggggagtctctctgaagaagagggagaccaggatggacagccccttttgaaagtagcagaaattttaaaagaaaaggaattttgtcctggagaaagaaatagttatgaacccatcaaagagtttcagaaagaagctgaaaaattcttgccactttttgggcacataggtggtacacaaagcaaaggaccatgggaagaattggcaaagggaagtccacatagcgtcattaatatttttacaaaatcctatcagttatatggaaaagggtttgaagacaagttggacagaggaacatcaacatcacggcctttgaatgccaccgcaactcctctaagtggtgtttcatatgaagatgattttgtctcctctccagggactgggacttcgacagaaaaaaaatcaactcttgaacctcatagcactttaagccctcaggaggaccattctaacagaaagtctgcctatgatccttcctctgtggatgttacctcccagcattcatcaggagcccagtctgctgcatcgtctcgttcatctacttcttctaaaggaaagaaaggaaaaaaggaaaagacagaatggttggattcattcactggaaatgttcagaactcacttcttgatgaggaaaaagcagaacgtggctcccatcaaggaaagaaatctgggaccagcagcaaactttctgttaaagattttgagcagactcttgatacagatagcactttggaggatctttctggacattctgtgagtgtctcatcagataagggaagatctcagaaaactccaacttctcccctgtcaccaagttcccagaaatcattgcagtttgacgttgcaggaacttcttcagaaagatctaagtcgtcagtaatgcctccaactataacaggatttaagcctaatgcacctctcactgatctgaacccggcagccagcagaacaacgacagagaacatggctccaataccaggttctaagcgcttttctcctgctggcctccatcatcgtatggcagcagaactcagttatctgaacgccattgaggagtcggtgcgccaactgtcagatgtagaaagagttagaggcatttcacttgctcagcaggagagtgtgtctctagctcagataataaaggcacaacagcaacgccatgaaagagacttggccctcttgaaactaaaggctgaacaagaggctctggagagtcagagacaattagaagaaacccgaaacaaagcagctcaggtccatgcagaatcattacagcaggtggttcaatcacaacgggaagtaactgaagtcctgcaggaagcaacgtgtaaaatagcagctcagcagtcagaaactgctcgcctcaccacagacgcagcacgtcaaatctgtgagatggcagagttgactagaactcatatctcagatgctgtcgtggcttcaggagctccccttgcaatactgtatgaccaccaacggcagcaccttccagactttgtgaaacagctgaggaccagaactgaaacagataggaaaagtccatctgtttcactctctcagagtaaagaagggacccttgactcaaagcatcagaagtattctgcttcatatgatagttattctgagtcttcaggatacaagaatcatgatagaagaagtagcagtggtagcagccgccaagaaagtccttcagttccatcttgtaaggaaaatgagaagaaacttaatggtgaaaagatagagagttccattgatgaacaggttcagactgctgcagatgattctctacgaagtgatagtgttccatctcttcctgatgaaaaagactcaacgtctattgcaacagaatattctctgaaatttgatgaatccatgacagaagatgaaatagaagaacaatcatttcgatcattactaccttcagagagtcaccgcagatttaacatggaaaagagaagaggtcatcatgatgactctgatgaagaagcttctccagaaaaaactacactgtctactgccaaggaactgaacatgccattctcaggaggacaagatagcttttctaaatttactatggagatggttcgacagtatatgaaagaggaagaaatgagggcagctcaccagtcttcactcctgcgtctccgtgaaaaggccttgaaggagaagactaaggctgaattggcctggttagagcatcaaaaaaaacatctacgagacaaaggagaggatgataaaatgcccccgctccggaagaaacagcgtggtttgcttttaaggttgcagcaagaaaaggcagaaataaaacgtcttcaagaagccaataaggcagctcggaaggaaagacagctgattcttaaacagcaggaggagatagaaaagatccgacagaccaccataaaactacaggagaaattgaagtctgcaggggagagtaaattggactctcatagtgatgatgatacaaaggataataaggcaaccagtcctggtccaactgacttggagacccgcagtccttctcccatttcaatctccagcagtgaaactagcagcattatgcagaaactgaagaaaatgagaagccgcatggatgaaaagtttctgacaaagcgggagcaaaaattaatgcaacggcgacaacatgcagaggagctcctagagtggaagcgacgtttagatgcagaagaagcagaaattcgtcaaatggaaaaacaagctttggctgcctgggacaaagaattaataaaacccaaaactcctaagaaagaactggaggaccagagaacagaacagaaagaaatagcaagtgaagaggaatctccagtacctctgtactctcatctaaacagtgaaagctccattccagaagaattaggcagccctgctgttgaatatgtaccatccgagtctataggacaggagcagccagggagtccagatcacagtatacttactgaagaaatgatttgttcacaggaactagaatcttctacctctcctagtaaacattcacttcccaaaagctgcacatctgtgtcaaagcaggagtctagcaaaggaagtcataggactggaggacaatgtcacctgcctatcaagtcccatcagcactgttatagttggtcagatgagtcattatctatgacacagtcagaaactacatctgaccagagtgatattgaaggtaggatcagagctctgaaggatgagttgcggaaaagaaaatcagttgtgaaccagctgaagaaggaacagaaaaaaaggcaaaaggaaagactgaaagcccaagaagccagtctgatcaagcagttagagtcatatgatgaatttattaagaaaactgaagccgagcttagccaagatttggaaacatcaccaacagccaagcctcagattaaaacgctctcctcagcttctgaaaaacccaagatcaaacccctcacaccactacacagatctgaaacggcaaagaattggaaatcactaacagagtcagaacgttccagaggatccctggagtctattgctgaacatgttgatgcttcactgtctggttctgagagatcagtatcagaaaggtctttatctgcatatgcaaagagagtaaatgaatgggacagtcgaacagaagattttcagaccccatctccagttctcagatcatcaaggaaaatcagagaagaatctggagattctctagaaaatgtacctgcattacatcttctcaaagaattaaatgccactagtagaattcttgatatgtcagatggcaaggttggagaatctagtaaaaaatcagaaataaaagaaatagagtatacaaaattgaagaagagtaagattgaagatgccttttctaaagaaggtaaatctgatgtcttactgaaattagtcctagaacagggagattcatctgaaattctttcaaagaaagatcttcctttagattctgaaaatgttcagaaagacctagttggattagctattgaaaatctccataaaagtgaggaaatgttgaaagagagacagtcagatcaagatatgaatcatagtccaaacatccaatcaggaaaagacattcacgaacaaaagaacacaaaggaaaaagatttgtcttggtcagaacatctttttgctcctaaagagataccatactctgaagattttgaagtgtcttctttcaagaaagaaatttcagctgaattgtacaaagatgattttgaggtgtcatctttgctgtcactcaggaaagactctcagtcttgcagagataagccacagccaatgaggagctctacaagtggagccactagctttggtagtaatgaggaaatcagtgagtgcctaagtgagaaaagcctttctatccatagcaatgttcattctgacaggctgttggaactcaagtcccctactgagctgatgaaaagtaaggagcgcagtgatgtggagcatgaacagcaagttactgaatccccttccttggcttcagttcctactgcagacgagttatttgatttccacattggtgatagggtgttgattggaaatgttcagccaggaattcttcgattcaaaggtgagactagttttgctaaaggattttgggccggagtggagttagataaacctgaaggaaataacaatggaacatatgatggtattgcatattttgagtgcaaagaaaagcatggtatttttgctcctcctcaaaaaatatctcacattccagaaaactttgatgactatgtagacattaatgaagatgaagactgttactcagatgaacgatatcagtgctataatcaagagcaaaatgatacagagggtccaaaagacagagaaaaggatgtcagtgaatatttttatgagaaatccctacctagtgtgaatgatatagaagcctcagttaatagaagtagaagccttaaaatagaaacagacaatgtacaggacatttctggggtacttgaagcccatgttcaccagcagtcttcagtggattcacagatttcttcaaaggaaaacaaagacctcatttctgatgccacagaaaaggtttccatcgctgcagaagatgacactttagacaataccttttccgaagaattggagaagcaacagcagtttacagaagaggaagacaacctatatgctgaagcttcagaaaagctttgtacaccacttctggatcttttaacaagagaaaaaaaccaactggaagcccagctgaagtcatcactaaatgaggaaaaaaagtcaaaacaacaactggaaaaaatcagcttactgacagacagtttactaaaagtctttgtaaaggacacagtcaatcaactacaacaaatcaaaaaaaccagggatgagaaaatccagcttagcaatcaggagcttcttggtgatgaccaaaagaaagtaacaccccaagacctatcccaaaatgttgaggaacagtcgccaagtatttcaggttgcttcttaagttctgaattggaagatgaaaaagaagagatttcctctccagatatgtgtcccagaccggagagcccagtatttggtgccagtgggcaggaagaacttgctaagagacttgctgaacttgaactcagccgggagttcctgagcgcgttaggagatgatcaagactggtttgatgaagactttggtttgagctcttctcacaagatccaaaaaaataaggcagaagaaaccattgtacctctaatggcagaacctaaaagagtaacccaacaaccatgtgaaacattattggcagtcccccatactgcagaagaagtagagattcttgtacataatgcagcagaagaactttggaaatggaaagaattaggccacgatcttcatagcatcagtattcctacaaaactgcttggctgtgccagtaaaggtctagatatagaaagcactagtaaaagggtctacaaacaggcggtttttgatttaacaaaagagatttttgaggaaatatttgctgaggatcccaacttaaatcaacctgtctggatgaagccatgtagaatcaactctagttatttccgacgagtgaaaaatccaaataaccttgatgaaatcaagagcttcatagcaagtgaagtactcaagttgttcagtcttaaaaaggagccaaaccacaaaacagattggcagaaaatgatgaaatttggaagaaagaaaagagaccgagtggatcatatcctggttcaggagctccatgaggaggaggcacagtgggtgaactatgatgaggatgagttgtgtgtgaaaatgcagctagccgacgggatctttgagaccctgatcaaagatactattgatgttctgaatcagatcagtgaaaagcaggggagaatgctacttgtgtgacatcttgcaaataaatcgaacgctgagtgctaatgtgagtcctgggcctttctgcctcctgatgtacacccatcgccatcatagcaagagtgcttctggaccttgtacttattcttaaagactaccagtatggagttcataggacaatgtggtacacctggtattacagcctttgcctttcgagactatccactggattaatgggttattttcagtgggcagggttgcacagtgtaatcctacaccttttgctaacacccctactaggtcccagagggccagaaacacctgacttacctctgagtttagactagggtatcacttctttgagtctgaagtcaagtgagagaggtatagataaatgcatcacatcacttttgaaatgtaattctggtctataccatggaagtcataaatggacattatagtctctaaacagtattaaacccttaaccacttctaaaataggcaagctcaataatgtctgccaacttcacattctggagtttatttcatttctttttgaagaccattttcttccattattgtagttgagcagcaccaagtggactgtcaggctaacaggaataagtggtagccttgctttctgagcaccatctaaagaattttaaacctctgcattatgtttagtgttctctgtgtgggcatgaaaacaaagaaatgcccctactgaagactgggctcaaaggaccaatgcagggctggttcttttaccccttggtttactcctgcacttgtcttactcattctgaatctctaccagctgctcccagaatcacagatactcaggaccatctcaggcatccaggcatggcaaagtggaaataattcattttggcctgcaaaccttcaactcccatctttccccaagaagtcagagatgctgttacttgaatgatttaggaaatgagtgtgtgcaccaaagacaaaaagatattgtctattgtttgtgtgcttgttttgcgctatggaacattttttaatttattttaagataaattattaagttgaaaatgtgtgtccctattcagaagtgaatctttgcacaggaacctgtggttttaacaaaccaatacacatattgaagaagtcattttaattcagtgaaacgaagatgggcttttccagatcacctgcaatagcagcagtgggataaaatgatttaaaaacactgtacaatttaactctgcctctcttgcagcattgcttctcacaactattacctgcatctgaaaaaaaatctatagactccagctgctacattagagcataagagatgctctcctgggacctcagtaccctgccttcttgactggtttccgttcatcagtcctgtccctcttcaagtaatctagaagaatgtggatactcttaggcgtgaatgtaaatgccttaatattgaaggtcctggttagaagcatgatacaagacatctactggattcatatttacaaatatcctggaatgttatagcttcaaagtatattagaaaaaccccaaagatggtataatctttaagtgtgcacgttcgtttatttctgcatcttccctccaaacttgcctttgcatcttaaatatttcactatgcacactcccattcctcttgggtttcatcttgtcgtttaagaaatgtactgaaataatcattggaatatttgcattttgcacaatgactggtatgatagctcttgacaaataaggaaagcactgaaatgttgtgattgggtctcgggaaatgctcagattgatgtcttaccagcatttcttctgggcttgtgatgttgagctgtagtcttgtagccataatgagcaaattgactaagagaagcaaaggtttcttggggttattaaccagtagtgtggaaatactagttttatgtggccaaggaaaagcaaaggcttttcttttcagtttgtgttatttggaagacagaaaaacatcttgtctacatcctttggctgtttgtaggatcacgttgtccttacgatactgaaactttacagctgctgtaaattttttataaatgaatttcaaaatgttataatgggactgtaggttgtttttctacatcttcattatttggacctaaaaccagtttttaataagaaagtttatctttactctttctgaaattatgactccagaaaaagaaaaaaaaaatacaagtcatggaatcagcaatctggtaagaaatgctgccaagaatgtggcagtagctgtcctgacagactccaactgtctttactatctgaagaatcctaggctccacatgagaggcagaaatggatcagtcttattcttttctagaaatggttatctgtagtttggtagcaaaaaaaaagaaaaaagaatccataattagcagatttcttattaactatttggatctaattgaaatggctttattcttaggattaagaaagatagatgtggatacccagccactcgttccatattggtatctttttaaatcagctctgcctcttaatcaagaacctaaatattccctctttctaatctttgttccttctccctacaccctcatcctctttcactcttccttcataattcctctaagaaaaatatctttgcatcagcagtaatatcttttagaatagcactatcagaatttagcagtaaaccaacatacaggcttcagatttacttctgagtccaaaacaatttgtgctatccagggtagttaactctgggttaaacaagtacagggtatagattccctcttcaggtctacacaggaatttttaccatagggaaaagtggggagagctcaaacgtagttaataaggaaggtaatttgtttttcttttacctaaaagaaaagaaaattccttctgtgactacaggtctctgagaaattatctttcaaaagagatttcattgctcataagagtgttgtggcctattgataaaaacaattttgttcagtttcttgtcttgaaaaaaaagtggccttagctttttgcaatacttgaataaagtgtgtactcgcaaaagaatttctgtagcacagcattagagactcataacttttctgcaagaaatacaaacttacatcttccttttactaccttaagaatactagtgaataaaacattaattcaaagagcaaattatagaaactacaatgacatttaatgcaaattgtaggaatttacatgtttacaaatcatcttcaactggttgtgcagcaattcaataaaatatctttgtattataaaaatgtgaagaaaaaatgtaaactgatgtaaaggaggtactgtcattttaattaacctatgtttaatagcttttccttctggactttgcaaagccttcttggcaaacacattgcaaagcattctctgggaggttcagcctccttgtgtgtactgtactgtgcagacatgaaaaaataaacccgtttactgtgtgcgtgtaaatagcctggtcatcaggccattttcagccaatagtcacatccagtgcaattttgcaccgaacacttaagggtgtggtttgtaagtacgatctgtaaaataactgggatgaattcccatgtatacctgtgtaaatagatttgttaactgaaatatactttaagaaagataaaatctgtaaataaactgatttataaattaa

SEQ ID NO: 324322 - DNA, 10883 bp, Homo sapiens
ttagatattctaaagcggcgacaacatgatgtcaaactggaaaaacttaaggaacggattagaaaacagtgggaacactcagaagaaacaaatggccggggccagaagctgggtcatattgaccatccagtaatggttgttaatgttgataactcagtaacagcaaaagtcagaaaagtggcaacagcaccacctgctccagcatataaaggtttcaacccttcagagaccaagattcgaacacctgatgggaaagtgtggcaggaggctgagtttcaaaacatgagtagagaactgtatcgagatttagcacttcactttgcagatgatatttctataaaggagaaacctgctgaaaaaagtaaagagaagaaagtagtcaagccagtacgaaaagtccaaaaagtagcacagttatcaagtacagaatgcagaacaggtagtagtcatcttataagtacatcttcttggcgagatggacaaaaattagtaaagaagattctgggacctgctcccagaatggagccaaaagagcaaagaacagcatcaagtgacagaggtggaagagaaagaactgctaaatctgggggtcacattggaagagcagaatctgatcccaggttggacgttttacatagacatcttcaaagaaactcagaacgttcgagaagtaaatctcggtctgaaaataatataaagaaactagcttcatctcttccagataataagcaggaggaaaatactgccttaaataaggactttttacctattgaaattcgtggcattcttgatgacctacagctggattctacagctcacactgcaaagcaagatactgtagagttacagaaccagaagtcatcagcaccagtacatgctcctaggagtcacagcccagtaaaaagaaaacctgacaaaataacagctaatgaagatccccctgttatttccaaaaggcgccactatgacacagatgaggtacgacagtacattgttaggcagcaggaggaaaggaagagaaagcaaaatgaagagaagaaggctcaaaaggaggctacagaacagaaaaacaaacgattacaagagctctaccggaagcagaaggaagcctttactaaagtaaaaaatgtccctccttctgagccatcagcaactaggcgactacaggaaacttactccaaattgctactagaaaagaccttgcttgaagagccatctcatcaacatgttacgcaggaaacacaggccaaaccagggtatcagccatctggagaatctgacaaagaaaacaaagtacaggaacgtcccccaagtgcatcttccagtagtgacatgtctctctcagaacctccacagcctcttgcaagaaaagacttgatggaatctacatggatgcagcctgaaagattgagcccacaagttcaccattctcaaccacagccttttgctggaacagctggaagtttactctcccatctcttgagtttagagcatgtaggaattttgcataaggattttgaatctattttaccaaccaggaagaatcataatatggcttcaaggccattaacttttacacctcaaccatatgtgacctcaccagctgcttatacagatgccttgttaaaacctagtgccagccaatataagagtaaactggatcgtattgaagccttgaaagcaacagctgcttctttgtccagcagaattgaaagtgaagccaagaaattagctggggccagcattaactatgggtcagcatggaacactgagtatgatgtgcagcaggcacctcaagaagatggaccttggaccaaggctgtaactccacctgtgaaagatgataatgaagatgttttctctgccagaattcagaagatgctgggaagctgtgtatctcatgcaacttttgatgatgatcttcctggtgtaggcaatcttagtgaatttaaaaagcttcctgagatgataagaccacagagtgccatatcaagctttagagtgagatcccctggtcccaaaccagaagggctactggcacagttatgtaaaaggcagactgactcttctagctctgatatgcaagcctgttctcaagacaaagccaaaatatctcttggttccagcatagattcagtcagtgaagggcctcttcttagtgaggggagtctctctgaagaagagggagaccaggatggacagccccttttgaaagtagcagaaattttaaaagaaaaggaattttgtcctggagaaagaaatagttatgaacccatcaaagagtttcagaaagaagctgaaaaattcttgccactttttgggcacataggtggtacacaaagcaaaggaccatgggaagaattggcaaagggaagtccacatagcgtcattaatatttttacaaaatcctatcagttatatggaaaagggtttgaagacaagttggacagaggaacatcaacatcacggcctttgaatgccaccgcaactcctctaagtggtgtttcatatgaagatgattttgtctcctctccagggactgggacttcgacagaaaaaaaatcaactcttgaacctcatagcactttaagccctcaggaggaccattctaacagaaagtctgcctatgatccttcctctgtggatgttacctcccagcattcatcaggagcccagtctgctgcatcgtctcgttcatctacttcttctaaaggaaagaaaggaaaaaaggaaaagacagaatggttggattcattcactggaaatgttcagaactcacttcttgatgaggaaaaagcagaacgtggctcccatcaaggaaagaaatctgggaccagcagcaaactttctgttaaagattttgagcagactcttgatacagatagcactttggaggatctttctggacattctgtgagtgtctcatcagataagggaagatctcagaaaactccaacttctcccctgtcaccaagttcccagaaatcattgcagtttgacgttgcaggaacttcttcagaaagatctaagtcgtcagtaatgcctccaactataacaggatttaagcctaatgcacctctcactgatctgaacccggcagccagcagaacaacgacagagaacatggctccaataccaggttctaagcgcttttctcctgctggcctccatcatcgtatggcagcagaactcagttatctgaacgccattgaggagtcggtgcgccaactgtcagatgtagaaagagttagaggcatttcacttgctcagcaggagagtgtgtctctagctcagataataaaggcacaacagcaacgccatgaaagagacttggccctcttgaaactaaaggctgaacaagaggctctggagagtcagagacaattagaagaaacccgaaacaaagcagctcaggtccatgcagaatcattacagcaggtggttcaatcacaacgggaagtaactgaagtcctgcaggaagcaacgtgtaaaatagcagctcagcagtcagaaactgctcgcctcaccacagacgcagcacgtcaaatctgtgaggaaaagtccatctgtttcactctctcagagtaaagaagggacccttgactcaaagcatcagaagtattctgcttcatatgatagttattctgagtcttcaggatacaagaatcatgatagaagaagtagcagtggtagcagccgccaagaaagtccttcagttccatcttgtaaggaaaatgagaagaaacttaatggtgaaaagatagagagttccattgatgaacaggttcagactgctgcagatgattctctacgaagtgatagtgttccatctcttcctgatgaaaaagactcaacgtctattgcaacagaatattctctgaaatttgatgaatccatgacagaagatgaaatagaagaacaatcatttcgatcattactaccttcagagagtcaccgcagatttaacatggaaaagagaagaggtcatcatgatgactctgatgaagaagcttctccagaaaaaactacactgtctactgccaaggaactgaacatgccattctcaggaggacaagatagcttttctaaatttactatggagatggttcgacagtatatgaaagaggaagaaatgagggcagctcaccagtcttcactcctgcgtctccgtgaaaaggccttgaaggagaagactaaggctgaattggcctggttagagcatcaaaaaaaacatctacgagacaaaggagaggatgataaaatgcccccgctccggaagaaacagcgtggtttgcttttaaggttgcagcaagaaaaggcagaaataaaacgtcttcaagaagccaataaggcagctcggaaggaaagacagctgattcttaaacagcaggaggagatagaaaagatccgacagaccaccataaaactacaggagaaattgaagtctgcaggggagagtaaattggactctcatagtgatgatgatacaaaggataataaggcaaccagtcctggtccaactgacttggagacccgcagtccttctcccatttcaatctccagcagtgaaactagcagcattatgcagaaactgaagaaaatgagaagccgcatggatgaaaagtttctgacaaagcgggagcaaaaattaatgcaacggcgacaacatgcagaggagctcctagagtggaagcgacgtttagatgcagaagaagcagaaattcgtcaaatggaaaaacaagctttggctgcctgggacaaagaattaataaaacccaaaactcctaagaaagaactggaggaccagagaacagaacagaaagaaatagcaagtgaagaggaatctccagtacctctgtactctcatctaaacagtgaaagctccattccagaagaattaggcagccctgctgttgaatatgtaccatccgagtctataggacaggagcagccagggagtccagatcacagtatacttactgaagaaatgatttgttcacaggaactagaatcttctacctctcctagtaaacattcacttcccaaaagctgcacatctgtgtcaaagcaggagtctagcaaaggaagtcataggactggaggacaatgtcacctgcctatcaagtcccatcagcactgttatagttggtcagatgagtcattatctatgacacagtcagaaactacatctgaccagagtgatattgaaggtaggatcagagctctgaaggatgagttgcggaaaagaaaatcagttgtgaaccagctgaagaaggaacagaaaaaaaggcaaaaggaaagactgaaagcccaagaagccagtctgatcaagcagttagagtcatatgatgaatttattaagaaaactgaagccgagcttagccaagatttggaaacatcaccaacagccaagcctcagattaaaacgctctcctcagcttctgaaaaacccaagatcaaacccctcacaccactacacagatctgaaacggcaaagaattggaaatcactaacagagtcagaacgttccagaggatccctggagtctattgctgaacatgttgatgcttcactgtctggttctgagagatcagtatcagaaaggtctttatctgcatatgcaaagagagtaaatgaatgggacagtcgaacagaagattttcagaccccatctccagttctcagatcatcaaggaaaatcagagaagaatctggagattctctagaaaatgtacctgcattacatcttctcaaagaattaaatgccactagtagaattcttgatatgtcagatggcaaggttggagaatctagtaaaaaatcagaaataaaagaaatagagtatacaaaattgaagaagagtaagattgaagatgccttttctaaagaaggtaaatctgatgtcttactgaaattagtcctagaacagggagattcatctgaaattctttcaaagaaagatcttcctttagattctgaaaatgttcagaaagacctagttggattagctattgaaaatctccataaaagtgaggaaatgttgaaagagagacagtcagatcaagatatgaatcatagtccaaacatccaatcaggaaaagacattcacgaacaaaagaacacaaaggaaaaagatttgtcttggtcagaacatctttttgctcctaaagagataccatactctgaagattttgaagtgtcttctttcaagaaagaaatttcagctgaattgtacaaagatgattttgaggtgtcatctttgctgtcactcaggaaagactctcagtcttgcagagataagccacagccaatgaggagctctacaagtggagccactagctttggtagtaatgaggaaatcagtgagtgcctaagtgagaaaagcctttctatccatagcaatgttcattctgacaggctgttggaactcaagtcccctactgagctgatgaaaagtaaggagcgcagtgatgtggagcatgaacagcaagttactgaatccccttccttggcttcagttcctactgcagacgagttatttgatttccacattggtgatagggtgttgattggaaatgttcagccaggaattcttcgattcaaaggtgagactagttttgctaaaggattttgggccggagtggagttagataaacctgaaggaaataacaatggaacatatgatggtattgcatattttgagtgcaaagaaaagcatggtatttttgctcctcctcaaaaaatatctcacattccagaaaactttgatgactatgtagacattaatgaagatgaagactgttactcagatgaacgatatcagtgctataatcaagagcaaaatgatacagagggtccaaaagacagagaaaaggatgtcagtgaatatttttatgagaaatccctacctagtgtgaatgatatagaagcctcagttaatagaagtagaagccttaaaatagaaacagacaatgtacaggacatttctggggtacttgaagcccatgttcaccagcagtcttcagtggattcacagatttcttcaaaggaaaacaaagacctcatttctgatgccacagaaaaggtttccatcgctgcagaagatgacactttagacaataccttttccgaagaattggagaagcaacagcagtttacagaagaggaagacaacctatatgctgaagcttcagaaaagctttgtacaccacttctggatcttttaacaagagaaaaaaaccaactggaagcccagctgaagtcatcactaaatgaggaaaaaaagtcaaaacaacaactggaaaaaatcagcttactgacagacagtttactaaaagtctttgtaaaggacacagtcaatcaactacaacaaatcaaaaaaaccagggatgagaaaatccagcttagcaatcaggagcttcttggtgatgaccaaaagaaagtaacaccccaagacctatcccaaaatgttgaggaacagtcgccaagtatttcaggttgcttcttaagttctgaattggaagatgaaaaagaagagatttcctctccagatatgtgtcccagaccggagagcccagtatttggtgccagtgggcaggaagaacttgctaagagacttgctgaacttgaactcagccgggagttcctgagcgcgttaggagatgatcaagactggtttgatgaagactttggtttgagctcttctcacaagatccaaaaaaataaggcagaagaaaccattgtacctctaatggcagaacctaaaagagtaacccaacaaccatgtgaaacattattggcagtcccccatactgcagaagaagtagagattcttgtacataatgcagcagaagaactttggaaatggaaagaattaggccacgatcttcatagcatcagtattcctacaaaactgcttggctgtgccagtaaaggtctagatatagaaagcactagtaaaagggtctacaaacaggcggtttttgatttaacaaaagagatttttgaggaaatatttgctgaggatcccaacttaaatcaacctgtctggatgaagccatgtagaatcaactctagttatttccgacgagtgaaaaatccaaataaccttgatgaaatcaagagcttcatagcaagtgaagtactcaagttgttcagtcttaaaaaggagccaaaccacaaaacagattggcagaaaatgatgaaatttggaagaaagaaaagagaccgagtggatcatatcctggttcaggagctccatgaggaggaggcacagtgggtgaactatgatgaggatgagttgtgtgtgaaaatgcagctagccgacgggatctttgagaccctgatcaaagatactattgatgttctgaatcagatcagtgaaaagcaggggagaatgctacttgtgtgacatcttgcaaataaatcgaacgctgagtgctaatcattgcttctcacaactattacctgcatctgaaaaaaaatctatagactccagctgctacattagagcataagagatgctctcctgggacctcagtaccctgccttcttgactggtttccgttcatcagtcctgtccctcttcaagtaatctagaagaatgtggatactcttaggcgtgaatgtaaatgccttaatattgaaggtcctggttagaagcatgatacaagacatctactggattcatatttacaaatatcctggaatgttatagcttcaaagtatattagaaaaaccccaaagatggtataatctttaagtgtgcacgttcgtttatttctgcatcttccctccaaacttgcctttgcatcttaaatatttcactatgcacactcccattcctcttgggtttcatcttgtcgtttaagaaatgtactgaaataatcattggaatatttgcattttgcacaatgactggtatgatagctcttgacaaataaggaaagcactgaaatgttgtgattgggtctcgggaaatgctcagattgatgtcttaccagcatttcttctgggcttgtgatgttgagctgtagtcttgtagccataatgagcaaattgactaagagaagcaaaggtttcttggggttattaaccagtagtgtggaaatactagttttatgtggccaaggaaaagcaaaggcttttcttttcagtttgtgttatttggaagacagaaaaacatcttgtctacatcctttggctgtttgtaggatcacgttgtccttacgatactgaaactttacagctgctgtaaattttttataaatgaatttcaaaatgttataatgggactgtaggttgtttttctacatcttcattatttggacctaaaaccagtttttaataagaaagtttatctttactctttctgaaattatgactccagaaaaagaaaaaaaaaatacaagtcatggaatcagcaatctggtaagaaatgctgccaagaatgtggcagtagctgtcctgacagactccaactgtctttactatctgaagaatcctaggctccacatgagaggcagaaatggatcagtcttattcttttctagaaatggttatctgtagtttggtagcaaaaaaaaagaaaaaagaatccataattagcagatttcttattaactatttggatctaattgaaatggctttattcttaggattaagaaagatagatgtggatacccagccactcgttccatattggtatctttttaaatcagctctgcctcttaatcaagaacctaaatattccctctttctaatctttgttccttctccctacaccctcatcctctttcactcttccttcataattcctctaagaaaaatatctttgcatcagcagtaatatcttttagaatagcactatcagaatttagcagtaaaccaacatacaggcttcagatttacttctgagtccaaaacaatttgtgctatccagggtagttaactctgggttaaacaagtacagggtatagattccctcttcaggtctacacaggaatttttaccatagggaaaagtggggagagctcaaacgtagttaataaggaaggtaatttgtttttcttttacctaaaagaaaagaaaattccttctgtgactacaggtctctgagaaattatctttcaaaagagatttcattgctcataagagtgttgtggcctattgataaaaacaattttgttcagtttcttgtcttgaaaaaaaagtggccttagctttttgcaatacttgaataaagtgtgtactcgcaaaagaatttctgtagcacagcattagagactcataacttttctgcaagaaatacaaacttacatcttccttttactaccttaagaatactagtgaataaaacattaattcaaagagcaaattatagaaactacaatgacatttaatgcaaattgtaggaatttacatgtttacaaatcatcttcaactggttgtgcagcaattcaataaaatatctttgtattataaaaatgtgaagaaaaaatgtaaactgatgtaaaggaggtactgtcattttaattaacctatgtttaatagcttttccttctggactttgcaaagccttcttggcaaacacattgcaaagcattctctgggaggttcagcctccttgtgtgtactgtactgtgcagacatgaaaaaataaacccgtttactgtgtgcgtgtaaatagcctggtcatcaggccattttcagccaatagtcacatccagtgcaattttgcaccgaacacttaagggtgtggtttgtaagtacgatctgtaaaataactgggatgaattcccatgtatacctgtgtaaatagatttgttaactgaaatatactttaagaaagataaaatctgtaaataaactgatttataaattaa

SEQ ID NO: 324323 - DNA, 9913 bp, Homo sapiens
ctgggtgatctagaggatcccgttcgacggaagcagctgtgtttctaggcttcaatacgatccagttactccaaattgctactagaaaagaccttgcttgaagagccatctcatcaacatgttacgcaggaaacacaggccaaaccagggtatcagccatctggagaatctgacaaagaaaacaaagtacaggaacgtcccccaagtgcatcttccagtagtgacatgtctctctcagaacctccacagcctcttgcaagaaaagacttgatggaatctacatggatgcagcctgaaagattgagcccacaagttcaccattctcaaccacagccttttgctggaacagctggaagtttactctcccatctcttgagtttagagcatgtaggaattttgcataaggattttgaatctattttaccaaccaggaagaatcataatatggcttcaaggccattaacttttacacctcaaccatatgtgacctcaccagctgcttatacagatgccttgttaaaacctagtgccagccaatataagagtaaactggatcgtattgaagccttgaaagcaacagctgcttctttgtccagcagaattgaaagtgaagccaagaaattagctggggccagcattaactatgggtcagcatggaacactgagtatgatgtgcagcaggcacctcaagaagatggaccttggaccaaggctgtaactccacctgtgaaagatgataatgaagatgttttctctgccagaattcagaagatgctgggaagctgtgtatctcatgcaacttttgatgatgatcttcctggtgtaggcaatcttagtgaatttaaaaagcttcctgagatgataagaccacagagtgccatatcaagctttagagtgagatcccctggtcccaaaccagaagggctactggcacagttatgtaaaaggcagactgactcttctagctctgatatgcaagcctgttctcaagacaaagccaaaatatctcttggttccagcatagattcagtcagtgaagggcctcttcttagtgaggggagtctctctgaagaagagggagaccaggatggacagccccttttgaaagtagcagaaattttaaaagaaaaggaattttgtcctggagaaagaaatagttatgaacccatcaaagagtttcagaaagaagctgaaaaattcttgccactttttgggcacataggtggtacacaaagcaaaggaccatgggaagaattggcaaagggaagtccacatagcgtcattaatatttttacaaaatcctatcagttatatggaaaagggtttgaagacaagttggacagaggaacatcaacatcacggcctttgaatgccaccgcaactcctctaagtggtgtttcatatgaagatgattttgtctcctctccagggactgggacttcgacagaaaaaaaatcaactcttgaacctcatagcactttaagccctcaggaggaccattctaacagaaagtctgcctatgatccttcctctgtggatgttacctcccagcattcatcaggagcccagtctgctgcatcgtctcgttcatctacttcttctaaaggaaagaaaggaaaaaaggaaaagacagaatggttggattcattcactggaaatgttcagaactcacttcttgatgaggaaaaagcagaacgtggctcccatcaaggaaagaaatctgggaccagcagcaaactttctgttaaagattttgagcagactcttgatacagatagcactttggaggatctttctggacattctgtgagtgtctcatcagataagggaagatctcagaaaactccaacttctcccctgtcaccaagttcccagaaatcattgcagtttgacgttgcaggaacttcttcagaaagatctaagtcgtcagtaatgcctccaactataacaggatttaagcctaatgcacctctcactgatctgaacccggcagccagcagaacaacgacagagaacatggctccaataccaggttctaagcgcttttctcctgctggcctccatcatcgtatggcagcagaactcagttatctgaacgccattgaggagtcggtgcgccaactgtcagatgtagaaagagttagaggcatttcacttgctcagcaggagagtgtgtctctagctcagataataaaggcacaacagcaacgccatgaaagagacttggccctcttgaaactaaaggctgaacaagaggctctggagagtcagagacaattagaagaaacccgaaacaaagcagctcaggtccatgcagaatcattacagcaggtggttcaatcacaacgggaagtaactgaagtcctgcaggaagcaacgtgtaaaatagcagctcagcagtcagaaactgctcgcctcaccacagacgcagcacgtcaaatctgtgagatggcagagttgactagaactcatatctcagatgctgtcgtggcttcaggagctccccttgcaatactgtatgaccaccaacggcagcaccttccagactttgtgaaacagctgaggaccagaactgaaacagataggaaaagtccatctgtttcactctctcagagtaaagaagggacccttgactcaaagcatcagaagtattctgcttcatatgatagttattctgagtcttcaggatacaagaatcatgatagaagaagtagcagtggtagcagccgccaagaaagtccttcagttccatcttgtaaggaaaatgagaagaaacttaatggtgaaaagatagagagttccattgatgaacaggttcagactgctgcagatgattctctacgaagtgatagtgttccatctcttcctgatgaaaaagactcaacgtctattgcaacagaatattctctgaaatttgatgaatccatgacagaagatgaaatagaagaacaatcatttcgatcattactaccttcagagagtcaccgcagatttaacatggaaaagagaagaggtcatcatgatgactctgatgaagaagcttctccagaaaaaactacactgtctactgccaaggaactgaacatgccattctcaggaggacaagatagcttttctaaatttactatggagatggttcgacagtatatgaaagaggaagaaatgagggcagctcaccagtcttcactcctgcgtctccgtgaaaaggccttgaaggagaagactaaggctgaattggcctggttagagcatcaaaaaaaacatctacgagacaaaggagaggatgataaaatgcccccgctccggaagaaacagcgtggtttgcttttaaggttgcagcaagaaaaggcagaaataaaacgtcttcaagaagccaataaggcagctcggaaggaaagacagctgattcttaaacagcaggaggagatagaaaagatccgacagaccaccataaaactacaggagaaattgaagtctgcaggggagagtaaattggactctcatagtgatgatgatacaaaggataataaggcaaccagtcctggtccaactgacttggagacccgcagtccttctcccatttcaatctccagcagtgaaactagcagcattatgcagaaactgaagaaaatgagaagccgcatggatgaaaagtttctgacaaagcgggagcaaaaattaatgcaacggcgacaacatgcagaggagctcctagagtggaagcgacgtttagatgcagaagaagcagaaattcgtcaaatggaaaaacaagctttggctgcctgggacaaagaattaataaaacccaaaactcctaagaaagaactggaggaccagagaacagaacagaaagaaatagcaagtgaagaggaatctccagtacctctgtactctcatctaaacagtgaaagctccattccagaagaattaggcagccctgctgttgaatatgtaccatccgagtctataggacaggagcagccagggagtccagatcacagtatacttactgaagaaatgatttgttcacaggaactagaatcttctacctctcctagtaaacattcacttcccaaaagctgcacatctgtgtcaaagcaggagtctagcaaaggaagtcataggactggaggacaatgtcacctgcctatcaagtcccatcagcactgttatagttggtcagatgagtcattatctatgacacagtcagaaactacatctgaccagagtgatattgaaggtaggatcagagctctgaaggatgagttgcggaaaagaaaatcagttgtgaaccagctgaagaaggaacagaaaaaaaggcaaaaggaaagactgaaagcccaagaagccagtctgatcaagcagttagagtcatatgatgaatttattaagaaaactgaagccgagcttagccaagatttggaaacatcaccaacagccaagcctcagattaaaacgctctcctcagcttctgaaaaacccaagatcaaacccctcacaccactacacagatctgaaacggcaaagaattggaaatcactaacagagtcagaacgttccagaggatccctggagtctattgctgaacatgttgatgcttcactgtctggttctgagagatcagtatcagaaaggtctttatctgcatatgcaaagagagtaaatgaatgggacagtcgaacagaagattttcagaccccatctccagttctcagatcatcaaggaaaatcagagaagaatctggagattctctagaaaatgtacctgcattacatcttctcaaagaattaaatgccactagtagaattcttgatatgtcagatggcaaggttggagaatctagtaaaaaatcagaaataaaagaaatagagtatacaaaattgaagaagagtaagattgaagatgccttttctaaagaaggtaaatctgatgtcttactgaaattagtcctagaacagggagattcatctgaaattctttcaaagaaagatcttcctttagattctgaaaatgttcagaaagacctagttggattagctattgaaaatctccataaaagtgaggaaatgttgaaagagagacagtcagatcaagatatgaatcatagtccaaacatccaatcaggaaaagacattcacgaacaaaagaacacaaaggaaaaagatttgtcttggtcagaacatctttttgctcctaaagagataccatactctgaagattttgaagtgtcttctttcaagaaagaaatttcagctgaattgtacaaagatgattttgaggtgtcatctttgctgtcactcaggaaagactctcagtcttgcagagataagccacagccaatgaggagctctacaagtggagccactagctttggtagtaatgaggaaatcagtgagtgcctaagtgagaaaagcctttctatccatagcaatgttcattctgacaggctgttggaactcaagtcccctactgagctgatgaaaagtaaggagcgcagtgatgtggagcatgaacagcaagttactgaatccccttccttggcttcagttcctactgcagacgagttatttgatttccacattggtgatagggtgttgattggaaatgttcagccaggaattcttcgattcaaaggtgagactagttttgctaaaggattttgggccggagtggagttagataaacctgaaggaaataacaatggaacatatgatggtattgcatattttgagtgcaaagaaaagcatggtatttttgctcctcctcaaaaaatatctcacattccagaaaactttgatgactatgtagacattaatgaagatgaagactgttactcagatgaacgatatcagtgctataatcaagagcaaaatgatacagagggtccaaaagacagagaaaaggatgtcagtgaatatttttatgagaaatccctacctagtgtgaatgatatagaagcctcagttaatagaagtagaagccttaaaatagaaacagacaatgtacaggacatttctggggtacttgaagcccatgttcaccagcagtcttcagtggattcacagatttcttcaaaggaaaacaaagacctcatttctgatgccacagaaaaggtttccatcgctgcagaagatgacactttagacaataccttttccgaagaattggagaagcaacagcagtttacagaagaggaagacaacctatatgctgaagcttcagaaaagctttgtacaccacttctggatcttttaacaagagaaaaaaaccaactggaagcccagctgaagtcatcactaaatgaggaaaaaaagtcaaaacaacaactggaaaaaatcagcttactgacagacagtttactaaaagtctttgtaaaggacacagtcaatcaactacaacaaatcaaaaaaaccagggatgagaaaatccagcttagcaatcaggagcttcttggtgatgaccaaaagaaagtaacaccccaagacctatcccaaaatgttgaggaacagtcgccaagtatttcaggttgcttcttaagttctgaattggaagatgaaaaagaagagatttcctctccagatatgtgtcccagaccggagagcccagtatttggtgccagtgggcaggaagaacttgctaagagacttgctgaacttgaactcagccgggagttcctgagcgcgttaggagatgatcaagactggtttgatgaagactttggtttgagctcttctcacaagatccaaaaaaataaggcagaagaaaccattgtacctctaatggcagaacctaaaagagtaacccaacaaccatgtgaaacattattggcagtcccccatactgcagaagaagtagagattcttgtacataatgcagcagaagaactttggaaatggaaagaattaggccacgatcttcatagcatcagtattcctacaaaactgcttggctgtgccagtaaaggtctagatatagaaagcactagtaaaagggtctacaaacaggcggtttttgatttaacaaaagagatttttgaggaaatatttgctgaggatcccaacttaaatcaacctgtctggatgaagccatgtagaatcaactctagttatttccgacgagtgaaaaatccaaataaccttgatgaaatcaagagcttcatagcaagtgaagtactcaagttgttcagtcttaaaaaggagccaaaccacaaaacagattggcagaaaatgatgaaatttggaagaaagaaaagagaccgagtggatcatatcctggttcaggagctccatgaggaggaggcacagtgggtgaactatgatgaggatgagttgtgtgtgaaaatgcagctagccgacgggatctttgagaccctgatcaaagatactattgatgttctgaatcagatcagtgaaaagcaggggagaatgctacttgtgtgacatcttgcaaataaatcgaacgctgagtgctaatcattgcttctcacaactattacctgcatctgaaaaaaaatctatagactccagctgctacattagagcataagagatgctctcctgggacctcagtaccctgccttcttgactggtttccgttcatcagtcctgtccctcttcaagtaatctagaagaatgtggatactcttaggcgtgaatgtaaatgccttaatattgaaggtcctggttagaagcatgatacaagacatctactggattcatatttacaaatatcctggaatgttatagcttcaaagtatattagaaaaaccccaaagatggtataatctttaagtgtgcacgttcgtttatttctgcatcttccctccaaacttgcctttgcatcttaaatatttcactatgcacactcccattcctcttgggtttcatcttgtcgtttaagaaatgtactgaaataatcattggaatatttgcattttgcacaatgactggtatgatagctcttgacaaataaggaaagcactgaaatgttgtgattgggtctcgggaaatgctcagattgatgtcttaccagcatttcttctgggcttgtgatgttgagctgtagtcttgtagccataatgagcaaattgactaagagaagcaaaggtttcttggggttattaaccagtagtgtggaaatactagttttatgtggccaaggaaaagcaaaggcttttcttttcagtttgtgttatttggaagacagaaaaacatcttgtctacatcctttggctgtttgtaggatcacgttgtccttacgatactgaaactttacagctgctgtaaattttttataaatgaatttcaaaatgttataatgggactgtaggttgtttttctacatcttcattatttggacctaaaaccagtttttaataagaaagtttatctttactctttctgaaattatgactccagaaaaagaaaaaaaaaatacaagtcatggaatcagcaatctggtaagaaatgctgccaagaatgtggcagtagctgtcctgacagactccaactgtctttactatctgaagaatcctaggctccacatgagaggcagaaatggatcagtcttattcttttctagaaatggttatctgtagtttggtagcaaaaaaaaagaaaaaagaatccataattagcagatttcttattaactatttggatctaattgaaatggctttattcttaggattaagaaagatagatgtggatacccagccactcgttccatattggtatctttttaaatcagctctgcctcttaatcaagaacctaaatattccctctttctaatctttgttccttctccctacaccctcatcctctttcactcttccttcataattcctctaagaaaaatatctttgcatcagcagtaatatcttttagaatagcactatcagaatttagcagtaaaccaacatacaggcttcagatttacttctgagtccaaaacaatttgtgctatccagggtagttaactctgggttaaacaagtacagggtatagattccctcttcaggtctacacaggaatttttaccatagggaaaagtggggagagctcaaacgtagttaataaggaaggtaatttgtttttcttttacctaaaagaaaagaaaattccttctgtgactacaggtctctgagaaattatctttcaaaagagatttcattgctcataagagtgttgtggcctattgataaaaacaattttgttcagtttcttgtcttgaaaaaaaagtggccttagctttttgcaatacttgaataaagtgtgtactcgcaaaagaatttctgtagcacagcattagagactcataacttttctgcaagaaatacaaacttacatcttccttttactaccttaagaatactagtgaataaaacattaattcaaagagcaaattatagaaactacaatgacatttaatgcaaattgtaggaatttacatgtttacaaatcatcttcaactggttgtgcagcaattcaataaaatatctttgtattataaaaatgtgaagaaaaaatgtaaactgatgtaaaggaggtactgtcattttaattaacctatgtttaatagcttttccttctggactttgcaaagccttcttggcaaacacattgcaaagcattctctgggaggttcagcctccttgtgtgtactgtactgtgcagacatgaaaaaataaacccgtttactgtgtgcgtgtaaatagcctggtcatcaggccattttcagccaatagtcacatccagtgcaattttgcaccgaacacttaagggtgtggtttgtaagtacgatctgtaaaataactgggatgaattcccatgtatacctgtgtaaatagatttgttaactgaaatatactttaagaaagataaaatctgtaaataaactgatttataaattaa

SEQ ID NO: 324324 - DNA, 9077 bp, Homo sapiens
tgttaatgaagaaaagactgagagcggtaactggatgataggcaatcttagtgaatttaaaaagcttcctgagatgataagaccacagagtgccatatcaagctttagagtgagatcccctggtcccaaaccagaagggctactggcacagttatgtaaaaggcagactgactcttctagctctgatatgcaagcctgttctcaagacaaagccaaaatatctcttggttccagcatagattcagtcagtgaagggcctcttcttagtgaggggagtctctctgaagaagagggagaccaggatggacagccccttttgaaagtagcagaaattttaaaagaaaaggaattttgtcctggagaaagaaatagttatgaacccatcaaagagtttcagaaagaagctgaaaaattcttgccactttttgggcacataggtggtacacaaagcaaaggaccatgggaagaattggcaaagggaagtccacatagcgtcattaatatttttacaaaatcctatcagttatatggaaaagggtttgaagacaagttggacagaggaacatcaacatcacggcctttgaatgccaccgcaactcctctaagtggtgtttcatatgaagatgattttgtctcctctccagggactgggacttcgacagaaaaaaaatcaactcttgaacctcatagcactttaagccctcaggaggaccattctaacagaaagtctgcctatgatccttcctctgtggatgttacctcccagcattcatcaggagcccagtctgctgcatcgtctcgttcatctacttcttctaaaggaaagaaaggaaaaaaggaaaagacagaatggttggattcattcactggaaatgttcagaactcacttcttgatgaggaaaaagcagaacgtggctcccatcaaggaaagaaatctgggaccagcagcaaactttctgttaaagattttgagcagactcttgatacagatagcactttggaggatctttctggacattctgtgagtgtctcatcagataagggaagatctcagaaaactccaacttctcccctgtcaccaagttcccagaaatcattgcagtttgacgttgcaggaacttcttcagaaagatctaagtcgtcagtaatgcctccaactataacaggatttaagcctaatgcacctctcactgatctgaacccggcagccagcagaacaacgacagagaacatggctccaataccaggttctaagcgcttttctcctgctggcctccatcatcgtatggcagcagaactcagttatctgaacgccattgaggagtcggtgcgccaactgtcagatgtagaaagagttagaggcatttcacttgctcagcaggagagtgtgtctctagctcagataataaaggcacaacagcaacgccatgaaagagacttggccctcttgaaactaaaggctgaacaagaggctctggagagtcagagacaattagaagaaacccgaaacaaagcagctcaggtccatgcagaatcattacagcaggtggttcaatcacaacgggaagtaactgaagtcctgcaggaagcaacgtgtaaaatagcagctcagcagtcagaaactgctcgcctcaccacagacgcagcacgtcaaatctgtgagatggcagagttgactagaactcatatctcagatgctgtcgtggcttcaggagctccccttgcaatactgtatgaccaccaacggcagcaccttccagactttgtgaaacagctgaggaccagaactgaaacagataggaaaagtccatctgtttcactctctcagagtaaagaagggacccttgactcaaagcatcagaagtattctgcttcatatgatagttattctgagtcttcaggatacaagaatcatgatagaagaagtagcagtggtagcagccgccaagaaagtccttcagttccatcttgtaaggaaaatgagaagaaacttaatggtgaaaagatagagagttccattgatgaacaggttcagactgctgcagatgattctctacgaagtgatagtgttccatctcttcctgatgaaaaagactcaacgtctattgcaacagaatattctctgaaatttgatgaatccatgacagaagatgaaatagaagaacaatcatttcgatcattactaccttcagagagtcaccgcagatttaacatggaaaagagaagaggtcatcatgatgactctgatgaagaagcttctccagaaaaaactacactgtctactgccaaggaactgaacatgccattctcaggaggacaagatagcttttctaaatttactatggagatggttcgacagtatatgaaagaggaagaaatgagggcagctcaccagtcttcactcctgcgtctccgtgaaaaggccttgaaggagaagactaaggctgaattggcctggttagagcatcaaaaaaaacatctacgagacaaaggagaggatgataaaatgcccccgctccggaagaaacagcgtggtttgcttttaaggttgcagcaagaaaaggcagaaataaaacgtcttcaagaagccaataaggcagctcggaaggaaagacagctgattcttaaacagcaggaggagatagaaaagatccgacagaccaccataaaactacaggagaaattgaagtctgcaggggagagtaaattggactctcatagtgatgatgatacaaaggataataaggcaaccagtcctggtccaactgacttggagacccgcagtccttctcccatttcaatctccagcagtgaaactagcagcattatgcagaaactgaagaaaatgagaagccgcatggatgaaaagtttctgacaaagcgggagcaaaaattaatgcaacggcgacaacatgcagaggagctcctagagtggaagcgacgtttagatgcagaagaagcagaaattcgtcaaatggaaaaacaagctttggctgcctgggacaaagaattaataaaacccaaaactcctaagaaagaactggaggaccagagaacagaacagaaagaaatagcaagtgaagaggaatctccagtacctctgtactctcatctaaacagtgaaagctccattccagaagaattaggcagccctgctgttgaatatgtaccatccgagtctataggacaggagcagccagggagtccagatcacagtatacttactgaagaaatgatttgttcacaggaactagaatcttctacctctcctagtaaacattcacttcccaaaagctgcacatctgtgtcaaagcaggagtctagcaaaggaagtcataggactggaggacaatgtcacctgcctatcaagtcccatcagcactgttatagttggtcagatgagtcattatctatgacacagtcagaaactacatctgaccagagtgatattgaaggtaggatcagagctctgaaggatgagttgcggaaaagaaaatcagttgtgaaccagctgaagaaggaacagaaaaaaaggcaaaaggaaagactgaaagcccaagaagccagtctgatcaagcagttagagtcatatgatgaatttattaagaaaactgaagccgagcttagccaagatttggaaacatcaccaacagccaagcctcagattaaaacgctctcctcagcttctgaaaaacccaagatcaaacccctcacaccactacacagatctgaaacggcaaagaattggaaatcactaacagagtcagaacgttccagaggatccctggagtctattgctgaacatgttgatgcttcactgtctggttctgagagatcagtatcagaaaggtctttatctgcatatgcaaagagagtaaatgaatgggacagtcgaacagaagattttcagaccccatctccagttctcagatcatcaaggaaaatcagagaagaatctggagattctctagaaaatgtacctgcattacatcttctcaaagaattaaatgccactagtagaattcttgatatgtcagatggcaaggttggagaatctagtaaaaaatcagaaataaaagaaatagagtatacaaaattgaagaagagtaagattgaagatgccttttctaaagaaggtaaatctgatgtcttactgaaattagtcctagaacagggagattcatctgaaattctttcaaagaaagatcttcctttagattctgaaaatgttcagaaagacctagttggattagctattgaaaatctccataaaagtgaggaaatgttgaaagagagacagtcagatcaagatatgaatcatagtccaaacatccaatcaggaaaagacattcacgaacaaaagaacacaaaggaaaaagatttgtcttggtcagaacatctttttgctcctaaagagataccatactctgaagattttgaagtgtcttctttcaagaaagaaatttcagctgaattgtacaaagatgattttgaggtgtcatctttgctgtcactcaggaaagactctcagtcttgcagagataagccacagccaatgaggagctctacaagtggagccactagctttggtagtaatgaggaaatcagtgagtgcctaagtgagaaaagcctttctatccatagcaatgttcattctgacaggctgttggaactcaagtcccctactgagctgatgaaaagtaaggagcgcagtgatgtggagcatgaacagcaagttactgaatccccttccttggcttcagttcctactgcagacgagttatttgatttccacattggtgatagggtgttgattggaaatgttcagccaggaattcttcgattcaaaggtgagactagttttgctaaaggattttgggccggagtggagttagataaacctgaaggaaataacaatggaacatatgatggtattgcatattttgagtgcaaagaaaagcatggtatttttgctcctcctcaaaaaatatctcacattccagaaaactttgatgactatgtagacattaatgaagatgaagactgttactcagatgaacgatatcagtgctataatcaagagcaaaatgatacagagggtccaaaagacagagaaaaggatgtcagtgaatatttttatgagaaatccctacctagtgtgaatgatatagaagcctcagttaatagaagtagaagccttaaaatagaaacagacaatgtacaggacatttctggggtacttgaagcccatgttcaccagcagtcttcagtggattcacagatttcttcaaaggaaaacaaagacctcatttctgatgccacagaaaaggtttccatcgctgcagaagatgacactttagacaataccttttccgaagaattggagaagcaacagcagtttacagaagaggaagacaacctatatgctgaagcttcagaaaagctttgtacaccacttctggatcttttaacaagagaaaaaaaccaactggaagcccagctgaagtcatcactaaatgaggaaaaaaagtcaaaacaacaactggaaaaaatcagcttactgacagacagtttactaaaagtctttgtaaaggacacagtcaatcaactacaacaaatcaaaaaaaccagggatgagaaaatccagcttagcaatcaggagcttcttggtgatgaccaaaagaaagtaacaccccaagacctatcccaaaatgttgaggaacagtcgccaagtatttcaggttgcttcttaagttctgaattggaagatgaaaaagaagagatttcctctccagatatgtgtcccagaccggagagcccagtatttggtgccagtgggcaggaagaacttgctaagagacttgctgaacttgaactcagccgggagttcctgagcgcgttaggagatgatcaagactggtttgatgaagactttggtttgagctcttctcacaagatccaaaaaaataaggcagaagaaaccattgtacctctaatggcagaacctaaaagagtaacccaacaaccatgtgaaacattattggcagtcccccatactgcagaagaagtagagattcttgtacataatgcagcagaagaactttggaaatggaaagaattaggccacgatcttcatagcatcagtattcctacaaaactgcttggctgtgccagtaaaggtctagatatagaaagcactagtaaaagggtctacaaacaggcggtttttgatttaacaaaagagatttttgaggaaatatttgctgaggatcccaacttaaatcaacctgtctggatgaagccatgtagaatcaactctagttatttccgacgagtgaaaaatccaaataaccttgatgaaatcaagagcttcatagcaagtgaagtactcaagttgttcagtcttaaaaaggagccaaaccacaaaacagattggcagaaaatgatgaaatttggaagaaagaaaagagaccgagtggatcatatcctggttcaggagctccatgaggaggaggcacagtgggtgaactatgatgaggatgagttgtgtgtgaaaatgcagctagccgacgggatctttgagaccctgatcaaagatactattgatgttctgaatcagatcagtgaaaagcaggggagaatgctacttgtgtgacatcttgcaaataaatcgaacgctgagtgctaatcattgcttctcacaactattacctgcatctgaaaaaaaatctatagactccagctgctacattagagcataagagatgctctcctgggacctcagtaccctgccttcttgactggtttccgttcatcagtcctgtccctcttcaagtaatctagaagaatgtggatactcttaggcgtgaatgtaaatgccttaatattgaaggtcctggttagaagcatgatacaagacatctactggattcatatttacaaatatcctggaatgttatagcttcaaagtatattagaaatcttccctccaaacttgcctttgcatcttaaatatttcactatgcacactcccattcctcttgggtttcatcttgtcgtttaagaaatgtactgaaataatcattggaatatttgcattttgcacaatgactggtatgatagctcttgacaaataaggaaagcactgaaatgttgtgattgggtctcgggaaatgctcagattgatgtcttaccagcatttcttctgggcttgtgatgttgagctgtagtcttgtagccataatgagcaaattgactaagagaagcaaaggtttcttggggttattaaccagtagtgtggaaatactagttttatgtggccaaggaaaagcaaaggcttttcttttcagtttgtgttatttggaagacagaaaaacatcttgtctacatcctttggctgtttgtaggatcacgttgtccttacgatactgaaactttacagctgctgtaaattttttataaatgaatttcaaaatgttataatgggactgtaggttgtttttctacatcttcattatttggacctaaaaccagtttttaataagaaagtttatctttactctttctgaaattatgactccagaaaaagaaaaaaaaaatacaagtcatggaatcagcaatctggtaagaaatgctgccaagaatgtggcagtagctgtcctgacagactccaactgtctttactatctgaagaatcctaggctccacatgagaggcagaaatggatcagtcttattcttttctagaaatggttatctgtagtttggtagcaaaaaaaaagaaaaaagaatccataattagcagatttcttattaactatttggatctaattgaaatggctttattcttaggattaagaaagatagatgtggatacccagccactcgttccatattggtatctttttaaatcagctctgcctcttaatcaagaacctaaatattccctctttctaatctttgttccttctccctacaccctcatcctctttcactcttccttcataattcctctaagaaaaatatctttgcatcagcagtaatatcttttagaatagcactatcagaatttagcagtaaaccaacatacaggcttcagatttacttctgagtccaaaacaatttgtgctatccagggtagttaactctgggttaaacaagtacagggtatagattccctcttcaggtctacacaggaatttttaccatagggaaaagtggggagagctcaaacgtagttaataaggaaggtaatttgtttttcttttacctaaaagaaaagaaaattccttctgtgactacaggtctctgagaaattatctttcaaaagagatttcattgctcataagagtgttgtggcctattgataaaaacaattttgttcagtttcttgtcttgaaaaaaaagtggccttagctttttgcaatacttgaataaagtgtgtactcgcaaaagaatttctgtagcacagcattagagactcataacttttctgcaagaaatacaaacttacatcttccttttactaccttaagaatactagtgaataaaacattaattcaaagagcaaattatagaaactacaatgacatttaatgcaaattgtaggaatttacatgtttacaaatcatcttcaactggttgtgcagcaattcaataaaatatctttgtattataaaaatgtgaagaaaaaatgtaaactgatgtaaaggaggtactgtcattttaattaacctatgtttaatagcttttccttctggactttgcaaagccttcttggcaaacacattgcaaagcattctctgggaggttcagcctccttgtgtgtactgtactgtgcagacatgaaaaaataaacccgtttactgtgtgcgtgtaaatagcctggtcatcaggccattttcagccaatagtcacatccagtgcaattttgcaccgaacacttaagggtgtggtttgtaagtacgatctgtaaaataactgggatgaattcccatgtatacctgtgtaaatagatttgttaactgaaatatactttaagaaagataaaatctgtaaataaactgatttataaattaa

SEQ ID NO: 324325 - DNA, 6824 bp, Homo sapiens
gtacgggctatcgtcgaccaggcgctcgaaatttactatggagatggttcgacagtatatgaaagaggaagaaatgagggcagctcaccagtcttcactcctgcgtctccgtgaaaaggccttgaaggagaagactaaggctgaattggcctggttagagcatcaaaaaaaacatctacgagacaaaggagaggatgataaaatgcccccgctccggaagaaacagcgtggtttgcttttaaggttgcagcaagaaaaggcagaaataaaacgtcttcaagaagccaataaggcagctcggaaggaaagacagctgattcttaaacagcaggaggagatagaaaagatccgacagaccaccataaaactacaggagaaattgaagtctgcaggggagagtaaattggactctcatagtgatgatgatacaaaggataataaggcaaccagtcctggtccaactgacttggagacccgcagtccttctcccatttcaatctccagcagtgaaactagcagcattatgcagaaactgaagaaaatgagaagccgcatggatgaaaagtttctgacaaagcgggagcaaaaattaatgcaacggcgacaacatgcagaggagctcctagagtggaagcgacgtttagatgcagaagaagcagaaattcgtcaaatggaaaaacaagctttggctgcctgggacaaagaattaataaaacccaaaactcctaagaaagaactggaggaccagagaacagaacagaaagaaatagcaagtgaagaggaatctccagtacctctgtactctcatctaaacagtgaaagctccattccagaagaattaggcagccctgctgttgaatatgtaccatccgagtctataggacaggagcagccagggagtccagatcacagtatacttactgaagaaatgatttgttcacaggaactagaatcttctacctctcctagtaaacattcacttcccaaaagctgcacatctgtgtcaaagcaggagtctagcaaaggaagtcataggactggaggacaatgtcacctgcctatcaagtcccatcagcactgttatagttggtcagatgagtcattatctatgacacagtcagaaactacatctgaccagagtgatattgaaggtaggatcagagctctgaaggatgagttgcggaaaagaaaatcagttgtgaaccagctgaagaaggaacagaaaaaaaggcaaaaggaaagactgaaagcccaagaagccagtctgatcaagcagttagagtcatatgatgaatttattaagaaaactgaagccgagcttagccaagatttggaaacatcaccaacagccaagcctcagattaaaacgctctcctcagcttctgaaaaacccaagatcaaacccctcacaccactacacagatctgaaacggcaaagaattggaaatcactaacagagtcagaacgttccagaggatccctggagtctattgctgaacatgttgatgcttcactgtctggttctgagagatcagtatcagaaaggtctttatctgcatatgcaaagagagtaaatgaatgggacagtcgaacagaagattttcagaccccatctccagttctcagatcatcaaggaaaatcagagaagaatctggagattctctagaaaatgtacctgcattacatcttctcaaagaattaaatgccactagtagaattcttgatatgtcagatggcaaggttggagaatctagtaaaaaatcagaaataaaagaaatagagtatacaaaattgaagaagagtaagattgaagatgccttttctaaagaaggtaaatctgatgtcttactgaaattagtcctagaacagggagattcatctgaaattctttcaaagaaagatcttcctttagattctgaaaatgttcagaaagacctagttggattagctattgaaaatctccataaaagtgaggaaatgttgaaagagagacagtcagatcaagatatgaatcatagtccaaacatccaatcaggaaaagacattcacgaacaaaagaacacaaaggaaaaagatttgtcttggtcagaacatctttttgctcctaaagagataccatactctgaagattttgaagtgtcttctttcaagaaagaaatttcagctgaattgtacaaagatgattttgaggtgtcatctttgctgtcactcaggaaagactctcagtcttgcagagataagccacagccaatgaggagctctacaagtggagccactagctttggtagtaatgaggaaatcagtgagtgcctaagtgagaaaagcctttctatccatagcaatgttcattctgacaggctgttggaactcaagtcccctactgagctgatgaaaagtaaggagcgcagtgatgtggagcatgaacagcaagttactgaatccccttccttggcttcagttcctactgcagacgagttatttgatttccacattggtgatagggtgttgattggaaatgttcagccaggaattcttcgattcaaaggtgagactagttttgctaaaggattttgggccggagtggagttagataaacctgaaggaaataacaatggaacatatgatggtattgcatattttgagtgcaaagaaaagcatggtatttttgctcctcctcaaaaaatatctcacattccagaaaactttgatgactatgtagacattaatgaagatgaagactgttactcagatgaacgatatcagtgctataatcaagagcaaaatgatacagagggtccaaaagacagagaaaaggatgtcagtgaatatttttatgagaaatccctacctagtgtgaatgatatagaagcctcagttaatagaagtagaagccttaaaatagaaacagacaatgtacaggacatttctggggtacttgaagcccatgttcaccagcagtcttcagtggattcacagatttcttcaaaggaaaacaaagacctcatttctgatgccacagaaaaggtttccatcgctgcagaagatgacactttagacaataccttttccgaagaattggagaagcaacagcagtttacagaagaggaagacaacctatatgctgaagcttcagaaaagctttgtacaccacttctggatcttttaacaagagaaaaaaaccaactggaagcccagctgaagtcatcactaaatgaggaaaaaaagtcaaaacaacaactggaaaaaatcagcttactgacagacagtttactaaaagtctttgtaaaggacacagtcaatcaactacaacaaatcaaaaaaaccagggatgagaaaatccagcttagcaatcaggagcttcttggtgatgaccaaaagaaagtaacaccccaagacctatcccaaaatgttgaggaacagtcgccaagtatttcaggttgcttcttaagttctgaattggaagatgaaaaagaagagatttcctctccagatatgtgtcccagaccggagagcccagtatttggtgccagtgggcaggaagaacttgctaagagacttgctgaacttgaactcagccgggagttcctgagcgcgttaggagatgatcaagactggtttgatgaagactttggtttgagctcttctcacaagatccaaaaaaataaggcagaagaaaccattgtacctctaatggcagaacctaaaagagtaacccaacaaccatgtgaaacattattggcagtcccccatactgcagaagaagtagagattcttgtacataatgcagcagaagaactttggaaatggaaagaattaggccacgatcttcatagcatcagtattcctacaaaactgcttggctgtgccagtaaaggtctagatatagaaagcactagtaaaagggtctacaaacaggcggtttttgatttaacaaaagagatttttgaggaaatatttgctgaggatcccaacttaaatcaacctgtctggatgaagccatgtagaatcaactctagttatttccgacgagtgaaaaatccaaataaccttgatgaaatcaagagcttcatagcaagtgaagtactcaagttgttcagtcttaaaaaggagccaaaccacaaaacagattggcagaaaatgatgaaatttggaagaaagaaaagagaccgagtggatcatatcctggttcaggagctccatgaggaggaggcacagtgggtgaactatgatgaggatgagttgtgtgtgaaaatgcagctagccgacgggatctttgagaccctgatcaaagatactattgatgttctgaatcagatcagtgaaaagcaggggagaatgctacttgtgtgacatcttgcaaataaatcgaacgctgagtgctaatcattgcttctcacaactattacctgcatctgaaaaaaaatctatagactccagctgctacattagagcataagagatgctctcctgggacctcagtaccctgccttcttgactggtttccgttcatcagtcctgtccctcttcaagtaatctagaagaatgtggatactcttaggcgtgaatgtaaatgccttaatattgaaggtcctggttagaagcatgatacaagacatctactggattcatatttacaaatatcctggaatgttatagcttcaaagtatattagaaaaaccccaaagatggtataatctttaagtgtgcacgttcgtttatttctgcatcttccctccaaacttgcctttgcatcttaaatatttcactatgcacactcccattcctcttgggtttcatcttgtcgtttaagaaatgtactgaaataatcattggaatatttgcattttgcacaatgactggtatgatagctcttgacaaataaggaaagcactgaaatgttgtgattgggtctcgggaaatgctcagattgatgtcttaccagcatttcttctgggcttgtgatgttgagctgtagtcttgtagccataatgagcaaattgactaagagaagcaaaggtttcttggggttattaaccagtagtgtggaaatactagttttatgtggccaaggaaaagcaaaggcttttcttttcagtttgtgttatttggaagacagaaaaacatcttgtctacatcctttggctgtttgtaggatcacgttgtccttacgatactgaaactttacagctgctgtaaattttttataaatgaatttcaaaatgttataatgggactgtaggttgtttttctacatcttcattatttggacctaaaaccagtttttaataagaaagtttatctttactctttctgaaattatgactccagaaaaagaaaaaaaaaatacaagtcatggaatcagcaatctggtaagaaatgctgccaagaatgtggcagtagctgtcctgacagactccaactgtctttactatctgaagaatcctaggctccacatgagaggcagaaatggatcagtcttattcttttctagaaatggttatctgtagtttggtagcaaaaaaaaagaaaaaagaatccataattagcagatttcttattaactatttggatctaattgaaatggctttattcttaggattaagaaagatagatgtggatacccagccactcgttccatattggtatctttttaaatcagctctgcctcttaatcaagaacctaaatattccctctttctaatctttgttccttctccctacaccctcatcctctttcactcttccttcataattcctctaagaaaaatatctttgcatcagcagtaatatcttttagaatagcactatcagaatttagcagtaaaccaacatacaggcttcagatttacttctgagtccaaaacaatttgtgctatccagggtagttaactctgggttaaacaagtacagggtatagattccctcttcaggtctacacaggaatttttaccatagggaaaagtggggagagctcaaacgtagttaataaggaaggtaatttgtttttcttttacctaaaagaaaagaaaattccttctgtgactacaggtctctgagaaattatctttcaaaagagatttcattgctcataagagtgttgtggcctattgataaaaacaattttgttcagtttcttgtcttgaaaaaaaagtggccttagctttttgcaatacttgaataaagtgtgtactcgcaaaagaatttctgtagcacagcattagagactcataacttttctgcaagaaatacaaacttacatcttccttttactaccttaagaatactagtgaataaaacattaattcaaagagcaaattatagaaactacaatgacatttaatgcaaattgtaggaatttacatgtttacaaatcatcttcaactggttgtgcagcaattcaataaaatatctttgtattataaaaatgtgaagaaaaaatgtaaactgatgtaaaggaggtactgtcattttaattaacctatgtttaatagcttttccttctggactttgcaaagccttcttggcaaacacattgcaaagcattctctgggaggttcagcctccttgtgtgtactgtactgtgcagacatgaaaaaataaacccgtttactgtgtgcgtgtaaatagcctggtcatcaggccattttcagccaatagtcacatccagtgcaattttgcaccgaacacttaagggtgtggtttgtaagtacgatctgtaaaataactgggatgaattcccatgtatacctgtgtaaatagatttgttaactgaaatatactttaagaaagataaaatctgtaaataaactgatttataaattaa

SEQ ID NO: 324326 - DNA, 6408 bp, Homo sapiens
aaaaattacatgaaagaacaaggaccaaaaagcaaagacactactaaagaaccacaaaatgcagaaacttactttaccatacatcaagacttctaaggtgtagtgattaaaataataacatttgcacagagagagacaaatagactgtgaaatagataacccagaaatagatctgtgcatctgtggaagctatgactctcctgtttgtgggagacaaaaatgcagtaagtaataatatgctaaaaacaatgtttattagtgtaattttcccattgaccaagattgtatcttttttttcttgttttcaccttctctgtctagaaatagcaagtgaagaggaatctccagtacctctgtactctcatctaaacagtgaaagctccattccagaagaattaggcagccctgctgttgaatatgtaccatccgagtctataggacaggagcagccagggagtccagatcacagtatacttactgaagaaatgatttgttcacaggaactagaatcttctacctctcctagtaaacattttccatttggttttctgtttgaacagtcacttcccaaaagctgcacatctgtgtcaaagcaggagtctagcaaaggaagtcataggactggaggacaatgtcacctgcctatcaagtcccatcagcactgttatagttggtcagatgagtcattatctatgacacagtcagaaactacatctgaccagagtgatattgaaggtaggatcagagctctgaaggatgagttgcggaaaagaaaatcagttgtgaaccagctgaagaaggaacagaaaaaaaggcaaaaggaaagactgaaagcccaagaagccagtctgatcaagcagttagagtcatatgatgaatttattaagaaaactgaagccgagcttagccaagatttggaaacatcaccaacagccaagcctcagattaaaacgctctcctcagcttctgaaaaacccaagatcaaacccctcacaccactacacagatctgaaacggcaaagaattggaaatcactaacagagtcagaacgttccagaggatccctggagtctattgctgaacatgttgatgcttcactgtctggttctgagagatcagtatcagaaaggtctttatctgcatatgcaaagagagtaaatgaatgggacagtcgaacagaagattttcagaccccatctccagttctcagatcatcaaggaaaatcagagaagaatctggagattctctagaaaatgtacctgcattacatcttctcaaagaattaaatgccactagtagaattcttgatatgtcagatggcaaggttggagaatctagtaaaaaatcagaaataaaagaaatagagtatacaaaattgaagaagagtaagattgaagatgccttttctaaagaaggtaaatctgatgtcttactgaaattagtcctagaacagggagattcatctgaaattctttcaaagaaagatcttcctttagattctgaaaatgttcagaaagacctagttggattagctattgaaaatctccataaaagtgaggaaatgttgaaagagagacagtcagatcaagatatgaatcatagtccaaacatccaatcaggaaaagacattcacgaacaaaagaacacaaaggaaaaagatttgtcttggtcagaacatctttttgctcctaaagagataccatactctgaagattttgaagtgtcttctttcaagaaagaaatttcagctgaattgtacaaagatgattttgaggtgtcatctttgctgtcactcaggaaagactctcagtcttgcagagataagccacagccaatgaggagctctacaagtggagccactagctttggtagtaatgaggaaatcagtgagtgcctaagtgagaaaagcctttctatccatagcaatgttcattctgacaggctgttggaactcaagtcccctactgagctgatgaaaagtaaggagcgcagtgatgtggagcatgaacagcaagttactgaatccccttccttggcttcagttcctactgcagacgagttatttgatttccacattggtgatagggtgttgattggaaatgttcagccaggaattcttcgattcaaaggtgagactagttttgctaaaggattttgggccggagtggagttagataaacctgaaggaaataacaatggaacatatgatggtattgcatattttgagtgcaaagaaaagcatggtatttttgctcctcctcaaaaaatatctcacattccagaaaactttgatgactatgtagacattaatgaagatgaagactgttactcagatgaacgatatcagtgctataatcaagagcaaaatgatacagagggtccaaaagacagagaaaaggatgtcagtgaatatttttatgagaaatccctacctagtgtgaatgatatagaagcctcagttaatagaagtagaagccttaaaatagaaacagacaatgtacaggacatttctggggtacttgaagcccatgttcaccagcagtcttcagtggattcacagatttcttcaaaggaaaacaaagacctcatttctgatgccacagaaaaggtttccatcgctgcagaagatgacactttagacaataccttttccgaagaattggagaagcaacagcagtttacagaagaggaagacaacctatatgctgaagcttcagaaaagctttgtacaccacttctggatcttttaacaagagaaaaaaaccaactggaagcccagctgaagtcatcactaaatgaggaaaaaaagtcaaaacaacaactggaaaaaatcagcttactgacagacagtttactaaaagtctttgtaaaggacacagtcaatcaactacaacaaatcaaaaaaaccagggatgagaaaatccagcttagcaatcaggagcttcttggtgatgaccaaaagaaagtaacaccccaagacctatcccaaaatgttgaggaacagtcgccaagtatttcaggttgcttcttaagttctgaattggaagatgaaaaagaagagatttcctctccagatatgtgtcccagaccggagagcccagtatttggtgccagtgggcaggaagaacttgctaagagacttgctgaacttgaactcagccgggagttcctgagcgcgttaggagatgatcaagactggtttgatgaagactttggtttgagctcttctcacaagatccaaaaaaataaggcagaagaaaccattgtacctctaatggcagaacctaaaagagtaacccaacaaccatgtgaaacattattggcagtcccccatactgcagaagaagtagagattcttgtacataatgcagcagaagaactttggaaatggaaagaattaggccacgatcttcatagcatcagtattcctacaaaactgcttggctgtgccagtaaaggtctagatatagaaagcactagtaaaagggtctacaaacaggcggtttttgatttaacaaaagagatttttgaggaaatatttgctgaggatcccaacttaaatcaacctgtctggatgaagccatgtagaatcaactctagttatttccgacgagtgaaaaatccaaataaccttgatgaaatcaagagcttcatagcaagtgaagtactcaagttgttcagtcttaaaaaggagccaaaccacaaaacagattggcagaaaatgatgaaatttggaagaaagaaaagagaccgagtggatcatatcctggttcaggagctccatgaggaggaggcacagtgggtgaactatgatgaggatgagttgtgtgtgaaaatgcagctagccgacgggatctttgagaccctgatcaaagatactattgatgttctgaatcagatcagtgaaaagcaggggagaatgctacttgtgtgacatcttgcaaataaatcgaacgctgagtgctaatcattgcttctcacaactattacctgcatctgaaaaaaaatctatagactccagctgctacattagagcataagagatgctctcctgggacctcagtaccctgccttcttgactggtttccgttcatcagtcctgtccctcttcaagtaatctagaagaatgtggatactcttaggcgtgaatgtaaatgccttaatattgaaggtcctggttagaagcatgatacaagacatctactggattcatatttacaaatatcctggaatgttatagcttcaaagtatattagaaaaaccccaaagatggtataatctttaagtgtgcacgttcgtttatttctgcatcttccctccaaacttgcctttgcatcttaaatatttcactatgcacactcccattcctcttgggtttcatcttgtcgtttaagaaatgtactgaaataatcattggaatatttgcattttgcacaatgactggtatgatagctcttgacaaataaggaaagcactgaaatgttgtgattgggtctcgggaaatgctcagattgatgtcttaccagcatttcttctgggcttgtgatgttgagctgtagtcttgtagccataatgagcaaattgactaagagaagcaaaggtttcttggggttattaaccagtagtgtggaaatactagttttatgtggccaaggaaaagcaaaggcttttcttttcagtttgtgttatttggaagacagaaaaacatcttgtctacatcctttggctgtttgtaggatcacgttgtccttacgatactgaaactttacagctgctgtaaattttttataaatgaatttcaaaatgttataatgggactgtaggttgtttttctacatcttcattatttggacctaaaaccagtttttaataagaaagtttatctttactctttctgaaattatgactccagaaaaagaaaaaaaaaatacaagtcatggaatcagcaatctggtaagaaatgctgccaagaatgtggcagtagctgtcctgacagactccaactgtctttactatctgaagaatcctaggctccacatgagaggcagaaatggatcagtcttattcttttctagaaatggttatctgtagtttggtagcaaaaaaaaagaaaaaagaatccataattagcagatttcttattaactatttggatctaattgaaatggctttattcttaggattaagaaagatagatgtggatacccagccactcgttccatattggtatctttttaaatcagctctgcctcttaatcaagaacctaaatattccctctttctaatctttgttccttctccctacaccctcatcctctttcactcttccttcataattcctctaagaaaaatatctttgcatcagcagtaatatcttttagaatagcactatcagaatttagcagtaaaccaacatacaggcttcagatttacttctgagtccaaaacaatttgtgctatccagggtagttaactctgggttaaacaagtacagggtatagattccctcttcaggtctacacaggaatttttaccatagggaaaagtggggagagctcaaacgtagttaataaggaaggtaatttgtttttcttttacctaaaagaaaagaaaattccttctgtgactacaggtctctgagaaattatctttcaaaagagatttcattgctcataagagtgttgtggcctattgataaaaacaattttgttcagtttcttgtcttgaaaaaaaagtggccttagctttttgcaatacttgaataaagtgtgtactcgcaaaagaatttctgtagcacagcattagagactcataacttttctgcaagaaatacaaacttacatcttccttttactaccttaagaatactagtgaataaaacattaattcaaagagcaaattatagaaactacaatgacatttaatgcaaattgtaggaatttacatgtttacaaatcatcttcaactggttgtgcagcaattcaataaaatatctttgtattataaaaatgtgaagaaaaaatgtaaactgatgtaaaggaggtactgtcattttaattaacctatgtttaatagcttttccttctggactttgcaaagccttcttggcaaacacattgcaaagcattctctgggaggttcagcctccttgtgtgtactgtactgtgcagacatgaaaaaataaacccgtttactgtgtgcgtgtaaatagcctggtcatcaggccattttcagccaatagtcacatccagtgcaattttgcaccgaacacttaagggtgtggtttgtaagtacgatctgtaaaataactgggatgaattcccatgtatacctgtgtaaatagatttgttaactgaaatatactttaagaaagataaaatctgtaaataaactgatttataaattaa

SEQ ID NO: 324327 - DNA, 1790 bp, Homo sapiens
ggacgcgtgggtcgaccacgcgtcgcggacgcgtggggaaaagcaaaggcttttcttttcagtttgtgttatttggaagacagaaaaacatcttgtctacatcctttggctgtttgtaggatcacgttgtccttacgatactgaaactttacagctgctgtaaattttttataaatgaatttcaaaatgttataatgggactgtaggttgtttttctacatcttcattatttggacctaaaaccagtttttaataagaaagtttatctttactctttctgaaattatgactccagaaaaagaaaaaaaaaatacaagtcatggaatcagcaatctggtaagaaatgctgccaagaatgtggcagtagctgtcctgacagactccaactgtctttactatctgaagaatcctaggctccacatgagaggcagaaatggatcagtcttattcttttctagaaatggttatctgtagtttggtagcaaaaaaaaagaaaaaagaatccataattagcagatttcttattaactatttggatctaattgaaatggctttattcttaggattaagaaagatagatgtggatacccagccactcgttccatattggtatctttttaaatcagctctgcctcttaatcaagaacctaaatattccctctttctaatctttgttccttctccctacaccctcatcctctttcactcttccttcataattcctctaagaaaaatatctttgcatcagcagtaatatcttttagaatagcactatcagaatttagcagtaaaccaacatacaggcttcagatttacttctgagtccaaaacaatttgtgctatccagggtagttaactctgggttaaacaagtacagggtatagattccctcttcaggtctacacaggaatttttaccatagggaaaagtggggagagctcaaacgtagttaataaggaaggtaatttgtttttcttttacctaaaagaaaagaaaattccttctgtgactacaggtctctgagaaattatctttcaaaagagatttcattgctcataagagtgttgtggcctattgataaaaacaattttgttcagtttcttgtcttgaaaaaaaagtggccttagctttttgcaatacttgaataaagtgtgtactcgcaaaagaatttctgtagcacagcattagagactcataacttttctgcaagaaatacaaacttacatcttccttttactaccttaagaatactagtgaataaaacattaattcaaagagcaaattatagaaactacaatgacatttaatgcaaattgtaggaatttacatgtttacaaatcatcttcaactggttgtgcagcaattcaataaaatatctttgtattataaaaatgtgaagaaaaaatgtaaactgatgtaaaggaggtactgtcattttaattaacctatgtttaatagcttttccttctggactttgcaaagccttcttggcaaacacattgcaaagcattctctgggaggttcagcctccttgtgtgtactgtactgtgcagacatgaaaaaataaacccgtttactgtgtgcgtgtaaatagcctggtcatcaggccattttcagccaatagtcacatccagtgcaattttgcaccgaacacttaagggtgtggtttgtaagtacgatctgtaaaataactgggatgaattcccatgtatacctgtgtaaatagatttgttaactgaaatatactttaagaaagataaaatctgtaaataaactgatttataaattaa

SEQ ID NO: 324328 - DNA, 1447 bp, Homo sapiens
ttagatattctaaagcggcgacaacatgatgtcaaactggaaaaacttaaggaacggattagaaaacagtgggaacactcagaagaaacaaatggccggggccagaagctgggtcatattgaccatccagtaatggttgttaatgttgataactcagtaacagcaaaagtcagaaaagtggcaacagcaccacctgctccagcatataaaggtttcaacccttcagagaccaagattcgaacacctgatgggaaagtgtggcaggaggctgagtttcaaaacatgagtagagaactgtatcgagatttagcacttcactttgcagatgatatttctataaaggagaaacctgctgaaaaaagtaaagagaagaaagtagtcaagccagtacgaaaagtccaaaaagtagcacagttatcaagtacagaatgcagaacaggtagtagtcatcttataagtacatcttcttggcgagatggacaaaaattagtaaagaagattctgggacctgctcccagaatggagccaaaagagcaaagaacagcatcaagtgacagaggtggaagagaaagaactgctaaatctgggggtcacattggaagagcagaatctgatcccaggttggacgttttacatagacatcttcaaagaaactcagaacgttcgagaagtaaatctcggtctgaaaataatataaagaaactagcttcatctcttccagataataagcaggaggaaaatactgccttaaataaggactttttacctattgaaattcgtggcattcttgatgacctacagctggattctacagctcacactgcaaagcaagatactgtagagttacagaaccagaagtcatcagcaccagtacatgctcctaggagtcacagcccagtaaaaagaaaacctgacaaaataacagctaatgaagatccccctgttatttccaaaaggcgccactatgacacagatgaggtacgacagtacattgttaggcagcaggaggaaaggaagagaaagcaaaatgaagagaagaaggctcaaaaggaggctacagaacagaaaaacaaacgattacaagagctctaccggaagcagaaggaagcctttactaaagtaaaaaatgtccctccttctgagccatcagcaactaggcgactacaggaaacttactccaaattgctactagaaaagaccttgcttgaagagccatctcatcaacatgttacgcaggaaacacaggtaatagtagtgacatatacaaaggagagtcattcatggttaggaaatgcttatttgctatactatttaaaaattacccatcattcctagtatgctcagataatacttataataatcatggccttcatgaaatatattaaatatgaggagtaatgtgataaatgtgatggaaaataaaagctgaattaagaatttcctacag

SEQ ID NO: 324329 - DNA, 403 bp, Homo sapiens
cgcatccagctaatttttgtattttcagtagagacacggttttgccacgttggccaggctggtcttgaactgacctcaagtgatctgcccaactcggcctcccaaagtgctgggattacagatgtgaaccactcccggccgatcccctcttcttataaggacactagtccttgggtttagggctcaccctaaatctcaaggtgaactcatcttaagatccttaactgattgcatctgcaaagaccctatttccaaagaaggccatgttctgaggttccaggtggacatgaatttgggggatgtcattcaacccttatacttgctgagctagttatttccaacaggacattattaagggaaatgcttgttcaggtacctctgttacttcaggaagaataggcca

SEQ ID NO: 324330 - DNA, 297 bp, Homo sapiens
atctcattgtggttttgatttgcatttctctgatggccagtgatgatgagcattttttcatatgtcttttggctgcataaatgtcttctttcgagaagtgtctgttcatatcctttgcccacttgttgatggggttgtttgttcaacatttcaaacaacctcattgaaattgtgaccggaaatccctggcattgccaatttaatattttcaacactgaattatcttcccttcacaaaagactaaaaaagtctagatttctccgtttctagtagcagtatactgttccttcaaagtag

SEQ ID NO: 324331 - DNA, 238 bp, Homo sapiens
aagggcggggatggacagacagacaccgacacacaccccccgcgcggcaccctaagtgtccacaacttttggctgccttacttagcccagggcgcagaggctggaaaggtcgcggggagtatcgtgtgagtaaagagagagatttacaaaatagaagtagtgagaaaaagttactcaagacagctttccagcccgtgcccaggcggtaagaaaccccgaggttgaggggccaggggga

SEQ ID NO: 324332 - DNA, 2260 bp, Homo sapiens
gaaggaagcgaggcgcgacactgctggggagaggagggcagtgaggagcgaggagcgggcagaggcagctccggcggccgagaggagggagcgcggcgcagagaggaggggcttgcgccccgtagaaatgtcaatcagagcccggagccccgggaatctccgccaatctgttcggacctgacctggctcctcgccgccgccctcgccgccgcggagcagatcaataggcgaacgcggagcacagcgcagcgcgggcggcagcgcggccccaagcccggcccagcccccgatgcgcgccggagcccgcgggcggcgctgagctgggcggcccgggggtcgggccccctctccgtccgtgccccgcgggccaccatgtccttcccccagctgggataccaatacatccgcccgctttacccgtccgagcgcccgggggccgctggcggcagcggcggcagcgcgggggcccggggcggcctgggtgccggagcctcggagctgaacgcctcggggtccctgtccaacgtgctctcgtccgtgtacggggcgccctacgccgcggccgctgcggccgccgccgcccaaggctacggcgccttcctgccctacgccgcggagctgcccatcttcccgcagctgggcgcgcagtatgagctgaaggacagccccggggtgcagcatccggccgcggctgccgcgtttccgcacccgcaccccgccttctacccgtatggccagtaccagttcggggacccgtcccgtcccaagaacgccaccagggagagcaccagcacgctgaaggcctggctcaacgagcaccgcaagaacccctaccccaccaagggcgagaagatcatgctggccatcatcaccaagatgaccctcacccaggtgtccacctggttcgccaacgcgcgccggcgcctcaagaaggagaataagatgacttgggcgcctcgcagccgcactgacgaggagggaaacgcttatgggagcgagcgcgaggaggaagacgaagaggaggacgaggaggacggcaaacgcgagctagagctggaggaggaggagctcgggggggaggaggaggacacggggggcgagggcctggctgacgacgacgaggacgaggagatcgatttggagaacttagacggcgcggccaccgagcctgagctgtccctggctggggcggcgcgcagggatggcgacctaggcctgggacccatttcggactccaaaaatagcgactcggaagatagctctgagggcttagaggaccggccactaccggtcctgagtctggctccagcgccaccaccagtggccgtggcctcgccgtctctgccgtcgccccccgtgagcctggacccctgcgctcccgcaccagcccccgcctccgccctgcagaagcccaagatctggtccctcgcggagactgccacaagcccggacaacccgcgccgctcgcctcccggcgcgggggggtctccaccgggggcagcggtcgcgccttccgccctgcagctctctccggccgccgccgccgccgccgctcacagactggtctcagcgccgctgggcaagttcccggcttggaccaaccggccgtttccaggcccaccgcccggcccccgcccgcacccgctctccctgctgggctctgcccctccgcacctgctgggacttcccggagccgcgggccacccggctgccgccgccgccttcgctcggccagcggagcccgaaggcggaacagatcgctgtagtgccttggaagtggagaaaaagttactcaagacagctttccagcccgtgcccaggcggccccagaaccatctggacgccgccctggtcttatcggctctctcctcatcctagttctttaaaaaaaacaaaaaaacaaaaaaaactttttttaatcgttgtaataattgtataaaaaaaatcgctctgtatagttacaacttgtaagcatgtccgtgtataaatacctaaaagcaaaactaaacaaagaaagtaagaaaaagaaataaaaccagtcctcctcagccctccccaagtcgcttctgtggcaccccgcattcgctgtgaggtttgtttgtccggttgattttggggggtggagtttcagtgagaataaacgtgtctgcctttgtgtgtgtgtatatatacagagaaatgtacatatgtgtgaaccaaattgtacgagaaagtatctatttttggctaaataaatgagctgctgccactttgactataa

SEQ ID NO: 324333 - DNA, 1143 bp, Homo sapiens
gaaggaagcgaggcgcgacactgctggggagaggagggcagtgaggagcgaggagcgggcagaggcagctccggcggccgagaggagggagcgcggcgcagagaggaggggcttgcgccccgtagaaatgtcaatcagagcccggagccccgggaatctccgccaatctgttcggacctgacctggctcctcgccgccgccctcgccgccgcggagcagatcaataggcgaacgcggagcacagcgcagcgcgggcggcagcgcggccccaagcccggcccagcccccgatgcgcgccggagcccgcgggcggcgctgagctgggcggcccgggggtcgggccccctctccgtccgtgccccgcgggccaccatgtccttcccccagctgggataccaatacatccgcccgctttacccgtccgagcgcccgggggccgctggcggcagcggcggcagcgcgggggcccggggcggcctgggtgccggagcctcggagctgaacgcctcggggtccctgtccaacgtgctctcgtccgtgtacggggcgccctacgccgcggccgctgcggccgccgccgcccaaggctacggcgccttcctgccctacgccgcggagctgcccatcttcccgcagctgatcgctgtagtgccttggaagtggagaaaaagttactcaagacagctttccagcccgtgcccaggcggccccagaaccatctggacgccgccctggtcttatcggctctctcctcatcctagttctttaaaaaaaacaaaaaaacaaaaaaaactttttttaatcgttgtaataattgtataaaaaaaatcgctctgtatagttacaacttgtaagcatgtccgtgtataaatacctaaaagcaaaactaaacaaagaaagtaagaaaaagaaataaaaccagtcctcctcagccctccccaagtcgcttctgtggcaccccgcattcgctgtgaggtttgtttgtccggttgattttggggggtggagtttcagtgagaataaacgtgtctgcctttgtgtgtgtgtatatatacagagaaatgtacatatgtgtgaaccaaattgtacgagaaagtatctatttttggctaaataaatgagctgctgccactttgactataa

SEQ ID NO: 324334 - DNA, 670 bp, Homo sapiens
ggcgggtggcggttctctgacgcccacctctttccagccccagacctcgggtcctgacgcctcgtgcccaccctacagttaaaccccaacacacacatctacaactggacataattttacattgcgacaccttcctgacgatcggccccaatccaagtaggatctccccgccctaggcagcctctgcgctcctgaatctcacctcttttgctactactgtctctctcttccaggccccagaaccatctggacgccgccctggtcttatcggctctctcctcatcctagttctttaaaaaaaacaaaaaaacaaaaaaaactttttttaatcgttgtaataattgtataaaaaaaatcgctctgtatagttacaacttgtaagcatgtccgtgtataaatacctaaaagcaaaactaaacaaagaaagtaagaaaaagaaataaaaccagtcctcctcagccctccccaagtcgcttctgtggcaccccgcattcgctgtgaggtttgtttgtccggttgattttggggggtggagtttcagtgagaataaacgtgtctgcctttgtgtgtgtgtatatatacagagaaatgtacatatgtgtgaaccaaattgtacgagaaagtatctatttttggctaaataaatgagctgctgccactttgactataa

SEQ ID NO: 324335 - DNA, 1076 bp, Homo sapiens
gaaggaagcgaggcgcgacactgctggggagaggagggcagtgaggagcgaggagcgggcagaggcagctccggcggccgagaggagggagcgcggcgcagagaggaggggcttgcgccccgtagaaatgtcaatcagagcccggagccccgggaatctccgccaatctgttcggacctgacctggctcctcgccgccgccctcgccgccgcggagcagatcaataggcgaacgcggagcacagcgcagcgcgggcggcagcgcggccccaagcccggcccagcccccgatgcgcgccggagcccgcgggcggcgctgagctgggcggcccgggggtcgggccccctctccgtccgtgccccgcgggccaccatgtccttcccccagctgggataccaatacatccgcccgctttacccgtccgagcgcccgggggccgctggcggcagcggcggcagcgcgggggcccggggcggcctgggtgccggagcctcggagctgaacgcctcggggtccctgtccaacgtgctctcgtccgtgtacggggcgccctacgccgcggccgctgcggccgccgccgcccaaggctacggcgccttcctgccctacgccgcggagctgcccatcttcccgcagctgggcgcgcagtatgagctgaaggacagccccggggtgcagcatccggccgcggctgccgcgtttccgcacccgcaccccgccttctacccgtatggccagtaccagttcggggacccgtcccgtcccaagaacgccaccagggagagcaccagcacgctgaaggcctggctcaacgagcaccgcaagaacccctaccccaccaagggcgagaagatcatgctggccatcatcaccaagtcgcttctgtggcaccccgcattcgctgtgaggtttgtttgtccggttgattttggggggtggagtttcagtgagaataaacgtgtctgcctttgtgtgtgtgtatatatacagagaaatgtacatatgtgtgaaccaaattgtacgagaaagtatctatttttggctaaataaatgagctgctgccactttgactataa

SEQ ID NO: 324336 - DNA, 478 bp, Homo sapiens
tccgtgggcttcctacgacaccacccggatgggggctaattggggaccatccttacgcggcgcccctgggatcgtacccttacgggacccatcgtcaagaatgaaacttacattaaaaaagcggcacgctgaaggcctggctcaacgagcaccgcaagaacccctaccccaccaagggcgagaagatcatgctggccatcatcaccaagatgaccctcacccaggtgtccacctggttcgccaacgcgcgccggcgcctcaagaaggagaataagatgacttgggcgcctcgcagccgcagcgaggacgaggaagaggaggagaacattgacctggagaagaacgacgaggacgagccccagaagcccgaggacaagggcgaccccgagggccccgaagcaggaggagctgagcagaaggcggcttcgggctgcgaacggcttcagggaccacccacccctgcaggcaaggagacgga

SEQ ID NO: 324337 - DNA, 2274 bp, Homo sapiens
  misc_feature (2219)..(2219): n is a, c, g, or t
  misc_feature (2239)..(2239): n is a, c, g, or t
  misc_feature (2247)..(2247): n is a, c, g, or t
gaaggaagcgaggcgcgacactgctggggagaggagggcagtgaggagcgaggagcgggcagaggcagctccggcggccgagaggagggagcgcggcgcagagaggaggggcttgcgccccgtagaaatgtcaatcagagcccggagccccgggaatctccgccaatctgttcggacctgacctggctcctcgccgccgccctcgccgccgcggagcagatcaataggcgaacgcggagcacagcgcagcgcgggcggcagcgcggccccaagcccggcccagcccccgatgcgcgccggagcccgcgggcggcgctgagctgggcggcccgggggtcgggccccctctccgtccgtgccccgcgggccaccatgtccttcccccagctgggataccaatacatccgcccgctttacccgtccgagcgcccgggggccgctggcggcagcggcggcagcgcgggggcccggggcggcctgggtgccggagcctcggagctgaacgcctcggggtccctgtccaacgtgctctcgtccgtgtacggggcgccctacgccgcggccgctgcggccgccgccgcccaaggctacggcgccttcctgccctacgccgcggagctgcccatcttcccgcagctgggcgcgcagtatgagctgaaggacagccccggggtgcagcatccggccgcggctgccgcgtttccgcacccgcaccccgccttctacccgtatggccagtaccagttcggggacccgtcccgtcccaagaacgccaccagggagagcaccagcacgctgaaggcctggctcaacgagcaccgcaagaacccctaccccaccaagggcgagaagatcatgctggccatcatcaccaagatgaccctcacccaggtgtccacctggttcgccaacgcgcgccggcgcctcaagaaggagaataagatgacttgggcgcctcgcagccgcactgacgaggagggaaacgcttatgggagcgagcgcgaggaggaagacgaagaggaggacgaggaggacggcaaacgcgagctagagctggaggaggaggagctcgggggggaggaggaggacacggggggcgagggcctggctgacgacgacgaggacgaggagatcgatttggagaacttagacggcgcggccaccgagcctgagctgtccctggctggggcggcgcgcagggatggcgacctaggcctgggacccatttcggactccaaaaatagcgactcggaagatagctctgagggcttagaggaccggccactaccggtcctgagtctggctccagcgccaccaccagtggccgtggcctcgccgtctctgccgtcgccccccgtgagcctggacccctgcgctcccgcaccagcccccgcctccgccctgcagaagcccaagatctggtccctcgcggagactgccacaagcccggacaacccgcgccgctcgcctcccggcgcgggggggtctccaccgggggcagcggtcgcgccttccgccctgcagctctctccggccgccgccgccgccgccgctcacagactggtctcagcgccgctgggcaagttcccggcttggaccaaccggccgtttccaggcccaccgcccggcccccgcccgcacccgctctccctgctgggctctgcccctccgcacctgctgggacttcccggagccgcgggccacccggctgccgccgccgccttcgctcggccagcggagcccgaaggcggaacagatcgctgtagtgccttggaagtggagaaaaagttactcaagacagctttccagcccgtgcccaggcggccccagaaccatctggacgccgccctggtcttatcggctctctcctcatcctagttctttaaaaaaaacaaaaaaacaaaaaaaactttttttaatcgttgtaataattgtataaaaaaaatcgctctgtatagttacaacttgtaagcatgtccgtgtataaatacctaaaagcaaaactaaacaaagaaagtaagaaaaagaaataaaaccagtcctcctcagccctccccaagtcgcttctgtggcaccccgcattcgctgtgaggtttgtttgtccggttgattttggggggtggagtttcagtgagaataaacgtgtctgcctttgtgtgtgtgtatatatacagagaaatgtacatatgtgtgaaccaaattgtggtgaattgaaaaanccagtgaatggggatttttntttggggncctaaaataaaaaatagggtcggcatc

SEQ ID NO: 324338 - DNA, 984 bp, Homo sapiens
gaaggaagcgaggcgcgacactgctggggagaggagggcagtgaggagcgaggagcgggcagaggcagctccggcggccgagaggagggagcgcggcgcagagaggaggggcttgcgccccgtagaaatgtcaatcagagcccggagccccgggaatctccgccaatctgttcggacctgacctggctcctcgccgccgccctcgccgccgcggagcagatcaataggcgaacgcggagcacagcgcagcgcgggcggcagcgcggccccaagcccggcccagcccccgatgcgcgccggagcccgcgggcggcgctgagctgggcggcccgggggtcgggccccctctccgtccgtgccccgcgggccaccatgtccttcccccagctgggataccaatacatccgcccgctttacccgtccgagcgcccgggggccgcgccgccttcgctcggccagcggagcccgaaggcggaacagatcgctgtagtgccttggaagtggagaaaaagttactcaagacagctttccagcccgtgcccaggcggccccagaaccatctggacgccgccctggtcttatcggctctctcctcatcctagttctttaaaaaaaacaaaaaaacaaaaaaaactttttttaatcgttgtaataattgtataaaaaaaatcgctctgtatagttacaacttgtaagcatgtccgtgtataaatacctaaaagcaaaactaaacaaagaaagtaagaaaaagaaataaaaccagtcctcctcagccctccccaagtcgcttctgtggcaccccgcattcgctgtgaggtttgtttgtccggttgattttggggggtggagtttcagtgagaataaacgtgtctgcctttgtgtgtgtgtatatatacagagaaatgtacatatgtgtgaaccaaattgtacgagaaagtatctatttttggctaaataaatgagctgctgccactttgactataa

SEQ ID NO: 324339 - DNA, 504 bp, Homo sapiens
aaccctcatcacatgtcactccccagctcagggtcactcaaggcttcctgttaccttcccagtgaagcctggactcctcaattttgatgtctaagacccgcctcaactgagatccatcctgtggaggacacattttttgagaaatgatctaatttttttttctttctggtacattccccttctttcctcctcaatcaagataggaacaggtccttatgttcattgatcttgagagacgggtatgacctgaaagcagcagaactagcctacaaatgatcctgactaagcctaagcacagatgggaaatggttctcatgtgtagagcaagtaacctgctaccagaactaccaagttccaccagactagaaagagacctgcagcaagcaggacggagaagagatgggtttctgggttcacaagcagagctgctggggaagggacaagaccccaacaagggaagggtggtttgtggtggagcttggcaggcagcagcctcacaaagct

SEQ ID NO: 324340 - DNA, 444 bp, Homo sapiens
tcgcgaagtgttatcctctttctggctatttgactaatatattaactttgggtttcaataattttgaaacaaatttttttttcaattttcttttctacttctttgggttttagtagcttttctgtttttacttttaaaatatagccggtaatcattcattcaagacctttggttttttctaatgtaggcatttagtgctataaatttccccttaagtatggtctggtaatcattaagcaaattccagctacaatctttcagtcaagcaatgaacctttcccagagtaatactgcctccatctccaggaaagctaaattccagatgtgcacatttcaattcttatttctgcataagagcatgaatattccctcttcttcttagtataaaatatcaaagtggatagctaaaaggtctcctcagaattttttttttttttttttttt

SEQ ID NO: 324341 - DNA, 727 bp, Homo sapiens
tttctttgctgcgtctactgcgagaatgaagactattctcagcaatcagactgtcgacattccagaaaatgtcgacattactctgaagggacgcacagttatcgtgaagggccccagaggaaccctgcggagggacttcaatcacatcaatgtagaactcagccttcttggaaaggactatttgtagtcatgtacagaacatgatcaagggtgttacactgggcttccgttacaagatgaggtctgtgtatgctcacttccccatcaacgttgttatccaggagaatgggtctcttgttgaaatccgaaatttcttgggtgaaaaatacatccgcagggttcggatgagaccaggtgttgcttgttcagtatctcaagcccagaaagatgaattaatccttgaaggaaatgacattgagcttgtttcaaattcagcggctttgattcagcaagccacaacagttaaaaacaaggatatcaggaaatttttggatggtatctatgtctctgaaaaaggaactgttcagcaggctgatgaataagatctaagagttacctggctacagaaagaagatgccagatgacacttaagacctacttgtgatatttaaatgatgcaataaaagacctattgatttggaaaatatttaatcagaattcagtcctgatgcagccggcttcccacctctcttgcctcatttttttctaaataatagacttatatctt

SEQ ID NO: 324342 - DNA, 538 bp, Homo sapiens
tttctttgctgcgtctactgcgagaatgaagactattctcagcaatcagactgtcgacattccagaaaatgtcgacattactctgaagggacgcacagttatcgtgaagggccccagaggaaccctgcggagggacttcaatcacatcaatgtagaactcagccttcttggaaagaaaaaaaagaggctccgggttgacaaatggtggggtaacagaaaggaactggctaccgttcggatgagaccaggtgttgcttgttcagtatctcaagcccagaaagatgaattaatccttgaaggaaatgacattgagcttgtttcaaattcagcggctttgattcagcaagccacaacagttaaaaacaaggatatcaggaaatttttggatggtatctatgtctctgaaaaaggaactgttcagcaggctgatgaataagatctaagagttacctggctacagaaagaagatgccagatgacacttaagacctacttgtgatatttaaatgatgcaataaaagacctattgatttggaaaa

SEQ ID NO: 324343 - DNA, 573 bp, Homo sapiens
tttctttgctgcgtctactgcgagaatgaagactattctcagcaatcagactgtcgacattccagaaaatgtcgacattactctgaagggacgcacagttatcgtgaagggccccagaggaaccctgcggagggacttcaatcacatcaatgtagaactcagccttcttggaaagaaaaaaaagaggctccgggttgacaaatggtggggtaacagaaaggaactggctaccgttcggactatttgtagtcatgtacagaacatgatcaagggatgagaccaggtgttgcttgttcagtatctcaagcccagaaagatgaattaatccttgaaggaaatgacattgagcttgtttcaaattcagcggctttgattcagcaagccacaacagttaaaaacaaggatatcaggaaatttttggatggtatctatgtctctgaaaaaggaactgttcagcaggctgatgaataagatctaagagttacctggctacagaaagaagatgccagatgacacttaagacctacttgtgatatttaaatgatgcaataaaagacctattgatttggaaaa

SEQ ID NO: 324344 - DNA, 642 bp, Homo sapiens
tttctttgctgcgtctactgcgagaatgaagactattctcagcaatcagactgtcgacattccagaaaatgtcgacattactctgaagggacgcacagttatcgtgaagggccccagaggaaccctgcggagggacttcaatcacatcaatgtagaactcagccttcttggaaagaaaaaaaagaggctccgggttgacaaatggtggggtaacagaaaggaactggctaccgttcgaggtctgtgtatgctcacttccccatcaacgttgttatccaggagaatgggtctcttgttgaaatccgaaatttcttgggtgaaaaatacatccgcagggttcggatgagaccaggtgttgcttgttcagtatctcaagcccagaaagatgaattaatccttgaaggaaatgacattgagcttgtttcaaattcagcggctttgattcagcaagccacaacagttaaaaacaaggatatcaggaaatttttggatggtatctatgtctctgaaaaaggaactgttcagcaggctgatgaataagatctaagagttacctggctacagaaagaagatgccagatgacacttaagacctacttgtgatatttaaatgatgcaataaaagacctattgatttggaaaa

SEQ ID NO: 324345 - DNA, 1107 bp, Homo sapiens
tttctttgctgcgtctactgcgagaatgaagactattctcagcaatcagactgtcgacattccagaaaatgtcgacattactctgaagggacgcacagttatcgtgaagggccccagaggaaccctgcggagggacttcaatcacatcaatgtagaactcagccttcttggaaagaaaaaaaagaggctccgggttgacaaatggtggggtaacagaaaggaactggctaccgttcggactatttgtagtcatgtacagaacatgatcaagggtgttacactgggcttccgttacaagatgaggtctgtgtatgctcacttccccatcaacgttgttatccaggagaatgggtctcttgttgaaatccgaaatttcttgggtgaaaaatacatccgcagggttcggatgagaccaggtgttgcttgttcagtatctcaagcccagaaagatgaattaatccttgaaggaaatgacattgagcttgtttcaaattcagcggctttgattcagcaagccacaacagttaaaaacaaggatatcaggaaatttttggatggtatctatgtctctgaaaaaggaactgttcagcaggctgatgaataagatctaagagttacctggctacagaaagaagatgccagatgacacttaagacctacttgtgatatttaaatgatgcaataaaagacctattgatttggaaaaaaaaaaaaaaaaaaaaaaaaaaaaaaatttgtgtgcggccgcccatgggaccccagcgaaaaacctttaaaaaaaattcaaggatgggagagccagggggcccccaaatagagggaaaagaagaaacaggggccgacaacagcgagggtgtcccaagaagaagacactcgtggggaaacaacagaaaaagcagcggagagtcctcgcgaacagcagaaaaacaaacgccgcagcggtgaggagacaagcagcacgtgtacaaagacagaacacagcccaagagagagaggagataataaggagcgcgaaccacaaggggcgacactcaacaacagaggagagacaccagaggggagaggcgcggaatcgacaaaatcgcccaccccgacccggggggaaga

SEQ ID NO: 324346 - DNA, 609 bp, Homo sapiens
tttctttgctgcgtctactgcgagaatgaagactattctcagcaatcagactgtcgacattccagaaaatgtcgacattactctgaagggacgcacagttatcgtgaagggccccagaggaaccctgcggagggacttcaatcacatcaatgtagaactcagccttcttggaaagaaaaaaaagaggctccgggttgacaaatggtggggtaacagaaaggaactggctaccgttcggactatttgtagtcatgtacagaacatgatcaagggtgttacactgggcttccgttacaagatgaggtctgtgtatgctcacttccccatcaacgttgttatccaggagaatgggtctcttgttgaaatccgaaatttcttgggtgaaaaatacatccgcagggttcggatgagaccaggtgttgcttgttcagtatctcaagcccagaaagatgaattaatccttgaaggaaatgacattgagcttgtttcaaattcagcggctttgattcagcaagccacaacagtggtcaaccctacaagccacggtcaacccacaagccacggtcaacccacaggccacggtcaacccacaagccacggtcaacccac

SEQ ID NO: 324347 - DNA, 706 bp, Homo sapiens
tttctttgctgcgtctactgcgagaatgaagactattctcagcaatcagactgtcgacattccagaaaatgtcgacattactctgaagggacgcacagttatcgtgaagggccccagaggaaccctgcggagggacttcaatcacatcaatgtagaactcagccttcttggaaagaaaaaaaagaggctccgggttgacaaatggtggggtaacagaaaggaactggctaccgttcggactatttgtagtcatgtacagaacatgatcaagggtgttacactgggcttccgttacaagatgaggtctgtgtatgctcacttccccatcaacgttgttatccaggagaatgggtctcttgttgaaatccgaaatttcttgggtgaaaaatacatccgcagggttcggatgagaccaggtgttgcttgttcagtatctcaagcccagaaagatgaattaatccttgaaggaaatgacattgagcttgtttcaaattcagcggctttgattcagcaagccacaacagttaaaaacaaggatatcaggaaatttttggatggtatctatgtctctgaaaaaggaactgttcagcaggctgatgaataagatctaagagttacctggctacagaaagaagatgccagatgacacttaagacctacttgtgatatttaaatgatgcaataaaagacctattgatttggaaaa

SEQ ID NO: 324348 - DNA, 644 bp, Homo sapiens
tttctttgctgcgtctactgcgagaatgaagactattctcagcaatcagactgtcgacattccagaaaatgtcgacattactctgaagggacgcacagttatcgtgaagggccccagaggaaccctgcggagggacttcaatcacatcaatgtagaactcagccttcttggaaaggactatttgtagtcatgtacagaacatgatcaagggtgttacactgggcttccgttacaagatgaggtctgtgtatgctcacttccccatcaacgttgttatccaggagaatgggtctcttgttgaaatccgaaatttcttgggtgaaaaatacatccgcagggttcggatgagaccaggtgttgcttgttcagtatctcaagcccagaaagatgaattaatccttgaaggaaatgacattgagcttgtttcaaattcagcggctttgattcagcaagccacaacagttaaaaacaaggatatcaggaaatttttggatggtatctatgtctctgaaaaaggaactgttcagcaggctgatgaataagatctaagagttacctggctacagaaagaagatgccagatgacacttaagacctacttgtgatatttaaatgatgcaataaaagacctattgatttggaaaa

SEQ ID NO: 324349 - DNA, 770 bp, Homo sapiens
  misc_feature (351)..(351): n is a, c, g, or t
tttctttgctgcgtctactgcgagaatgaagactattctcagcaatcagactgtcgacattccagaaaatgtcgacattactctgaagggacgcacagttatcgtgaagggccccagaggaaccctgcggagggacttcaatcacatcaatgtagaactcagccttcttggaaagaaaaaaaagaggctccgggttgacaaatggtggggtaacagaaaggaactggctaccgttctacctatcggtaggtgcatggtacgacgagatcatgcatcaacaggggtgtatacagctgcgcgtcgttacgcggttaccaaagcaatgatgagtcttgttgttaatggcgtcancctttctcccagtacaacgcggtaggtatagtcgcaggtaggagacatgggtgctgctggctatgataactccggaagaatttcgtgggcgtgaagaaagtagcacgtaccggcaggggatgagaccaggtgttgcttgttcagtatctcaagcccagaaagatgaattaatccttgaaggaaatgacattgagcttgtttcaaattcagcggctttgattcagcaagccacaacagttaaaaacaaggatatcaggaaatttttggatggtatctatgtctctgaaaaaggaactgttcagcaggctgatgaataagatctaagagttacctggctacagaaagaagatgccagatgacacttaagacctacttgtgatatttaaatgatgcaataaaagacctattgatttggaaaa

SEQ ID NO: 324350 - DNA, 659 bp, Homo sapiens
ctgataccaccggtaaagaaatgctgggcgatccagtccgactcgttcttatgatcgaaccgatacggactgtgcttgtggctgaaaacgtgaatgaaaagccgccccgtattgggccgcaagccacgtcttgatacgttcgagcagaacccgccagttcgacatgtgctcgaacatttcgacggaaagtggtatagggtggtatagctagctataccaccaagggtgttacactgggcttccgttacaagatgaggtctgtgtatgctcacttccccatcaacgttgttatccaggagaatgggtctcttgttgaaatccgaaatttcttgggtgaaaaatacatccgcagggttcggatgagaccaggtgttgcttgttcagtatctcaagcccagaaagatgaattaatccttgaaggaaatgacattgagcttgtttcaaattcagcggctttgattcagcaagccacaacagttaaaaacaaggatatcaggaaatttttggatggtatctatgtctctgaaaaaggaactgttcagcaggctgatgaataagatctaagagttacctggctacagaaagaagatgccagatgacacttaagacctacttgtgatatttaaatgatgcaataaaagacctattgatttggaaaa

SEQ ID NO: 324351 - DNA, 541 bp, Homo sapiens
tttctttgctgcgtctactgcgagaatgaagactattctcagcaatcagactgtcgacattccagaaaatgtcgacattactctgaagggacgcacagttatcgtgaagggccccagaggaaccctgcggagggacttcaatcacatcaatgtagaactcagccttcttggaaagaaaaaaaagaggctccgggttgacaaatggtggggtaacagaaaggaactggctaccgttcggactatttgtagtcatgtacagaacatgatcaagggtgttacactgggcttccgttacaagatgaggtctgtgtatgctcacttccccatcaacgttgttatccaggagaatgggtctcttgttgaaatccgaaatttcttgggtgaaaaatacatccgcagggttcggatgagaccaggtgttgcttgttcagtatctcaagcccagaaagatgaatcaaagccgctgaatttgaaacaagctatatgtcatttccttcaaggattaattcgtcgaccggccgcgaatttagtagtagtagta

SEQ ID NO: 324352 - DNA, 423 bp, Homo sapiens
cgcttgttccttgggtcattgaattccaggccttggcctggctgagtagtttacttttattgctgctgcttatcagaggatcctgggagttaggattcttctctctcttttaaaaatgctgagagcagagtgagccactggctggagatcacgtagcccaggagccttgctttgttttaaagcaggaccaggagactcggagtttgtctaagcggttaaggacagaaaatcacgtgtatctcccagccctttctggagtctatggacctagttgccaggcatgttctgagaagcccagagccattacaaaagttcctctggcaccaggtctcacagcggccgtgtccaggatcccccaattccatgcacttgtgtttttccttgccactggctgagattctgactggtccttgcctctcgacc

SEQ ID NO: 324353 - DNA, 1219 bp, Homo sapiens
ccagacaccgttctggaccctggaaatggagggcaccctccaggtacatgcttcccagagctggtctctgaggtcccctgagccagcccctgcctctgggaagatgacccctaaatggcagcctcagtcagggggcagggttttagagaacaacaggaatagaagtatttgcctcccaggagtagataagacggtgtatgtgaaaccttgacacgattggcattcattcgtaaaatcagagcagatacctgcacacacaggcataaatgaaagatactttgaattacagaaaagttaaggtctttgcaagtgcatgtaggaatgctgccaggcacacagcgtgactccagccaccaacaaagtgtttccaagtctggagctgtgtggtccttgaaggaaatataaatgtttcacttgttatacgctgtgatttttgcgtacttagcggtttctggagtccgtgaaagtggtttgttttctctgaacgggaagtgcgtttcctccaatcacaccgacctgatttgtttgttgcttgttgggcctccccacgggaacacgagatcccacagaacacagcaggacgtgtccttgtttactgaggaatctctggggctcggcacaggtgtgcagaaagcatttattgaactgaacaaacagattttacaagccggaccttctgtggcgttggcccgggtagctacttcagcatgggtccaagcatcctttctaagccaattccattctttcactcctcctcccttgtaggatcagaaatccaaagctagcttatccttttgcagatgtttctttccatattatttcctacctccagaacaaaggctatctgtgtctcacattcggaggcttggatgtgaagccctgtctgttcatttttctctccagttttttcacaggctgggtaactacctgcctgctagcaacgatgtgttcgttctccctggattcctgattgaggtgggcagagaggactctgagacaggagcatgaggatgaggcagatcagcttctttctcatgaaatctggatgttgaggctggtagcaggaccaccgcatgtgccaatagtctttagcagctcatcaggccatagaagaagtgcctttactaacttcaagtccagcctgggaaacgtagtgagaccttgtctctccctgtctaaaaaaagaagaagaaagaaggaggaggaggaggagaaggag

SEQ ID NO: 324354 - DNA, 824 bp, Homo sapiens
cgcagatgcgcagccctcgctctcgcacgcaactcgtggccacctagcctagaggcggctgccaagcgtcctggctgagggatggcgggaccccaggcggctggagtggagaaagttgaccgcccccgtcttttctgccccgtgggtggctactgcgtgcccccaagtaacccagaggttgagggccccccagtgcgcggcggccgggggtcaggatgcgggactcccctccaccgccatgatctcgcagtgtgggggagcgctcggggacagaaatgaggcccgagatgtgtgccttctccttgctcctgaccgctgacttcgttattccaaatacgcagccgaaaccatcgctcttgcaggtgcagcttttctctgcctctcctatgtggaaagcagcgcagcgtggactccagccaaactccctcgattggattgcagctctctggctctctgtccctgtgaccttgggcagtttacctcctctatgtctcagtttcctcagctgtgcaaaggggttactgatcctgcttaatggggtgggttgttgtgaagaggaaatgagttaacataagtagagaaagagactggtgcctggcaagcactatgtgagtgtttgatgttattattgctgtttttattagagctgtgtgtaacgggacgtttaatgagccttttcctgttaccctggaattagtgagtcagggcacaaagtgttcatttcctcaagaggacacaacaaggcaccatcttggaagcagagagcgagccatcactggacaccaaacctgcaggtgccttgatcttgggacttcccagcctct

SEQ ID NO: 324355 - DNA, 718 bp, Homo sapiens
cgcagatgcgcagccctcgctctcgcacgcaactcgtggccacctagcctagaggcggctgccaagcgtcctggctgagggatggcgggaccccaggcggctggagtggagaaagttgaccgcccccgtcttttctgccccgtgggtggctactgcgtgcccccaagtaacccagaggttgagggccccccagtgcgcggcggccgggggtcaggatgcgggactcccctccaccgccatgatctcgcagtgtgggggagcgctcggggacagaaatgaggcccgagatgtgtgccttctccttgctcctgaccgctgacttcgttattccaaatacgcagccgaaaccatcgctcttgcaggtgcagcttttctctgcctctcctatgtggaaagcagcgcagcgtggactccagccaaactccctcgattggattgcagctctctggctctctgtccctgtgaccttgggcagtttacctcctctatgtctcagtttcctcagctgtgcaaaggggttactgatcctgcttaatggggtgggttgttgtgaagaggaaatgagttaacataagtagagaaagagactggtgcctggcaagcactattgttcatttcctcaagaggacacaacaaggcaccatcttggaagcagagagcgagccatcactggacaccaaacctgcaggtgccttgatcttgggacttcccagcctct

SEQ ID NO: 324356 - DNA, 214 bp, Homo sapiens
caaaaggttaggagagggcactgttctagcaatccttatttgcatcttggagtcctggagggtggggaagagctagaagttaaaggttagggaaaatccaggagggatgcatattgtatgttagatggtatcatagaattgttctcttagagttgaaaatggtattatgattatgtaaagaggatgtccttattctgacaacacaaatacttaa

SEQ ID NO: 324357 - DNA, 2392 bp, Homo sapiens
ttgatttttaaataaggatagtaataaatggaggaggtgtcctataaatttaaagttcagttgacccagccttatacttaagatagccttatgaaaaatatgtgctgtgaggcagaagtatattttggcagagagaataataaataaaactttttcttttagctcaatatccttactttggtaagtatttttttttatttcacatctacttaacagaaaataaactgagaaatagaagtcagtccattggcataatttatcattcttcactttaaaaaattctaataaatattctgcttgagttttcttttctgctatttgttcttacttgcaactttaagtcaaacctcccaatacaaaacattaaaagctaacattaatgtactaaagtattaatttaaaagaaatcgaacctcccatgctagatttgaaaataacatcatcacagcaccctgatcccaaatattacaccgaggcttttaaaatgtaagtgaaatctagctaagtttcatggtttcattaaaagcaaatgtctgcctctatctgaaaaacaaatggaaatcttttgaggtgttaataccctttggatcctcatcaaaaggatggcattcacctgaggattcctatcttgacttcttaggtattaaaaacctttcttgatatgctctacattttaaaatttgttttataaaatccttatgttgattttcattttattctcaagtacaatacgtttcactctagaccagttgaagaacatgtttaaactttgttcatggtcaaattcattttctatttttttagtaacatatctcttaaaaagcacactaccttataaaaaacttcatcagaaattaaatttaatgcaagtaaattgccatctgatacttccacatgctatcataatcaactgtaataataaaaatgatttatccaattagaaaaggacaagatatatttttctctgtatttctataacttttgccactccattgaatacattgtatgttggacataagattattagtaatgcattcttgagatcttttattttggaatgatgctaactctgtctctttgccaattctaataccaggttccaagtaataactctacagtacaaagagaactgaatattcattctagggctataggatatgaacttcacaattcatttgggtacattctcattgaatttccttcaaaacaatctgttcctggtgcccagtgataattcagtcgggaccagcatgactaaaaggaaggggatatgctaaggctcagcaaagtgaccctaaatgagagatatgtcccaggatggaaagaagaagacgtggtttaaccaagttatactgactaatctaagcagtccactcatccttccattttgggaaaggagtgggggcagcctaagaagaacatatctggattgggaagaaccgtctttctgggctagggatggggaacagaaagggagtatggaaagaaaaattataagagatttgactgaagcaaggaaaaaaagcaaatccccaaacgtgctaatccttgaaagtaactatctttcccaaactactgctgttaccagcaagtgatcaggaagactaggagctatttctgactgtaaatgaattgtataatagctctgctgcagttctgtgacttccaagccaggaattaaatgctctttttaagaataacaaaaaacaaaagcatttcctatgctagtctcccagtaaaatgtacatgttttggagacttcaaaggtattatgtgagttcacatttagcaacagcttattaataaccctcaagctgtcagaatctctatagttaccatttacaattttatactgtgaaaaaatacagatcagtgaaagcataaagacaagtcagaattcactttgaagagggtctgaggcctgggagagtctctactgtctattgaagaatgaggcatgtataaaatagttggttgaatttcactgatcttcccaatgtgaacaaatatactatgtatattgtgtgtatttctagaaatcaatggcagctgctgatggtgttgtaattagaaatctatatagattatagatgttttagaaagatggtgccaatcctaaaagatttgtgtgggctaaaagtgcttgtacttacttttttctgcacttataactgatttggttttaaaattgtgtgcgtgtatctgttctttctctgttgtggcagcttgtactattaaaataatagagaatgttaaattattttgatgtgaactgcaaatgattttttttcataaagtttaacatttttatcagcattgttttgctttgtacttgtataaatatgttttattttagcacttcaaaatatacttgcctgtttctcagttgtct

SEQ ID NO: 324358 - DNA, 2254 bp, Homo sapiens
ttgatttttaaataaggatagtaataaatggaggaggtgtcctataaatttaaagttcagttgacccagccttatacttaagatagccttatgaaaaatatgtgctgtgaggcagaagtatattttggcagagagaataataaataaaactttttcttttagctcaatatccttactttggtaagtatttttttttatttcacatctacttaacagaaaataaactgagaaatagaagtcagtccattggcataatttatcattcttcactttaaaaaattctaataaatattctgcttgagttttcttttctgctatttgttcttacttgcaactttaagtcaaacctcccaatacaaaacattaaaagctaacattaatgtactaaagtattaatttaaaagaaatcgaacctcccatgctagatttgaaaataacatcatcacagcaccctgatcccaaatattacaccgaggcttttaaaatgtaagtgaaatctagctaagtttcatggtttcattaaaagcaaatgtctgcctctatctgaaaaacaaatggaaatcttttgaggtgttaataccctttggatcctcatcaaaaggatggcattcacctgaggattcctatcttgacttcttaggtattaaaaacctttcttgatatgctctacattttaaaatttgttttataaaatccttatgttgattttcattttattctcaagtacaatacgtttcactctagaccagttgaagaacatgtttaaactttgttcatggtcaaattcattttctatttttttagtaacatatctcttaaaaagcacactaccttataaaaaacttcatcagaaattaaatttaatgcaagtaaattgccatctgatacttccacatgctatcataatcaactgtaataataaaaatgatttatccaattagaaaaggacaagatatatttttctctgtatttctataacttttgccactccattgaatacattgtatgttggacataagattattagtaatgcattcttgagatcttttattttggaatgatgctaactctgtctctttgccaattctaataccaggttccaagtaataactctacagtacaaagagaactgaatattcattctagggctataggatatgaacttcacaattcatttgggtacattctcattgaatttccttcaaaacaatctgttcctggtgcccagtgataattcagtcgggaccagcatgactaaaaggaaggggatatgctaaggctcagcaaagtgaccctaaatgagagatatgtcccaggatggaaagaagaagacgtggtttaaccaagttatactgactaatctaagcagtccactcatccttccattttgggaaaggagtgggggcagcctaagaagaacatatctggattgggaagaaccgtctttctgggctagggatggggaacagaaagggagtatggaaagaaaaattataagagatttgactgaagcaaggaaaaaaagcaaatccccaaacgtgctaatccttgaaagtaactatctttcccaaactactgctgttaccagcaagtgatcaggaagactaggagctatttctgactgtaaatgaattgtataatagctctgctgcagttctgtgacttccaagccaggaattaaatgctctttttaagaataacaaaaaacaaaagcatttcctatgctagtctcccagtaaaatgtacatgttttggagacttcaaaggtattatgtgagttcacatttagcaacagcttattaataaccctcaagctgtcagaatctctatagttaccatttacaattttatactgtgaaaaaatacagatcagtgaaagcataaagacaagtcagaattcactttgaagagggtctgaggcctgggagagtctctactgtctattgaagaatgaggcatgtataaaatagttggttgaatttcactgatcttcccaatgtgaacaaatatactatgtatattgtgtgtatttctagaaatcaatggcagctgctgatggtgttgtaattagaaatctatatagattatagatgttttagaaagatggtgccaatcctaaaagatttgtgtgggctaaaagtgcttgtacttacttttttctgcacttataactgatttggttttaaaattgtgtgcgtgtatctgttctttctctgttgtggcagcttgtactattaaaataatagagaatgtt

SEQ ID NO: 324359 - DNA, 2461 bp, Homo sapiens
ttgatttttaaataaggatagtaataaatggaggaggtgtcctataaatttaaagttcagttgacccagccttatacttaagatagccttatgaaaaatatgtgctgtgaggcagaagtatattttggcagagagaataataaataaaactttttcttttagctcaatatccttactttggtaagtatttttttttatttcacatctacttaacagaaaataaactgagaaatagaagtcagtccattggcataatttatcattcttcactttaaaaaattctaataaatattctgcttgagttttcttttctgctatttgttcttacttgcaactttaagtcaaacctcccaatacaaaacattaaaagctaacattaatgtactaaagtattaatttaaaagaaatcgaacctcccatgctagatttgaaaataacatcatcacagcaccctgatcccaaatattacaccgaggcttttaaaatgtaagtgaaatctagctaagtttcatggtttcattaaaagcaaatgtctgcctctatctgaaaaacaaatggaaatcttttgaggtgttaataccctttggatcctcatcaaaaggatggcattcacctgaggattcctatcttgacttcttaggtattaaaaacctttcttgatatgctctacattttaaaatttgttttataaaatccttatgttgattttcattttattctcaagtacaatacgtttcactctagaccagttgaagaacatgtttaaactttgttcatggtcaaattcattttctatttttttagtaacatatctcttaaaaagcacactaccttataaaaaacttcatcagaaattaaatttaatgcaagtaaattgccatctgatacttccacatgctatcataatcaactgtaataataaaaatgatttatccaattagaaaaggacaagatatatttttctctgtatttctataacttttgccactccattgaatacattgtatgttggacataagattattagtaatgcattcttgagatcttttattttggaatgatgctaactctgtctctttgccaattctaataccaggttccaagtaataactctacagtacaaagagaactgaatattcattctagggctataggatatgaacttcacaattcatttgggtacattctcattgaatttccttcaaaacaatctgttcctggtgcccagtgataattcagtcgggaccagcatgactaaaaggaaggggatatgctaaggctcagcaaagtgaccctaaatgagagatatgtcccaggatggaaagaagaagacgtggtttaaccaagttatactgactaatctaagcagtccactcatccttccattttgggaaaggagtgggggcagcctaagaagaacatatctggattgggaagaaccgtctttctgggctagggatggggaacagaaagggagtatggaaagaaaaattataagagatttgactgaagcaaggaaaaaaagcaaatccccaaacgtgctaatccttgaaagtaactatctttcccaaactactgctgttaccagcaagtgatcaggaagactaggagctatttctgactgtaaatgaattgtataatagctctgctgcagttctgtgacttccaagccaggaattaaatgctctttttaagaataacaaaaaacaaaagcatttcctatgctagtctcccagtaaaatgtacatgttttggagacttcaaaggtattatgtgagttcacatttagcaacagcttattaataaccctcaagctgtcagaatctctatagttaccatttacaattttatactgtgaaaaaatacagatcagtgaaagcataaagacaagtcagaattcactttgaagagggtctgaggcctgggagagtctctactgtctattgaagaatgaggcatgtataaaatagttggttgaatttcactgatcttcccaatgtgaacaaatatactatgtatattgtgtgtatttctagaaatcaatggcagctgctgatggtgttgtaattagaaatctatatagattatagatgttttagaaagatggtgccaatcctaaaagatttgtgtgggctaaaagtgcttgtacttacttttttctgcacttataactgatttggttttaaaattgtgtgcgtgtatctgttctttctctgttgtggcagcttgtactattaaaataatagagaatgttaaattattttgatgtgaactgcaaatgattttttttcataaagtttaacatttttatcagcattgttttgctttgtacttgtataaatatgttttattttagcacttcaaaatatacttgcctgtttctcagttgtctaaatcatgttgtacttggtgtttgtgaagccagttacttttcaaaaaaattaaaaaacctataatatga

SEQ ID NO: 324360 - DNA, 1278 bp, Homo sapiens
  misc_feature (1162)..(1162): n is a, c, g, or t
  misc_feature (1208)..(1208): n is a, c, g, or t
  misc_feature (1223)..(1223): n is a, c, g, or t
  misc_feature (1225)..(1225): n is a, c, g, or t
  misc_feature (1269)..(1269): n is a, c, g, or t
ttgatttttaaataaggatagtaataaatggaggaggtgtcctataaatttaaagttcagttgacccagccttatacttaagatagccttatgaaaaatatgtgctgtgaggcagaagtatattttggcagagagaataataaataaaactttttcttttagctcaatatccttactttggtaagtatttttttttatttcacatctacttaacagaaaataaactgagaaatagaagtcagtccattggcataatttatcattcttcactttaaaaaattctaataaatattctgcttgagttttcttttctgctatttgttcttacttgcaactttaagtcaaacctcccaatacaaaacattaaaagctaacattaatgtactaaagtattaatttaaaagaaatcgaacctcccatgctagatttgaaaataacatcatcacagcaccctgatcccaaatattacaccgaggcttttaaaatgtaagtgaaatctagctaagtttcatggtttcattaaaagcaaatgtctgcctctatctgaaaaacaaatggaaatcttttgaggtgttaataccctttggatcctcatcaaaaggatggcattcacctgaggattcctatcttgacttcttaggtattaaaaacctttcttgatatgctctacattttaaaatttgttttataaaatccttatgttgattttcattttattctcaagtacaatacgtttcactctagaccagttgaagaacatgtttaaactttgttcatggtcaaattcattttctatttttttagtaacatatctcttaaaaagcacactaccttataaaaaacttcatcagaaattaaatttaatgcaagtaaattgccatctgatacttccacatgctatcataatcaactgtaataataaaaatgatttatccaattagaaaaggacaagatatatttttctctgtatttctataacttttgccactccattgaatacattgtatgttggacataagattattagtaatgcattcttgagatcttttattttggaatgatgctaactctgtctctttgccaattctaataccaggttccaagtaataactctacagtacaaagagaactgaatattcattctaggggggcttataggggntatgggaacttccaccaatttcatttggggggtaccatttcttccnttgggaattttcccntnccaaaaccaatctggttcccgggggggggcccccgggtgggatnaatttcagt

SEQ ID NO: 324361 - DNA, 2252 bp, Homo sapiens
  misc_feature (1826)..(1827): n is a, c, g, or t
gtggtgccggctggttcttcgcgctcgcccgacttcccagcggccccgtgcggcccgggcatgcccagtgcgggcgcagcggccccggccctggaagcgccccggcggagctggcccgcggtgggctaggggcagggccggagccgcggcggcggagctgtggatccttcatgatgagagatttggggacacttctctctcctgtgtgtagttgatagtttggtggtgaagagatggctgacagtgtcaaaacctttctccaggaccttgccagaggaatcaaagactccatctggggtatttgtaccatctcaaagctagatgctcgaatccagcaaaagagagaggagcagcgtcgaagaagggcaagtagtgtcttggcacagagaagagcccagagtatagagcggaagcaagagagtgagccacgtattgttagtagaattttccagtgttgtgcttggaatggtggagtgttctggttcagtctcctcttgttttatcgagtatttattcctgtgcttcagtcggtaacagcccgaattatcggtgacccatcactacatggagatgtttggtcgtggctggaattcttcctcacgtcaattttcagtgctctttgggtgctccccttgtttgtgcttagcaaagtggtgaatgccatttggtttcaggatatagctgacctggcatttgaggtatcagggaggaagcctcacccattccctagtgtcagcaaaataattgctgacatgctcttcaaccttttgctgcaggctcttttcctcattcagggaatgtttgtgagtctctttcccatccatcttgtcggtcagctggttagtctcctgcatatgtcccttctctactcactgtactgctttgaatatcgttggttcaataaaggaattgaaatgcaccagcggttgtctaacatagaaaggaattggccttactactttgggtttggtttgcccttggcttttctcacagcaatgcagtcctcatatattatcagtggctgccttttctctatcctctttcctttattcattatcagcgccaatgaagcaaagacccctggcaaagcatatctcttccagttgcgcctcttctccttggtggtcttcttaagcaacagactcttccacaagacagtctacctgcagtcggccctgagcagctctacttctgcagagaagttcccttcaccgcatccgtcgcctgccaaactgaaggctactgcaggtcactgagttgcctgccatccaaaggggatgggcgggattggaagaagctgtggcagctcttttccctgttcacctcccgcctgccagggaaggcaggacccgctctgccaagggccctctgcgtattcccttctctctgaggaattgaaatttttgtctctggtgcacgtaaggcagaatgttccctgacaccagtgtgtggatttttaacatcaccgtgagtctgaaaggaccacaggtttttctgcagctattttctagcatttgccagtccctgtgcctggactgattggaacactttgtttttctccctgtgccatttacccttccacctttccatcctgccttctaccacccttggatgaatggattttgtaattctagctgttgtattttgtgaatttgttaattttgttgtttttctgtgaaacacatacattggatatgggaggtaaaggagtgtcccagttgctcctggtcactccctttatagccattactgtcttgtttcttgtaactcaggttaggttttggtctctcttgctccactgcaaaaaaaaaaaaaaaaaaaaaaannttaaccccttaggggttgatatgggggaaaacccctcccccccatttttttgggttttgaggagtgattttctttcttccccttgaaggggaaaaagctattttcattggtacatttaaagtcccccaactatggggaggtaccaattctggacaagtgccactacaacaacactaaacctgaacttttcaactccgttggtggtgggaggcagcgggcagaaatttactgttggccactgccaggtctatttcatatttcaaaggaatattgggtgctgcatataggaactgaaggggtcaatgtattaaacctgtgattggttgttttcctgtcattttgagagactaaatgtggggggcagatgtcaaaatacctgtacaattttaaaatgtcacaattaaacatgagctggtttcccacaa

SEQ ID NO: 324362 - DNA, 2687 bp, Homo sapiens
gtggtgccggctggttcttcgcgctcgcccgacttcccagcggccccgtgcggcccgggcatgcccagtgcgggcgcagcggccccggccctggaagcgccccggcggagctggcccgcggtgggctaggggcagggccggagccgcggcggcggagctgtggatccttcatgatgagagatttggggacacttctctctcctgtgtgtagttgatagtttggtggtgaagagatggctgacagtgtcaaaacctttctccaggaccttgccagaggaatcaaagactccatctggggtatttgtaccatctcaaagctagatgctcgaatccagcaaaagagagaggagcagcgtcgaagaagggcaagtagtgtcttggcacagagaagagcccagagtatagagcggaagcaagagagtgagccacgtattgttagtagaattttccagtgttgtgcttggaatggtggagtgttctggttcagtctcctcttgttttatcgagtatttattcctgtgcttcagtcggtaacagcccgaattatcggtgacccatcactacatggagatgtttggtcgtggctggaattcttcctcacgtcaattttcagtgctctttgggtgctccccttgtttgtgcttagcaaagtggtgaatgccatttggtttcaggatatagctgacctggcatttgaggtatcagggaggaagcctcacccattccctagtgtcagcaaaataattgctgacatgctcttcaaccttttgctgcaggctcttttcctcattcagggaatgtttgtgagtctctttcccatccatcttgtcggtcagctggttagtctcctgcatatgtcccttctctactcactgtactgctttgaatatcgttggttcaataaaggaattgaaatgcaccagcggttgtctaacatagaaaggaattggccttactactttgggtttggtttgcccttggcttttctcacagcaatgcagtcctcatatattatcagtggctgccttttctctatcctctttcctttattcattatcagcgccaatgaagcaaagacccctggcaaagcatatctcttccagttgcgcctcttctccttggtggtcttcttaagcaacagactcttccacaagacagtctacctgcagtcggccctgagcagctctacttctgcagagaagttcccttcaccgcatccgtcgcctgccaaactgaaggctactgcaggtcactgagttgcctgccatccaaaggggatgggcgggattggaagaagctgtggcagctcttttccctgttcacctcccgcctgccagggaaggcaggacccgctctgccaagggccctctgcgtattcccttctctctgaggaattgaaatttttgtctctggtgcacgtaaggcagaatgttccctgacaccagtgtgtggatttttaacatcaccgtgagtctgaaaggaccacaggtttttctgcagctattttctagcatttgccagtccctgtgcctggactgattggaacactttgtttttctccctgtgccatttacccttccacctttccatcctgccttctaccacccttggatgaatggattttgtaattctagctgttgtattttgtgaatttgttaattttgttgtttttctgtgaaacacatacattggatatgggaggtaaaggagtgtcccagttgctcctggtcactccctttatagccattactgtcttgtttcttgtaactcaggttaggttttggtctctcttgctccactgcaaaaaaaaaaaaaaaaaaaaaaaaaaaaaaaaaaaagcctgaagagatgagataggaggaaagacctcacagccagatctgctgggttttgaggagtgattttctttcttccccttgaaggggaaaaagctattttcattggtacatttaaagtcccccaactatggggaggtaccaattctggacaagtgccactacaacaacactaaacctgaacttttcaactccgttggtggtgggaggcagcgggcagaaatttactgttggccactgccaggtctatttcatatttcaaaggaatattgggtgctgcatataggaactgaaggggtcaatgtattaaacctgtgattggttgttttcctgtcattttgagagactaaatgtggggggcagatgtcaaaatacctgtacaattttaaaatgtcacaattaaacatgagctggtttcccacaaaaaaaaaaaaaaaaaaaaaaaaaaaaaaaaaaaaaaaaaaaaaaaaaaaaaaaaaaaaaaaaaaaaaaaaaaaaaaaaaaaaaaaaaaaaaagaaaaacaaaaaaggggggggcgggacgaaagtatgaaccacccggctgccgaagacaaaagaattcaaggtcgcaaaaccccgcccaagccgagccaggcggagcggccgggccaccacaaacacataaatggatcaacaaacacgcccgtgcggggtggtaaacaaaaagcgtgcccagagacaaaacaagcgcgcagggcagcatctcaccagaagaacgaccacgacgataagacatccacccaatatcaggtatcagagccgcgccccccaccacgtagaaaaaaacccaccacatggcgggcaacaataagactcccggcacaccaccac

SEQ ID NO: 324363 - DNA, 2136 bp, Homo sapiens
  misc_feature (2136)..(2136): n is a, c, g, or t
gtggtgccggctggttcttcgcgctcgcccgacttcccagcggccccgtgcggcccgggcatgcccagtgcgggcgcagcggccccggccctggaagcgccccggcggagctggcccgcggtgggctaggggcagggccggagccgcggcggcggagctgtggatccttcatgatgagagatttggggacacttctctctcctgtgtgtagttgatagtttggtggtgaagagatggctgacagtgtcaaaacctttctccaggaccttgccagaggaatcaaagactccatctggggtatttgtaccatctcaaagctagatgctcgaatccagcaaaagagagaggagcagcgtcgaagaagggcaagtagtgtcttggcacagagaagagcccagagtatagagcggaagcaagagagtgagccacgtattgttagtagaattttccagtgttgtgcttggaatggtggagtgttctggttcagtctcctcttgttttatcgagtatttattcctgtgcttcagtcggtaacagcccgaattatcggtgacccatcactacatggagatgtttggtcgtggctggaattcttcctcacgtcaattttcagtgctctttgggtgctccccttgtttgtgcttagcaaagtggtgaatgccatttggtttcaggatatagctgacctggcatttgaggtatcagggaggaagcctcacccattccctagtgtcagcaaaataattgctgacatgctcttcaaccttttgctgcaggctcttttcctcattcagggaatgtttgtgagtctctttcccatccatcttgtcggtcagctggttagtctcctgcatatgtcccttctctactcactgtactgctttgaatatcgttggttcaataaaggaattgaaatgcaccagcggttgtctaacatagaaaggaattggccttactactttgggtttggtttgcccttggcttttctcacagcaatgcagtcctcatatattatcagtggctgccttttctctatcctctttcctttattcattatcagcgccaatgaagcaaagacccctggcaaagcatatctcttccagttgcgcctcttctccttggtggtcttcttaagcaacagactcttccacaagacagtctacctgcagtcggccctgagcagctctacttctgcagagaagttcccttcaccgcatccgtcgcctgccaaactgaaggctactgcaggtcactgagttgcctgccatccaaaggggatgggcgggattggaagaagctgtggcagctcttttccctgttcacctcccgcctgccagggaaggcaggacccgctctgccaagggccctctgcgtattcccttctctctgaggaattgaaatttttgtctctggtgcacgtaaggcagaatgttccctgacaccagtgtgtggatttttaacatcaccgtgagtctgaaaggaccacaggtttttctgcagctattttctagcatttgccagtccctgtgcctggactgattggaacactttgtttttctccctgtgccatttacccttccacctttccatcctgccttctaccacccttggatgaatggattttgtaattctagctgttgtattttgtgaatttgttaattttgttgtttttctgtgaaacacatacattggatatgggaggtaaaggagtgtcccagttgctcctggtcactccctttatagccattactgtcttgtttcttgtaactcaggttaggttttggtctctcttgctccactgcaaaaaaaaaaaaaaaaaaaaaaaggttgaaaaaaataaaaagggggaaaaaacctaagcacgaatggggggttcggaggaggaattctttttccccttgtgggaaagctatttcttggtattaagtccccaattgggggtcattgggaaggcgctaaaactaccgacttaccggggggaggagggcgacaaatgggcacgcaggcatcaatcagataggggggagaacaaggaggaaacgaggagttttggaaaagggggacacatatatgaaagttgtcaaaagagatggcccattatatatgtgcgactcgtaatttattttttataatagn

SEQ ID NO: 324364 - DNA, 2214 bp, Homo sapiens
  misc_feature (16)..(16): n is a, c, g, or t
  misc_feature (20)..(20): n is a, c, g, or t
  misc_feature (22)..(22): n is a, c, g, or t
tgctaggtcgaggccngtgntnatcggccgagggcggccccggccctggaagcgccccggcggagctggcccgcggtgggctaggggcagggccggagccgcggcggcggagctgtggatccttcatgatgagagatttggggacacttctctctcctgtgtgtagttgatagtttggtggtgaagagatggctgacagtgtcaaaacctttctccaggaccttgccagaggaatcaaagactccatctggggtatttgtaccatctcaaagctagatgctcgaatccagcaaaagagagaggagcagcgtcgaagaagggcaagtagtgtcttggcacagagaagagcccagagtatagagcggaagcaagagagtgagccacgtattgttagtagaattttccagtgttgtgcttggaatggtggagtgttctggttcagtctcctcttgttttatcgagtatttattcctgtgcttcagtcggtaacagcccgaattatcggtgacccatcactacatggagatgtttggtcgtggctggaattcttcctcacgtcaattttcagtgctctttgggtgctccccttgtttgtgcttagcaaagtggtgaatgccatttggtttcaggatatagctgacctggcatttgaggtatcagggaggaagcctcacccattccctagtgtcagcaaaataattgctgacatgctcttcaaccttttgctgcaggctcttttcctcattcagggaatgtttgtgagtctctttcccatccatcttgtcggtcagctggttagtctcctgcatatgtcccttctctactcactgtactgctttgaatatcgttggttcaataaaggaattgaaatgcaccagcggttgtctaacatagaaaggaattggccttactactttgggtttggtttgcccttggcttttctcacagcaatgcagtcctcatatattatcagtggctgccttttctctatcctctttcctttattcattatcagcgccaatgaagcaaagacccctggcaaagcatatctcttccagttgcgcctcttctccttggtggtcttcttaagcaacagactcttccacaagacagtctacctgcagtcggccctgagcagctctacttctgcagagaagttcccttcaccgcatccgtcgcctgccaaactgaaggctactgcaggtcactgagttgcctgccatccaaaggggatgggcgggattggaagaagctgtggcagctcttttccctgttcacctcccgcctgccagggaaggcaggacccgctctgccaagggccctctgcgtattcccttctctctgaggaattgaaatttttgtctctggtgcacgtaaggcagaatgttccctgacaccagtgtgtggatttttaacatcaccgtgagtctgaaaggaccacaggtttttctgcagctattttctagcatttgccagtccctgtgcctggactgattggaacactttgtttttctccctgtgccatttacccttccacctttccatcctgccttctaccacccttggatgaatggattttgtaattctagctgttgtattttgtgaatttgttaattttgttgtttttctgtgaaacacatacattggatatgggaggtaaaggagtgtcccagttgctcctggtcactccctttatagccattactgtcttgtttcttgtaactcaggttaggttttggtctctcttgctccactgcaaaaaaaaaaaaaaaaaaaaaaaaaaaaaaaaaaaagcctgaagagatgagataggaggaaagacctcacagccagatctgctgggttttgaggagtgattttctttcttccccttgaaggggaaaaagctattttcattggtacatttaaagtcccccaactatggggaggtaccaattctggacaagtgccactacaacaacactaaacctgaacttttcaactccgttggtggtgggaggcagcgggcagaaatttactgttggccactgccaggtctatttcatatttcaaaggaatattgggtgctgcatataggaactgaaggggtcaatgtattaaacctgtgattggttgttttcctgtcattttgagagactaaatgtggggggcagatgtcaaaatacctgtacaattttaaaatgtcacaattaaacatgagctggtttcccacaa

SEQ ID NO: 324365 - DNA, 2301 bp, Homo sapiens
  misc_feature (16)..(16): n is a, c, g, or t
  misc_feature (20)..(20): n is a, c, g, or t
  misc_feature (22)..(22): n is a, c, g, or t
tgctaggtcgaggccngtgntnatcggccgagggcggccccggccctggaagcgccccggcggagctggcccgcggtgggctaggggcagggccggagccgcggcggcggagctgtgggtttgagaggttatttgtccatgggatgctcgtgttaaaacaaaaatcttcattgcaaagcttaagtaaaaacaagtctcgaccgagatccttcatgatgagagatttggggacacttctctctcctgtgtgtagttgatagtttggtggtgaagagatggctgacagtgtcaaaacctttctccaggaccttgccagaggaatcaaagactccatctggggtatttgtaccatctcaaagctagatgctcgaatccagcaaaagagagaggagcagcgtcgaagaagggcaagtagtgtcttggcacagagaagagcccagagtatagagcggaagcaagagagtgagccacgtattgttagtagaattttccagtgttgtgcttggaatggtggagtgttctggttcagtctcctcttgttttatcgagtatttattcctgtgcttcagtcggtaacagcccgaattatcggtgacccatcactacatggagatgtttggtcgtggctggaattcttcctcacgtcaattttcagtgctctttgggtgctccccttgtttgtgcttagcaaagtggtgaatgccatttggtttcaggatatagctgacctggcatttgaggtatcagggaggaagcctcacccattccctagtgtcagcaaaataattgctgacatgctcttcaaccttttgctgcaggctcttttcctcattcagggaatgtttgtgagtctctttcccatccatcttgtcggtcagctggttagtctcctgcatatgtcccttctctactcactgtactgctttgaatatcgttggttcaataaaggaattgaaatgcaccagcggttgtctaacatagaaaggaattggccttactactttgggtttggtttgcccttggcttttctcacagcaatgcagtcctcatatattatcagtggctgccttttctctatcctctttcctttattcattatcagcgccaatgaagcaaagacccctggcaaagcatatctcttccagttgcgcctcttctccttggtggtcttcttaagcaacagactcttccacaagacagtctacctgcagtcggccctgagcagctctacttctgcagagaagttcccttcaccgcatccgtcgcctgccaaactgaaggctactgcaggtcactgagttgcctgccatccaaaggggatgggcgggattggaagaagctgtggcagctcttttccctgttcacctcccgcctgccagggaaggcaggacccgctctgccaagggccctctgcgtattcccttctctctgaggaattgaaatttttgtctctggtgcacgtaaggcagaatgttccctgacaccagtgtgtggatttttaacatcaccgtgagtctgaaaggaccacaggtttttctgcagctattttctagcatttgccagtccctgtgcctggactgattggaacactttgtttttctccctgtgccatttacccttccacctttccatcctgccttctaccacccttggatgaatggattttgtaattctagctgttgtattttgtgaatttgttaattttgttgtttttctgtgaaacacatacattggatatgggaggtaaaggagtgtcccagttgctcctggtcactccctttatagccattactgtcttgtttcttgtaactcaggttaggttttggtctctcttgctccactgcaaaaaaaaaaaaaaaaaaaaaaaaaaaaaaaaaaaagcctgaagagatgagataggaggaaagacctcacagccagatctgctgggttttgaggagtgattttctttcttccccttgaaggggaaaaagctattttcattggtacatttaaagtcccccaactatggggaggtaccaattctggacaagtgccactacaacaacactaaacctgaacttttcaactccgttggtggtgggaggcagcgggcagaaatttactgttggccactgccaggtctatttcatatttcaaaggaatattgggtgctgcatataggaactgaaggggtcaatgtattaaacctgtgattggttgttttcctgtcattttgagagactaaatgtggggggcagatgtcaaaatacctgtacaattttaaaatgtcacaattaaacatgagctggtttcccacaa

SEQ ID NO: 324366 - DNA, 2031 bp, Homo sapiens
  misc_feature (4)..(4): n is a, c, g, or t
aggnggatggagtgatgtctgacggtgtaagatgatcttagggtggccaggaaaggcctttctgaaggggtatttgtaccatctcaaagctagatgctcgaatccagcaaaagagagaggagcagcgtcgaagaagggcaagtagtgtcttggcacagagaagagcccagagtatagagcggaagcaagagagtgagccacgtattgttagtagaattttccagtgttgtgcttggaatggtggagtgttctggttcagtctcctcttgttttatcgagtatttattcctgtgcttcagtcggtaacagcccgaattatcggtgacccatcactacatggagatgtttggtcgtggctggaattcttcctcacgtcaattttcagtgctctttgggtgctccccttgtttgtgcttagcaaagtggtgaatgccatttggtttcaggatatagctgacctggcatttgaggtatcagggaggaagcctcacccattccctagtgtcagcaaaataattgctgacatgctcttcaaccttttgctgcaggctcttttcctcattcagggaatgtttgtgagtctctttcccatccatcttgtcggtcagctggttagtctcctgcatatgtcccttctctactcactgtactgctttgaatatcgttggttcaataaaggaattgaaatgcaccagcggttgtctaacatagaaaggaattggccttactactttgggtttggtttgcccttggcttttctcacagcaatgcagtcctcatatattatcagtggctgccttttctctatcctctttcctttattcattatcagcgccaatgaagcaaagacccctggcaaagcatatctcttccagttgcgcctcttctccttggtggtcttcttaagcaacagactcttccacaagacagtctacctgcagtcggccctgagcagctctacttctgcagagaagttcccttcaccgcatccgtcgcctgccaaactgaaggctactgcaggtcactgagttgcctgccatccaaaggggatgggcgggattggaagaagctgtggcagctcttttccctgttcacctcccgcctgccagggaaggcaggacccgctctgccaagggccctctgcgtattcccttctctctgaggaattgaaatttttgtctctggtgcacgtaaggcagaatgttccctgacaccagtgtgtggatttttaacatcaccgtgagtctgaaaggaccacaggtttttctgcagctattttctagcatttgccagtccctgtgcctggactgattggaacactttgtttttctccctgtgccatttacccttccacctttccatcctgccttctaccacccttggatgaatggattttgtaattctagctgttgtattttgtgaatttgttaattttgttgtttttctgtgaaacacatacattggatatgggaggtaaaggagtgtcccagttgctcctggtcactccctttatagccattactgtcttgtttcttgtaactcaggttaggttttggtctctcttgctccactgcaaaaaaaaaaaaaaaaaaaaaaaaaaaaaaaaaaaagcctgaagagatgagataggaggaaagacctcacagccagatctgctgggttttgaggagtgattttctttcttccccttgaaggggaaaaagctattttcattggtacatttaaagtcccccaactatggggaggtaccaattctggacaagtgccactacaacaacactaaacctgaacttttcaactccgttggtggtgggaggcagcgggcagaaatttactgttggccactgccaggtctatttcatatttcaaaggaatattgggtgctgcatataggaactgaaggggtcaatgtattaaacctgtgattggttgttttcctgtcattttgagagactaaatgtggggggcagatgtcaaaatacctgtacaattttaaaatgtcacaattaaacatgagctggtttcccacaa

SEQ ID NO: 324367 - DNA, 2085 bp, Homo sapiens
gtggtgccggctggttcttcgcgctcgcccgacttcccagcggccccgtgcggcccgggcatgcccagtgcgggcgcagcggccccggccctggaagcgccccggcggagctggcccgcggtgggctaggggcagggccggagccgcggcggcggagctgtggatccttcatgatgagagatttggggacacttctctctcctgtgtgtagttgatagtttggtggtgaagagatggctgacagtgtcaaaacctttctccaggaccttgccagaggaatcaaagactccatctggggtatttgtaccatctcaaagctagatgctcgaatccagcaaaagagagaggagcagcgtcgaagaagggcaagtagtgtcttggcacagagaagagcccagagtatagagcggaagcaagagagtgagccacgtattgttagtagaattttccagtgttgtgcttggaatggtggagtgttctggttcagtctcctcttgttttatcgagtatttattcctgtgcttcagtcggtaacagcccgaattatcggtgacccatcactacatggagatgtttggtcgtggctggaattcttcctcacgtcaattttcagtgctctttgggtgctccccttgtttgtgcttagcaaagtggtgaatgccatttggtttcaggatatagctgacctggcatttgaggtatcagggaggaagcctcacccattccctagtgtcagcaaaataattgctgacatgctcttcaaccttttgctgcaggctcttttcctcattcagggaatgtttgtgagtctctttcccatccatcttgtcggtcagctggttagtctcctgcatatgtcccttctctactcactgtactgctttgaatatcgttggttcaataaaggaattgaaatgcaccagcggttgtctaacatagaaaggaattggccttactactttgggtttggtttgcccttggcttttctcacagcaatgcagtcctcatatattatcagtggctgccttttctctatcctctttcctttattcattatcagcgccaatgaagcaaagacccctggcaaagcatatctcttccagttgcgcctcttctccttggtggtcttcttaagcaacagactcttccacaagacagtctacctgcagtcggccctgagcagctctacttctgcagagaagttcccttcaccgcatccgtcgcctgccaaactgaaggctactgcaggtcactgagttgcctgccatccaaaggggatgggcgggattggaagaagctgtggcagctcttttccctgttcacctcccgcctgccagggaaggcaggacccgctctgccaagggccctctgcgtattcccttctctctgaggaattgaaatttttgtctctggtgcacgtaaggcagaatgttccctgacaccagtgtgtggatttttaacatcaccgtgagtctgaaaggaccacaggtttttctgcagctattttctagcatttgccagtccctgtgcctggactgattggaacactttgtttttctccctgtgccatttacccttccacctttccatcctgccttctaccacccttggatgaatggattttgtaattctagctgttgtattttgtgaatttgttaattttgttgtttttctgtgaaacacatacattggatatgggaggtaaaggagtgtcccagttgctcctggtcactccctttatagccattactgtcttgtttcttgtaactcaggttaggtctacctggcccttatccccatactagttattatcgaaaccatcagcctactcattcaaccaatagccctggccgtacgcctaaccgctaacattactgcaggccacctactcatgcacctaattggaagcaccaccctagcaatatcaaccattaaccttccctctacacttatcatcttcacaattctaattctactgactatcctagaaatcgctgtcgccttagtccaggcctacgttttcacacttctagttaggtctacctgggttaggtctaccagtctacctgggttaggtctacctgg

SEQ ID NO: 324368 - DNA, 1760 bp, Homo sapiens
tagcgaacgtgaaggtcgctgtgaaaggccggtaacagcccgaattatcggtgacccatcactacatggagatgtttggtcgtggctggaattcttcctcacgtcaattttcagtgctctttgggtgctccccttgtttgtgcttagcaaagtggtgaatgccatttggtttcaggatatagctgacctggcatttgaggtatcagggaggaagcctcacccattccctagtgtcagcaaaataattgctgacatgctcttcaaccttttgctgcaggctcttttcctcattcagggaatgtttgtgagtctctttcccatccatcttgtcggtcagctggttagtctcctgcatatgtcccttctctactcactgtactgctttgaatatcgttggttcaataaaggaattgaaatgcaccagcggttgtctaacatagaaaggaattggccttactactttgggtttggtttgcccttggcttttctcacagcaatgcagtcctcatatattatcagtggctgccttttctctatcctctttcctttattcattatcagcgccaatgaagcaaagacccctggcaaagcatatctcttccagttgcgcctcttctccttggtggtcttcttaagcaacagactcttccacaagacagtctacctgcagtcggccctgagcagctctacttctgcagagaagttcccttcaccgcatccgtcgcctgccaaactgaaggctactgcaggtcactgagttgcctgccatccaaaggggatgggcgggattggaagaagctgtggcagctcttttccctgttcacctcccgcctgccagggaaggcaggacccgctctgccaagggccctctgcgtattcccttctctctgaggaattgaaatttttgtctctggtgcacgtaaggcagaatgttccctgacaccagtgtgtggatttttaacatcaccgtgagtctgaaaggaccacaggtttttctgcagctattttctagcatttgccagtccctgtgcctggactgattggaacactttgtttttctccctgtgccatttacccttccacctttccatcctgccttctaccacccttggatgaatggattttgtaattctagctgttgtattttgtgaatttgttaattttgttgtttttctgtgaaacacatacattggatatgggaggtaaaggagtgtcccagttgctcctggtcactccctttatagccattactgtcttgtttcttgtaactcaggttaggttttggtctctcttgctccactgcaaaaaaaaaaaaaaaaaaaaaaaaaaaaaaaaaaaagcctgaagagatgagataggaggaaagacctcacagccagatctgctgggttttgaggagtgattttctttcttccccttgaaggggaaaaagctattttcattggtacatttaaagtcccccaactatggggaggtaccaattctggacaagtgccactacaacaacactaaacctgaacttttcaactccgttggtggtgggaggcagcgggcagaaatttactgttggccactgccaggtctatttcatatttcaaaggaatattgggtgctgcatataggaactgaaggggtcaatgtattaaacctgtgattggttgttttcctgtcattttgagagactaaatgtggggggcagatgtcaaaatacctgtacaattttaaaatgtcacaattaaacatgagctggtttcccacaa

SEQ ID NO: 324369 - DNA, 1644 bp, Homo sapiens
cggtctaggtacgaggctgggtgtcggcttacaaagtggtgaatgccatttggtttcaggatatagctgacctggcatttgaggtatcagggaggaagcctcacccattccctagtgtcagcaaaataattgctgacatgctcttcaaccttttgctgcaggctcttttcctcattcagggaatgtttgtgagtctctttcccatccatcttgtcggtcagctggttagtctcctgcatatgtcccttctctactcactgtactgctttgaatatcgttggttcaataaaggaattgaaatgcaccagcggttgtctaacatagaaaggaattggccttactactttgggtttggtttgcccttggcttttctcacagcaatgcagtcctcatatattatcagtggctgccttttctctatcctctttcctttattcattatcagcgccaatgaagcaaagacccctggcaaagcatatctcttccagttgcgcctcttctccttggtggtcttcttaagcaacagactcttccacaagacagtctacctgcagtcggccctgagcagctctacttctgcagagaagttcccttcaccgcatccgtcgcctgccaaactgaaggctactgcaggtcactgagttgcctgccatccaaaggggatgggcgggattggaagaagctgtggcagctcttttccctgttcacctcccgcctgccagggaaggcaggacccgctctgccaagggccctctgcgtattcccttctctctgaggaattgaaatttttgtctctggtgcacgtaaggcagaatgttccctgacaccagtgtgtggatttttaacatcaccgtgagtctgaaaggaccacaggtttttctgcagctattttctagcatttgccagtccctgtgcctggactgattggaacactttgtttttctccctgtgccatttacccttccacctttccatcctgccttctaccacccttggatgaatggattttgtaattctagctgttgtattttgtgaatttgttaattttgttgtttttctgtgaaacacatacattggatatgggaggtaaaggagtgtcccagttgctcctggtcactccctttatagccattactgtcttgtttcttgtaactcaggttaggttttggtctctcttgctccactgcaaaaaaaaaaaaaaaaaaaaaaaaaaaaaaaaaaaagcctgaagagatgagataggaggaaagacctcacagccagatctgctgggttttgaggagtgattttctttcttccccttgaaggggaaaaagctattttcattggtacatttaaagtcccccaactatggggaggtaccaattctggacaagtgccactacaacaacactaaacctgaacttttcaactccgttggtggtgggaggcagcgggcagaaatttactgttggccactgccaggtctatttcatatttcaaaggaatattgggtgctgcatataggaactgaaggggtcaatgtattaaacctgtgattggttgttttcctgtcattttgagagactaaatgtggggggcagatgtcaaaatacctgtacaattttaaaatgtcacaattaaacatgagctggtttcccacaa

SEQ ID NO: 324370 - DNA, 2147 bp, Homo sapiens
gtggtgccggctggttcttcgcgctcgcccgacttcccagcggccccgtgcggcccgggcatgcccagtgcgggcgcagcggccccggccctggaagcgccccggcggagctggcccgcggtgggctaggggcagggccggagccgcggcggcggagctgtggatccttcatgatgagagatttggggacacttctctctcctgtgtgtagttgatagtttggtggtgaagagatggctgacagtgtcaaaacctttctccaggaccttgccagaggaatcaaagactccatctggggtatttgtaccatctcaaagctagatgctcgaatccagcaaaagagagaggagcagcgtcgaagaagggcaagtagtgtcttggcacagagaagagcccagagtatagagcggaagcaagagagtgagccacgtattgttagtagaattttccagtgttgtgcttggaatggtggagtgttctggttcagtctcctcttgttttatcgagtatttattcctgtgcttcagtcggtaacagcccgaattatcggtgacccatcactacatggagatgtttggtcgtggctggaattcttcctcacgtcaattttcagtgctctttgggtgctccccttgtttgtgcttagcaaagtggtgaatgccatttggtttcaggatatagctgacctggcatttgaggtatcagggaggaagcctcacccattccctagtgtcagcaaaataattgctgacatgctcttcaaccttttgctgcaggctcttttcctcattcaggaattgaaatgcaccagcggttgtctaacatagaaaggaattggccttactactttgggtttggtttgcccttggcttttctcacagcaatgcagtcctcatatattatcagtggctgccttttctctatcctctttcctttattcattatcagcgccaatgaagcaaagacccctggcaaagcatatctcttccagttgcgcctcttctccttggtggtcttcttaagcaacagactcttccacaagacagtctacctgcagtcggccctgagcagctctacttctgcagagaagttcccttcaccgcatccgtcgcctgccaaactgaaggctactgcaggtcactgagttgcctgccatccaaaggggatgggcgggattggaagaagctgtggcagctcttttccctgttcacctcccgcctgccagggaaggcaggacccgctctgccaagggccctctgcgtattcccttctctctgaggaattgaaatttttgtctctggtgcacgtaaggcagaatgttccctgacaccagtgtgtggatttttaacatcaccgtgagtctgaaaggaccacaggtttttctgcagctattttctagcatttgccagtccctgtgcctggactgattggaacactttgtttttctccctgtgccatttacccttccacctttccatcctgccttctaccacccttggatgaatggattttgtaattctagctgttgtattttgtgaatttgttaattttgttgtttttctgtgaaacacatacattggatatgggaggtaaaggagtgtcccagttgctcctggtcactccctttatagccattactgtcttgtttcttgtaactcaggttaggttttggtctctcttgctccactgcaaaaaaaaaaaaaaaaaaaaaaaaaaaaaaaaaaaagcctgaagagatgagataggaggaaagacctcacagccagatctgctgggttttgaggagtgattttctttcttccccttgaaggggaaaaagctattttcattggtacatttaaagtcccccaactatggggaggtaccaattctggacaagtgccactacaacaacactaaacctgaacttttcaactccgttggtggtgggaggcagcgggcagaaatttactgttggccactgccaggtctatttcatatttcaaaggaatattgggtgctgcatataggaactgaaggggtcaatgtattaaacctgtgattggttgttttcctgtcattttgagagactaaatgtggggggcagatgtcaaaatacctgtacaattttaaaatgtcacaattaaacatgagctggtttcccacaa

SEQ ID NO: 324371 - DNA, 1797 bp, Homo sapiens
  misc_feature (229)..(229): n is a, c, g, or t
ggccgggttatccagtaaaccaatcgatagcgtcggacagtgctattcgcatctctcggtggagtacttactctccctcgaatccggagtcgcactcttgtgctggcgtccccttgttagtgcttcgcacaccatggctgcagatgctcatcctagtgtatacagcgaattttgctgcaacgtgaggcatcaggaaggtatgctgcggagatcggaagtgcatactgcnccaattggccgtagctcgctcgagggcacacacattaagttcgccattgcaccagtgtctcttatcacagcctgtccgtctggaggctcttttcctcatgcagggaatgtttgtgagtctctttcccatccatcttgtcggtcagctggttagtctcctgcatatgtcccttctctactcactgtactgctttgaatatcgttggttcaataaaggaattgaaatgcaccagcggttgtctaacatagaaaggaattggccttactactttgggtttggtttgcccttggcttttctcacagcaatgcagtcctcatatattatcagtggctgccttttctctatcctctttcctttattcattatcagcgccaatgaagcaaagacccctggcaaagcatatctcttccagttgcgcctcttctccttggtggtcttcttaagcaacagactcttccacaagacagtctacctgcagtcggccctgagcagctctacttctgcagagaagttcccttcaccgcatccgtcgcctgccaaactgaaggctactgcaggtcactgagttgcctgccatccaaaggggatgggcgggattggaagaagctgtggcagctcttttccctgttcacctcccgcctgccagggaaggcaggacccgctctgccaagggccctctgcgtattcccttctctctgaggaattgaaatttttgtctctggtgcacgtaaggcagaatgttccctgacaccagtgtgtggatttttaacatcaccgtgagtctgaaaggaccacaggtttttctgcagctattttctagcatttgccagtccctgtgcctggactgattggaacactttgtttttctccctgtgccatttacccttccacctttccatcctgccttctaccacccttggatgaatggattttgtaattctagctgttgtattttgtgaatttgttaattttgttgtttttctgtgaaacacatacattggatatgggaggtaaaggagtgtcccagttgctcctggtcactccctttatagccattactgtcttgtttcttgtaactcaggttaggttttggtctctcttgctccactgcaaaaaaaaaaaaaaaaaaaaaaaaaaaaaaaaaaaagcctgaagagatgagataggaggaaagacctcacagccagatctgctgggttttgaggagtgattttctttcttccccttgaaggggaaaaagctattttcattggtacatttaaagtcccccaactatggggaggtaccaattctggacaagtgccactacaacaacactaaacctgaacttttcaactccgttggtggtgggaggcagcgggcagaaatttactgttggccactgccaggtctatttcatatttcaaaggaatattgggtgctgcatataggaactgaaggggtcaatgtattaaacctgtgattggttgttttcctgtcattttgagagactaaatgtggggggcagatgtcaaaatacctgtacaattttaaaatgtcacaattaaacatgagctggtttcccacaa

SEQ ID NO: 324372 - DNA, 1573 bp, Homo sapiens
cggcacgagggactagtctcgagtttcatccccttccctagagtcaggagatggagtgttgatatcttctacacactttggagtgacagggtctgtgacctcattcagggaatgtttgtgagtctctttcccatccatcttgtcggtcagctggttagtctcctgcatatgtcccttctctactcactgtactgctttgaatatcgttggttcaataaaggaattgaaatgcaccagcggttgtctaacatagaaaggaattggccttactactttgggtttggtttgcccttggcttttctcacagcaatgcagtcctcatatattatcagtggctgccttttctctatcctctttcctttattcattatcagcgccaatgaagcaaagacccctggcaaagcatatctcttccagttgcgcctcttctccttggtggtcttcttaagcaacagactcttccacaagacagtctacctgcagtcggccctgagcagctctacttctgcagagaagttcccttcaccgcatccgtcgcctgccaaactgaaggctactgcaggtcactgagttgcctgccatccaaaggggatgggcgggattggaagaagctgtggcagctcttttccctgttcacctcccgcctgccagggaaggcaggacccgctctgccaagggccctctgcgtattcccttctctctgaggaattgaaatttttgtctctggtgcacgtaaggcagaatgttccctgacaccagtgtgtggatttttaacatcaccgtgagtctgaaaggaccacaggtttttctgcagctattttctagcatttgccagtccctgtgcctggactgattggaacactttgtttttctccctgtgccatttacccttccacctttccatcctgccttctaccacccttggatgaatggattttgtaattctagctgttgtattttgtgaatttgttaattttgttgtttttctgtgaaacacatacattggatatgggaggtaaaggagtgtcccagttgctcctggtcactccctttatagccattactgtcttgtttcttgtaactcaggttaggttttggtctctcttgctccactgcaaaaaaaaaaaaaaaaaaaaaaaaaaaaaaaaaaaagcctgaagagatgagataggaggaaagacctcacagccagatctgctgggttttgaggagtgattttctttcttccccttgaaggggaaaaagctattttcattggtacatttaaagtcccccaactatggggaggtaccaattctggacaagtgccactacaacaacactaaacctgaacttttcaactccgttggtggtgggaggcagcgggcagaaatttactgttggccactgccaggtctatttcatatttcaaaggaatattgggtgctgcatataggaactgaaggggtcaatgtattaaacctgtgattggttgttttcctgtcattttgagagactaaatgtggggggcagatgtcaaaatacctgtacaattttaaaatgtcacaattaaacatgagctggtttcccacaa

SEQ ID NO: 324373 - DNA, 2049 bp, Homo sapiens
tacatattcaagtagagggctgtatgacctggccacatgagtttattgataacagtagtaaaatatactttaaaatgagtttttagcaataataatagcattctaaaagttttattacttcaaagaaaagctcaattcatctttgatcaattttggttaagtcagtgtggatacttgtattagagacttaggtctgctttgggtttttgtatgctcttgctatacagcacagctcactgtttatcttaagaggaatatttgactttcttttgaaactcttcttcctgcaaccacagatagcatatgataccttcagacatagcttgaagtctgtaccccgaagtcagccatagaaaagtacttctcaaatcaaagttaatctaaaatataactatttcctgtaagagccacaatacttcaacgctggtgactgcattacattcatggcagcagcagggcccaatgcattctttttttttttgagacggagtctcgctctgtcacccaagctggagtgcagtggcgtgatctcggctcactgcaacctccgcctaccaggttcaagcgattctcctgcctcagcctcctgggtagctgggattgcaggcgcatgctaccatgccctgctaatttttttctcaagtgatccacctgcttcagcctcccaaagtgctgggattacaggtatgaggcaccacgcccggctccaatgtattctttagttgcctgttccatccatgtatctaatatctgtatttccttgatcaagtttcatttgtcttgtctttccctgtgtagttttaaatttaatgtcaagttgtcaaacaacggaaataattttgagtaactggggagctaacaagttgggtttcttgccttttagtctcttccagttgcgcctcttctccttggtggtcttcttaagcaacagactcttccacaagacagtctacctgcagtcggccctgagcagctctacttctgcagagaagttcccttcaccgcatccgtcgcctgccaaactgaaggctactgcaggtcactgagttgcctgccatccaaaggggatgggcgggattggaagaagctgtggcagctcttttccctgttcacctcccgcctgccagggaaggcaggacccgctctgccaagggccctctgcgtattcccttctctctgaggaattgaaatttttgtctctggtgcacgtaaggcagaatgttccctgacaccagtgtgtggatttttaacatcaccgtgagtctgaaaggaccacaggtttttctgcagctattttctagcatttgccagtccctgtgcctggactgattggaacactttgtttttctccctgtgccatttacccttccacctttccatcctgccttctaccacccttggatgaatggattttgtaattctagctgttgtattttgtgaatttgttaattttgttgtttttctgtgaaacacatacattggatatgggaggtaaaggagtgtcccagttgctcctggtcactccctttatagccattactgtcttgtttcttgtaactcaggttaggttttggtctctcttgctccactgcaaaaaaaaaaaaaaaaaaaaaaaaaaaaaaaaaaaagcctgaagagatgagataggaggaaagacctcacagccagatctgctgggttttgaggagtgattttctttcttccccttgaaggggaaaaagctattttcattggtacatttaaagtcccccaactatggggaggtaccaattctggacaagtgccactacaacaacactaaacctgaacttttcaactccgttggtggtgggaggcagcgggcagaaatttactgttggccactgccaggtctatttcatatttcaaaggaatattgggtgctgcatataggaactgaaggggtcaatgtattaaacctgtgattggttgttttcctgtcattttgagagactaaatgtggggggcagatgtcaaaatacctgtacaattttaaaatgtcacaattaaacatgagctggtttcccacaa

SEQ ID NO: 324374 - DNA, 711 bp, Homo sapiens
  misc_feature (11)..(11): n is a, c, g, or t
gattggaacantttgttttcccccccccccccccccccatttatacattataaccacccttggatgaatggattttgtaattctagctgttgtattttgtgaatttgttaattttgttgtttttctgtgaaacacatacattggatatgggaggtaaaggagtgtcccagttgctcctggtcactccctttatagccattactgtcttgtttcttgtaactcaggttaggttttggtctctcttgctccactgcaaaaaaaaaaaaaaaaaaaaaaaaaaaaaaaaaaaagcctgaagagatgagataggaggaaagacctcacagccagatctgctgggttttgaggagtgattttctttcttccccttgaaggggaaaaagctattttcattggtacatttaaagtcccccaactatggggaggtaccaattctggacaagtgccactacaacaacactaaacctgaacttttcaactccgttggtggtgggaggcagcgggcagaaatttactgttggccactgccaggtctatttcatatttcaaaggaatattgggtgctgcatataggaactgaaggggtcaatgtattaaacctgtgattggttgttttcctgtcattttgagagactaaatgtggggggcagatgtcaaaatacctgtacaattttaaaatgtcacaattaaacatgagctggtttcccacaa

SEQ ID NO: 324375 - DNA, 867 bp, Homo sapiens
gtggtgccggctggttcttcgcgctcgcccgacttcccagcggccccgtgcggcccgggcatgcccagtgcgggcgcagcggccccggccctggaagcgccccggcggagctggcccgcggtgggctaggggcagggccggagccgcggcggcggagctgtggatccttcatgatgagagatttggggacacttctctctcctgtgtgtagttgatagtttggtggtgaagagatggctgacagtgtcaaaacctttctccaggaccttgccagaggaatcaaagactccatctggggtatttgtaccatctcaaagctagatgctcgaatccagcaaaagagagaggagcagcgtcgaagaagggcaagtagtgtcttggcacagagaagagcccagagtatagagcggaagcaagagagtgagccacgtattgttagtagaattttccagtgttgtgcttggaatggtggagtgttctggttcagtctcctcttgttttatcgagtatttattcctgtgcttcagtcggtaacagcccgaattatcggtaagtgtataccctgctccttgtctgttggggacagagtgggagatgatgtttcagtctccctcagtttactgaacatttcctgtgtaccaggagctttcactgtttattttcttttttgttgttttattctttttaaaaatttatatttcgttattctcctagaggccctttaagaatgggtactgttgttctatccattttatgaatgaggaaatgcaagttaccaaggttaaaccattagtaagaggcaaagctgagatttaaacccagatggtatcctgcagatagcgtactggtaatcactgtggcatctcg

SEQ ID NO: 324376 - DNA, 720 bp, Homo sapiens
ctaattttttatattctttagtggagacagggttttgccatgttggccaggctggtctcgaactcctgacctcagttgatcgcctaccacggcctcccaaagtgttaggattacagccgtgagccactgcgcttgaccatttttttagtcttttctcattgactgacattagaacattgggagaacatgaggcactgaaaaataatacagtacccacaaaagataagatataaaatgaactactgaatgacaattaggaaataacttatgctttataaactaaatacatgtgatcttttccagtgagccacgtattgttagtagaattttccagtgttgtgcttggaatggtggagtgttctgggtaagttctttaaattccaggtgccttataagcatcttcagattgttgctgggttgatagctatgaactgttttcttgaaacactgagacaaatagttttcatctgctgatgtacacttagaaatataactcaggagtctgtgcatctgcagagattttattcccactcaggaaagcacacttatatgtaagcaaacgtcacagccctgaatatacacttgaattttgtttctaaaatgactcattcacaagtattagaggtagcagtttctcttgacactgtctagacattttaaaatgctaacagcaactatggggactcgggaagggcagatacggctagacaagaacaaggt

SEQ ID NO: 324377 - DNA, 2259 bp, Homo sapiens
gtggtgccggctggttcttcgcgctcgcccgacttcccagcggccccgtgcggcccgggcatgcccagtgcgggcgcagcggccccggccctggaagcgccccggcggagctggcccgcggtgggctaggggcagggccggagccgcggcggcggagctgtggatccttcatgatgagagatttggggacacttctctctcctgtgtgtagttgatagtttggtggtgaagagatggctgacagtgtcaaaacctttctccaggaccttgccagaggaatcaaagactccatctggggtatttgtaccatctcaaagctagatgctcgaatccagcaaaagagagaggagcagcgtcgaagaagggcaagtagtgtcttggcacagagaagagcccagagtatagagcggaagcaagagagtgagccacgtattgttagtagaattttccagtgttgtgcttggaatggtggagtgttctggttcagtctcctcttgttttatcgagtatttattcctgtgcttcagtcggtaacagcccgaattatcggtgacccatcactacatggagatgtttggtcgtggctggaattcttcctcacgtcaattttcagtgctctttgggtgctccccttgtttgtgcttagcaaagtggtgaatgccatttggtttcaggatatagctgacctggcatttgaggtatcagggaggaagcctcacccattccctagtgtcagcaaaataattgctgacatgctcttcaaccttttgctgcaggctcttttcctcattcagggaatgtttgtgagtctctttcccatccatcttgtcggtcagctggttagtctcctgcatatgtcccttctctactcactgtactgctttgaatatcgttggttcaataaaggaattgaaatgcaccagcggttgtctaacatagaaaggaattggccttactactttgggtttggtttgcccttggcttttctcacagcaatgcagtcctcatatattatcagtggctgccttttctctatcctctttcctttattcattatcagcgccaatgaagcaaagacccctggcaaagcatatctcttccagttgcgcctcttctccttggtggtcttcttaagcaacagactcttccacaagacagtctacctgcagtcggccctgagcagctctacttctgcagagaagttcccttcaccgcatccgtcgcctgccaaactgaaggctactgcaggtcactgagttgcctgccatccaaaggggatgggcgggattggaagaagctgtggcagctcttttccctgttcacctcccgcctgccagggaaggcaggacccgctctgccaagggccctctgcgtattcccttctctctgaggaattgaaatttttgtctctggtgcacgtaaggcagaatgttccctgacaccagtgtgtggatttttaacatcaccgtgagtctgaaaggaccacaggtttttctgcagctattttctagcatttgccagtccctgtgcctggactgattggaacactttgtttttctccctgtgccatttacccttccacctttccatcctgccttctaccacccttggatgaatggattttgtaattctagctgttgtattttgtgaatttgttaattttgttgtttttctgtgaaacacatacattggatatgggaggtaaaggagtgtcccagttgctcctggtcactccctttatagccattactgtcttgtttcttgtaactcaggttaggttttggtctctcttgctccactgcaaaaaaaaaaaaaaaaaaaaaaaaaaaaaaaaaaaagcctgaagagatgagataggaggaaagacctcacagccagatctgctgggttttgaggagtgattttctttcttccccttgaaggggaaaaagctattttcattggtacatttaaagtcccccaactatggggaggtaccaattctggacaagtgccactacaacaacactaaacctgaacttttcaactccgttggtggtgggaggcagcgggcagaaatttactgttggccactgccaggtctatttcatatttcaaaggaatattgggtgctgcatataggaactgaaggggtcaatgtattaaacctgtgattggttgttttcctgtcattttgagagactaaatgtggggggcagatgtcaaaatacctgtacaattttaaaatgtcacaattaaacatgagctggtttcccacaa

SEQ ID NO: 324378 - DNA, 2147 bp, Homo sapiens
gtggtgccggctggttcttcgcgctcgcccgacttcccagcggccccgtgcggcccgggcatgcccagtgcgggcgcagcggccccggccctggaagcgccccggcggagctggcccgcggtgggctaggggcagggccggagccgcggcggcggagctgtggatccttcatgatgagagatttggggacacttctctctcctgtgtgtagttgatagtttggtggtgaagagatggctgacagtgtcaaaacctttctccaggaccttgccagaggaatcaaagactccatctggggtatttgtaccatctcaaagctagatgctcgaatccagcaaaagagagaggagcagcgtcgaagaagggcaagtagtgtcttggcacagagaagagcccagagtatagagcggaagcaagagagtgagccacgtattgttagtagaattttccagtgttgtgcttggaatggtggagtgttctggttcagtctcctcttgttttatcgagtatttattcctgtgcttcagtcggtaacagcccgaattatcggtgacccatcactacatggagatgtttggtcgtggctggaattcttcctcacgtcaattttcagtgctctttgggtgctccccttgtttgtgcttagcaaagtggtgaatgccatttggtttcaggatatagctgacctggcatttgaggtatcagggaggaagcctcacccattccctagtgtcagcaaaataattgctgacatgctcttcaaccttttgctgcaggctcttttcctcattcagggaatgtttgtgagtctctttcccatccatcttgtcggtcagctggttagtctcctgcatatgtcccttctctactcactgtactgctttgaatatcgttggttcaataaaggaattgaaatgcaccagcggttgtctaacatagaaaggaattggccttactactttgggtttggtttgcccttggcttttctcacagcaatgcagtcctcatatattatcagtggctgccttttctctatcctctttcctttattcattatcagcgccaatgaagcaaagacccctggcaaagcatatctcttccagttgcgcctcttctccttggtggtcttcttaagcaacagactcttccacaagacagtctacctgcagtcggccctgagcagctctacttctgcagagaagttcccttcaccgcatccgtcgcctgccaaactgaaggctactgcaggtcactgagttgcctgccatccaaaggggatgggcgggattggaagaagctgtggcagctcttttccctgttcacctcccgcctgccagggaaggcaggacccgctctgccaagggccctctgcgtattcccttctctctgaggaattgaaatttttgtctctggtgcacgtaaggcagaatgttccctgacaccagtgtgtggatttttaacatcaccgtgagtctgaaaggaccacaggtttttctgcagctattttctagcatttgccagtccctgtgcctggactgattggaacactttgtttttctccctgtgccatttacccttccacctttccatcctgccttctaccacccttggatgaatggattttgtaattctagctgttgtattttgtgaatttgttaattttgttgtttttctgtgaaacacatacattggatatgggaggtaaaggagtgtcccagttgctcctggtcactccctttatagccattactgtcttgtttcttgtaactcaggttaggttttggtctctcttgctccactgcaaaaaaaaaaaaaaaaaaaaaaaaaaaaaaaaaaaagcctgaagagatgagataggaggaaagacctcacagccagatctgctgggttttgaggagtgattttctttcttccccttgaaggggaaaaagctattttcattggtacatttaaagtcccccaactatggggaggtaccaattctggacaagtgccactacaacaacactaaacctgaacttttcaactccgttggtggtgggaggcagcgggcagaaatttactgttggccactgccaggtctatttcatatttcaaaggaatattgggtgctgctcaaagatctcttggggtcctctgaacagctt

SEQ ID NO: 324379 - DNA, 2140 bp, Homo sapiens
gtggtgccggctggttcttcgcgctcgcccgacttcccagcggccccgtgcggcccgggcatgcccagtgcgggcgcagcggccccggccctggaagcgccccggcggagctggcccgcggtgggctaggggcagggccggagccgcggcggcggagctgtggatccttcatgatgagagatttggggacacttctctctcctgtgtgtagttgatagtttggtggtgaagagatggctgacagtgtcaaaacctttctccaggaccttgccagaggaatcaaagactccatctggggtatttgtaccatctcaaagctagatgctcgaatccagcaaaagagagaggagcagcgtcgaagaagggcaagtagtgtcttggcacagagaagagcccagagtatagagcggaagcaagagagtgagccacgtattgttagtagaattttccagtgttgtgcttggaatggtggagtgttctggttcagtctcctcttgttttatcgagtatttattcctgtgcttcagtcggtaacagcccgaattatcggtgacccatcactacatggagatgtttggtcgtggctggaattcttcctcacgtcaattttcagtgctctttgggtgctccccttgtttgtgcttagcaaagtggtgaatgccatttggtttcaggatatagctgacctggcatttgaggtatcagggaggaagcctcacccattccctagtgtcagcaaaataattgctgacatgctcttcaaccttttgctgcaggctcttttcctcattcagggaatgtttgtgagtctctttcccatccatcttgtcggtcagctggttagtctcctgcatatgtcccttctctactcactgtactgctttgaatatcgttggttcaataaaggaattgaaatgcaccagcggttgtctaacatagaaaggaattggccttactactttgggtttggtttgcccttggcttttctcacagcaatgcagtcctcatatattatcagtggctgccttttctctatcctctttcctttattcattatcagcgccaatgaagcaaagacccctggcaaagcatatctcttccagttgcgcctcttctccttggtggtcttcttaagcaacagactcttccacaagacagtctacctgcagtcggccctgagcagctctacttctgcagagaagttcccttcaccgcatccgtcgcctgccaaactgaaggctactgcaggtcactgagttgcctgccatccaaaggggatgggcgggattggaagaagctgtggcagctcttttccctgttcacctcccgcctgccagggaaggcaggacccgctctgccaagggccctctgcgtattcccttctctctgaggaattgaaatttttgtctctggtgcacgtaaggcagaatgttccctgacaccagtgtgtggatttttaacatcaccgtgagtctgaaaggaccacaggtttttctgcagctattttctagcatttgccagtccctgtgcctggactgattggaacactttgtttttctccctgtgccatttacccttccacctttccatcctgccttctaccacccttggatgaatggattttgtaattctagctgttgtattttgtgaatttgttaattttgttgtttttctgtgaaacacatacattggatatgggaggtaaaggagtgtcccagttgctcctggtcactccctttatagccattactgtcttgtttcttgtaactcaggttaggttttggtctctcttgctccactgcaaaaaaaaaaaaaaaaaaaaaaaaaaaaaaaaaaaagcctgaagagatgagataggaggaaagacctcacagccagatctgctgggttttgaggagtgattttctttcttccccttgaaggggaaaaagctattttcattggtacatttaaagtcccccaactatggggaggtaccaattctggacaagtgccactacaacaacactaaacctgaacttttcaactccgttggtggaagggaacattctgccttacgtgcaccagagacaaaaatttcaattcctcagagagaagggaatacgcagagggcccttggcagagcgggctggtgaaggga

SEQ ID NO: 324380 - DNA, 2143 bp, Homo sapiens
gccgacttcccagcggccccgtgcggcccgcggcggcggagctgtggatccttcatgatgagagatttggggacacttctctctcctgtgtgtagttgatagtttggtggtgaagagatggctgacagtgtcaaaacctttctccaggaccttgccagaggaatcaaagactccatctggggtatttgtaccatctcaaagctagatgctcgaatccagcaaaagagagaggagcagcgtcgaagaagggcaagtagtgtcttggcacagagaagagcccagagtatagagcggaagcaagagagtgagccacgtattgttagtagaattttccagtgttgtgcttggaatggtggagtgttctggttcagtctcctcttgttttatcgagtatttattcctgtgcttcagtcggtaacagcccgaattatcggtgacccatcactacatggagatgtttggtcgtggctggaattcttcctcacgtcaattttcagtgctctttgggtgctccccttgtttgtgcttagcaaagtggtgaatgccatttggtttcaggatatagctgacctggcatttgaggtatcagggaggaagcctcacccattccctagtgtcagcaaaataattgctgacatgctcttcaaccttttgctgcaggctcttttcctcattcagggaatgtttgtgagtctctttcccatccatcttgtcggtcagctggttagtctcctgcatatgtcccttctctactcactgtactgctttgaatatcgttggttcaataaaggaattgaaatgcaccagcggttgtctaacatagaaaggaattggccttactactttgggtttggtttgcccttggcttttctcacagcaatgcagtcctcatatattatcagtggctgccttttctctatcctctttcctttattcattatcagcgccaatgaagcaaagacccctggcaaagcatatctcttccagttgcgcctcttctccttggtggtcttcttaagcaacagactcttccacaagacagtctacctgcagtcggccctgagcagctctacttctgcagagaagttcccttcaccgcatccgtcgcctgccaaactgaaggctactgcaggtcactgagttgcctgccatccaaaggggatgggcgggattggaagaagctgtggcagctcttttccctgttcacctcccgcctgccagggaaggcaggacccgctctgccaagggccctctgcgtattcccttctctctgaggaattgaaatttttgtctctggtgcacgtaaggcagaatgttccctgacaccagtgtgtggatttttaacatcaccgtgagtctgaaaggaccacaggtttttctgcagctattttctagcatttgccagtccctgtgcctggactgattggaacactttgtttttctccctgtgccatttacccttccacctttccatcctgccttctaccacccttggatgaatggattttgtaattctagctgttgtattttgtgaatttgttaattttgttgtttttctgtgaaacacatacattggatatgggaggtaaaggagtgtcccagttgctcctggtcactccctttatagccattactgtcttgtttcttgtaactcaggttaggttttggtctctcttgctccactgcaaaaaaaaaaaaaaaaaaaaaaaaaaaaaaaaaaaagcctgaagagatgagataggaggaaagacctcacagccagatctgctgggttttgaggagtgattttctttcttccccttgaaggggaaaaagctattttcattggtacatttaaagtcccccaactatggggaggtaccaattctggacaagtgccactacaacaacactaaacctgaacttttcaactccgttggtggtgggaggcagcgggcagaaatttactgttggccactgccaggtctatttcatatttcaaaggaatattgggtgctgcatataggaactgaaggggtcaatgtattaaacctgtgattggttgttttcctgtcattttgagagactaaatgtggggggcagatgtcaaaatacctgtacaattttaaaatgtcacaattaaacatgagctggtttcccacaa

SEQ ID NO: 324381 - DNA, 2217 bp, Homo sapiens
gtggtgccggctggttcttcgcgctcgcccgacttcccagcggccccgtgcggcccgggcatgcccagtgcgggcgcagcggccccggccctggaagcgccccggcggagctggcccgcggtgggctaggggcagggccggagccgcggcggcggagctgtggatccttcatgatgagagatttggggacacttctctctcctgtgtgtagttgatagtttggtggtgaagagatggctgacagtgtcaaaacctttctccaggaccttgccagactagatgctcgaatccagcaaaagagagaggagcagcgtcgaagaagggcaagtagtgtcttggcacagagaagagcccagagtatagagcggaagcaagagagtgagccacgtattgttagtagaattttccagtgttgtgcttggaatggtggagtgttctggttcagtctcctcttgttttatcgagtatttattcctgtgcttcagtcggtaacagcccgaattatcggtgacccatcactacatggagatgtttggtcgtggctggaattcttcctcacgtcaattttcagtgctctttgggtgctccccttgtttgtgcttagcaaagtggtgaatgccatttggtttcaggatatagctgacctggcatttgaggtatcagggaggaagcctcacccattccctagtgtcagcaaaataattgctgacatgctcttcaaccttttgctgcaggctcttttcctcattcagggaatgtttgtgagtctctttcccatccatcttgtcggtcagctggttagtctcctgcatatgtcccttctctactcactgtactgctttgaatatcgttggttcaataaaggaattgaaatgcaccagcggttgtctaacatagaaaggaattggccttactactttgggtttggtttgcccttggcttttctcacagcaatgcagtcctcatatattatcagtggctgccttttctctatcctctttcctttattcattatcagcgccaatgaagcaaagacccctggcaaagcatatctcttccagttgcgcctcttctccttggtggtcttcttaagcaacagactcttccacaagacagtctacctgcagtcggccctgagcagctctacttctgcagagaagttcccttcaccgcatccgtcgcctgccaaactgaaggctactgcaggtcactgagttgcctgccatccaaaggggatgggcgggattggaagaagctgtggcagctcttttccctgttcacctcccgcctgccagggaaggcaggacccgctctgccaagggccctctgcgtattcccttctctctgaggaattgaaatttttgtctctggtgcacgtaaggcagaatgttccctgacaccagtgtgtggatttttaacatcaccgtgagtctgaaaggaccacaggtttttctgcagctattttctagcatttgccagtccctgtgcctggactgattggaacactttgtttttctccctgtgccatttacccttccacctttccatcctgccttctaccacccttggatgaatggattttgtaattctagctgttgtattttgtgaatttgttaattttgttgtttttctgtgaaacacatacattggatatgggaggtaaaggagtgtcccagttgctcctggtcactccctttatagccattactgtcttgtttcttgtaactcaggttaggttttggtctctcttgctccactgcaaaaaaaaaaaaaaaaaaaaaaaaaaaaaaaaaaaagcctgaagagatgagataggaggaaagacctcacagccagatctgctgggttttgaggagtgattttctttcttccccttgaaggggaaaaagctattttcattggtacatttaaagtcccccaactatggggaggtaccaattctggacaagtgccactacaacaacactaaacctgaacttttcaactccgttggtggtgggaggcagcgggcagaaatttactgttggccactgccaggtctatttcatatttcaaaggaatattgggtgctgcatataggaactgaaggggtcaatgtattaaacctgtgattggttgttttcctgtcattttgagagactaaatgtggggggcagatgtcaaaatacctgtacaattttaaaatgtcacaattaaacatgagctggtttcccacaa

SEQ ID NO: 324382 - DNA, 2272 bp, Homo sapiens
gccgacttcccagcggccccgtgcggcccgcggcggcggagctgtggatccttcatgatgagagatttggggacacttctctctcctgtgtgtagttgatagtttggtggtgaagagatggctgacagtgtcaaaacctttctccaggaccttgccagaggaatcaaagactccatctggggtatttgtaccatctcaaagctagatgctcgaatccagcaaaagagagaggagcagcgtcgaagaagggcaagtagtgtcttggcacagagaagagcccagagtatagagcggaagcaagagagacggattcttgccctgtcaccaagctgtcacctgagattgccgtggtgcaatctcagcttactgcagcctctgcctcccaggtccaagtaattcttctgcctcagcgaaccggctggctggaagtacagtgagccacgtattgttagtagaattttccagtgttgtgcttggaatggtggagtgttctggttcagtctcctcttgttttatcgagtatttattcctgtgcttcagtcggtaacagcccgaattatcggtgacccatcactacatggagatgtttggtcgtggctggaattcttcctcacgtcaattttcagtgctctttgggtgctccccttgtttgtgcttagcaaagtggtgaatgccatttggtttcaggatatagctgacctggcatttgaggtatcagggaggaagcctcacccattccctagtgtcagcaaaataattgctgacatgctcttcaaccttttgctgcaggctcttttcctcattcagggaatgtttgtgagtctctttcccatccatcttgtcggtcagctggttagtctcctgcatatgtcccttctctactcactgtactgctttgaatatcgttggttcaataaaggaattgaaatgcaccagcggttgtctaacatagaaaggaattggccttactactttgggtttggtttgcccttggcttttctcacagcaatgcagtcctcatatattatcagtggctgccttttctctatcctctttcctttattcattatcagcgccaatgaagcaaagacccctggcaaagcatatctcttccagttgcgcctcttctccttggtggtcttcttaagcaacagactcttccacaagacagtctacctgcagtcggccctgagcagctctacttctgcagagaagttcccttcaccgcatccgtcgcctgccaaactgaaggctactgcaggtcactgagttgcctgccatccaaaggggatgggcgggattggaagaagctgtggcagctcttttccctgttcacctcccgcctgccagggaaggcaggacccgctctgccaagggccctctgcgtattcccttctctctgaggaattgaaatttttgtctctggtgcacgtaaggcagaatgttccctgacaccagtgtgtggatttttaacatcaccgtgagtctgaaaggaccacaggtttttctgcagctattttctagcatttgccagtccctgtgcctggactgattggaacactttgtttttctccctgtgccatttacccttccacctttccatcctgccttctaccacccttggatgaatggattttgtaattctagctgttgtattttgtgaatttgttaattttgttgtttttctgtgaaacacatacattggatatgggaggtaaaggagtgtcccagttgctcctggtcactccctttatagccattactgtcttgtttcttgtaactcaggttaggttttggtctctcttgctccactgcaaaaaaaaaaaaaaaaaaaaaaaaaaaaaaaaaaaagcctgaagagatgagataggaggaaagacctcacagccagatctgctgggttttgaggagtgattttctttcttccccttgaaggggaaaaagctattttcattggtacatttaaagtcccccaactatggggaggtaccaattctggacaagtgccactacaacaacactaaacctgaacttttcaactccgttggtggtgggaggcagcgggcagaaatttactgttggccactgccaggtctatttcatatttcaaaggaatattgggtgctgcatataggaactgaaggggtcaatgtattaaacctgtgattggttgttttcctgtcattttgagagactaaatgtggggggcagatgtcaaaatacctgtacaattttaaaatgtcacaattaaacatgagctggtttcccacaa

SEQ ID NO: 324383 - DNA, 2202 bp, Homo sapiens
gtggtgccggctggttcttcgcgctcgcccgacttcccagcggccccgtgcggcccgggcatgcccagtgcgggcgcagcggccccggccctggaagcgccccggcggagctggcccgcggtgggctaggggcagggccggagccgcggcggcggagctgtggatccttcatgatgagagatttggggacacttctctctcctgtgtgtagttgatagtttggtggtgaagagatggctgacagtgtcaaaacctttctccaggaccttgccagaggaatcaaagactccatctggggtatttgtaccatctcaaagctagatgctcgaatccagcaaaagagagaggagcagcgtcgaagaagggcaagtagtgtcttggcacagagaagagcccagagtatagagcggaagcaagagagtgagccacgtattgttagtagaattttccagtgttgtgcttggaatggtggagtgttctggttcagtctcctcttgttttatcgagtatttattcctgtgcttcagtcggtaacagcccgaattatcggtgacccatcactacatggagatgtttggtcgtggctggaattcttcctcacgtcaattttcagtgctctttgggtgctccccttgtttgtgcttagcaaagtggtgaatgccatttggtttcaggatatagctgacctggcatttgaggtatcagggaggaagcctcacccattccctagtgtcagcggaatgtttgtgagtctctttcccatccatcttgtcggtcagctggttagtctcctgcatatgtcccttctctactcactgtactgctttgaatatcgttggttcaataaaggaattgaaatgcaccagcggttgtctaacatagaaaggaattggccttactactttgggtttggtttgcccttggcttttctcacagcaatgcagtcctcatatattatcagtggctgccttttctctatcctctttcctttattcattatcagcgccaatgaagcaaagacccctggcaaagcatatctcttccagttgcgcctcttctccttggtggtcttcttaagcaacagactcttccacaagacagtctacctgcagtcggccctgagcagctctacttctgcagagaagttcccttcaccgcatccgtcgcctgccaaactgaaggctactgcaggtcactgagttgcctgccatccaaaggggatgggcgggattggaagaagctgtggcagctcttttccctgttcacctcccgcctgccagggaaggcaggacccgctctgccaagggccctctgcgtattcccttctctctgaggaattgaaatttttgtctctggtgcacgtaaggcagaatgttccctgacaccagtgtgtggatttttaacatcaccgtgagtctgaaaggaccacaggtttttctgcagctattttctagcatttgccagtccctgtgcctggactgattggaacactttgtttttctccctgtgccatttacccttccacctttccatcctgccttctaccacccttggatgaatggattttgtaattctagctgttgtattttgtgaatttgttaattttgttgtttttctgtgaaacacatacattggatatgggaggtaaaggagtgtcccagttgctcctggtcactccctttatagccattactgtcttgtttcttgtaactcaggttaggttttggtctctcttgctccactgcaaaaaaaaaaaaaaaaaaaaaaaaaaaaaaaaaaaagcctgaagagatgagataggaggaaagacctcacagccagatctgctgggttttgaggagtgattttctttcttccccttgaaggggaaaaagctattttcattggtacatttaaagtcccccaactatggggaggtaccaattctggacaagtgccactacaacaacactaaacctgaacttttcaactccgttggtggtgggaggcagcgggcagaaatttactgttggccactgccaggtctatttcatatttcaaaggaatattgggtgctgcatataggaactgaaggggtcaatgtattaaacctgtgattggttgttttcctgtcattttgagagactaaatgtggggggcagatgtcaaaatacctgtacaattttaaaatgtcacaattaaacatgagctggtttcccacaa

SEQ ID NO: 324384 - DNA, 1460 bp, Homo sapiens
gtggtgccggctggttcttcgcgctcgcccgacttcccagcggccccgtgcggcccgggcatgcccagtgcgggcgcagcggccccggccctggaagcgccccggcggagctggcccgcggtgggctaggggcagggccggagccgcggcggcggagctgtggatccttcatgatgagagatttggggacacttctctctcctgtgtgtagttgatagtttggtggtgaagagatggctgacagtgtcaaaacctttctccaggaccttgccagaggaatcaaagactccatctggggtatttgtaccatctcaaagctagatgctcgaatccagcaaaagagagaggagcagcgtcgaagaagggcaagtagtgtcttggcacagagaagagcccagagtatagagcggaagcaagagagtgagccacgtattgttagtagaattttccagtgttgtgcttggaatggtggagtgttctggttcagtctcctcttgttttatcgagtatttattcctgtgcttcagtcggtaacagcccgaattatcggtgacccatcactacatggagatgtttggtcgtggctggaattcttcctcacgtcaattttcagtgctctttgggtgctccccttgtttgtgcttagcaaagtggtgaatgccatttggtttcaggatatagctgacctggcatttgaggtatcagggaggaagcctcacccattccctagtgtcagcaaaataattgctgacatgctcttcaaccttttgctgcaggctcttttcctcattcagggaatgtttgtgagtctctttcccatccatcttgtcggtcagctggttagtctcctgcatatgtcccttctctactcactgtactgctttgaatatcgttggttcaataaaggaattgaaatgcaccagcggttgtctaacatagaaaggaattggccttactactttgggtttggtttgcccttggcttttctcacagcaatgcagtcctcatatattatcagtggctgccttttctctatcctctttcctttattcattatcagcgccaatgaagcaaagacccctggcaaagcatatctcttccagttgcgcctcttctccttggtggtcttcttaagcaacagactcttccacaagacagtctacctgcagtcggccctgagcagctctacttctgcagagaagttcccttcaccgcatccgtcgcctgccaaactgaaggctactgcaggtcactgagttgcctgccatccaaaggggatgggcgggattggaagaagctgtggcagctcttttccctgttcacctcccgcctgctaaaatcaacgggaaggacagcattgagaaagagcatgtcgaagagatcagtgaacttttctatgatgccaagtcctccgccaaaatcctggctgaccagcaggataagtacatgaagtgagatgg

SEQ ID NO: 324385 - DNA, 1747 bp, Homo sapiens
ctaaattccgggcatttctttggtgtctcaatcctgcccctaatctagatttctatgttgcccagtctggtctttaactcttggcctcaagagatcctcccgcctcatcctcccaaactgttgggattacaggaatgagtcactgtgcccaccctgcactcggccttttagaaacttgagaagcagctaggaagctatctcagacagtgattggagagtgacaggtgaatggtgctaggtttccgaggctttgggattaagattttccatatttgttcttcaggaatgtttgtgagtctctttcccatccatcttgtcggtcagctggttagtctcctgcatatgtcccttctctactcactgtactgctttgaatatcgttggttcaataaaggaattgaaatgcaccagcggttgtctaacatagaaaggaattggccttactactttgggtttggtttgcccttggcttttctcacagcaatgcagtcctcatatattatcagtggctgccttttctctatcctctttcctttattcattatcagcgccaatgaagcaaagacccctggcaaagcatatctcttccagttgcgcctcttctccttggtggtcttcttaagcaacagactcttccacaagacagtctacctgcagtcggccctgagcagctctacttctgcagagaagttcccttcaccgcatccgtcgcctgccaaactgaaggctactgcaggtcactgagttgcctgccatccaaaggggatgggcgggattggaagaagctgtggcagctcttttccctgttcacctcccgcctgccagggaaggcaggacccgctctgccaagggccctctgcgtattcccttctctctgaggaattgaaatttttgtctctggtgcacgtaaggcagaatgttccctgacaccagtgtgtggatttttaacatcaccgtgagtctgaaaggaccacaggtttttctgcagctattttctagcatttgccagtccctgtgcctggactgattggaacactttgtttttctccctgtgccatttacccttccacctttccatcctgccttctaccacccttggatgaatggattttgtaattctagctgttgtattttgtgaatttgttaattttgttgtttttctgtgaaacacatacattggatatgggaggtaaaggagtgtcccagttgctcctggtcactccctttatagccattactgtcttgtttcttgtaactcaggttaggttttggtctctcttgctccactgcaaaaaaaaaaaaaaaaaaaaaaaaaaaaaaaaaaaagcctgaagagatgagataggaggaaagacctcacagccagatctgctgggttttgaggagtgattttctttcttccccttgaaggggaaaaagctattttcattggtacatttaaagtcccccaactatggggaggtaccaattctggacaagtgccactacaacaacactaaacctgaacttttcaactccgttggtggtgggaggcagcgggcagaaatttactgttggccactgccaggtctatttcatatttcaaaggaatattgggtgctgcatataggaactgaaggggtcaatgtattaaacctgtgattggttgttttcctgtcattttgagagactaaatgtggggggcagatgtcaaaatacctgtacaattttaaaatgtcacaattaaacatgagctggtttcccacaa

SEQ ID NO: 324386 - DNA, 677 bp, Homo sapiens
gtggtgccggctggttcttcgcgctcgcccgacttcccagcggccccgtgcggcccgggcatgcccagtgcgggcgcagcggccccggccctggaagcgccccggcggagctggcccgcggtgggctaggggcagggccggagccgcggcggcggagctgtggatccttcatgatgagagatttggggacacttctctctcctgtgtgtagttgatagtttggtggtgaagagatggctgacagtgtcaaaacctttctccaggaccttgccagaggaatcaaagactccatctggggtatttgtaccatctcaaagctagatgctcgaatccagcaaaagagagaggagcagcgtcgaagaagggcaagtagtgtcttggcacagagaagagcccagagtatagagcggaagcaagagagtgagccacgtattgttagtagaattttccagtgttgtgcttggaatggtggagtgttctggttcagtctcctcttgttttatcgagtatttattcctgtgcttcagtcggtaacagcccgaattatcggtgacccatcactacatggagatgtttggtcgtggctggaattcttcctctgtccctcctctgtgctggcaatgacagctcaggggccacttcccccatcaacctgccctccctatcgtctgtacatt

SEQ ID NO: 324387 - DNA, 138 bp, Homo sapiens
cctaacatagtttgcccagtgcgtatccatcttacgtgtctttgccttcatttgccagtccagttctccttgttatagctgatcctgagaccctacttcatcttgacactatatttagaatttgtacaataatctctg

SEQ ID NO: 324388 - DNA, 526 bp, Homo sapiens
ctgatgaattgtaaatatccttaattaaaaacctttactcctatgagaagaactgtaaatgacagtgctcttcacaatcctgtttcagtgcttggaatagaaaacaaatttgaccttacagttaacagagtaatgcttcattcaacagtctacttgtgagggtaatcctaaccctaacccttactgtttggtggcagatcctgacctctacttcttttcccctactgctaatatactttttctgatcaatctttttgagcctactgtacctgactacaccactttctaagttctcagactggaaaacttagttattcaatcctcaaagtcctagaagaacaaagatgccataattctgatctgagaacatcaccaaggagcttttaataatgtggaacaggccaggagaggtggctcatgcctgtaatcccagcacgttgggaggccaaggtgggcaaatcacctgaggtcaggagttcgagaccagcctggccaacgtggtgaaactccatctctactaaaaaaa

SEQ ID NO: 324389 - DNA, 218 bp, Homo sapiens
tcttgcacccggggtggcccttccccacacttggagtgacttgtgacaggcgcctctgtcccaggaggtgccaggaaactcggttgattcccacgcagagtgcttcagcctgtgcctcagacctctctgtccccagccctgcccatccaggaggagccaagaaacttggttgattcccacccacagagcgtttcagcctgtgcctcagacctcactgt

SEQ ID NO: 324390 - DNA, 630 bp, Homo sapiens
gtcacgttgcacagttttattttaaaaccataattgtgtatttaatatactgtttttctttaaatttggctttgggcctcatttccaggtgttctcccgcagaaaacatgatgtgtgtagtttttatatgcaaacgagttaaagaagagtgatctagagccaggctggtcaagacaagaattggctggaataggctgctcttcccccattccatcatgtgctgtccccacccctttggccacctgggctgactgtgtcttaatacctcaagtgcaagtatataggagtaagaaatgaacaatgcctgcctccttatactcatgcctacattgtatgacatctagtatgaaagggaaacattaaaggaaaacccttgttttgctctaaaacctgaggacggtaaacactgagagtaacctggtgcttggtttgaagtaaaacacaaatacttcccttttataatggtgatggttgtgtttgcttattagcctttttgctggttaattcttgatactgactagaaatgtgtatattgcttcttgaaatgatttaatgacttctatattggtgaacatggacgttctctaagtataatccacttatattatatttacaaatcagtaagattga

SEQ ID NO: 324391 - DNA, 592 bp, Homo sapiens
tggatctgtacagttcaaactcatgttgttcaagggccaaatgtatatctcattaactcaggggaaaaacttgatgtgagtagaaagttagaagcaaaaagagtactggcatccaattcttctttggggatcttgatgggattaaactcttttgatgacattccttcctgtcttctccattaatttgctgttccttctaatctctgcctcttcattctctgttttcaaaacacactccaatatcattattttaaacttaagtgacataaaacacgttacataaaaatatgcttctgagatataatttctaagaataaaattatatagaaattaatttaaattatatttaaaatctgtggtctagagactgacaaacttgataatactagttaactctaccacctacctgttgtatgaccctagaaaaattgttcaacttctctgacctctcttacctcatgtgtaaaatggtaattttcagaatacccttatgttatggttgttttgataattaagtgtattgattataagaaatgagaacagaacagcgtttggcacaaaataagcccctaatatatgttaacaatttgtg

SEQ ID NO: 324392 - DNA, 142 bp, Homo sapiens
accagcaatatgaccttagcctaattacttaaaattccctgttctccacatacaaaaaagggataccatttgctacttgcctcttagggctgcagtgggtattacgggagatatgtaccaagggtttttttttttttttttt

SEQ ID NO: 324393 - DNA, 545 bp, Homo sapiens
ttgcctaagccaatgtctagaagagtttttatgatggtatcttctagaatttttatggtttcaggtctaaggtttaagtctttgctccatcttgagttgaatttttttataaggtgaaagatggggatccagtttcattcttctacatgtgtcttgacagttttcccggtaccatttattgcatagggtgtcctttccccaaattatgtttttgtatgcttttttaaagatatgttggttgtgtttgactttatttctgggttctccattctgttacatacctatttttataccagtaccatgctgttttggtaactacagccttgtagtataacttgaagtcagcaaatgcgatgcctccagatttgttctttttgcttagtatgacttttgctatgtgggctctttttttttggttccatatgaattttaagattgttttttatacttctgtgaagaatgatgagggtattttgatggtaattgcatagaatttgtagattgctttgggcagtatggtcattttcacaatattgattcttccc

SEQ ID NO: 324394 - DNA, 818 bp, Homo sapiens
gtcagccgacccttttccctgggaaccccacttctctctctggctggcttggttgtcgggggtgagatgccatattgattacagggcagcaaagaaccagtaccaggaatttacttgaccattccccttatttttcatctagaggaatctcggattcagccctttcattgctaagacaccttttcactgaggttcttaccagctcagccaaatctccactctgctatagcagaagcaataatgtttgctttaaaaagatttcttgacctatgccttttcttagaaagtttgatagattagttagaacttcagatcatcagatcagtctcaaatgggtttcttggaattttatatttgacaatatttatactataccaaactcatttgcagttcttaggtttgttggttaaaacatttttttaaagcagtaagtttatagaaaatgttttcatttaatggaaggctggggaatgtccagcatcaacccctatggcatgcattcccagtggccttctcatctgggcctggaacctttggttcagggcttaggggagaacaggccacatggcaacagccacacagtcattgccttcaacacagagccacgtgtccccaaacagcaatagtcatgcccttgtccaggctgggatctaattgatacaataggtcgttgactccctcctagtagagctatctaggtttgtctggaaagtttccgaccctggcttataggcaccacacctcatgtactcctcatggcttggatctctgtattcagcctttgttcagtccaataaactttgagtagatgatctcaa

SEQ ID NO: 324395 - DNA, 898 bp, Homo sapiens
  misc_feature (845)..(845): n is a, c, g, or t
gtcagccgacccttttccctgggaaccccacttctctctctggctggcttggttgtcgggggtgagatgccatattgattacagggcagcaaagaaccagtaccaggaatttacttgaccattccccttatttttcatctagaggaatctcggattcagccctttcattgctaagacaccttttcactgaggttcttaccagctcagccaaatctccactctgctatagcagaagcaataatgtttgctttaaaaagatttcttgacctatgccttttcttagaaagtttgatagattagttagaacttcagatcatcagatcagtctcaaatgggtttcttggaattttatatttgacaatatttatactataccaaactcatttgcagttcttaggtttgttggttaaaacatttttttaaagcagtaagtttatagaaaatgttttcatttaatggaaggctggggaatgtccagcatcaacccctatggcatgcattcccagtggccttctcatctgggcctggaacctttggttcagggcttaggggagaacaggccacatggcaacagccacacagtcattgccttcaacacagagccacgtgtccccaaacagcaatagtcatgcccttgtccaggctgggatctaattgatacaataggtcgttgactccctcctagtagagctatctaggtttgtctggaaagtttccgaccctggcttataggcaccacacctcatgtactcctcatggcttggatctctgtattcagcctttgttcagtccaataaactttgagtagatgatctcaattactgtgtgttttttcagtttgcttngttttaaaacaaaatcccttttgaacccattgaagttggacctttctttcatt

SEQ ID NO: 324396 - DNA, 880 bp, Homo sapiens
gtcagccgacccttttccctgggaaccccacttctctctctggctggcttggttgtcgggggtgagatgccatattgattacagggcagcaaagaaccagtaccaggaatttacttgaccattccccttatttttcatctagaggaatctcggattcagccctttcattgctaagacaccttttcactgaggttcttaccagctcagccaaatctccactctgctatagcagaagcaataatgtttgctttaaaaagatttcttgacctatgccttttcttagaaagtttgatagattagttagaacttcagatcatcagatcagtctcaaatgggtttcttggaattttatatttgacaatatttatactataccaaactcatttgcagttcttaggtttgttggttaaaacatttttttaaagcagtaagtttatagaaaatgttttcatttaatggaaggctggggaatgtccagcatcaacccctatggcatgcattcccagtggccttctcatctgggcctggaacctttggttcagggcttaggggagaacaggccacatggcaacagccacacagtcattgccttcaacacagagccacgtgtccccaaacagcaatagtcatgcccttgtccaggctgggatctaattgatacaataggtcgttgactccctcctagtagagctatctaggtttgtctggaaagtttccgaccctggcttataggcaccgaactcatgtagagctatctaggttagtctggaaagtttccgaccctggcttatagggcaccacacctcatgtactcctcatggcttggatctctgtattcagcctttgttcagtccaataaactttgagtagatgatctcaa

SEQ ID NO: 324397 - DNA, 369 bp, Homo sapiens
tccagcatcaacccctatggcatgcattcccagtggccttctcatctgggcctggaacctttggttcagggcttaggggagaacaggccacatggcaacagccacacagtcattgccttcaacacagagccacgtgtccccaaacagcaatagtcatgcccttgtccaggctgggatctaattgatacaataggtcgttgactccctcctagtagagctatctaggtttgtctggaaagtttccgaccctggcttataggcaccacacctcatgtactcctcatggcttggatctctgtattcagcctttgttcagtccaataaactttgagtagatgatctcaaaaaaaaaaaaaaaaaaaaattcat

SEQ ID NO: 324398 - DNA, 385 bp, Homo sapiens
atggaagccttttcttcctactacttcactttcttttctgagggtgttacgtttgtttcacatctaagaaaactaaaacaaggcttaggaagtatatcaggaaaaaactgtcatctctacttcaaagtttagtattagcttggtgcaaaggtaattgtgtttttcataattacttttaatggcaaaaaccacagtttcttttgcaccaacctaatagttaatattcctttactagaaccacctaaaaaaaaaagttaatactgtggtgaataaaatgttacctgctagagaagtaaataatacaaaggcctaaagaaaaaagattattataactacaatgtcaagatatatccccccaaaatttggggacttccagagaaatctt

SEQ ID NO: 324399 - DNA, 901 bp, Homo sapiens
attgccgcctcctgcctgttcccctcccggcacctcctcacccaatgcacccagccatggaggacagccagaagcacgtccagcccggggcaccccacagttccactccactcctccccaagtcaccccaaaaatgggttctcaagccgagcagcactggcatcacactctgtcccattcacccagttcacaggagaggaccaagggcccaggaggtcgcgtcactctgcccgaaatgccagaaacgccaactccacgcagccagaagtgggcctgacgcaggcgctcgccacaccacgtcgcccaggagggaggcagccactgtcccgggcatcagccacaggcgaccacctgggtgcagcagctgagtggcagctgaacaggttctaacacctcatcaggcagggcaggccgagggggtctactcagaactgagtcctgatcccagacggtgtgacacaacggaggcccccagagcatgcctgtgtggttccctgggcctatgaacctgtttctctcttcctttgagacagagctgcagaccccggagcactgtccttggacaactgtccactcctgggcctggccccaggatggcccagctcagaatgaactagaaggccactaggtgtgggcccctccaccccagctcgagttaagcaatctggaggcctccggcactagggccaacacagtgaggggctcttgggaatatcaaggtgcccgagggcaagagggtccccagccccttcaccaggtccctaggccaccccactggcctgagctcaaccaggagactgcccaggggccctcaaagtggcccttaggcccctccaagccagggtctcccttgagacacctcctgtgtcccaaaaccacatccccagggtggcactgcggg

SEQ ID NO: 324400 - DNA, 1632 bp, Homo sapiens
aataaaggggtggcccgtagaagattccagcaccctcccctaactccaggccagactcctttcagctaaaggggagatctggatggcatctacttcgtatgactattgcagagtgcccatggaagacggggataagcgctgtaagcttctgctggggataggaattctggtgctcctgatcatcgtgattctgggggtgcccttgattatcttcaccatcaaggccaacagcgaggcctgccgggacggccttcgggcagtgatggagtgtcgcaatgtcacccatctcctgcaacaagagctgaccgaggcccagaagggctttcaggatgtggaggcccaggccgccacctgcaaccacactgtgatggccctaatggcttccctggatgcagagaaggcccaaggacaaaagaaagtggaggagcttgagggagagatcactacattaaaccataagcttcaggacgcgtctgcagaggtggagcgactgagaagagaaaaccaggtcttaagcgtgagaatcgcggacaagaagtactaccccagctcccaggactccagctccgctgcggcgccccagctgctgattgtgctgctgggcctcagcgctctgctgcagtgagatcccaggaagctggcacatcttggaaggtccgtcctgctcggcttttcgcttgaacattcccttgatctcatcagttctgagcgggtcatggggcaacacggttagcggggagagcacggggtagccggagaagggcctctggagcaggtctggaggggccatggggcagtcctgggtgtggggacacagtcgggttgacccagggctgtctccctccagagcctccctccggacaatgagtcccccctcttgtctcccaccctgagattgggcatggggtgcggtgtggggggcatgtgctgcctgttgttatgggttttttttgcggggggggttgcttttttctggggtctttgagctccaaaaaataaacacttcctttgagggagagcacaccttaaaaaaaaaaaaaaaaaaaaaaaaaaaaaaaaaaaaaaaaaaaaaaaaaaaaaaaaaaaaaaaaaaaaaaaaaaaaaaaaggaggggggggccgggctataaaatttcctcccggggggggcaccacaataaacacgggcgaccccagtttttgttgtaaaaagaaggggggccactatagatgagacgggcgaatatataaatagcaacgcagagaagcgcggcgcgccaggttacaacaacagccgctgagtacgctggcgagaaaagcccgcgacactgcggagcgactacatgaggacgaagcaccacaccatataagggggggagggggcgacacaatatggggacaacaaccctcgcacgaccggaggaaaaaaatgaaaaggccgcgactgggggggatgacactaaataagaacacactggagcgaggctgcatcagaagcagtggtaccaacgacacgcaccgtgaccaacttatgcgcgcgcgcgcaggggtcgaagaaaaaggatgacggacccaccgagcggggggatgagtgacgtataacaaaccaaaatcttaacacgacgcggggaggatggtgaataatagagggggg

SEQ ID NO: 324401 - DNA, 993 bp, Homo sapiens
gcggccgcctactactactaaattcgcggccgctcgacgggagatctggatggcatctacttcgtatgactattgcagagtgcccatggaagacggggataagcgctgtaagcttctgctggggataggaattctggtgctcctgatcatcgtgattctgggggtgcccttgattatcttcaccatcaaggccaacagcgaggcctgccgggacggccttcgggcagtgatggagtgtcgcaatgtcacccatctcctgcaacaagagctgaccgaggcccagaagggctttcaggatgtggaggcccaggccgccacctgcaaccacactgtgatggccctaatggcttccctggatgcagagaaggcccaaggacaaaagaaagtggaggagcttgagggagagatcactacattaaaccataagcttcaggacgcgtctgcagaggtggagcgactgagaagagaaaaccaggtcttaagcgtgagaatcgcggacaagaagtactaccccagctcccaggactccagctccgctgcggcgccccagctgctgattgtgctgctgggcctcagcgctctgctgcagtgagatcccaggaagctggcacatcttggaaggtccgtcctgctcggcttttcgcttgaacattcccttgatctcatcagttctgagcgggtcatggggcaacacggttagcggggagagcacggggtagccggagaagggcctctggagcaggtctggaggggccatggggcagtcctgggtgtggggacacagtcgggttgacccagggctgtctccctccagagcctccctccggacaatgagtcccccctcttgtctcccaccctgagattgggcatggggtgcggtgtggggggcatgtgctgcctgttgttatgggttttttttgcggggggggttgcttttttctggggtctttgagctccaaaaaataaacacttcctttgagggagagcacacct

SEQ ID NO: 324402 - DNA, 1127 bp, Homo sapiens
  misc_feature (193)..(193): n is a, c, g, or t
  misc_feature (327)..(327): n is a, c, g, or t
  misc_feature (356)..(356): n is a, c, g, or t
gtccaggccagactcctttcaactaaaggggagatctaggaatggcatctacttcgtatgactagtagactcgcatgtgccccatgaacagactggggcagtagaggtcggctgtagagctatcgtgctggggataggaattgctggtgctcctgagtcagtctgtgacttacgtgggagggtgcgccgttgnagtgtcatctgtacagccagtacaacgggccgaagcgaggcgaggacctggccgggagcggtcgcttgcggcgacacgtttgatcgcgaaggtgttcggactagattggattacagcctcgaatctgcgcatgncatagcagatgagcctagagccgatgggncccagcaaggggtctattgcaagcgaatgatgggagcgcacccaaggtctccgcacgagcacgttgcaaatcgcgacgagcattgatggaatggaccctaattgtccgttcccgtggaatgcatgaagagagggcccgagatggtacgatagatagaagagtggaaaggagtcttgggggagagatcactacattaaaccataagcttcaggacgcgtctgcagaggtggagcgactgagaagagaaaaccaggtcttaagcgtgagaatcgcggacaagaagtactaccccagctcccaggactccagctccgctgcggcgccccagctgctgattgtgctgctgggcctcagcgctctgctgcagtgagatcccaggaagctggcacatcttggaaggtccgtcctgctcggcttttcgcttgaacattcccttgatctcatcagttctgagcgggtcatggggcaacacggttagcggggagagcacggggtagccggagaagggcctctggagcaggtctggaggggccatggggcagtcctgggtgtggggacacagtcgggttgacccagggctgtctccctccagagcctccctccggacaatgagtcccccctcttgtctcccaccctgagattgggcatggggtgcggtgtggggggcatgtgctgcctgttgttatgggttttttttgcggggggggttgcttttttctggggtctttgagctccaaaaaataaacacttcctttgagggagagcacacct

SEQ ID NO: 324403 - DNA, 763 bp, Homo sapiens
cccgtgtggttctggggcggcagcagcgacgtaggtgacctgggcgttggtgcctgagtctctgtctgtggcgctgacactgccgatgtgcagcgacggggctgttgttctctcggacgaacagggtgtaggaggtttgggtggtcccgagcggaccggtccgctcggaccgagagatcactacattaaaccataagcttcaggacgcgtctgcagaggtggagcgactgagaagagaaaaccaggtcttaagcgtgagaatcgcggacaagaagtactaccccagctcccaggactccagctccgctgcggcgccccagctgctgattgtgctgctgggcctcagcgctctgctgcagtgagatcccaggaagctggcacatcttggaaggtccgtcctgctcggcttttcgcttgaacattcccttgatctcatcagttctgagcgggtcatggggcaacacggttagcggggagagcacggggtagccggagaagggcctctggagcaggtctggaggggccatggggcagtcctgggtgtggggacacagtcgggttgacccagggctgtctccctccagagcctccctccggacaatgagtcccccctcttgtctcccaccctgagattgggcatggggtgcggtgtggggggcatgtgctgcctgttgttatgggttttttttgcggggggggttgcttttttctggggtctttgagctccaaaaaataaacacttcctttgagggagagcacacct

SEQ ID NO: 324404 - DNA, 1249 bp, Homo sapiens
ctgcagacgcgtcctgaagcttatggtttaatgtagtgatctctccctcaagctcctccactttcttttgaccttgggccttctctgcgtctgcagaggtggagcgactgagaagagaaaaccaggtcttaagcgtgagaatcgcggacaagaagtactaccccagctcccaggactccagctccgctgcggcgccccagctgctgattgtgctgctgggcctcagcgctctgctgcagtgagatcccaggaagctggcacatcttggaaggtccgtcctgctcggcttttcgcttgaacattcccttgatctcatcagttctgagcgggtcatggggcaacacggttagcggggagagcacggggtagccggagaagggcctctggagcaggtctggaggggccatggggcagtcctgggtgtggggacacagtcgggttgacccagggctgtctccctccagagcctccctccggacaatgagtcccccctcttgtctcccaccctgagattgggcatggggtgcggtgtggggggcatgtgctgcctgttgttatgggttttttttgcggggggggttgcttttttctggggtctttgagctccaaaaaataaacacttcctttgagggagagcacaccttaaaaaaaaaaaaaaaaaaaaaaaaaaaaaaaaaaaaaaaaaaaaaaaaaaaaaaaaaaaaaaaaaaaaaaaaaaaaaaaaggaggggggggccgggctataaaatttcctcccggggggggcaccacaataaacacgggcgaccccagtttttgttgtaaaaagaaggggggccactatagatgagacgggcgaatatataaatagcaacgcagagaagcgcggcgcgccaggttacaacaacagccgctgagtacgctggcgagaaaagcccgcgacactgcggagcgactacatgaggacgaagcaccacaccatataagggggggagggggcgacacaatatggggacaacaaccctcgcacgaccggaggaaaaaaatgaaaaggccgcgactgggggggatgacactaaataagaacacactggagcgaggctgcatcagaagcagtggtaccaacgacacgcaccgtgaccaacttatgcgcgcgcgcgcaggggtcgaagaaaaaggatgacggacccaccgagcggggggatgagtgacgtataacaaaccaaaatcttaacacgacgcggggaggatggtgaataatagagggggg

SEQ ID NO: 324405 - DNA, 963 bp, Homo sapiens
aataaaggggtggcccgtagaagattccagcaccctcccctaactccaggccagactcctttcagctaaaggggagatctggatggcatctacttcgtatgactattgcagagtgcccatggaagacggggataagcgctgtaagcttctgctggggataggaattctggtgctcctgatcatcgtgattctgggggtgcccttgattatcttcaccatcaaggccaacagcgaggcctgccgggacggccttcgggcagtgatggagtgtcgcaatgtcacccatctcctgcaacaagagctgaccgaggcccagaagggctttcaggatgtggaggcccaggccgccacctgcaaccacactgtgatggccctaatggcttccctggatgcagagaaggcccaaggacaaaagaaagtggaggagcttgagggagagatcactacattaaaccataagcttcaggacgcgtctgcagaggtggagcgactgagaagagaaaaccaggtcttaagcgtgagaatcgcggacaagaagtactaccccagctcccaggactccagctccgctgcggcgccccagctgctgattgtgctgctgggcctcagcgctctgctgcagtgagatcccaggaagctggcacatcttggaaggtccgtcctgctcggcttttcgcttgaacattcccttgatctcatcagttctgagcgggtctggaggggccatggggcagtcctgggtgtggggacacagtcgggttgacccagggctgtctccctccagagcctccctccggacaatgagtcccccctcttgtctcccaccctgagattgggcatggggtgcggtgtggggggcatgtgctgcctgttgttatgggttttttttgcggggggggttgcttttttctggggtctttgagctccaaaaaataaacacttcctttgagggagagcacacct

SEQ ID NO: 324406 - DNA, 463 bp, Homo sapiens
aataaaggggtggcccgtagaagattccagcaccctcccctaactccaggccagactcctttcagctaaaggggagatctggatggcatctacttcgtatgactattgcagagtgcccatggaagacggggataagcgctgtaagcttctgctggggataggaattctggtgctcctgatcatcgtgattctgggggtgcccttgattatcttcaccatcaaggccaacagcgaggcctgccgggacggccttcgggcagtgatggagtgtcgcaatgtcacccatctcctgcaacaagagctgaccgaggcccagaagggctttcaggatgtggaggcccaggccgccacctgcaaccacactgtggagagatcactacattaaaccataagcttcaggacgcgtctgcagaggtggagcgactgagaagagaaaaccagtctaagcgatcagcggtaccga

SEQ ID NO: 324407 - DNA, 1026 bp, Homo sapiens
aataaaggggtggcccgtagaagattccagcaccctcccctaactccaggccagactcctttcagctaaaggggagatctggatggcatctacttcgtatgactattgcagagtgcccatggaagacggggataagcgctgtaagcttctgctggggataggaattctggtgctcctgatcatcgtgattctgggggtgcccttgattatcttcaccatcaaggccaacagcgaggcctgccgggacggccttcgggcagtgatggagtgtcgcaatgtcacccatctcctgcaacaagagctgaccgaggcccagaagggctttcaggatgtggaggcccaggccgccacctgcaaccacactgtgatggccctaatggcttccctggatgcagagaaggcccaaggacaaaagaaagtggaggagcttgagggagagatcactacattaaaccataagcttcaggacgcgtctgcagaggtggagcgactgagaagagaaaaccaggtcttaagcgtgagaatcgcggacaagaagtactaccccagctcccaggactccagctccgctgcggcgccccagctgctgattgtgctgctgggcctcagcgctctgctgcagtgagatcccaggaagctggcacatcttggaaggtccgtcctgctcggcttttcgcttgaacattcccttgatctcatcagttctgagcgggtcatggggcaacacggttagcggggagagcacggggtagccggagaagggcctctggagcaggtctggaggggccatggggcagtcctgggtgtggggacacagtcgggttgacccagggctgtctccctccagagcctccctccggacaatgagtcccccctcttgtctcccaccctgagattgggcatggggtgcggtgtggggggcatgtgctgcctgttgttatgggttttttttgcggggggggttgcttttttctggggtctttgagctccaaaaaataaacacttcctttgagggagagcacacct

SEQ ID NO: 324408 - DNA, 968 bp, Homo sapiens
aataaaggggtggcccgtagaagattccagcaccctcccctaactccaggccagactcctttcagctaaaggggagatctggatggcatctacttcgtatgactattgcagagtgcccatggaagacggggataagcgctgtaagcttctgctggggataggaattctggtgctcctgatcatcgtgattctgggggtgcccttgattatcttcaccatcaaggccaacagcgaggcctgccgggacggccttcgggcagtgatggagtgtcgcaatgtcacccatctcctgcaacaagagctgaccgaggcccagaagggctttcaggatgtggaggcccaggccgccacctgcaaccacactgtgatggccctaatggcttccctggatgcagagaaggcccaaggacaaaagaaagtggaggagcttgagggagagatcactacattaaaccataagcttcaggacgcgtctgcagaggtggagcgactgagaagagaaaaccaggtcttaagcgtgagaatcgcggacaagaagtactaccccagctcccaggactccagctccgctgcggcgccccagctgctgattgtgctgctgggcctcagcgctctgctgcagtgagatcccaggaagctggcacatcttggaaggtccgtcctgctcggcttttcgcttgaacattcccttgatctcatcagttctgagcgggtcatggggcaacacggttagcggggagagcacggggtagccggagaagggcctctggagcaggtctggaggggccatggggcagtcctgggtgtggggacacagtcgggttgacccagggctgtctccctccagagcctccctccggacaatgagtcccccctcttgtctcccaccctgaggcggggggggttgcttttttctggggtctttgagctccaaaaaataaacacttcctttgagggagagcacacct

SEQ ID NO: 324409 - DNA, 893 bp, Homo sapiens
  misc_feature (771)..(771): n is a, c, g, or t
aataaaggggtggcccgtagaagattccagcaccctcccctaactccaggccagactcctttcagctaaaggggagatctggatggcatctacttcgtatgactattgcagagtgcccatggaagacggggataagcgctgtaagcttctgctggggataggaattctggtgctcctgatcatcgtgattctgggggtgcccttgattatcttcaccatcaaggccaacagcgaggcctgccgggacggccttcgggcagtgatggagtgtcgcaatgtcacccatctcctgcaacaagagctgaccgaggcccagaagggctttcaggatgtggaggcccaggccgccacctgcaaccacactgtgatggccctaatggcttccctggatgcagagaaggcccaaggacaaaagaaagtggaggagcttgagggagagatcactacattaaaccataagcttcaggacgcgtctgcagaggtggagcgactgagaagagaaaaccaggtcttaagcgtgagaatcgcggacaagaagtactaccccagctcccaggactccagctccgctgcggcgccccagctgctgattgtgctgctgggcctcagcgctctgctgcagtgagatcccaggaagctggcacatcttggaaggtccgtcctgctcggcttttcgcttgaacattcccttgatctcatcagttctgagcgggtcatggggcaacacggttagcggtaaaaagcttaagcttttaccgctcatatattttnattttgtatcaggttgctgcttttgctcagaggacatccatgaccctaatggtcttttggtacaggataaagtgattttttgcctttgttgattaactgggcaaattcaggttagtgtattt

SEQ ID NO: 324410 - DNA, 635 bp, Homo sapiens
gattccagcaccctcccctaactccaggccagactcctttcagctaaaggggagatctggatggcatctacttcgtatgactattgcagagtgcccatggaagacggggataagcgctgtaagcttctgctggggataggaattctggtgctcctgatcatcgtgattctgggggtgcccttgattatcttcaccatcaaggccaacagcgaggcctgccgggacggccttcgggcagtgatggagtgtcgcaatgtcacccatctcctgcaacaagagctgaccgaggcccagaagggctttcaggatgtggaggcccaggccgccacctgcaaccacactgtggtaagctcctcaactcctttggatggcctagtactaggcggtgggagggacaagaatctctccccagaaatctgacccagggtgggtctccagggagatgcaggggaggtcctgaaactgctcctgggcccccacatcaagggacctaggttcccctaccagggtttgtgggcccctaacccagtccagggcactggtgtaggggcagggtgttaaaactctccagatcccccaaatcggggacctcagtatccccctgggacttaggtgaatttataaattctttccag

SEQ ID NO: 324411 - DNA, 1881 bp, Homo sapiens
gacccacgcgtccgcggacgcgtgggcgcgcgggagctgggaggctgcgagatccctaccgcagtagccgcctctgccgccgcggagcttcccgaacctcttcagccgcccggagccgctcccggagcccggccgtagaggctgcaatcgcagccgggagcccgcagcccgcgccccgagcccgccgccgcccttcgagggcgccccaggccgcgccatggtgaaggtgacgttcaactccgctctggcccagaaggaggccaagaaggacgagcccaagagcggcgaggaggcgctcatcatcccccccgacgccgtcgcggtggactgcaaggacccagatgatgtggtaccagttggccaaagaagagcctggtgttggtgcatgtgctttggactagcatttatgcttgcaggtgttattctaggaggagcatacttgtacaaatattttgcacttcaaccagatgacgtgtactactgtggaataaagtacatcaaagatgatgtcatcttaaatgagccctctgcagatgccccagctgctctctaccagacaattgaagaaaatattaaaatctttgaagaagaagaagttgaatttatcagtgtgcctgtcccagagtttgcagatagtgatcctgccaacattgttcatgactttaacaagaaacttacagcctatttagatcttaacctggataagtgctatgtgatccctctgaacacttccattgttatgccacccagaaacctactggagttacttattaacatcaaggctggaacctatttgcctcagtcctatctgattcatgagcacatggttattactgatcgcattgaaaacattgatcacctgggtttctttatttatcgactgtgtcatgacaaggaaacttacaaactgcaacgcagagaaactattaaaggtattcagaaacgtgaagccagcaattgtttcgcaattcggcattttgaaaacaaatttgccgtggaaactttaatttgttcttgaacagtcaagaaaaacattattgaggaaaattaatatcacagcataaccccaccctttacattttgtgcagtgattattttttaaagtcttctttcatgtaagtagcaaacagggctttactatcttttcatctcattaattcaattaaaaccattaccttaaaatttttttctttcgaagtgtggtgtcttttatatttgaattagtaactgtatgaagtcatagataatagtacatgtcaccttaggtagtaggaagaattacaatttctttaaatcatttatctggatttttatgttttattagcattttcaagaagacggattatctagagaataatcatatatatgcatacgtaaaaatggaccacagtgacttatttgtagttgttagttgccctgctacctagtttgttagtgcatttgagcacacattttaattttcctctaattaaaatgtgcagtattttcagtgtcaaatatatttaactatttagagaatgatttccacctttatgttttaatatcctaggcatctgctgtaataatattttagaaaatgtttggaatttaagaaataacttgtgttactaatttgtataacccatatctgtgcaatggaatataaatatcacaaagttgtttaactagactgcgtgttgtttttcccgtataataaaaccaaagaatagtttggttcttcaaatcttaagagaatccacataaaagaagaaactattttttaaaaattcacttctatatatacaatgagtaaaatcacagattttttctttaaataaaaataagtcattttaataactaaaccagattctttgtggatactattaaagtaacatttaagcc

SEQ ID NO: 324412 - DNA, 593 bp, Homo sapiens
  misc_feature (29)..(29): n is a, c, g, or t
taaaacgggctgtcttatttgtgcggggnacagagtttgcagatggtgatgctgtcaacatgggtcatgatctttaacaggaaacttacagcctatttagatcttaacctggataagtgctatgtgatccctctgaacacttccattgttatgccacccagaaacctactggagttacttattaacatcaaggctggaacctatttgcctcagtcctatctgattcatgagcacatggttattactgatcgcattgaaaacattgatcacctgggtttctttatttatcgactgtgtcatgacaaggaaacttacaaactgcaacgcagagaaactattaaaggtattcagaaacgtgaagccagcaattgtttcgcaattcggcattttgaaaacaaatttgccgtggaaactttaatttgttcttgaacagtcaagaaaaacattattgaggaaaattaatatcacagcataaccccaccctttacattttgtgcagtgattattttttaaagtcttctttcatgtaagtagcaaacagggctttactatcttttcatctcattaattcaattaaaaccattaccttaaaa

SEQ ID NO: 324413 - DNA, 806 bp, Homo sapiens
gacactgtagtgagaagagactgtgatccgaggacagggaaacttacaaactgcaacgcagagaaactattaaaggtattcagaaacgtgaagccagcaattgtttcgcaattcggcattttgaaaacaaatttgccgtggaaactttaatttgttcttgaacagtcaagaaaaacattattgaggaaaattaatatcacagcataaccccaccctttacattttgtgcagtgattattttttaaagtcttctttcatgtaagtagcaaacagggctttactatcttttcatctcattaattcaattaaaaccattaccttaaaatttttttctttcgaagtgtggtgtcttttatatttgaattagtaactgtatgaagtcatagataatagtacatgtcaccttaggtagtaggaagaattacaatttctttaaatcatttatctggatttttatgttttattagcattttcaagaagacggattatctagagaataatcatatatatgcatacgtaaaaatggaccacagtgacttatttgtagttgttagttgccctgctacctagtttgttagtgcatttgagcacacattttaattttcctctaattaaaatgtgcagtattttcagtgtcaaatatatttaactatttagagaatgatttccacctttatgttttaatatcctaggcatctgctgtaataatattttagaaaatgtttggaatttaagaaataacttgtgttactaatttgtataacccatatctgtgcaatggaatataaatatcacaaagttgttta

SEQ ID NO: 324414 - DNA, 2090 bp, Homo sapiens
  misc_feature (371)..(371): n is a, c, g, or t
  misc_feature (377)..(378): n is a, c, g, or t
  misc_feature (387)..(387): n is a, c, g, or t
  misc_feature (415)..(415): n is a, c, g, or t
  misc_feature (421)..(421): n is a, c, g, or t
  misc_feature (432)..(432): n is a, c, g, or t
  misc_feature (439)..(439): n is a, c, g, or t
  misc_feature (448)..(448): n is a, c, g, or t
  misc_feature (460)..(460): n is a, c, g, or t
  misc_feature (467)..(467): n is a, c, g, or t
  misc_feature (470)..(470): n is a, c, g, or t
  misc_feature (473)..(473): n is a, c, g, or t
  misc_feature (475)..(475): n is a, c, g, or t
  misc_feature (488)..(488): n is a, c, g, or t
  misc_feature (499)..(499): n is a, c, g, or t
  misc_feature (509)..(510): n is a, c, g, or t
  misc_feature (518)..(520): n is a, c, g, or t
  misc_feature (541)..(541): n is a, c, g, or t
  misc_feature (544)..(545): n is a, c, g, or t
  misc_feature (559)..(559): n is a, c, g, or t
  misc_feature (563)..(563): n is a, c, g, or t
  misc_feature (581)..(581): n is a, c, g, or t
  misc_feature (590)..(590): n is a, c, g, or t
  misc_feature (603)..(604): n is a, c, g, or t
  misc_feature (606)..(606): n is a, c, g, or t
  misc_feature (610)..(610): n is a, c, g, or t
  misc_feature (613)..(613): n is a, c, g, or t
  misc_feature (627)..(628): n is a, c, g, or t
  misc_feature (633)..(633): n is a, c, g, or t
  misc_feature (635)..(635): n is a, c, g, or t
  misc_feature (638)..(639): n is a, c, g, or t
  misc_feature (641)..(644): n is a, c, g, or t
  misc_feature (647)..(647): n is a, c, g, or t
gcactctagcctgggcaacaagagtgaaactccatctcaaaaaaaaaaaaaaaaaaaaaagcgtaaaggcagttgaactaatggcagaagaagactgtcaaagcatttttttttaaccactttatgtcatggaaagcttcgaaatttcttaggcccagttaattgctctacatgaagagttcttcattaaacaaatcactaattagaaatacaggcaagagaaaagaatatataaaatttggcaagtaatagcaggttagatttgcttaaggcaggtgtcttacccattttcatggttggaacaatccttgatttctgggcctaaaataacttttgaaataattttctaagaaaattatttgcatctggcngggtgnngtggctcangcctgtaatcccagcactttgggaggcngaggcnggcggatcacntgaggtnaggagttcnagaccagcctgnccaacanggnganancccgtctctactnaaaatacaaanttagctgggnntggtggcnnntgcctgtaatcccagctactnggnnggctgaggcagganaatngcttgaacctgggaggcngaggttgcngtgagctgagatnncnccantgnactccagcctgggnnacagngnganncnnnntcnaaaaaaaaaaaaagaaaattatttgcatctgaattaatggctgaagtattaattaatgattgctgaagagaaccctgaaacttagtacttggcacatataacaaaaagttgatttatccattgcttactgaggtatccttgagaagtgatcttaagcaggagcagtgacaatgatagaattaatagtggtcatgaattactaggaaacaaagtggcattgagcagaaaagaaagaagctgttgccacaactttgggatatataaaaatggattatatcttgtgtattgtgggataaaagaggagctaaagaaaactttgcaggaggtctctcccagtggcatttaggtagcgctatgtttgaggatcaaccaaaagcggtgagttatttctgtcctgtttccccatctaagagttcttcttgcaattattggaacatcttctttaaaaaaatttttttcccttttctttttttactttttcaatttttttaaataatagatacggggtttcgccacgttcttcaactcctgggctcaagcagtctgcccactgtggcctcccaaaatgatggaattacaggcgtgagccaccgcgcctggctggaacattttctttacatacactggcttttctccccttcaaatcatcagaaaatgggataatttttagaaatcaggtttaagcactactttcagataagcatttcatagttacaacagttacctcaaaatagaagtatgaagagcaagtgagaaatctggtttcattgttacactaggcagttccctgtagaaactttgcaggggttaatagtcctgaggaagattttagttacaatgtattccaatcccatcgatctgatctgagcaaagctgacaaatgaagctggtcaaaaataaagggagattactcaggatggagtcagtcttaaacaaacttgtttctaacggcccatggtaggcatgacaacagcaggagttcaaaaaaagatgcatgcttggaaatcttacctttgagaaacatctcaaatgcagtcttagttattctaattgtagattgttgaccaagaggttgttcaatgatagaacctcaagtcatttcttaaattccaaacattttctaaatttccacctttatgttttaatatcctaggcatctgctgtaataatattttagaaaatgtttggaatttaagaaataacttgtgttactaatttgtataacccatatctgtgcaatggaatataaatatcacaaagttgtttaactagactgcgtgttgtttttcccgtataataaaaccaaagaatagtttggttcttcaaatcttaagagaatccacataaaagaagaaactattttttaaaaattcacttctatatatacaatgagtaaaatcacagattttttctttaaataaaaataagtcattttaataacta

SEQ ID NO: 324415 - DNA, 479 bp, Homo sapiens
cagtctggatagcattattaatgttgctgtgatctgtcaagatattaatacttggttcagaaaagggagaaaaattacttttcttcagtgtaaacattcaaactgtagaagtttttgtggaatatagagtgaaatacttctatatgtctaaataataactataaaaatgatgtgaatatttattattaaagaatcaaaattttaaaaaacttttttccctctccaacaggtattcagaaacgtgaagccagcaattgtttcgcaattcggcattttgaaaacaaatttgccgtggaaactttaatttgttcttgaacagtcaagaaaaacattattgaggaaaattaatatcacagcataaccccaccctttacattttgtgcagtgattattttttaaagtcttctttcatgtaagtagcaaacagggctttactatcttttcatctcattaattcaattaaaaccattaccttaaaa

SEQ ID NO: 324416 - DNA, 1836 bp, Homo sapiens
agcgggcgagcagtctccgccctcgcgcgggagctgggaggctgcgagatccctaccgcagtagccgcctctgccgccgcggagcttcccgaacctcttcagccgcccggagccgctcccggagcccggccgtagaggctgcaatcgcagccgggagcccgcagcccgcgccccgagcccgccgccgcccttcgagggcgccccaggccgcgccatggtgaaggtgacgttcaactccgctctggcccagaaggaggccaagaaggacgagcccaagagcggcgaggaggcgctcatcatcccccccgacgccgtcgcggtggactgcaaggacccagatgatgtggtaccagttggccaaagaagagcctggtgttggtgcatgtgctttggactagcatttatgcttgcaggtgttattctaggaggagcatacttgtacaaatattttgcacttcaaccagatgacgtgtactactgtggaataaagtacatcaaagatgatgtcatcttaaatgagccctctgcagatgccccagctgctctctaccagacaattgaagaaaatattaaaatctttgaagaagaagaagttgaatttatcagtgtgcctgtcccagagtttgcagatagtgatcctgccaacattgttcatgactttaacaagaaacttacagcctatttagatcttaacctggataagtgctatgtgatccctctgaacacttccattgttatgccacccagaaacctactggagttacttattaacatcaaggctggaacctatttgcctcagtcctatctgattcatgagcacatggttattactgatcgcattgaaaacattgatcacctgggtttctttatttatcgactgtgtcatgacaaggaaacttacaaactgcaacgcagagaaactattaaaggtattcagaaacgtgaagccagcaattgtttcgcaattcggcattttgaaaacaaatttgccgtggaaactttaatttgttcttgaacagtcaagaaaaacattattgaggaaaattaatatcacagcataaccccaccctttacattttgtgcagtgattattttttaaagtcttctttcatgtaagtagcaaacagggctttactatcttttcatctcattaattcaattaaaaccattaccttaaaatttttttctttcgaagtgtggtgtcttttatatttgaattagtaactgtatgaagtcatagataatagtacatgtcaccttaggtagtaggaagaattacaatttctttaaatcatttatctggatttttatgttttattagcattttcaagaagacggattatctagagaataatcatatatatgcatacgtaaaaatggaccacagtgacttatttgtagttgttagttgccctgctacctagtttgttagtgcatttgagcacacattttaattttcctctaattaaaatgtgcagtattttcagtgtcaaatatatttaactatttagagaatgatttccacctttatgttttaatatcctaggcatctgctgtaataatattttagaaaatgtttggaatttaagaaataacttgtgttactaatttgtataacccatatctgtgcaatggaatataaatatcacaaagttgtttaactagactgcgtgttgtttttcccgtataataaaaccaaagaatagtttggttcttcaaatcttaagagaatccacataaaagaagaaactattttttaaaaattcacttctatatatacaatgagtaaaatcacagattttttctttaaataaaaataagtcattttaataacta

SEQ ID NO: 324417 - DNA, 1660 bp, Homo sapiens
agcgggcgagcagtctccgccctcgcgcgggagctgggaggctgcgagatccctaccgcagtagccgcctctgccgccgcggagcttcccgaacctcttcagccgcccggagccgctcccggagcccggccgtagaggctgcaatcgcagccgggagcccgcagcccgcgccccgagcccgccgccgcccttcgagggcgccccaggccgcgccatggtgaaggtgacgttcaactccgctctggcccagaaggaggccaagaaggacgagcccaagagcggcgaggaggcgctcatcatcccccccgacgccgtcgcggtggactgcaaggacccagatgatgtggtaccagttggccaaagaagagcctggtgttggtgcatgtgctttggactagcatttatgcttgcaggtgttattctaggaggagcatacttgtacaaatattttgcacttcaaccagatgacgtgtactactgtggaataaagtacatcaaagatgatgtcatcttaaatgagccctctgcagatgccccagctgctctctaccagacaattgaagaaaatattaaaatctttgaagaagaagaagttgaatttatcagtgtgcctgtcccagagtttgcagatagtgatcctgccaacattgttcatgactttaacaagaaacttacagcctatttagatcttaacctggataagtgctatgtgatccctctgaacacttccattgttatgccacccagaaacctactggagttacttattaacatcaaggctggaacctatttgcctcagtcctatctgattcatgagcacatggttattactgatcgcattgaaaacattgatcacctgggtttctttatttatcgactgtgtcatgacaaggaaacttacaaactgcaacgcagagaaactattaaaggtattcagaaacgtgaagccagcaattgtttcgcaattcggcattttgaaaacaaatttgccgtggaaactttaatttgttcttgaacagtcaagaaaaacattattgaggaaaattaatatcacagcataaccccaccctttacattttgtgcagtgattattttttaaagtcttctttcatgtaagtagcaaacagggctttactatcttttcatctcattaattcaattaaaaccattaccttaaaatttttttctttcgaagtgtggtgtcttttatatttgaattagtaactgtatgaagtcatagataatagtacatgtcaccttaggtagtaggaagaattacaatttctttaaatcatttatctggatttttatgttttattagcattttcaagaagacggattatctagagaataatcatatatatgcatacgtaaaaatggaccacagtgacttatttgtagttgttagttgccctgctacctagtttgttagtgcatttgagcacacattttaattttcctctaattaaaatgtgcagtattttcagtgtcaaatatatttaactatttagagaatgatttccacctttatgttttaatatcctaggcatctgctgtaataatattttagaaaatgtttggaatttaagaaataacttgtgttactaatttgtataacccatatctgtgcaatggaatataaatatcacaaagttgttta

SEQ ID NO: 324418 - DNA, 1746 bp, Homo sapiens
  misc_feature (1676)..(1676): n is a, c, g, or t
agcgggcgagcagtctccgccctcgcgcgggagctgggaggctgcgagatccctaccgcagtagccgcctctgccgccgcggagcttcccgaacctcttcagccgcccggagccgctcccggagcccggccgtagaggctgcaatcgcagccgggagcccgcagcccgcgccccgagcccgccgccgcccttcgagggcgccccaggccgcgccatggtgaaggtgacgttcaactccgctctggcccagaaggaggccaagaaggacgagcccaagagcggcgaggaggcgctcatcatcccccccgacgccgtcgcggtggactgcaaggacccagatgatgtggtaccagttggccaaagaagagcctggtgttggtgcatgtgctttggactagcatttatgcttgcaggtgttattctaggaggagcatacttgtacaaatattttgcacttcaaccagatgacgtgtactactgtggaataaagtacatcaaagatgatgtcatcttaaatgagccctctgcagatgccccagctgctctctaccagacaattgaagaaaatattaaaatctttgaagaagaagaagttgaatttatcagtgtgcctgtcccagagtttgcagatagtgatcctgccaacattgttcatgactttaacaagaaacttacagcctatttagatcttaacctggataagtgctatgtgatccctctgaacacttccattgttatgccacccagaaacctactggagttacttattaacatcaaggctggaacctatttgcctcagtcctatctgattcatgagcacatggttattactgatcgcattgaaaacattgatcacctgggtttctttatttatcgactgtgtcatgacaaggaaacttacaaactgcaacgcagagaaactattaaaggtattcagaaacgtgaagccagcaattgtttcgcaattcggcattttgaaaacaaatttgccgtggaaactttaatttgttcttgaacagtcaagaaaaacattattgaggaaaattaatatcacagcataaccccaccctttacattttgtgcagtgattattttttaaagtcttctttcatgtaagtagcaaacagggctttactatcttttcatctcattaattcaattaaaaccattaccttaaaatttttttctttcgaagtgtggtgtcttttatatttgaattagtaactgtatgaagtcatagataatagtacatgtcaccttaggtagtaggaagaattacaatttctttaaatcatttatctggatttttatgttttattagcattttcaagaagacggattatctagagaataatcatatatatgcatacgtaaaaatggaccacagtgacttatttgtagttgttagttgccctgctacctagtttgttagtgcatttgagcacacattttaattttcctctaattaaaatgtgcagtattttcagtgtcaaatatatttaactatttagagaatgatttccacctttatgttttaatatcctaggcatctgctgtaataatattttagaaaatgtttggaatttaagaaataacttgtgttactaatttgtataacccatatctgtgcaatggaatataaatatcacaaagttgtttaaaaaggaaaaaaaagnaagattggggggggggccggtaccatttggcctatggtgagtgttttaaattaatggccgtggtttttaa

SEQ ID NO: 324419 - DNA, 1838 bp, Homo sapiens
agcgggcgagcagtctccgccctcgcgcgggagctgggaggctgcgagatccctaccgcagtagccgcctctgccgccgcggagcttcccgaacctcttcagccgcccggagccgctcccggagcccggccgtagaggctgcaatcgcagccgggagcccgcagcccgcgccccgagcccgccgccgcccttcgagggcgccccaggccgcgccatggtgaaggtgacgttcaactccgctctggcccagaaggaggccaaccccccgacgccgtcgcggtggactgcaaggacccagatgatgtggtaccagttggccaaagaagagcctggtgttggtgcatgtgctttggactagcatttatgcttgcaggtgttattctaggaggagcatacttgtacaaatattttgcacttcaaccagatgacgtgtactactgtggaataaagtacatcaaagatgatgtcatcttaaatgagccctctgcagatgccccagctgctctctaccagacaattgaagaaaatattaaaatctttgaagaagaagaagttgaatttatcagtgtgcctgtcccagagtttgcagatagtgatcctgccaacattgttcatgactttaacaagaaacttacagcctatttagatcttaacctggataagtgctatgtgatccctctgaacacttccattgttatgccacccagaaacctactggagttacttattaacatcaaggctggaacctatttgcctcagtcctatctgattcatgagcacatggttattactgatcgcattgaaaacattgatcacctgggtttctttatttatcgactgtgtcatgacaaggaaacttacaaactgcaacgcagagaaactattaaaggtattcagaaacgtgaagccagcaattgtttcgcaattcggcattttgaaaacaaatttgccgtggaaactttaatttgttcttgaacagtcaagaaaaacattattgaggaaaattaatatcacagcataaccccaccctttacattttgtgcagtgattattttttaaagtcttctttcatgtaagtagcaaacagggctttactatcttttcatctcattaattcaattaaaaccattaccttaaaatttttttctttcgaagtgtggtgtcttttatatttgaattagtaactgtatgaagtcatagataatagtacatgtcaccttaggtagtaggaagaattacaatttctttaaatcatttatctggatttttatgttttattagcattttcaagaagacggattatctagagaataatcatatatatgcatacgtaaaaatggaccacagtgacttatttgtagttgttagttgccctgctacctagtttgttagtgcatttgagcacacattttaattttcctctaattaaaatgtgcagtattttcagtgtcaaatatatttaactatttagagaatgatttccacctttatgttttaatatcctaggcatctgctgtaataatattttagaaaatgtttggaatttaagaaataacttgtgttactaatttgtataacccatatctgtgcaatggaatataaatatcacaaagttgtttaactagactgcgtgttgtttttcccgtataataaaaccaaagaatagtttggttcttcaaatcttaagagaatccacataaaagaagaaactattttttaaaaattcacttctatatatacaatgagtaaaatcacagattttttctttaaataaaaataagtcattttaataactaaaccagattctttgtggatactattaaagtaacatttaagcc

SEQ ID NO: 324420 - DNA, 1572 bp, Homo sapiens
  misc_feature (43)..(43): n is a, c, g, or t
  misc_feature (48)..(48): n is a, c, g, or t
gttgttgtggggggagcaataagaaggaaatagcttatttccntcttnatgccaaagaagagcctggtgttggtgcatgtgctttggactagcatttatgcttgcaggtgttattctaggaggagcatacttgtacaaatattttgcacttcaaccagatgacgtgtactactgtggaataaagtacatcaaagatgatgtcatcttaaatgagccctctgcagatgccccagctgctctctaccagacaattgaagaaaatattaaaatctttgaagaagaagaagttgaatttatcagtgtgcctgtcccagagtttgcagatagtgatcctgccaacattgttcatgactttaacaagaaacttacagcctatttagatcttaacctggataagtgctatgtgatccctctgaacacttccattgttatgccacccagaaacctactggagttacttattaacatcaaggctggaacctatttgcctcagtcctatctgattcatgagcacatggttattactgatcgcattgaaaacattgatcacctgggtttctttatttatcgactgtgtcatgacaaggaaacttacaaactgcaacgcagagaaactattaaaggtattcagaaacgtgaagccagcaattgtttcgcaattcggcattttgaaaacaaatttgccgtggaaactttaatttgttcttgaacagtcaagaaaaacattattgaggaaaattaatatcacagcataaccccaccctttacattttgtgcagtgattattttttaaagtcttctttcatgtaagtagcaaacagggctttactatcttttcatctcattaattcaattaaaaccattaccttaaaatttttttctttcgaagtgtggtgtcttttatatttgaattagtaactgtatgaagtcatagataatagtacatgtcaccttaggtagtaggaagaattacaatttctttaaatcatttatctggatttttatgttttattagcattttcaagaagacggattatctagagaataatcatatatatgcatacgtaaaaatggaccacagtgacttatttgtagttgttagttgccctgctacctagtttgttagtgcatttgagcacacattttaattttcctctaattaaaatgtgcagtattttcagtgtcaaatatatttaactatttagagaatgatttccacctttatgttttaatatcctaggcatctgctgtaataatattttagaaaatgtttggaatttaagaaataacttgtgttactaatttgtataacccatatctgtgcaatggaatataaatatcacaaagttgtttaactagactgcgtgttgtttttcccgtataataaaaccaaagaatagtttggttcttcaaatcttaagagaatccacataaaagaagaaactattttttaaaaattcacttctatatatacaatgagtaaaatcacagattttttctttaaataaaaataagtcattttaataactaaaccagattctttgtggatactattaaagtaacatttaagcc

SEQ ID NO: 324421 - DNA, 1828 bp, Homo sapiens
agcgggcgagcagtctccgccctcgcgcgggagctgggaggctgcgagatccctaccgcagtagccgcctctgccgccgcggagcttcccgaacctcttcagccgcccggagccgctcccggagcccggccgtagaggctgcaatcgcagccgggagcccgcagcccgcgccccgagcccgccgccgcccttcgagggcgccccaggccgcgccatggtgaaggtgacgttcaactccgctctggcccagaaggaggccaagaaggacgagcccaagagcggcgaggaggcgctcatcatcccccccgacgccgtcgcggtggactgcaaggacccagatgatgtggtaccagttggccaaagaagagcctggtgttggtgcatgtgctttggactagcatttatgcttgcaggtgttattctaggaggagcatacttgtacaaatattttgcacttcaaccagatgacgtgtactactgtggaataaagtacatcaaagatgatgtcatcttaaatgagccctctgcagatgccccagctgctctctaccagacaattgaagaaaatattaaaatctttgaagaagaagaagttgaatttatcagtgtgcctgtcccagagtttgcagatagtgatcctgccaacattgttcatgactttaacaagaaacttacagcctatttagatcttaacctggataagtgctatgtgatccctctgaacacttccattgttatgccacccagaaacctactggagttacttattaacatcaaggctggaacctatttgcctcagtcctatctgattcatgagcacatggttattactgatcgcattgaaaacattgatcacctgggtttctttatttatcgactgtgtcatgacaaggaaacttacaaactgcaacgcagagaaactattaaaggtattcagaaacgtgaagccagcaattgtttcgcaattcggcattttgaaaacaaatttgccgtggaaactttaatttgttcttgaacagtcaagaaaaacattattgaggaaaattaatatcacagcataaccccaccctttacattttgtgcagtgattattttttaaagtcttctttcatgtaagtagcaaacagggctttactatcttttcatctcattaattcaattaaaaccattaccttaaaatgaagtcatagataatagtacatgtcaccttaggtagtaggaagaattacaatttctttaaatcatttatctggatttttatgttttattagcattttcaagaagacggattatctagagaataatcatatatatgcatacgtaaaaatggaccacagtgacttatttgtagttgttagttgccctgctacctagtttgttagtgcatttgagcacacattttaattttcctctaattaaaatgtgcagtattttcagtgtcaaatatatttaactatttagagaatgatttccacctttatgttttaatatcctaggcatctgctgtaataatattttagaaaatgtttggaatttaagaaataacttgtgttactaatttgtataacccatatctgtgcaatggaatataaatatcacaaagttgtttaactagactgcgtgttgtttttcccgtataataaaaccaaagaatagtttggttcttcaaatcttaagagaatccacataaaagaagaaactattttttaaaaattcacttctatatatacaatgagtaaaatcacagattttttctttaaataaaaataagtcattttaataactaaaccagattctttgtggatactattaaagtaacatttaagcc

SEQ ID NO: 324422 - DNA, 1473 bp, Homo sapiens
agaggtcgcccgttttcattaaggagggcatacttgtcaaatatttgcacttcaaccagatgacgtgtactactgtggaataaagtacatcaaagatgatgtcatcttaaatgagccctctgcagatgccccagctgctctctaccagacaattgaagaaaatattaaaatctttgaagaagaagaagttgaatttatcagtgtgcctgtcccagagtttgcagatagtgatcctgccaacattgttcatgactttaacaagaaacttacagcctatttagatcttaacctggataagtgctatgtgatccctctgaacacttccattgttatgccacccagaaacctactggagttacttattaacatcaaggctggaacctatttgcctcagtcctatctgattcatgagcacatggttattactgatcgcattgaaaacattgatcacctgggtttctttatttatcgactgtgtcatgacaaggaaacttacaaactgcaacgcagagaaactattaaaggtattcagaaacgtgaagccagcaattgtttcgcaattcggcattttgaaaacaaatttgccgtggaaactttaatttgttcttgaacagtcaagaaaaacattattgaggaaaattaatatcacagcataaccccaccctttacattttgtgcagtgattattttttaaagtcttctttcatgtaagtagcaaacagggctttactatcttttcatctcattaattcaattaaaaccattaccttaaaatttttttctttcgaagtgtggtgtcttttatatttgaattagtaactgtatgaagtcatagataatagtacatgtcaccttaggtagtaggaagaattacaatttctttaaatcatttatctggatttttatgttttattagcattttcaagaagacggattatctagagaataatcatatatatgcatacgtaaaaatggaccacagtgacttatttgtagttgttagttgccctgctacctagtttgttagtgcatttgagcacacattttaattttcctctaattaaaatgtgcagtattttcagtgtcaaatatatttaactatttagagaatgatttccacctttatgttttaatatcctaggcatctgctgtaataatattttagaaaatgtttggaatttaagaaataacttgtgttactaatttgtataacccatatctgtgcaatggaatataaatatcacaaagttgtttaactagactgcgtgttgtttttcccgtataataaaaccaaagaatagtttggttcttcaaatcttaagagaatccacataaaagaagaaactattttttaaaaattcacttctatatatacaatgagtaaaatcacagattttttctttaaataaaaataagtcattttaataactaaaccagattctttgtggatactattaaagtaacatttaagcc

SEQ ID NO: 324423 - DNA, 1659 bp, Homo sapiens
ggcagcgctggtgctcccaggattaccgcctaattcatcataaatatgtttccactgacggcgggctgttatgtttcatatcctcccatatgaaagatttattaaaggagaagaagataagcccctgcctccaatcaaacctcggaaacaggagaacagttcacaggaaaatgagaacaaaacaaaagtatctggaaccaaacgcatcaaacatgaaatacctaaatattttgcacttcaaccagatgacgtgtactactgtggaataaagtacatcaaagatgatgtcatcttaaatgagccctctgcagatgccccagctgctctctaccagacaattgaagaaaatattaaaatctttgaagaagaagaagttgaatttatcagtgtgcctgtcccagagtttgcagatagtgatcctgccaacattgttcatgactttaacaagaaacttacagcctatttagatcttaacctggataagtgctatgtgatccctctgaacacttccattgttatgccacccagaaacctactggagttacttattaacatcaaggctggaacctatttgcctcagtcctatctgattcatgagcacatggttattactgatcgcattgaaaacattgatcacctgggtttctttatttatcgactgtgtcatgacaaggaaacttacaaactgcaacgcagagaaactattaaaggtattcagaaacgtgaagccagcaattgtttcgcaattcggcattttgaaaacaaatttgccgtggaaactttaatttgttcttgaacagtcaagaaaaacattattgaggaaaattaatatcacagcataaccccaccctttacattttgtgcagtgattattttttaaagtcttctttcatgtaagtagcaaacagggctttactatcttttcatctcattaattcaattaaaaccattaccttaaaatttttttctttcgaagtgtggtgtcttttatatttgaattagtaactgtatgaagtcatagataatagtacatgtcaccttaggtagtaggaagaattacaatttctttaaatcatttatctggatttttatgttttattagcattttcaagaagacggattatctagagaataatcatatatatgcatacgtaaaaatggaccacagtgacttatttgtagttgttagttgccctgctacctagtttgttagtgcatttgagcacacattttaattttcctctaattaaaatgtgcagtattttcagtgtcaaatatatttaactatttagagaatgatttccacctttatgttttaatatcctaggcatctgctgtaataatattttagaaaatgtttggaatttaagaaataacttgtgttactaatttgtataacccatatctgtgcaatggaatataaatatcacaaagttgtttaactagactgcgtgttgtttttcccgtataataaaaccaaagaatagtttggttcttcaaatcttaagagaatccacataaaagaagaaactattttttaaaaattcacttctatatatacaatgagtaaaatcacagattttttctttaaataaaaataagtcattttaataactaaaccagattctttgtggatactattaaagtaacatttaagcc

SEQ ID NO: 324424 - DNA, 1480 bp, Homo sapiens
  misc_feature (35)..(35): n is a, c, g, or t
gtctgctgtgttgttggtcagtttgttaccgccgntccgccgccccgtaaattttagccggtccagatgacgtgtactactgtggaataaagtacatcaaagatgatgtcatcttaaatgagccctctgcagatgccccagctgctctctaccagacaattgaagaaaatattaaaatctttgaagaagaagaagttgaatttatcagtgtgcctgtcccagagtttgcagatagtgatcctgccaacattgttcatgactttaacaagaaacttacagcctatttagatcttaacctggataagtgctatgtgatccctctgaacacttccattgttatgccacccagaaacctactggagttacttattaacatcaaggctggaacctatttgcctcagtcctatctgattcatgagcacatggttattactgatcgcattgaaaacattgatcacctgggtttctttatttatcgactgtgtcatgacaaggaaacttacaaactgcaacgcagagaaactattaaaggtattcagaaacgtgaagccagcaattgtttcgcaattcggcattttgaaaacaaatttgccgtggaaactttaatttgttcttgaacagtcaagaaaaacattattgaggaaaattaatatcacagcataaccccaccctttacattttgtgcagtgattattttttaaagtcttctttcatgtaagtagcaaacagggctttactatcttttcatctcattaattcaattaaaaccattaccttaaaatttttttctttcgaagtgtggtgtcttttatatttgaattagtaactgtatgaagtcatagataatagtacatgtcaccttaggtagtaggaagaattacaatttctttaaatcatttatctggatttttatgttttattagcattttcaagaagacggattatctagagaataatcatatatatgcatacgtaaaaatggaccacagtgacttatttgtagttgttagttgccctgctacctagtttgttagtgcatttgagcacacattttaattttcctctaattaaaatgtgcagtattttcagtgtcaaatatatttaactatttagagaatgatttccacctttatgttttaatatcctaggcatctgctgtaataatattttagaaaatgtttggaatttaagaaataacttgtgttactaatttgtataacccatatctgtgcaatggaatataaatatcacaaagttgtttaactagactgcgtgttgtttttcccgtataataaaaccaaagaatagtttggttcttcaaatcttaagagaatccacataaaagaagaaactattttttaaaaattcacttctatatatacaatgagtaaaatcacagattttttctttaaataaaaataagtcattttaataactaaaccagattctttgtggatactattaaagtaacatttaagcc

SEQ ID NO: 324425 - DNA, 1289 bp, Homo sapiens
agcgggcgagcagtctccgccctcgcgcgggagctgggaggctgcgagatccctaccgcagtagccgcctctgccgccgcggagcttcccgaacctcttcagccgcccggagccgctcccggagcccggccgtagaggctgcaatcgcagccgggagcccgcagcccgcgccccgagcccgccgccgcccttcgagggcgccccaggccgcgccatggtgaaggtgacgttcaactccgctctggcccagaaggaggccaagaaggacgagcccaagagcggcgaggaggcgctcatcatcccccccgacgccgtcgcggtggactgcaaggacccagatgatgtggtaccagttggccaaagaagagcctggtgttggtgcatgtgctttggactagcatttatgcttgcaggtgttattctaggaggagcatacttgtacaaatattttgcacttcaaccagatgacgtgtactactgtggaataaagtacatcaaagatgatgtcatcttaaatgagccctctgcagatgccccagctgctctctaccagacaattgaagaaaatattaaaatctttgaagaagaagaagttgaatttatcagtgtgcctgtcccagagtttgcagatagtgatcctgccaacattgttcatgactttaacaagaaacttacagcctatttagatcttaacctggataagtgctatgtgatccctctgaacacttccattgttatgccacccagaaacctactggagttacttattaacatcaaggctggaacctatttgcctcagtcctatctgattcatgagcacatggttattactgatcgcattgaaaacattgatcacctgggtttctttatttatcgactgtgtcatgacaaggaaacttacaaactgcaacgcagagaaactattaaaggtattcagaaacgtgaagccagcaattgtttcgcaattcggcattttgaaaacaaatttgccgtggaaactttaatttgttcttgaacagtcaagaaaaacattattgaggaaaattaatatcacagcataaccccaccctttacattttgtgcagtgattattttttaaagtcttctttcatgtaagtagcaaacagggctttactatcttttcatctcattaattcaattaaaaccattaccttaaaattctatatatacaatgagtaaaatcacagattttttctttaaataaaaataagtcattttaataactaaaccagattctttgtggatactattaaagtaacatttaagcc

SEQ ID NO: 324426 - DNA, 1494 bp, Homo sapiens
  misc_feature (1410)..(1410): n is a, c, g, or t
agcgggcgagcagtctccgccctcgcgcgggagctgggaggctgcgagatccctaccgcagtagccgcctctgccgccgcggagcttcccgaacctcttcagccgcccggagccgctcccggagcccggccgtagaggctgcaatcgcagccgggagcccgcagcccgcgccccgagcccgccgccgcccttcgagggcgccccaggccgcgccatggtgaaggtgacgttcaactccgctctggcccagaaggaggccaagaaggacgagcccaagagcggcgaggaggcgctcatcatcccccccgacgccgtcgcggtggactgcaaggacccagatgatgtggtaccagttggccaaagaagagcctggtgttggtgcatgtgctttggactagcatttatgcttgcaggtgttattctaggaggagcatacttgtacaaatattttgcacttcaaccagatgacgtgtactactgtggaataaagtacatcaaagatgatgtcatcttaaatgagccctctgcagatgccccagctgctctctaccagacaattgaagaaaatattaaaatctttgaagaagaagaagttgaatttatcagtgtgcctgtcccagagtttgcagatagtgatcctgccaacattgttcatgactttaacaagaaacttacagcctatttagatcttaacctggataagtgctatgtgatccctctgaacacttccattgttatgccacccagaaacctactggagttacttattaacatcaaggctggaacctatttgcctcagtcctatctgattcatgagcacatggttattactgatcgcattgaaaacattgatcacctgggtttctttatttatcgactgtgtcatgacaaggaaacttacaaactgcaacgcagagaaactattaaaggtattcagaaacgtgaagccagcaattgtttcgcaattcggcattttgaaaacaaatttgccgtggaaactttaatttgttcttgaacagtcaagaaaaacattattgaggaaaattaatatcacagcataaccccaccctttacattttgtgcagtgattattttttaaagtcttctttcatgtaagtagcaaacagggctttactatcttttcatctcattaattcaattaaaaccattaccttaaaaaaaaaaaaaaaaaaaaaaaaaaaaaaaaaaaaaaaaaaaaaaaaagaaaaaaaaaaaaaaaaaaaaaaaaaaaaaaaaaaaaaaaaacttcgaggggggccccggacccaaattcgccttatagtgagcggaataacaattaattggccggcgttttacaccgtcggaactgggaaaaccttggcttaccaacttaaatcgctttgagaaaatcccccttctcacattgcntattagcaaaaagccccaaccgatggcctttccaccagttgcccactctgaatgctattgggaaatggaagccgtaaattctgt

SEQ ID NO: 324427 - DNA, 2129 bp, Homo sapiens
agcgggcgagcagtctccgccctcgcgcgggagctgggaggctgcgagatccctaccgcagtagccgcctctgccgccgcggagcttcccgaacctcttcagccgcccggagccgctcccggagcccggccgtagaggctgcaatcgcagccgggagcccgcagcccgcgccccgagcccgccgccgcccttcgagggcgccccaggccgcgccatggtgaaggtgacgttcaactccgctctggcccagaaggaggccaagaaggacgagcccaagagcggcgaggaggcgctcatcatcccccccgacgccgtcgcggtggactgcaaggacccagatgatgtggtaccagttggccaaagaagagcctggtgttggtgcatgtgctttggactagcatttatgcttgcaggtgttattctaggaggagcatacttgtacaaatattttgcacttcaaccagatgacgtgtactactgtggaataaagtacatcaaagatgatgtcatcttaaatgagccctctgcagatgccccagctgctctctaccagacaattgaagaaaatattaaaatctttgaagaagaagaagttgaatttatcagtgtgcctgtcccagagtttgcagatagtgatcctgccaacattgttcatgactttaacaagaaacttacagcctatttagatcttaacctggataagtgctatgtgatccctctgaacacttccattgttatgccacccagaaacctactggagttacttattaacatcaaggctggaacctatttgcctcagtcctatctgattcatgagcacatggttattactgatcgcattgaaaacattgatcacctgggtttctttatttatcgactgtgtcatgacaaggaaacttacaaactgcaacgcagagaaactattaaaggtattcagaaacgtgaagccagcaattgtttcgcaattcggcattttgaaaacaaatttgccgtggaaactttaatttgttcttgaacagtcaagaaaaacattattgaggaaaattaatatcacagcataaccccaccctttacattttgtgcagtgattattttttaaagtcttctttcatgctctaaaattacatgaattttcagggagctgtgaacatttaggagcacattattcattcagcatcttttatatgcccaacatatgatattgtgttgaagatatatctgcaaagaagaaaaaaagccactgccgtcgtggagactcacaatctaggaaaagagagggacagcaaacaactcattacaatacattgggatcagtagtgtgagggagaaaaacaggtctaggttctttggaaaacatttaggagagtcaatgagactttcagaatgtgaagtgcatgggattaggtcatggaagaagaccatgtatgtcatcttgaggacttcattctgtagaccatgggccactattgaagttttgcattttggaaggagcttattagtttgttttcctgttgattatagtagtaatgcagtatcagggtagctgaactgcaataataatcccaacatctcactggcttcatgcagtaggaatatgctttcatcacagtccagtatggcaggcaacctccagactcccagggacccaaacttacactttactaaatgtaattctttcatttgaatttttaaaggtttttgtataatcatcttagtaaaacatttgataattcttcacaacatttgcaatcattgatttggccagattggtctaacatggtacccatgattttacttcatttccagtactattctgataatttcctttagagtcaattgagtagagagtacccctctcacctaagcttagtcatgtcccaggaattttggaactccaactgagatttcaggctcattattcattctagggctgaatgaataatgtgccctttgaacccttgtgccatgctggaaactgtggtcttggtgtggcatggaaaaaccagagggtgagggatgtggatgagaagatgacagagaatcagacatgcagagaggactgccaggtctcccagtgggttccagggagactcagctatccttccctcttcttgagttctgtcttagtc

SEQ ID NO: 324428 - DNA, 1824 bp, Homo sapiens
agcgggcgagcagtctccgccctcgcgcgggagctgggaggctgcgagatccctaccgcagtagccgcctctgccgccgcggagcttcccgaacctcttcagccgcccggagccgctcccggagcccggccgtagaggctgcaatcgcagccgggagcccgcagcccgcgccccgagcccgccgccgcccttcgagggcgccccaggccgcgccatggtgaaggtgacgttcaactccgctctggcccagaaggaggccaagaaggacgagcccaagagcggcgaggaggcgctcatcatcccccccgacgccgtcgcggtggactgcaaggacccagatgatgtggtaccagttggccaaagaagagcctggtgttggtgcatgtgctttggactagcatttatgcttgcaggtgttattctaggaggagcatacttgtacaaatattttgcacttcaaccagatgacgtgtactactgtggaataaagtacatcaaagatgatgtcatcttaaatgagccctctgcagatgccccagctgctctctaccagacaattgaagaaaatattgcagatagtgatcctgccaacattgttcatgactttaacaagaaacttacagcctatttagatcttaacctggataagtgctatgtgatccctctgaacacttccattgttatgccacccagaaacctactggagttacttattaacatcaaggctggaacctatttgcctcagtcctatctgattcatgagcacatggttattactgatcgcattgaaaacattgatcacctgggtttctttatttatcgactgtgtcatgacaaggaaacttacaaactgcaacgcagagaaactattaaaggtattcagaaacgtgaagccagcaattgtttcgcaattcggcattttgaaaacaaatttgccgtggaaactttaatttgttcttgaacagtcaagaaaaacattattgaggaaaattaatatcacagcataaccccaccctttacattttgtgcagtgattattttttaaagtcttctttcatgtaagtagcaaacagggctttactatcttttcatctcattaattcaattaaaaccattaccttaaaatttttttctttcgaagtgtggtgtcttttatatttgaattagtaactgtatgaagtcatagataatagtacatgtcaccttaggtagtaggaagaattacaatttctttaaatcatttatctggatttttatgttttattagcattttcaagaagacggattatctagagaataatcatatatatgcatacgtaaaaatggaccacagtgacttatttgtagttgttagttgccctgctacctagtttgttagtgcatttgagcacacattttaattttcctctaattaaaatgtgcagtattttcagtgtcaaatatatttaactatttagagaatgatttccacctttatgttttaatatcctaggcatctgctgtaataatattttagaaaatgtttggaatttaagaaataacttgtgttactaatttgtataacccatatctgtgcaatggaatataaatatcacaaagttgtttaactagactgcgtgttgtttttcccgtataataaaaccaaagaatagtttggttcttcaaatcttaagagaatccacataaaagaagaaactattttttaaaaattcacttctatatatacaatgagtaaaatcacagattttttctttaaataaaaataagtcattttaataactaaaccagattctttgtggatactattaaagtaacatttaagcc

SEQ ID NO: 324429 - DNA, 1257 bp, Homo sapiens
  misc_feature (6)..(7): n is a, c, g, or t
  misc_feature (10)..(10): n is a, c, g, or t
  misc_feature (13)..(13): n is a, c, g, or t
cgaggnnccnctnaggatactcaacattgttcatgactttaacaagaaacttacagcctatttagatcttaacctggataagtgctatgtgatccctctgaacacttccattgttatgccacccagaaacctactggagttacttattaacatcaaggctggaacctatttgcctcagtcctatctgattcatgagcacatggttattactgatcgcattgaaaacattgatcacctgggtttctttatttatcgactgtgtcatgacaaggaaacttacaaactgcaacgcagagaaactattaaaggtattcagaaacgtgaagccagcaattgtttcgcaattcggcattttgaaaacaaatttgccgtggaaactttaatttgttcttgaacagtcaagaaaaacattattgaggaaaattaatatcacagcataaccccaccctttacattttgtgcagtgattattttttaaagtcttctttcatgtaagtagcaaacagggctttactatcttttcatctcattaattcaattaaaaccattaccttaaaatttttttctttcgaagtgtggtgtcttttatatttgaattagtaactgtatgaagtcatagataatagtacatgtcaccttaggtagtaggaagaattacaatttctttaaatcatttatctggatttttatgttttattagcattttcaagaagacggattatctagagaataatcatatatatgcatacgtaaaaatggaccacagtgacttatttgtagttgttagttgccctgctacctagtttgttagtgcatttgagcacacattttaattttcctctaattaaaatgtgcagtattttcagtgtcaaatatatttaactatttagagaatgatttccacctttatgttttaatatcctaggcatctgctgtaataatattttagaaaatgtttggaatttaagaaataacttgtgttactaatttgtataacccatatctgtgcaatggaatataaatatcacaaagttgtttaactagactgcgtgttgtttttcccgtataataaaaccaaagaatagtttggttcttcaaatcttaagagaatccacataaaagaagaaactattttttaaaaattcacttctatatatacaatgagtaaaatcacagattttttctttaaataaaaataagtcattttaataactaaaccagattctttgtggatactattaaagtaacatttaagcc

SEQ ID NO: 324430 - DNA, 1292 bp, Homo sapiens
  misc_feature (29)..(29): n is a, c, g, or t
taaaacgggctgtcttatttgtgcggggnacagagtttgcagatggtgatgctgtcaacatgggtcatgatctttaacaggaaacttacagcctatttagatcttaacctggataagtgctatgtgatccctctgaacacttccattgttatgccacccagaaacctactggagttacttattaacatcaaggctggaacctatttgcctcagtcctatctgattcatgagcacatggttattactgatcgcattgaaaacattgatcacctgggtttctttatttatcgactgtgtcatgacaaggaaacttacaaactgcaacgcagagaaactattaaaggtattcagaaacgtgaagccagcaattgtttcgcaattcggcattttgaaaacaaatttgccgtggaaactttaatttgttcttgaacagtcaagaaaaacattattgaggaaaattaatatcacagcataaccccaccctttacattttgtgcagtgattattttttaaagtcttctttcatgtaagtagcaaacagggctttactatcttttcatctcattaattcaattaaaaccattaccttaaaatttttttctttcgaagtgtggtgtcttttatatttgaattagtaactgtatgaagtcatagataatagtacatgtcaccttaggtagtaggaagaattacaatttctttaaatcatttatctggatttttatgttttattagcattttcaagaagacggattatctagagaataatcatatatatgcatacgtaaaaatggaccacagtgacttatttgtagttgttagttgccctgctacctagtttgttagtgcatttgagcacacattttaattttcctctaattaaaatgtgcagtattttcagtgtcaaatatatttaactatttagagaatgatttccacctttatgttttaatatcctaggcatctgctgtaataatattttagaaaatgtttggaatttaagaaataacttgtgttactaatttgtataacccatatctgtgcaatggaatataaatatcacaaagttgtttaactagactgcgtgttgtttttcccgtataataaaaccaaagaatagtttggttcttcaaatcttaagagaatccacataaaagaagaaactattttttaaaaattcacttctatatatacaatgagtaaaatcacagattttttctttaaataaaaataagtcattttaataactaaaccagattctttgtggatactattaaagtaacatttaagcc

SEQ ID NO: 324431 - DNA, 1936 bp, Homo sapiens
tcacctgtgatttttatgtctctctgtaagcttgccattttgaacactcgaatatattactgaagttagctttgcaaacatttcgtgcctgataaatacatctgatggatgtttataaaccagtttgaaaatttacttatttcaaggaaataaacttccaaagcaaatagtaaataataatagttaacacttactgagctcttaggaatcaaaatgttgacattatttgatttaagttattcttaaaaaccgttctatgagacagtctttctcaaccagcgtttctcatttgaaccacagaacacaaaatcatttaaatgactgtttttctaatgttctaaggatggtagtattcaagatacatatgagaaaatttaatctttacaaacaatggacagataaccttagagggcatttgagcttataagtggggaagttaaattgcttaattatataataagtatttgcagttaatttgaataggtattattacttattatagaaatataccctcgatgagcattttatttactggtagcaatattttttcctctcccattcccacttccaactttatccagccaaattctgaatttgttgaaatgcaagtgatttatacattctaaagccaattcattttaatgatacaaattattcttaaaaatccagttgctgcctgtttttgcaagtattactgtaactacactgtatctttttcttcccagaaacttacagcctatttagatcttaacctggataagtgctatgtgatccctctgaacacttccattgttatgccacccagaaacctactggagttacttattaacatcaaggctggaacctatttgcctcagtcctatctgattcatgagcacatggttattactgatcgcattgaaaacattgatcacctgggtttctttatttatcgactgtgtcatgacaaggaaacttacaaactgcaacgcagagaaactattaaaggtattcagaaacgtgaagccagcaattgtttcgcaattcggcattttgaaaacaaatttgccgtggaaactttaatttgttcttgaacagtcaagaaaaacattattgaggaaaattaatatcacagcataaccccaccctttacattttgtgcagtgattattttttaaagtcttctttcatgtaagtagcaaacagggctttactatcttttcatctcattaattcaattaaaaccattaccttaaaatttttttctttcgaagtgtggtgtcttttatatttgaattagtaactgtatgaagtcatagataatagtacatgtcaccttaggtagtaggaagaattacaatttctttaaatcatttatctggatttttatgttttattagcattttcaagaagacggattatctagagaataatcatatatatgcatacgtaaaaatggaccacagtgacttatttgtagttgttagttgccctgctacctagtttgttagtgcatttgagcacacattttaattttcctctaattaaaatgtgcagtattttcagtgtcaaatatatttaactatttagagaatgatttccacctttatgttttaatatcctaggcatctgctgtaataatattttagaaaatgtttggaatttaagaaataacttgtgttactaatttgtataacccatatctgtgcaatggaatataaatatcacaaagttgtttaactagactgcgtgttgtttttcccgtataataaaaccaaagaatagtttggttcttcaaatcttaagagaatccacataaaagaagaaactattttttaaaaattcacttctatatatacaatgagtaaaatcacagattttttctttaaataaaaataagtcattttaataactaaaccagattctttgtggatactattaaagtaacatttaagcc

SEQ ID NO: 324432 - DNA, 1541 bp, Homo sapiens
ctctcgcacgaagcattcctatagacgcgatccgtatctgtgtgccgcagtagtcctagctacgtgtcaagtcgagcttaggtgcgtacgcacgtgtcgcgtatggagatacttgcgtcatggacgatagtcgctctgtgatatcgcacccatcttagcaagaatgccccgagcgtggatctcgaagccgatgactagaacgaatccagaatggagtattcttgaggtcgatcgaactgagagtctgattaaatggagtgtcgaccgtggtacgctcgagtttgcaagttacgtcgcaccgctgctgacattgttcatgactttaacaagaaacttacagcctatttagatcttaacctggataagtgctatgtgatccctctgaacacttccattgttatgccacccagaaacctactggagttacttattaacatcaaggctggaacctatttgcctcagtcctatctgattcatgagcacatggttattactgatcgcattgaaaacattgatcacctgggtttctttatttatcgactgtgtcatgacaaggaaacttacaaactgcaacgcagagaaactattaaaggtattcagaaacgtgaagccagcaattgtttcgcaattcggcattttgaaaacaaatttgccgtggaaactttaatttgttcttgaacagtcaagaaaaacattattgaggaaaattaatatcacagcataaccccaccctttacattttgtgcagtgattattttttaaagtcttctttcatgtaagtagcaaacagggctttactatcttttcatctcattaattcaattaaaaccattaccttaaaatttttttctttcgaagtgtggtgtcttttatatttgaattagtaactgtatgaagtcatagataatagtacatgtcaccttaggtagtaggaagaattacaatttctttaaatcatttatctggatttttatgttttattagcattttcaagaagacggattatctagagaataatcatatatatgcatacgtaaaaatggaccacagtgacttatttgtagttgttagttgccctgctacctagtttgttagtgcatttgagcacacattttaattttcctctaattaaaatgtgcagtattttcagtgtcaaatatatttaactatttagagaatgatttccacctttatgttttaatatcctaggcatctgctgtaataatattttagaaaatgtttggaatttaagaaataacttgtgttactaatttgtataacccatatctgtgcaatggaatataaatatcacaaagttgtttaactagactgcgtgttgtttttcccgtataataaaaccaaagaatagtttggttcttcaaatcttaagagaatccacataaaagaagaaactattttttaaaaattcacttctatatatacaatgagtaaaatcacagattttttctttaaataaaaataagtcattttaataactaaaccagattctttgtggatactattaaagtaacatttaagcc

SEQ ID NO: 324433 - DNA, 1289 bp, Homo sapiens
cgaggggggtgatcagagggcgggggccagagttcgcagaggagagatcctgacaacattgttcatgactttaacaagaaacttacagcctatttagatcttaacctggataagtgctatgtgatccctctgaacacttccattgttatgccacccagaaacctactggagttacttattaacatcaaggctggaacctatttgcctcagtcctatctgattcatgagcacatggttattactgatcgcattgaaaacattgatcacctgggtttctttatttatcgactgtgtcatgacaaggaaacttacaaactgcaacgcagagaaactattaaaggtattcagaaacgtgaagccagcaattgtttcgcaattcggcattttgaaaacaaatttgccgtggaaactttaatttgttcttgaacagtcaagaaaaacattattgaggaaaattaatatcacagcataaccccaccctttacattttgtgcagtgattattttttaaagtcttctttcatgtaagtagcaaacagggctttactatcttttcatctcattaattcaattaaaaccattaccttaaaatttttttctttcgaagtgtggtgtcttttatatttgaattagtaactgtatgaagtcatagataatagtacatgtcaccttaggtagtaggaagaattacaatttctttaaatcatttatctggatttttatgttttattagcattttcaagaagacggattatctagagaataatcatatatatgcatacgtaaaaatggaccacagtgacttatttgtagttgttagttgccctgctacctagtttgttagtgcatttgagcacacattttaattttcctctaattaaaatgtgcagtattttcagtgtcaaatatatttaactatttagagaatgatttccacctttatgttttaatatcctaggcatctgctgtaataatattttagaaaatgtttggaatttaagaaataacttgtgttactaatttgtataacccatatctgtgcaatggaatataaatatcacaaagttgtttaactagactgcgtgttgtttttcccgtataataaaaccaaagaatagtttggttcttcaaatcttaagagaatccacataaaagaagaaactattttttaaaaattcacttctatatatacaatgagtaaaatcacagattttttctttaaataaaaataagtcattttaataactaaaccagattctttgtggatactattaaagtaacatttaagcc

SEQ ID NO: 324434 - DNA, 1124 bp, Homo sapiens
taaccccaccctttacattttgtgcagtgattatttttgaaagtcttctttcatgtaagtagcatcaaggggctcaatgatcgcattgaaaacattgatcacctgggtttctttatttatcgactgtgtcatgacaaggaaacttacaaactgcaacgcagagaaactattaaaggtattcagaaacgtgaagccagcaattgtttcgcaattcggcattttgaaaacaaatttgccgtggaaactttaatttgttcttgaacagtcaagaaaaacattattgaggaaaattaatatcacagcataaccccaccctttacattttgtgcagtgattattttttaaagtcttctttcatgtaagtagcaaacagggctttactatcttttcatctcattaattcaattaaaaccattaccttaaaatttttttctttcgaagtgtggtgtcttttatatttgaattagtaactgtatgaagtcatagataatagtacatgtcaccttaggtagtaggaagaattacaatttctttaaatcatttatctggatttttatgttttattagcattttcaagaagacggattatctagagaataatcatatatatgcatacgtaaaaatggaccacagtgacttatttgtagttgttagttgccctgctacctagtttgttagtgcatttgagcacacattttaattttcctctaattaaaatgtgcagtattttcagtgtcaaatatatttaactatttagagaatgatttccacctttatgttttaatatcctaggcatctgctgtaataatattttagaaaatgtttggaatttaagaaataacttgtgttactaatttgtataacccatatctgtgcaatggaatataaatatcacaaagttgtttaactagactgcgtgttgtttttcccgtataataaaaccaaagaatagtttggttcttcaaatcttaagagaatccacataaaagaagaaactattttttaaaaattcacttctatatatacaatgagtaaaatcacagattttttctttaaataaaaataagtcattttaataactaaaccagattctttgtggatactattaaagtaacatttaagcc

SEQ ID NO: 324435 - DNA, 1024 bp, Homo sapiens
gacactgtagtgagaagagactgtgatccgaggacagggaaacttacaaactgcaacgcagagaaactattaaaggtattcagaaacgtgaagccagcaattgtttcgcaattcggcattttgaaaacaaatttgccgtggaaactttaatttgttcttgaacagtcaagaaaaacattattgaggaaaattaatatcacagcataaccccaccctttacattttgtgcagtgattattttttaaagtcttctttcatgtaagtagcaaacagggctttactatcttttcatctcattaattcaattaaaaccattaccttaaaatttttttctttcgaagtgtggtgtcttttatatttgaattagtaactgtatgaagtcatagataatagtacatgtcaccttaggtagtaggaagaattacaatttctttaaatcatttatctggatttttatgttttattagcattttcaagaagacggattatctagagaataatcatatatatgcatacgtaaaaatggaccacagtgacttatttgtagttgttagttgccctgctacctagtttgttagtgcatttgagcacacattttaattttcctctaattaaaatgtgcagtattttcagtgtcaaatatatttaactatttagagaatgatttccacctttatgttttaatatcctaggcatctgctgtaataatattttagaaaatgtttggaatttaagaaataacttgtgttactaatttgtataacccatatctgtgcaatggaatataaatatcacaaagttgtttaactagactgcgtgttgtttttcccgtataataaaaccaaagaatagtttggttcttcaaatcttaagagaatccacataaaagaagaaactattttttaaaaattcacttctatatatacaatgagtaaaatcacagattttttctttaaataaaaataagtcattttaataactaaaccagattctttgtggatactattaaagtaacatttaagcc

SEQ ID NO: 324436 - DNA, 1209 bp, Homo sapiens
  misc_feature (6)..(7): n is a, c, g, or t
  misc_feature (10)..(10): n is a, c, g, or t
  misc_feature (13)..(13): n is a, c, g, or t
cgaggnnccnctnaggatactcaacattgttcatgactttaacaagaaacttacagcctatttagatcttaacctggataagtgctatgtgatccctctgaacacttccattgttatgccacccagaaacctactggagttacttattaacatcaaggctggaacctatttgcctcagtcctatctgattcatgagcacatggttattactgatcgcattgaaaacattgatcacctgggtttctttatttatcgactgtgtcatgacaaggaaacttacaaactgcaacgcagagaaactattaaaggtattcagaaacgtgaagccagcaattgtttcgcaattcggcattttgaaaacaaatttgccgtggaaactttaatttgttcttgaacagtcaagaaaaacattattgagattattttttaaagtcttctttcatgtaagtagcaaacagggctttactatcttttcatctcattaattcaattaaaaccattaccttaaaatttttttctttcgaagtgtggtgtcttttatatttgaattagtaactgtatgaagtcatagataatagtacatgtcaccttaggtagtaggaagaattacaatttctttaaatcatttatctggatttttatgttttattagcattttcaagaagacggattatctagagaataatcatatatatgcatacgtaaaaatggaccacagtgacttatttgtagttgttagttgccctgctacctagtttgttagtgcatttgagcacacattttaattttcctctaattaaaatgtgcagtattttcagtgtcaaatatatttaactatttagagaatgatttccacctttatgttttaatatcctaggcatctgctgtaataatattttagaaaatgtttggaatttaagaaataacttgtgttactaatttgtataacccatatctgtgcaatggaatataaatatcacaaagttgtttaactagactgcgtgttgtttttcccgtataataaaaccaaagaatagtttggttcttcaaatcttaagagaatccacataaaagaagaaactattttttaaaaattcacttctatatatacaatgagtaaaatcacagattttttctttaaataaaaataagtcattttaataactaaaccagattctttgtggatactattaaagtaacatttaagcc

SEQ ID NO: 324437 - DNA, 792 bp, Homo sapiens
gacccacgcgtccgcggacgcgtggggtaagtagcaaacagggctttactatcttttcatctcattaattcaattaaaaccattaccttaaaatttttttctttcgaagtgtggtgtcttttatatttgaattagtaactgtatgaagtcatagataatagtacatgtcaccttaggtagtaggaagaattacaatttctttaaatcatttatctggatttttatgttttattagcattttcaagaagacggattatctagagaataatcatatatatgcatacgtaaaaatggaccacagtgacttatttgtagttgttagttgccctgctacctagtttgttagtgcatttgagcacacattttaattttcctctaattaaaatgtgcagtattttcagtgtcaaatatatttaactatttagagaatgatttccacctttatgttttaatatcctaggcatctgctgtaataatattttagaaaatgtttggaatttaagaaataacttgtgttactaatttgtataacccatatctgtgcaatggaatataaatatcacaaagttgtttaactagactgcgtgttgtttttcccgtataataaaaccaaagaatagtttggttcttcaaatcttaagagaatccacataaaagaagaaactattttttaaaaattcacttctatatatacaatgagtaaaatcacagattttttctttaaataaaaataagtcattttaataactaaaccagattctttgtggatactattaaagtaacatttaagcc

SEQ ID NO: 324438 - DNA, 773 bp, Homo sapiens
agcgggcgagcagtctccgccctcgcgcgggagctgggaggctgcgagatccctaccgcagtagccgcctctgccgccgcggagcttcccgaacctcttcagccgcccggagccgctcccggagcccggccgtagaggctgcaatcgcagccgggagcccgcagcccgcgccccgagcccgccgccgcccttcgagggcgccccaggccgcgccatggtgaaggtgacgttcaactccgctctggcccagaaggaggccaagaaggacgagcccaagagcggcgaggaggcgctcatcatcccccccgacgccgtcgcggtggactgcaaggacccagatgatgtggtaccagttggccaaagaagagcctggtgttggtgcatgtgctttggactagcatttatgcttgcaggtgttattctaggaggagcatacttgtacaaatattttgcacttcaaccagatgacgtgtactactgtggaataaagtacatcaaagatgatgtcatcttaaatgagccctctgcagatgccccagctgctctctaccagacaattgaagaaaatattaaaatctttgaagaagaagaagttgaatttatcagtgtgcctgtcccagagtttgcagatagtgatcctgccaacattgttcatgactttaacaagaaacttacagcctatttagatcttaacctggataagtgctatgtgatccctctgaacacttccattgttatgccacccagaacaccgtcgaaggggtaccgagctc

SEQ ID NO: 324439 - DNA, 763 bp, Homo sapiens
agcgggcgagcagtctccgccctcgcgcgggagctgggaggctgcgagatccctaccgcagtagccgcctctgccgccgcggagcttcccgaacctcttcagccgcccggagccgctcccggagcccggccgtagaggctgcaatcgcagccgggagcccgcagcccgcgccccgagcccgccgccgcccttcgagggcgccccaggccgcgccatggtgaaggtgacgttcaactccgctctggcccagaaggaggccaagaaggacgagcccaagagcggcgaggaggcgctcatcatcccccccgacgccgtcgcggtggactgcaaggacccagatgatgtggtaccagttggccaaagaagagcctggtgttggtgcatgtgctttggactagcatttatgcttgcaggtgttattctaggaggagcatacttgtacaaatattttgcacttcaaccagatgacgtgtactactgtggaataaagtacatcaaagatgatgtcatcttaaatgagccctctgcagatgccccagctgctctctaccagacaattgaagaaaatattaaaatctttgaagaagaagaagttgaatttatcagtgtgcctgtcccagagtttgcagatagtgatcctgccaacattgttcatgactttaacaagaaactcccacggatttgatagtcacgacgattattacgactggacagcggatcaatagaagtgcaactgcaatgcaatgtcagtgagttaactcga

SEQ ID NO: 324440 - DNA, 798 bp, Homo sapiens
agcgggcgagcagtctccgccctcgcgcgggagctgggaggctgcgagatccctaccgcagtagccgcctctgccgccgcggagcttcccgaacctcttcagccgcccggagccgctcccggagcccggccgtagaggctgcaatcgcagccgggagcccgcagcccgcgccccgagcccgccgccgcccttcgagggcgccccaggccgcgccatggtgaaggtgacgttcaactccgctctggcccagaaggaggccaagaaggacgagcccaagagcggcgaggaggcgctcatcatcccccccgacgccgtcgcggtggactgcaaggacccagatgatgtggtaccagttggccaaagaagagcctggtgttggtgcatgtgctttggactagcatttatgcttgcaggtgttattctaggaggagcatacttgtacaaatattttgcacttcaaccagatgacgtgtactactgtggaataaagtacatcaaagatgatgtcatcttaaatgagccctctgcagatgccccagctgctctctaccagacaattgaagaaaatattaaaatctttgaagaagaagaaaaagaagatagaagatggaagaagaaagaaaagaaagaagaataagaaggaagaagaaagaagagcagaaggaaagaagaagaagagaagaaaggaagaagaggaaagaacaagaggacgaagagaaaagaaaaagaaagaaggaaagaagaaagaaaaagaggaagaagaaagaataagaaagaataagaaggatgaagaagagg

SEQ ID NO: 324441 - DNA, 509 bp, Homo sapiens
cgaggggggtgatcagagggcgggggccagagttcgcagaggagagatcctgacaacattgttcatgactttaacaagaaacttacagcctatttagatcttaacctggataagtgctatgtgatccctctgaacacttccattgttatgccacccagaaacctactggagttacttattaacatcaaggctggaacctatttgcctcagtcctatctgattcatgagcacatggttattactgatcgcattgaaaacattgatcacctgggtttctttatttatcgactgtgtcatgacaaggaaacttacaaactgcaacgcagagaaactattaaaggtattcagaaacgtgaagccagcaattgtttcgcaattcggcattttgaaaacaaatttgccgtggaaactttaatttgttcttgaacagtcaagaaaaacattattgagttttaaagtcttctttcatgtaagtagcaaacagggctttaccggcacgagctcgtgcg

SEQ ID NO: 324442 - DNA, 1182 bp, Homo sapiens
gacccacgcgtccgcggacgcgtgggcgcgcgggagctgggaggctgcgagatccctaccgcagtagccgcctctgccgccgcggagcttcccgaacctcttcagccgcccggagccgctcccggagcccggccgtagaggctgcaatcgcagccgggagcccgcagcccgcgccccgagcccgccgccgcccttcgagggcgccccaggccgcgccatggtgaaggtgacgttcaactccgctctggcccagaaggaggccaagaaggacgagcccaagagcggcgaggaggcgctcatcatcccccccgacgccgtcgcggtggactgcaaggacccagatgatgtggtaccagttggccaaagaagagcctggtgttggtgcatgtgctttggactagcatttatgcttgcaggtgttattctaggaggagcatacttgtacaaatattttgcacttcaaccagatgacgtgtactactgtggaataaagtacatcaaagatgatgtcatcttaaatgagccctctgcagatgccccagctgctctctaccagacaattgaagaaaatattaaaatctttgaagaagaagaagttgaatttatcagtgtgcctgtcccagagtttgcagatagtgatcctgccaacattgttcatgactttaacaagaaacttacagcctatttagatcttaacctggataagtgctatgtgatccctctgaacacttccattgttatgccacccagaaacctactggagttacttattaacatcaaggctggaacctatttgcctcagtcctatctgattcatgagcacatggttattactgatcgcattgaaaacattgatcacctgggtttctttatttatcgactgtgtcatgacaaggaaacttacaaactgcaacgcagagaaactattaaaggtattcagaaacgtgaagccagcaattgtttcgcaattcggcattttgaaaacaaatttgccgtggaaactttaatttgttcttgaacagtcaagaaaaacattattgaggaaaattaatatcacagcataaccccaccctttacattttgtgcagtgattattttttaaagtcttctttcatgtaagtagcaaacagggctttactatcttttcatctcattaattcaattaaaaccattaccttaaaa

SEQ ID NO: 324443 - DNA, 1878 bp, Homo sapiens
agcgggcgagcagtctccgccctcgcgcgggagctgggaggctgcgagatccctaccgcagtagccgcctctgccgccgcggagcttcccgaacctcttcagccgcccggagccgctcccggagcccggccgtagaggctgcaatcgcagccgggagcccgcagcccgcgccccgagcccgccgccgcccttcgagggcgccccaggccgcgccatggtgaaggtgacgttcaactccgctctggcccagaaggaggccaagaaggacgagcccaagagcggcgaggaggcgctcatcatcccccccgacgccgtcgcggtggactgcaaggacccagatgatgtggtaccagttggccaaagaagagcctggtgttggtgcatgtgctttggactagcatttatgcttgcaggtgttattctaggaggagcatacttgtacaaatattttgcacttcaaccagatgacgtgtactactgtggaataaagtacatcaaagatgatgtcatcttaaatgagccctctgcagatgccccagctgctctctaccagacaattgaagaaaatattaaaatctttgaagaagaagaagttgaatttatcagtgtgcctgtcccagagtttgcagatagtgatcctgccaacattgttcatgactttaacaagaaacttacagcctatttagatcttaacctggataagtgctatgtgatccctctgaacacttccattgttatgccacccagaaacctactggagttacttattaacatcaaggctggaacctatttgcctcagtcctatctgattcatgagcacatggttattactgatcgcattgaaaacattgatcacctgggtttctttatttatcgactgtgtcatgacaaggaaacttacaaactgcaacgcagagaaactattaaaggtattcagaaacgtgaagccagcaattgtttcgcaattcggcattttgaaaacaaatttgccgtggaaactttaatttgttcttgaacagtcaagaaaaacattattgaggaaaattaatatcacagcataaccccaccctttacattttgtgcagtgattattttttaaagtcttctttcatgtaagtagcaaacagggctttactatcttttcatctcattaattcaattaaaaccattaccttaaaatttttttctttcgaagtgtggtgtcttttatatttgaattagtaactgtatgaagtcatagataatagtacatgtcaccttaggtagtaggaagaattacaatttctttaaatcatttatctggatttttatgttttattagcattttcaagaagacggattatctagagaataatcatatatatgcatacgtaaaaatggaccacagtgacttatttgtagttgttagttgccctgctacctagtttgttagtgcatttgagcacacattttaattttcctctaattaaaatgtgcagtattttcagtgtcaaatatatttaactatttagagaatgatttccacctttatgttttaatatcctaggcatctgctgtaataatattttagaaaatgtttggaatttaagaaataacttgtgttactaatttgtataacccatatctgtgcaatggaatataaatatcacaaagttgtttaactagactgcgtgttgtttttcccgtataataaaaccaaagaatagtttggttcttcaaatcttaagagaatccacataaaagaagaaactattttttaaaaattcacttctatatatacaatgagtaaaatcacagattttttctttaaataaaaataagtcattttaataactaaaccagattctttgtggatactattaaagtaacatttaagcc

SEQ ID NO: 324444 - DNA, 2106 bp, Homo sapiens
agcgggcgagcagtctccgccctcgcgcgggagctgggaggctgcgagatccctaccgcagtagccgcctctgccgccgcggagcttcccgaacctcttcagccgcccggagccgctcccggagcccggccgtagaggctgcaatcgcagccgggagcccgcagcccgcgccccgagcccgccgccgcccttcgagggcgccccaggccgcgccatggtgaaggtgacgttcaactccgctctggcccagaaggaggccaagaaggacgagcccaagagcggcgaggaggcgctcatcatcccccccgacgccgtcgcggtggactgcaaggacccagatgatgtggtaccagttggccaaagaagagcctggtgttggtgcatgtgctttggactagcatttatgcttgcaggtgttattctaggaggagcatacttgtacaaatattttgcacttcaaccagatgacgtgtactactgtggaataaagtacatcaaagatgatgtcatcttaaatgagccctctgcagatgccccagctgctctctaccagacaattgaagaaaatattaaaatctttgaagaagaagaagttgaatttatcagtgtgcctgtcccagagtttgcagatagtgatcctgccaacattgttcatgactttaacaagaaacttacagcctatttagatcttaacctggataagtgctatgtgatccctctgaacacttccattgttatgccacccagaaacctactggagttacttattaacatcaaggctggaacctatttgcctcagtcctatctgattcatgagcacatggttattactgatcgcattgaaaacattgatcacctgggtttctttatttatcgactgtgtcatgacaaggaaacttacaaactgcaacgcagagaaactattaaaggtattcagaaacgtgaagccagcaattgtttcgcaattcggcattttgaaaacaaatttgccgtggaaactttaatttgttcttgaacagtcaagaaaaacattattgaggaaaattaatatcacagcataaccccaccctttacattttgtgcagtgattattttttaaagtcttctttcatgtaagtagcaaacagggctttactatcttttcatctcattaattcaattaaaaccattaccttaaaatttttttctttcgaagtgtggtgtcttttatatttgaattagtaactgtatgaagtcatagataatagtacatgtcaccttaggtagtaggaagaattacaatttctttaaatcatttatctggatttttatgttttattagcattttcaagaagacggattatctagagaataatcatatatatgcatacgtaaaaatggaccacagtgacttatttgtagttgttagttgccctgctacctagtttgttagtgcatttgagcacacattttaattttcctctaattaaaatgtgcagtattttcagtgtcaaatatatttaactatttagagaatgatttccacctttatgttttaatatcctaggcatctgctgtaataatattttagaaaatgtttggaatttaagaaataacttgtgttactaatttgtataacccatatctgtgcaatggaatataaatatcacaaagttgtttaactagactgcgtgttgtttttcccgtataataaaaccaaagaatagtttggttcttcaaatcttaagagaatccacataaaagaagaaactattttttaaaaattcacttctatatatacaatgagtaaaatcacagattttttctttaaataaaaataagtcattttaataactaaaccagattctttgtggatactattaaagtaacatttaagcctcaaccttgaatgatgttgtttaatataaaatgcttttatttttgatggaaaggcaatcaaagcctaaagtttccaaggaacgtaaaataactgtgcttctctgagaatgcccgcctcacaagtggaacattttgagttaataatgatgatttttatgtttctaaggttgcttcctctctgaaataattcagaatccacccccatttaataaaatacctatgattcat

SEQ ID NO: 324445 - DNA, 1975 bp, Homo sapiens
  misc_feature (1891)..(1891): n is a, c, g, or t
agcgggcgagcagtctccgccctcgcgcgggagctgggaggctgcgagatccctaccgcagtagccgcctctgccgccgcggagcttcccgaacctcttcagccgcccggagccgctcccggagcccggccgtagaggctgcaatcgcagccgggagcccgcagcccgcgccccgagcccgccgccgcccttcgagggcgccccaggccgcgccatggtgaaggtgacgttcaactccgctctggcccagaaggaggccaagaaggacgagcccaagagcggcgaggaggcgctcatcatcccccccgacgccgtcgcggtggactgcaaggacccagatgatgtggtaccagttggccaaagaagagcctggtgttggtgcatgtgctttggactagcatttatgcttgcaggtgttattctaggaggagcatacttgtacaaatattttgcacttcaaccagatgacgtgtactactgtggaataaagtacatcaaagatgatgtcatcttaaatgagccctctgcagatgccccagctgctctctaccagacaattgaagaaaatattaaaatctttgaagaagaagaagttgaatttatcagtgtgcctgtcccagagtttgcagatagtgatcctgccaacattgttcatgactttaacaagaaacttacagcctatttagatcttaacctggataagtgctatgtgatccctctgaacacttccattgttatgccacccagaaacctactggagttacttattaacatcaaggctggaacctatttgcctcagtcctatctgattcatgagcacatggttattactgatcgcattgaaaacattgatcacctgggtttctttatttatcgactgtgtcatgacaaggaaacttacaaactgcaacgcagagaaactattaaaggtattcagaaacgtgaagccagcaattgtttcgcaattcggcattttgaaaacaaatttgccgtggaaactttaatttgttcttgaacagtcaagaaaaacattattgaggaaaattaatatcacagcataaccccaccctttacattttgtgcagtgattattttttaaagtcttctttcatgtaagtagcaaacagggctttactatcttttcatctcattaattcaattaaaaccattaccttaaaatttttttctttcgaagtgtggtgtcttttatatttgaattagtaactgtatgaagtcatagataatagtacatgtcaccttaggtagtaggaagaattacaatttctttaaatcatttatctggatttttatgttttattagcattttcaagaagacggattatctagagaataatcatatatatgcatacgtaaaaatggaccacagtgacttatttgtagttgttagttgccctgctacctagtttgttagtgcatttgagcacacattttaattttcctctaattaaaatgtgcagtattttcagtgtcaaatatatttaactatttagagaatgatttccacctttatgttttaatatcctaggcatctgctgtaataatattttagaaaatgtttggaatttaagaaataacttgtgttactaatttgtataacccatatctgtgcaatggaatataaatatcacaaagttgtttaaaaaaaaaaaaaaaaaaaaaaaaaaaaaaaaaaaaaaaaaaaaaagaaaaaaaaaaaaaaaaaaaaaaaaaaaaaaaaaaaaaaaaacttcgaggggggccccggacccaaattcgccttatagtgagcggaataacaattaattggccggcgttttacaccgtcggaactgggaaaaccttggcttaccaacttaaatcgctttgagaaaatcccccttctcacattgcntattagcaaaaagccccaaccgatggcctttccaccagttgcccactctgaatgctattgggaaatggaagccgtaaattctgt

SEQ ID NO: 324446 - DNA, 1609 bp, Homo sapiens
tcggtccttcaacgggtctggagtctgtgagctatctagcaaatactaatctaaggagaaggttgtgtggaacccccaatttataacgccaaagaagagcctggtgttggtgcatgtgctttggactagcatttatgcttgcaggtgttattctaggaggagcatacttgtacaaatattttgcacttcaaccagatgacgtgtactactgtggaataaagtacatcaaagatgatgtcatcttaaatgagccctctgcagatgccccagctgctctctaccagacaattgaagaaaatattaaaatctttgaagaagaagaagttgaatttatcagtgtgcctgtcccagagtttgcagatagtgatcctgccaacattgttcatgactttaacaagaaacttacagcctatttagatcttaacctggataagtgctatgtgatccctctgaacacttccattgttatgccacccagaaacctactggagttacttattaacatcaaggctggaacctatttgcctcagtcctatctgattcatgagcacatggttattactgatcgcattgaaaacattgatcacctgggtttctttatttatcgactgtgtcatgacaaggaaacttacaaactgcaacgcagagaaactattaaaggtattcagaaacgtgaagccagcaattgtttcgcaattcggcattttgaaaacaaatttgccgtggaaactttaatttgttcttgaacagtcaagaaaaacattattgaggaaaattaatatcacagcataaccccaccctttacattttgtgcagtgattattttttaaagtcttctttcatgtaagtagcaaacagggctttactatcttttcatctcattaattcaattaaaaccattaccttaaaatttttttctttcgaagtgtggtgtcttttatatttgaattagtaactgtatgaagtcatagataatagtacatgtcaccttaggtagtaggaagaattacaatttctttaaatcatttatctggatttttatgttttattagcattttcaagaagacggattatctagagaataatcatatatatgcatacgtaaaaatggaccacagtgacttatttgtagttgttagttgccctgctacctagtttgttagtgcatttgagcacacattttaattttcctctaattaaaatgtgcagtattttcagtgtcaaatatatttaactatttagagaatgatttccacctttatgttttaatatcctaggcatctgctgtaataatattttagaaaatgtttggaatttaagaaataacttgtgttactaatttgtataacccatatctgtgcaatggaatataaatatcacaaagttgtttaactagactgcgtgttgtttttcccgtataataaaaccaaagaatagtttggttcttcaaatcttaagagaatccacataaaagaagaaactattttttaaaaattcacttctatatatacaatgagtaaaatcacagattttttctttaaataaaaataagtcattttaataactaaaccagattctttgtggatactattaaagtaacatttaagcc

SEQ ID NO: 324447 - DNA, 1540 bp, Homo sapiens
  misc_feature (1408)..(1408): n is a, c, g, or t
  misc_feature (1439)..(1439): n is a, c, g, or t
  misc_feature (1449)..(1449): n is a, c, g, or t
  misc_feature (1484)..(1484): n is a, c, g, or t
agcgggcgagcagtctccgccctcgcgcgggagctgggaggctgcgagatccctaccgcagtagccgcctctgccgccgcggagcttcccgaacctcttcagccgcccggagccgctcccggagcccggccgtagaggctgcaatcgcagccgggagcccgcagcccgcgccccgagcccgccgccgcccttcgagggcgccccaggccgcgccatggtgaaggtgacgttcaactccgctctggcccagaaggaggccaagaaggacgagcccaagagcggcgaggaggcgctcatcatcccccccgacgccgtcgcggtggactgcaaggacccagatgatgtggtaccagttggccaaagaagagcctggtgttggtgcatgtgctttggactagcatttatgcttgcaggtgttattctaggaggagcatacttgtacaaatattttgcacttcaaccagatgacgtgtactactgtggaataaagtacatcaaagatgatgtcatcttaaatgagccctctgcagatgccccagctgctctctaccagacaattgaagaaaatattaaaatctttgaagaagaagaagttgaatttatcagtgtgcctgtcccagagtttgcagatagtgatcctgccaacattgttcatgactttaacaagaaacttacagcctatttagatcttaacctggataagtgctatgtgatccctctgaacacttccattgttatgccacccagaaacctactggagttacttattaacatcaaggctggaacctatttgcctcagtcctatctgattcatgagcacatggttattactgatcgcattgaaaacattgatcacctgggtttctttatttatcgactgtgtcatgacaaggaaacttacaaactgcaacgcagagaaactattaaaggtattcagaaacgtgaagccagcaattgtttcgcaattcggcattttgaaaacaaatttgccgtggaaactttaatttgttcttgaacagtcaagaaaaacattattgaggaaaattaatatcacagcataaccccaccctttacattttgtgcagtgattattttttaaagtcttctttcatgtaagtagcaaacagggctttactatcttttcatctcattaattcaattaaaaccattaccttaaaatttttttctttcgaagtgtggtgtcttttatatttgaattagtaactgtatgaagtcatagataatagtacatgtcaccttaggtagtaggaagaattacaatttctttaaatcatttatcttaaatgtttttaaatttaaggcaattttttccaaagaaaggaaccgggaattaaattcttaagagagaattaatttcaataataattaatggccattacggtaaaanaaattgggacccaacaagtggaaccttaaantttggaaagnttgggtaaaagttggcccttgggttacaccttagntttgggttaaagggcaattttggaagcccccaccaattttaaaaatttttccttct

SEQ ID NO: 324448 - DNA, 1673 bp, Homo sapiens
  misc_feature (92)..(92): n is a, c, g, or t
aaaataagctcatctgagctctagccctggggatgcagcctttccaaaggctctgactctcatcctaagggcggcggtgctactgtgtggcntcatgcgatgggcagcagcaatttcagccaggaaggatgagcatatggtggaggcgtgtcctgtgggccactggacacagggccacaggcctcccatgtgtgctgggcatgttaaagggcagtggctggacagctgcatccacatagttcagcgtctgacgtcccagatgacgtgtactactgtggaataaagtacatcaaagatgatgtcatcttaaatgagccctctgcagatgccccagctgctctctaccagacaattgaagaaaatattaaaatctttgaagaagaagaagttgaatttatcagtgtgcctgtcccagagtttgcagatagtgatcctgccaacattgttcatgactttaacaagaaacttacagcctatttagatcttaacctggataagtgctatgtgatccctctgaacacttccattgttatgccacccagaaacctactggagttacttattaacatcaaggctggaacctatttgcctcagtcctatctgattcatgagcacatggttattactgatcgcattgaaaacattgatcacctgggtttctttatttatcgactgtgtcatgacaaggaaacttacaaactgcaacgcagagaaactattaaaggtattcagaaacgtgaagccagcaattgtttcgcaattcggcattttgaaaacaaatttgccgtggaaactttaatttgttcttgaacagtcaagaaaaacattattgaggaaaattaatatcacagcataaccccaccctttacattttgtgcagtgattattttttaaagtcttctttcatgtaagtagcaaacagggctttactatcttttcatctcattaattcaattaaaaccattaccttaaaatttttttctttcgaagtgtggtgtcttttatatttgaattagtaactgtatgaagtcatagataatagtacatgtcaccttaggtagtaggaagaattacaatttctttaaatcatttatctggatttttatgttttattagcattttcaagaagacggattatctagagaataatcatatatatgcatacgtaaaaatggaccacagtgacttatttgtagttgttagttgccctgctacctagtttgttagtgcatttgagcacacattttaattttcctctaattaaaatgtgcagtattttcagtgtcaaatatatttaactatttagagaatgatttccacctttatgttttaatatcctaggcatctgctgtaataatattttagaaaatgtttggaatttaagaaataacttgtgttactaatttgtataacccatatctgtgcaatggaatataaatatcacaaagttgtttaactagactgcgtgttgtttttcccgtataataaaaccaaagaatagtttggttcttcaaatcttaagagaatccacataaaagaagaaactattttttaaaaattcacttctatatatacaatgagtaaaatcacagattttttctttaaataaaaataagtcattttaataactaaaccagattctttgtggatactattaaagtaacatttaagcc

SEQ ID NO: 324449 - DNA, 1476 bp, Homo sapiens
  misc_feature (51)..(51): n is a, c, g, or t
agactgaacgtgatgaatgcactaacaccactctctatggacagctcagcngctagcaccagatgacgtgtactactgtggaataaagtacatcaaagatgatgtcatcttaaatgagccctctgcagatgccccagctgctctctaccagacaattgaagaaaatattaaaatctttgaagaagaagaagttgaatttatcagtgtgcctgtcccagagtttgcagatagtgatcctgccaacattgttcatgactttaacaagaaacttacagcctatttagatcttaacctggataagtgctatgtgatccctctgaacacttccattgttatgccacccagaaacctactggagttacttattaacatcaaggctggaacctatttgcctcagtcctatctgattcatgagcacatggttattactgatcgcattgaaaacattgatcacctgggtttctttatttatcgactgtgtcatgacaaggaaacttacaaactgcaacgcagagaaactattaaaggtattcagaaacgtgaagccagcaattgtttcgcaattcggcattttgaaaacaaatttgccgtggaaactttaatttgttcttgaacagtcaagaaaaacattattgaggaaaattaatatcacagcataaccccaccctttacattttgtgcagtgattattttttaaagtcttctttcatgtaagtagcaaacagggctttactatcttttcatctcattaattcaattaaaaccattaccttaaaatttttttctttcgaagtgtggtgtcttttatatttgaattagtaactgtatgaagtcatagataatagtacatgtcaccttaggtagtaggaagaattacaatttctttaaatcatttatctggatttttatgttttattagcattttcaagaagacggattatctagagaataatcatatatatgcatacgtaaaaatggaccacagtgacttatttgtagttgttagttgccctgctacctagtttgttagtgcatttgagcacacattttaattttcctctaattaaaatgtgcagtattttcagtgtcaaatatatttaactatttagagaatgatttccacctttatgttttaatatcctaggcatctgctgtaataatattttagaaaatgtttggaatttaagaaataacttgtgttactaatttgtataacccatatctgtgcaatggaatataaatatcacaaagttgtttaactagactgcgtgttgtttttcccgtataataaaaccaaagaatagtttggttcttcaaatcttaagagaatccacataaaagaagaaactattttttaaaaattcacttctatatatacaatgagtaaaatcacagattttttctttaaataaaaataagtcattttaataactaaaccagattctttgtggatactattaaagtaacatttaagcc

SEQ ID NO: 324450 - DNA, 1830 bp, Homo sapiens
agcgggcgagcagtctccgccctcgcgcgggagctgggaggctgcgagatccctaccgcagtagccgcctctgccgccgcggagcttcccgaacctcttcagccgcccggagccgctcccggagcccggccgtagaggctgcaatcgcagccgggagcccgcagcccgcgccccgagcccgccgccgcccttcgagggcgccccaggccgcgccatggtgaaggtgacgttcaactccgctctggcccagaaggaggccaagaaggacgagcccaagagcggcgaggaggcgctcatcatcccccccgacgccgtcgcggtggactgcaaggacccagatgatgtggtaccagttggccaaagaagagcctggtgttggtgcatgtgctttggactagcatttatgcttgcaggtgttattctaggaggagcatacttgtacaaatattttgcacttcaaccagatgacgtgtactactgtggaataaagtacatcaaagatgatgtcatcttaaatgagccctctgcagatgccccagctgctctctaccagacaattgaagaaaatattaaaatctttgaagaagaagaagttgaatttatcagtgtgcctgtcccagagtttgcagatagtgatcctgccaacattgttcatgactttaacaagaaacttacagcctatttagatcttaacctggataagtgctatgtgatccctctgaacacttccattgttatgccacccagaaacctactggagttacttattaacatcaaggctggaacctatttgcctcagtcctatctgattcatgagcacatggttattactgatcgcattgaaaacattgatcacctgggtttctttatttatcgactgtgtcatgacaaggaaacttacaaactgcaacgcagagaaactattaaaggtattcagaaacgtgaagccagcaattgtttcgcaattcggcattttgaaaacaaatttgccgtggaaactttaatttgttcttgaacagtcaagaaaaacattattgagattattttttaaagtcttctttcatgtaagtagcaaacagggctttactatcttttcatctcattaattcaattaaaaccattaccttaaaatttttttctttcgaagtgtggtgtcttttatatttgaattagtaactgtatgaagtcatagataatagtacatgtcaccttaggtagtaggaagaattacaatttctttaaatcatttatctggatttttatgttttattagcattttcaagaagacggattatctagagaataatcatatatatgcatacgtaaaaatggaccacagtgacttatttgtagttgttagttgccctgctacctagtttgttagtgcatttgagcacacattttaattttcctctaattaaaatgtgcagtattttcagtgtcaaatatatttaactatttagagaatgatttccacctttatgttttaatatcctaggcatctgctgtaataatattttagaaaatgtttggaatttaagaaataacttgtgttactaatttgtataacccatatctgtgcaatggaatataaatatcacaaagttgtttaactagactgcgtgttgtttttcccgtataataaaaccaaagaatagtttggttcttcaaatcttaagagaatccacataaaagaagaaactattttttaaaaattcacttctatatatacaatgagtaaaatcacagattttttctttaaataaaaataagtcattttaataactaaaccagattctttgtggatactattaaagtaacatttaagcc

SEQ ID NO: 324451 - DNA, 1514 bp, Homo sapiens
  misc_feature (1430)..(1430): n is a, c, g, or t
agcgggcgagcagtctccgccctcgcgcgggagctgggaggctgcgagatccctaccgcagtagccgcctctgccgccgcggagcttcccgaacctcttcagccgcccggagccgctcccggagcccggccgtagaggctgcaatcgcagccgggagcccgcagcccgcgccccgagcccgccgccgcccttcgagggcgccccaggccgcgccatggtgaaggtgacgttcaactccgctctggcccagaaggaggccaagaaggacgagcccaagagcggcgaggaggcgctcatcatcccccccgacgccgtcgcggtggactgcaaggacccagatgatgtggtaccagttggccaaagaagagcctggtgttggtgcatgtgctttggactagcatttatgcttgcaggtgttattctaggaggagcatacttgtacaaatattttgcacttcaaccagatgacgtgtactactgtggaataaagtacatcaaagatgatgtcatcttaaatgagccctctgcagatgccccagctgctctctaccagacaattgaagaaaatattaaaatctttgaagaagaagaagttgaatttatcagtgtgcctgtcccagagtttgcagatagtgatcctgccaacattgttcatgactttaacaagaaacttacagcctatttagatcttaacctggataagtgctatgtgatccctctgaacacttccattgttatgccacccagaaacctactggagttacttattaacatcaaggctggaacctatttgcctcagtcctatctgattcatgagcacatggttattactgatcgcattgaaaacattgatcacctgggtttctttatttatcgactgtgtcatgacaaggaaacttacaaactgcaacgcagagaaactattaaaggtattcagaaacgtgaagccagcaattgtttcgcaattcggcattttgaaaacaaatttgccgtggaaactttaatttgttcttgaacagtcaagaaaaacattattgaggaaaattaatatcacagcataaccccaccctttacattttgtgcagtgattattttttaaagtcttctttcatgtaagtagcaaacagggctttactatcttttcatctcattaattcaattaaaaccattaccttaaaaaaaaaaaaaaaaaaaaaaaaaaaaaaaaaaaaaaaaaaaaaaaaaaaaaaaaaaaaaaaaaaaaagaaaaaaaaaaaaaaaaaaaaaaaaaaaaaaaaaaaaaaaaacttcgaggggggccccggacccaaattcgccttatagtgagcggaataacaattaattggccggcgttttacaccgtcggaactgggaaaaccttggcttaccaacttaaatcgctttgagaaaatcccccttctcacattgcntattagcaaaaagccccaaccgatggcctttccaccagttgcccactctgaatgctattgggaaatggaagccgtaaattctgt

SEQ ID NO: 324452 - DNA, 1379 bp, Homo sapiens
gccggtccgtctttcattgttgaggcttcagatgccccagctgctctctaccagacaattgaagaaaatattaaaatctttgaagaagaagaagttgaatttatcagtgtgcctgtcccagagtttgcagatagtgatcctgccaacattgttcatgactttaacaagaaacttacagcctatttagatcttaacctggataagtgctatgtgatccctctgaacacttccattgttatgccacccagaaacctactggagttacttattaacatcaaggctggaacctatttgcctcagtcctatctgattcatgagcacatggttattactgatcgcattgaaaacattgatcacctgggtttctttatttatcgactgtgtcatgacaaggaaacttacaaactgcaacgcagagaaactattaaaggtattcagaaacgtgaagccagcaattgtttcgcaattcggcattttgaaaacaaatttgccgtggaaactttaatttgttcttgaacagtcaagaaaaacattattgaggaaaattaatatcacagcataaccccaccctttacattttgtgcagtgattattttttaaagtcttctttcatgtaagtagcaaacagggctttactatcttttcatctcattaattcaattaaaaccattaccttaaaatttttttctttcgaagtgtggtgtcttttatatttgaattagtaactgtatgaagtcatagataatagtacatgtcaccttaggtagtaggaagaattacaatttctttaaatcatttatctggatttttatgttttattagcattttcaagaagacggattatctagagaataatcatatatatgcatacgtaaaaatggaccacagtgacttatttgtagttgttagttgccctgctacctagtttgttagtgcatttgagcacacattttaattttcctctaattaaaatgtgcagtattttcagtgtcaaatatatttaactatttagagaatgatttccacctttatgttttaatatcctaggcatctgctgtaataatattttagaaaatgtttggaatttaagaaataacttgtgttactaatttgtataacccatatctgtgcaatggaatataaatatcacaaagttgtttaactagactgcgtgttgtttttcccgtataataaaaccaaagaatagtttggttcttcaaatcttaagagaatccacataaaagaagaaactattttttaaaaattcacttctatatatacaatgagtaaaatcacagattttttctttaaataaaaataagtcattttaataactaaaccagattctttgtggatactattaaagtaacatttaagcc

SEQ ID NO: 324453 - DNA, 1369 bp, Homo sapiens
gtgctcgcttcggcagcacatatactaaaatggaacgatacagagaagattagcatggcccctgcgcaaggatgacacgcaaattcgtgaagcgttccatatttttcccagagtttgcagatagtgatcctgccaacattgttcatgactttaacaagaaacttacagcctatttagatcttaacctggataagtgctatgtgatccctctgaacacttccattgttatgccacccagaaacctactggagttacttattaacatcaaggctggaacctatttgcctcagtcctatctgattcatgagcacatggttattactgatcgcattgaaaacattgatcacctgggtttctttatttatcgactgtgtcatgacaaggaaacttacaaactgcaacgcagagaaactattaaaggtattcagaaacgtgaagccagcaattgtttcgcaattcggcattttgaaaacaaatttgccgtggaaactttaatttgttcttgaacagtcaagaaaaacattattgaggaaaattaatatcacagcataaccccaccctttacattttgtgcagtgattattttttaaagtcttctttcatgtaagtagcaaacagggctttactatcttttcatctcattaattcaattaaaaccattaccttaaaatttttttctttcgaagtgtggtgtcttttatatttgaattagtaactgtatgaagtcatagataatagtacatgtcaccttaggtagtaggaagaattacaatttctttaaatcatttatctggatttttatgttttattagcattttcaagaagacggattatctagagaataatcatatatatgcatacgtaaaaatggaccacagtgacttatttgtagttgttagttgccctgctacctagtttgttagtgcatttgagcacacattttaattttcctctaattaaaatgtgcagtattttcagtgtcaaatatatttaactatttagagaatgatttccacctttatgttttaatatcctaggcatctgctgtaataatattttagaaaatgtttggaatttaagaaataacttgtgttactaatttgtataacccatatctgtgcaatggaatataaatatcacaaagttgtttaactagactgcgtgttgtttttcccgtataataaaaccaaagaatagtttggttcttcaaatcttaagagaatccacataaaagaagaaactattttttaaaaattcacttctatatatacaatgagtaaaatcacagattttttctttaaataaaaataagtcattttaataactaaaccagattctttgtggatactattaaagtaacatttaagcc

SEQ ID NO: 324454 - DNA, 999 bp, Homo sapiens
agcgggcgagcagtctccgccctcgcgcgggagctgggaggctgcgagatccctaccgcagtagccgcctctgccgccgcggagcttcccgaacctcttcagccgcccggagccgctcccggagcccggccgtagaggctgcaatcgcagccgggagcccgcagcccgcgccccgagcccgccgccgcccttcgagggcgccccaggccgcgccatggtgaaggtgacgttcaactccgctctggcccagaaggaggccaagaaggacgagcccaagagcggcgaggaggcgctcatcatcccccccgacgccgtcgcggtggactgcaaggacccagatgatgtggtaccagttggccaaagaagagcctggtgttggtgcatgtgctttggactagcatttatgcttgcaggtgttattctaggaggagcatacttgtacaaatattttgcacttcaaccagatgacgtgtactactgtggaataaagtacatcaaagatgatgtcatcttaaatgagccctctgcagatgccccagctgctctctaccagacaattgaagaaaatattaaaatctttgaagaagaagaagttgaatttatcagtgtgcctgtcccagagtttgcagatagtgatcctgccaacattgttcatgactttaacaagaaacttacagcctatttagatcttaacctggataagtgctatgtgatccctctgaacacttccattgttatgccacccagaaacctactggagttacttattaacatcaaggctggaacctatttgcctcagtcctatctgattcatgagcacatggttattactgatcgcattgaaaacattgatcacctgggtttctttatttatcgactgtgtcatgacaaggaaacttacaaactgcaacgcagagaaactattaaagattcagaacctgagccgcaatgtttccaatcgcatttgaaacaattgcgtgcttaattggcttgacagcg

SEQ ID NO: 324455 - DNA, 861 bp, Homo sapiens
agcgggcgagcagtctccgccctcgcgcgggagctgggaggctgcgagatccctaccgcagtagccgcctctgccgccgcggagcttcccgaacctcttcagccgcccggagccgctcccggagcccggccgtagaggctgcaatcgcagccgggagcccgcagcccgcgccccgagcccgccgccgcccttcgagggcgccccaggccgcgccatggtgaaggtgacgttcaactccgctctggcccagaaggaggccaagaaggacgagcccaagagcggcgaggaggcgctcatcatcccccccgacgccgtcgcggtggactgcaaggacccagatgatgtggtaccagttggccaaagaagagcctggtgttggtgcatgtgctttggactagcatttatgcttgcaggtgttattctaggaggagcatacttgtacaaatattttgcacttcaagctggaacctatttgcctcagtcctatctgattcatgagcacatggttattactgatcgcattgaaaacattgatcacctgggtttctttatttatcgactgtgtcatgacaaggaaacttacaaactgcaacgcagagaaactattaaaggtattcagaaacgtgaagccagcaattgtttcgcaattcggcattttgaaaacaaatttgccgtggaaactttaatttgttcttgaacagtcaagaaaaacattattgaggaaaattaatatcacagcataaccccaccctttacattttgtgcagtgattattttttaaagtcttctttcatgtaagtagcaaacagggctttactatcttttcatctcattaattcaattaaaaccattaccttaaaa

SEQ ID NO: 324456 - DNA, 667 bp, Homo sapiens
agcgggcgagcagtctccgccctcgcgcgggagctgggaggctgcgagatccctaccgcagtagccgcctctgccgccgcggagcttcccgaacctcttcagccgcccggagccgctcccggagcccggccgtagaggctgcaatcgcagccgggagcccgcagcccgcgccccgagcccgccgccgcccttcgagggcgccccaggccgcgccatggtgaaggtgacgttcaactccgctctggcccagaaggaggccaagaaggacgagcccaagagcggcgaggaggcgctcatcatcccccccgacgccgtcgcggtggactgcaaggacccagatgatgtggtaccagttggccaaagaagagcctggtgttggtgcatgtgctttggactagcatttatgcttgcaggtgttattctaggaggagcatacttgtacaaatattttgcacttcaaccagatgacgtgtactactgtggaataaagtacatcaaagatgatgtcatcttaaatgagccctctgcagatgccccagctgctctctaccagacaattgaagaaaataacgtcttggagggggggaggtgatttatcgggtgccgtccagggtgcggaggggtccgccacctgtctggcttagcagggctatcgccgttaggctag

SEQ ID NO: 324457 - DNA, 856 bp, Homo sapiens
gaggaagtgccgcgtcttggtgggtctggagctggctgacaatgcaggagacaaggtctcgccatgttgcctaggatggtctcgaactcctgaactcaagtaatccaccttggcctcccaaagtgctgggattacaggcatgagccaccacgcccggccaaattgtatgggtctctctgtgtctccagatccctgtctgtcgctgggagctccatctctcctgccccacccatcatgccagagactgcagcctcagacccccgggaggtgctggagccacagtgcagaggtggtgcccaactcagaggaccagggaccgggcgccgccttccagctcagtgaagcaagccctccccagagctcaggcctgcggttcagtggctgccctgaactttggcaagaagatctggagggggcccgcctgggcatcttctactaaatggcctcggcttccctctttccatccaggaatcagtcctgtagcttgggtgcctccttatttgttaattagtggcttttcatgttctcctttagccaaggctccctttttccaagtgatgtctttcagggaagcagtgtttgaaatagatagcgggtaccttccctggatggagtcagggcgggggcactgtcctccactgctagacacccccagaatgcctggcgctctgcagagcacagtctgagctgctctaagaaggggtctcctttaccctaaaggcagctgggcagggacaggtgggagaatgggtgtaggaggcaggccccaggctctgcttcttggtgacagttggccagagccctgtatgctttgatttttttgtacttaaaaagaaaaaacacacacacacaacaa

SEQ ID NO: 324458 - DNA, 2095 bp, Homo sapiens
cccgccccctcgtcgcagtcactgccgaccggctggctgggccttgcggcgtgaggaccccggcggcgccgcagtcccgcgagccatggcccagtccggcggggaggctcggcccgggcccaagacggcggtgcagatccgcgtcgccatccaggaggccgaggacgtggacgagttggaggacgaggaggagggggcggagactcggggcgccggggacccggcccggtacctcagccccggctggggcagcgcgagcgaggaggagccgagccgcgggcacagtggcaccactgcaagtggaggtgagaacgagcgtgaggacctggagcaggagtggaagcccccggatgaggagttgatcaagaaactggtggatcagatcgaattctacttttctgatgaaaacctggagaaggacgcctttttgctaaaacacgtgaggaggaacaagctgggatatgtgagcgttaagctactcacatccttcaaaaaggtgaaacatcttacacgggactggagaaccacagcacatgctttgaagtattcagtggtccttgagttgaatgaggaccaccggaaggtgaggaggaccacccccgtcccactgttccccaacgagaacctccccagcaagatgctcctggtctatgatctctacttgtctcctaagctgtgggctctggccaccccccagaagaatggaagggtgcaagagaaggtgatggaacacctgctcaagctttttgggacttttggagtcatctcatcagtgcggatcctcaaacctgggagagagctgccccctgacatccggaggatcagcagccgctacagccaagtggggacccaggagtgcgccatcgtggagttcgaggaggtggaagcagccatcaaagcccatgagttcatgatcacagaatctcagggcaaagagaacatgaaagctgtcctgattggtatgaagccacccaaaaagaaacctgccaaagacaaaaatcatgacgaggagcccactgcgagcatccacctgaacaagtccctgaacaagagagtcgaggagcttcagtacatgggtgatgagtcttctgccaacagctcctctgaccccgagagcaaccccacatcccctatggcgggccgacggcacgcggccaccaacaagctcagcccgtctggccaccagaatctctttctgagtccaaatgcctccccgtgcacaagtccttggagcagccccttggcccaacgcaaaggcgtttccagaaagtccccactggcggaggaaggtagactgaactgcagcaccagccctgagatcttccgcaagtgtatggattattcctctgacagcagcgtcactccctctggcagcccctgggtccggaggcgtcgccaagccgagatggggacccaggagaaaagccccggtacgagtcccctgctctcccggaagatgcagactgcagatgggctacccgtaggggtgctgaggttgcccaggggtcctgacaacaccagaggatttcatggccatgagaggagcagggcctgtgtataaataccttctatttttaatacaagctccactgaaaaccaccttcgttttcaaggttctgacaaacacctggcatgacagaatggaattcgttcccctttgagagattttttattcatgtagacctcttaatttatctatctgtaatatacataaatcggtacgccatggtttgaagaccaccttctagttcaggactcctgttcttcccagcatggccactattttgatgatggctgatgtgtgtgagtgtgatggccctgaagggctgtaggacggaggttccctgggggaagtctgttctttggtatggaatttttctctcttctttggtatggaatttttcccttcagtgactgagctgtcctcgataggccatgcaagggcttcctgagagttcaggaaagttctcttgtgcaacagcaagtagctaagcctatagcatggtgtcttgtaggaccaaatcgatgttacctgtcaagtaaataaataataaaacacccaactgggagtgctgactttgaggttataaaaaaa

SEQ ID NO: 324459 - DNA, 473 bp, Homo sapiens
gccgcaaagtccatccctacccgccttcccctccccttgcgagtggtcccgcttacccttcactgccatcatcgccctgcctttcccagtcctgctggctgcgctcagtctttaggtggtagcaggccaggtacagcggacacttgctgatgggggattccaggaggtgggatttcaaggaataggagctcggtgaattcaaggaccatgcttgcttcgttcattgtatcttcagcacctagcacagcacccagcacataggacatgtttgttgactgaatgcgtatctctatcatcacactcactcaatggtgttgagatatttgtgtttccccttccctagacagtgagatccttgaaggcagctgccttatcttattcctttttgtatttccatacctagcctaatacctagcttatataagggaacagaataaatgaacaataaagaaaagtctttacagcctctaaaa

SEQ ID NO: 324460 - DNA, 2093 bp, Homo sapiens
cacaagccaccacaacacagtaggctaggtacgagcctggtgtaaatcggccgaggcccggcggcgccgcagtcccgcgagccatggcccagtccggcggggaggctcggcccgggcccaagacggcggtgcagatccgcgtcgccatccaggaggccgaggacgtggacgagttggaggacgaggaggagggggcggagactcggggcgccggggacccggcccggtacctcagccccggctggggcagcgcgagcgaggaggagccgagccgcgggcacagtggcaccactgcaagtggaggtgagaacgagcgtgaggacctggagcaggagtggaagcccccggatgaggagttgatcaagaaactggtggatcagatcgaattctacttttctgatgaaaacctggagaaggacgcctttttgctaaaacacgtgaggaggaacaagctgggatatgtgagcgttaagctactcacatccttcaaaaaggtgaaacatcttacacgggactggagaaccacagcacatgctttgaagtattcagtggtccttgagttgaatgaggaccaccggaaggtgaggaggaccacccccgtcccactgttccccaacgagaacctccccagcaagatgctcctggtctatgatctctacttgtctcctaagctgtgggctctggccaccccccagaagaatggaagggtgcaagagaaggtgatggaacacctgctcaagctttttgggacttttggagtcatctcatcagtgcggatcctcaaacctgggagagagctgccccctgacatccggaggatcagcagccgctacagccaagtggggacccaggagtgcgccatcgtggagttcgaggaggtggaagcagccatcaaagcccatgagttcatgatcacagaatctcagggcaaagagaacatgaaagctgtcctgattggtatgaagccacccaaaaagaaacctgccaaagacaaaaatcatgacgaggagcccactgcgagcatccacctgaacaagtccctgaacaagagagtcgaggagcttcagtacatgggtgatgagtcttctgccaacagctcctctgaccccgagagcaaccccacatcccctatggcgggccgacggcacgcggccaccaacaagctcagcccgtctggccaccagaatctctttctgagtccaaatgcctccccgtgcacaagtccttggagcagccccttggcccaacgcaaaggcgtttccagaaagtccccactggcggaggaaggtagactgaactgcagcaccagccctgagatcttccgcaagtgtatggattattcctctgacagcagcgtcactccctctggcagcccctgggtccggaggcgtcgccaagccgagatggggacccaggagaaaagccccggtacgagtcccctgctctcccggaagatgcagactgcagatgggctacccgtaggggtgctgaggttgcccaggggtcctgacaacaccagaggatttcatggccatgagaggagcagggcctgtgtataaataccttctatttttaatacaagctccactgaaaaccaccttcgttttcaaggttctgacaaacacctggcatgacagaatggaattcgttcccctttgagagattttttattcatgtagacctcttaatttatctatctgtaatatacataaatcggtacgccatggtttgaagaccaccttctagttcaggactcctgttcttcccagcatggccactattttgatgatggctgatgtgtgtgagtgtgatggccctgaagggctgtaggacggaggttccctgggggaagtctgttctttggtatggaatttttctctcttctttggtatggaatttttcccttcagtgactgagctgtcctcgataggccatgcaagggcttcctgagagttcaggaaagttctcttgtgcaacagcaagtagctaagcctatagcatggtgtcttgtaggaccaaatcgatgttacctgtcaagtaaataaataataaaacacccaactgggagtgctgactttgaggttataaaaaaa

SEQ ID NO: 324461 - DNA, 1954 bp, Homo sapiens
  misc_feature (233)..(233): n is a, c, g, or t
  misc_feature (236)..(236): n is a, c, g, or t
  misc_feature (245)..(245): n is a, c, g, or t
  misc_feature (260)..(260): n is a, c, g, or t
  misc_feature (267)..(267): n is a, c, g, or t
  misc_feature (279)..(280): n is a, c, g, or t
  misc_feature (296)..(296): n is a, c, g, or t
aaatgcctccccgtgcacaagtccttggagcagccccttggcccaacgcaaaggcgtttccagaaagtccccactggcggaggaaggttgactgaactgcagcaccagccctgagatcttccgcaagtgtatggattattcctctgacagcagcgtcactccctctggcagcccctgggtccggaggcgtcgccaagccgaatatggggacccaggagaaaagccccggtacnagncccctgctntcccggaagatgcanactgcanatgggctacccnnaggggtgctgaggttncccaagggtcctgacaactcctgaggattttaatggcacttgataggaacagggccctgtgtataaaatacctttttatttttaaaaacaagctccactggaaaccatattcagtggtccttgagttgaatgaggaccaccggaaggtgaggaggaccacccccgtcccactgttccccaacgagaacctccccagcaagatgctcctggtctatgatctctacttgtctcctaagctgtgggctctggccaccccccagaagaatggaagggtgcaagagaaggtgatggaacacctgctcaagctttttgggacttttggagtcatctcatcagtgcggatcctcaaacctgggagagagctgccccctgacatccggaggatcagcagccgctacagccaagtggggacccaggagtgcgccatcgtggagttcgaggaggtggaagcagccatcaaagcccatgagttcatgatcacagaatctcagggcaaagagaacatgaaagctgtcctgattggtatgaagccacccaaaaagaaacctgccaaagacaaaaatcatgacgaggagcccactgcgagcatccacctgaacaagtccctgaacaagagagtcgaggagcttcagtacatgggtgatgagtcttctgccaacagctcctctgaccccgagagcaaccccacatcccctatggcgggccgacggcacgcggccaccaacaagctcagcccgtctggccaccagaatctctttctgagtccaaatgcctccccgtgcacaagtccttggagcagccccttggcccaacgcaaaggcgtttccagaaagtccccactggcggaggaaggtagactgaactgcagcaccagccctgagatcttccgcaagtgtatggattattcctctgacagcagcgtcactccctctggcagcccctgggtccggaggcgtcgccaagccgagatggggacccaggagaaaagccccggtacgagtcccctgctctcccggaagatgcagactgcagatgggctacccgtaggggtgctgaggttgcccaggggtcctgacaacaccagaggatttcatggccatgagaggagcagggcctgtgtataaataccttctatttttaatacaagctccactgaaaaccaccttcgttttcaaggttctgacaaacacctggcatgacagaatggaattcgttcccctttgagagattttttattcatgtagacctcttaatttatctatctgtaatatacataaatcggtacgccatggtttgaagaccaccttctagttcaggactcctgttcttcccagcatggccactattttgatgatggctgatgtgtgtgagtgtgatggccctgaagggctgtaggacggaggttccctgggggaagtctgttctttggtatggaatttttctctcttctttggtatggaatttttcccttcagtgactgagctgtcctcgataggccatgcaagggcttcctgagagttcaggaaagttctcttgtgcaacagcaagtagctaagcctatagcatggtgtcttgtaggaccaaatcgatgttacctgtcaagtaaataaataataaaacacccaactgggagtgctgactttgaggttataaaaaaa

SEQ ID NO: 324462 - DNA, 629 bp, Homo sapiens
gatctctcatggacatgaaatcctctggtgtagtcaggacccctgggcaactcagaggatttcatggccatgagaggagcagggcctgtgtataaataccttctatttttaatacaagctccactgaaaaccaccttcgttttcaaggttctgacaaacacctggcatgacagaatggaattcgttcccctttgagagattttttattcatgtagacctcttaatttatctatctgtaatatacataaatcggtacgccatggtttgaagaccaccttctagttcaggactcctgttcttcccagcatggccactattttgatgatggctgatgtgtgtgagtgtgatggccctgaagggctgtaggacggaggttccctgggggaagtctgttctttggtatggaatttttctctcttctttggtatggaatttttcccttcagtgactgagctgtcctcgataggccatgcaagggcttcctgagagttcaggaaagttctcttgtgcaacagcaagtagctaagcctatagcatggtgtcttgtaggaccaaatcgatgttacctgtcaagtaaataaataataaaacacccaactgggagtgctgactttgaggttataaaaaaa

SEQ ID NO: 324463 - DNA, 1193 bp, Homo sapiens
tacagcggcggtacgcaccgggagtaaggatcggctggctgggccttgcggcgtgaggaccccggcggcgccgcagtcccgcgagccatggcccagtccggcggggaggctcggcccgggcccaagacggcggtgcagatccgcgtcgccatccaggaggccgaggacgtggacgagttggaggacgaggaggagggggcggagactcggggcgccggggacccggcccggtacctcagccccggctggggcagcgcgagcgaggaggagccgagccgcgggcacagaactgcccagctcccgtggcttgagtctcagcaagtgttcagtctgaagcccttcctgctgcccactggcatagagttgaccccagaaaatccctggggttcttcggtgagctgacagagcccagtgggcaggcacccagagcaggaggagatgtagccaagaacaggatccacactatcccctgtttggacccaggctcgcatggcagcagccatcacccgatgtgaatgttctcagctcctggagcctacaggagaaaacccagattcctcaatctgctcattaagatgtgacacccactcacatcatctcctcagcccattgcctcaacagttcacgctgtcaacagttcacgctcccgtgattccagctagttccctgagcatagggggctattttgtgtctacatgcctctgcacccccacctctaggtcctctgattgactgatttctagtcagcctttaaaacttcgctgcctcttctccaccacccccaatccccaccccagagctggctgtgtttcctttcttctctgttgctgtagtactctgtacattttatgcctagcaccttccacaattgtgattctatcattgtgtctccctcacaggaataggagctcggtgaattcaaggaccatgcttgcttcgttcattgtatcttcagcacctagcacagcacccagcacataggacatgtttgttgactgaatgcgtatctctatcatcacactcactcaatggtgttgagatatttgtgtttccccttccctagacagtgagatccttgaaggcagctgccttatcttattcctttttgtatttccatacctagcctaatacctagcttatataagggaacagaataaatgaacaataaagaaaagtctttacagcctctaaaa

SEQ ID NO: 324464 - DNA, 770 bp, Homo sapiens
cacaagccaccacaacacagtaggctaggtacgagcctggtgtaaatcggccgaggcccggcggcgccgcagtcccgcgagccatggcccagtccggcggggaggctcggcccgggcccaagacggcggtgcagatccgcgtcgccatccaggaggccgaggacgtggacgagttggaggacgaggaggagggggcggagactcggggcgccggggacccggcccggtacctcagccccggctggggcagcgcgagcgaggaggagccgagccgcgggcacagtggcaccactgcaagtggaggtgagaacgagcgtgaggacctggagcaggagtggaagcccccggatgaggagttgatcaagaaactggtggatcagatcgaattctacttttctgatgaaaacctggagaaggacgcctttttgctaaaacacgtgaggaggaacaaggctgtgcgagtattgcttgacgcgttgaaggctagctcatcgatccttctaacaagaggtgcaaaacaatgcgttcaccactgggagcgtgggagagaccaacagcgagcagttgcttcttgaagggtacttcaagtgcgtgccgttggacgcttgaagtgagggagcccacgcggaagggtgaacggacggatgcacctcaccgtggcccacttgttgcccgcatagagaccaaggcctcccccacgcaagagtgctccctggtctatgactctctatcttgtctcgctaaaggctgtgggctctgggcatgccccc

SEQ ID NO: 324465 - DNA, 2097 bp, Homo sapiens
tacagcggcggtacgcaccgggagtaaggatcggctggctgggccttgcggcgtgaggaccccggcggcgccgcagtcccgcgagccatggcccagtccggcggggaggctcggcccgggcccaagacggcggtgcagatccgcgtcgccatccaggaggccgaggacgtggacgagttggaggacgaggaggagggggcggagactcggggcgccggggacccggcccggtacctcagccccggctggggcagcgcgagcgaggaggagccgagccgcgggcacagtggcaccactgcaagtggaggtgagaacgagcgtgaggacctggagcaggagtggaagcccccggatgaggagttgatcaagaaactggtggatcagatcgaattctacttttctgatgaaaacctggagaaggacgcctttttgctaaaacacgtgaggaggaacaagctgggatatgtgagcgttaagctactcacatccttcaaaaaggtgaaacatcttacacgggactggagaaccacagcacatgctttgaagtattcagtggtccttgagttgaatgaggaccaccggaaggtgaggaggaccacccccgtcccactgttccccaacgagaacctccccagcaagatgctcctggtctatgatctctacttgtctcctaagctgtgggctctggccaccccccagaagaatggaagggtgcaagagaaggtgatggaacacctgctcaagctttttgggacttttggagtcatctcatcagtgcggatcctcaaacctgggagagagctgccccctgacatccggaggatcagcagccgctacagccaagtggggacccaggagtgcgccatcgtggagttcgaggaggtggaagcagccatcaaagcccatgagttcatgatcacagaatctcagggcaaagagaacatgaaagctgtcctgattggtatgaagccacccaaaaagaaacctgccaaagacaaaaatcatgacgaggagcccactgcgagcatccacctgaacaagtccctgaacaagagagtcgaggagcttcagtacatgggtgatgagtcttctgccaacagctcctctgaccccgagagcaaccccacatcccctatggcgggccgacggcacgcggccaccaacaagctcagcccgtctggccaccagaatctctttctgagtccaaatgcctccccgtgcacaagtccttggagcagccccttggcccaacgcaaaggcgtttccagaaagtccccactggcggaggaaggtagactgaactgcagcaccagccctgagatcttccgcaagtgtatggattattcctctgacagcagcgtcactccctctggcagcccctgggtccggaggcgtcgccaagccgagatggggacccaggagaaaagccccggtacgagtcccctgctctcccggaagatgcagactgcagatgggctacccgtaggggtgctgaggttgcccaggggtcctgacaacaccagaggatttcatggccatgagaggagcagggcctgtgtataaataccttctatttttaatacaagctccactgaaaaccaccttcgttttcaaggttctgacaaacacctggcatgacagaatggaattcgttcccctttgagagattttttattcatgtagacctcttaatttatctatctgtaatatacataaatcggtacgccatggtttgaagaccaccttctagttcaggactcctgttcttcccagcatggccactattttgatgatggctgatgtgtgtgagtgtgatggccctgaagggctgtaggacggaggttccctgggggaagtctgttctttggtatggaatttttctctcttctttggtatggaatttttcccttcagtgactgagctgtcctcgataggccatgcaagggcttcctgagagttcaggaaagttctcttgtgcaacagcaagtagctaagcctatagcatggtgtcttgtaggaccaaatcgatgttacctgtcaagtaaataaataataaaacacccaactgggagtgctgactttgaggttataaaaaaa

SEQ ID NO: 324466 - DNA, 1690 bp, Homo sapiens
cccgccccctcgtcgcagtcactgccgaccggctggctgggccttgcggcgtgaggaccccggcggcgccgcagtcccgcgagccatggcccagtccggcggggaggctcggcccgggcccaagacggcggtgcagatccgcgtcgccatccaggaggccgaggacgtggacgagttggaggacgaggaggagggggcggagactcggggcgccggggacccggcccggtacctcagccccggctggggcagcgcgagcgaggaggagccgagccgcgggcacagtggcaccactgcaagtggaggtgagaacgagcgtgaggacctggagcaggagtggaagcccccggatgaggagttgatcaagaaactggtggatcagatcgaattctacttttctgatgaaaacctggagaaggacgcctttttgctaaaacacgtgaggaggaacaagctgggatatgtgagcgttaagctactcacatccttcaaaaaggtgaaacatcttacacgggactggagaaccacagcacatgctttgaagtattcagtggtccttgagttgaatgaggaccaccggaaggtgaggaggaccacccccgtcccactgttccccaacgagaacctccccagcaagatgctcctggtctatgatctctacttgtctcctaagctgtgggctctggccaccccccagaagaatggaagggtgcaagagaaggtgatggaacacctgctcaagctttttgggacttttggagtcatctcatcagtgcggatcctcaaacctgggagagagctgccccctgacatccggaggatcagcagccgctacagccaagtggggacccaggagtgcgccatcgtggagttcgaggaggaaggtagactgaactgcagcaccagccctgagatcttccgcaagtgtatggattattcctctgacagcagcgtcactccctctggcagcccctgggtccggaggcgtcgccaagccgagatggggacccaggagaaaagccccggtacgagtcccctgctctcccggaagatgcagactgcagatgggctacccgtaggggtgctgaggttgcccaggggtcctgacaacaccagaggatttcatggccatgagaggagcagggcctgtgtataaataccttctatttttaatacaagctccactgaaaaccaccttcgttttcaaggttctgacaaacacctggcatgacagaatggaattcgttcccctttgagagattttttattcatgtagacctcttaatttatctatctgtaatatacataaatcggtacgccatggtttgaagaccaccttctagttcaggactcctgttcttcccagcatggccactattttgatgatggctgatgtgtgtgagtgtgatggccctgaagggctgtaggacggaggttccctgggggaagtctgttctttggtatggaatttttctctcttctttggtatggaatttttcccttcagtgactgagctgtcctcgataggccatgcaagggcttcctgagagttcaggaaagttctcttgtgcaacagcaagtagctaagcctatagcatggtgtcttgtaggaccaaatcgatgttacctgtcaagtaaataaataataaaacacccaactgggagtgctgactttgaggttataaaaaaa

SEQ ID NO: 324467 - DNA, 581 bp, Homo sapiens
tacagcggcggtacgcaccgggagtaaggatcggctggctgggccttgcggcgtgaggaccccggcggcgccgcagtcccgcgagccatggcccagtccggcggggaggctcggcccgggcccaagacggcggtgcagatccgcgtcgccatccaggaggccgaggacgtggacgagttggaggacgaggaggagggggcggagactcggggcgccggggacccggcccggtacctcagccccggctggggcagcgcgagcgaggaggagccgagccgcgggcacaggaataggagctcggtgaattcaaggaccatgcttgcttcgttcattgtatcttcagcacctagcacagcacccagcacataggacatgtttgttgactgaatgcgtatctctatcatcacactcactcaatggtgttgagatatttgtgtttccccttccctagacagtgagatccttgaaggcagctgccttatcttattcctttttgtatttccatacctagcctaatacctagcttatataagggaacagaataaatgaacaataaagaaaagtctttacagcctctaaaa

SEQ ID NO: 324468 - DNA, 1399 bp, Homo sapiens
tttttttgagaacttgcttcaggctaaacttcagcataggaactttgcccaaaagttaataggttttccaaatactgcaatgtagttagcccactcgggatgtaacttgagtggaaagaagagttaccgcccccactcccattccctctcctatttgcaggcctgttgtatagtctcctgtcggagaccaaagggttttggaactcagaaaaaatcacttaacctgatgacaaaaacccgggttaaggaggaggaaagaaggaaaaacaatttagctgcttgcctaaacacttcaatttgtcttaggccagtactgatgcaggcactgcaggagccctgactccacagcatgttcgagctcattcctctccagcttctctgcagttgggagctgtttctcctgggacactgacccccactggagtagtctctggcccagcagctacacccacagctcagcatcttcgacagtcttcttttgagatacctgatgatgtacctctgccagcaggttgggagatggcaaagacatcttctggtcagagatacttcttaaatcacatcgatcagacaacaacatggcaggaccccaggaaggccatgctgtcccagatgaacgtcacagcccccaccagtccaccagtgcagcagaatatgatgaactcggcttcaggtcctcttcctgatggatgggaacaagccatgactcaggatggagaaatttactatataaaccataagaacaagaccacctcttggctagacccaaggcttgaccctcgttttggtaaaggttcatctcaaaacctttttagatgcttttggttgctaattttttttgtaaatatacttcggaaagcacatttaaataaaatcgcattgctttatagtattaaaaaatgaccctgcccacccaatgtttaccagtagtgtttttatccttctcattgtaaacttgagaaatttagatctgaatcagatttttagggctcctcaggttggggtgggggaatgtcataatggccgactaaccagaatcacttgttcctttcacattttgggagaaacacagtgattgtttttaaaatgtttttttttttttagctgcaataataatcaggctgtcatgcaacacctcagaccaggagtaccagcttttgtcagtgacctgatgtctgcttgtgcttaggttctgagagtgatgagtaccatcttatgcctgggtgttgtagtgtttcccatcctaaggaggaacatgtcaccccagaaatggcccagtgaaagcattttgccccctcttctgtctctctcgaaaaataaatgtttttttttcttcattcagaaaacaaagaaagccatattcccctccagatctcatgaataaatcacatttgcacaa

SEQ ID NO: 324469 - DNA, 718 bp, Homo sapiens
cagacattgcaggacaggaattttcactaatcctctttgagaattatgttgctgctcagcaggtgtttatttttaccttgaattgatttttaaaattttttgtgttggtctttaactgtcatgtttatgtagtggcacctatcactctcgagatgagagtacagacagtggactaagcatgagcagctacagtgtccctcgaaccccagatgacttcctgaacagtgtggatgagatggatacaggttggtattctttattcctcttagtaacctgacttaacagtcggatatgttatcaccaggtctcataaggtattgtaagcaaagatgattcagaagaaaaccaattaaaatcctgtaaatttgaattaaattgatcctgctttgtctctatacggtgatttgtaacttgtcttttcctagtttaaaaaaatatatatcatggattggccgggtgcagtggctcatgcctctaattccagcattttgggaggccaaagtgggtgtattgtttgagcccaggagttcaagaccagtctgggcaacatggtgaaaccccatctctataaaaaaacatacaaaaataagtcagctgtcatggtacatgcctgtagtcccagctactcaggaggctgaggtgggaggatggattgagccccggtgatcacaccactgcactccagtttgggtgacagaatgagacctcttctcaaaaa

SEQ ID NO: 324470 - DNA, 649 bp, Homo sapiens
ttattctcaaacttactctgggtgatgggtcctggacagaatagcttcacttcctttaaaggtaacttctttgtttcatctttactgcctactgtgtcgtcttttcttatgttgaagttgacagacctgctctattctcatactaatagactatttttagatttttttaaagtaatcacaataaattcagtatatcttaagtcttttggcttcctgtgaacttcttcccttgacagtttatcttagcactgaaacatcaaatatattgtatctgctttatctaatactcagaaacaaagaacctacatgaccaatatcaaattttattttttagttctgactcctaaagtcttgctgtcctatcctcaatgctgttaaaaacttctgaggttccagttttgttatgtggtgactccattggctcctgtcttcgtcagtctgcttcttcttgggtagcttgggaattctgtgctatggtgatatgtctggatacaatttgtaagtcagcctacacagccagaccatgtggcttaaagtaatttttatccgtcttattttttactcttaggcaatgcggaatatcaatcccagcacagcaaattctccaaaatgtcaggtaggctcttatctgatgttttagcactggaaa

SEQ ID NO: 324471 - DNA, 4828 bp, Homo sapiens
  misc_feature (4802)..(4803): n is a, c, g, or t
  misc_feature (4805)..(4805): n is a, c, g, or t
  misc_feature (4812)..(4812): n is a, c, g, or t
  misc_feature (4818)..(4818): n is a, c, g, or t
cgccagggaaaagaaagggaggaaggaaggaacaagaaaaggaaataaagagaaaggggaggcggggaaaggcaacgagctgtccggcctccgtcaagggagttggagggaaaaagttctcaggcgccgcaggtccgagtgcctcgcagcccctcccgaggcgcagccgccagaccagtggagccggggcgcagggcgggggcggaggcgccggggcgggggatgcggggccgcggcgcagccccccggccctgagagcgaggacagcgccgcccggcccgcagccgtcgccgcttctccacctcggcccgtggagccggggcgtccgggcgtagccctcgctcgcctgggtcagggggtgcgcgtcgggggaggcagaagccatggatcccgggcagcagccgccgcctcaaccggccccccagggccaagggcagccgccttcgcagcccccgcaggggcagggcccgccgtccggacccgggcaaccggcacccgcggcgacccaggcggcgccgcaggcaccccccgccgggcatcagatcgtgcacgtccgcggggactcggagaccgacctggaggcgctcttcaacgccgtcatgaaccccaagacggccaacgtgccccagaccgtgcccatgaggctccggaagctgcccgactccttcttcaagccgccggagcccaaatcccactcccgacaggccagtactgatgcaggcactgcaggagccctgactccacagcatgttcgagctcattcctctccagcttctctgcagttgggagctgtttctcctgggacactgacccccactggagtagtctctggcccagcagctacacccacagctcagcatcttcgacagtcttcttttgagatacctgatgatgtacctctgccagcaggttgggagatggcaaagacatcttctggtcagagatacttcttaaatcacatcgatcagacaacaacatggcaggaccccaggaaggccatgctgtcccagatgaacgtcacagcccccaccagtccaccagtgcagcagaatatgatgaactcggcttcagccatgaaccagagaatcagtcagagtgctccagtgaaacagccaccacccctggctccccagagcccacagggaggcgtcatgggtggcagcaactccaaccagcagcaacagatgcgactgcagcaactgcagatggagaaggagaggctgcggctgaaacagcaagaactgcttcggcaggtgaggagttagccctgcgtagccagttaccaacactggagcaggatggtgggactcaaaatccagtgtcttctcccgggatgtctcaggaattgagaacaatgacgaccaatagctcagatcctttccttaacagtggcacctatcactctcgagatgagagtacagacagtggactaagcatgagcagctacagtgtccctcgaaccccagatgacttcctgaacagtgtggatgagatggatacaggtgatactatcaaccaaagcaccctgccctcacagcagaaccgtttcccagactaccttgaagccattcctgggacaaatgtggaccttggaacactggaaggagatggaatgaacatagaaggagaggagctgatgccaagtctgcaggaagctttgagttctgacatccttaatgacatggagtctgttttggctgccaccaagctagataaagaaagctttcttacatggttatagagccctcaggcagactgaattctaaatctgtgaaggatctaaggagacacatgcaccggaaatttccataagccagttgcagttttcaggctaatacagaaaaagatgaacaaacgtccagcaagatactttaatcctctattttgctcttccttgtccattgctgctgttaatgtattgctgacctctttcacagttggctctaaagaatcaaaagaaaaaaactttttatttcttttgctattaaaactactgttcattttgggggctgggggaagtgagcctgtttggatgatggatgccattccttttgcccagttaaatgttcaccaatcattttaactaggcaaatgaccatattagtgaatctgttaatagttgtagcttgggatggttattgtagttgttttggtaaaatcttcatttcctggttttttttaccaccttatttaaatctcgattatctgctctctcttttatatacatacacacacccaaacataacatttataatagtgtggtagtggaatgtatccttttttaggtttccctgctttccagttaatttttaaaatggtagcgctttgtatgcatttagaatacatgactagtagtttatatttcactggtagtttaaatctggttggggcagtctgcagatgtttgaagtagtttagtgttctagaaagagctattactgtggatagtgcctaggggagtgctccacgccctctgggcatacggtagatattatctgatgaattggaaaggagcaaaccagaaatggctttattttctcccttggactaatttttaagtctcgattggaaatcagtgagtaggttcataatgtgcatgacagaaataagctttatagtggtttaccttcatttagctttggaagttttctttgccttagttttggaagtaaattctagtttgtagttctcatttgtaatgaacacattaacgactagattaaaatattgccttcaagattgttcttacttacaagacttgctcctacttctatgctgaaaattgaccctggatagaatactataaggttttgagttagctggaaaagtgatcagattaataaatgtatattggtagttgaatttagcaaagaaatagagataatcatgattatacctttatttttacaggaagagatgatgtaactagagtatgtgtctacaggagtaataatggtttccaaagagtattttttaaaggaacaaaacgagcatgaattaactcttcaatataagctatgaagtaatagttggttgtgaattaaagtggcaccagctagcacctctgtgttttaagggtctttcaatgtttctagaataagcccttattttcaagggttcataacaggcataaaatctcttctcctggcaaaagctgctatgaaaagcctcagcttgggaagatagatttttttccccccaattacaaaatctaagtattttggcccttcaatttggaggagggcaaaagttggaagtaagaagttttattttaagtactttcagtgctcaaaaaaatgcaatcactgtgttgtatataatagttcataggttgatcactcataataattgactctaaggcttttattaagaaaacagcagaaagattaaatcttgaattaagtctggggggaaatggccactgcagatggagttttagagtagtaatgaaattctacctagaatgcaaaattgggtatatgaattacatagcatgttgttgggattttttttaatgtgcagaagatcaaagctacttggaaggagtgcctataatttgccagtagccacagattaagattatatcttatatatcagcagattagctttagcttagggggagggtgggaaagtttggggggggggttgtgaagatttagggggaccttgatagagaactttataaacttctttctctttaataaagacttgtcttacaccgtgctgccattaaaggcagctgttctagagtttcagtcacctaagtacacccacaaaacaatatgaatatggagatcttcctttacccctcaactttaatttgcccagttatacctcagtgttgtagcagtactgtgatacctggcacagtgctttgatcttacgatgccctctgtactgacctgaaggagacctaagagtcctttccctttttgagtttgaatcatagccttgatgtggtctcttgttttatgtccttgttcctaatgtaaaagtgcttaactgcttcttggttgtattgggtagcattgggataagattttaactgggtattcttgaattgcttttacaataaaccaattttataatctttaaatttatcaactttttacatttgtgttattttcagtcagggcttcttagatctacttatggttgatggagcacattgatttggagtttcagatcttccaaagcactatttgttgtaataacttttctaaatgtagtgcctttaaaggaaaaatgaacacagggaagtgactttgctacaaataatgttgctgtgttaagtattcatattaaatacatgccttctatatggaacatggcagaaagactgaaaaataacagtaattaattgtgtaattcagaattcataccaatcagtgttgaaactcaaacattgcaaaagtgggtggcaatattcagtgcttaacacttttctagcgttggtacatctgagaaatgagtgctcaggtggattttatcctcgcaagcatgttgttataagaattgtgggtgtgcctatcataacaattgttttctgtatcttgaaaaagtattctccacattttaaatgttttatattagagaattctttaatgcacacttgtcaaatatatatatatagtaccaatgttacctttttattttttgttttagatgtaagagcatgctcatatgttaggtacttacataaattgttacattattttttcttatgtaatacctttttgtttgtttatgtggttcaaatatattctttccttaaaaaaaaaaaaaaaaaaaaaaaaaaattnngnggcggcngggccnaaaaaagttt

SEQ ID NO: 324472 - DNA, 2717 bp, Homo sapiens
caaatacaataacaatgtcatttgaccagcctacgcctgccgaaaattctgcgatatattcgaccacgcatcgctaggcaatatgaacatattatggtaacatctagtaactacctagtatcttgctatggtcatagctttcaaagactctcctgtttaccaccttatactcatatgctctctctatatactacccccataatatattggaatgtatccttttttaggtttccctgctttccagttaatttttaaaatggtagcgctttgtatgcatttagaatacatgactagtagtttatatttcactggtagtttaaatctggttggggcagtctgcagatgtttgaagtagtttagtgttctagaaagagctattactgtggatagtgcctaggggagtgctccacgccctctgggcatacggtagatattatctgatgaattggaaaggagcaaaccagaaatggctttattttctcccttggactaatttttaagtctcgattggaaatcagtgagtaggttcataatgtgcatgacagaaataagctttatagtggtttaccttcatttagctttggaagttttctttgccttagttttggaagtaaattctagtttgtagttctcatttgtaatgaacacattaacgactagattaaaatattgccttcaagattgttcttacttacaagacttgctcctacttctatgctgaaaattgaccctggatagaatactataaggttttgagttagctggaaaagtgatcagattaataaatgtatattggtagttgaatttagcaaagaaatagagataatcatgattatacctttatttttacaggaagagatgatgtaactagagtatgtgtctacaggagtaataatggtttccaaagagtattttttaaaggaacaaaacgagcatgaattaactcttcaatataagctatgaagtaatagttggttgtgaattaaagtggcaccagctagcacctctgtgttttaagggtctttcaatgtttctagaataagcccttattttcaagggttcataacaggcataaaatctcttctcctggcaaaagctgctatgaaaagcctcagcttgggaagatagatttttttccccccaattacaaaatctaagtattttggcccttcaatttggaggagggcaaaagttggaagtaagaagttttattttaagtactttcagtgctcaaaaaaatgcaatcactgtgttgtatataatagttcataggttgatcactcataataattgactctaaggcttttattaagaaaacagcagaaagattaaatcttgaattaagtctggggggaaatggccactgcagatggagttttagagtagtaatgaaattctacctagaatgcaaaattgggtatatgaattacatagcatgttgttgggattttttttaatgtgcagaagatcaaagctacttggaaggagtgcctataatttgccagtagccacagattaagattatatcttatatatcagcagattagctttagcttagggggagggtgggaaagtttggggggggggttgtgaagatttagggggaccttgatagagaactttataaacttctttctctttaataaagacttgtcttacaccgtgctgccattaaaggcagctgttctagagtttcagtcacctaagtacacccacaaaacaatatgaatatggagatcttcctttacccctcaactttaatttgcccagttatacctcagtgttgtagcagtactgtgatacctggcacagtgctttgatcttacgatgccctctgtactgacctgaaggagacctaagagtcctttccctttttgagtttgaatcatagccttgatgtggtctcttgttttatgtccttgttcctaatgtaaaagtgcttaactgcttcttggttgtattgggtagcattgggataagattttaactgggtattcttgaattgcttttacaataaaccaattttataatctttaaatttatcaactttttacatttgtgttattttcagtcagggcttcttagatctacttatggttgatggagcacattgatttggagtttcagatcttccaaagcactatttgttgtaataacttttctaaatgtagtgcctttaaaggaaaaatgaacacagggaagtgactttgctacaaataatgttgctgtgttaagtattcatattaaatacatgccttctatatggaacatggcagaaagactgaaaaataacagtaattaattgtgtaattcagaattcataccaatcagtgttgaaactcaaacattgcaaaagtgggtggcaatattcagtgcttaacacttttctagcgttggtacatctgagaaatgagtgctcaggtggattttatcctcgcaagcatgttgttataagaattgtgggtgtgcctatcataacaattgttttctgtatcttgaaaaagtattctccacattttaaatgttttatattagagaattctttaatgcacacttgtcaaatatatatatatagtaccaatgttacctttttattttttgttttagatgtaagagcatgctcatatgttaggtacttacataaattgttacattattttttcttatgtaatacctttttgtttgtttatgtggttcaaatatattctttccttaaa

SEQ ID NO: 324473 - DNA, 5182 bp, Homo sapiens
cgccagggaaaagaaagggaggaaggaaggaacaagaaaaggaaataaagagaaaggggaggcggggaaaggcaacgagctgtccggcctccgtcaagggagttggagggaaaaagttctcaggcgccgcaggtccgagtgcctcgcagcccctcccgaggcgcagccgccagaccagtggagccggggcgcagggcgggggcggaggcgccggggcgggggatgcggggccgcggcgcagccccccggccctgagagcgaggacagcgccgcccggcccgcagccgtcgccgcttctccacctcggcccgtggagccggggcgtccgggcgtagccctcgctcgcctgggtcagggggtgcgcgtcgggggaggcagaagccatggatcccgggcagcagccgccgcctcaaccggccccccagggccaagggcagccgccttcgcagcccccgcaggggcagggcccgccgtccggacccgggcaaccggcacccgcggcgacccaggcggcgccgcaggcaccccccgccgggcatcagatcgtgcacgtccgcggggactcggagaccgacctggaggcgctcttcaacgccgtcatgaaccccaagacggccaacgtgccccagaccgtgcccatgaggctccggaagctgcccgactccttcttcaagccgccggagcccaaatcccactcccgacaggccagtactgatgcaggcactgcaggagccctgactccacagcatgttcgagctcattcctctccagcttctctgcagttgggagctgtttctcctgggacactgacccccactggagtagtctctggcccagcagctacacccacagctcagcatcttcgacagtcttcttttgagatacctgatgatgtacctctgccagcaggttgggagatggcaaagacatcttctggtcagagatacttcttaaatcacatcgatcagacaacaacatggcaggaccccaggaaggccatgctgtcccagatgaacgtcacagcccccaccagtccaccagtgcagcagaatatgatgaactcggcttcagccatgaaccagagaatcagtcagagtgctccagtgaaacagccaccacccctggctccccagagcccacagggaggcgtcatgggtggcagcaactccaaccagcagcaacagatgcgactgcagcaactgcagatggagaaggagaggctgcggctgaaacagcaagaactgcttcggcaggtgaggagttagccctgcgtagccagttaccaacactggagcaggatggtgggactcaaaatccagtgtcttctcccgggatgtctcaggaattgagaacaatgacgaccaatagctcagatcctttccttaacagtggcacctatcactctcgagatgagagtacagacagtggactaagcatgagcagctacagtgtccctcgaaccccagatgacttcctgaacagtgtggatgagatggatacaggtgatactatcaaccaaagcaccctgccctcacagcagaaccgtttcccagactaccttgaagccattcctgggacaaatgtggaccttggaacactggaaggagatggaatgaacatagaaggagaggagctgatgccaagtctgcaggaagctttgagttctgacatccttaatgacatggagtctgttttggctgccaccaagctagataaagaaagctttcttacatggttatagagccctcaggcagactgaattctaaatctgtgaaggatctaaggagacacatgcaccggaaatttccataagccagttgcagttttcaggctaatacagaaaaagatgaacaaacgtccagcaagatactttaatcctctattttgctcttccttgtccattgctgctgttaatgtattgctgacctctttcacagttggctctaaagaatcaaaagaaaaaaactttttatttcttttgctattaaaactactgttcattttgggggctgggggaagtgagcctgtttggatgatggatgccattccttttgcccagttaaatgttcaccaatcattttaactaggcaaatgaccatattagtgaatctgttaatagttgtagcttgggatggttattgtagttgttttggtaaaatcttcatttcctggttttttttaccaccttatttaaatctcgattatctgctctctcttttatatacatacacacacccaaacataacatttataatagtgtggtagtggaatgtatccttttttaggtttccctgctttccagttaatttttaaaatggtagcgctttgtatgcatttagaatacatgactagtagtttatatttcactggtagtttaaatctggttggggcagtctgcagatgtttgaagtagtttagtgttctagaaagagctattactgtggatagtgcctaggggagtgctccacgccctctgggcatacggtagatattatctgatgaattggaaaggagcaaaccagaaatggctttattttctcccttggactaatttttaagtctcgattggaaatcagtgagtaggttcataatgtgcatgacagaaataagctttatagtggtttaccttcatttagctttggaagttttctttgccttagttttggaagtaaattctagtttgtagttctcatttgtaatgaacacattaacgactagattaaaatattgccttcaagattgttcttacttacaagacttgctcctacttctatgctgaaaattgaccctggatagaatactataaggttttgagttagctggaaaagtgatcagattaataaatgtatattggtagttgaatttagcaaagaaatagagataatcatgattatacctttatttttacaggaagagatgatgtaactagagtatgtgtctacaggagtaataatggtttccaaagagtattttttaaaggaacaaaacgagcatgaattaactcttcaatataagctatgaagtaatagttggttgtgaattaaagtggcaccagctagcacctctgtgttttaagggtctttcaatgtttctagaataagcccttattttcaagggttcataacaggcataaaatctcttctcctggcaaaagctgctatgaaaagcctcagcttgggaagatagatttttttccccccaattacaaaatctaagtattttggcccttcaatttggaggagggcaaaagttggaagtaagaagttttattttaagtactttcagtgctcaaaaaaatgcaatcactgtgttgtatataatagttcataggttgatcactcataataattgactctaaggcttttattaagaaaacagcagaaagattaaatcttgaattaagtctggggggaaatggccactgcagatggagttttagagtagtaatgaaattctacctagaatgcaaaattgggtatatgaattacatagcatgttgttgggattttttttaatgtgcagaagatcaaagctacttggaaggagtgcctataatttgccagtagccacagattaagattatatcttatatatcagcagattagctttagcttagggggagggtgggaaagtttggggggggggttgtgaagatttagggggaccttgatagagaactttataaacttctttctctttaataaagacttgtcttacaccgtgctgccattaaaggcagctgttctagagtttcagtcacctaagtacacccacaaaacaatatgaatatggagatcttcctttacccctcaactttaatttgcccagttatacctcagtgttgtagcagtactgtgatacctggcacagtgctttgatcttacgatgccctctgtactgacctgaaggagacctaagagtcctttccctttttgagtttgaatcatagccttgatgtggtctcttgttttatgtccttgttcctaatgtaaaagtgcttaactgcttcttggttgtattgggtagcattgggataagattttaactgggtattcttgaattgcttttacaataaaccaattttataatctttaaatttatcaactttttacatttgtgttattttcagtcagggcttcttagatctacttatggttgatggagcacattgatttggagtttcagatcttccaaagcactatttgttgtaataacttttctaaatgtagtgcctttaaaggaaaaatgaacacagggaagtgactttgctacaaataatgttgctgtgttaagtattcatattaaatacatgccttctatatggaacatggcagaaagactgaaaaataacagtaattaattgtgtaattcagaattcataccaatcagtgttgaaactcaaacattgcaaaagtgggtggcaatattcagtgcttaacacttttctagcgttggtacatctgagaaatgagtgctcaggtggattttatcctcgcaagcatgttgttataagaattgtgggtgtgcctatcataacaattgttttctgtatcttgaaaaagtattctccacattttaaatgttttatattagagaattctttaatgcacacttgtcaaatatatatatatagtaccaatgttacctttttattttttgttttagatgtaagagcatgctcatatgttaggtacttacataaattgttacattattttttcttatgtaatacctttttgtttgtttatgtggttcaaatatattctttccttaaaaaaaaaaaaaaaaaaaggggcggccgccctttttttttttttaaacggccttggctattttttcaccggaaacagctcaagttttccagaattaagagccctcggggaggggacccgcttcaagatactgaaggtgacattcaagagtcccctcctaaagggaccaattctatctaaaagttgtttacgagtaactggaatctggtgtgattagtctacttctcacaagaccatcggggcatgaggtaacgaacacggttgtagatggtccggtatgaacaagagggttaccaaaaatagtcggcatttgcttgtctaagtgaagtcattataacgacaatcagtgaggacctgaaaaaaattagtgcaaggggtcgccaaaagaatttaaagttccgaaatccaat

SEQ ID NO: 324474 - DNA, 1727 bp, Homo sapiens
agaggatctcctctctatccttatctctctatccttaatctctctatccttaatttctctattcttaatctcataacaggcataaaatctcttctcctggcaaaagctgctatgaaaagcctcagcttgggaagatagatttttttccccccaattacaaaatctaagtattttggcccttcaatttggaggagggcaaaagttggaagtaagaagttttattttaagtactttcagtgctcaaaaaaatgcaatcactgtgttgtatataatagttcataggttgatcactcataataattgactctaaggcttttattaagaaaacagcagaaagattaaatcttgaattaagtctggggggaaatggccactgcagatggagttttagagtagtaatgaaattctacctagaatgcaaaattgggtatatgaattacatagcatgttgttgggattttttttaatgtgcagaagatcaaagctacttggaaggagtgcctataatttgccagtagccacagattaagattatatcttatatatcagcagattagctttagcttagggggagggtgggaaagtttggggggggggttgtgaagatttagggggaccttgatagagaactttataaacttctttctctttaataaagacttgtcttacaccgtgctgccattaaaggcagctgttctagagtttcagtcacctaagtacacccacaaaacaatatgaatatggagatcttcctttacccctcaactttaatttgcccagttatacctcagtgttgtagcagtactgtgatacctggcacagtgctttgatcttacgatgccctctgtactgacctgaaggagacctaagagtcctttccctttttgagtttgaatcatagccttgatgtggtctcttgttttatgtccttgttcctaatgtaaaagtgcttaactgcttcttggttgtattgggtagcattgggataagattttaactgggtattcttgaattgcttttacaataaaccaattttataatctttaaatttatcaactttttacatttgtgttattttcagtcagggcttcttagatctacttatggttgatggagcacattgatttggagtttcagatcttccaaagcactatttgttgtaataacttttctaaatgtagtgcctttaaaggaaaaatgaacacagggaagtgactttgctacaaataatgttgctgtgttaagtattcatattaaatacatgccttctatatggaacatggcagaaagactgaaaaataacagtaattaattgtgtaattcagaattcataccaatcagtgttgaaactcaaacattgcaaaagtgggtggcaatattcagtgcttaacacttttctagcgttggtacatctgagaaatgagtgctcaggtggattttatcctcgcaagcatgttgttataagaattgtgggtgtgcctatcataacaattgttttctgtatcttgaaaaagtattctccacattttaaatgttttatattagagaattctttaatgcacacttgtcaaatatatatatatagtaccaatgttacctttttattttttgttttagatgtaagagcatgctcatatgttaggtacttacataaattgttacattattttttcttatgtaatacctttttgtttgtttatgtggttcaaatatattctttccttaaa

SEQ ID NO: 324475 - DNA, 1126 bp, Homo sapiens
  misc_feature (9)..(9): n is a, c, g, or t
  misc_feature (17)..(17): n is a, c, g, or t
  misc_feature (22)..(22): n is a, c, g, or t
  misc_feature (43)..(43): n is a, c, g, or t
tcgtgcganttcggcangaggngagagagagagagagagagantctctttaataaagacttgtcttacaccgtgctgccattaaaggcagctgttctagagtttcagtcacctaagtacacccacaaaacaatatgaatatggagatcttcctttacccctcaactttaatttgcccagttatacctcagtgttgtagcagtactgtgatacctggcacagtgctttgatcttacgatgccctctgtactgacctgaaggagacctaagagtcctttccctttttgagtttgaatcatagccttgatgtggtctcttgttttatgtccttgttcctaatgtaaaagtgcttaactgcttcttggttgtattgggtagcattgggataagattttaactgggtattcttgaattgcttttacaataaaccaattttataatctttaaatttatcaactttttacatttgtgttattttcagtcagggcttcttagatctacttatggttgatggagcacattgatttggagtttcagatcttccaaagcactatttgttgtaataacttttctaaatgtagtgcctttaaaggaaaaatgaacacagggaagtgactttgctacaaataatgttgctgtgttaagtattcatattaaatacatgccttctatatggaacatggcagaaagactgaaaaataacagtaattaattgtgtaattcagaattcataccaatcagtgttgaaactcaaacattgcaaaagtgggtggcaatattcagtgcttaacacttttctagcgttggtacatctgagaaatgagtgctcaggtggattttatcctcgcaagcatgttgttataagaattgtgggtgtgcctatcataacaattgttttctgtatcttgaaaaagtattctccacattttaaatgttttatattagagaattctttaatgcacacttgtcaaatatatatatatagtaccaatgttacctttttattttttgttttagatgtaagagcatgctcatatgttaggtacttacataaattgttacattattttttcttatgtaatacctttttgtttgtttatgtggttcaaatatattctttccttaaa

SEQ ID NO: 324476 - DNA, 911 bp, Homo sapiens
gtatcaacgagagtgcccattacggccggggtactgacctgaaggagacctaagagtcctttccctttttgagtttgaatcatagccttgatgtggtctcttgttttatgtccttgttcctaatgtaaaagtgcttaactgcttcttggttgtattgggtagcattgggataagattttaactgggtattcttgaattgcttttacaataaaccaattttataatctttaaatttatcaactttttacatttgtgttattttcagtcagggcttcttagatctacttatggttgatggagcacattgatttggagtttcagatcttccaaagcactatttgttgtaataacttttctaaatgtagtgcctttaaaggaaaaatgaacacagggaagtgactttgctacaaataatgttgctgtgttaagtattcatattaaatacatgccttctatatggaacatggcagaaagactgaaaaataacagtaattaattgtgtaattcagaattcataccaatcagtgttgaaactcaaacattgcaaaagtgggtggcaatattcagtgcttaacacttttctagcgttggtacatctgagaaatgagtgctcaggtggattttatcctcgcaagcatgttgttataagaattgtgggtgtgcctatcataacaattgttttctgtatcttgaaaaagtattctccacattttaaatgttttatattagagaattctttaatgcacacttgtcaaatatatatatatagtaccaatgttacctttttattttttgttttagatgtaagagcatgctcatatgttaggtacttacataaattgttacattattttttcttatgtaatacctttttgtttgtttatgtggttcaaatatattctttccttaaa

SEQ ID NO: 324477 - DNA, 4024 bp, Homo sapiens
cgccagggaaaagaaagggaggaaggaaggaacaagaaaaggaaataaagagaaaggggaggcggggaaaggcaacgagctgtccggcctccgtcaagggagttggagggaaaaagttctcaggcgccgcaggtccgagtgcctcgcagcccctcccgaggcgcagccgccagaccagtggagccggggcgcagggcgggggcggaggcgccggggcgggggatgcggggccgcggcgcagccccccggccctgagagcgaggacagcgccgcccggcccgcagccgtcgccgcttctccacctcggcccgtggagccggggcgtccgggcgtagccctcgctcgcctgggtcagggggtgcgcgtcgggggaggcagaagccatggatcccgggcagcagccgccgcctcaaccggccccccagggccaagggcagccgccttcgcagcccccgcaggggcagggcccgccgtccggacccgggcaaccggcacccgcggcgacccaggcggcgccgcaggcaccccccgccgggcatcagatcgtgcacgtccgcggggactcggagaccgacctggaggcgctcttcaacgccgtcatgaaccccaagacggccaacgtgccccagaccgtgcccatgaggctccggaagctgcccgactccttcttcaagccgccggagcccaaatcccactcccgacaggccagtactgatgcaggcactgcaggagccctgactccacagcatgttcgagctcattcctctccagcttctctgcagttgggagctgtttctcctgggacactgacccccactggagtagtctctggcccagcagctacacccacagctcagcatcttcgacagtcttcttttgagatacctgatgatgtacctctgccagcaggttgggagatggcaaagacatcttctggtcagagatacttcttaaatcacatcgatcagacaacaacatggcaggaccccaggaaggccatgctgtcccagatgaacgtcacagcccccaccagtccaccagtgcagcagaatatgatgaactcggcttcagccatgaaccagagaatcagtcagagtgctccagtgaaacagccaccacccctggctccccagagcccacagggaggcgtcatgggtggcagcaactccaaccagcagcaacagatgcgactgcagcaactgcagatggagaaggagaggctgcggctgaaacagcaagaactgcttcggcaggtgaggagttagccctgcgtagccagttaccaacactggagcaggatggtgggactcaaaatccagtgtcttctcccgggatgtctcaggaattgagaacaatgacgaccaatagctcagatcctttccttaacagtggcacctatcactctcgagatgagagtacagacagtggactaagcatgagcagctacagtgtccctcgaaccccagatgacttcctgaacagtgtggatgagatggatacaggtgatactatcaaccaaagcaccctgccctcacagcagaaccgtttcccagactaccttgaagccattcctgggacaaatgtggaccttggaacactggaaggagatggaatgaacatagaaggagaggagctgatgccaagtctgcaggaagctttgagttctgacatccttaatgacatggagtctgttttggctgccaccaagctagataaagaaagctttcttacatggttatagagccctcaggcagactgaattctaaatctgtgaaggatctaaggagacacatgcaccggaaatttccataagccagttgcagttttcaggctaatacagaaaaagatgaacaaacgtccagcaagatactttaatcctctattttgctcttccttgtccattgctgctgttaatgtattgctgacctctttcacagttggctctaaagaatcaaaagaaaaaaactttttatttcttttgctattaaaactactgttcattttgggggctgggggaagtgagcctgtttggatgatggatgccattccttttgcccagttaaatgttcaccaatcattttaactaggcaaatgaccatattagtgaatctgttaatagttgtagcttgggatggttattgtagttgttttggtaaaatcttcatttcctggttttttttaccaccttatttaaatctcgattatctgctctctcttttatatacatacacacacccaaacataacatttataatagtgtggtagtggaatgtatccttttttaggtttccctgctttccagttaatttttaaaatggtagcgctttgtatgcatttagaatacatgactagtagtttatatttcactggtagtttaaatctggttggggcagtctgcagatgtttgaagtagtttagtgttctagaaagagctattactgtggatagtgcctaggggagtgctccacgccctctgggcatacggtagatattatctgatgaattggaaaggagcaaaccagaaatggctttattttctcccttggactaatttttaagtctcgattggaaatcagtgagtaggttcataatgtgcatgacagaaataagctttatagtggtttaccttcatttagctttggaagttttctttgccttagttttggaagtaaattctagtttgtagttctcatttgtaatgaacacattaacgactagattaaaatattgccttcaagattgttcttacttacaagacttgctcctacttctatgctgaaaattgaccctggatagaatactataaggttttgagttagctggaaaagtgatcagattaataaatgtatattggtagttgaatttagcaaagaaatagagataatcatgattatacctttatttttacaggaagagatgatgtaactagagtatgtgtctacaggagtaataatggtttccaaagagtattttttaaaggaacaaaacgagcatgaattaactcttcaatataagctatgaagtaatagttggttgtgaattaaagtggcaccagctagcacctctgtgttttaagggtctttcaatgtttctagaataagcccttattttcaagggttcataacaggcataaaatctcttctcctggcaaaagctgctatgaaaagcctcagcttgggaagatagatttttttccccccaattacaaaatctaagtattttggcccttcaatttggaggagggcaaaagttggaagtaagaagttttattttaagtactttcagtgctcaaaaaaatgcaatcactgtgttgtatataatagttcataggttgatcactcataataattgactctaaggcttttattaagaaaacagcagaaagattaaatcttgaattaagtctggggggaaatggccactgcagatggagttttagagtagtaatgaaattctacctagaatgcaaaattgggtatatgaattacatagcatgttgttgggattttttttaatgtgcagaagatcaaagctacttggaaggagtgcctataatttgccagtagccacagattaagattatatcttatatatcagcagattagctttagcttagggggagggtgggaaagtttggggggggggttgtgaagatttagggggaccttgatagagaactttataaacttctttctctttaataaagacttgtcttacaccgtgctgccattaaaggcagctgttctagagtttcagtcacctaagtacacccacaaaacaatatgaatatggagatcttcctttacccctcaactttaatttgcccagttatacctcagtgttgtagcagtactgtgatacctggcacagtgctttgatcttacgatgccctctgtactgacctgaaggagacctaagagtcctttccctttttgagtttgaatccagatacctttggcccatggaagccataggccctattaccgattgtgtgggagtcaaggatgcctttaccatctgcttg

SEQ ID NO: 324478 - DNA, 2423 bp, Homo sapiens
cgccagggaaaagaaagggaggaaggaaggaacaagaaaaggaaataaagagaaaggggaggcggggaaaggcaacgagctgtccggcctccgtcaagggagttggagggaaaaagttctcaggcgccgcaggtccgagtgcctcgcagcccctcccgaggcgcagccgccagaccagtggagccggggcgcagggcgggggcggaggcgccggggcgggggatgcggggccgcggcgcagccccccggccctgagagcgaggacagcgccgcccggcccgcagccgtcgccgcttctccacctcggcccgtggagccggggcgtccgggcgtagccctcgctcgcctgggtcagggggtgcgcgtcgggggaggcagaagccatggatcccgggcagcagccgccgcctcaaccggccccccagggccaagggcagccgccttcgcagcccccgcaggggcagggcccgccgtccggacccgggcaaccggcacccgcggcgacccaggcggcgccgcaggcaccccccgccgggcatcagatcgtgcacgtccgcggggactcggagaccgacctggaggcgctcttcaacgccgtcatgaaccccaagacggccaacgtgccccagaccgtgcccatgaggctccggaagctgcccgactccttcttcaagccgccggagcccaaatcccactcccgacaggccagtactgatgcaggcactgcaggagccctgactccacagcatgttcgagctcattcctctccagcttctctgcagttgggagctgtttctcctgggacactgacccccactggagtagtctctggcccagcagctacacccacagctcagcatcttcgacagtcttcttttgagatacctgatgatgtacctctgccagcaggttgggagatggcaaagacatcttctggtcagagatacttcttaaatcacatcgatcagacaacaacatggcaggaccccaggaaggccatgctgtcccagatgaacgtcacagcccccaccagtccaccagtgcagcagaatatgatgaactcggcttcagccatgaaccagagaatcagtcagagtgctccagtgaaacagccaccacccctggctccccagagcccacagggaggcgtcatgggtggcagcaactccaaccagcagcaacagatgcgactgcagcaactgcagatggagaaggagaggctgcggctgaaacagcaagaactgcttcggcaggtgaggagttagccctgcgtagccagttaccaacactggagcaggatggtgggactcaaaatccagtgtcttctcccgggatgtctcaggaattgagaacaatgacgaccaatagctcagatcctttccttaacagtggcacctatcactctcgagatgagagtacagacagtggactaagcatgagcagctacagtgtccctcgaaccccagatgacttcctgaacagtgtggatgagatggatacaggtgatactatcaaccaaagcaccctgccctcacagcagaaccgtttcccagactaccttgaagccattcctgggacaaatgtggaccttggaacactggaaggagatggaatgaacatagaaggagaggagctgatgccaagtctgcaggaagctttgagttctgacatccttaatgacatggagtctgttttggctgccaccaagctagataaagaaagctttcttacatggttatagagccctcaggcagactgaattctaaatctgtgaaggatctaaggagacacatgcaccggaaatttccataagccagttgcagttttcaggctaatacagaaaaagatgaacaaacgtccagcaagatactttaatcctctattttgctcttccttgtccattgctgctgttaatgtattgctgacctctttcacagttggctctaaagaatcaaaagaaaaaaactttttatttcttttgctattaaaactactgttcattttgggggctgggggaagtgagcctgtttggatgatggatgccattccttttgcccagttaaatgttcaccaatcattttaactaaatactcagacttagaagtcagatgcttcatgtcacagcatttagtttgttcaacagttgtttcttcagcttcctttgtccagtggaaaaacatgatttactggtctgacaagccaaaaatgttatatctgatattaaatacttaatgctgatttgaagagatagctgaaaccaaggctgaagactgttttactttcagtattttcttttcctcctagtgctatcattagtcacataatgaccttgattttattttaggagcttataaggcatgagacaatttccatataaatatattaattattgccacatactctaatatagattttggtgataa

SEQ ID NO: 324479 - DNA, 2451 bp, Homo sapiens
cgccagggaaaagaaagggaggaaggaaggaacaagaaaaggaaataaagagaaaggggaggcggggaaaggcaacgagctgtccggcctccgtcaagggagttggagggaaaaagttctcaggcgccgcaggtccgagtgcctcgcagcccctcccgaggcgcagccgccagaccagtggagccggggcgcagggcgggggcggaggcgccggggcgggggatgcggggccgcggcgcagccccccggccctgagagcgaggacagcgccgcccggcccgcagccgtcgccgcttctccacctcggcccgtggagccggggcgtccgggcgtagccctcgctcgcctgggtcagggggtgcgcgtcgggggaggcagaagccatggatcccgggcagcagccgccgcctcaaccggccccccagggccaagggcagccgccttcgcagcccccgcaggggcagggcccgccgtccggacccgggcaaccggcacccgcggcgacccaggcggcgccgcaggcaccccccgccgggcatcagatcgtgcacgtccgcggggactcggagaccgacctggaggcgctcttcaacgccgtcatgaaccccaagacggccaacgtgccccagaccgtgcccatgaggctccggaagctgcccgactccttcttcaagccgccggagcccaaatcccactcccgacaggccagtactgatgcaggcactgcaggagccctgactccacagcatgttcgagctcattcctctccagcttctctgcagttgggagctgtttctcctgggacactgacccccactggagtagtctctggcccagcagctacacccacagctcagcatcttcgacagtcttcttttgagatacctgatgatgtacctctgccagcaggttgggagatggcaaagacatcttctggtcagagatacttcttaaatcacatcgatcagacaacaacatggcaggaccccaggaaggccatgctgtcccagatgaacgtcacagcccccaccagtccaccagtgcagcagaatatgatgaactcggcttcagccatgaaccagagaatcagtcagagtgctccagtgaaacagccaccacccctggctccccagagcccacagggaggcgtcatgggtggcagcaactccaaccagcagcaacagatgcgactgcagcaactgcagatggagaaggagaggctgcggctgaaacagcaagaactgcttcggcaggtgaggagttagccctgcgtagccagttaccaacactggagcaggatggtgggactcaaaatccagtgtcttctcccgggatgtctcaggaattgagaacaatgacgaccaatagctcagatcctttccttaacagtggcacctatcactctcgagatgagagtacagacagtggactaagcatgagcagctacagtgtccctcgaaccccagatgacttcctgaacagtgtggatgagatggatacaggtgatactatcaaccaaagcaccctgccctcacagcagaaccgtttcccagactaccttgaagccattcctgggacaaatgtggaccttggaacactggaaggagatggaatgaacatagaaggagaggagctgatgccaagtctgcaggaagctttgagttctgacatccttaatgacatggagtctgttttggctgccaccaagctagataaagaaagctttcttacatggttatagagccctcaggcagactgaattctaaatctgtgaaggatctaaggagacacatgcaccggaaatttccataagccagttgcagttttcaggctaatacagaaaaagatgaacaaacgtccagcaagatactttaatcctctattttgctcttccttgtccattgctgctgttaatgtattgctgacctctttcacagttggctctaaagaatcaaaagaaaaaaactttttatttcttttgctattaaaactactgttcattttgggggctgggggaagtgagcctgtttggatgatggatgccattccttttgcccagttaaatgttcaccaatcattttaactaaatactcagacttagaagtcagatgcttcatgtcacagcatttagtttgttcaacagttgtttcttcagcttcctttgtccagtggaaaaacatgatttactggtctgacaagccaaaaatgttatatctgatattaaatacttaatgctgatgggacgcccatcttgcgtcacatcaggtttaaagtccttgaatttagatcctcatccctctggggctgggagtatttctaccatagctaagtcctttgaggagcagagggaaccacatggatttgcatttcttacatgcaaaccttgctaaggtagcaatgctaatggtcagagttggagaaatgtcctcttgttctgtaattttcctttct

SEQ ID NO: 324480 - DNA, 958 bp, Homo sapiens
tttttttgagaacttgcttcaggctaaacttcagcataggaactttgcccaaaagttaataggttttccaaatactgcaatgtagttagcccactcgggatgtaacttgagtggaaagaagagttaccgcccccactcccattccctctcctatttgcaggcctgttgtatagtctcctgtcggagaccaaagggttttggaactcagaaaaaatcacttaacctgatgacaaaaacccgggttaaggaggaggaaagaaggaaaaacaatttagctgcttgcctaaacacttcaatttgtcttaggccagtactgatgcaggcactgcaggagccctgactccacagcatgttcgagctcattcctctccagcttctctgcagttgggagctgtttctcctgggacactgacccccactggagtagtctctggcccagcagctacacccacagctcagcatcttcgacagtcttcttttgagatacctgatgatgtacctctgccagcaggttgggagatggcaaagacatcttctggtcagagatacttcttaaatcacatcgatcagacaacaacatggcaggaccccaggaaggccatgctgtcccagatgaacgtcacagcccccaccagtccaccagtgcagcagaatatgatgaactcggcttcaggtgagtgagacactgtaattacagcacatggagtaatgcttacgcattggtaaaagttgatgtggaaaatagtcattactcgtttacagaaactgggacatggtgatgtttattgtctctccagtttcatacagaagacatagtctattttaaaataacgtaagctatattattgccttgtatagttgttaacgcataagggggccgataactgaaagccagtggttctttaagatttggttctgaagcgggtatctcaaatttgtagttcatcatataattttg

SEQ ID NO: 324481 - DNA, 449 bp, Homo sapiens
cgcaatgaatctgatcctcctacaaattgctgggggctggggaagtgagcctgtttggatgatggatgccattccttttgcccagttaaatgttcaccaatcattttaactaaatactcagacttagaagtcagatgcttcatgtcacagcatttagtttgttcaacagttgtttcttcagcttcctttgtccagtggaaaaacatgatttactggtctgacaagccaaaaatgttatatctgatattaaatacttaatgctgatttgaagagatagctgaaaccaaggctgaagactgttttactttcagtattttcttttcctcctagtgctatcattagtcacataatgaccttgattttattttaggagcttataaggcatgagacaatttccatataaatatattaattattgccacatactctaatatagattttggtgataa

SEQ ID NO: 324482 - DNA, 293 bp, Homo sapiens
cacacttgtcaaatatatatatatagtaccaatgttacctttttattttttgttttagatgtaagagcatgctcatatgttaggtacttacataaattgttacattattttttcttatgtaatacctttttgtttgtttatgtggttcaaatatattctttccttaaacttctttgttgtttttaacaattgatatttgaaactttttttttttttggcttcttactggtcttccaatagaacaagaactggcaataaaaggtgattacagtagtaactgggaagacaagtta

SEQ ID NO: 324483 - DNA, 682 bp, Homo sapiens
ttcatgtcacagcatttagtttgttcaacagttgtttcttcagcttcctttgtccagtggaaaaacatgatttactggtctgacaagccaaaaatgttatatctgatattaaatacttaatgctgatttgaagagatagctgaaaccaaggctgaagactgttttactttcagtattttcttttcctcctagtgctatcattagtcacataatgaccttgattttattttaggagcttataaggcatgagacaatttccatataaatatattaattattgccacatactctaatatagattttggtgataattttgtgggtgtgcattttgttctgttttgttgggttttttgttttttttgtttttggcagggtcggtgggggggttggttggttggttggttttgtcggaacctaggcaaatgaccatattagtgaatctgttaatagttgtagcttgggatggttattgtagttgttttggtaaaatcttcatttcctggttttttttaccaccttatttaaatctcgattatctgctctctcttttatatacatacacacacccaaacataacatttataatagtgtggtagtggaatgtatccttttttaggtttccctgctttccagttaatttttaaaatggtagcgctttgtatgcatttagaatacatgacta

SEQ ID NO: 324484 - DNA, 4775 bp, Homo sapiens
cgccagggaaaagaaagggaggaaggaaggaacaagaaaaggaaataaagagaaaggggaggcggggaaaggcaacgagctgtccggcctccgtcaagggagttggagggaaaaagttctcaggcgccgcaggtccgagtgcctcgcagcccctcccgaggcgcagccgccagaccagtggagccggggcgcagggcgggggcggaggcgccggggcgggggatgcggggccgcggcgcagccccccggccctgagagcgaggacagcgccgcccggcccgcagccgtcgccgcttctccacctcggcccgtggagccggggcgtccgggcgtagccctcgctcgcctgggtcagggggtgcgcgtcgggggaggcagaagccatggatcccgggcagcagccgccgcctcaaccggccccccagggccaagggcagccgccttcgcagcccccgcaggggcagggcccgccgtccggacccgggcaaccggcacccgcggcgacccaggcggcgccgcaggcaccccccgccgggcatcagatcgtgcacgtccgcggggactcggagaccgacctggaggcgctcttcaacgccgtcatgaaccccaagacggccaacgtgccccagaccgtgcccatgaggctccggaagctgcccgactccttcttcaagccgccggagcccaaatcccactcccgacaggccagtactgatgcaggcactgcaggagccctgactccacagcatgttcgagctcattcctctccagcttctctgcagttgggagctgtttctcctgggacactgacccccactggagtagtctctggcccagcagctacacccacagctcagcatcttcgacagtcttcttttgagatacctgatgatgtacctctgccagcaggttgggagatggcaaagacatcttctggtcagagatacttcttaaatcacatcgatcagacaacaacatggcaggaccccaggaaggccatgctgtcccagatgaacgtcacagcccccaccagtccaccagtgcagcagaatatgatgaactcggcttcagccatgaaccagagaatcagtcagagtgctccagtgaaacagccaccacccctggctccccagagcccacagggaggcgtcatgggtggcagcaactccaaccagcagcaacagatgcgactgcagcaactgcagatggagaaggagaggctgcggctgaaacagcaagaactgcttcggcaggtgaggagttagccctgcgtagccagttaccaacactggagcaggatggtgggactcaaaatccagtgtcttctcccgggatgtctcaggaattgagaacaatgacgaccaatagctcagatcctttccttaacagtggcacctatcactctcgagatgagagtacagacagtggactaagcatgagcagctacagtgtccctcgaaccccagatgacttcctgaacagtgtggatgagatggatacaggtgatactatcaaccaaagcaccctgccctcacagcagaaccgtttcccagactaccttgaagccattcctgggacaaatgtggaccttggaacactggaaggagatggaatgaacatagaaggagaggagctgatgccaagtctgcaggaagctttgagttctgacatccttaatgacatggagtctgttttggctgccaccaagctagataaagaaagctttcttacatggttatagagccctcaggcagactgaattctaaatctgtgaaggatctaaggagacacatgcaccggaaatttccataagccagttgcagttttcaggctaatacagaaaaagatgaacaaacgtccagcaagatactttaatcctctattttgctcttccttgtccattgctgctgttaatgtattgctgacctctttcacagttggctctaaagaatcaaaagaaaaaaactttttatttcttttgctattaaaactactgttcattttgggggctgggggaagtgagcctgtttggatgatggatgccattccttttgcccagttaaatgttcaccaatcattttaactaggcaaatgaccatattagtgaatctgttaatagttgtagcttgggatggttattgtagttgttttggtaaaatcttcatttcctggttttttttaccaccttatttaaatctcgattatctgctctctcttttatatacatacacacacccaaacataacatttataatagtgtggtagtggaatgtatccttttttaggtttccctgctttccagttaatttttaaaatggtagcgctttgtatgcatttagaatacatgactagtagtttatatttcactggtagtttaaatctggttggggcagtctgcagatgtttgaagtagtttagtgttctagaaagagctattactgtggatagtgcctaggggagtgctccacgccctctgggcatacggtagatattatctgatgaattggaaaggagcaaaccagaaatggctttattttctcccttggactaatttttaagtctcgattggaaatcagtgagtaggttcataatgtgcatgacagaaataagctttatagtggtttaccttcatttagctttggaagttttctttgccttagttttggaagtaaattctagtttgtagttctcatttgtaatgaacacattaacgactagattaaaatattgccttcaagattgttcttacttacaagacttgctcctacttctatgctgaaaattgaccctggatagaatactataaggttttgagttagctggaaaagtgatcagattaataaatgtatattggtagttgaatttagcaaagaaatagagataatcatgattatacctttatttttacaggaagagatgatgtaactagagtatgtgtctacaggagtaataatggtttccaaagagtattttttaaaggaacaaaacgagcatgaattaactcttcaatataagctatgaagtaatagttggttgtgaattaaagtggcaccagctagcacctctgtgttttaagggtctttcaatgtttctagaataagcccttattttcaagggttcataacaggcataaaatctcttctcctggcaaaagctgctatgaaaagcctcagcttgggaagatagatttttttccccccaattacaaaatctaagtattttggcccttcaatttggaggagggcaaaagttggaagtaagaagttttattttaagtactttcagtgctcaaaaaaatgcaatcactgtgttgtatataatagttcataggttgatcactcataataattgactctaaggcttttattaagaaaacagcagaaagattaaatcttgaattaagtctggggggaaatggccactgcagatggagttttagagtagtaatgaaattctacctagaatgcaaaattgggtatatgaattacatagcatgttgttgggattttttttaatgtgcagaagatcaaagctacttggaaggagtgcctataatttgccagtagccacagattaagattatatcttatatatcagcagattagctttagcttagggggagggtgggaaagtttggggggggggttgtgaagatttagggggaccttgatagagaactttataaacttctttctctttaataaagacttgtcttacaccgtgctgccattaaaggcagctgttctagagtttcagtcacctaagtacacccacaaaacaatatgaatatggagatcttcctttacccctcaactttaatttgcccagttatacctcagtgttgtagcagtactgtgatacctggcacagtgctttgatcttacgatgccctctgtactgacctgaaggagacctaagagtcctttccctttttgagtttgaatcatagccttgatgtggtctcttgttttatgtccttgttcctaatgtaaaagtgcttaactgcttcttggttgtattgggtagcattgggataagattttaactgggtattcttgaattgcttttacaataaaccaattttataatctttaaatttatcaactttttacatttgtgttattttcagtcagggcttcttagatctacttatggttgatggagcacattgatttggagtttcagatcttccaaagcactatttgttgtaataacttttctaaatgtagtgcctttaaaggaaaaatgaacacagggaagtgactttgctacaaataatgttgctgtgttaagtattcatattaaatacatgccttctatatggaacatggcagaaagactgaaaaataacagtaattaattgtgtaattcagaattcataccaatcagtgttgaaactcaaacattgcaaaagtgggtggcaatattcagtgcttaacacttttctagcgttggtacatctgagaaatgagtgctcaggtggattttatcctcgcaagcatgttgttataagaattgtgggtgtgcctatcataacaattgttttctgtatcttgaaaaagtattctccacattttaaatgttttatattagagaattctttaatgcacacttgtcaaatatatatatatagtaccaatgttacctttttattttttgttttagatgtaagagcatgctcatatgttaggtacttacataaattgttacattattttttcttatgtaatacctttttgtttgtttatgtggttcaaatatattctttccttaaa

SEQ ID NO: 324485 - DNA, 4425 bp, Homo sapiens
tttttttgagaacttgcttcaggctaaacttcagcataggaactttgcccaaaagttaataggttttccaaatactgcaatgtagttagcccactcgggatgtaacttgagtggaaagaagagttaccgcccccactcccattccctctcctatttgcaggcctgttgtatagtctcctgtcggagaccaaagggttttggaactcagaaaaaatcacttaacctgatgacaaaaacccgggttaaggaggaggaaagaaggaaaaacaatttagctgcttgcctaaacacttcaatttgtcttaggccagtactgatgcaggcactgcaggagccctgactccacagcatgttcgagctcattcctctccagcttctctgcagttgggagctgtttctcctgggacactgacccccactggagtagtctctggcccagcagctacacccacagctcagcatcttcgacagtcttcttttgagatacctgatgatgtacctctgccagcaggttgggagatggcaaagacatcttctggtcagagatacttcttaaatcacatcgatcagacaacaacatggcaggaccccaggaaggccatgctgtcccagatgaacgtcacagcccccaccagtccaccagtgcagcagaatatgatgaactcggcttcagccatgaaccagagaatcagtcagagtgctccagtgaaacagccaccacccctggctccccagagcccacagggaggcgtcatgggtggcagcaactccaaccagcagcaacagatgcgactgcagcaactgcagatggagaaggagaggctgcggctgaaacagcaagaactgcttcggcaggtgaggcaatgcggaatatcaatcccagcacagcaaattctccaaaatgtcaggagttagccctgcgtagccagttaccaacactggagcaggatggtgggactcaaaatccagtgtcttctcccgggatgtctcaggaattgagaacaatgacgaccaatagctcagatcctttccttaacagtggcacctatcactctcgagatgagagtacagacagtggactaagcatgagcagctacagtgtccctcgaaccccagatgacttcctgaacagtgtggatgagatggatacaggtgatactatcaaccaaagcaccctgccctcacagcagaaccgtttcccagactaccttgaagccattcctgggacaaatgtggaccttggaacactggaaggagatggaatgaacatagaaggagaggagctgatgccaagtctgcaggaagctttgagttctgacatccttaatgacatggagtctgttttggctgccaccaagctagataaagaaagctttcttacatggttatagagccctcaggcagactgaattctaaatctgtgaaggatctaaggagacacatgcaccggaaatttccataagccagttgcagttttcaggctaatacagaaaaagatgaacaaacgtccagcaagatactttaatcctctattttgctcttccttgtccattgctgctgttaatgtattgctgacctctttcacagttggctctaaagaatcaaaagaaaaaaactttttatttcttttgctattaaaactactgttcattttgggggctgggggaagtgagcctgtttggatgatggatgccattccttttgcccagttaaatgttcaccaatcattttaactaggcaaatgaccatattagtgaatctgttaatagttgtagcttgggatggttattgtagttgttttggtaaaatcttcatttcctggttttttttaccaccttatttaaatctcgattatctgctctctcttttatatacatacacacacccaaacataacatttataatagtgtggtagtggaatgtatccttttttaggtttccctgctttccagttaatttttaaaatggtagcgctttgtatgcatttagaatacatgactagtagtttatatttcactggtagtttaaatctggttggggcagtctgcagatgtttgaagtagtttagtgttctagaaagagctattactgtggatagtgcctaggggagtgctccacgccctctgggcatacggtagatattatctgatgaattggaaaggagcaaaccagaaatggctttattttctcccttggactaatttttaagtctcgattggaaatcagtgagtaggttcataatgtgcatgacagaaataagctttatagtggtttaccttcatttagctttggaagttttctttgccttagttttggaagtaaattctagtttgtagttctcatttgtaatgaacacattaacgactagattaaaatattgccttcaagattgttcttacttacaagacttgctcctacttctatgctgaaaattgaccctggatagaatactataaggttttgagttagctggaaaagtgatcagattaataaatgtatattggtagttgaatttagcaaagaaatagagataatcatgattatacctttatttttacaggaagagatgatgtaactagagtatgtgtctacaggagtaataatggtttccaaagagtattttttaaaggaacaaaacgagcatgaattaactcttcaatataagctatgaagtaatagttggttgtgaattaaagtggcaccagctagcacctctgtgttttaagggtctttcaatgtttctagaataagcccttattttcaagggttcataacaggcataaaatctcttctcctggcaaaagctgctatgaaaagcctcagcttgggaagatagatttttttccccccaattacaaaatctaagtattttggcccttcaatttggaggagggcaaaagttggaagtaagaagttttattttaagtactttcagtgctcaaaaaaatgcaatcactgtgttgtatataatagttcataggttgatcactcataataattgactctaaggcttttattaagaaaacagcagaaagattaaatcttgaattaagtctggggggaaatggccactgcagatggagttttagagtagtaatgaaattctacctagaatgcaaaattgggtatatgaattacatagcatgttgttgggattttttttaatgtgcagaagatcaaagctacttggaaggagtgcctataatttgccagtagccacagattaagattatatcttatatatcagcagattagctttagcttagggggagggtgggaaagtttggggggggggttgtgaagatttagggggaccttgatagagaactttataaacttctttctctttaataaagacttgtcttacaccgtgctgccattaaaggcagctgttctagagtttcagtcacctaagtacacccacaaaacaatatgaatatggagatcttcctttacccctcaactttaatttgcccagttatacctcagtgttgtagcagtactgtgatacctggcacagtgctttgatcttacgatgccctctgtactgacctgaaggagacctaagagtcctttccctttttgagtttgaatcatagccttgatgtggtctcttgttttatgtccttgttcctaatgtaaaagtgcttaactgcttcttggttgtattgggtagcattgggataagattttaactgggtattcttgaattgcttttacaataaaccaattttataatctttaaatttatcaactttttacatttgtgttattttcagtcagggcttcttagatctacttatggttgatggagcacattgatttggagtttcagatcttccaaagcactatttgttgtaataacttttctaaatgtagtgcctttaaaggaaaaatgaacacagggaagtgactttgctacaaataatgttgctgtgttaagtattcatattaaatacatgccttctatatggaacatggcagaaagactgaaaaataacagtaattaattgtgtaattcagaattcataccaatcagtgttgaaactcaaacattgcaaaagtgggtggcaatattcagtgcttaacacttttctagcgttggtacatctgagaaatgagtgctcaggtggattttatcctcgcaagcatgttgttataagaattgtgggtgtgcctatcataacaattgttttctgtatcttgaaaaagtattctccacattttaaatgttttatattagagaattctttaatgcacacttgtcaaatatatatatatagtaccaatgttacctttttattttttgttttagatgtaagagcatgctcatatgttaggtacttacataaattgttacattattttttcttatgtaatacctttttgtttgtttatgtggttcaaatatattctttccttaaa

SEQ ID NO: 324486 - DNA, 4133 bp, Homo sapiens
ttattctcaaacttactctgggtgatgggtcctggacagaatagcttcacttcctttaaaggtaacttctttgtttcatctttactgcctactgtgtcgtcttttcttatgttgaagttgacagacctgctctattctcatactaatagactatttttagatttttttaaagtaatcacaataaattcagtatatcttaagtcttttggcttcctgtgaacttcttcccttgacagtttatcttagcactgaaacatcaaatatattgtatctgctttatctaatactcagaaacaaagaacctacatgaccaatatcaaattttattttttagttctgactcctaaagtcttgctgtcctatcctcaatgctgttaaaaacttctgaggttccagttttgttatgtggtgactccattggctcctgtcttcgtcagtctgcttcttcttgggtagcttgggaattctgtgctatggtgatatgtctggatacaatttgtaagtcagcctacacagccagaccatgtggcttaaagtaatttttatccgtcttattttttactcttaggcaatgcggaatatcaatcccagcacagcaaattctccaaaatgtcaggagttagccctgcgtagccagttaccaacactggagcaggatggtgggactcaaaatccagtgtcttctcccgggatgtctcaggaattgagaacaatgacgaccaatagctcagatcctttccttaacagtggcacctatcactctcgagatgagagtacagacagtggactaagcatgagcagctacagtgtccctcgaaccccagatgacttcctgaacagtgtggatgagatggatacaggtgatactatcaaccaaagcaccctgccctcacagcagaaccgtttcccagactaccttgaagccattcctgggacaaatgtggaccttggaacactggaaggagatggaatgaacatagaaggagaggagctgatgccaagtctgcaggaagctttgagttctgacatccttaatgacatggagtctgttttggctgccaccaagctagataaagaaagctttcttacatggttatagagccctcaggcagactgaattctaaatctgtgaaggatctaaggagacacatgcaccggaaatttccataagccagttgcagttttcaggctaatacagaaaaagatgaacaaacgtccagcaagatactttaatcctctattttgctcttccttgtccattgctgctgttaatgtattgctgacctctttcacagttggctctaaagaatcaaaagaaaaaaactttttatttcttttgctattaaaactactgttcattttgggggctgggggaagtgagcctgtttggatgatggatgccattccttttgcccagttaaatgttcaccaatcattttaactaggcaaatgaccatattagtgaatctgttaatagttgtagcttgggatggttattgtagttgttttggtaaaatcttcatttcctggttttttttaccaccttatttaaatctcgattatctgctctctcttttatatacatacacacacccaaacataacatttataatagtgtggtagtggaatgtatccttttttaggtttccctgctttccagttaatttttaaaatggtagcgctttgtatgcatttagaatacatgactagtagtttatatttcactggtagtttaaatctggttggggcagtctgcagatgtttgaagtagtttagtgttctagaaagagctattactgtggatagtgcctaggggagtgctccacgccctctgggcatacggtagatattatctgatgaattggaaaggagcaaaccagaaatggctttattttctcccttggactaatttttaagtctcgattggaaatcagtgagtaggttcataatgtgcatgacagaaataagctttatagtggtttaccttcatttagctttggaagttttctttgccttagttttggaagtaaattctagtttgtagttctcatttgtaatgaacacattaacgactagattaaaatattgccttcaagattgttcttacttacaagacttgctcctacttctatgctgaaaattgaccctggatagaatactataaggttttgagttagctggaaaagtgatcagattaataaatgtatattggtagttgaatttagcaaagaaatagagataatcatgattatacctttatttttacaggaagagatgatgtaactagagtatgtgtctacaggagtaataatggtttccaaagagtattttttaaaggaacaaaacgagcatgaattaactcttcaatataagctatgaagtaatagttggttgtgaattaaagtggcaccagctagcacctctgtgttttaagggtctttcaatgtttctagaataagcccttattttcaagggttcataacaggcataaaatctcttctcctggcaaaagctgctatgaaaagcctcagcttgggaagatagatttttttccccccaattacaaaatctaagtattttggcccttcaatttggaggagggcaaaagttggaagtaagaagttttattttaagtactttcagtgctcaaaaaaatgcaatcactgtgttgtatataatagttcataggttgatcactcataataattgactctaaggcttttattaagaaaacagcagaaagattaaatcttgaattaagtctggggggaaatggccactgcagatggagttttagagtagtaatgaaattctacctagaatgcaaaattgggtatatgaattacatagcatgttgttgggattttttttaatgtgcagaagatcaaagctacttggaaggagtgcctataatttgccagtagccacagattaagattatatcttatatatcagcagattagctttagcttagggggagggtgggaaagtttggggggggggttgtgaagatttagggggaccttgatagagaactttataaacttctttctctttaataaagacttgtcttacaccgtgctgccattaaaggcagctgttctagagtttcagtcacctaagtacacccacaaaacaatatgaatatggagatcttcctttacccctcaactttaatttgcccagttatacctcagtgttgtagcagtactgtgatacctggcacagtgctttgatcttacgatgccctctgtactgacctgaaggagacctaagagtcctttccctttttgagtttgaatcatagccttgatgtggtctcttgttttatgtccttgttcctaatgtaaaagtgcttaactgcttcttggttgtattgggtagcattgggataagattttaactgggtattcttgaattgcttttacaataaaccaattttataatctttaaatttatcaactttttacatttgtgttattttcagtcagggcttcttagatctacttatggttgatggagcacattgatttggagtttcagatcttccaaagcactatttgttgtaataacttttctaaatgtagtgcctttaaaggaaaaatgaacacagggaagtgactttgctacaaataatgttgctgtgttaagtattcatattaaatacatgccttctatatggaacatggcagaaagactgaaaaataacagtaattaattgtgtaattcagaattcataccaatcagtgttgaaactcaaacattgcaaaagtgggtggcaatattcagtgcttaacacttttctagcgttggtacatctgagaaatgagtgctcaggtggattttatcctcgcaagcatgttgttataagaattgtgggtgtgcctatcataacaattgttttctgtatcttgaaaaagtattctccacattttaaatgttttatattagagaattctttaatgcacacttgtcaaatatatatatatagtaccaatgttacctttttattttttgttttagatgtaagagcatgctcatatgttaggtacttacataaattgttacattattttttcttatgtaatacctttttgtttgtttatgtggttcaaatatattctttccttaaa

SEQ ID NO: 324487 - DNA, 4660 bp, Homo sapiens
cgccagggaaaagaaagggaggaaggaaggaacaagaaaaggaaataaagagaaaggggaggcggggaaaggcaacgagctgtccggcctccgtcaagggagttggagggaaaaagttctcaggcgccgcaggtccgagtgcctcgcagcccctcccgaggcgcagccgccagaccagtggagccggggcgcagggcgggggcggaggcgccggggcgggggatgcggggccgcggcgcagccccccggccctgagagcgaggacagcgccgcccggcccgcagccgtcgccgcttctccacctcggcccgtggagccggggcgtccgggcgtagccctcgctcgcctgggtcagggggtgcgcgtcgggggaggcagaagccatggatcccgggcagcagccgccgcctcaaccggccccccagggccaagggcagccgccttcgcagcccccgcaggggcagggcccgccgtccggacccgggcaaccggcacccgcggcgacccaggcggcgccgcaggcaccccccgccgggcatcagatcgtgcacgtccgcggggactcggagaccgacctggaggcgctcttcaacgccgtcatgaaccccaagacggccaacgtgccccagaccgtgcccatgaggctccggaagctgcccgactccttcttcaagccgccggagcccaaatcccactcccgacaggccagtactgatgcaggcactgcaggagccctgactccacagcatgttcgagctcattcctctccagcttctctgcagttgggagctgtttctcctgggacactgacccccactggagtagtctctggcccagcagctacacccacagctcagcatcttcgacagtcttcttttgagatacctgatgatgtacctctgccagcaggttgggagatggcaaagacatcttctggtcagagatacttcttaaatcacatcgatcagacaacaacatggcaggaccccaggaaggccatgctgtcccagatgaacgtcacagcccccaccagtccaccagtgcagcagaatatgatgaactcggcttcagccatgaaccagagaatcagtcagagtgctccagtgaaacagccaccacccctggctccccagagcccacagggaggcgtcatgggtggcagcaactccaaccagcagcaacagatgcgactgcagcaactgcagatggagaaggagaggctgcggctgaaacagcaagaactgcttcggcaggtgaggagttagccctgcgtagccagttaccaacactggagcaggatggtgggactcaaaatccagtgtcttctcccgggatgtctcaggaattgagaacaatgacgaccaatagctcagatcctttccttaacagtggcacctatcactctcgagatgagagtacagacagtggactaagcatgagcagctacagtgtccctcgaaccccagatgacttcctgaacagtgtggatgagatggatacaggtgatactatcaaccaaagcaccctgccctcacagcagaaccgtttcccagactaccttgaagccattcctgggacaaatgtggaccttggaacactggaaggagatggaatgaacatagaaggagaggagctgatgccaagtctgcaggaagctttgagttctgacatccttaatgacatggagtctgttttggctgccaccaagctagataaagaaagctttcttacatggttatagagccctcaggcagactgaattctaaatctgtgaaggatctaaggagacacatgcaccggaaatttccataagccagttgcagttttcaggctaatacagaaaaagatgaacaaacgtccagcaagatactttaatcctctattttgctcttccttgtccattgctgctgttaatgtattgctgacctctttcacagttggctctaaagaatcaaaagaaaaaaactttttatttcttttgctattaaaactactgttcattttgggggctgggggaagtgagcctgtttggatgatggatgccattccttttgcccagttaaatgttcaccaatcattttaactaggcaaatgaccatattagtgaatctgttaatagttgtagcttgggatggttattgtagttgttttggtaaaatcttcatttcctggttttttttaccaccttatttaaatctcgattatctgctctctcttttatatacatacacacacccaaacataacatttataatagtgtggtagtggaatgtatccttttttaggtttccctgctttccagttaatttttaaaatggtagcgctttgtatgcatttagaatacatgactagtagtttatatttcactggtagtttaaatctggttggggcagtctgcagatgtttgaagtagtttagtgttctagaaagagctattactgtggatagtgcctaggggagtgctccacgccctctgggcatacggtagatattatctgatgaattggaaaggagcaaaccagaaatggctttattttctcccttggactaatttttaagtctcgattggaaatcagtgagtaggttcataatgtgcatgacagaaataagctttatagtggtttaccttcatttagctttggaagttttctttgccttagttttggaagtaaattctagtttgtagttctcatttgtaatgaacacattaacgactagattaaaatattgccttcaagattgttcttacttacaagacttgctcctacttctatgctgaaaattgaccctggatagaatactataaggttttgagttagctggaaaagtgatcagattaataaatgtatattggtagttgaatttagcaaagaaatagagataatcatgattatacctttatttttacaggaagagatgatgtaactagagtatgtgtctacaggagtaataatggtttccaaagagtattttttaaaggaacaaaacgagcatgaattaactcttcaatataagctatgaagtaatagttggttgtgaattaaagtggcaccagctagcacctctgtgttttaagggtctttcaatgtttctagaataagcccttattttcaagggttcataacaggcataaaatctcttctcctggcaaaagctgctatgaaaagcctcagcttgggaagatagatttttttccccccaattacaaaatctaagtattttggcccttcaatttggaggagggcaaaagttggaagtaagaagttttattttaagtactttcagtgctcaaaaaaatgcaatcactgtgttgtatataatagttcataggttgatcactcataataattgactctaaggcttttattaagaaaacagcagaaagattaaatcttgaattaagtctagaatgcaaaattgggtatatgaattacatagcatgttgttgggattttttttaatgtgcagaagatcaaagctacttggaaggagtgcctataatttgccagtagccacagattaagattatatcttatatatcagcagattagctttagcttagggggagggtgggaaatctctttaataaagacttgtcttacaccgtgctgccattaaaggcagctgttctagagtttcagtcacctaagtacacccacaaaacaatatgaatatggagatcttcctttacccctcaactttaatttgcccagttatacctcagtgttgtagcagtactgtgatacctggcacagtgctttgatcttacgatgccctctgtactgacctgaaggagacctaagagtcctttccctttttgagtttgaatcatagccttgatgtggtctcttgttttatgtccttgttcctaatgtaaaagtgcttaactgcttcttggttgtattgggtagcattgggataagattttaactgggtattcttgaattgcttttacaataaaccaattttataatctttaaatttatcaactttttacatttgtgttattttcagtcagggcttcttagatctacttatggttgatggagcacattgatttggagtttcagatcttccaaagcactatttgttgtaataacttttctaaatgtagtgcctttaaaggaaaaatgaacacagggaagtgactttgctacaaataatgttgctgtgttaagtattcatattaaatacatgccttctatatggaacatggcagaaagactgaaaaataacagtaattaattgtgtaattcagaattcataccaatcagtgttgaaactcaaacattgcaaaagtgggtggcaatattcagtgcttaacacttttctagcgttggtacatctgagaaatgagtgctcaggtggattttatcctcgcaagcatgttgttataagaattgtgggtgtgcctatcataacaattgttttctgtatcttgaaaaagtattctccacattttaaatgttttatattagagaattctttaatgcacacttgtcaaatatatatatatagtaccaatgttacctttttattttttgttttagatgtaagagcatgctcatatgttaggtacttacataaattgttacattattttttcttatgtaatacctttttgtttgtttatgtggttcaaatatattctttccttaaa

SEQ ID NO: 324488 - DNA, 2476 bp, Homo sapiens
  misc_feature (2450)..(2451): n is a, c, g, or t
  misc_feature (2453)..(2453): n is a, c, g, or t
  misc_feature (2460)..(2460): n is a, c, g, or t
  misc_feature (2466)..(2466): n is a, c, g, or t
cgccagggaaaagaaagggaggaaggaaggaacaagaaaaggaaataaagagaaaggggaggcggggaaaggcaacgagctgtccggcctccgtcaagggagttggagggaaaaagttctcaggcgccgcaggtccgagtgcctcgcagcccctcccgaggcgcagccgccagaccagtggagccggggcgcagggcgggggcggaggcgccggggcgggggatgcggggccgcggcgcagccccccggccctgagagcgaggacagcgccgcccggcccgcagccgtcgccgcttctccacctcggcccgtggagccggggcgtccgggcgtagccctcgctcgcctgggtcagggggtgcgcgtcgggggaggcagaagccatggatcccgggcagcagccgccgcctcaaccggccccccagggccaagggcagccgccttcgcagcccccgcaggggcagggcccgccgtccggacccgggcaaccggcacccgcggcgacccaggcggcgccgcaggcaccccccgccgggcatcagatcgtgcacgtccgcggggactcggagaccgacctggaggcgctcttcaacgccgtcatgaaccccaagacggccaacgtgccccagaccgtgcccatgaggctccggaagctgcccgactccttcttcaagccgccggagcccaaatcccactcccgacaggccagtactgatgcaggcactgcaggagccctgactccacagcatgttcgagctcattcctctccagcttctctgcagttgggagctgtttctcctgggacactgacccccactggagtagtctctggcccagcagctacacccacagctcagcatcttcgacagtcttcttttgagatacctgatgatgtacctctgccagcaggttgggagatggcaaagacatcttctggtcagagatacttcttaaatcacatcgatcagacaacaacatggcaggaccccaggaaggccatgctgtcccagatgaacgtcacagcccccaccagtccaccagtgcagcagaatatgatgaactcggcttcagccatgaaccagagaatcagtcagagtgctccagtgaaacagccaccacccctggctccccagagcccacagggaggcgtcatgggtggcagcaactccaaccagcagcaacagatgcgactgcagcaactgcagatggagaaggagaggctgcggctgaaacagcaagaactgcttcggcaggtgaggagttagccctgcgtagccagttaccaacactggagcaggatggtgggactcaaaatccagtgtcttctcccgggatgtctcaggaattgagaacaatgacgaccaatagctcagatcctttccttaacagtggcacctatcactctcgagatgagagtacagacagtggactaagcatgagcagctacagtgtccctcgaaccccagatgacttcctgaacagtgtggatgagatggatacaggtgatactatcaaccaaagcaccctgccctcacagcagaaccgtttcccagactaccttgaagccattcctgggacaaatgtggaccttggaacactggaaggagatggaatgaacatagaaggagaggagctgatgccaagtctgcaggaagctttgagttctgacatccttaatgacatggagtctgttttggctgccaccaagctagataaagaaagctttcttacatggttatagagccctcaggcagactgaattctaaatctgtgaaggatctaaggagacacatgcaccggaaatttccataagccagttgcagttttcaggctaatacagaaaaagatgaacaaacgtccagcaagatactttaatcctctattttgctcttccttgtccattgctgctgttaatgtattgctgacctctttcacagttggctctaaagaatcaaaagaaaaaaactttttatttcttttgctattaaaactactgttcattttgggggctgggggaagtgagcctgtttggatgatggatgccattccttttgcccagttaaatgttcaccaatcattttaactaaatactcagacttagaagtcagatgcttcatgtcacagcatttagtttgttcaacagttgtttcttcagcttcctttgtccagtggaaaaacatgatttactggtctgacaagccaaaaatgttatatctgatattaaatacttaatgctgatttgaagagatagctgaaaccaaggctgaagactgttttactttcagtattttcttttcctcctagtgctatcattagtcacataatgaccttgattttattttaggagcttataaggcatgagacaatttccatataaatatattaattattgccacatactctaatatagattttggtgataaaaaaaaaaaaaaaaaaaaaaaaaattnngnggcggcngggccnaaaaaagttt

SEQ ID NO: 324489 - DNA, 1017 bp, Homo sapiens
cgtgctgcaggaattcggcacgaggtcatgtttatgtagtggcacctatcactctcgagatgagagtacagacagtggactaagcatgagcagctacagtgtccctcgaaccccagatgacttcctgaacagtgtggatgagatggatacaggtgatactatcaaccaaagcaccctgccctcacagcagaaccgtttcccagactaccttgaagccattcctgggacaaatgtggaccttggaacactggaaggagatggaatgaacatagaaggagaggagctgatgccaagtctgcaggaagctttgagttctgacatccttaatgacatggagtctgttttggctgccaccaagctagataaagaaagctttcttacatggttatagagccctcaggcagactgaattctaaatctgtgaaggatctaaggagacacatgcaccggaaatttccataagccagttgcagttttcaggctaatacagaaaaagatgaacaaacgtccagcaagatactttaatcctctattttgctcttccttgtccattgctgctgttaatgtattgctgacctctttcacagttggctctaaagaatcaaaagagaagtgagcctgtttggatgatggatgccattccttttgcccagttaaatgttcaccaatcattttaactaaatactcagacttagaagtcagatgcttcatgtcacagcatttagtttgttcaacagttgtttcttcagcttcctttgtccagtggaaaaacatgatttactggtctgacaagccaaaaatgttatatctgatattaaatacttaatgctgatttgaagagatagctgaaaccaaggctgaagactgttttactttcagtattttcttttcctcctagtgctatcattagtcacataatgaccttgattttattttaggagcttataaggcatgagacaatttccatataaatatattaattattgccacatactctaatatagattttggtgataa

SEQ ID NO: 324490 - DNA, 2144 bp, Homo sapiens
cccagccctgcgtgagcactgagtgcccgccccctcctccttgcagggtctggccgtgggcctgggcttcggggcactggcagaggtcgccaagaagagcctgcgctccgaggacccctcagggaagaaggccgtgctgggttccagtcctttcctgtccgaggccaatgcagagcggatcgtgcgcacgctctgcaaggtgcgtggtgcggcactcaagctgggccagatgctgagcatccaggatgatgcctttatcaacccccacctggctaagatcttcgagcgggtgcggcagagcgcggacttcatgccactgaagcagatgatgaaaactctcaacaacgacctgggccccaactggcgggacaagttggaatacttcgaggagcggcccttcgccgccgcatccattgggcaggtgcacttggcccgaatgaagggcggccgcgaggtggccatgaagatccagtaccctggcgtggcccagagcatcaacagtgatgtcaacaacctcatggccgtgttgaacatgagcaacatgcttccagaaggcctgttccccgagcacctgatcgacgtgctgaggcgggagctggccctggagtgtgactaccagcgagaggccgcctgtgcccgcaagttcagggacctgctgaagggccaccccttcttctatgtgcctgagattgtggatgagctctgcagcccacatgtgctgaccacagagctggtgtctggcttccccctggaccaggccgaagggctcagccaggagattcggaacgagatctgctacaacatcctggttctgtgcctgagggagctgttcgagttccacttcatgcaaacagaccccaactggtccaacttcttctatgacccccagcagcacaaggtggctcttttggattttggggcaacgcgggaatatgacagatccttcaccgacctctacattcagatcatcagggctgctgccgacagggacagggagactgtgcgggcgaaatccatagagatgaagttcctcaccggctacgaggtcaaggtcatggaagacgcccacttggatgccatcctcatcctgggggaggccttcgcctccgatgagccttttgattttggcactcagagcaccaccgagaagatccacaacctgattcccgtcatgctgaggcaccgtctcgtccccccacccgaggaaacctactccctgcacaggaagatggggggctccttcctcatctgctccaagctgaaggcccgcttcccctgcaaggccatgttcgaggaggcctacagcaactactgcaagaggcaggcccagcagtagggctgcgggccacgcccaggccggctccgcgggaactctctccctcagacaggccaaaaaccagtagcgaggtcgtggtgatgctctttttaactcctttgcccaataaggggggtggctgcctggagccccgtagccagcgctttccacggtttctgttgctaaatggttgtagggtgagaagtgcaagaatgaagatgaagccccactgctcggtcagtctgcctccgtgtgtcctctgaaataagcagatgaagatgaaagggcaactttgttttcttctttttcctgatgtgaatgttaagcagaagggagagagtccttactcccttccaatctctgttcagtgcaaaacccagaaacatgaacagatacgattgtgggatttttatcatctgtgtagtaggtgtgtgtatgtgtttctagagtgagatttgtgttttctgcccttttcctctccagccgatgggctggagctgggagaggtgctgagctaacagtgccaacaagtgctccttaagcctgcgaggcccaggcctgtggggctggttctcacctttgacagctgaatgttcctaaagaactgctgccccacagtgagggtgggagcagcggaacagggaatgccagacacaggctcgctgctgctggaaggcggggtgggacttccttcctctgtccggagaggcacaggtgtcaccagttccagccaaaggctcctcacaggcgctgtgaatttttgtacaagtcttgtaattatcgaatcaacaacttgtttcaatttaataaaaatgctcatgggaagtgc

SEQ ID NO: 324491 - DNA, 3075 bp, Homo sapiens
aattcatggcagagggcctgggattcagtatgccagattactggtgccttggcttacatttaaaagccagcgcgcagaggcgggcgcggaggcggctagaaggtgaccgcggatcccagcttcctgcagccaggtaaggctgccacccgccggcccgccgcgtgcccaggcgccgtctggctgcggccagagctggggtcaacacccacctcagcccttcttgcattctcttcatgtgacagcgcagcttccccgcgagtttcgctggccgcgagcctcaggtccggacgcagtgggggcgcctcagttgcaggccctgaaggatggctgccatattgggagacaccatcatggtggctaaaggccttgtcaagctgacccaggcggccgtggaaacccacctgcagcacttgggcatcggaggggagctgatcatggcggccagggccctgcagtccacggctgtggagcagattggcatgttcttggggaaggtgcagggtcaggataaacatgaagaatattttgctgagaacttcggcggcccagaaggggagttccacttctcagtcccgcatgcagccggagcctccacagacttctcttcagcctccgctcccgaccagtcagcgcccccatccctgggtcatgcccacagcgagggcccagctcctgcctacgtggccagtggaccctttagagaagccgggttccccggccaggcctcctcccctctgggcagggccaacgggaggctctttgcaaaccccagagactcattctctgccatgggctttcagcgaaggttcttccaccaggaccaatcccctgttgggggcctcacagccgaggacattgagaaggcccggcaggctaaggctcgccccgagaacaagcagcacaaacagacgctcagcgagcatgcccgggagcggaaggtgcctgtgacgaggattggccggctggccaacttcggaggtctggccgtgggcctgggcttcggggcactggcagaggtcgccaagaagagcctgcgctccgaggacccctcagggaagaaggccgtgctgggttccagtcctttcctgtccgaggccaatgcagagcggatcgtgcgcacgctctgcaaggtgcgtggtgcggcactcaagctgggccagatgctgagcatccaggatgatgcctttatcaacccccacctggctaagatcttcgagcgggtgcggcagagcgcggacttcatgccactgaagcagatgatgaaaactctcaacaacgacctgggccccaactggcgggacaagttggaatacttcgaggagcggcccttcgccgccgcatccattgggcaggtgcacttggcccgaatgaagggcggccgcgaggtggccatgaagatccagtaccctggcgtggcccagagcatcaacagtgatgtcaacaacctcatggccgtgttgaacatgagcaacatgcttccagaaggcctgttccccgagcacctgatcgacgtgctgaggcgggagctggccctggagtgtgactaccagcgagaggccgcctgtgcccgcaagttcagggacctgctgaagggccaccccttcttctatgtgcctgagattgtggatgagctctgcagcccacatgtgctgaccacagagctggtgtctggcttccccctggaccaggccgaagggctcagccaggagattcggaacgagatctgctacaacatcctggttctgtgcctgagggagctgttcgagttccacttcatgcaaacagaccccaactggtccaacttcttctatgacccccagcagcacaaggtggctcttttggattttggggcaacgcgggaatatgacagatccttcaccgacctctacattcagatcatcagggctgctgccgacagggacagggagactgtgcgggcgaaatccatagagatgaagttcctcaccggctacgaggtcaaggtcatggaagacgcccacttggatgccatcctcatcctgggggaggccttcgcctccgatgagccttttgattttggcactcagagcaccaccgagaagatccacaacctgattcccgtcatgctgaggcaccgtctcgtccccccacccgaggaaacctactccctgcacaggaagatggggggctccttcctcatctgctccaagctgaaggcccgcttcccctgcaaggccatgttcgaggaggcctacagcaactactgcaagaggcaggcccagcagtagggctgcgggccacgcccaggccggctccgcgggaactctctccctcagacaggccaaaaaccagtagcgaggtcgtggtgatgctctttttaactcctttgcccaataaggggggtggctgcctggagccccgtagccagcgctttccacggtttctgttgctaaatggttgtagggtgagaagtgcaagaatgaagatgaagccccactgctcggtcagtctgcctccgtgtgtcctctgaaataagcagatgaagatgaaagggcaactttgttttcttctttttcctgatgtgaatgttaagcagaagggagagagtccttactcccttccaatctctgttcagtgcaaaacccagaaacatgaacagatacgattgtgggatttttatcatctgtgtagtaggtgtgtgtatgtgtttctagagtgagatttgtgttttctgcccttttcctctccagccgatgggctggagctgggagaggtgctgagctaacagtgccaacaagtgctccttaagcctgcgaggcccaggcctgtggggctggttctcacctttgacagctgaatgttcctaaagaactgctgccccacagtgagggtgggagcagcggaacagggaatgccagacacaggctcgctgctgctggaaggcggggtgggacttccttcctctgtccggagaggcacaggtgtcaccagttccagccaaaggctcctcacaggcgctgtgaatttttgtacaagtcttgtaattatcgaatcaacaacttgtttcaatttaataaaaatgctcatgggaagtgc

SEQ ID NO: 324492 - DNA, 2894 bp, Homo sapiens
aattcatggcagagggcctgggattcagtatgccagattactggtgccttggcttacatttaaaagccagcgcgcagaggcgggcgcggaggcggctagaaggtgaccgcggatcccagcttcctgcagccagccctgaaggatggctgccatattgggagacaccatcatggtggctaaaggccttgtcaagctgacccaggcggccgtggaaacccacctgcagcacttgggcatcggaggggagctgatcatggcggccagggccctgcagtccacggctgtggagcagattggcatgttcttggggaaggtgcagggtcaggataaacatgaagaatattttgctgagaacttcggcggcccagaaggggagttccacttctcagtcccgcatgcagccggagcctccacagacttctcttcagcctccgctcccgaccagtcagcgcccccatccctgggtcatgcccacagcgagggcccagctcctgcctacgtggccagtggaccctttagagaagccgggttccccggccaggcctcctcccctctgggcagggccaacgggaggctctttgcaaaccccagagactcattctctgccatgggctttcagcgaaggttcttccaccaggaccaatcccctgttgggggcctcacagccgaggacattgagaaggcccggcaggctaaggctcgccccgagaacaagcagcacaaacagacgctcagcgagcatgcccgggagcggaaggtgcctgtgacgaggattggccggctggccaacttcggaggtctggccgtgggcctgggcttcggggcactggcagaggtcgccaagaagagcctgcgctccgaggacccctcagggaagaaggccgtgctgggttccagtcctttcctgtccgaggccaatgcagagcggatcgtgcgcacgctctgcaaggtgcgtggtgcggcactcaagctgggccagatgctgagcatccaggatgatgcctttatcaacccccacctggctaagatcttcgagcgggtgcggcagagcgcggacttcatgccactgaagcagatgatgaaaactctcaacaacgacctgggccccaactggcgggacaagttggaatacttcgaggagcggcccttcgccgccgcatccattgggcaggtgcacttggcccgaatgaagggcggccgcgaggtggccatgaagatccagtaccctggcgtggcccagagcatcaacagtgatgtcaacaacctcatggccgtgttgaacatgagcaacatgcttccagaaggcctgttccccgagcacctgatcgacgtgctgaggcgggagctggccctggagtgtgactaccagcgagaggccgcctgtgcccgcaagttcagggacctgctgaagggccaccccttcttctatgtgcctgagattgtggatgagctctgcagcccacatgtgctgaccacagagctggtgtctggcttccccctggaccaggccgaagggctcagccaggagattcggaacgagatctgctacaacatcctggttctgtgcctgagggagctgttcgagttccacttcatgcaaacagaccccaactggtccaacttcttctatgacccccagcagcacaaggtggctcttttggattttggggcaacgcgggaatatgacagatccttcaccgacctctacattcagatcatcagggctgctgccgacagggacagggagactgtgcgggcgaaatccatagagatgaagttcctcaccggctacgaggtcaaggtcatggaagacgcccacttggatgccatcctcatcctgggggaggccttcgcctccgatgagccttttgattttggcactcagagcaccaccgagaagatccacaacctgattcccgtcatgctgaggcaccgtctcgtccccccacccgaggaaacctactccctgcacaggaagatggggggctccttcctcatctgctccaagctgaaggcccgcttcccctgcaaggccatgttcgaggaggcctacagcaactactgcaagaggcaggcccagcagtagggctgcgggccacgcccaggccggctccgcgggaactctctccctcagacaggccaaaaaccagtagcgaggtcgtggtgatgctctttttaactcctttgcccaataaggggggtggctgcctggagccccgtagccagcgctttccacggtttctgttgctaaatggttgtagggtgagaagtgcaagaatgaagatgaagccccactgctcggtcagtctgcctccgtgtgtcctctgaaataagcagatgaagatgaaagggcaactttgttttcttctttttcctgatgtgaatgttaagcagaagggagagagtccttactcccttccaatctctgttcagtgcaaaacccagaaacatgaacagatacgattgtgggatttttatcatctgtgtagtaggtgtgtgtatgtgtttctagagtgagatttgtgttttctgcccttttcctctccagccgatgggctggagctgggagaggtgctgagctaacagtgccaacaagtgctccttaagcctgcgaggcccaggcctgtggggctggttctcacctttgacagctgaatgttcctaaagaactgctgccccacagtgagggtgggagcagcggaacagggaatgccagacacaggctcgctgctgctggaaggcggggtgggacttccttcctctgtccggagaggcacaggtgtcaccagttccagccaaaggctcctcacaggcgctgtgaatttttgtacaagtcttgtaattatcgaatcaacaacttgtttcaatttaataaaaatgctcatgggaagtgc

SEQ ID NO: 324493 - DNA, 2801 bp, Homo sapiens
aattcatggcagagggcctgggattcagtatgccagattactggtgccttggcttacatttaaaagccagcgcgcagaggcgggcgcggaggcggctagaaggtgaccgcggatcccagcttcctgcagccaggtaaggctgccacccgccggcccgccgcgtgcccaggcgccgtctggctgcggccagagctggggtcaacacccacctcagcccttcttgcattctcttcatgtgacagcgcagcttccccgcgagtttcgctggccgcgagcctcaggtccggacgcagtgggggcgcctcagttgcaggccctgaaggatggctgccatattgggagacaccatcatggtggctaaaggccttgtcaagctgacccaggcggccgtggaaacccacctgcagcacttgggcatcggaggggagctgatcatggcggccagggccctgcagtccacggctgtggagcagattggcatgttcttggggaaggtgcagggtcaggataaacatgaagaatattttgctgagaacttcggcggcccagaaggggagttccacttctcagtcccgcatgcagccggagcctccacagacttctcttcagcctccgctcccgaccagtcagcgcccccatccctgggtcatgcccacagcgagggcccagctcctgcctacgtggccagtggaccctttagagaagtctggccgtgggcctgggcttcggggcactggcagaggtcgccaagaagagcctgcgctccgaggacccctcagggaagaaggccgtgctgggttccagtcctttcctgtccgaggccaatgcagagcggatcgtgcgcacgctctgcaaggtgcgtggtgcggcactcaagctgggccagatgctgagcatccaggatgatgcctttatcaacccccacctggctaagatcttcgagcgggtgcggcagagcgcggacttcatgccactgaagcagatgatgaaaactctcaacaacgacctgggccccaactggcgggacaagttggaatacttcgaggagcggcccttcgccgccgcatccattgggcaggtgcacttggcccgaatgaagggcggccgcgaggtggccatgaagatccagtaccctggcgtggcccagagcatcaacagtgatgtcaacaacctcatggccgtgttgaacatgagcaacatgcttccagaaggcctgttccccgagcacctgatcgacgtgctgaggcgggagctggccctggagtgtgactaccagcgagaggccgcctgtgcccgcaagttcagggacctgctgaagggccaccccttcttctatgtgcctgagattgtggatgagctctgcagcccacatgtgctgaccacagagctggtgtctggcttccccctggaccaggccgaagggctcagccaggagattcggaacgagatctgctacaacatcctggttctgtgcctgagggagctgttcgagttccacttcatgcaaacagaccccaactggtccaacttcttctatgacccccagcagcacaaggtggctcttttggattttggggcaacgcgggaatatgacagatccttcaccgacctctacattcagatcatcagggctgctgccgacagggacagggagactgtgcgggcgaaatccatagagatgaagttcctcaccggctacgaggtcaaggtcatggaagacgcccacttggatgccatcctcatcctgggggaggccttcgcctccgatgagccttttgattttggcactcagagcaccaccgagaagatccacaacctgattcccgtcatgctgaggcaccgtctcgtccccccacccgaggaaacctactccctgcacaggaagatggggggctccttcctcatctgctccaagctgaaggcccgcttcccctgcaaggccatgttcgaggaggcctacagcaactactgcaagaggcaggcccagcagtagggctgcgggccacgcccaggccggctccgcgggaactctctccctcagacaggccaaaaaccagtagcgaggtcgtggtgatgctctttttaactcctttgcccaataaggggggtggctgcctggagccccgtagccagcgctttccacggtttctgttgctaaatggttgtagggtgagaagtgcaagaatgaagatgaagccccactgctcggtcagtctgcctccgtgtgtcctctgaaataagcagatgaagatgaaagggcaactttgttttcttctttttcctgatgtgaatgttaagcagaagggagagagtccttactcccttccaatctctgttcagtgcaaaacccagaaacatgaacagatacgattgtgggatttttatcatctgtgtagtaggtgtgtgtatgtgtttctagagtgagatttgtgttttctgcccttttcctctccagccgatgggctggagctgggagaggtgctgagctaacagtgccaacaagtgctccttaagcctgcgaggcccaggcctgtggggctggttctcacctttgacagctgaatgttcctaaagaactgctgccccacagtgagggtgggagcagcggaacagggaatgccagacacaggctcgctgctgctggaaggcggggtgggacttccttcctctgtccggagaggcacaggtgtcaccagttccagccaaaggctcctcacaggcgctgtgaatttttgtacaagtcttgtaattatcgaatcaacaacttgtttcaatttaataaaaatgctcatgggaagtgc

SEQ ID NO: 324494 - DNA, 2243 bp, Homo sapiens
aattcatggcagagggcctgggattcagtatgccagattactggtgccttggcttacatttaaaagccagcgcgcagaggcgggcgcggaggcggctagaaggtgaccgcggatcccagcttcctgcagccagccctgaaggatggctgccatattgggagacaccatcatggtggctaaaggccttgtcaagctgacccaggcggccgtggaaacccacctgcagcacttgggcatcggaggggagctgatcatggcggccagggccctgcagtccacggctgtggagcagattggcatgttcttggggaaggtgcagggtcaggataaacatgaagaatattttgctgagaacttcggcggcccagaaggggagttccacttctcagtcccgcatgcagccggagcctccacagacttctcttcagcctccgctcccgaccagtcagcgcccccatcctggcgggacaagttggaatacttcgaggagcggcccttcgccgccgcatccattgggcaggtgcacttggcccgaatgaagggcggccgcgaggtggccatgaagatccagtaccctggcgtggcccagagcatcaacagtgatgtcaacaacctcatggccgtgttgaacatgagcaacatgcttccagaaggcctgttccccgagcacctgatcgacgtgctgaggcgggagctggccctggagtgtgactaccagcgagaggccgcctgtgcccgcaagttcagggacctgctgaagggccaccccttcttctatgtgcctgagattgtggatgagctctgcagcccacatgtgctgaccacagagctggtgtctggcttccccctggaccaggccgaagggctcagccaggagattcggaacgagatctgctacaacatcctggttctgtgcctgagggagctgttcgagttccacttcatgcaaacagaccccaactggtccaacttcttctatgacccccagcagcacaaggtggctcttttggattttggggcaacgcgggaatatgacagatccttcaccgacctctacattcagatcatcagggctgctgccgacagggacagggagactgtgcgggcgaaatccatagagatgaagttcctcaccggctacgaggtcaaggtcatggaagacgcccacttggatgccatcctcatcctgggggaggccttcgcctccgatgagccttttgattttggcactcagagcaccaccgagaagatccacaacctgattcccgtcatgctgaggcaccgtctcgtccccccacccgaggaaacctactccctgcacaggaagatggggggctccttcctcatctgctccaagctgaaggcccgcttcccctgcaaggccatgttcgaggaggcctacagcaactactgcaagaggcaggcccagcagtagggctgcgggccacgcccaggccggctccgcgggaactctctccctcagacaggccaaaaaccagtagcgaggtcgtggtgatgctctttttaactcctttgcccaataaggggggtggctgcctggagccccgtagccagcgctttccacggtttctgttgctaaatggttgtagggtgagaagtgcaagaatgaagatgaagccccactgctcggtcagtctgcctccgtgtgtcctctgaaataagcagatgaagatgaaagggcaactttgttttcttctttttcctgatgtgaatgttaagcagaagggagagagtccttactcccttccaatctctgttcagtgcaaaacccagaaacatgaacagatacgattgtgggatttttatcatctgtgtagtaggtgtgtgtatgtgtttctagagtgagatttgtgttttctgcccttttcctctccagccgatgggctggagctgggagaggtgctgagctaacagtgccaacaagtgctccttaagcctgcgaggcccaggcctgtggggctggttctcacctttgacagctgaatgttcctaaagaactgctgccccacagtgagggtgggagcagcggaacagggaatgccagacacaggctcgctgctgctggaaggcggggtgggacttccttcctctgtccggagaggcacaggtgtcaccagttccagccaaaggctcctcacaggcgctgtgaatttttgtacaagtcttgtaattatcgaatcaacaacttgtttcaatttaataaaaatgctcatgggaagtgc

SEQ ID NO: 324495 - DNA, 2910 bp, Homo sapiens
  misc_feature (3)..(4): n is a, c, g, or t
  misc_feature (7)..(7): n is a, c, g, or t
ggnncgngggttggtaaacagatccggagcgcgtggcgggcgtcagcgcggtggccagcgcgcagaggcgggcgcggaggcggctagaaggtgaccgcggatcccagcttcctgcagccagccctgaaggatggctgccatattgggagacaccatcatggtggctaaaggccttgtcaagctgacccaggcggccgtggaaacccacctgcagcacttgggcatcggaggggagctgatcatggcggccagggccctgcagtccacggctgtggagcagattggcatgttcttggggaaggtgcagggtcaggataaacatgaagaatattttgctgagaacttcggcggcccagaaggggagttccacttctcagtcccgcatgcagccggagcctccacagacttctcttcagcctccgctcccgaccagtcagcgcccccatccctgggtcatgcccacagcgagggcccagctcctgcctacgtggccagtggaccctttagagaagccgggttccccggccaggcctcctcccctctgggcagggccaacgggaggctctttgcaaaccccagagactcattctctgccatgggctttcagcgaaggttcttccaccaggaccaatcccctgttgggggcctcacagccgaggacattgagaaggcccggcaggctaaggctcgccccgagaacaagcagcacaaacagacgctcagcgagcatgcccgggagcggaaggtgcctgtgacgaggattggccggctggccaacttcggaggtctggccgtgggcctgggcttcggggcactggcagaggtcgccaagaagagcctgcgctccgaggacccctcagggaagaaggccgtgctgggttccagtcctttcctgtccgaggccaatgcagagcggatcgtgcgcacgctctgcaaggtgcgtggtgcggcactcaagctgggccagatgctgagcatccaggatgatgcctttatcaacccccacctggctaagatcttcgagcgggtgcggcagagcgcggacttcatgccactgaagcagatgatgaaaactctcaacaacgacctgggccccaactggcgggacaagttggaatacttcgaggagcggcccttcgccgccgcatccattgggcaggtgcacttggcccgaatgaagggcggccgcgaggtggccatgaagatccagtaccctggcgtggcccagagcatcaacagtgatgtcaacaacctcatggccgtgttgaacatgagcaacatgcttccagaaggcctgttccccgagcacctgatcgacgtgctgaggcgggagctggccctggagtgtgactaccagcgagaggccgcctgtgcccgcaagttcagggacctgctgaagggccaccccttcttctatgtgcctgagattgtggatgagctctgcagcccacatgtgctgaccacagagctggtgtctggcttccccctggaccaggccgaagggctcagccaggagattcggaacgagatctgctacaacatcctggttctgtgcctgagggagctgttcgagttccacttcatgcaaacagaccccaactggtccaacttcttctatgacccccagcagcacaaggtggctcttttggattttggggcaacgcgggaatatgacagatccttcaccgacctctacattcagatcatcagggctgctgccgacagggacagggagactgtgcgggcgaaatccatagagatgaagttcctcaccggctacgaggtcaaggtcatggaagacgcccacttggatgccatcctcatcctgggggaggccttcgcctccgatgagccttttgattttggcactcagagcaccaccgagaagatccacaacctgattcccgtcatgctgaggcaccgtctcgtccccccacccgaggaaacctactccctgcacaggaagatggggggctccttcctcatctgctccaagctgaaggcccgcttcccctgcaaggccatgttcgaggaggcctacagcaactactgcaagaggcaggcccagcagtagggctgcgggccacgcccaggccggctccgcgggaactctctccctcagacaggccaaaaaccagtagcgaggtcgtggtgatgctctttttaactcctttgcccaataaggggggtggctgcctggagccccgtagccagcgctttccacggtttctgttgctaaatggttgtagggtgagaagtgcaagaatgaagatgaagccccactgctcggtcagtctgcctccgtgtgtcctctgaaataagcagatgaagatgaaagggcaactttgttttcttctttttcctgatgtgaatgttaagcagaagggagagagtccttactcccttccaatctctgttcagtgcaaaacccagaaacatgaacagatacgattgtgggatttttatcatctgtgtagtaggtgtgtgtatgtgtttctagagtgagatttgtgttttctgcccttttcctctccagccgatgggctggagctgggagaggtgctgagctaacagtgccaacaagtgctccttaagcctgcgaggcccaggcctgtggggctggttctcacctttgacagctgaatgttcctaaagaactgctgccccacagtgagggtgggagcagcggaacagggaatgccagacacaggctcgctgctgctggaaggcggggtgggacttccttcctctgtccggagaggcacaggtgtcaccagttccagccaaaggctcctcacaggcgctgtgaatttttgtacaagtcttgtaattatcgaatcaacaacttgtttcaatttaataaaaatgctcatgggaagtgcctgtggggaagggggatcctctaagtcg

SEQ ID NO: 324496 - DNA, 1891 bp, Homo sapiens
  misc_feature (3)..(4): n is a, c, g, or t
  misc_feature (7)..(7): n is a, c, g, or t
ggnncgngggttggtaaacagatccggagcgcgtggcgggcgtcagcgcggtggccagcgcgcagaggcgggcgcggaggcggctagaaggtgaccgcggatcccagcttcctgcagccagccctgaaggatggctgccatattgggagacaccatcatggtggctaaaggccttgtcaagctgacccaggcggccgtggaaacccacctgcagcacttgggcatcggaggggagctgatcatggcggccagggccctgcagtccacggctgtggagcagattggcatgttcttggggaaggtgcagggtcaggataaacatgaagaatattttgctgagaacttcggcggcccagaaggggagttccacttctcagtcccgcatgcagccggagcctccacagacttctcttcagcctccgctcccgaccagtcagcgcccccatccctgggtcatgcccacagcgagggcccagctcctgcctacgtggccagtggaccctttagagaagccgggttccccggccaggcctcctcccctctgggcagggccaacgggaggctctttgcaaaccccagagactcattctctgccatgggctttcagcgaaggttcttccaccaggaccaatcccctgttgggggcctcacagccgaggacattgagaaggcccggcaggctaaggctcgccccgagaacaagcagcacaaacagacgctcagcgagcatgcccgggagcggaaggtgcctgtgacgaggattggccggctggccaacttcggaggtctggccgtgggcctgggcttcggggcactggcagaggtcgccaagaagagcctgcgctccgaggacccctcagggaagaaggccgtgctgggttccagtcctttcctgtccgaggccaatgcagagcggatcgtgcgcacgctctgcaaggtgcgtggtgcggcactcaagctgggccagatgctgagcatccaggatgatgcctttatcaacccccacctggctaagatcttcgagcgggtgcggcagagcgcggacttcatgccactgaagcagatgatgaaaactctcaacaacgacctgggccccaactggcgggacaagttggaatacttcgaggagcggcccttcgccgccgcatccattgggcaggtgcacttggcccgaatgaagggcggccgcgaggtggccatgaagatccagtaccctggcgtggcccagagcatcaacagtgatgtcaacaacctcatggccgtgttgaacatgagcaacatgcttccagaaggcctgttccccgagcacctgatcgacgtgctgaggcgggagctggccctggagtgtgactaccagcgagaggccgcctgtgcccgcaagttcagggacctgctgaagggccaccccttcttctatgtgcctgagattgtggatgagctctgcagcccacatgtgctgaccacagagctggtgtctggcttccccctggaccaggccgaagggctcagccaggagattcggaacgagatctgctacaacatcctggttctgtgcctgagggagctgttcgagttccacttcatgcaaacagaccccaactggtccaacttcttctatgacccccagcagcacaaggtggctcttttggattttggggcaacgcgggaatatgacagatccttcaccgacctctacattcagatcatcagggctgctgccgacagggacagggagactgtgcgggcgaaatccttcctctgtccggagaggcacaggtgtcaccagttccagccaaaggctcctcacaggcgctgtgaatttttgtacaagtcttgtaattatcgaatcaacaacttgtttcaatttaataaaaatgctcatgggaagtgc

SEQ ID NO: 324497 - DNA, 1640 bp, Homo sapiens
  misc_feature (3)..(4): n is a, c, g, or t
  misc_feature (7)..(7): n is a, c, g, or t
ggnncgngggttggtaaacagatccggagcgcgtggcgggcgtcagcgcggtggccagcgcgcagaggcgggcgcggaggcggctagaaggtgaccgcggatcccagcttcctgcagccagccctgaaggatggctgccatattgggagacaccatcatggtggctaaaggccttgtcaagctgacccaggcggccgtggaaacccacctgcagcacttgggcatcggaggggagctgatcatggcggccagggccctgcagtccacggctgtggagcagattggcatgttcttggggaaggtgcagggtcaggataaacatgaagaatattttgctgagaacttcggcggcccagaaggggagttccacttctcagtcccgcatgcagccggagcctccacagacttctcttcagcctccgctcccgaccagtcagcgcccccatccctgggtcatgcccacagcgagggcccagctcctgcctacgtggccagtggaccctttagagaagccgggttccccggccaggcctcctcccctctgggcagggccaacgggaggctctttgcaaaccccagagactcattctctgccatgggctttcagcgaaggttcttccaccaggaccaatcccctgttgggggcctcacagccgaggacattgagaaggcccggcaggctaaggctcgccccgagaacaagcagcacaaacagacgctcagcgagcatgcccgggagcggaaggtgcctgtgacgaggattggccggctggccaacttcggaggtctggccgtgggcctgggcttcggggcactggcagaggtcgccaagaagagcctgcgctccgaggacccctcagggaagaaggccgtgctgggttccagtcctttcctgtccgaggccaatgcagagcggatcgtgcgcacgctctgcaaggtgcgtggtgcggcactcaagctgggccagatgctgagcatccaggatgatgcctttatcaacccccacctggctaagatcttcgagcgggtgcggcagagcgcggacttcatgccactgaagcagatgatgaaaactctcaacaacgacctgggccccaactggcgggacaagttggaatacttcgaggagcggcccttcgccgccgcatccattgggcaggtgcacttggcccgaatgaagggcggccgcgaggtggccatgaagatccagtaccctggcgtggcccagagcatcaacagtgatgtcaacaacctcatggccgtgttgaacatgagcaacatgcttccagaaggcctgttccccgagcacctgatcgacgtgctgaggcgggagctggccctggagtgtgactaccagcgagaggccgcctgtgcccgcaagttcagggacctgctgaagggccaccccttcttctatgtgcctgagattgtggatgagctctgcagcccacatgtgctgaccacagaggctcgctgctgctggaaggcggggtgggacttccttcctctgtccggagaggcacaggtgtcaccagttccagccaaaggctcctcacaggcgctgtgaatttttgtacaagtcttgtaattatcgaatcaacaacttgtttcaatttaataaaaatgctcatgggaagtgc

SEQ ID NO: 324498 - DNA, 478 bp, Homo sapiens
gccgagggcgtgtgtgcgagggctcctgtctttctggcctcacccgtgctcctggtggggagggtgtggtggccagggcatcccaggagtgtgcccgcccaggtcctgggcgcacactttaatccccaggttcgccctgtgtcattctcctgccttccagatgatgcctttatcaacccccacctggctaagatcttcgagcgggtgcggcagagcgcggacttcatgccactgaagcagatgatggtgaggagccaggggctctgcccactctctgtggcctcggcccccactgggtggaggggacagacttggggcttctcccggtggcccaggcagggcatgctcagagcccctccctggccctgcccttcagaaaactctcaacaacgacctgggccccaactggcgggacaagttggaatacttcgaggagcggcccttcgccgccgcatccattgggcaggtgcacttggcc

SEQ ID NO: 324499 - DNA, 431 bp, Homo sapiens
tggttctccagggtgtgggctggggccaggacacagctgggaagccagttgggggttgggggagtgccccaggcagggcccacccgtctccctgggctaactcccctgcctcacccatacccccacagtaccctggcgtggcccagagcatcaacagtgatgtcaacaacctcatggccgtgttgaacatgagcaacatgcttccagaaggtctgaggctaggtggttgggtcaagggcaggagtgggtggcaggcatctgtgttgggttctggggaccagagggggtcctccctgcagagcccccttcctcgctgatgccctcctccctggcccaggcctgttccccgagcacctgatcgacgtgctgaggcgggagctggccctggagtgtgactaccagcgagaggccgcctgtgcccgcaagttcag

SEQ ID NO: 324500 - DNA, 2882 bp, Homo sapiens
  misc_feature (3)..(4): n is a, c, g, or t
  misc_feature (7)..(7): n is a, c, g, or t
ggnncgngggttggtaaacagatccggagcgcgtggcgggcgtcagcgcggtggccagcgcgcagaggcgggcgcggaggcggctagaaggtgaccgcggatcccagcttcctgcagccagccctgaaggatggctgccatattgggagacaccatcatggtggctaaaggccttgtcaagctgacccaggcggccgtggaaacccacctgcagcacttgggcatcggaggggagctgatcatggcggccagggccctgcagtccacggctgtggagcagattggcatgttcttggggaaggtgcagggtcaggataaacatgaagaatattttgctgagaacttcggcggcccagaaggggagttccacttctcagtcccgcatgcagccggagcctccacagacttctcttcagcctccgctcccgaccagtcagcgcccccatccctgggtcatgcccacagcgagggcccagctcctgcctacgtggccagtggaccctttagagaagccgggttccccggccaggcctcctcccctctgggcagggccaacgggaggctctttgcaaaccccagagactcattctctgccatgggctttcagcgaaggttcttccaccaggaccaatcccctgttgggggcctcacagccgaggacattgagaaggcccggcaggctaaggctcgccccgagaacaagcagcacaaacagacgctcagcgagcatgcccgggagcggaaggtgcctgtgacgaggattggccggctggccaacttcggaggtctggccgtgggcctgggcttcggggcactggcagaggtcgccaagaagagcctgcgctccgaggacccctcagggaagaaggccgtgctgggttccagtcctttcctgtccgaggccaatgcagagcggatcgtgcgcacgctctgcaaggtgcgtggtgcggcactcaagctgggccagatgctgagcatccaggatgatgcctttatcaacccccacctggctaagatcttcgagcgggtgcggcagagcgcggacttcatgccactgaagcagatgatgaaaactctcaacaacgacctgggccccaactggcgggacaagttggaatacttcgaggagcggcccttcgccgccgcatccattgggcaggtgcacttggcccgaatgaagggcggccgcgaggtggccatgaagatccagtaccctggcgtggcccagagcatcaacagtgatgtcaacaacctcatggccgtgttgaacatgagcaacatgcttccagaaggcctgttccccgagcacctgatcgacgtgctgaggcgggagctggccctggagtgtgactaccagcgagaggccgcctgtgcccgcaagttcagggacctgctgaagggccaccccttcttctatgtgcctgagattgtggatgagctctgcagcccacatgtgctgaccacagagctggtgtctggcttccccctggaccaggccgaagggctcagccaggagattcggaacgagatctgctacaacatcctggttctgtgcctgagggagctgttcgagttccacttcatgcaaacagaccccaactggtccaacttcttctatgacccccagcagcacaaggtggctcttttggattttggggcaacgcgggaatatgacagatccttcaccgacctctacattcagatcatcagggctgctgccgacagggacagggagactgtgcgggcgaaatccatagagatgaagttcctcaccggctacgaggtcaaggtcatggaagacgcccacttggatgccatcctcatcctgggggaggccttcgcctccgatgagccttttgattttggcactcagagcaccaccgagaagatccacaacctgattcccgtcatgctgaggcaccgtctcgtccccccacccgaggaaacctactccctgcacaggaagatggggggctccttcctcatctgctccaagctgaaggcccgcttcccctgcaaggccatgttcgaggaggcctacagcaactactgcaagaggcaggcccagcagtagggctgcgggccacgcccaggccggctccgcgggaactctctccctcagacaggccaaaaaccagtagcgaggtcgtggtgatgctctttttaactcctttgcccaataaggggggtggctgcctggagccccgtagccagcgctttccacggtttctgttgctaaatggttgtagggtgagaagtgcaagaatgaagatgaagccccactgctcggtcagtctgcctccgtgtgtcctctgaaataagcagatgaagatgaaagggcaactttgttttcttctttttcctgatgtgaatgttaagcagaagggagagagtccttactcccttccaatctctgttcagtgcaaaacccagaaacatgaacagatacgattgtgggatttttatcatctgtgtagtaggtgtgtgtatgtgtttctagagtgagatttgtgttttctgcccttttcctctccagccgatgggctggagctgggagaggtgctgagctaacagtgccaacaagtgctccttaagcctgcgaggcccaggcctgtggggctggttctcacctttgacagctgaatgttcctaaagaactgctgccccacagtgagggtgggagcagcggaacagggaatgccagacacaggctcgctgctgctggaaggcggggtgggacttccttcctctgtccggagaggcacaggtgtcaccagttccagccaaaggctcctcacaggcgctgtgaatttttgtacaagtcttgtaattatcgaatcaacaacttgtttcaatttaataaaaatgctcatgggaagtgc

SEQ ID NO: 324501 - DNA, 2965 bp, Homo sapiens
acgttccttttctcgttaaggagggagtgacggggcaaatctgcgtgctgctggtggcggtgcctcccagggctgctcggcggggacgccgagggctgcacccgagctccatcccgtgttggctgcgcgccctccaaaaccccggctgtcagcgactgcgggcacctgcacgccgacgagaccggcgggcggacagcgactccgccctgaaggatggctgccatattgggagacaccatcatggtggctaaaggccttgtcaagctgacccaggcggccgtggaaacccacctgcagcacttgggcatcggaggggagctgatcatggcggccagggccctgcagtccacggctgtggagcagattggcatgttcttggggaaggtgcagggtcaggataaacatgaagaatattttgctgagaacttcggcggcccagaaggggagttccacttctcagtcccgcatgcagccggagcctccacagacttctcttcagcctccgctcccgaccagtcagcgcccccatccctgggtcatgcccacagcgagggcccagctcctgcctacgtggccagtggaccctttagagaagccgggttccccggccaggcctcctcccctctgggcagggccaacgggaggctctttgcaaaccccagagactcattctctgccatgggctttcagcgaaggttcttccaccaggaccaatcccctgttgggggcctcacagccgaggacattgagaaggcccggcaggctaaggctcgccccgagaacaagcagcacaaacagacgctcagcgagcatgcccgggagcggaaggtgcctgtgacgaggattggccggctggccaacttcggaggtctggccgtgggcctgggcttcggggcactggcagaggtcgccaagaagagcctgcgctccgaggacccctcagggaagaaggccgtgctgggttccagtcctttcctgtccgaggccaatgcagagcggatcgtgcgcacgctctgcaaggtgcgtggtgcggcactcaagctgggccagatgctgagcatccaggatgatgcctttatcaacccccacctggctaagatcttcgagcgggtgcggcagagcgcggacttcatgccactgaagcagatgatgaaaactctcaacaacgacctgggccccaactggcgggacaagttggaatacttcgaggagcggcccttcgccgccgcatccattgggcaggtgcacttggcccgaatgaagggcggccgcgaggtggccatgaagatccagtaccctggcgtggcccagagcatcaacagtgatgtcaacaacctcatggccgtgttgaacatgagcaacatgcttccagaaggcctgttccccgagcacctgatcgacgtgctgaggcgggagctggccctggagtgtgactaccagcgagaggccgcctgtgcccgcaagttcagggacctgctgaagggccaccccttcttctatgtgcctgagattgtggatgagctctgcagcccacatgtgctgaccacagagctggtgtctggcttccccctggaccaggccgaagggctcagccaggagattcggaacgagatctgctacaacatcctggttctgtgcctgagggagctgttcgagttccacttcatgcaaacagaccccaactggtccaacttcttctatgacccccagcagcacaaggtggctcttttggattttggggcaacgcgggaatatgacagatccttcaccgacctctacattcagatcatcagggctgctgccgacagggacagggagactgtgcgggcgaaatccatagagatgaagttcctcaccggctacgaggtcaaggtcatggaagacgcccacttggatgccatcctcatcctgggggaggccttcgcctccgatgagccttttgattttggcactcagagcaccaccgagaagatccacaacctgattcccgtcatgctgaggcaccgtctcgtccccccacccgaggaaacctactccctgcacaggaagatggggggctccttcctcatctgctccaagctgaaggcccgcttcccctgcaaggccatgttcgaggaggcctacagcaactactgcaagaggcaggcccagcagtagggctgcgggccacgcccaggccggctccgcgggaactctctccctcagacaggccaaaaaccagtagcgaggtcgtggtgatgctctttttaactcctttgcccaataaggggggtggctgcctggagccccgtagccagcgctttccacggtttctgttgctaaatggttgtagggtgagaagtgcaagaatgaagatgaagccccactgctcggtcagtctgcctccgtgtgtcctctgaaataagcagatgaagatgaaagggcaactttgttttcttctttttcctgatgtgaatgttaagcagaagggagagagtccttactcccttccaatctctgttcagtgcaaaacccagaaacatgaacagatacgattgtgggatttttatcatctgtgtagtaggtgtgtgtatgtgtttctagagtgagatttgtgttttctgcccttttcctctccagccgatgggctggagctgggagaggtgctgagctaacagtgccaacaagtgctccttaagcctgcgaggcccaggcctgtggggctggttctcacctttgacagctgaatgttcctaaagaactgctgccccacagtgagggtgggagcagcggaacagggaatgccagacacaggctcgctgctgctggaaggcggggtgggacttccttcctctgtccggagaggcacaggtgtcaccagttccagccaaaggctcctcacaggcgctgtgaatttttgtacaagtcttgtaattatcgaatcaacaacttgtttcaatttaataaaaatgctcatgggaagtgc

SEQ ID NO: 324502 - DNA, 3121 bp, Homo sapiens
  misc_feature (3)..(4): n is a, c, g, or t
  misc_feature (7)..(7): n is a, c, g, or t
ggnncgngggttggtaaacagatccggagcgcgtggcgggcgtcagcgcggtggccagcgcgcagaggcgggcgcggaggcggctagaaggtgaccgcggatcccagcttcctgcagccagccctgaaggatggctgccatattgggagacaccatcatggtggctaaaggccttgtcaagctgacccaggcggccgtggaaacccacctgcagcacttgggcatcggaggggagctgatcatggcggccagggccctgcagtccacggctgtggagcagattggcatgttcttggggaaggtgcagggtcaggataaacatgaagaatattttgctgagaacttcggcggcccagaaggggagttccacttctcagtcccgcatgcagccggagcctccacagacttctcttcagcctccgctcccgaccagtcagcgcccccatccctgggtcatgcccacagcgagggcccagctcctgcctacgtggccagtggaccctttagagaagccgggttccccggccaggcctcctcccctctgggcagggccaacgggaggctctttgcaaaccccagagactcattctctgccatgggctttcagcgaaggttcttccaccaggaccaatcccctgttgggggcctcacagccgaggacattgagaaggcccggcaggctaaggctcgccccgagaacaagcagcacaaacagacgctcagcgagcatgcccgggagcggaaggtgcctgtgacgaggattggccggctggccaacttcggaggtctggccgtgggcctgggcttcggggcactggcagaggtcgccaagaagagcctgcgctccgaggacccctcagggaagaaggccgtgctgggttccagtcctttcctgtccgaggccaatgcagagcggatcgtgcgcacgctctgcaaggtgcgtggtgcggcactcaagctgggccagatgctgagcatccaggatgatgcctttatcaacccccacctggctaagatcttcgagcgggtgcggcagagcgcggacttcatgccactgaagcagatgatgaaaactctcaacaacgacctgggccccaactggcgggacaagttggaatacttcgaggagcggcccttcgccgccgcatccattgggcaggtgcacttggcccgaatgaagggcggccgcgaggtggccatgaagatccagtaccctggcgtggcccagagcatcaacagtgatgtcaacaacctcatggccgtgttgaacatgagcaacatgcttccagaaggcctgttccccgagcacctgatcgacgtgctgaggcgggagctggccctggagtgtgactaccagcgagaggccgcctgtgcccgcaagttcaggtgtggcccccggccgggccccttgcgtgtttgcaccagggaggcagaagggaccatgttcagcagctggtgaaggcccctccagctctgaggggcagagggctggggttgcagcctgggccgaggccatatcctgcctggggtgaaggagggccctctgcctggttggggggtgtgtgtggggggggggacggtgtggagggcctgtggctagggcgtgacctccctcccctacccagggacctgctgaagggccaccccttcttctatgtgcctgagattgtggatgagctctgcagcccacatgtgctgaccacagagctggtgtctggcttccccctggaccaggccgaagggctcagccaggagattcggaacgagatctgctacaacatcctggttctgtgcctgagggagctgttcgagttccacttcatgcaaacagaccccaactggtccaacttcttctatgacccccagcagcacaaggtggctcttttggattttggggcaacgcgggaatatgacagatccttcaccgacctctacattcagatcatcagggctgctgccgacagggacagggagactgtgcgggcgaaatccatagagatgaagttcctcaccggctacgaggtcaaggtcatggaagacgcccacttggatgccatcctcatcctgggggaggccttcgcctccgatgagccttttgattttggcactcagagcaccaccgagaagatccacaacctgattcccgtcatgctgaggcaccgtctcgtccccccacccgaggaaacctactccctgcacaggaagatggggggctccttcctcatctgctccaagctgaaggcccgcttcccctgcaaggccatgttcgaggaggcctacagcaactactgcaagaggcaggcccagcagtagggctgcgggccacgcccaggccggctccgcgggaactctctccctcagacaggccaaaaaccagtagcgaggtcgtggtgatgctctttttaactcctttgcccaataaggggggtggctgcctggagccccgtagccagcgctttccacggtttctgttgctaaatggttgtagggtgagaagtgcaagaatgaagatgaagccccactgctcggtcagtctgcctccgtgtgtcctctgaaataagcagatgaagatgaaagggcaactttgttttcttctttttcctgatgtgaatgttaagcagaagggagagagtccttactcccttccaatctctgttcagtgcaaaacccagaaacatgaacagatacgattgtgggatttttatcatctgtgtagtaggtgtgtgtatgtgtttctagagtgagatttgtgttttctgcccttttcctctccagccgatgggctggagctgggagaggtgctgagctaacagtgccaacaagtgctccttaagcctgcgaggcccaggcctgtggggctggttctcacctttgacagctgaatgttcctaaagaactgctgccccacagtgagggtgggagcagcggaacagggaatgccagacacaggctcgctgctgctggaaggcggggtgggacttccttcctctgtccggagaggcacaggtgtcaccagttccagccaaaggctcctcacaggcgctgtgaatttttgtacaagtcttgtaattatcgaatcaacaacttgtttcaatttaataaaaatgctcatgggaagtgc

SEQ ID NO: 324503 - DNA, 2828 bp, Homo sapiens
  misc_feature (3)..(4): n is a, c, g, or t
  misc_feature (7)..(7): n is a, c, g, or t
ggnncgngggttggtaaacagatccggagcgcgtggcgggcgtcagcgcggtggccagcgcgcagaggcgggcgcggaggcggctagaaggtgaccgcggatcccagcttcctgcagccagccctgaaggatggctgccatattgggagacaccatcatggtggctaaaggccttgtcaagctgacccaggcggccgtggaaacccacctgcagcacttgggcatcggaggggagctgatcatggcggccagggccctgcagtccacggctgtggagcagattggcatgttcttggggaaggtgcagggtcaggataaacatgaagaatattttgctgagaacttcggcggcccagaaggggagttccacttctcagtcccgcatgcagccggagcctccacagacttctcttcagcctccgctcccgaccagtcagcgcccccatccctgggtcatgcccacagcgagggcccagctcctgcctacgtggccagtggaccctttagagaagccgggttccccggccaggcctcctcccctctgggcagggccaacgggaggctctttgcaaaccccagagactcattctctgccatgggctttcagcgaaggttcttccaccaggaccaatcccctgttgggggcctcacagccgaggacattgagaaggcccggcaggctaaggctcgccccgagaacaagcagcacaaacagacgctcagcgagcatgcccgggagcggaaggtgcctgtgacgaggattggccggctggccaacttcggaggtctggccgtgggcctgggcttcggggcactggcagaggtcgccaagaagagcctgcgctccgaggacccctcagggaagaaggccgtgctgggttccagtcctttcctgtccgaggccaatgcagagcggatcgtgcgcacgctctgcaaggtgcgtggtgcggcactcaagctgggccagatgctgagcatccaggatgatgcctttatcaacccccacctggctaagatcttcgagcgggtgcggcagagcgcggacttcatgccactgaagcagatgatggaggagcggcccttcgccgccgcatccattgggcaggtgcacttggcccgaatgaagggcggccgcgaggtggccatgaagatccagtaccctggcgtggcccagagcatcaacagtgatgtcaacaacctcatggccgtgttgaacatgagcaacatgcttccagaaggcctgttccccgagcacctgatcgacgtgctgaggcgggagctggccctggagtgtgactaccagcgagaggccgcctgtgcccgcaagttcagggacctgctgaagggccaccccttcttctatgtgcctgagattgtggatgagctctgcagcccacatgtgctgaccacagagctggtgtctggcttccccctggaccaggccgaagggctcagccaggagattcggaacgagatctgctacaacatcctggttctgtgcctgagggagctgttcgagttccacttcatgcaaacagaccccaactggtccaacttcttctatgacccccagcagcacaaggtggctcttttggattttggggcaacgcgggaatatgacagatccttcaccgacctctacattcagatcatcagggctgctgccgacagggacagggagactgtgcgggcgaaatccatagagatgaagttcctcaccggctacgaggtcaaggtcatggaagacgcccacttggatgccatcctcatcctgggggaggccttcgcctccgatgagccttttgattttggcactcagagcaccaccgagaagatccacaacctgattcccgtcatgctgaggcaccgtctcgtccccccacccgaggaaacctactccctgcacaggaagatggggggctccttcctcatctgctccaagctgaaggcccgcttcccctgcaaggccatgttcgaggaggcctacagcaactactgcaagaggcaggcccagcagtagggctgcgggccacgcccaggccggctccgcgggaactctctccctcagacaggccaaaaaccagtagcgaggtcgtggtgatgctctttttaactcctttgcccaataaggggggtggctgcctggagccccgtagccagcgctttccacggtttctgttgctaaatggttgtagggtgagaagtgcaagaatgaagatgaagccccactgctcggtcagtctgcctccgtgtgtcctctgaaataagcagatgaagatgaaagggcaactttgttttcttctttttcctgatgtgaatgttaagcagaagggagagagtccttactcccttccaatctctgttcagtgcaaaacccagaaacatgaacagatacgattgtgggatttttatcatctgtgtagtaggtgtgtgtatgtgtttctagagtgagatttgtgttttctgcccttttcctctccagccgatgggctggagctgggagaggtgctgagctaacagtgccaacaagtgctccttaagcctgcgaggcccaggcctgtggggctggttctcacctttgacagctgaatgttcctaaagaactgctgccccacagtgagggtgggagcagcggaacagggaatgccagacacaggctcgctgctgctggaaggcggggtgggacttccttcctctgtccggagaggcacaggtgtcaccagttccagccaaaggctcctcacaggcgctgtgaatttttgtacaagtcttgtaattatcgaatcaacaacttgtttcaatttaataaaaatgctcatgggaagtgc

SEQ ID NO: 324504 - DNA, 1728 bp, Homo sapiens
  misc_feature (3)..(4): n is a, c, g, or t
  misc_feature (7)..(7): n is a, c, g, or t
ggnncgngggttggtaaacagatccggagcgcgtggcgggcgtcagcgcggtggccagcgcgcagaggcgggcgcggaggcggctagaaggtgaccgcggatcccagcttcctgcagccagccctgaaggatggctgccatattgggagacaccatcatggtggctaaaggccttgtcaagctgacccaggcggccgtggaaacccacctgcagcacttgggcatcggaggggagctgatcatggcggccagggccctgcagtccacggctgtggagcagattggcatgttcttggggaaggtgcagggtcaggataaacatgaagaatattttgctgagaacttcggcggcccagaaggggagttccacttctcagtcccgcatgcagccggagcctccacagacttctcttcagcctccgctcccgaccagtcagcgcccccatccctgggtcatgcccacagcgagggcccagctcctgcctacgtggccagtggaccctttagagaagccgggttccccggccaggcctcctcccctctgggcagggccaacgggaggctctttgcaaaccccagagactcattctctgccatgggctttcagcgaaggttcttccaccaggaccaatcccctgttgggggcctcacagccgaggacattgagaaggcccggcaggctaaggctcgccccgagaacaagcagcacaaacagacgctcagcgagcatgcccgggagcggaaggtgcctgtgacgaggattggccggctggccaacttcggaggtctggccgtgggcctgggcttcggggcactggcagaggtcgccaagaagagcctgcgctccgaggacccctcagggaagaaggccgtgctgggttccagtcctttcctgtccgaggccaatgcagagcggatcgtgcgcacgctctgcaaggtgcgtggtgcggcactcaagctgggccagatgctgagcatccaggatgatgcctttatcaacccccacctggctaagatcttcgagcgggtgcggcagagcgcggacttcatgccactgaagcagatgatgaaaactctcaacaacgacctgggccccaactggcgggacaagttggaatacttcgaggagcggcccttcgccgccgcatccattgggcaggtgcacttggcccgaatgaagggcggccgcgaggtggccatgaagatccagtaccctggcgtggcccagagcatcaacagtgatgtcaacaacctcatggccgtgttgaacatgagcaacatgcttccagaaggcctgttccccgagcacctgatcgacgtgctgaggcgggagctggccctggagtgtgactaccagcgagaggccgcctgtgcccgcaagttcagggacctgctgaagggccaccccttcttctatgtgcctgagattgtggatgagctctgcagcccacatgtgctgaccacagaggttctcacctttgacagctgaatgttcctaaagaactgctgccccacagtgagggtgggagcagcggaacagggaatgccagacacaggctcgctgctgctggaaggcggggtgggacttccttcctctgtccggagaggcacaggtgtcaccagttccagccaaaggctcctcacaggcgctgtgaatttttgtacaagtcttgtaattatcgaatcaacaacttgtttcaatttaataaaaatgctcatgggaagtgc

SEQ ID NO: 324505 - DNA, 358 bp, Homo sapiens
gaatgagaactcagcgccccgggcactgtgggaggaacccgggctggtggagggctctggtgtctcgccgccatttatccttcctctcttgccccaggtcatggaagacgcccacttggatgccatcctcatcctgggggaggccttcgcctccgatgagccttttgattttggcactcagagcaccaccgagaagatccacaacctgattcccgtcatgctgaggcaccgtctcgtccccccacccgaggaaacctactccctgcacaggaagatggggggctccttcctcatctgctccaagctgaaggcccgcttcccctgcaaggccatgttcgaggaggcctacagcaactac

SEQ ID NO: 324506 - DNA, 213 bp, Homo sapiens
gtttgttgcaaagtgcaggggacagaggagtgtggtagtaaattccaagtgtgaacttcaatatgggcaatataattacagaaaggccagtaattaggggcctttcaatatgggcaatataattacagaaaggccaggaatttgaggaaaactactatcagtgagcttatctattcccagcatctcttggacatgaaatcatctcccttcccc

SEQ ID NO: 324507 - DNA, 459 bp, Homo sapiens
ctcctggatgtagtcagggcagaaatcctaaataaatataataaattgccacctaatgccagaatggtattgggttgaaaatcatcaaaatatgacattactaagggagacacttcatactattaactcctcaacagcttctttggcctgaccatgggtctataaatactgggtagttaagagaaggtaggaaggaaaagaagaaggagaatctggcattcgtagccaccaataatgaaactttctagtcctgcctcccccaacccttgacacacagaacagcattacatgaaacaggaagctgaatcataattctggttaaataataagaatttatagtttatttcataagctaacatagtgagaagaaggggaaaaaaaacatcctggaagcctcaatggaaaacctatttttgaggggagaaaaaaaactaaacgtttcacggtagcagtaaagca

SEQ ID NO: 324508 - DNA, 1826 bp, Homo sapiens
gtgactccttgatcttcttcctgcgtggagagccttcgcgggtgaggcttaacgcgcaggaggtctcacgagagtggaagcaactctcgcgaattttaaaatttatctttttgcctagcgactgacaacaggctggttgcttggcgtggaatcctaaagtggcctggctttgagactggagtgagaccccagccctaggctggggttctttccattatagaggagacggattcagaagggctacagaccaaggttgttgaaaaccagacatatgatgagcgtctagagattaacgactccgaagaggttgcaagtatttatactccaaccccaagacaccaaggacttcctcgttctgcccatcttcctaacaaggctatggctgataacagcagtgatgagtgtgaagaggaaaataacaaggtcctaagggagggcatgccacaggctccaggccacagaggcaaagacatggaccctgttccacctgcccctgcaagtctcaagtgccaccagaccccttctcatgtacttgagagggtgggatggtacagagagagccagaagcacagaaaggagaagaagaagacctcacagttgacacctcaacggggctttagtgaaaatgaggatgacgatgatgatgatgatgattcatctgaaactgattctgattctgatgatgatgatgaagagcatggagcccctctggaaggggcctatgaccctgcagactatgagcatttgccagtttctgctgaaattaaggaactcttccagtacatcagtaggtacacacctcagttgattgacctggaccacaaactgaagcctttcattcctgattttatcccagctgtcggggatattgatgcattcttaaaggtcccacgtcctgatggaaagcctgacaaccttggcctattggtattggatgaaccttctacaaagcagtcagaccctacggtgctctcactctggttaacagagaattctaagcagcacaacatcacacaacatatgaaagtaaaaagcctagaagatgcagaaaagaatcccaaagccattgacacgtggattgagagcatctctgaattacaccgttctaagccccctgcgactgtgcactacaccaggcccatgcccgacattgacacgctgatgcaggaatggtccccggagtttgaagagcttttgggcaaggtaagcctgcccacggcagagattgattgcagcctggcagagtacattgacatgatctgtgccattctagacatccctgtctacaagagtcggatccagtccctccatctgctcttttccctctactcagaattcaagaactcacagcattttaaagctctcgctgaaggcaagaaagcattcactccttcatccaattccacctcccaagctggagacatggagacattaaccttcagctgagacacttcccaagctgctgtttcaaggctgagctggcccctctgccccagctgagatggacagatcgttgtcagctacttgatgtccttgcccatgccacagcttggctcaggggcagtgcatgtcctgctgccctctctgccagagggcacagaacatgtttgtttaatgaacctgcctgcctcagattgctgtccccggggagttaatgcatctacaccactgtggggatttgagttataagaattggaatttctgagatcccatggaggttagattgggaggaaagcttaaaagatgtcctttttgtgagagggatggaattgttttctttcattcgtaaagttagtgagtaaagattttataaatcaaatgctcta

SEQ ID NO: 324509 - DNA, 508 bp, Homo sapiens
ctagttttagaagtttcaatacgcaataatgtttcttttatacagaaactaataatacaattacctggaaagcagtagcaattaatttttctttttaaacttcttaatcagaaactttaagcagcttgtcagctttgattttcagattgctaacaagcattctgccctccatttttttttttttaagattctctgctattgaaacttctaaaactaggcctagttttagaagtttcattggcagtcgaggggaatcatttttcctctggaatttaatttttctaagggtctctcttcagttaatgccgccttcctgaggctgtctggctccagacctgtctggttctggtctcagggagcgtagctattgcggtaatccaggtgagaggtgattggggtggcagtagtagagatggacagattcagtaaatattttggagttatgtcagccaagctccagtcaggaagtctgaaaccatgctagttatttctaacaaagggtgtttag

SEQ ID NO: 324510 - DNA, 1708 bp, Homo sapiens
gtgactccttgatcttcttcctgcgtggagagccttcgcgggtgaggcttaacgcgcaggaggtctcacgagagtggaagcaactctcgcgaattttaaaatttatctttttgcctagcgactgacaacaggctggttgcttggcgtggaatcctaaagtggcctggctttgagactggagtgagaccccagccctaggctggggttctttccattatagaggagacggattcagaagggctacagaccaaggttgttgaaaaccagacatatgatgagcgtctagagattaacgactccgaagaggttgcaagtatttatactccaaccccaagacaccaaggacttcctcgttctgcccatcttcctaacaaggctatggctgataacagcagtgatgagtgtgaagaggaaaataacaaggagaagaagaagacctcacagttgacacctcaacggggctttagtgaaaatgaggatgacgatgatgatgatgatgattcatctgaaactgattctgattctgatgatgatgatgaagagcatggagcccctctggaaggggcctatgaccctgcagactatgagcatttgccagtttctgctgaaattaaggaactcttccagtacatcagtaggtacacacctcagttgattgacctggaccacaaactgaagcctttcattcctgattttatcccagctgtcggggatattgatgcattcttaaaggtcccacgtcctgatggaaagcctgacaaccttggcctattggtattggatgaaccttctacaaagcagtcagaccctacggtgctctcactctggttaacagagaattctaagcagcacaacatcacacaacatatgaaagtaaaaagcctagaagatgcagaaaagaatcccaaagccattgacacgtggattgagagcatctctgaattacaccgttctaagccccctgcgactgtgcactacaccaggcccatgcccgacattgacacgctgatgcaggaatggtccccggagtttgaagagcttttgggcaaggtaagcctgcccacggcagagattgattgcagcctggcagagtacattgacatgatctgtgccattctagacatccctgtctacaagagtcggatccagtccctccatctgctcttttccctctactcagaattcaagaactcacagcattttaaagctctcgctgaaggcaagaaagcattcactccttcatccaattccacctcccaagctggagacatggagacattaaccttcagctgagacacttcccaagctgctgtttcaaggctgagctggcccctctgccccagctgagatggacagatcgttgtcagctacttgatgtccttgcccatgccacagcttggctcaggggcagtgcatgtcctgctgccctctctgccagagggcacagaacatgtttgtttaatgaacctgcctgcctcagattgctgtccccggggagttaatgcatctacaccactgtggggatttgagttataagaattggaatttctgagatcccatggaggttagattgggaggaaagcttaaaagatgtcctttttgtgagagggatggaattgttttctttcattcgtaaagttagtgagtaaagattttataaatcaaatgctctaaaaaaccacacacacaaacacacacaaaaacaaat

SEQ ID NO: 324511 - DNA, 1961 bp, Homo sapiens
agctctgattaacagaaggaccagaacctccggagacaggcccagcctgctgagcctaagcgccagggaaccggcgggacagcatcagttccgaggtccgcagcctgggacccgcaccaccaccacgaagttctcgcagagcaaaaacgccgggccgtctcaggggcaggtcccagcaaacgagggagtccagctggttggggggtggtgcggaagcgggcacgacgacagatggactggagtcagctccatcggatctccaggagaccgggcacaggaggccacactgctccccgagcccggagcaaaagcactctgccctagaccctcagggcggggctcctccggcccctgccccaggcccgccgacaaggagagacgaccaaggttgttgaaaaccagacatatgatgagcgtctagagattaacgactccgaagaggttgcaagtatttatactccaaccccaagacaccaaggacttcctcgttctgcccatcttcctaacaaggctatggctgataacagcagtgatgagtgtgaagaggaaaataacaaggtcctaagggagggcatgccacaggctccaggccacagaggcaaagacatggaccctgttccacctgcccctgcaagtctcaagtgccaccagaccccttctcatgtacttgagagggtgggatggtacagagagagccagaagcacagaaaggagaagaagaagacctcacagttgacacctcaacggggctttagtgaaaatgaggatgacgatgatgatgatgatgattcatctgaaactgattctgattctgatgatgatgatgaagagcatggagcccctctggaaggggcctatgaccctgcagactatgagcatttgccagtttctgctgaaattaaggaactcttccagtacatcagtaggtacacacctcagttgattgacctggaccacaaactgaagcctttcattcctgattttatcccagctgtcggggatattgatgcattcttaaaggtcccacgtcctgatggaaagcctgacaaccttggcctattggtattggatgaaccttctacaaagcagtcagaccctacggtgctctcactctggttaacagagaattctaagcagcacaacatcacacaacatatgaaagtaaaaagcctagaagatgcagaaaagaatcccaaagccattgacacgtggattgagagcatctctgaattacaccgttctaagccccctgcgactgtgcactacaccaggcccatgcccgacattgacacgctgatgcaggaatggtccccggagtttgaagagcttttgggcaaggtaagcctgcccacggcagagattgattgcagcctggcagagtacattgacatgatctgtgccattctagacatccctgtctacaagagtcggatccagtccctccatctgctcttttccctctactcagaattcaagaactcacagcattttaaagctctcgctgaaggcaagaaagcattcactccttcatccaattccacctcccaagctggagacatggagacattaaccttcagctgagacacttcccaagctgctgtttcaaggctgagctggcccctctgccccagctgagatggacagatcgttgtcagctacttgatgtccttgcccatgccacagcttggctcaggggcagtgcatgtcctgctgccctctctgccagagggcacagaacatgtttgtttaatgaacctgcctgcctcagattgctgtccccggggagttaatgcatctacaccactgtggggatttgagttataagaattggaatttctgagatcccatggaggttagattgggaggaaagcttaaaagatgtcctttttgtgagagggatggaattgttttctttcattcgtaaagttagtgagtaaagattttataaatcaaatgctcta

SEQ ID NO: 324512 - DNA, 1493 bp, Homo sapiens
tgcttcctttattcccccaagaaacttaggtgggatcctatctgcaagataagggtgaaagtggagaccaaggttgttgaaaaccagacatatgatgagcgtctagagattaacgactccgaagaggttgcaagtatttatactccaaccccaagacaccaaggacttcctcgttctgcccatcttcctaacaaggctatggctgataacagcagtgatgagtgtgaagaggaaaataacaaggagaagaagaagacctcacagttgacacctcaacggggctttagtgaaaatgaggatgacgatgatgatgatgatgattcatctgaaactgattctgattctgatgatgatgatgaagagcatggagcccctctggaaggggcctatgaccctgcagactatgagcatttgccagtttctgctgaaattaaggaactcttccagtacatcagtaggtacacacctcagttgattgacctggaccacaaactgaagcctttcattcctgattttatcccagctgtcggggatattgatgcattcttaaaggtcccacgtcctgatggaaagcctgacaaccttggcctattggtattggatgaaccttctacaaagcagtcagaccctacggtgctctcactctggttaacagagaattctaagcagcacaacatcacacaacatatgaaagtaaaaagcctagaagatgcagaaaagaatcccaaagccattgacacgtggattgagagcatctctgaattacaccgttctaagccccctgcgactgtgcactacaccaggcccatgcccgacattgacacgctgatgcaggaatggtccccggagtttgaagagcttttgggcaaggtaagcctgcccacggcagagattgattgcagcctggcagagtacattgacatgatctgtgccattctagacatccctgtctacaagagtcggatccagtccctccatctgctcttttccctctactcagaattcaagaactcacagcattttaaagctctcgctgaaggcaagaaagcattcactccttcatccaattccacctcccaagctggagacatggagacattaaccttcagctgagacacttcccaagctgctgtttcaaggctgagctggcccctctgccccagctgagatggacagatcgttgtcagctacttgatgtccttgcccatgccacagcttggctcaggggcagtgcatgtcctgctgccctctctgccagagggcacagaacatgtttgtttaatgaacctgcctgcctcagattgctgtccccggggagttaatgcatctacaccactgtggggatttgagttataagaattggaatttctgagatcccatggaggttagattgggaggaaagcttaaaagatgtcctttttgtgagagggatggaattgttttctttcattcgtaaagttagtgagtaaagattttataaatcaaatgctcta

SEQ ID NO: 324513 - DNA, 1888 bp, Homo sapiens
acaggctctcactctgttgcccgggctggagtgcagcagcatgaacactggacactgctcactgcagcctcgaactcctgggtttaagcagacctcctgcgtcagcctcccgagtagctgggaccacaggcgcatggcatcacacccagctaattttttttctttttttttttttgtagatgggatcttgccatattgtccagtctaggctcaaactcctgggctcaagtgatcctcctgcctccccttcccaaagtgttgggattataggcatgagccactgcccctggccagagtttatattatttatgtaatggcagataatttgaatagtataatgtctaacccaatgccttaagcacagtaatgtttagtaaatatatcttgaattgaactggcagagccatgactagaattcagtctcctgtctctttagccagatgttccaataaaccttgttttataaaatggttagagcataaaatattaaaaactaaaaaatacttgtttttaaaaatcattttaacaataatctaaaggaaaaactttttttctaaggacttcctcgttctgcccatcttcctaacaaggctatggctgataacagcagtgatgagtgtgaagaggaaaataacaaggagaagaagaagacctcacagttgacacctcaacggggctttagtgaaaatgaggatgacgatgatgatgatgatgattcatctgaaactgattctgattctgatgatgatgatgaagagcatggagcccctctggaaggggcctatgaccctgcagactatgagcatttgccagtttctgctgaaattaaggaactcttccagtacatcagtaggtacacacctcagttgattgacctggaccacaaactgaagcctttcattcctgattttatcccagctgtcggggatattgatgcattcttaaaggtcccacgtcctgatggaaagcctgacaaccttggcctattggtattggatgaaccttctacaaagcagtcagaccctacggtgctctcactctggttaacagagaattctaagcagcacaacatcacacaacatatgaaagtaaaaagcctagaagatgcagaaaagaatcccaaagccattgacacgtggattgagagcatctctgaattacaccgttctaagccccctgcgactgtgcactacaccaggcccatgcccgacattgacacgctgatgcaggaatggtccccggagtttgaagagcttttgggcaaggtaagcctgcccacggcagagattgattgcagcctggcagagtacattgacatgatctgtgccattctagacatccctgtctacaagagtcggatccagtccctccatctgctcttttccctctactcagaattcaagaactcacagcattttaaagctctcgctgaaggcaagaaagcattcactccttcatccaattccacctcccaagctggagacatggagacattaaccttcagctgagacacttcccaagctgctgtttcaaggctgagctggcccctctgccccagctgagatggacagatcgttgtcagctacttgatgtccttgcccatgccacagcttggctcaggggcagtgcatgtcctgctgccctctctgccagagggcacagaacatgtttgtttaatgaacctgcctgcctcagattgctgtccccggggagttaatgcatctacaccactgtggggatttgagttataagaattggaatttctgagatcccatggaggttagattgggaggaaagcttaaaagatgtcctttttgtgagagggatggaattgttttctttcattcgtaaagttagtgagtaaagattttataaatcaaatgctcta

SEQ ID NO: 324514 - DNA, 1096 bp, Homo sapiens
gtgactccttgatcttcttcctgcgtggagagccttcgcgggtgaggcttaacgcgcaggaggtctcacgagagtggaagcaactctcgcgaattttaaaatttatctttttgcctagcgactgacaacaggctggttgcttggcgtggaatcctaaagtggcctggctttgagactggagtgagaccccagccctaggctggggttctttccattatagaggagacggattcagaagggctacagaccaaggttgttgaaaaccagacatatgatgagcgtctagagattaacgactccgaagaggttgcaagtatttatactccaaccccaagacaccaaggacttcctcgttctgcccatcttcctaacaaggctatggctgataacagcagtgatgagtgtgaagaggaaaataacaaggagaagaagaagacctcacagttgacacctcaacggggctttagtgaaaatgaggatgacgatgatgatgatgatgattcatctgaaactgattctgattctgatgatgatgatgaagagcatggagcccctctggaaggggcctatgaccctgcagactatgagcatttgccagtttctgctgaaattaaggaactcttccagtacatcagtaggtacacacctcagttgattgacctggaccacaaactgaagcctttcattcctgattttatcccagctgtcggggatattgatgcattcttaaaggtcccacgtcctgatggaaagcctgacaaccttggcctattggtattggatgaaccttctacaaagcagtcagaccctacggtgctctcactctggttaacagagaattctaagcagcacaacatcacacaacatatgaaagtaaaaagcctagaagatgcagaaaagaatcccaaagccattgacacgtggattgagagcatctctgaattacaccgttctaagccttcttacaaagggaaaaagcaagaacatacgatcacgcactggtgactcgttaccccaggacacgtcggggagtgcactgaaacattccgtgtctgagataaaactacacaccttgtttattttcattcatgataag

SEQ ID NO: 324515 - DNA, 1119 bp, Homo sapiens
  misc_feature (43)..(43): n is a, c, g, or t
  misc_feature (85)..(85): n is a, c, g, or t
  misc_feature (93)..(94): n is a, c, g, or t
  misc_feature (111)..(111): n is a, c, g, or t
  misc_feature (143)..(143): n is a, c, g, or t
  misc_feature (152)..(152): n is a, c, g, or t
  misc_feature (159)..(160): n is a, c, g, or t
  misc_feature (168)..(168): n is a, c, g, or t
  misc_feature (172)..(172): n is a, c, g, or t
  misc_feature (199)..(199): n is a, c, g, or t
  misc_feature (210)..(210): n is a, c, g, or t
  misc_feature (215)..(215): n is a, c, g, or t
  misc_feature (232)..(232): n is a, c, g, or t
  misc_feature (234)..(235): n is a, c, g, or t
  misc_feature (246)..(246): n is a, c, g, or t
  misc_feature (259)..(259): n is a, c, g, or t
  misc_feature (278)..(278): n is a, c, g, or t
  misc_feature (283)..(283): n is a, c, g, or t
  misc_feature (292)..(292): n is a, c, g, or t
  misc_feature (310)..(310): n is a, c, g, or t
  misc_feature (313)..(313): n is a, c, g, or t
  misc_feature (333)..(333): n is a, c, g, or t
  misc_feature (349)..(349): n is a, c, g, or t
  misc_feature (360)..(360): n is a, c, g, or t
  misc_feature (362)..(362): n is a, c, g, or t
  misc_feature (393)..(393): n is a, c, g, or t
  misc_feature (439)..(439): n is a, c, g, or t
  misc_feature (442)..(442): n is a, c, g, or t
  misc_feature (457)..(457): n is a, c, g, or t
  misc_feature (477)..(477): n is a, c, g, or t
  misc_feature (542)..(542): n is a, c, g, or t
  misc_feature (569)..(569): n is a, c, g, or t
  misc_feature (581)..(581): n is a, c, g, or t
  misc_feature (608)..(608): n is a, c, g, or t
agcccttagcggggtggcttcttcaacctgcttgggtttaaancatggatagaaatttcttaaatggcatgcaagcaaagcattncagcagcnnagcattaattggaaaangtaaaaaaatggccctatggaatgattggcanggaaaaaangaaatgnncgcaaaanggcncattttggagcagctgttgggattttngatgatggcantgctncttagaaatttagcagncnnggttgcttaanggcgcgcgcgctngctgagcttggtggcagcntagcnagcgcatgngcgcgcatttgcgcgcgnagnattttgagcagctgcttganttggcatgggaaattnggtgcgcgcgngngatgtttttgaaatgatggctttttttgtgnggcacatgtgtaaatggcgctgcgcgcagcggggcatgatgatttngantttggcatggcgctngggcatgatgtaagcatttngagcagttgagtgcttgtggcgcatttgctatgagcatgcgcgcttgtgctagcaatgatgtgcnggatgcgcagtgccgctgcgcatgctngctgcttttgcncctgctagctgcatgaatttgcaatgnagctgcagcatgcattttctaaaatgctgctgcgcttgaagtgcaatgaaatgcattcagctgcgcttgcatgcgcaattgcgcagcgctgctcccaagctggagacatggagacattaaccttcagctgagacacttcccaagctgctgtttcaaggctgagctggcccctctgccccagctgagatggacagatcgttgtcagctacttgatgtccttgcccatgccacagcttggctcaggggcagtgcatgtcctgctgccctctctgccagagggcacagaacatgtttgtttaatgaacctgcctgcctcagattgctgtccccggggagttaatgcatctacaccactgtggggatttgagttataagaattggaatttctgagatcccatggaggttagattgggaggaaagcttaaaagatgtcctttttgtgagagggatggaattgttttctttcattcgtaaagttagtgagtaaagattttataaatcaaatgctcta

SEQ ID NO: 324516 - DNA, 682 bp, Homo sapiens
gtgactccttgatcttcttcctgcgtggagagccttcgcgggtgaggcttaacgcgcaggaggtctcacgagagtggaagcaactctcgcgaattttaaaatttatctttttgcctagcgactgacaacaggctggttgcttggcgtggaatcctaaagtggcctggctttgagactggagtgagaccccagccctaggctggggttctttccattatagaggagacggattcagaagggctacagaccaaggttgttgaaaaccagacatatgatgagcgtctagagattaacgactccgaagaggttgcaagtatttatactccaaccccaagacaccaaggtaagagaggaaagaagagaaatgctactgaaagagcaggatggattcacggttgtcttcaagaagttcttattttataatagcaaatgttgactttcagcgtcaatttacttcacttgccattgtttgttttctgactagttaagggggagaaatcatagccttccaaattacaggatcttcccccaatccaaccctgtcaccatttacttcatgttactgctttgctcactgtctgccaggaattcactgttctttttctttttcttttctttttttttaacttatgtttttcctagctttgaagatgcttcataacctccccttagcctgcaaccc

SEQ ID NO: 324517 - DNA, 186 bp, Homo sapiens
ctcgttctttcagaaccaagttccctcatgaatggaagcaggaaggaaataaagggggttcattttaaagaaattaattcttgttaaaatatagcaattagcatatccctaatactcaatattccctctcctcttccttgcagcattttaaagctctcgctgaaggcaagaaagcattcactcctt

SEQ ID NO: 324518 - DNA, 348 bp, Homo sapiens
agaggcccagaggctgggaacatatttgatcaacctgaggtcctgtggatcctggcaactactggctgagattgtagacataaagattgtaatttctctagtattacttagctacctcctccaaaccccaggccctgggtaactttggtatgcccagtctaggttctcctgaagccttcctgatgtgccagattgaagacctctccttcatcctagaatatgctgatccagaggttgctgatgttatcagttcacgtttcttgttcatatttacctttatacttttaggcccatgcccgacattgacacgctgatgcaggaatggtccccggagtttgaagagctttt

SEQ ID NO: 324519 - DNA, 360 bp, Homo sapiens
tacaccactgtggggatttgagttataagaattggaatttctgagatcccatggaggttagattgggaggaaagcttaaaagatgtcctttttgtgagagggatggaattgttttctttcattcgtaaagttagtgagtaaagattttataaatcaaatgctctattatattgtcagattattctgctatttaatatgaaagagaaaaggctgactgagcataacgcagagacacaggaactttgcttagtaatgggcattaaatgaagagtagttaaagcaaacaaattttgtgaaataaaatgaaaccccaatcctccaagattggcagtcgaggggaatcatttttcctctggaatt

SEQ ID NO: 324520 - DNA, 418 bp, Homo sapiens
aattccacctcccaagctggagacatggagacattaaccttcagctgagacacttcccaagctgctgtttcaaggctgagctggcccctctgccccagctgagatggacagatcgttgtcagctacttgatgtccttgcccatgccacagcttggctcaggggcagtgcatgtcctgctgccctctctgccagagggcacagaacatgtttgtttaatgaacctgcctgcctcagattgctgtccccggggagttaatgcatctacaccactgtggggatttgagttataagaattggaatttctgagatcccatggaggttagattgggaggaaagcttaaaagatgtcctttttgtgagagggatggaattgttttctttcattcgtaaagttagtgagtaaagattttataaatc

SEQ ID NO: 324521 - DNA, 1673 bp, Homo sapiens
gtgactccttgatcttcttcctgcgtggagagccttcgcgggtgaggcttaacgcgcaggaggtctcacgagagtggaagcaactctcgcgaattttaaaatttatctttttgcctagcgactgacaacaggctggttgcttggcgtggaatcctaaagtggcctggctttgagactggagtgagaccccagccctaggctggggttctttccattatagaggagacggattcagaagggctacagaccaaggttgttgaaaaccagacatatgatgagcgtctagagattaacgactccgaagaggttgcaagtatttatactccaaccccaagacaccaaggacttcctcgttctgcccatcttcctaacaaggctatggctgataacagcagtgatgagtgtgaagaggaaaataacaaggagaagaagaagacctcacagttgacacctcaacggggctttagtgaaaatgaggatgacgatgatgatgatgatgattcatctgaaactgattctgattctgatgatgatgatgaagagcatggagcccctctggaaggggcctatgaccctgcagactatgagcatttgccagtttctgctgaaattaaggaactcttccagtacatcagtaggtacacacctcagttgattgacctggaccacaaactgaagcctttcattcctgattttatcccagctgtcggggatattgatgcattcttaaaggtcccacgtcctgatggaaagcctgacaaccttggcctattggtattggatgaaccttctacaaagcagtcagaccctacggtgctctcactctggttaacagagaattctaagcagcacaacatcacacaacatatgaaagtaaaaagcctagaagatgcagaaaagaatcccaaagccattgacacgtggattgagagcatctctgaattacaccgttctaagccccctgcgactgtgcactacaccaggcccatgcccgacattgacacgctgatgcaggaatggtccccggagtttgaagagcttttgggcaaggtaagcctgcccacggcagagattgattgcagcctggcagagtacattgacatgatctgtgccattctagacatccctgtctacaagagtcggatccagtccctccatctgctcttttccctctactcagaattcaagaactcacagcattttaaagctctcgctgaaggcaagaaagcattcactccttcatccaattccacctcccaagctggagacatggagacattaaccttcagctgagacacttcccaagctgctgtttcaaggctgagctggcccctctgccccagctgagatggacagatcgttgtcagctacttgatgtccttgcccatgccacagcttggctcaggggcagtgcatgtcctgctgccctctctgccagagggcacagaacatgtttgtttaatgaacctgcctgcctcagattgctgtccccggggagttaatgcatctacaccactgtggggatttgagttataagaattggaatttctgagatcccatggaggttagattgggaggaaagcttaaaagatgtcctttttgtgagagggatggaattgttttctttcattcgtaaagttagtgagtaaagattttataaatcaaatgctcta

SEQ ID NO: 324522 - DNA, 913 bp, Homo sapiens
gtgactccttgatcttcttcctgcgtggagagccttcgcgggtgaggcttaacgcgcaggaggtctcacgagagtggaagcaactctcgcgaattttaaaatttatctttttgcctagcgactgacaacaggctggttgcttggcgtggaatcctaaagtggcctggctttgagactggagtgagaccccagccctaggctggggttctttccattatagaggagacggattcagaagggctacagaccaaggttgttgaaaaccagacatatgatgagcgtctagagattaacgactccgaagaggttgcaagtatttatactccaaccccaagacaccaaggacttcctcgttctgcccatcttcctaacaaggctatggctgataacagcagtgatgagtgtgaagaggaaaataacaaggagaagaagaagacctcacagttgacacctcaacggggctttagtgaaaatgaggatgacgatgatgatgatgatgattcatctgaaactgattctgattctgatgatgatgatgaagagcatggagcccctctggaaggggcctatgaccctgcagactatgagcatttgccagtttctgctgaaattaaggaactcttccagtacatcagtaggtacacacctcagttgattgacctggaccacaaactgaagcctttcattcctgattttatcccagctgtcggggatattgatgcattcttaaaggtcccacgtcctgatggaaagcctgacaaccttggcctattggtattggatgaaccttctacaaagcagtcagaccctacggtgctctcactctggttaacagagaattctaagcagcacaacatcacacaacatttgaaagtaaaagcctgaaaatgccaagcccctgcgatgggcccta

SEQ ID NO: 324523 - DNA, 1808 bp, Homo sapiens
agctctgattaacagaaggaccagaacctccggagacaggcccagcctgctgagcctaagcgccagggaaccggcgggacagcatcagttccgaggtccgcagcctgggacccgcaccaccaccacgaagttctcgcagagcaaaaacgccgggccgtctcaggggcaggtcccagcaaacgagggagtccagctggttggggggtggtgcggaagcgggcacgacgacagatggactggagtcagctccatcggatctccaggagaccgggcacaggaggccacactgctccccgagcccggagcaaaagcactctgccctagaccctcagggcggggctcctccggcccctgccccaggcccgccgacaaggagagacgaccaaggttgttgaaaaccagacatatgatgagcgtctagagattaacgactccgaagaggttgcaagtatttatactccaaccccaagacaccaaggacttcctcgttctgcccatcttcctaacaaggctatggctgataacagcagtgatgagtgtgaagaggaaaataacaaggagaagaagaagacctcacagttgacacctcaacggggctttagtgaaaatgaggatgacgatgatgatgatgatgattcatctgaaactgattctgattctgatgatgatgatgaagagcatggagcccctctggaaggggcctatgaccctgcagactatgagcatttgccagtttctgctgaaattaaggaactcttccagtacatcagtaggtacacacctcagttgattgacctggaccacaaactgaagcctttcattcctgattttatcccagctgtcggggatattgatgcattcttaaaggtcccacgtcctgatggaaagcctgacaaccttggcctattggtattggatgaaccttctacaaagcagtcagaccctacggtgctctcactctggttaacagagaattctaagcagcacaacatcacacaacatatgaaagtaaaaagcctagaagatgcagaaaagaatcccaaagccattgacacgtggattgagagcatctctgaattacaccgttctaagccccctgcgactgtgcactacaccaggcccatgcccgacattgacacgctgatgcaggaatggtccccggagtttgaagagcttttgggcaaggtaagcctgcccacggcagagattgattgcagcctggcagagtacattgacatgatctgtgccattctagacatccctgtctacaagagtcggatccagtccctccatctgctcttttccctctactcagaattcaagaactcacagcattttaaagctctcgctgaaggcaagaaagcattcactccttcatccaattccacctcccaagctggagacatggagacattaaccttcagctgagacacttcccaagctgctgtttcaaggctgagctggcccctctgccccagctgagatggacagatcgttgtcagctacttgatgtccttgcccatgccacagcttggctcaggggcagtgcatgtcctgctgccctctctgccagagggcacagaacatgtttgtttaatgaacctgcctgcctcagattgctgtccccggggagttaatgcatctacaccactgtggggatttgagttataagaattggaatttctgagatcccatggaggttagattgggaggaaagcttaaaagatgtcctttttgtgagagggatggaattgttttctttcattcgtaaagttagtgagtaaagattttataaatcaaatgctcta

SEQ ID NO: 324524 - DNA, 1141 bp, Homo sapiens
gtgactccttgatcttcttcctgcgtggagagccttcgcgggtgaggcttaacgcgcaggaggtctcacgagagtggaagcaactctcgcgaattttaaaatttatctttttgcctagcgactgacaacaggctggttgcttggcgtggaatcctaaagtggcctggctttgagactggagtgagaccccagccctaggctggggttctttccattatagaggagacggattcagaagggctacagaccaaggttgttgaaaaccagacatatgatgagcgtctagagattaacgactccgaagaggttgcaagtatttatactccaaccccaagacaccaaggacttcctcgttctgcccatcttcctaacaaggctatggctgataacagcagtgatgagtgtgaagaggaaaataacaaggagaagaagaagacctcacagttgacacctcaacggggctttagtgaaaatgaggatgacgatgatgatgatgatgattcatctgaaactgattctgattctgatgatgatgatgaagagcatggagcccctctggaaggggcctatgaccctgcagactatgagcatttgccagtttctgctgaaattaaggaactcttccagtacatcagtaggtacacacctcagttgattgacctggaccacaaactgaagcctttcattcctgattttatcccagctgtcggggatattgatgcattcttaaaggtcccacgtcctgatggaaagcctgacaaccttggcctattggtattggatgaaccttctacaaagcagtcagaccctacggtgctctcactctggttaacagagaattctaagcagcacaacatcacacaacatatgaaagtaaaaagcctagaagatgcagaaaagaatcccaaagccattgacacgtggattgagagcatctctgaattacaccgttctaagccccctgcgactgtgcactacaccaggcccatgcccgacattgacacgctgatgcaggaatggtccccggagtttgaagagcttttgggcaaggtaagcctgcccacggcagagattgattgcagcctggcagagtacattgacatgatctgtgccattctagacatcctgtcttcggtcgttt

SEQ ID NO: 324525 - DNA, 363 bp, Homo sapiens
ctcgggtgctattgctgtcccaagagtcctgccaaaactcacaccacactgtcttttatgtaagggcaaacccctaaacaccatagcaactcagaacagactcaaacaaggagaacctgtcatgaggttccagtgtgctggactatgaaagactagtcacagggttgtctatactaaaaatctccttactgatctctgggttcctgtttccatggtgattttacacacactacagaccctgtttcgtacagcaagacatagactaacaaagcagaaccattttaataatttcaggttcattaaagaggccttagactcttttactaagcatatcttcatgcacacactgtatatttggggatg

SEQ ID NO: 324526 - DNA, 1781 bp, Homo sapiens
ccaggaaggaggggcttagcttcggccgccattctgaggcagccacctccacccccacccccaccgcaacagccagccaaggcgctaggagtctccagctgccggcctcagctggtgcactagtaccgcagtcccagcaccttgcccggaatcccgtcaccccgcaggatggggcagggacaggtcatcttcaagccaagggaagagcaggttcactgccacccgcgatccccttttcttcctggatcttacagccaggctagggggcgtcgaacccaatggggccttagatcattccttgtccggaacagaatctctgcggaaccgccagacagacacacagctgctgctgcggatactggcttcttggggccaagacctcaacatgcaggacctcacatttccagcgatgcacacgttttttgagaacatcccgacctttcctcctccccaggaagatgctgcagacgtgcccgccatcccaggtctcgaagagctcttaaggcaaacctccggcacccgggccacacccaccggccggcccactctcctcgcgcatcccccaacctgccggcctaaggggaatggttcccttccctggccacatggtagacccttctcccatccagccctttctcccacaccatcccgaaagaactattcatccatccttccagaacagtaccccggcaaacggcatctctcacctgggtatcgaacccgttttccaccgagccgctcttccgcagcgggagcccctcccccgctggctcctgcagcccctgcagcacctgcgatttcagggggatctggctaggataggtggtcttgctcacctccaccttgcttcccaacttcaggtagcagggctgggggcccgcccgggccgggggcacgtgcaggatgggcgcggcgctgtgcacgggtttgggcagtcccgacttcattttggaggcgaccaggatggccggcatcttctcccggggcttgggctttcccagcacgtccctggcagcggcggcgggggcgaccgctaaaggcagcgcgggtagcagagcaggcgccgggccttagcccacgaggcgcccaccaccagcggctaaaaaaaaaatccccaggtcggggaactcgaagcaatcgggcgagcgcgcctttggggtgccgggatgggaatgggggactggccacggcgctcagcgggtcccacctggacggatgctgccgccgggtctcacacctctcctgggtggcctttcaagagctctgggcgctcaggggctgccgcctcttgcaaatttcctcctgggaaacagaggcttggacgcccatattaacttgtcactgcatctccgaagtgaggaggcccctttggaagagacagaggcggcggcgacccacgagtcccgttccggaggctacgggtctgagccggcgagagaaagagcgagcagccaaggaaggaaaggagacagcagcgaaggaaggagagaagaagggcgcaagggtcccaagacgtctccaccgagaggcagctgccaccctgctcgcgagcaccgcagtgtcacccgcgacgcagcagaggtgcggcaagagcccccgaaaggtctctcttggggtgacagtcaccgctgcccagaaggcccccggactgagagcaccttagcgcctgcgggtctgcacatgctccgtgagctagatagaggcaaggctgtggccgtgggggcgggcgccgggacgcgcggctggcgggccgggcagggctgcgctcgggagcggccgcc

SEQ ID NO: 324527 - DNA, 331 bp, Homo sapiens
cccacgagtcccgttccggaggctacgggtctgagccggcgagagaaagagcgagcagccaaggaaggaaaggagacagcagcgaaggaaggagagaagaagggcgcaagggtcccaagacgtctccaccgagaggcagctgccaccctgctcgcgagcaccgcagtgtcacccgcgacgcagcagaggtgcggcaagagcccccgaaaggtctctcttggggtgacagtcaccgctgcccagaaggcccccggactgagagcaccttagcgcctgcgggtctgcacatgctccgtgagctagatagaggcaaggctgtggccgtgggggc

SEQ ID NO: 324528 - DNA, 357 bp, Homo sapiens
ggctctgtctggaaaggtaggagtcaccaattctcttcaagccatctcccatccccacgccccgtcactcgggctaccaacaccaggatctaccacccaggaaggaggggcttagcttcggccgccattctgaggcagccacctccacccccacccccaccgcaacagccagccaaggcgctaggagtctccagctgccggcctcagctggtgcactagtaccgcagtcccagcaccttgcccggaatcccgtcaccccgcaggatggggcagggacaggtcatcttcaagccaagggaagagcaggttcactgccacccgcgatccccttttcttcctggatcttacagccaggct

SEQ ID NO: 324529 - DNA, 992 bp, Homo sapiens
gatgagaacagagccctggagaaaagagccttgcaagggccctgcaggagagagtccctgggaaaggaaaggaaggggcagaagagtggggtgatgctcttattggtaagtgggagtaaggggcaagcagcaggatcagctatggagacattagggatttgtaattaaataacaatttatgtcttagttatgaagtgcataacaatttatattgacctgagagtgcatataggcgttttagaaaatgctttcattagtcagttcccaggcttaactttagagcagtaacttacctctgccattgttcattacatttcttaagccttgccctctgtgcccagtacagtgctgggagcatcaggatgagtggatggggccttccccgtaagactcatactgcgcgtatgcacaagcacacacctggctctgcaagagctcagctctctcctgcttcctcacaggtttgcacagatgaagaatgaagcctagtagaatatggacttggaaaattctcttaatcactactgtatgtaatatttacataaagactgtgctgagaagcagtataagcctttttaaccttccaagactgaagactgcacaggtgacaagcgtcacttctcctgctgctcctgtttgtctgatgtggcaaaaggccctctggagggctggtggccacgaggttaaagaagctgcatgttaagtgccattactactgtacacggaccatcgcctctgtctcctccgtgtctcgcgcgactgagaaccgtgacatcagcgtagtgttttgacctttctaggttcaaaagaagttgtagtgttatcaggcatcccataccttgtttttaatctcctgtttgttgagtgcactgactgtgaaacctttaccttttttgttgttgttggcaagctgcaggtttgtaatgcaaaaggctgattactgaaatttaagaaaaaggttcttttttcaataaatggtttattttaggaaa

SEQ ID NO: 324530 - DNA, 5793 bp, Homo sapiens
ttcgagcctgtggaaggctgcgctgtcaagagaccggagttgcgagcgtctgggtgacgtccgtcctcctggaaggtgggatccgggtggcaggtccctgggcggcgactccggccgggctcatagcgtcgcgcccgccccgctcatcggccctacccagcgtccctcccagaccgacgaccgcctgggaagcctcgagctcccagcccgctgcacagcccggctccgctccacagtcccccactgccaccggccggggcgacaccgggcgagctggcgagacccggctccaggaccgaatcgcgccgacacttgacggcgctccccgcccctccctgccgccgtctccgcccccgtccggtcgcattccggcgcccgccgccgccgccgccaccgccgccgatctgggaggcttgtccctcgccgcccaccgtagccccggcgctcggccggtcgccgtttccaagatggccgcggcgcgcacggctcctgcggcggggtagaggcggaggcggagtcgagtcactcccgcacttcggggctccggtgccccgcgccaggctgcagcttactgcccgccgcggccatgcggggctccgtgcacggatgagagaagccgctgccgcgctggtccctcctcccgcctttgccgtcacgcctgccgccgccatggaggagccgccgccaccgccgccgccgccaccaccgccaccggaacccgagaccgagtcagaacccgagtgctgcttggcggcgaggcaagagggcacattgggagattcagcttgcaagagtcctgaatctgatctagaagacttctccgatgaaacaaatacagagaatctttatggtacctctccccccagcacacctcgacagatgaaacgcatgtcaaccaaacatcagaggaataatgtggggaggccagccagtcggtctaatttgaaagaaaaaatgaatgcaccaaatcagcctccacataaagacactggaaaaacagtggagaatgtggaagaatacagctataagcaggagaaaaagatccgagcagctcttagaacaacagagcgtgatcataaaaaaaatgtacagtgctcattcatgttagactcagtgggtggatctttgccaaaaaaatcaattccagatgtggatctcaataagccttacctcagccttggctgtagcaatgctaagcttccagtatctgtgcccatgcctatagccagacctgcacgccagacttctaggactgactgtccagcagatcgtttaaagttttttgaaactttacgacttttgctaaagcttacctcagtctcaaagaaaaaagacagggagcaaagaggacaagaaaatacgtctggtttctggcttaaccgatctaacgaactgatctggttagagctacaagcctggcatgcaggacggacaattaacgaccaggacttctttttatatacagcccgtcaagccatcccagatattattaatgaaatccttactttcaaagtcgactatgggagcttcgcctttgttagagatagagctggttttaatggtacttcagtagaagggcagtgcaaagccactcctggaacaaagattgtaggttactcaacacatcatgagcatctccaacgccagagggtctcatttgagcaggtaaaacggataatggagctgctagagtacatagaagcactttatccatcattgcaggctcttcagaaggactatgaaaaatatgctgcaaaagacttccaggacagggtgcaggcactctgtttgtggttaaacatcacaaaagacttaaatcagaaattaaggattatgggcactgttttgggcatcaagaatttatcagacattggctggccagtgtttgaaatcccttcccctcgaccatccaaaggtaatgagccggagtatgagggtgatgacacagaaggagaattaaaggagttggaaagtagtacggatgagagtgaagaagaacaaatctctgatcctagggtaccggaaatcagacagcccatagataacagcttcgacatccagtcgcgggactgcatatccaagaagcttgagaggctcgaatctgaggatgattctcttggctggggagcaccagactggagcacagaagcaggctttagtagacattgtctgacttctatttatagaccatttgtagacaaagcactgaagcagatggggttaagaaagttaattttaagacttcacaagctaatggatggttccttgcaaagggcacgtatagcattggtaaagaacgatcgtccagtggagttttctgaatttccagatcccatgtggggttcagattatgtgcagttgtcaaggacaccaccttcatctgaggagaaatgcagtgctgtgtcgtgggaggagctgaaggccatggatttaccttcattcgaacctgccttcctagttctctgccgagtccttctgaatgtcatacatgagtgtctgaagttaagattggagcagagacctgctggagaaccatctctcttgagtattaagcagctggtgagagagtgtaaggaggtcctgaagggcggcctgctgatgaagcagtactaccagttcatgctgcaggaggttctggaggacttggagaagcccgactgcaacattgacgcttttgaagaggatctacataaaatgcttatggtgtattttgattacatgagaagctggatccaaatgctacagcaattacctcaagcatcgcatagtttaaaaaatctgttagaagaagaatggaatttcaccaaagaaataactcattacatacggggaggagaagcacaggccgggaagcttttctgtgacattgcaggaatgctgctgaaatctacaggaagttttttagaatttggcttacaggagagctgtgctgaattttggactagtgcggatgacagcagtgcttccgacgaaatcaggaggtctgttatagagatcagtcgagccctgaaggagctcttccatgaagccagagaaagggcttccaaagcacttggatttgctaaaatgttgagaaaggacctggaaatagcagcagaattcaggctttcagccccagttagagacctcctggatgttctgaaatcaaaacagtatgtcaaggtgcaaattcctgggttagaaaacttgcaaatgtttgttccagacactcttgctgaggagaagagtattattttgcagttactcaatgcagctgcaggaaaggactgttcaaaagattcagatgacgtactcatcgatgcctatctgcttctgaccaagcacggtgatcgagcccgtgattcagaggacagctggggcacctgggaggcacagcctgtcaaagtcgtgcctcaggtggagactgttgacaccctgagaagcatgcaggtggataatcttttactagttgtcatgcagtctgcgcatctcacaattcagagaaaagctttccagcagtccattgagggacttatgactctgtgccaggagcagacatccagtcagccggtcatcgccaaagctttgcagcagctgaagaatgatgcattggagctatgcaacaggataagcaatgccattgaccgcgtggaccacatgttcacatcagaatttgatgctgaggttgatgaatctgaatctgtcaccttgcaacagtactaccgagaagcaatgattcaggggtacaattttggatttgagtatcataaagaagttgttcgtttgatgtctggggagtttagacagaagataggagacaaatatataagctttgcccggaagtggatgaattatgtcctgactaaatgtgagagtggtagaggtacaagacccaggtgggcgactcaaggatttgattttctacaagcaattgaacctgcctttatttcagctttaccagaagatgacttcttgagtttacaagccttgatgaatgaatgcattggccatgtcataggaaaaccacacagtcctgttacaggtttgtaccttgccattcatcggaacagcccccgtcctatgaaggtacctcgatgccatagtgaccctcctaacccacacctcattatccccactccagagggattcaggggttccagcgttcctgaaaatgatcgattggcttccatagctgctgaattgcagtttaggtccctgagtcgtcactcaagccccacggaggagcgagatgaaccagcatatccaagaggagattcaagtgggtccacaagaagaagttgggaacttcggacactaatcagccagagtaaagatactgcttctaaactaggacccatagaagctatccagaagtcagtccgattgtttgaagaaaagaggtaccgagaaatgaggagaaagaatatcattggtcaagtttgtgatacgcctaagtcctatgataatgttatgcacgttggcttgaggaaggtgaccttcaaatggcaaagaggaaacaaaattggagaaggccagtatgggaaggtgtacacctgcatcagcgtcgacaccggggagctgatggccatgaaagagattcgatttcaacctaatgaccataagactatcaaggaaactgcagacgaattgaaaatattcgaaggcatcaaacaccccaatctggttcggtattttggtgtggagctccatagagaagaaatgtacatcttcatggagtactgcgatgaggggactttagaagaggtgtcaaggctgggacttcaggaacatgtgattaggctgtattcaaagcagatcaccattgcgatcaacgtcctccatgagcatggcatagtccaccgtgacattaaaggtgccaatatcttccttacctcatctggattaatcaaactgggagattttggatgttcagtaaagctcaaaaacaatgcccagaccatgcctggtgaagtgaacagcaccctggggacagcagcatacatggcacctgaagtcatcactcgtgccaaaggagagggccatgggcgtgcggccgacatctggagtctggggtgtgttgtcatagagatggtgactggcaagaggccttggcatgagtatgagcacaactttcaaattatgtataaagtggggatgggacataagccaccaatccctgaaagattaagccctgaaggaaaggacttcctttctcactgccttgagagtgacccaaagatgagatggaccgccagccagctcctcgaccattcgtttgtcaaggtttgcacagatgaagaatgaagcctagtagaatatggacttggaaaattctcttaatcactactgtatgtaatatttacataaagactgtgctgagaagcagtataagcctttttaaccttccaagactgaagactgcacaggtgacaagcgtcacttctcctgctgctcctgtttgtctgatgtggcaaaaggccctctggagggctggtggccacgaggttaaagaagctgcatgttaagtgccattactactgtacacggaccatcgcctctgtctcctccgtgtctcgcgcgactgagaaccgtgacatcagcgtagtgttttgacctttctaggttcaaaagaagttgtagtgttatcaggcatcccataccttgtttttaatctcctgtttgttgagtgcactgactgtgaaacctttaccttttttgttgttgttggcaagctgcaggtttgtaatgcaaaaggctgattactgaaatttaagaaaaaggttcttttttcaataaatggtttattttaggaaa

SEQ ID NO: 324531 - DNA, 5940 bp, Homo sapiens
ttcgagcctgtggaaggctgcgctgtcaagagaccggagttgcgagcgtctgggtgacgtccgtcctcctggaaggtgggatccgggtggcaggtccctgggcggcgactccggccgggctcatagcgtcgcgcccgccccgctcatcggccctacccagcgtccctcccagaccgacgaccgcctgggaagcctcgagctcccagcccgctgcacagcccggctccgctccacagtcccccactgccaccggccggggcgacaccgggcgagctggcgagacccggctccaggaccgaatcgcgccgacacttgacggcgctccccgcccctccctgccgccgtctccgcccccgtccggtcgcattccggcgcccgccgccgccgccgccaccgccgccgatctgggaggcttgtccctcgccgcccaccgtagccccggcgctcggccggtcgccgtttccaagatggccgcggcgcgcacggctcctgcggcggggtagaggcggaggcggagtcgagtcactcccgcacttcggggctccggtgccccgcgccaggctgcagcttactgcccgccgcggccatgcggggctccgtgcacggatgagagaagccgctgccgcgctggtccctcctcccgcctttgccgtcacgcctgccgccgccatggaggagccgccgccaccgccgccgccgccaccaccgccaccggaacccgagaccgagtcagaacccgagtgctgcttggcggcgaggcaagagggcacattgggagattcagcttgcaagagtcctgaatctgatctagaagacttctccgatgaaacaaatacagagaatctttatggtacctctccccccagcacacctcgacagatgaaacgcatgtcaaccaaacatcagaggaataatgtggggaggccagccagtcggtctaatttgaaagaaaaaatgaatgcaccaaatcagcctccacataaagacactggaaaaacagtggagaatgtggaagaatacagctataagcaggagaaaaagatccgagcagctcttagaacaacagagcgtgatcataaaaaaaatgtacagtgctcattcatgttagactcagtgggtggatctttgccaaaaaaatcaattccagatgtggatctcaataagccttacctcagccttggctgtagcaatgctaagcttccagtatctgtgcccatgcctatagccagacctgcacgccagacttctaggactgactgtccagcagatcgtttaaagttttttgaaactttacgacttttgctaaagcttacctcagtctcaaagaaaaaagacagggagcaaagaggacaagaaaatacgtctggtttctggcttaaccgatctaacgaactgatctggttagagctacaagcctggcatgcaggacggacaattaacgaccaggacttctttttatatacagcccgtcaagccatcccagatattattaatgaaatccttactttcaaagtcgactatgggagcttcgcctttgttagagatagagctggttttaatggtacttcagtagaagggcagtgcaaagccactcctggaacaaagattgtaggttactcaacacatcatgagcatctccaacgccagagggtctcatttgagcaggtaaaacggataatggagctgctagagtacatagaagcactttatccatcattgcaggctcttcagaaggactatgaaaaatatgctgcaaaagacttccaggacagggtgcaggcactctgtttgtggttaaacatcacaaaagacttaaatcagaaattaaggattatgggcactgttttgggcatcaagaatttatcagacattggctggccagtgtttgaaatcccttcccctcgaccatccaaaggtaatgagccggagtatgagggtgatgacacagaaggagaattaaaggagttggaaagtagtacggatgagagtgaagaagaacaaatctctgatcctagggtaccggaaatcagacagcccatagataacagcttcgacatccagtcgcgggactgcatatccaagaagcttgagaggctcgaatctgaggatgattctcttggctggggagcaccagactggagcacagaagcaggctttagtagacattgtctgacttctatttatagaccatttgtagacaaagcactgaagcagatggggttaagaaagttaattttaagacttcacaagctaatggatggttccttgcaaagggcacgtatagcattggtaaagaacgatcgtccagtggagttttctgaatttccagatcccatgtggggttcagattatgtgcagttgtcaaggacaccaccttcatctgaggagaaatgcagtgctgtgtcgtgggaggagctgaaggccatggatttaccttcattcgaacctgccttcctagttctctgccgagtccttctgaatgtcatacatgagtgtctgaagttaagattggagcagagacctgctggagaaccatctctcttgagtattaagcagctggtgagagagtgtaaggaggtcctgaagggcggcctgctgatgaagcagtactaccagttcatgctgcaggaggttctggaggacttggagaagcccgactgcaacattgacgcttttgaagaggatctacataaaatgcttatggtgtattttgattacatgagaagctggatccaaatgctacagcaattacctcaagcatcgcatagtttaaaaaatctgttagaagaagaatggaatttcaccaaagaaataactcattacatacggggaggagaagcacaggccgggaagcttttctgtgacattgcaggaatgctgctgaaatctacaggaagttttttagaatttggcttacaggagagctgtgctgaattttggactagtgcggatgacagcagtgcttccgacgaaatcaggaggtctgttatagagatcagtcgagccctgaaggagctcttccatgaagccagagaaagggcttccaaagcacttggatttgctaaaatgttgagaaaggacctggaaatagcagcagaattcaggctttcagccccagttagagacctcctggatgttctgaaatcaaaacagtatgtcaaggtgcaaattcctgggttagaaaacttgcaaatgtttgttccagacactcttgctgaggagaagagtattattttgcagttactcaatgcagctgcaggaaaggactgttcaaaagattcagatgacgtactcatcgatgcctatctgcttctgaccaagcacggtgatcgagcccgtgattcagaggacagctggggcacctgggaggcacagcctgtcaaagtcgtgcctcaggtggagactgttgacaccctgagaagcatgcaggtggataatcttttactagttgtcatgcagtctgcgcatctcacaattcagagaaaagctttccagcagtccattgagggacttatgactctgtgccaggagcagacatccagtcagccggtcatcgccaaagctttgcagcagctgaagaatgatgcattggagctatgcaacaggataagcaatgccattgaccgcgtggaccacatgttcacatcagaatttgatgctgaggttgatgaatctgaatctgtcaccttgcaacagtactaccgagaagcaatgattcaggggtacaattttggatttgagtatcataaagaagttgttcgtttgatgtctggggagtttagacagaagataggagacaaatatataagctttgcccggaagtggatgaattatgtcctgactaaatgtgagagtggtagaggtacaagacccaggtgggcgactcaaggatttgattttctacaagcaattgaacctgcctttatttcagctttaccagaagatgacttcttgagtttacaagccttgatgaatgaatgcattggccatgtcataggaaaaccacacagtcctgttacaggtttgtaccttgccattcatcggaacagcccccgtcctatgaaggtacctcgatgccatagtgaccctcctaacccacacctcattatccccactccagagggattcagcactcggagcatgccttccgacgcgcggagccatggcagccctgctgctgctgctgctgctgctgctgctgttgctgccagtcggcccagcccctctggtggtgactctgtgctgcccaaatccatcagcagtgcccatgataccaggggttccagcgttcctgaaaatgatcgattggcttccatagctgctgaattgcagtttaggtccctgagtcgtcactcaagccccacggaggagcgagatgaaccagcatatccaagaggagattcaagtgggtccacaagaagaagttgggaacttcggacactaatcagccagagtaaagatactgcttctaaactaggacccatagaagctatccagaagtcagtccgattgtttgaagaaaagaggtaccgagaaatgaggagaaagaatatcattggtcaagtttgtgatacgcctaagtcctatgataatgttatgcacgttggcttgaggaaggtgaccttcaaatggcaaagaggaaacaaaattggagaaggccagtatgggaaggtgtacacctgcatcagcgtcgacaccggggagctgatggccatgaaagagattcgatttcaacctaatgaccataagactatcaaggaaactgcagacgaattgaaaatattcgaaggcatcaaacaccccaatctggttcggtattttggtgtggagctccatagagaagaaatgtacatcttcatggagtactgcgatgaggggactttagaagaggtgtcaaggctgggacttcaggaacatgtgattaggctgtattcaaagcagatcaccattgcgatcaacgtcctccatgagcatggcatagtccaccgtgacattaaaggtgccaatatcttccttacctcatctggattaatcaaactgggagattttggatgttcagtaaagctcaaaaacaatgcccagaccatgcctggtgaagtgaacagcaccctggggacagcagcatacatggcacctgaagtcatcactcgtgccaaaggagagggccatgggcgtgcggccgacatctggagtctggggtgtgttgtcatagagatggtgactggcaagaggccttggcatgagtatgagcacaactttcaaattatgtataaagtggggatgggacataagccaccaatccctgaaagattaagccctgaaggaaaggacttcctttctcactgccttgagagtgacccaaagatgagatggaccgccagccagctcctcgaccattcgtttgtcaaggtttgcacagatgaagaatgaagcctagtagaatatggacttggaaaattctcttaatcactactgtatgtaatatttacataaagactgtgctgagaagcagtataagcctttttaaccttccaagactgaagactgcacaggtgacaagcgtcacttctcctgctgctcctgtttgtctgatgtggcaaaaggccctctggagggctggtggccacgaggttaaagaagctgcatgttaagtgccattactactgtacacggaccatcgcctctgtctcctccgtgtctcgcgcgactgagaaccgtgacatcagcgtagtgttttgacctttctaggttcaaaagaagttgtagtgttatcaggcatcccataccttgtttttaatctcctgtttgttgagtgcactgactgtgaaacctttaccttttttgttgttgttggcaagctgcaggtttgtaatgcaaaaggctgattactgaaatttaagaaaaaggttcttttttcaataaatggtttattttaggaaa

SEQ ID NO: 324532 - DNA, 1254 bp, Homo sapiens
ttcgagcctgtggaaggctgcgctgtcaagagaccggagttgcgagcgtctgggtgacgtccgtcctcctggaaggtgggatccgggtggcaggtccctgggcggcgactccggccgggctcatagcgtcgcgcccgccccgctcatcggccctacccagcgtccctcccagaccgacgaccgcctgggaagcctcgagctcccagcccgctgcacagcccggctccgctccacagtcccccactgccaccggccggggcgacaccgggcgagctggcgagacccggctccaggaccgaatcgcgccgacacttgacggcgctccccgcccctccctgccgccgtctccgcccccgtccggtcgcattccggcgcccgccgccgccgccgccaccgccgccgatctgggaggcttgtccctcgccgcccaccgtagccccggcgctcggccggtcgccgtttccaagatggccgcggcgcgcacggctcctgcggcggggtagaggcggaggcggagtcgagtcactcccgcacttcggggctccggtgccccgcgccaggctgcagcttactgcccgccgcggccatgcggggctccgtgcacggatgagagaagccgctgccgcgctggtccctcctcccgcctttgccgtcacgcctgccgccgccatggaggagccgccgccaccgccgccgccgccaccaccgccaccggaacccgagaccgagtcagaacccgagtgctgcttggcggcgaggtgagtgtggcggccgcagtcggtcgctcgcagaaagcggggcgggtcctggcccgaactcggtcgggcccgagggcctctgcttcccgccaggtggggagggaagcatccagtctctgcaggctggggcgggaggggcgcggtgcatccctgggtcccaggggaccgcgtctgagtctgtccggcgactcctcccggggttgcagctccgcagggttccgctcgagcgtgttgccggctccccttcccttgtagactcccccagctcaccctcaacgttgcgggggctgggagcagagtgcggctgcctcccctgccgctagcttcggaagagtggcctcactgaagtgcctctcatcattactgaacgaaagtggtccctcccctctgccctcattcgagtaaaagagacattcggaaatcgagtgcgtactggctatttcccgcgttctcctcctcctctccttttgcccgctccagagaatgcctgtcatct

SEQ ID NO: 324533 - DNA, 527 bp, Homo sapiens
acagaatggagtcctgttctacatcacaggtcttctcatttcagagcacagtaactttgcctaattctcaggaaatctccatgagttacatcatttctgccttctctctgaaactagaggagttcctcctaaaatgtaagttgtagactgtagtcattaacccgacatcataaagcactgaaacccatcctgccattcagaagattcttctaaaacgccccttacaccacttcttgtgactttttttccgtttttttgctgaaccactgttgagtacactgttaagtaatactggtttttttcttgtatgtatttagggagccattgtgaaatgagagaaaattcaaacctcaaattgagtttcctccttgtgtttagaaataaacacgtcgagggaaagaggataacttggagcatcgtggtgtagagcatgagcttccaggggaagttggaaatggatcatttttaatgtttttacaaattatgtttaaaaaggatgtgtttcagtacttaataatgtatttgta

SEQ ID NO: 324534 - DNA, 5839 bp, Homo sapiens
ttcgagcctgtggaaggctgcgctgtcaagagaccggagttgcgagcgtctgggtgacgtccgtcctcctggaaggtgggatccgggtggcaggtccctgggcggcgactccggccgggctcatagcgtcgcgcccgccccgctcatcggccctacccagcgtccctcccagaccgacgaccgcctgggaagcctcgagctcccagcccgctgcacagcccggctccgctccacagtcccccactgccaccggccggggcgacaccgggcgagctggcgagacccggctccaggaccgaatcgcgccgacacttgacggcgctccccgcccctccctgccgccgtctccgcccccgtccggtcgcattccggcgcccgccgccgccgccgccaccgccgccgatctgggaggcttgtccctcgccgcccaccgtagccccggcgctcggccggtcgccgtttccaagatggccgcggcgcgcacggctcctgcggcggggtagaggcggaggcggagtcgagtcactcccgcacttcggggctccggtgccccgcgccaggctgcagcttactgcccgccgcggccatgcggggctccgtgcacggatgagagaagccgctgccgcgctggtccctcctcccgcctttgccgtcacgcctgccgccgccatggaggagccgccgccaccgccgccgccgccaccaccgccaccggaacccgagaccgagtcagaacccgagtgctgcttggcggcgaggcaagagggcacattgggagattcagcttgcaagagtcctgaatctgatctagaagacttctccgatgaaacaaatacagagaatctttatggtacctctccccccagcacacctcgacagatgaaacgcatgtcaaccaaacatcagaggaataatgtggggaggccagccagtcggtctaatttgaaaggtgtccgtcagatctcccatgctgtttcttcctccttaaattgaagaaaaaatgaatgcaccaaatcagcctccacataaagacactggaaaaacagtggagaatgtggaagaatacagctataagcaggagaaaaagatccgagcagctcttagaacaacagagcgtgatcataaaaaaaatgtacagtgctcattcatgttagactcagtgggtggatctttgccaaaaaaatcaattccagatgtggatctcaataagccttacctcagccttggctgtagcaatgctaagcttccagtatctgtgcccatgcctatagccagacctgcacgccagacttctaggactgactgtccagcagatcgtttaaagttttttgaaactttacgacttttgctaaagcttacctcagtctcaaagaaaaaagacagggagcaaagaggacaagaaaatacgtctggtttctggcttaaccgatctaacgaactgatctggttagagctacaagcctggcatgcaggacggacaattaacgaccaggacttctttttatatacagcccgtcaagccatcccagatattattaatgaaatccttactttcaaagtcgactatgggagcttcgcctttgttagagatagagctggttttaatggtacttcagtagaagggcagtgcaaagccactcctggaacaaagattgtaggttactcaacacatcatgagcatctccaacgccagagggtctcatttgagcaggtaaaacggataatggagctgctagagtacatagaagcactttatccatcattgcaggctcttcagaaggactatgaaaaatatgctgcaaaagacttccaggacagggtgcaggcactctgtttgtggttaaacatcacaaaagacttaaatcagaaattaaggattatgggcactgttttgggcatcaagaatttatcagacattggctggccagtgtttgaaatcccttcccctcgaccatccaaaggtaatgagccggagtatgagggtgatgacacagaaggagaattaaaggagttggaaagtagtacggatgagagtgaagaagaacaaatctctgatcctagggtaccggaaatcagacagcccatagataacagcttcgacatccagtcgcgggactgcatatccaagaagcttgagaggctcgaatctgaggatgattctcttggctggggagcaccagactggagcacagaagcaggctttagtagacattgtctgacttctatttatagaccatttgtagacaaagcactgaagcagatggggttaagaaagttaattttaagacttcacaagctaatggatggttccttgcaaagggcacgtatagcattggtaaagaacgatcgtccagtggagttttctgaatttccagatcccatgtggggttcagattatgtgcagttgtcaaggacaccaccttcatctgaggagaaatgcagtgctgtgtcgtgggaggagctgaaggccatggatttaccttcattcgaacctgccttcctagttctctgccgagtccttctgaatgtcatacatgagtgtctgaagttaagattggagcagagacctgctggagaaccatctctcttgagtattaagcagctggtgagagagtgtaaggaggtcctgaagggcggcctgctgatgaagcagtactaccagttcatgctgcaggaggttctggaggacttggagaagcccgactgcaacattgacgcttttgaagaggatctacataaaatgcttatggtgtattttgattacatgagaagctggatccaaatgctacagcaattacctcaagcatcgcatagtttaaaaaatctgttagaagaagaatggaatttcaccaaagaaataactcattacatacggggaggagaagcacaggccgggaagcttttctgtgacattgcaggaatgctgctgaaatctacaggaagttttttagaatttggcttacaggagagctgtgctgaattttggactagtgcggatgacagcagtgcttccgacgaaatcaggaggtctgttatagagatcagtcgagccctgaaggagctcttccatgaagccagagaaagggcttccaaagcacttggatttgctaaaatgttgagaaaggacctggaaatagcagcagaattcaggctttcagccccagttagagacctcctggatgttctgaaatcaaaacagtatgtcaaggtgcaaattcctgggttagaaaacttgcaaatgtttgttccagacactcttgctgaggagaagagtattattttgcagttactcaatgcagctgcaggaaaggactgttcaaaagattcagatgacgtactcatcgatgcctatctgcttctgaccaagcacggtgatcgagcccgtgattcagaggacagctggggcacctgggaggcacagcctgtcaaagtcgtgcctcaggtggagactgttgacaccctgagaagcatgcaggtggataatcttttactagttgtcatgcagtctgcgcatctcacaattcagagaaaagctttccagcagtccattgagggacttatgactctgtgccaggagcagacatccagtcagccggtcatcgccaaagctttgcagcagctgaagaatgatgcattggagctatgcaacaggataagcaatgccattgaccgcgtggaccacatgttcacatcagaatttgatgctgaggttgatgaatctgaatctgtcaccttgcaacagtactaccgagaagcaatgattcaggggtacaattttggatttgagtatcataaagaagttgttcgtttgatgtctggggagtttagacagaagataggagacaaatatataagctttgcccggaagtggatgaattatgtcctgactaaatgtgagagtggtagaggtacaagacccaggtgggcgactcaaggatttgattttctacaagcaattgaacctgcctttatttcagctttaccagaagatgacttcttgagtttacaagccttgatgaatgaatgcattggccatgtcataggaaaaccacacagtcctgttacaggtttgtaccttgccattcatcggaacagcccccgtcctatgaaggtacctcgatgccatagtgaccctcctaacccacacctcattatccccactccagagggattcaggggttccagcgttcctgaaaatgatcgattggcttccatagctgctgaattgcagtttaggtccctgagtcgtcactcaagccccacggaggagcgagatgaaccagcatatccaagaggagattcaagtgggtccacaagaagaagttgggaacttcggacactaatcagccagagtaaagatactgcttctaaactaggacccatagaagctatccagaagtcagtccgattgtttgaagaaaagaggtaccgagaaatgaggagaaagaatatcattggtcaagtttgtgatacgcctaagtcctatgataatgttatgcacgttggcttgaggaaggtgaccttcaaatggcaaagaggaaacaaaattggagaaggccagtatgggaaggtgtacacctgcatcagcgtcgacaccggggagctgatggccatgaaagagattcgatttcaacctaatgaccataagactatcaaggaaactgcagacgaattgaaaatattcgaaggcatcaaacaccccaatctggttcggtattttggtgtggagctccatagagaagaaatgtacatcttcatggagtactgcgatgaggggactttagaagaggtgtcaaggctgggacttcaggaacatgtgattaggctgtattcaaagcagatcaccattgcgatcaacgtcctccatgagcatggcatagtccaccgtgacattaaaggtgccaatatcttccttacctcatctggattaatcaaactgggagattttggatgttcagtaaagctcaaaaacaatgcccagaccatgcctggtgaagtgaacagcaccctggggacagcagcatacatggcacctgaagtcatcactcgtgccaaaggagagggccatgggcgtgcggccgacatctggagtctggggtgtgttgtcatagagatggtgactggcaagaggccttggcatgagtatgagcacaactttcaaattatgtataaagtggggatgggacataagccaccaatccctgaaagattaagccctgaaggaaaggacttcctttctcactgccttgagagtgacccaaagatgagatggaccgccagccagctcctcgaccattcgtttgtcaaggtttgcacagatgaagaatgaagcctagtagaatatggacttggaaaattctcttaatcactactgtatgtaatatttacataaagactgtgctgagaagcagtataagcctttttaaccttccaagactgaagactgcacaggtgacaagcgtcacttctcctgctgctcctgtttgtctgatgtggcaaaaggccctctggagggctggtggccacgaggttaaagaagctgcatgttaagtgccattactactgtacacggaccatcgcctctgtctcctccgtgtctcgcgcgactgagaaccgtgacatcagcgtagtgttttgacctttctaggttcaaaagaagttgtagtgttatcaggcatcccataccttgtttttaatctcctgtttgttgagtgcactgactgtgaaacctttaccttttttgttgttgttggcaagctgcaggtttgtaatgcaaaaggctgattactgaaatttaagaaaaaggttcttttttcaataaatggtttattttaggaaa

SEQ ID NO: 324535 - DNA, 5930 bp, Homo sapiens
ttcgagcctgtggaaggctgcgctgtcaagagaccggagttgcgagcgtctgggtgacgtccgtcctcctggaaggtgggatccgggtggcaggtccctgggcggcgactccggccgggctcatagcgtcgcgcccgccccgctcatcggccctacccagcgtccctcccagaccgacgaccgcctgggaagcctcgagctcccagcccgctgcacagcccggctccgctccacagtcccccactgccaccggccggggcgacaccgggcgagctggcgagacccggctccaggaccgaatcgcgccgacacttgacggcgctccccgcccctccctgccgccgtctccgcccccgtccggtcgcattccggcgcccgccgccgccgccgccaccgccgccgatctgggaggcttgtccctcgccgcccaccgtagccccggcgctcggccggtcgccgtttccaagatggccgcggcgcgcacggctcctgcggcggggtagaggcggaggcggagtcgagtcactcccgcacttcggggctccggtgccccgcgccaggctgcagcttactgcccgccgcggccatgcggggctccgtgcacggatgagagaagccgctgccgcgctggtccctcctcccgcctttgccgtcacgcctgccgccgccatggaggagccgccgccaccgccgccgccgccaccaccgccaccggaacccgagaccgagtcagaacccgagtgctgcttggcggcgaggcaagagggcacattgggagattcagcttgcaagagtcctgaatctgatctagaagacttctccgatgaaacaaatacagagaatctttatggtacctctccccccagcacacctcgacagatgaaacgcatgtcaaccaaacatcagaggaataatgtggggaggccagccagtcggtctaatttgaaaggtgtccgtcagatctcccatgctgtttcttcctccttaaattgaagaaaaaatgaatgcaccaaatcagcctccacataaagacactggaaaaacagtggagaatgtggaagaatacagctataagcaggagaaaaagatccgagcagctcttagaacaacagagcgtgatcataaaaaaaatgtacagtgctcattcatgttagactcagtgggtggatctttgccaaaaaaatcaattccagatgtggatctcaataagccttacctcagccttggctgtagcaatgctaagcttccagtatctgtgcccatgcctatagccagacctgcacgccagacttctaggactgactgtccagcagatcgtttaaagttttttgaaactttacgacttttgctaaagcttacctcagtctcaaagaaaaaagacagggagcaaagaggacaagaaaatacgtctggtttctggcttaaccgatctaacgaactgatctggttagagctacaagcctggcatgcaggacggacaattaacgaccaggacttctttttatatacagcccgtcaagccatcccagatattattaatgaaatccttactttcaaagtcgactatgggagcttcgcctttgttagagatagagctggttttaatggtacttcagtagaagggcagtgcaaagccactcctggaacaaagattgtaggttactcaacacatcatgagcatctccaacgccagagggtctcatttgagcaggtaaaacggataatggagctgctagagtacatagaagcactttatccatcattgcaggctcttcagaaggactatgaaaaatatgctgcaaaagacttccaggacagggtgcaggcactctgtttgtggttaaacatcacaaaagacttaaatcagaaattaaggattatgggcactgttttgggcatcaagaatttatcagacattggctggccagtgtttgaaatcccttcccctcgaccatccaaaggtaatgagccggagtatgagggtgatgacacagaaggagaattaaaggagttggaaagtagtacggatgagagtgaagaagaacaaatctctgatcctagggtaccggaaatcagacagcccatagataacagcttcgacatccagtcgcgggactgcatatccaagaagcttgagaggctcgaatctgaggatgattctcttggctggggagcaccagactggagcacagaagcaggctttagtagacattgtctgacttctatttatagaccatttgtagacaaagcactgaagcagatggggttaagaaagttaattttaagacttcacaagctaatggatggttccttgcaaagggcacgtatagcattggtaaagaacgatcgtccagtggagttttctgaatttccagatcccatgtggggttcagattatgtgcagttgtcaaggacaccaccttcatctgaggagaaatgcagtgctgtgtcgtgggaggagctgaaggccatggatttaccttcattcgaacctgccttcctagttctctgccgagtccttctgaatgtcatacatgagtgtctgaagttaagattggagcagagacctgctggagaaccatctctcttgagtattaagcagctggtgagagagtgtaaggaggtcctgaagggcggcctgctgatgaagcagtactaccagttcatgctgcaggaggttctggaggacttggagaagcccgactgcaacattgacgcttttgaagaggatctacataaaatgcttatggtgtattttgattacatgagaagctggatccaaatgctacagcaattacctcaagcatcgcatagtttaaaaaatctgttagaagaagaatggaatttcaccaaagaaataactcattacatacggggaggagaagcacaggccgggaagcttttctgtgacattgcaggaatgctgctgaaatctacaggaagttttttagaatttggcttacaggagagctgtgctgaattttggactagtgcggatgacagcagtgcttccgacgaaatcaggaggtctgttatagagatcagtcgagccctgaaggagctcttccatgaagccagagaaagggcttccaaagcacttggatttgctaaaatgttgagaaaggacctggaaatagcagcagaattcaggctttcagccccagttagagacctcctggatgttctgaaatcaaaacagtatgtcaaggtgcaaattcctgggttagaaaacttgcaaatgtttgttccagacactcttgctgaggagaagagtattattttgcagttactcaatgcagctgcaggaaaggactgttcaaaagattcagatgacgtactcatcgatgcctatctgcttctgaccaagcacggtgatcgagcccgtgattcagaggacagctggggcacctgggaggcacagcctgtcaaagtcgtgcctcaggtggagactgttgacaccctgagaagcatgcaggtggataatcttttactagttgtcatgcagtctgcgcatctcacaattcagagaaaagctttccagcagtccattgagggacttatgactctgtgccaggagcagacatccagtcagccggtcatcgccaaagctttgcagcagctgaagaatgatgcattggagctatgcaacaggataagcaatgccattgaccgcgtggaccacatgttcacatcagaatttgatgctgaggttgatgaatctgaatctgtcaccttgcaacagtactaccgagaagcaatgattcaggggtacaattttggatttgagtatcataaagaagttgttcgtttgatgtctggggagtttagacagaagataggagacaaatatataagctttgcccggaagtggatgaattatgtcctgactaaatgtgagagtggtagaggtacaagacccaggtgggcgactcaaggatttgattttctacaagcaattgaacctgcctttatttcagctttaccagaagatgacttcttgagtttacaagccttgatgaatgaatgcattggccatgtcataggaaaaccacacagtcctgttacaggtttgtaccttgccattcatcggaacagcccccgtcctatgaaggtacctcgatgccatagtgaccctcctaacccacacctcattatccccactccagagggattcaggggttccagcgttcctgaaaatgatcgattggcttccatagctgctgaattgcagtttaggtccctgagtcgtcactcaagccccacggaggagcgagatgaaccagcatatccaagaggagattcaagtgggtccacaagaagaagttgggaacttcggacactaatcagccagagtaaagatactgcttctaaactaggacccatagaagctatccagaagtcagtccgattgtttgaagaaaagaggtaccgagaaatgaggagaaagaatatcattggtcaagtttgtgatacgcctaagtcctatgataatgttatgcacgttggcttgaggaaggtgaccttcaaatggcaaagaggaaacaaaattggagaaggccagtatgggaaggtgtacacctgcatcagcgtcgacaccggggagctgatggccatgaaagagattcgatttcaacctaatgaccataagactatcaaggaaactgcagacgaattgaaaatattcgaaggcatcaaacaccccaatctggttcggtattttggtgtggagctccatagaagcacagtaactttgcctaattctcaggaaatctccatgagttacatcatttctgccttctctctgaaactagaggagttcctcctaaaatgaagaaatgtacatcttcatggagtactgcgatgaggggactttagaagaggtgtcaaggctgggacttcaggaacatgtgattaggctgtattcaaagcagatcaccattgcgatcaacgtcctccatgagcatggcatagtccaccgtgacattaaaggtgccaatatcttccttacctcatctggattaatcaaactgggagattttggatgttcagtaaagctcaaaaacaatgcccagaccatgcctggtgaagtgaacagcaccctggggacagcagcatacatggcacctgaagtcatcactcgtgccaaaggagagggccatgggcgtgcggccgacatctggagtctggggtgtgttgtcatagagatggtgactggcaagaggccttggcatgagtatgagcacaactttcaaattatgtataaagtggggatgggacataagccaccaatccctgaaagattaagccctgaaggaaaggacttcctttctcactgccttgagagtgacccaaagatgagatggaccgccagccagctcctcgaccattcgtttgtcaaggtttgcacagatgaagaatgaagcctagtagaatatggacttggaaaattctcttaatcactactgtatgtaatatttacataaagactgtgctgagaagcagtataagcctttttaaccttccaagactgaagactgcacaggtgacaagcgtcacttctcctgctgctcctgtttgtctgatgtggcaaaaggccctctggagggctggtggccacgaggttaaagaagctgcatgttaagtgccattactactgtacacggaccatcgcctctgtctcctccgtgtctcgcgcgactgagaaccgtgacatcagcgtagtgttttgacctttctaggttcaaaagaagttgtagtgttatcaggcatcccataccttgtttttaatctcctgtttgttgagtgcactgactgtgaaacctttaccttttttgttgttgttggcaagctgcaggtttgtaatgcaaaaggctgattactgaaatttaagaaaaaggttcttttttcaataaatggtttattttaggaaa

SEQ ID NO: 324536 - DNA, 1866 bp, Homo sapiens
ttcaagtccgttccctcttctcacatgtgttcctgaagcttttcttcttgtcttagcactcggagcatgccttccgacgcgcggagccatggcagccctgctgctgctgctgctgctgctgctgctgttgctgccagtcggcccagcccctctggtggtgactctgtgctgcccaaatccatcagcagtgcccatgataccaggggttccagcgttcctgaaaatgatcgattggcttccatagctgctgaattgcagtttaggtccctgagtcgtcactcaagccccacggaggagcgagatgaaccagcatatccaagaggagattcaagtgggtccacaagaagaagttgggaacttcggacactaatcagccagagtaaagatactgcttctaaactaggacccatagaagctatccagaagtcagtccgattgtttgaagaaaagaggtaccgagaaatgaggagaaagaatatcattggtcaagtttgtgatacgcctaagtcctatgataatgttatgcacgttggcttgaggaaggtgaccttcaaatggcaaagaggaaacaaaattggagaaggccagtatgggaaggtgtacacctgcatcagcgtcgacaccggggagctgatggccatgaaagagattcgatttcaacctaatgaccataagactatcaaggaaactgcagacgaattgaaaatattcgaaggcatcaaacaccccaatctggttcggtattttggtgtggagctccatagagaagaaatgtacatcttcatggagtactgcgatgaggggactttagaagaggtgtcaaggctgggacttcaggaacatgtgattaggctgtattcaaagcagatcaccattgcgatcaacgtcctccatgagcatggcatagtccaccgtgacattaaaggtgccaatatcttccttacctcatctggattaatcaaactgggagattttggatgttcagtaaagctcaaaaacaatgcccagaccatgcctggtgaagtgaacagcaccctggggacagcagcatacatggcacctgaagtcatcactcgtgccaaaggagagggccatgggcgtgcggccgacatctggagtctggggtgtgttgtcatagagatggtgactggcaagaggccttggcatgagtatgagcacaactttcaaattatgtataaagtggggatgggacataagccaccaatccctgaaagattaagccctgaaggaaaggacttcctttctcactgccttgagagtgacccaaagatgagatggaccgccagccagctcctcgaccattcgtttgtcaaggtttgcacagatgaagaatgaagcctagtagaatatggacttggaaaattctcttaatcactactgtatgtaatatttacataaagactgtgctgagaagcagtataagcctttttaaccttccaagactgaagactgcacaggtgacaagcgtcacttctcctgctgctcctgtttgtctgatgtggcaaaaggccctctggagggctggtggccacgaggttaaagaagctgcatgttaagtgccattactactgtacacggaccatcgcctctgtctcctccgtgtctcgcgcgactgagaaccgtgacatcagcgtagtgttttgacctttctaggttcaaaagaagttgtagtgttatcaggcatcccataccttgtttttaatctcctgtttgttgagtgcactgactgtgaaacctttaccttttttgttgttgttggcaagctgcaggtttgtaatgcaaaaggctgattactgaaatttaagaaaaaggttcttttttcaataaatggtttattttaggaaa

SEQ ID NO: 324537 - DNA, 5878 bp, Homo sapiens
ttcgagcctgtggaaggctgcgctgtcaagagaccggagttgcgagcgtctgggtgacgtccgtcctcctggaaggtgggatccgggtggcaggtccctgggcggcgactccggccgggctcatagcgtcgcgcccgccccgctcatcggccctacccagcgtccctcccagaccgacgaccgcctgggaagcctcgagctcccagcccgctgcacagcccggctccgctccacagtcccccactgccaccggccggggcgacaccgggcgagctggcgagacccggctccaggaccgaatcgcgccgacacttgacggcgctccccgcccctccctgccgccgtctccgcccccgtccggtcgcattccggcgcccgccgccgccgccgccaccgccgccgatctgggaggcttgtccctcgccgcccaccgtagccccggcgctcggccggtcgccgtttccaagatggccgcggcgcgcacggctcctgcggcggggtagaggcggaggcggagtcgagtcactcccgcacttcggggctccggtgccccgcgccaggctgcagcttactgcccgccgcggccatgcggggctccgtgcacggatgagagaagccgctgccgcgctggtccctcctcccgcctttgccgtcacgcctgccgccgccatggaggagccgccgccaccgccgccgccgccaccaccgccaccggaacccgagaccgagtcagaacccgagtgctgcttggcggcgaggcaagagggcacattgggagattcagcttgcaagagtcctgaatctgatctagaagacttctccgatgaaacaaatacagagaatctttatggtacctctccccccagcacacctcgacagatgaaacgcatgtcaaccaaacatcagaggaataatgtggggaggccagccagtcggtctaatttgaaaggtgtccgtcagatctcccatgctgtttcttcctccttaaattgaagaaaaaatgaatgcaccaaatcagcctccacataaagacactggaaaaacagtggagaatgtggaagaatacagctataagcaggagaaaaagatccgagcagctcttagaacaacagagcgtgatcataaaaaaaatgtacagtgctcattcatgttagactcagtgggtggatctttgccaaaaaaatcaattccagatgtggatctcaataagccttacctcagccttggctgtagcaatgctaagcttccagtatctgtgcccatgcctatagccagacctgcacgccagacttctaggactgactgtccagcagatcgtttaaagttttttgaaactttacgacttttgctaaagcttacctcagtctcaaagaaaaaagacagggagcaaagaggacaagaaaatacgtctggtttctggcttaaccgatctaacgaactgatctggttagagctacaagcctggcatgcaggacggacaattaacgaccaggacttctttttatatacagcccgtcaagccatcccagatattattaatgaaatccttactttcaaagtcgactatgggagcttcgcctttgttagagatagagctggttttaatggtacttcagtagaagggcagtgcaaagccactcctggaacaaagattgtaggttactcaacacatcatgagcatctccaacgccagagggtctcatttgagcaggtaaaacggataatggagctgctagagtacatagaagcactttatccatcattgcaggctcttcagaaggactatgaaaaatatgctgcaaaagacttccaggacagggtgcaggcactctgtttgtggttaaacatcacaaaagacttaaatcagaaattaaggattatgggcactgttttgggcatcaagaatttatcagacattggctggccagtgtttgaaatcccttcccctcgaccatccaaaggtaatgagccggagtatgagggtgatgacacagaaggagaattaaaggagttggaaagtagtacggatgagagtgaagaagaacaaatctctgatcctagggtaccggaaatcagacagcccatagataacagcttcgacatccagtcgcgggactgcatatccaagaagcttgagaggctcgaatctgaggatgattctcttggctggggagcaccagactggagcacagaagcaggctttagtagacattgtctgacttctatttatagaccatttgtagacaaagcactgaagcagatggggttaagaaagttaattttaagacttcacaagctaatggatggttccttgcaaagggcacgtatagcattggtaaagaacgatcgtccagtggagttttctgaatttccagatcccatgtggggttcagattatgtgcagttgtcaaggacaccaccttcatctgaggagaaatgcagtgctgtgtcgtgggaggagctgaaggccatggatttaccttcattcgaacctgccttcctagttctctgccgagtccttctgaatgtcatacatgagtgtctgaagttaagattggagcagagacctgctggagaaccatctctcttgagtattaagcagctggtgagagagtgtaaggaggtcctgaagggcggcctgctgatgaagcagtactaccagttcatgctgcaggaggttctggaggacttggagaagcccgactgcaacattgacgcttttgaagaggatctacataaaatgcttatggtgtattttgattacatgagaagctggatccaaatgctacagcaattacctcaagcatcgcatagtttaaaaaatctgttagaagaagaatggaatttcaccaaagaaataactcattacatacggggaggagaagcacaggccgggaagcttttctgtgacattgcaggaatgctgctgaaatctacaggaagttttttagaatttggcttacaggagagctgtgctgaattttggactagtgcggatgacagcagtgcttccgacgaaatcaggaggtctgttatagagatcagtcgagccctgaaggagctcttccatgaagccagagaaagggcttccaaagcacttggatttgctaaaatgttgagaaaggacctggaaatagcagcagaattcaggctttcagccccagttagagacctcctggatgttctgaaatcaaaacagtatgtcaaggtgcaaattcctgggttagaaaacttgcaaatgtttgttccagacactcttgctgaggagaagagtattattttgcagttactcaatgcagctgcaggaaaggactgttcaaaagattcagatgacgtactcatcgatgcctatctgcttctgaccaagcacggtgatcgagcccgtgattcagaggacagctggggcacctgggaggcacagcctgtcaaagtcgtgcctcaggtggagactgttgacaccctgagaagcatgcaggtggataatcttttactagttgtcatgcagtctgcgcatctcacaattcagagaaaagctttccagcagtccattgagggacttatgactctgtgccaggagcagacatccagtcagccggtcatcgccaaagctttgcagcagctgaagaatgatgcattggagctatgcaacaggataagcaatgccattgaccgcgtggaccacatgttcacatcagaatttgatgctgaggttgatgaatctgaatctgtcaccttgcaacagtactaccgagaagcaatgattcaggggtacaattttggatttgagtatcataaagaagttgttcgtttgatgtctggggagtttagacagaagataggagacaaatatataagctttgcccggaagtggatgaattatgtcctgactaaatgtgagagtggtagaggtacaagacccaggtgggcgactcaaggatttgattttctacaagcaattgaacctgcctttatttcagctttaccagaagatgacttcttgagtttacaagccttgatgaatgaatgcattggccatgtcataggaaaaccacacagtcctgttacaggtttgtaccttgccattcatcggaacagcccccgtcctatgaaggtacctcgatgccatagtgaccctcctaacccacacctcattatccccactccagagggattcaggggttccagcgttcctgaaaatgatcgattggcttccatagctgctgaattgcagtttaggtccctgagtcgtcactcaagccccacggaggagcgagatgaaccagcatatccaagaggagattcaagtgggtccacaagaagaagttgggaacttcggacactaatcagccagagtaaagatactgcttctaaactaggacccatagaagctatccagaagtcagtccgattgtttgaagaaaagaggtaccgagaaatgaggagaaagaatatcattggtcaagtttgtgatacgcctaagtcctatgataatgttatgcacgttggcttgaggaaggtgaccttcaaatggcaaagaggaaacaaaattggagaaggccagtatgggaaggtgtacacctgcatcagcgtcgacaccggggagctgatggccatgaaagagattcgatttcaacctaatgaccataagactatcaaggaaactgcagacgaattgaaaatattcgaaggcatcaaacaccccaatctggttcggtattttggtgtggagctccatagagaagaaatgtacatcttcatggagtactgcgatgaggggactttagaagaggtgtcaaggctgggacttcaggaacatgtgattaggctgtattcaaagcagatcaccattgcgatcaacgtcctccatgagcatggcatagtccaccgtgacattaaaggtgccaatatcttccttacctcatctggattaatcaaactgggagattttggatgttcagtaaagctcaaaaacaatgcccagaccatgcctggtgaagtgaacagcaccctggggacagcagcatacatggcacctgaagtcatcactcgtgccaaaggagagggccatgggcgtgcggccgacatctggagtctggggtgtgttgtcatagagatggtgactggcaagaggccttggcatgagtatgagcacaactttcaaattatgtataaagtggggatgggacataagccaccaatccctgaaagattaagccctgaaggaaaggacttcctttctcactgccttgagagtgacccaaagatgagatggaccgccagccagctcctcgaccattcgtttgtcaaggtttgcacagatgaagaatgaagcctagtagaatatggacttggaaaattctcttaatcactactgtatgtaatatttacataaagactgtgctgagaagcagtataagcctttttaaccttccaagactgaagactgcacaggtgacaagcgtcacttctcctgctgctcctgtttgtctgatgtggcaaaaggccctctggagggctggtggccacgaggttaaagaagctgcatgttaagtgccattactactgtacacggaccatcgcctctgtctcctccgtgtctcgcgcgactgagaaccgtgacatcagcgtagtgttttgacctttctaggttcaaaagaagttgtagtgttatcaggcatcccataccttgtttttaatctcctgtttgttgagtgcactgactgtgaaacctttaccttttttgttgttgttggcaagctgcaggtttgtaatgcaaaaggctgattactgaaatttaagaaaaaggttcttttttcaataaatggtttattttaggaaaaaaaaaaaagtcgacgcggccgcgaatttagtagtagta

SEQ ID NO: 324538 - DNA, 716 bp, Homo sapiens
aaatgaggacagcacgatcggaggaggtcatctagaagtacatggactttttcactctgtggaattgcacccgtacttatggttgagcaaccgtccaggaggagaaaacaacaggtggttgatgtataaaaatattgaagataaaagcatctattccaagagcagattataactagactgtatcattttaaatgcatttttttctcttctatttaagaatgccaaataaaatgacataatttcttctatatttggtaattcctttaccaagtggctgaattgtttgtagtggttaatgtctgtgtgatgatgaacgaaatcttcctttaaaatgtggtaagtattgtatgatttgcttcattttgcattaatcatggtttggactcttcagaatgatgcattggagctatgcaacaggataagcaatgccattgaccgcgtggaccacatgttcacatcagaatttgatgctgaggttgatgaatctgaatctgtcaccttgcaacagtactaccgagaagcaatgattcaggggtacaattttggatttgaggtaggttcaaaataagaggaaacacggtacaatttagtaattgcttgataacttacagaaagtttttggaaccttttacagtaaatctgatattgtaatcatagcttaatcaagaatatcatcttatatcactgctgtatatcagagatgttagtttactttt

SEQ ID NO: 324539 - DNA, 3374 bp, Homo sapiens
gaatctagaaactattgtaggttttttagaggcaaggttccctctgagttttttgaagatttaagtaggaagatataaaacacggatcgtctggttggagtttatggctgctggaacctgtgtgtgttgttttgcagctggtgagagagtgtaaggaggtcctgaagggcggcctgctgatgaagcagtactaccagttcatgctgcaggaggttctggaggacttggagaagcccgactgcaacattgacgcttttgaagaggatctacataaaatgcttatggtgtattttgattacatgagaagctggatccaaatgctacagcaattacctcaagcatcgcatagtttaaaaaatctgttagaagaagaatggaatttcaccaaagaaataactcattacatacggggaggagaagcacaggccgggaagcttttctgtgacattgcaggaatgctgctgaaatctacaggaagttttttagaatttggcttacaggagagctgtgctgaattttggactagtgcggatgacagcagtgcttccgacgaaatcaggaggtctgttatagagatcagtcgagccctgaaggagctcttccatgaagccagagaaagggcttccaaagcacttggatttgctaaaatgttgagaaaggacctggaaatagcagcagaattcaggctttcagccccagttagagacctcctggatgttctgaaatcaaaacagtatgtcaaggtgcaaattcctgggttagaaaacttgcaaatgtttgttccagacactcttgctgaggagaagagtattattttgcagttactcaatgcagctgcaggaaaggactgttcaaaagattcagatgacgtactcatcgatgcctatctgcttctgaccaagcacggtgatcgagcccgtgattcagaggacagctggggcacctgggaggcacagcctgtcaaagtcgtgcctcaggtggagactgttgacaccctgagaagcatgcaggtggataatcttttactagttgtcatgcagtctgcgcatctcacaattcagagaaaagctttccagcagtccattgagggacttatgactctgtgccaggagcagacatccagtcagccggtcatcgccaaagctttgcagcagctgaagaatgatgcattggagctatgcaacaggataagcaatgccattgaccgcgtggaccacatgttcacatcagaatttgatgctgaggttgatgaatctgaatctgtcaccttgcaacagtactaccgagaagcaatgattcaggggtacaattttggatttgagtatcataaagaagttgttcgtttgatgtctggggagtttagacagaagataggagacaaatatataagctttgcccggaagtggatgaattatgtcctgactaaatgtgagagtggtagaggtacaagacccaggtgggcgactcaaggatttgattttctacaagcaattgaacctgcctttatttcagctttaccagaagatgacttcttgagtttacaagccttgatgaatgaatgcattggccatgtcataggaaaaccacacagtcctgttacaggtttgtaccttgccattcatcggaacagcccccgtcctatgaaggtacctcgatgccatagtgaccctcctaacccacacctcattatccccactccagagggattcaggggttccagcgttcctgaaaatgatcgattggcttccatagctgctgaattgcagtttaggtccctgagtcgtcactcaagccccacggaggagcgagatgaaccagcatatccaagaggagattcaagtgggtccacaagaagaagttgggaacttcggacactaatcagccagagtaaagatactgcttctaaactaggacccatagaagctatccagaagtcagtccgattgtttgaagaaaagaggtaccgagaaatgaggagaaagaatatcattggtcaagtttgtgatacgcctaagtcctatgataatgttatgcacgttggcttgaggaaggtgaccttcaaatggcaaagaggaaacaaaattggagaaggccagtatgggaaggtgtacacctgcatcagcgtcgacaccggggagctgatggccatgaaagagattcgatttcaacctaatgaccataagactatcaaggaaactgcagacgaattgaaaatattcgaaggcatcaaacaccccaatctggttcggtattttggtgtggagctccatagagaagaaatgtacatcttcatggagtactgcgatgaggggactttagaagaggtgtcaaggctgggacttcaggaacatgtgattaggctgtattcaaagcagatcaccattgcgatcaacgtcctccatgagcatggcatagtccaccgtgacattaaaggtgccaatatcttccttacctcatctggattaatcaaactgggagattttggatgttcagtaaagctcaaaaacaatgcccagaccatgcctggtgaagtgaacagcaccctggggacagcagcatacatggcacctgaagtcatcactcgtgccaaaggagagggccatgggcgtgcggccgacatctggagtctggggtgtgttgtcatagagatggtgactggcaagaggccttggcatgagtatgagcacaactttcaaattatgtataaagtggggatgggacataagccaccaatccctgaaagattaagccctgaaggaaaggacttcctttctcactgccttgagagtgacccaaagatgagatggaccgccagccagctcctcgaccattcgtttgtcaaggtttgcacagatgaagaatgaagcctagtagaatatggacttggaaaattctcttaatcactactgtatgtaatatttacataaagactgtgctgagaagcagtataagcctttttaaccttccaagactgaagactgcacaggtgacaagcgtcacttctcctgctgctcctgtttgtctgatgtggcaaaaggccctctggagggctggtggccacgaggttaaagaagctgcatgttaagtgccattactactgtacacggaccatcgcctctgtctcctccgtgtctcgcgcgactgagaaccgtgacatcagcgtagtgttttgacctttctaggttcaaaagaagttgtagtgttatcaggcatcccataccttgtttttaatctcctgtttgttgagtgcactgactgtgaaacctttaccttttttgttgttgttggcaagctgcaggtttgtaatgcaaaaggctgattactgaaatttaagaaaaaggttcttttttcaataaatggtttattttaggaaa

SEQ ID NO: 324540 - DNA, 2989 bp, Homo sapiens
ttgtcatttcatcccgggacgcgtttacttgatgcatctggtccctggcgaccagttacaagaagaatggaatttcaccaaagaaataactcattacatacggggaggagaagcacaggccgggaagcttttctgtgacattgcaggaatgctgctgaaatctacaggaagttttttagaatttggcttacaggagagctgtgctgaattttggactagtgcggatgacagcagtgcttccgacgaaatcaggaggtctgttatagagatcagtcgagccctgaaggagctcttccatgaagccagagaaagggcttccaaagcacttggatttgctaaaatgttgagaaaggacctggaaatagcagcagaattcaggctttcagccccagttagagacctcctggatgttctgaaatcaaaacagtatgtcaagttactcaatgcagctgcaggaaaggactgttcaaaagattcagatgacgtactcatcgatgcctatctgcttctgaccaagcacggtgatcgagcccgtgattcagaggacagctggggcacctgggaggcacagcctgtcaaagtcgtgcctcaggtggagactgttgacaccctgagaagcatgcaggtggataatcttttactagttgtcatgcagtctgcgcatctcacaattcagagaaaagctttccagcagtccattgagggacttatgactctgtgccaggagcagacatccagtcagccggtcatcgccaaagctttgcagcagctgaagaatgatgcattggagctatgcaacaggataagcaatgccattgaccgcgtggaccacatgttcacatcagaatttgatgctgaggttgatgaatctgaatctgtcaccttgcaacagtactaccgagaagcaatgattcaggggtacaattttggatttgagtatcataaagaagttgttcgtttgatgtctggggagtttagacagaagataggagacaaatatataagctttgcccggaagtggatgaattatgtcctgactaaatgtgagagtggtagaggtacaagacccaggtgggcgactcaaggatttgattttctacaagcaattgaacctgcctttatttcagctttaccagaagatgacttcttgagtttacaagccttgatgaatgaatgcattggccatgtcataggaaaaccacacagtcctgttacaggtttgtaccttgccattcatcggaacagcccccgtcctatgaaggtacctcgatgccatagtgaccctcctaacccacacctcattatccccactccagagggattcaggggttccagcgttcctgaaaatgatcgattggcttccatagctgctgaattgcagtttaggtccctgagtcgtcactcaagccccacggaggagcgagatgaaccagcatatccaagaggagattcaagtgggtccacaagaagaagttgggaacttcggacactaatcagccagagtaaagatactgcttctaaactaggacccatagaagctatccagaagtcagtccgattgtttgaagaaaagaggtaccgagaaatgaggagaaagaatatcattggtcaagtttgtgatacgcctaagtcctatgataatgttatgcacgttggcttgaggaaggtgaccttcaaatggcaaagaggaaacaaaattggagaaggccagtatgggaaggtgtacacctgcatcagcgtcgacaccggggagctgatggccatgaaagagattcgatttcaacctaatgaccataagactatcaaggaaactgcagacgaattgaaaatattcgaaggcatcaaacaccccaatctggttcggtattttggtgtggagctccatagagaagaaatgtacatcttcatggagtactgcgatgaggggactttagaagaggtgtcaaggctgggacttcaggaacatgtgattaggctgtattcaaagcagatcaccattgcgatcaacgtcctccatgagcatggcatagtccaccgtgacattaaaggtgccaatatcttccttacctcatctggattaatcaaactgggagattttggatgttcagtaaagctcaaaaacaatgcccagaccatgcctggtgaagtgaacagcaccctggggacagcagcatacatggcacctgaagtcatcactcgtgccaaaggagagggccatgggcgtgcggccgacatctggagtctggggtgtgttgtcatagagatggtgactggcaagaggccttggcatgagtatgagcacaactttcaaattatgtataaagtggggatgggacataagccaccaatccctgaaagattaagccctgaaggaaaggacttcctttctcactgccttgagagtgacccaaagatgagatggaccgccagccagctcctcgaccattcgtttgtcaaggtttgcacagatgaagaatgaagcctagtagaatatggacttggaaaattctcttaatcactactgtatgtaatatttacataaagactgtgctgagaagcagtataagcctttttaaccttccaagactgaagactgcacaggtgacaagcgtcacttctcctgctgctcctgtttgtctgatgtggcaaaaggccctctggagggctggtggccacgaggttaaagaagctgcatgttaagtgccattactactgtacacggaccatcgcctctgtctcctccgtgtctcgcgcgactgagaaccgtgacatcagcgtagtgttttgacctttctaggttcaaaagaagttgtagtgttatcaggcatcccataccttgtttttaatctcctgtttgttgagtgcactgactgtgaaacctttaccttttttgttgttgttggcaagctgcaggtttgtaatgcaaaaggctgattactgaaatttaagaaaaaggttcttttttcaataaatggtttattttaggaaa

SEQ ID NO: 324541 - DNA, 1761 bp, Homo sapiens
cccgtctgacttggagctctcacctagggacaggtcaggacgtcggggcaggcagatgtgaaggctgctgccaaatccatcagcagtgccatgataccgggttccagcgttcctgaaaatgatcgattggcttccatagctgctgaattgcagtttaggtccctgagtcgtcactcaagccccacggaggagcgagatgaaccagcatatccaagaggagattcaagtgggtccacaagaagaagttgggaacttcggacactaatcagccagagtaaagatactgcttctaaactaggacccatagaagctatccagaagtcagtccgattgtttgaagaaaagaggtaccgagaaatgaggagaaagaatatcattggtcaagtttgtgatacgcctaagtcctatgataatgttatgcacgttggcttgaggaaggtgaccttcaaatggcaaagaggaaacaaaattggagaaggccagtatgggaaggtgtacacctgcatcagcgtcgacaccggggagctgatggccatgaaagagattcgatttcaacctaatgaccataagactatcaaggaaactgcagacgaattgaaaatattcgaaggcatcaaacaccccaatctggttcggtattttggtgtggagctccatagagaagaaatgtacatcttcatggagtactgcgatgaggggactttagaagaggtgtcaaggctgggacttcaggaacatgtgattaggctgtattcaaagcagatcaccattgcgatcaacgtcctccatgagcatggcatagtccaccgtgacattaaaggtgccaatatcttccttacctcatctggattaatcaaactgggagattttggatgttcagtaaagctcaaaaacaatgcccagaccatgcctggtgaagtgaacagcaccctggggacagcagcatacatggcacctgaagtcatcactcgtgccaaaggagagggccatgggcgtgcggccgacatctggagtctggggtgtgttgtcatagagatggtgactggcaagaggccttggcatgagtatgagcacaactttcaaattatgtataaagtggggatgggacataagccaccaatccctgaaagattaagccctgaaggaaaggacttcctttctcactgccttgagagtgacccaaagatgagatggaccgccagccagctcctcgaccattcgtttgtcaaggtttgcacagatgaagaatgaagcctagtagaatatggacttggaaaattctcttaatcactactgtatgtaatatttacataaagactgtgctgagaagcagtataagcctttttaaccttccaagactgaagactgcacaggtgacaagcgtcacttctcctgctgctcctgtttgtctgatgtggcaaaaggccctctggagggctggtggccacgaggttaaagaagctgcatgttaagtgccattactactgtacacggaccatcgcctctgtctcctccgtgtctcgcgcgactgagaaccgtgacatcagcgtagtgttttgacctttctaggttcaaaagaagttgtagtgttatcaggcatcccataccttgtttttaatctcctgtttgttgagtgcactgactgtgaaacctttaccttttttgttgttgttggcaagctgcaggtttgtaatgcaaaaggctgattactgaaatttaagaaaaaggttcttttttcaataaatggtttattttaggaaa

SEQ ID NO: 324542 - DNA, 5221 bp, Homo sapiens
ttcgagcctgtggaaggctgcgctgtcaagagaccggagttgcgagcgtctgggtgacgtccgtcctcctggaaggtgggatccgggtggcaggtccctgggcggcgactccggccgggctcatagcgtcgcgcccgccccgctcatcggccctacccagcgtccctcccagaccgacgaccgcctgggaagcctcgagctcccagcccgctgcacagcccggctccgctccacagtcccccactgccaccggccggggcgacaccgggcgagctggcgagacccggctccaggaccgaatcgcgccgacacttgacggcgctccccgcccctccctgccgccgtctccgcccccgtccggtcgcattccggcgcccgccgccgccgccgccaccgccgccgatctgggaggcttgtccctcgccgcccaccgtagccccggcgctcggccggtcgccgtttccaagatggccgcggcgcgcacggctcctgcggcggggtagaggcggaggcggagtcgagtcactcccgcacttcggggctccggtgccccgcgccaggctgcagcttactgcccgccgcggccatgcggggctccgtgcacggatgagagaagccgctgccgcgctggtccctcctcccgcctttgccgtcacgcctgccgccgccatggaggagccgccgccaccgccgccgccgccaccaccgccaccggaacccgagaccgagtcagaacccgagtgctgcttggcggcgaggcaagagggcacattgggagattcagcttgcaagagtcctgaatctgatctagaagacttctccgatgaaacaaatacagagaatctttatggtacctctccccccagcacacctcgacagatgaaacgcatgtcaaccaaacatcagaggaataatgtggggaggccagccagtcggtctaatttgaaaggtgtccgtcagatctcccatgctgtttcttcctccttaaattgaagaaaaaatgaatgcaccaaatcagcctccacataaagacactggaaaaacagtggagaatgtggaagaatacagctataagcaggagaaaaagatccgagcagctcttagaacaacagagcgtgatcataaaaaaaatgtacagtgctcattcatgttagactcagtgggtggatctttgccaaaaaaatcaattccagatgtggatctcaataagccttacctcagccttggctgtagcaatgctaagcttccagtatctgtgcccatgcctatagccagacctgcacgccagacttctaggactgactgtccagcagatcgtttaaagttttttgaaactttacgacttttgctaaagcttacctcagtctcaaagaaaaaagacagggagcaaagaggacaagaaaatacgtctggtttctggcttaaccgatctaacgaactgatctggttagagctacaagcctggcatgcaggacggacaattaacgaccaggacttctttttatatacagcccgtcaagccatcccagatattattaatgaaatccttactttcaaagtcgactatgggagcttcgcctttgttagagatagagctggttttaatggtacttcagtagaagggcagtgcaaagccactcctggaacaaagattgtaggttactcaacacatcatgagcatctccaacgccagagggtctcatttgagcaggtaaaacggataatggagctgctagagtacatagaagcactttatccatcattgcaggctcttcagaaggactatgaaaaatatgctgcaaaagacttccaggacagggtgcaggcactctgtttgtggttaaacatcacaaaagacttaaatcagaaattaaggattatgggcactgttttgggcatcaagaatttatcagacattggctggccagtgtttgaaatcccttcccctcgaccatccaaaggtaatgagccggagtatgagggtgatgacacagaaggagaattaaaggagttggaaagtagtacggatgagagtgaagaagaacaaatctctgatcctagggtaccggaaatcagacagcccatagataacagcttcgacatccagtcgcgggactgcatatccaagaagcttgagaggctcgaatctgaggatgattctcttggctggggagcaccagactggagcacagaagcaggctttagtagacattgtctgacttctatttatagaccatttgtagacaaagcactgaagcagatggggttaagaaagttaattttaagacttcacaagctaatggatggttccttgcaaagggcacgtatagcattggtaaagaacgatcgtccagtggagttttctgaatttccagatcccatgtggggttcagattatgtgcagttgtcaaggacaccaccttcatctgaggagaaatgcagtgctgtgtcgtgggaggagctgaaggccatggatttaccttcattcgaacctgccttcctagttctctgccgagtccttctgaatgtcatacatgagtgtctgaagttaagattggagcagagacctgctggagaaccatctctcttgagtattaagcagctggtgagagagtgtaaggaggtcctgaagggcggcctgctgatgaagcagtactaccagttcatgctgcaggaggttctggaggacttggagaagcccgactgcaacattgacgcttttgaagaggatctacataaaatgcttatggtgtattttgattacatgagaagctggatccaaatgctacagcaattacctcaagcatcgcatagtttaaaaaatctgttagaagaagaatggaatttcaccaaagaaataactcattacatacggggaggagaagcacaggccgggaagcttttctgtgacattgcaggaatgctgctgaaatctacaggaagttttttagaatttggcttacaggagagctgtgctgaattttggactagtgcggatgacagcagtgcttccgacgaaatcaggaggtctgttatagagatcagtcgagccctgaaggagctcttccatgaagccagagaaagggcttccaaagcacttggatttgctaaaatgttgagaaaggacctggaaatagcagcagaattcaggctttcagccccagttagagacctcctggatgttctgaaatcaaaacagtatgtcaaggtgcaaattcctgggttagaaaacttgcaaatgtttgttccagacactcttgctgaggagaagagtattattttgcagttactcaatgcagctgcaggaaaggactgttcaaaagattcagatgacgtactcatcgatgcctatctgcttctgaccaagcacggtgatcgagcccgtgattcagaggacagctggggcacctgggaggcacagcctgtcaaagtcgtgcctcaggtggagactgttgacaccctgagaagcatgcaggtggataatcttttactagttgtcatgcagtctgcgcatctcacaattcagagaaaagctttccagcagtccattgagggacttatgactctgtgccaggagcagacatccagtcagccggtcatcgccaaagctttgcagcagctgaagaatgatgcattggagctatgcaacaggataagcaatgccattgaccgcgtggaccacatgttcacatcagaatttgatgctgaggttgatgaatctgaatctgtcaccttgcaacagtactaccgagaagcaatgattcaggggtacaattttggatttgagtatcataaagaagttgttcgtttgatgtctggggagtttagacagaagataggagacaaatatataagctttgcccggaagtggatgaattatgtcctgactaaatgtgagagtggtagaggtacaagacccaggtgggcgactcaaggatttgattttctacaagcaattgaacctgcctttatttcagctttaccagaagatgacttcttgagtttacaagccttgatgaatgaatgcattggccatgtcataggaaaaccacacagtcctgttacaggtttgtaccttgccattcatcggaacagcccccgtcctatgaaggtacctcgatgccatagtgaccctcctaacccacacctcattatccccactccagagggattcaggggttccagcgttcctgaaaatgatcgattggcttccatagctgctgaattgcagtttaggtccctgagtcgtcactcaagccccacggaggagcgagatgaaccagcatatccaagaggagattcaagtgggtccacaagaagaagttgggaacttcggacactaatcagccagagtaaagatactgcttctaaactaggacccatagaagctatccagaagtcagtccgattgtttgaagaaaagaggtaccgagaaatgaggagaaagaatatcattggtcaagtttgtgatacgcctaagtcctatgataatgttatgcacgttggcttgaggaaggtgaccttcaaatggcaaagaggaaacaaaattggagaaggccagtatgggaaggtgtacacctgcatcagcgtcgacaccggggagctgatggccatgaaagagattcgatttcaacctaatgaccataagactatcaaggaaactgcagacgaattgaaaatattcgaaggcatcaaacaccccaatctggttcggtattttggtgtggagctccatagaagcacagtaactttgcctaattctcaggaaatctccatgagttacatcatttctgccttctctctgaaactagaggagttcctcctaaaatgtaagttgtagactgtagtcattaacccgacatcataaagcactgaaacccatcctgccattcagaagattcttctaaaacgccccttacaccacttcttgtgactttttttccgtttttttgctgaaccactgttgagtacactgttaagtaatactggtttttttcttgtatgtatttagggagccattgtgaaatgagagaaaattcaaacctcaaattgagtttcctccttgtgtttagaaataaacacgtcgagggaaagaggataacttggagcatcgtggtgtagagcatgagcttccaggggaagttggaaatggatcatttttaatgtttttacaaattatgtttaaaaaggatgtgtttcagtacttaataatgtatttgta

SEQ ID NO: 324543 - DNA, 898 bp, Homo sapiens
accggaatctaggtggggccgcccggagcggcgtcctcgggagccgcctccccgcggcctcttcgcttttgtggcggcgcccgcgctcgcaggccactctctgctgtcgcccgtcccgcgcgctcctccgacccgctccgctccgctccgctcggccccgcgccgcccgtcaacatgatccgctgcggcctggcctgcgagcgctgccgctggatcctgcccctgctcctactcagcgccatcgccttcgacatcatcgcgctggccggccgcggctggttgcagtctagcgaccacggccagacgtcctcgctgtggtggaaatgctcccaagagggcggcggcagcgggtcctacgaggagggctgtcagagcctcatggagtacgcgtggggtagagcagcggctgccatgctcttctgtggcttcatcatcctggtgatctgtttcatcctctccttcttcgccctctgtggaccccagatgcttgtcttcctgagagtgattggaggtctccttgccttggctgctgtgttccagatcatctccctggtaatttaccccgtgaagtacacccagaccttcacccttcatgccaaccgtgctgtcacttacatctataactgggcctacggctttgggtgggcagccacgattatcctgatcggctgtgccttcttcttctgctgcctccccaactacgaagatgaccttctgggcaatgccaagcccaggtacttctacacatctgcctaacttgggaatgaatgtgggagaaaatcgctgctgctgagatggactccagaagaagaaactgtttctccaggcgactttgaacccattttttggcagtgttcatattattaaactagtcaaaaatgctaaaataatttgggag

SEQ ID NO: 324544 - DNA, 516 bp, Homo sapiens
aggtcgtctagaggatccctcataggttcgcaggctacgaggagggctgtcagagcctcatggagtacgcgtggggtagagcagcggctgccatgctcttctgtggcttcatcatcctggtgatctgtttcatcctctccttcttcgccctctgtggaccccagatgcttgtcttcctgagagtgattggaggtctccttgccttggctgctgtgttccagatcatctccctggtaatttaccccgtgaagtacacccagaccttcacccttcatgccaaccgtgcgaacctattcataggttcgcaggcatggcgggttgtgccatactcatgaccatcgcgctagcactgctggagcagctaccctggatgtcctatctgagcatcgtggccatcttgggctttgtggccttctttgaagtgggtcctggccccatcccatggttcatcgtggctgaactcttcagccagggtccacgtccagctgccattgccgttgcaggcttctccaactg

SEQ ID NO: 324545 - DNA, 196 bp, Homo sapiens
tgaggaatgtatctatatatactagtggaatattgtggtttagatattttaacttaagggacaacccggctttgccaagtatagaagcagttcctcatccttggatgagaaactgtttctccaggcgactttgaacccattttttggcagtgttcatattattaaactagtcaaaaatgctaaaataatttgggag

SEQ ID NO: 324546 - DNA, 2153 bp, Homo sapiens
  misc_feature (2016)..(2016): n is a, c, g, or t
  misc_feature (2019)..(2019): n is a, c, g, or t
accggaatctaggtggggccgcccggagcggcgtcctcgggagccgcctccccgcggcctcttcgcttttgtggcggcgcccgcgctcgcaggccactctctgctgtcgcccgtcccgcgcgctcctccgacccgctccgctccgctccgctcggccccgcgccgcccgtcaacatgatccgctgcggcctggcctgcgagcgctgccgctggatcctgcccctgctcctactcagcgccatcgccttcgacatcatcgcgctggccggccgcggctggttgcagtctagcgaccacggccagacgtcctcgctgtggtggaaatgctcccaagagggcggcggcagcgggtcctacgaggagggctgtcagagcctcatggagtacgcgtggggtagagcagcggctgccatgctcttctgtggcttcatcatcctggtgatctgtttcatcctctccttcttcgccctctgtggaccccagatgcttgtcttcctgagagtgattggaggtctccttgccttggctgctgtgttccagatcatctccctggtaatttaccccgtgaagtacacccagaccttcacccttcatgccaaccgtgctgtcacttacatctataactgggcctacggctttgggtgggcagccacgattatcctgatcggctgtgccttcttcttctgctgcctccccaactacgaagatgaccttctgggcaatgccaagcccaggtacttctacacatctgcctaacttgggaatgaatgtgggagaaaatcgctgctgctgagatggactccagaagaagaaactgtttctccaggcgactttgaacccattttttggcagtgttcatattattaaactagtcaaaaatgctaaaataatttgggagaaaatattttttaagtagtgttatagtttcatgtttatcttttattatgttttgtgaagttgtgtcttttcactaattacctatactatgccaatatttccttatatctatccataacatttatactacatttgtaagagaatatgcacgtgaaacttaacactttataaggtaaaaatgaggtttccaagatttaataatctgatcaagttcttgttatttccaaatagaatggactcggtctgttaagggctaaggagaagaggaagataaggttaaaagttgttaatgaccaaacattctaaaagaaatgcaaaaaaaaagtttattttcaagccttcgaactatttaaggaaagcaaaatcatttcctaaatgcatatcatttgtgagaatttctcattaatatcctgaatcattcatttcagctaaggcttcatgttgactcgatatgtcatctaggaaagtactatttcatggtccaaacctgttgccatagttggtaaggctttcctttaagtgtgaaatatttagatgaaattttctcttttaaagttctttatagggttagggtgtgggaaaatgctatattaataaatctgtagtgttttgtgtttatatgttcagaaccagagtagactggattgaaagatggactgggtctaatttatcatgactgatagatctggttaagttgtgtagtaaagcattaggagggtcattcttgtcacaaaagtgccactaaaacagcctcaggagaataaatgacttgcttttctaaatctcaggtttatctgggctctatcatatagacaggcttctgatagtttgcaactgtaagcagaaacctacatatagttaaaatcctggtctttcttggtaaacagattttaaatgtctgatataaaacatgccacaggagaattcggggatttgagtttctctgaatagcatatatatgatgcatcggataggtcattatgattttttaccatttcgacttacataatgaaaaccaattcattttaaatatcagattattattttgtaagttgtggaaaaagctaattgtagttttcattatgaagttttcccaataaaccaggtattctaaacaancancaccacatacaaaacaaaaactttttgggcgggctggcccctggaaaagtttttaacacttggtgggggcgcggcccgagttgcgaacatgctagcgtccaggaacgtgcgaaacggcgggttttccaaaaaag

SEQ ID NO: 324547 - DNA, 2070 bp, Homo sapiens
  misc_feature (2041)..(2041): n is a, c, g, or t
  misc_feature (2043)..(2043): n is a, c, g, or t
  misc_feature (2045)..(2045): n is a, c, g, or t
  misc_feature (2053)..(2054): n is a, c, g, or t
accggaatctaggtggggccgcccggagcggcgtcctcgggagccgcctccccgcggcctcttcgcttttgtggcggcgcccgcgctcgcaggccactctctgctgtcgcccgtcccgcgcgctcctccgacccgctccgctccgctccgctcggccccgcgccgcccgtcaacatgatccgctgcggcctggcctgcgagcgctgccgctggatcctgcccctgctcctactcagcgccatcgccttcgacatcatcgcgctggccggccgcggctggttgcagtctagcgaccacggccagacgtcctcgctgtggtggaaatgctcccaagagggcggcggcagcgggtcctacgaggagggctgtcagagcctcatggagtacgcgtggggtagagcagcggctgccatgctcttctgtggcttcatcatcctggtgatctgtttcatcctctccttcttcgccctctgtggaccccagatgcttgtcttcctgagagtgattggaggtctccttgccttggctgctgtgttccagatcatctccctggtaatttaccccgtgaagtacacccagaccttcacccttcatgccaaccgtgctgtcacttacatctataactgggcctacggctttgggtgggcagccacgattatcctgatcggctgtgccttcttcttctgctgcctccccaactacgaagatgaccttctgggcaatgccaagcccaggtacttctacacatctgcctaacttgggaatgaatgtgggagaaaatcgctgctgctgagatggactccagaagaagaaactgtttctccaggcgactttgaacccattttttggcagtgttcatattattaaactagtcaaaaatgctaaaataatttgggagaaaatattttttaagtagtgttatagtttcatgtttatcttttattatgttttgtgaagttgtgtcttttcactaattacctatactatgccaatatttccttatatctatccataacatttatactacatttgtaagagaatatgcacgtgaaacttaacactttataaggtaaaaatgaggtttccaagatttaataatctgatcaagttcttgttatttccaaatagaatggactcggtctgttaagggctaaggagaagaggaagataaggttaaaagttgttaatgaccaaacattctaaaagaaatgcaaaaaaaaagtttattttcaagccttcgaactatttaaggaaagcaaaatcatttcctaaatgcatatcatttgtgagaatttctcattaatatcctgaatcattcatttcagctaaggcttcatgttgactcgatatgtcatctaggaaagtactatttcatggtccaaacctgttgccatagttggtaaggctttcctttaagtgtgaaatatttagatgaaattttctcttttaaagttctttatagggttagggtgtgggaaaatgctatattaataaatctgtagtgttttgtgtttatatgttcagaaccagagtagactggattgaaagatggactgggtctaatttatcatgactgatagatctggttaagttgtgtagtaaagcattaggagggtcattcttgtcacaaaagtgccactaaaacagcctcaggagaataaatgacttgcttttctaaatctcaggtttatctgggctctatcatatagacaggcttctgatagtttgcaactgtaagcagaaacctacatatagttaaaatcctggtctttcttggtaaacagattttaaatgtctgatataaaacatgccacaggagaattcggggatttgagtttctctgaatagcatatatatgatgcatcggataggtcattatgattttttaccatttcgacttacataatgaaaaccaattcattttaaatatcagattattattttgtaagttgtggaaaaagctaattgtagttttcattatgaagttttcccaataaaccaggtattctaaaaaaaaaaagcaacacacaaaaaaaaactntntnggggcgcnntgggcccctggaaaaa

SEQ ID NO: 324548 - DNA, 2074 bp, Homo sapiens
  misc_feature (2021)..(2021): n is a, c, g, or t
  misc_feature (2023)..(2023): n is a, c, g, or t
  misc_feature (2029)..(2029): n is a, c, g, or t
  misc_feature (2045)..(2045): n is a, c, g, or t
  misc_feature (2047)..(2047): n is a, c, g, or t
  misc_feature (2049)..(2049): n is a, c, g, or t
  misc_feature (2057)..(2058): n is a, c, g, or t
accggaatctaggtggggccgcccggagcggcgtcctcgggagccgcctccccgcggcctcttcgcttttgtggcggcgcccgcgctcgcaggccactctctgctgtcgcccgtcccgcgcgctcctccgacccgctccgctccgctccgctcggccccgcgccgcccgtcaacatgatccgctgcggcctggcctgcgagcgctgccgctggatcctgcccctgctcctactcagcgccatcgccttcgacatcatcgcgctggccggccgcggctggttgcagtctagcgaccacggccagacgtcctcgctgtggtggaaatgctcccaagagggcggcggcagcgggtcctacgaggagggctgtcagagcctcatggagtacgcgtggggtagagcagcggctgccatgctcttctgtggcttcatcatcctggtgatctgtttcatcctctccttcttcgccctctgtggaccccagatgcttgtcttcctgagagtgattggaggtctccttgccttggctgctgtgttccagatcatctccctggtaatttaccccgtgaagtacacccagaccttcacccttcatgccaaccgtgctgtcacttacatctataactgggcctacggctttgggtgggcagccacgattatcctgatcggctgtgccttcttcttctgctgcctccccaactacgaagatgaccttctgggcaatgccaagcccaggtacttctacacatctgcctaacttgggaatgaatgtgggagaaaatcgctgctgctgagatggactccagaagaagaaactgtttctccaggcgactttgaacccattttttggcagtgttcatattattaaactagtcaaaaatgctaaaataatttgggagaaaatattttttaagtagtgttatagtttcatgtttatcttttattatgttttgtgaagttgtgtcttttcactaattacctatactatgccaatatttccttatatctatccataacatttatactacatttgtaagagaatatgcacgtgaaacttaacactttataaggtaaaaatgaggtttccaagatttaataatctgatcaagttcttgttatttccaaatagaatggactcggtctgttaagggctaaggagaagaggaagataaggttaaaagttgttaatgaccaaacattctaaaagaaatgcaaaaaaaaagtttattttcaagccttcgaactatttaaggaaagcaaaatcatttcctaaatgcatatcatttgtgagaatttctcattaatatcctgaatcattcatttcagctaaggcttcatgttgactcgatatgtcatctaggaaagtactatttcatggtccaaacctgttgccatagttggtaaggctttcctttaagtgtgaaatatttagatgaaattttctcttttaaagttctttatagggttagggtgtgggaaaatgctatattaataaatctgtagtgttttgtgtttatatgttcagaaccagagtagactggattgaaagatggactgggtctaatttatcatgactgatagatctggttaagttgtgtagtaaagcattaggagggtcattcttgtcacaaaagtgccactaaaacagcctcaggagaataaatgacttgcttttctaaatctcaggtttatctgggctctatcatatagacaggcttctgatagtttgcaactgtaagcagaaacctacatatagttaaaatcctggtctttcttggtaaacagattttaaatgtctgatataaaacatgccacaggagaattcggggatttgagtttctctgaatagcatatatatgatgcatcggataggtcattatgattttttaccatttcgacttacataatgaaaaccaattcattttaaatatcagattattattttgtaagttgtggaaaaagctaattgtagttttcattatgaagttttcccaataaaccaggtattctaaaaaaaaaaananaaaaanaaaaaaaaaaaaactntntnggggcgcnntgggcccctggaaaaa

SEQ ID NO: 324549 - DNA, 1836 bp, Homo sapiens
accggaatctaggtggggccgcccggagcggcgtcctcgggagccgcctccccgcggcctcttcgcttttgtggcggcgcccgcgctcgcaggccactctctgctgtcgcccgtcccgcgcgctcctccgacccgctccgctccgctccgctcggccccgcgccgcccgtcaacatgatccgctgcggcctggcctgcgagcgctgccgctggatcctgcccctgctcctactcagcgccatcgccttcgacatcatcgcgctggccggccgcggctggttgcagtctagcgaccacggccagacgtcctcgctgtggtggaaatgctcccaagagggcggcggcagcgggtcctacgaggagggctgtcagagcctcatggagtacgcgtggggtagagcagcggctgccatgctcttctgtggcttcatcatcctggtgatctgtttcatcctctccttcttcgccctctgtggaccccagatgcttgtcttcctgagagtgattggaggtctccttgccttggctgctgtgttccagatcatctccctggtaatttaccccgtgaagtacacccagaccttcacccttcatgccaaccgtgctgtcacttacatctataactgggcctacggctttgggtgggcagccacgattatcctgatcggctgtgccttcttcttctgctgcctccccaactacgaagatgaccttctgggcaatgccaagcccaggtacttctacacatctgcctaacttgggaatgaatgtgggagaaaatcgctgctgctgagatggactccagaagaagaaactgtttctccaggcgactttgaacccattttttggcagtgttcatattattaaactagtcaaaaatgctaaaataatttgggagaaaatattttttaagtagtgttatagtttcatgtttatcttttattatgttttgtgaagttgtgtcttttcactaattacctatactatgccaatatttccttatatctatccataacatttatactacatttgtaagagaatatgcacgtgaaacttaacactttataaggtaaaaatgaggtttccaagatttaataatctgatcaagttcttgttatttccaaatagaatggactcggtctgttaagggctaaggagaagaggaagataaggttaaaagttgttaatgaccaaacattctaaaagaaatgcaaaaaaaaagtttattttcaagccttcgaactatttaaggaaagcaaaatcatttcctaaatgcatatcatttgtgagaatttctcattaatatcctgaatcattcatttcagctaaggcttcatgttgactcgatatgtcatctaggaaagtactatttcatggtccaaacctgttgccatagttggtaaggctttcctttaagtgtgaaatatttagatgaaattttctcttttaaagttctttatagggttagggtgtgggaaaatgctatattaataaatctgtagtgttttgtgtttatatgttcagaaccagagtagactggattgaaagatggactgggtctaatttatcatgactgatagatctggttaagttgtgtagtaaagcattaggagggtcattcttgtcacaaaagtgccactaaaacagcctcaggagaataaatgacttgcttttctaaatctcaggtttatctgggctctatcatatagacaggcttctgatagtttgcaactgtaagcagaaacctacatatagttaaaatccggcttctgggaaccgctttattgtctgtttaacctggccccgggaattgggggtggttcccgaaggatttgg

SEQ ID NO: 324550 - DNA, 1085 bp, Homo sapiens
  misc_feature (25)..(25): n is a, c, g, or t
  misc_feature (28)..(28): n is a, c, g, or t
gcggccgcctactactactaaattngcngccggtcgatttatactacatttgtaagagaatatgcacgtgaaacttaacactttataaggtaaaaatgaggtttccaagatttaataatctgatcaagttcttgttatttccaaatagaatggactcggtctgttaagggctaaggagaagaggaagataaggttaaaagttgttaatgaccaaacattctaaaagaaatgcaaaaaaaaagtttattttcaagccttcgaactatttaaggaaagcaaaatcatttcctaaatgcatatcatttgtgagaatttctcattaatatcctgaatcattcatttcagctaaggcttcatgttgactcgatatgtcatctaggaaagtactatttcatggtccaaacctgttgccatagttggtaaggctttcctttaagtgtgaaatatttagatgaaattttctcttttaaagttctttatagggttagggtgtgggaaaatgctatattaataaatctgtagtgttttgtgtttatatgttcagaaccagagtagactggattgaaagatggactgggtctaatttatcatgactgatagatctggttaagttgtgtagtaaagcattaggagggtcattcttgtcacaaaagtgccactaaaacagcctcaggagaataaatgacttgcttttctaaatctcaggtttatctgggctctatcatatagacaggcttctgatagtttgcaactgtaagcagaaacctacatatagttaaaatcctggtctttcttggtaaacagattttaaatgtctgatataaaacatgccacaggagaattcggggatttgagtttctctgaatagcatatatatgatgcatcggataggtcattatgattttttaccatttcgacttacataatgaaaaccaattcattttaaatatcagattattattttgtaagttgtggaaaaagctaattgtagttttcattatgaagttttcccaataaaccaggtattctaaaaaaaaacattcataaaaataaaaatccgagactagctggtgccgaattcctgc

SEQ ID NO: 324551 - DNA, 1100 bp, Homo sapiens
  misc_feature (22)..(22): n is a, c, g, or t
  misc_feature (26)..(27): n is a, c, g, or t
  misc_feature (30)..(31): n is a, c, g, or t
  misc_feature (36)..(36): n is a, c, g, or t
  misc_feature (41)..(41): n is a, c, g, or t
gttatggatagatgtaaggaantttnnctnntatangtttngtgaaaagacacaacttcacaaaacataataaaatatgcacgtgaaacttaacactttataaggtaaaaatgaggtttccaagatttaataatctgatcaagttcttgttatttccaaatagaatggactcggtctgttaagggctaaggagaagaggaagataaggttaaaagttgttaatgaccaaacattctaaaagaaatgcaaaaaaaaagtttattttcaagccttcgaactatttaaggaaagcaaaatcatttcctaaatgcatatcatttgtgagaatttctcattaatatcctgaatcattcatttcagctaaggcttcatgttgactcgatatgtcatctaggaaagtactatttcatggtccaaacctgttgccatagttggtaaggctttcctttaagtgtgaaatatttagatgaaattttctcttttaaagttctttatagggttagggtgtgggaaaatgctatattaataaatctgtagtgttttgtgtttatatgttcagaaccagagtagactggattgaaagatggactgggtctaatttatcatgactgatagatctggttaagttgtgtagtaaagcattaggagggtcattcttgtcacaaaagtgccactaaaacagcctcaggagaataaatgacttgcttttctaaatctcaggtttatctgggctctatcatatagacaggcttctgatagtttgcaactgtaagcagaaacctacatatagttaaaatcctggtctttcttggtaaacagattttaaatgtctgatataaaacatgccacaggagaattcggggatttgagtttctctgaatagcatatatatgatgcatcggataggtcattatgattttttaccatttcgacttacataatgaaaaccaattcattttaaatatcagattattattttgtaagttgtggaaaaagctaattgtagttttcattatgaagttttcccaataaaccaggtattctaaaaaaaaacattcataaaaataaaaatccgagactagctggtgccgaattcctgc

SEQ ID NO: 324552 - DNA, 1700 bp, Homo sapiens
accggaatctaggtggggccgcccggagcggcgtcctcgggagccgcctccccgcggcctcttcgcttttgtggcggcgcccgcgctcgcaggccactctctgctgtcgcccgtcccgcgcgctcctccgacccgctccgctccgctccgctcggccccgcgccgcccgtcaacatgatccgctgcggcctggcctgcgagcgctgccgctggatcctgcccctgctcctactcagcgccatcgccttcgacatcatcgcgctggccggccgcggctggttgcagtctagcgaccacggccagacgtcctcgctgtggtggaaatgctcccaagagggcggcggcagcgggtcctacgaggagggctgtcagagcctcatggagtacgcgtggggtagagcagcggctgccatgctcttctgtggcttcatcatcctggtgatctgtttcatcctctccttcttcgccctctgtggaccccagatgcttgtcttcctgagagtgattggaggtctccttgccttggctgctgtgttccagatcatctccctggtaatttaccccgtgaagtacacccagaccttcacccttcatgccaaccgtgctgtcacttacatctataactgggcctacggctttgggtgggcagccacgattatcctgatcggctgtgccttcttcttctgctgcctccccaactacgaagatgaccttctgggcaatgccaagcccaggtacttctacacatctgcctaacttgggaatgaatgtgggagaaaatcgctgctgctgagatggactccagaagaagaaactgtttctccaggcgactttgaacccattttttggcagtgttcatattattaaactagtcaaaaatgctaaaataatttgggagaaaatattttttaagtagtgttatagtttcatgtttatcttttattatgttttgtgaagttgtgtcttttcactaattacctatactatgccaatatttccttatatctatccataacatttatactacatttgtaagagaatatgcacgtgaaacttaacactttataaggtaaaaatgaggtttccaagatttaataatctgatcaagttcttgttatttccaaatagaatggactcggtctgttaagggctaaggagaagaggaagataaggttaaaagttgttaatgaccaaacattctaaaagaaatgcaaaaaaaaagtttattttcaagccttcgaactatttaaggaaagcaaaatcatttcctaaatgcatatcatttgtgagaatttctcattaatatcctgaatcattcatttcagctaaggcttcatgttgactcgatatgtcatctaggaaagtactatttcatggtccaaacctgttgccatagttggtaaggctttcctttaagtgtgaaatatttagatgaaattttctcttttaaagttctttatagggttagggtgtgggaaaatgctatattaataaatctgtagtgttttgtgtttatatgttcagaaccagagtagactggattgaaagatggactgggtctaatttatcatgactgatagatctggttaagttgtgtagtaaagcattaggagggtcattcttgtcacaaaagtgccactaaaacagcctcaggagaataaatgacttgcttttctaaagtcgacgcggccgcgaattta

SEQ ID NO: 324553 - DNA, 1627 bp, Homo sapiens
accggaatctaggtggggccgcccggagcggcgtcctcgggagccgcctccccgcggcctcttcgcttttgtggcggcgcccgcgctcgcaggccactctctgctgtcgcccgtcccgcgcgctcctccgacccgctccgctccgctccgctcggccccgcgccgcccgtcaacatgatccgctgcggcctggcctgcgagcgctgccgctggatcctgcccctgctcctactcagcgccatcgccttcgacatcatcgcgctggccggccgcggctggttgcagtctagcgaccacggccagacgtcctcgctgtggtggaaatgctcccaagagggcggcggcagcgggtcctacgaggagggctgtcagagcctcatggagtacgcgtggggtagagcagcggctgccatgctcttctgtggcttcatcatcctggtgatctgtttcatcctctccttcttcgccctctgtggaccccagatgcttgtcttcctgagagtgattggaggtctccttgccttggctgctgtgttccagatcatctccctggtaatttaccccgtgaagtacacccagaccttcacccttcatgccaaccgtgctgtcacttacatctataactgggcctacggctttgggtgggcagccacgattatcctgatcggctgtgccttcttcttctgctgcctccccaactacgaagatgaccttctgggcaatgccaagcccaggtacttctacacatctgcctaacttgggaatgaatgtgggagaaaatcgctgctgctgagatggactccagaagaagaaactgtttctccaggcgactttgaacccattttttggcagtgttcatattattaaactagtcaaaaatgctaaaataatttgggagaaaatattttttaagtagtgttatagtttcatgtttatcttttattatgttttgtgaagttgtgtcttttcactaattacctatactatgccaatatttccttatatctatccataacatttatactacatttgtaagagaatatgcacgtgaaacttaacactttataaggtaaaaatgaggtttccaagatttaataatctgatcaagttcttgttatttccaaatagaatggactcggtctgttaagggctaaggagaagaggaagataaggttaaaagttgttaatgaccaaacattctaaaagaaatgcaaaaaaaaagtttattttcaagccttcgaactatttaaggaaagcaaaatcatttcctaaatgcatatcatttgtgagaatttctcattaatatcctgaatcattcatttcagctaaggcttcatgttgactcgatatgtcatctaggaaagtactatttcatggtccaaacctgttgccatagttggtaaggctttcctttaagtgtgaaatatttagatgaaattttctcttttaaagttctttatagggttagggtgtgggaaaatgctatattaataaatctgtagtgttttgtgtttatatgttcagaaccagagtagactggattgaaagatggactgggtctaatttatcatgactgatagatctggttaagttgtgtagtagtaggcgcacgggatcctctagatct

SEQ ID NO: 324554 - DNA, 1532 bp, Homo sapiens
accggaatctaggtggggccgcccggagcggcgtcctcgggagccgcctccccgcggcctcttcgcttttgtggcggcgcccgcgctcgcaggccactctctgctgtcgcccgtcccgcgcgctcctccgacccgctccgctccgctccgctcggccccgcgccgcccgtcaacatgatccgctgcggcctggcctgcgagcgctgccgctggatcctgcccctgctcctactcagcgccatcgccttcgacatcatcgcgctggccggccgcggctggttgcagtctagcgaccacggccagacgtcctcgctgtggtggaaatgctcccaagagggcggcggcagcgggtcctacgaggagggctgtcagagcctcatggagtacgcgtggggtagagcagcggctgccatgctcttctgtggcttcatcatcctggtgatctgtttcatcctctccttcttcgccctctgtggaccccagatgcttgtcttcctgagagtgattggaggtctccttgccttggctgctgtgttccagatcatctccctggtaatttaccccgtgaagtacacccagaccttcacccttcatgccaaccgtgctgtcacttacatctataactgggcctacggctttgggtgggcagccacgattatcctgatcggctgtgccttcttcttctgctgcctccccaactacgaagatgaccttctgggcaatgccaagcccaggtacttctacacatctgcctaacttgggaatgaatgtgggagaaaatcgctgctgctgagatggactccagaagaagaaactgtttctccaggcgactttgaacccattttttggcagtgttcatattattaaactagtcaaaaatgctaaaataatttgggagaaaatattttttaagtagtgttatagtttcatgtttatcttttattatgttttgtgaagttgtgtcttttcactaattacctatactatgccaatatttccttatatctatccataacatttatactacatttgtaagagaatatgcacgtgaaacttaacactttataaggtaaaaatgaggtttccaagatttaataatctgatcaagttcttgttatttccaaatagaatggactcggtctgttaagggctaaggagaagaggaagataaggttaaaagttgttaatgaccaaacattctaaaagaaatgcaaaaaaaaagtttattttcaagccttcgaactatttaaggaaagcaaaatcatttcctaaatgcatatcatttgtgagaatttctcattaatatcctgaatcattcatttcagctaaggcttcatgttgactcgatatgtcatctaggaaagtactatttcatggtccaaacctgttgccatagttggtaaggctttcctttaagtgtgaaatatttagatgaaattttctcttttaaagttctttatagggttagggtgtgggaaaatgctttaaatgccctttaagtgtatttttgttgttacttttctgtttatatt

SEQ ID NO: 324555 - DNA, 898 bp, Homo sapiens
aatagagattcaggtgcattcgcatcaaacataataaatgaaagtcagaccaggatccagatccaggggtaccccatttactgtcaggtccatgttcttagaagtgaaacaaggattcacctttaacatctttttcaaaataataagccacatcagagctaaggcttcatgttgactcgatatgtcatctaggaaagtactatttcatggtccaaacctgttgccatagttggtaaggctttcctttaagtgtgaaatatttagatgaaattttctcttttaaagttctttatagggttagggtgtgggaaaatgctatattaataaatctgtagtgttttgtgtttatatgttcagaaccagagtagactggattgaaagatggactgggtctaatttatcatgactgatagatctggttaagttgtgtagtaaagcattaggagggtcattcttgtcacaaaagtgccactaaaacagcctcaggagaataaatgacttgcttttctaaatctcaggtttatctgggctctatcatatagacaggcttctgatagtttgcaactgtaagcagaaacctacatatagttaaaatcctggtctttcttggtaaacagattttaaatgtctgatataaaacatgccacaggagaattcggggatttgagtttctctgaatagcatatatatgatgcatcggataggtcattatgattttttaccatttcgacttacataatgaaaaccaattcattttaaatatcagattattattttgtaagttgtggaaaaagctaattgtagttttcattatgaagttttcccaataaaccaggtattctaaaaaaaaacattcataaaaataaaaatccgagactagctggtgccgaattcctgc

SEQ ID NO: 324556 - DNA, 742 bp, Homo sapiens
  misc_feature (25)..(25): n is a, c, g, or t
  misc_feature (28)..(28): n is a, c, g, or t
gcggccgcctactactactaaattngcngccggtcggaaagtactatttcatggtccaaacctgttgccatagttggtaaggctttcctttaagtgtgaaatatttagatgaaattttctcttttaaagttctttatagggttagggtgtgggaaaatgctatattaataaatctgtagtgttttgtgtttatatgttcagaaccagagtagactggattgaaagatggactgggtctaatttatcatgactgatagatctggttaagttgtgtagtaaagcattaggagggtcattcttgtcacaaaagtgccactaaaacagcctcaggagaataaatgacttgcttttctaaatctcaggtttatctgggctctatcatatagacaggcttctgatagtttgcaactgtaagcagaaacctacatatagttaaaatcctggtctttcttggtaaacagattttaaatgtctgatataaaacatgccacaggagaattcggggatttgagtttctctgaatagcatatatatgatgcatcggataggtcattatgattttttaccatttcgacttacataatgaaaaccaattcattttaaatatcagattattattttgtaagttgtggaaaaagctaattgtagttttcattatgaagttttcccaataaaccaggtattctaaaaaaaaacattcataaaaataaaaatccgagactagctggtgccgaattcctgc

SEQ ID NO: 324557 - DNA, 937 bp, Homo sapiens
tttttctacactccttacatacaaagggctcctctcctgtgtgagttctctggtgtctgatgaggtttgacttctgaatgaaagctttcccgcaatctttacactcaaaaggtttttctccagtgtgaattttctggtgcgtaaggaggtttcccttctggctaaatgattttccacattcattacattcgaaaagcttctcgccagtatgggtgttcaatttctacacaggaaagtactatttcatggtccaaacctgttgccatagttggtaaggctttcctttaagtgtgaaatatttagatgaaattttctcttttaaagttctttatagggttagggtgtgggaaaatgctatattaataaatctgtagtgttttgtgtttatatgttcagaaccagagtagactggattgaaagatggactgggtctaatttatcatgactgatagatctggttaagttgtgtagtaaagcattaggagggtcattcttgtcacaaaagtgccactaaaacagcctcaggagaataaatgacttgcttttctaaatctcaggtttatctgggctctatcatatagacaggcttctgatagtttgcaactgtaagcagaaacctacatatagttaaaatcctggtctttcttggtaaacagattttaaatgtctgatataaaacatgccacaggagaattcggggatttgagtttctctgaatagcatatatatgatgcatcggataggtcattatgattttttaccatttcgacttacataatgaaaaccaattcattttaaatatcagattattattttgtaagttgtggaaaaagctaattgtagttttcattatgaagttttcccaataaaccaggtattctaaaaaaaaacattcataaaaataaaaatccgagactagctggtgccgaattcctgc

SEQ ID NO: 324558 - DNA, 769 bp, Homo sapiens
ccgggaaccattcttcgctcatatctctccacatagcagtaaaggatccggtctcagtatccacctaagccaggtttagatagatctcctttacaaagaaccgagtttctagcttggacttggaaaaagagatagaaaaccccttctcttttaaagttctttatagggttagggtgtgggaaaatgctatattaataaatctgtagtgttttgtgtttatatgttcagaaccagagtagactggattgaaagatggactgggtctaatttatcatgactgatagatctggttaagttgtgtagtaaagcattaggagggtcattcttgtcacaaaagtgccactaaaacagcctcaggagaataaatgacttgcttttctaaatctcaggtttatctgggctctatcatatagacaggcttctgatagtttgcaactgtaagcagaaacctacatatagttaaaatcctggtctttcttggtaaacagattttaaatgtctgatataaaacatgccacaggagaattcggggatttgagtttctctgaatagcatatatatgatgcatcggataggtcattatgattttttaccatttcgacttacataatgaaaaccaattcattttaaatatcagattattattttgtaagttgtggaaaaagctaattgtagttttcattatgaagttttcccaataaaccaggtattctaaaaaaaaacattcataaaaataaaaatccgagactagctggtgccgaattcctgc

SEQ ID NO: 324559 - DNA, 284 bp, Homo sapiens
tcaagcttctaacgatgtacggggacatgccacaggagaattcggggatttgagtttctctgaatagcatatatatgatgcatcggataggtcattatgattttttaccatttcgacttacataatgaaaaccaattcattttaaatatcagattattattttgtaagttgtggaaaaagctaattgtagttttcattatgaagttttcccaataaaccaggtattctaaaaaaaaacattcataaaaataaaaatccgagactagctggtgccgaattcctgc

SEQ ID NO: 324560 - DNA, 350 bp, Homo sapiens
cgacatcatcgcgctggccggccgcggctggttgcagtctagcgaccacggccagacgtcctcgctgtggtggaaatgctcccaagagggcggcggcagcgggtcctacgaggagggctgtcagagcctcatggagtacggtgagtgcccgccgccgccgccgtcgccgcctccaggaagccctcggggccgcggcctgcaaaagccgccgcgcgtgatgggccctcacagggtcgggggagccagtgcttttcagaatgcctgtttaggacgagctcgggctcatgcatccgacctgaaccaaatgcagcagcagtagctttgggtggccaacaccaagctcagaaaca

SEQ ID NO: 324561 - DNA, 1003 bp, Homo sapiens
accggaatctaggtggggccgcccggagcggcgtcctcgggagccgcctccccgcggcctcttcgcttttgtggcggcgcccgcgctcgcaggccactctctgctgtcgcccgtcccgcgcgctcctccgacccgctccgctccgctccgctcggccccgcgccgcccgtcaacatgatccgctgcggcctggcctgcgagcgctgccgctggatcctgcccctgctcctactcagcgccatcgccttcgacatcatcgcgctggccggccgcggctggttgcagtctagcgaccacggccagacgtcctcgctgtggtggaaatgctcccaagagggcggcggcagcgggtcctacgaggagggctgtcagagcctcatggagtacgcgtggggtagagcagcggctgccatgctcttctgtggcttcatcatcctggtgatctgtttcatcctctccttcttcgccctctgtggaccccagatgcttgtcttcctgagagtgattggaggtctccttgccttggctgctgtgttccagatcatctccctggtaatttaccccgtgaagtacacccagaccttcacccttcatgccaaccgtgctgtcacttacatctataactgggcctacggctttgggtgggcagccacgattatcctgatcggctgtgccttcttcttctgctgcctccccaactacgaagatgaccttctgggcaatgccaagcccaggtacttctacacatctgcctaacttgggaatgaatgtgggagaaaatcgctgctgctgagatggactccagaagaagaaactgtttctccaggcgactttgaacccattttttggcagtgttcatattattaaactagtcaaaaatgctaaaataatttgggagaacactatttgttaagtaagggtgataaggtgttcacggtgtaatactttgagatatagtgttcgcggaaagttgtgggctatttgaactaaaattaacctaaaa

SEQ ID NO: 324562 - DNA, 2065 bp, Homo sapiens
accggaatctaggtggggccgcccggagcggcgtcctcgggagccgcctccccgcggcctcttcgcttttgtggcggcgcccgcgctcgcaggccactctctgctgtcgcccgtcccgcgcgctcctccgacccgctccgctccgctccgctcggccccgcgccgcccgtcaacatgatccgctgcggcctggcctgcgagcgctgccgctggatcctgcccctgctcctactcagcgccatcgccttcgacatcatcgcgctggccggccgcggctggttgcagtctagcgaccacggccagacgtcctcgctgtggtggaaatgctcccaagagggcggcggcagcgggtcctacgaggagggctgtcagagcctcatggagtacgcgtggggtagagcagcggctgccatgctcttctgtggcttcatcatcctggtgatctgtttcatcctctccttcttcgccctctgtggaccccagatgcttgtcttcctgagagtgattggaggtctccttgccttggctgctgtgttccagatcatctccctggtaatttaccccgtgaagtacacccagaccttcacccttcatgccaaccgtgctgtcacttacatctataactgggcctacggctttgggtgggcagccacgattatcctgatcggctgtgccttcttcttctgctgcctccccaactacgaagatgaccttctgggcaatgccaagcccaggtacttctacacatctgcctaacttgggaatgaatgtgggagaaaatcgctgctgctgagatggactccagaagaagaaactgtttctccaggcgactttgaacccattttttggcagtgttcatattattaaactagtcaaaaatgctaaaataatttgggagaaaatattttttaagtagtgttatagtttcatgtttatcttttattatgttttgtgaagttgtgtcttttcactaattacctatactatgccaatatttccttatatctatccataacatttatactacatttgtaagagaatatgcacgtgaaacttaacactttataaggtaaaaatgaggtttccaagatttaataatctgatcaagttcttgttatttccaaatagaatggactcggtctgttaagggctaaggagaagaggaagataaggttaaaagttgttaatgaccaaacattctaaaagaaatgcaaaaaaaaagtttattttcaagccttcgaactatttaaggaaagcaaaatcatttcctaaatgcatatcatttgtgagaatttctcattaatatcctgaatcattcatttcagctaaggcttcatgttgactcgatatgtcatctaggaaagtactatttcatggtccaaacctgttgccatagttggtaaggctttcctttaagtgtgaaatatttagatgaaattttctcttttaaagttctttatagggttagggtgtgggaaaatgctatattaataaatctgtagtgttttgtgtttatatgttcagaaccagagtagactggattgaaagatggactgggtctaatttatcatgactgatagatctggttaagttgtgtagtaaagcattaggagggtcattcttgtcacaaaagtgccactaaaacagcctcaggagaataaatgacttgcttttctaaatctcaggtttatctgggctctatcatatagacaggcttctgatagtttgcaactgtaagcagaaacctacatatagttaaaatcctggtctttcttggtaaacagattttaaatgtctgatataaaacatgccacaggagaattcggggatttgagtttctctgaatagcatatatatgatgcatcggataggtcattatgattttttaccatttcgacttacataatgaaaaccaattcattttaaatatcagattattattttgtaagttgtggaaaaagctaattgtagttttcattatgaagttttcccaataaaccaggtattctaaaaaaaaacattcataaaaataaaaatccgagactagctggtgccgaattcctgc

SEQ ID NO: 324563 - DNA, 2168 bp, Homo sapiens
  misc_feature (2017)..(2017): n is a, c, g, or t
  misc_feature (2020)..(2020): n is a, c, g, or t
accggaatctaggtggggccgcccggagcggcgtcctcgggagccgcctccccgcggcctcttcgcttttgtggcggcgcccgcgctcgcaggccactctctgctgtcgcccgtcccgcgcgctcctccgacccgctccgctccgctccgctcggccccgcgccgcccgtcaacatgatccgctgcggcctggcctgcgagcgctgccgctggatcctgcccctgctcctactcagcgccatcgccttcgacatcatcgcgctggccggccgcggctggttgcagtctagcgaccacggccagacgtcctcgctgtggtggaaatgctcccaagagggcggcggcagcgggtcctacgaggagggctgtcagagcctcatggagtacgcgtggggtagagcagcggctgccatgctcttctgtggcttcatcatcctggtgatctgtttcatcctctccttcttcgccctctgtggaccccagatgcttgtcttcctgagagtgattggaggtctccttgccttggctgctgtgttccagatcatctccctggtaatttaccccgtgaagtacacccagaccttcacccttcatgccaaccgtgctgtcacttacatctataactgggcctacggctttgggtgggcagccacgattatcctgatcggctgtgccttcttcttctgctgcctccccaactacgaagatgaccttctgggcaatgccaagcccaggtacttctacacatctgcctaacttgggaatgaatgtgggagaaaatcgctgctgctgagatggactccagaagaagaaactgtttctccaggcgactttgaacccattttttggcagtgttcatattattaaactagtcaaaaatgctaaaataatttgggagaaaatattttttaagtagtgttatagtttcatgtttatcttttattatgttttgtgaagttgtgtcttttcactaattacctatactatgccaatatttccttatatctatccataacatttatactacatttgtaagagaatatgcacgtgaaacttaacactttataaggtaaaaatgaggtttccaagatttaataatctgatcaagttcttgttatttccaaatagaatggactcggtctgttaagggctaaggagaagaggaagataaggttaaaagttgttaatgaccaaacattctaaaagaaatgcaaaaaaaaagtttattttcaagccttcgaactatttaaggaaagcaaaatcatttcctaaatgcatatcatttgtgagaatttctcattaatatcctgaatcattcatttcagctaaggcttcatgttgactcgatatgtcatctaggaaagtactatttcatggtccaaacctgttgccatagttggtaaggctttcctttaagtgtgaaatatttagatgaaattttctcttttaaagttctttatagggttagggtgtgggaaaatgctatattaataaatctgtagtgttttgtgtttatatgttcagaaccagagtagactggattgaaagatggactgggtctaatttatcatgactgatagatctggttaagttgtgtagtaaagcattaggagggtcattcttgtcacaaaagtgccactaaaacagcctcaggagaataaatgacttgcttttctaaatctcaggtttatctgggctctatcatatagacaggcttctgatagtttgcaactgtaagcagaaacctacatatagttaaaatcctggtctttcttggtaaacagattttaaatgtctgatataaaacatgccacaggagaattcggggatttgagtttctctgaatagcatatatatgatgcatcggataggtcattatgattttttaccatttcgacttacataatgaaaaccaattcattttaaatatcagattattattttgtaagttgtggaaaaagctaattgtagttttcattatgaagttttcccaataaaccaggtattctaaaacaancancaaaaaaaaattttgggggcttggcccaaaaatttttaaacatctgttgggcgcggcccaaggttgtaagtgggctcggtccaggaaccggggcggaaatgggggttccccaaaaagccgggcgggtttaaaaccaggggtgggcggc

SEQ ID NO: 324564 - DNA, 2035 bp, Homo sapiens
accggaatctaggtggggccgcccggagcggcgtcctcgggagccgcctccccgcggcctcttcgcttttgtggcggcgcccgcgctcgcaggccactctctgctgtcgcccgtcccgcgcgctcctccgacccgctccgctccgctccgctcggccccgcgccgcccgtcaacatgatccgctgcggcctggcctgcgagcgctgccgctggatcctgcccctgctcctactcagcgccatcgccttcgacatcatcgcgctggccggccgcggctggttgcagtctagcgaccacggccagacgtcctcgctgtggtggaaatgctcccaagagggcggcggcagcgggtcctacgaggagggctgtcagagcctcatggagtacgcgtggggtagagcagcggctgccatgctcttctgtggcttcatcatcctggtgatctgtttcatcctctccttcttcgccctctgtggaccccagatgcttgtcttcctgagagtgattggaggtctccttgccttggctgctgtgttccagatcatctccctggtaatttaccccgtgaagtacacccagaccttcacccttcatgccaaccgtgctgtcacttacatctataactgggcctacggctttgggtgggcagccacgattatcctgatcggctgtgccttcttcttctgctgcctccccaactacgaagatgaccttctgggcaatgccaagcccaggtacttctacacatctgcctaacttgggaatgaatgtgggagaaaatcgctgctgctgagatggactccagaagaagaaactgtttctccaggcgactttgaacccattttttggcagtgttcatattattaaactagtcaaaaatgctaaaataatttgggagaaaatattttttaagtagtgttatagtttcatgtttatcttttattatgttttgtgaagttgtgtcttttcactaattacctatactatgccaatatttccttatatctatccataacatttatactacatttgtaagagaatatgcacgtgaaacttaacactttataaggtaaaaatgaggtttccaagatttaataatctgatcaagttcttgttatttccaaatagaatggactcggtctgttaagggctaaggagaagaggaagataaggttaaaagttgttaatgaccaaacattctaaaagaaatgcaaaaaaaaagtttattttcaagccttcgaactatttaaggaaagcaaaatcatttcctaaatgcatatcatttgtgagaatttctcattaatatcctgaatcattcatttcagctaaggcttcatgttgactcgatatgtcatctaggaaagtactatttcatggtccaaacctgttgccatagttggtaaggctttcctttaagtgtgaaatatttagatgaaattttctcttttaaagttctttatagggttagggtgtgggaaaatgctatattaataaatctgtagtgttttgtgtttatatgttcagaaccagagtagactggattgaaagatggactgggtctaatttatcatgactgatagatctggttaagttgtgtagtaaagcattaggagggtcattcttgtcacaaaagtgccactaaaacagcctcaggagaataaatgacttgcttttctaaatctcaggtttatctgggctctatcatatagacaggcttctgatagtttgcaactgtaagcagaaacctacatatagttaaaatcctggtctttcttggtaaacagattttaaatgtctgatataaaacatgccacaggagaattcggggatttgagtttctctgaatagcatatatatgatgcatcggataggtcattatgattttttaccatttcgacttacataatgaaaaccaattcattttaaatatcagattattattttgtaagttgtggaaaaagctaattgtagttttcattatgaagttttcccaataaaccaggtattctaaaaagtcgacgcggccgcgaattta

SEQ ID NO: 324565 - DNA, 2012 bp, Homo sapiens
accggaatctaggtggggccgcccggagcggcgtcctcgggagccgcctccccgcggcctcttcgcttttgtggcggcgcccgcgctcgcaggccactctctgctgtcgcccgtcccgcgcgctcctccgacccgctccgctccgctccgctcggccccgcgccgcccgtcaacatgatccgctgcggcctggcctgcgagcgctgccgctggatcctgcccctgctcctactcagcgccatcgccttcgacatcatcgcgctggccggccgcggctggttgcagtctagcgaccacggccagacgtcctcgctgtggtggaaatgctcccaagagggcggcggcagcgggtcctacgaggagggctgtcagagcctcatggagtacgcgtggggtagagcagcggctgccatgctcttctgtggcttcatcatcctggtgatctgtttcatcctctccttcttcgccctctgtggaccccagatgcttgtcttcctgagagtgattggaggtctccttgccttggctgctgtgttccagatcatctccctggtaatttaccccgtgaagtacacccagaccttcacccttcatgccaaccgtgctgtcacttacatctataactgggcctacggctttgggtgggcagccacgattatcctgatcggctgtgccttcttcttctgctgcctccccaactacgaagatgaccttctgggcaatgccaagcccaggtacttctacacatctgcctaacttgggaatgaatgtgggagaaaatcgctgctgctgagatggactccagaagaagaaactgtttctccaggcgactttgaacccattttttggcagtgttcatattattaaactagtcaaaaatgctaaaataatttgggaggtgaagttgtgtcttttcactaattacctatactatgccaatatttccttatatctatccataacatttatactacatttgtaagagaatatgcacgtgaaacttaacactttataaggtaaaaatgaggtttccaagatttaataatctgatcaagttcttgttatttccaaatagaatggactcggtctgttaagggctaaggagaagaggaagataaggttaaaagttgttaatgaccaaacattctaaaagaaatgcaaaaaaaaagtttattttcaagccttcgaactatttaaggaaagcaaaatcatttcctaaatgcatatcatttgtgagaatttctcattaatatcctgaatcattcatttcagctaaggcttcatgttgactcgatatgtcatctaggaaagtactatttcatggtccaaacctgttgccatagttggtaaggctttcctttaagtgtgaaatatttagatgaaattttctcttttaaagttctttatagggttagggtgtgggaaaatgctatattaataaatctgtagtgttttgtgtttatatgttcagaaccagagtagactggattgaaagatggactgggtctaatttatcatgactgatagatctggttaagttgtgtagtaaagcattaggagggtcattcttgtcacaaaagtgccactaaaacagcctcaggagaataaatgacttgcttttctaaatctcaggtttatctgggctctatcatatagacaggcttctgatagtttgcaactgtaagcagaaacctacatatagttaaaatcctggtctttcttggtaaacagattttaaatgtctgatataaaacatgccacaggagaattcggggatttgagtttctctgaatagcatatatatgatgcatcggataggtcattatgattttttaccatttcgacttacataatgaaaaccaattcattttaaatatcagattattattttgtaagttgtggaaaaagctaattgtagttttcattatgaagttttcccaataaaccaggtattctaaaaaaaaacattcataaaaataaaaatccgagactagctggtgccgaattcctgc

SEQ ID NO: 324566 - DNA, 1941 bp, Homo sapiens
accggaatctaggtggggccgcccggagcggcgtcctcgggagccgcctccccgcggcctcttcgcttttgtggcggcgcccgcgctcgcaggccactctctgctgtcgcccgtcccgcgcgctcctccgacccgctccgctccgctccgctcggccccgcgccgcccgtcaacatgatccgctgcggcctggcctgcgagcgctgccgctggatcctgcccctgctcctactcagcgccatcgccttcgacatcatcgcgctggccggccgcggctggttgcagtctagcgaccacggccagacgtcctcgctgtggtggaaatgctcccaagagggcggcggcagcgggtcctacgaggagggctgtcagagcctcatggagtacgcgtggggtagagcagcggctgccatgctcttctgtggcttcatcatcctggtgatctgtttcatcctctccttcttcgccctctgtggaccccagatgcttgtcttcctgagagtgattggaggtctccttgccttggctgctgtgttccagatcatctccctggtaatttaccccgtgaagtacacccagaccttcacccttcatgccaaccgtgctgtcacttacatctataactgggcctacggctttgggtgggcagccacgattatcctgatcggctgtgccttcttcttctgctgcctccccaactacgaagatgaccttctgggcaatgccaagcccaggtacttctacacatctgcctaacttgggaatgaatgtgggagaaaatcgctgctgctgagatggactccagaagaagaaactgtttctccaggcgactttgaacccattttttggcagtgttcatattattaaactagtcaaaaatgctaaaataatttgggagaaaatattttttaagtagtgttatagtttcatgtttatcttttattatgttttgtgaagttgtgtcttttcactaattacctatactatgccaatatttccttatatctatccataacatttatactacatttgtaagagaatatgcacgtgaaacttaacactttataaggtaaaaatgaggtttccaagatttaataatctgatcaagttcttgttatttccaaatagaatggactcggtctgttaagggctaaggagaagaggaagataaggttaaaagttgttaatgaccaaacattctaaaagaaatgcaaaaaaaaagtttattttcaagccttcgaactatttaaggaaagcaaaatcatttcctaaatgcatatcatttgtgagaatttctcattaatatcctgaatcattcatttcagctaaggcttcatgttgactcgatatgtcatctaggaaagtactatttcatggtccaaacctgttgccatagttggtaaggctttcctttaagtgtgaaatatttagatgaaattttctcttttaaagttctttatagggttagggtgtgggaaagcattaggagggtcattcttgtcacaaaagtgccactaaaacagcctcaggagaataaatgacttgcttttctaaatctcaggtttatctgggctctatcatatagacaggcttctgatagtttgcaactgtaagcagaaacctacatatagttaaaatcctggtctttcttggtaaacagattttaaatgtctgatataaaacatgccacaggagaattcggggatttgagtttctctgaatagcatatatatgatgcatcggataggtcattatgattttttaccatttcgacttacataatgaaaaccaattcattttaaatatcagattattattttgtaagttgtggaaaaagctaattgtagttttcattatgaagttttcccaataaaccaggtattctaaaaaaaaacattcataaaaataaaaatccgagactagctggtgccgaattcctgc

SEQ ID NO: 324567 - DNA, 1703 bp, Homo sapiens
accggaatctaggtggggccgcccggagcggcgtcctcgggagccgcctccccgcggcctcttcgcttttgtggcggcgcccgcgctcgcaggccactctctgctgtcgcccgtcccgcgcgctcctccgacccgctccgctccgctccgctcggccccgcgccgcccgtcaacatgatccgctgcggcctggcctgcgagcgctgccgctggatcctgcccctgctcctactcagcgccatcgccttcgacatcatcgcgctggccggccgcggctggttgcagtctagcgaccacggccagacgtcctcgctgtggtggaaatgctcccaagagggcggcggcagcgggtcctacgaggagggctgtcagagcctcatggagtacgcgtggggtagagcagcggctgccatgctcttctgtggcttcatcatcctggtgatctgtttcatcctctccttcttcgccctctgtggaccccagatgcttgtcttcctgagagtgattggaggtctccttgccttggctgctgtgttccagatcatctccctggtaatttaccccgtgaagtacacccagaccttcacccttcatgccaaccgtgctgtcacttacatctataactgggcctacggctttgggtgggcagccacgattatcctgatcggctgtgccttcttcttctgctgcctccccaactacgaagatgaccttctgggcaatgccaagcccaggtacttctacacatctgcctaacttgggaatgaatgtgggagaaaatcgctgctgctgagatggactccagaagaagaaactgtttctccaggcgactttgaacccattttttggcagtgttcatattattaaactagtcaaaaatgctaaaataatttgggagaaaatattttttaagtagtgttatagtttcatgtttatcttttattatgttttgtgaagttgtgtcttttcactaattacctatactatgccaatatttccttatatctatccataacatttatactacatttgtaagagaatatgcacgtgaaacttaacactttataaggtaaaaatgaggtttccaagatttaataatctgatcaagttcttgttatttccaaatagaatggactcggtctgttaagggctaaggagaagaggaagataaggttaaaagttgttaatgaccaaacattctaaaagaaatgcaaaaaaaaagtttattttcaagccttcgaactatttaaggaaagcaaaatcatttcctaaatgcatatcatttgtgagaatttctcattaatatcctgaatcattcatttcagctaaggcttcatgttgactcgatatgtcatctaggaaagtactatttcatggtccaaacctgttgccatagttggtaaggctttcctttaagtgtgaaatatttagatgaaattttctcttttaaagttctttatagggttagggtgtgggaaaatgctatattaataaatctgtagtgttttgtgtttatatgttcagaaccagagtagactggattgaaagatggactgggtctaatttatcatgactgatagatctggttaagttgtgtagtaaagcattaggagggtcattcttgtcacaaaagtgccactaaaacagccatttaggtacaagcccatttaggtacagccatttaggtacagccatttaggtaa

SEQ ID NO: 324568 - DNA, 2060 bp, Homo sapiens
  misc_feature (1448)..(1448): n is a, c, g, or t
  misc_feature (1458)..(1458): n is a, c, g, or t
  misc_feature (1465)..(1466): n is a, c, g, or t
  misc_feature (1470)..(1470): n is a, c, g, or t
  misc_feature (1474)..(1474): n is a, c, g, or t
  misc_feature (1478)..(1478): n is a, c, g, or t
  misc_feature (1481)..(1481): n is a, c, g, or t
  misc_feature (1486)..(1486): n is a, c, g, or t
  misc_feature (1489)..(1490): n is a, c, g, or t
  misc_feature (1497)..(1497): n is a, c, g, or t
  misc_feature (1511)..(1511): n is a, c, g, or t
  misc_feature (1513)..(1513): n is a, c, g, or t
  misc_feature (1522)..(1522): n is a, c, g, or t
  misc_feature (1526)..(1526): n is a, c, g, or t
  misc_feature (1528)..(1528): n is a, c, g, or t
  misc_feature (1535)..(1535): n is a, c, g, or t
  misc_feature (1542)..(1542): n is a, c, g, or t
  misc_feature (1544)..(1544): n is a, c, g, or t
  misc_feature (1553)..(1553): n is a, c, g, or t
  misc_feature (1558)..(1559): n is a, c, g, or t
  misc_feature (1586)..(1586): n is a, c, g, or t
  misc_feature (1588)..(1589): n is a, c, g, or t
  misc_feature (1598)..(1598): n is a, c, g, or t
  misc_feature (1619)..(1619): n is a, c, g, or t
  misc_feature (1626)..(1626): n is a, c, g, or t
  misc_feature (1630)..(1630): n is a, c, g, or t
  misc_feature (1633)..(1633): n is a, c, g, or t
  misc_feature (1638)..(1638): n is a, c, g, or t
  misc_feature (1641)..(1641): n is a, c, g, or t
  misc_feature (1650)..(1650): n is a, c, g, or t
  misc_feature (1652)..(1653): n is a, c, g, or t
  misc_feature (1655)..(1655): n is a, c, g, or t
  misc_feature (1672)..(1672): n is a, c, g, or t
  misc_feature (1680)..(1680): n is a, c, g, or t
  misc_feature (1691)..(1691): n is a, c, g, or t
  misc_feature (1696)..(1696): n is a, c, g, or t
accggaatctaggtggggccgcccggagcggcgtcctcgggagccgcctccccgcggcctcttcgcttttgtggcggcgcccgcgctcgcaggccactctctgctgtcgcccgtcccgcgcgctcctccgacccgctccgctccgctccgctcggccccgcgccgcccgtcaacatgatccgctgcggcctggcctgcgagcgctgccgctggatcctgcccctgctcctactcagcgccatcgccttcgacatcatcgcgctggccggccgcggctggttgcagtctagcgaccacggccagacgtcctcgctgtggtggaaatgctcccaagagggcggcggcagcgggtcctacgaggagggctgtcagagcctcatggagtacgcgtggggtagagcagcggctgccatgctcttctgtggcttcatcatcctggtgatctgtttcatcctctccttcttcgccctctgtggaccccagatgcttgtcttcctgagagtgattggaggtctccttgccttggctgctgtgttccagatcatctccctggtaatttaccccgtgaagtacacccagaccttcacccttcatgccaaccgtgctgtcacttacatctataactgggcctacggctttgggtgggcagccacgattatcctgatcggctgtgccttcttcttctgctgcctccccaactacgaagatgaccttctgggcaatgccaagcccaggtacttctacacatctgcctaacttgggaatgaatgtgggagaaaatcgctgctgctgagatggactccagaagaagaaactgtttctccaggcgactttgaacccattttttggcagtgttcatattattaaactagtcaaaaatgctaaaataatttgggagaaaatattttttaagtagtgttatagtttcatgtttatcttttattatgttttgtgaagttgtgtcttttcactaattacctatactatgccaatatttccttatatctatccataacatttatactacatttgtaagagaatatgcacgtgaaacttaacactttataaggtaaaaatgaggtttccaagatttaataatctgatcaagttcttgttatttccaaatagaatggactcggtctgttaagggctaaggagaagaggaagataaggttaaaagttgttaatgaccaaacattctaaaagaaatgcaaaaaaaaagtttattttcaagccttcgaactatttaaggaaagcaaaatcatttcctaaatgcatatcatttgtgagaatttctcattaatatcctgaatcattcatttcagctaaggcttcatgttgactcgatatgtcatctaggaaagtactatttcatggtccaaacctgttgccatagttggtaaggctttcctttaagtgtgaaatatttagatgaaatttccccaaanccccccatanggttagnncgcncccnaacnccncaccnccnnccccccncccccccccccccncncgcccaganccanancacaccngacccananacgcaccgnccccnncccaccaccaccgacagacccgccccncnnagtaccaanccatcaggaggcccacccccnccacaanagcnccnccaanacncccccagcncnncnaaccacccccccccccnacccccanccccccccggnccccnccatatagacaggcttctgatagtttgcaactgtaagcagaaacctacatatagttaaaatcctggtctttcttggtaaacagattttaaatgtctgatataaaacatgccacaggagaattcggggatttgagtttctctgaatagcatatatatgatgcatcggataggtcattatgattttttaccatttcgacttacataatgaaaaccaattcattttaaatatcagattattattttgtaagttgtggaaaaagctaattgtagttttcattatgaagttttcccaataaaccaggtattctaaaaaaaaacattcataaaaataaaaatccgagactagctggtgccgaattcctgc

SEQ ID NO: 324569 - DNA, 2162 bp, Homo sapiens
  misc_feature (1448)..(1448): n is a, c, g, or t
  misc_feature (1458)..(1458): n is a, c, g, or t
  misc_feature (1465)..(1466): n is a, c, g, or t
  misc_feature (1470)..(1470): n is a, c, g, or t
  misc_feature (1474)..(1474): n is a, c, g, or t
  misc_feature (1478)..(1478): n is a, c, g, or t
  misc_feature (1481)..(1481): n is a, c, g, or t
  misc_feature (1486)..(1486): n is a, c, g, or t
  misc_feature (1489)..(1490): n is a, c, g, or t
  misc_feature (1497)..(1497): n is a, c, g, or t
  misc_feature (1511)..(1511): n is a, c, g, or t
  misc_feature (1513)..(1513): n is a, c, g, or t
  misc_feature (1522)..(1522): n is a, c, g, or t
  misc_feature (1526)..(1526): n is a, c, g, or t
  misc_feature (1528)..(1528): n is a, c, g, or t
  misc_feature (1535)..(1535): n is a, c, g, or t
  misc_feature (1542)..(1542): n is a, c, g, or t
  misc_feature (1544)..(1544): n is a, c, g, or t
  misc_feature (1553)..(1553): n is a, c, g, or t
  misc_feature (1558)..(1559): n is a, c, g, or t
  misc_feature (1586)..(1586): n is a, c, g, or t
  misc_feature (1588)..(1589): n is a, c, g, or t
  misc_feature (1598)..(1598): n is a, c, g, or t
  misc_feature (1619)..(1619): n is a, c, g, or t
  misc_feature (1626)..(1626): n is a, c, g, or t
  misc_feature (1630)..(1630): n is a, c, g, or t
  misc_feature (1633)..(1633): n is a, c, g, or t
  misc_feature (1638)..(1638): n is a, c, g, or t
  misc_feature (1641)..(1641): n is a, c, g, or t
  misc_feature (1650)..(1650): n is a, c, g, or t
  misc_feature (1652)..(1653): n is a, c, g, or t
  misc_feature (1655)..(1655): n is a, c, g, or t
  misc_feature (1672)..(1672): n is a, c, g, or t
  misc_feature (1680)..(1680): n is a, c, g, or t
  misc_feature (1691)..(1691): n is a, c, g, or t
  misc_feature (1696)..(1696): n is a, c, g, or t
  misc_feature (2016)..(2016): n is a, c, g, or t
  misc_feature (2018)..(2018): n is a, c, g, or t
  misc_feature (2024)..(2024): n is a, c, g, or t
accggaatctaggtggggccgcccggagcggcgtcctcgggagccgcctccccgcggcctcttcgcttttgtggcggcgcccgcgctcgcaggccactctctgctgtcgcccgtcccgcgcgctcctccgacccgctccgctccgctccgctcggccccgcgccgcccgtcaacatgatccgctgcggcctggcctgcgagcgctgccgctggatcctgcccctgctcctactcagcgccatcgccttcgacatcatcgcgctggccggccgcggctggttgcagtctagcgaccacggccagacgtcctcgctgtggtggaaatgctcccaagagggcggcggcagcgggtcctacgaggagggctgtcagagcctcatggagtacgcgtggggtagagcagcggctgccatgctcttctgtggcttcatcatcctggtgatctgtttcatcctctccttcttcgccctctgtggaccccagatgcttgtcttcctgagagtgattggaggtctccttgccttggctgctgtgttccagatcatctccctggtaatttaccccgtgaagtacacccagaccttcacccttcatgccaaccgtgctgtcacttacatctataactgggcctacggctttgggtgggcagccacgattatcctgatcggctgtgccttcttcttctgctgcctccccaactacgaagatgaccttctgggcaatgccaagcccaggtacttctacacatctgcctaacttgggaatgaatgtgggagaaaatcgctgctgctgagatggactccagaagaagaaactgtttctccaggcgactttgaacccattttttggcagtgttcatattattaaactagtcaaaaatgctaaaataatttgggagaaaatattttttaagtagtgttatagtttcatgtttatcttttattatgttttgtgaagttgtgtcttttcactaattacctatactatgccaatatttccttatatctatccataacatttatactacatttgtaagagaatatgcacgtgaaacttaacactttataaggtaaaaatgaggtttccaagatttaataatctgatcaagttcttgttatttccaaatagaatggactcggtctgttaagggctaaggagaagaggaagataaggttaaaagttgttaatgaccaaacattctaaaagaaatgcaaaaaaaaagtttattttcaagccttcgaactatttaaggaaagcaaaatcatttcctaaatgcatatcatttgtgagaatttctcattaatatcctgaatcattcatttcagctaaggcttcatgttgactcgatatgtcatctaggaaagtactatttcatggtccaaacctgttgccatagttggtaaggctttcctttaagtgtgaaatatttagatgaaatttccccaaanccccccatanggttagnncgcncccnaacnccncaccnccnnccccccncccccccccccccncncgcccaganccanancacaccngacccananacgcaccgnccccnncccaccaccaccgacagacccgccccncnnagtaccaanccatcaggaggcccacccccnccacaanagcnccnccaanacncccccagcncnncnaaccacccccccccccnacccccanccccccccggnccccnccatatagacaggcttctgatagtttgcaactgtaagcagaaacctacatatagttaaaatcctggtctttcttggtaaacagattttaaatgtctgatataaaacatgccacaggagaattcggggatttgagtttctctgaatagcatatatatgatgcatcggataggtcattatgattttttaccatttcgacttacataatgaaaaccaattcattttaaatatcagattattattttgtaagttgtggaaaaagctaattgtagttttcattatgaagttttcccaataaaccaggtattctaaaaaaaaaaananaaaaanaaaaaaaaaaatacaaaaatggacattggacttgcaaagcataacattatttaaaatagcaaagcacccattgttagaaaacccccttaaaaaaaaatagtggccgccaatttaaggcctctgtggcacatatccttt

SEQ ID NO: 324570 - DNA, 1650 bp, Homo sapiens
cgggagcaaacttaggctaggtacgaggctgggtggtccaagcttattggagggctatcttgccttacggctccaagccgctttttacggcgtttttcagctcgccattcacttcgctgtgaagatggcgtcgggcagcgggacaaaaaacttggactttcgccgaaagtgggacaaagatgaatatgagaaactcgccgagaagaggctcacggaagagagagaaaagaaagatggaaaaccagtgcagcctgtcaagcgagagcttttacggcatagggactacaaggtggacttggaatccaagcttgggaagacaattgtcattaccaagacaacccctcaatctgagatgggaggatattactgcaatgtctgtgactgtgtggtgaaggactccatcaactttctggatcacattaatggaaagaaacatcagagaaacctgggcatgtctatgcgtgtggaacgttccaccctggatcaggtgaagaaacgttttgaggtcaacaagaagaagatggaagagaagcagaaggattatgattttgaggaaaggatgaaggagctcagagaagaggaggaaaaggccaaagcgtacaagaaagagaaacagaaggagaagaaaaggagggctgaggaggacttgacatttgaggaggacgatgagatggcagctgtgatgggcttctctggctttggttccaccaagaagagttactgaggctttctgtgcttggcctgactttggcctatgctggacctaactttgcgtgtgtgtgtgtgtagtagggggtcatttctttttgggtaatgggaaagttcttaagagtgtcaatggggagggatagagggtgggggctcatggtttccctctactttgggagagggcacagattgcagaggtaatgctgtggcatattgcttctgcctcagtgtatcactggagtcacaggaccctgcccacctgagttcccaataaagaaaaacctccccttctgaggctgctttcccaaaactccccctgcatctttatctcttcatctatcccacctcttgtctgaacatcccacctttatcctgtgttctgcctttgttttaattttaactcatgttcatcctgcaacagaagcattctctaggtcccagtttccagttgattgcatatccttgatcagccctttttcccatcctgccctatggttctctagccacctgtgcatgcatgtgtatttctgcctggttctatggtgtgtggatgtgtgtgcatgaatctgtcatatagagggggtccgagctggaatcctagagcattgctgccctggggcctgatgttcttggcttcctcagagcatgtaacaggaaattaaatgggatgagtgtttggtgtggtttgtgtctgatgagttttttaacattcaggtgtagattgtttcagcttctcttgtttcattttcctgaagatttatgtttttgtctaccttgtgagcaggcttttggaagaacctgtttgatgcaaaaaagaaaatgaaaaacaaaacaaaaaatccccaaaaccttattatgggagcccttcggtcttagaagctgtttgacatgtataataaatggcattgactgggcctgttttacatttggtgagaacattcc

SEQ ID NO: 324571 - DNA, 1654 bp, Homo sapiens
tagaaaccctccagtccttagctcgtttagaacacaagactccaagcttattggagggctatcttgccttacggctccaagccgctttttacggcgtttttcagctcgccattcacttcgctgtgaagatggcgtcgggcagcgggacaaaaaacttggactttcgccgaaagtgggacaaagatgaatatgagaaactcgccgagaagaggctcacggaagagagagaaaagaaagatggaaaaccagtgcagcctgtcaagcgagagcttttacggcatagggactacaaggtggacttggaatccaagcttgggaagacaattgtcattaccaagacaacccctcaatctgagatgggaggatattactgcaatgtctgtgactgtgtggtgaaggactccatcaactttctggatcacattaatggaaagaaacatcagagaaacctgggcatgtctatgcgtgtggaacgttccaccctggatcaggtgaagaaacgttttgaggtcaacaagaagaagatggaagagaagcagaaggattatgattttgaggaaaggatgaaggagctcagagaagaggaggaaaaggccaaagcgtacaagaaagagaaacagaaggagaagaaaaggagggctgaggaggacttgacatttgaggaggacgatgagatggcagctgtgatgggcttctctggctttggttccaccaagaagagttactgaggctttctgtgcttggcctgactttggcctatgctggacctaactttgcgtgtgtgtgtgtgtagtagggggtcatttctttttgggtaatgggaaagttcttaagagtgtcaatggggagggatagagggtgggggctcatggtttccctctactttgggagagggcacagattgcagaggtaatgctgtggcatattgcttctgcctcagtgtatcactggagtcacaggaccctgcccacctgagttcccaataaagaaaaacctccccttctgaggctgctttcccaaaactccccctgcatctttatctcttcatctatcccacctcttgtctgaacatcccacctttatcctgtgttctgcctttgttttaattttaactcatgttcatcctgcaacagaagcattctctaggtcccagtttccagttgattgcatatccttgatcagccctttttcccatcctgccctatggttctctagccacctgtgcatgcatgtgtatttctgcctggttctatggtgtgtggatgtgtgtgcatgaatctgtcatatagagggggtccgagctggaatcctagagcattgctgccctggggcctgatgttcttggcttcctcagagcatgtaacaggaaattaaatgggatgagtgtttggtgtggtttgtgtctgatgagttttttaacattcaggtgtagattgtttcagcttctcttgtttcattttcctgaagatttatgtttttgtctaccttgtgagcaggcttttggaagaacctgtttgatgcaaaaaagaaaatgaaaaacaaaacaaaaaatccccaaaaccttattatgggagcccttcggtcttagaagctgtttgacatgtataataaatggcattgactgggcctgttttacatttggtgagaacattcc

SEQ ID NO: 324572 - DNA, 1384 bp, Homo sapiens
cgggagcaaacttaggctaggtacgaggctgggtggtccaagcttattggagggctatcttgccttacggctccaagccgctttttacggcgtttttcagctcgccattcacttcgctgtgaagatggcgtcgggcagcgggacaaaaaacttggactttcgccgaaagtgggacaaagatgaatatgagaaactcgccgagaagaggctcacggaagagagagaaaagaaagatggaaaaccagtgcagcctgtcaagcgagagcttttacggcatagggactacaaggtggacttggaatccaagcttgggaagacaattgtcattaccaagacaacccctcaatctgagatgggaggatattactgcaatgtctgtgactgtgtggtgaaggactccatcaactttctggatcacattaatggaaagaaacatcagagaaacctgggcatgtctatgcgtgtggaacgttccaccctggatcaggtgaagaaacgttttgaggtcaacaagaagaagatggaagagaagcagaaggattatgattttgaggaaaggatgaaggagctcagagaagaggaggaaaaggccaaagcgtacaagaaagagaaacagaaggagaagaaaaggagggctgaggaggacttgacatttgaggaggacgatgagatggcagctgtgatgggcttctctggctttggttccaccaagaagagttactgaggctttctgtgcttggcctgactttggcctatgctggacctaactttgcgtgtgtgtgtgtgtagtagggggtcatttctttttgggtaatgggaaagttcttaagagtgtcaatggggagggatagagggtgggggctcatggtttccctctactttgggagagggcacagattgcagaggtaatgctgtggcatattgcttctgcctcagtgtatcactggagtcacaggaccctgcccacctgagttcccaataaagaaaaacctccccttctgaggctgctttcccaaaactccccctgcatctttatctcttcatctatcccacctcttgtctgaacatcccacctttatcctgtgttctgcctttgttttaattttaactcatgttcatcctgcaacagaagcattctctaggtcccagtttccagttgattgcatatccttgatcagccctttttcccatcctgccctatggttctctagccacctgtgcatgcatgtgtatttctgcctggttctatggtgtgtggatgtgtgtgcatgaatctgtcatatagagggggtccgagctggaatcctagagcattgctgccctggggcctgatgttcttggcttcctcagagcatgtaacaggaaattaaatgggatgagtgtt

SEQ ID NO: 324573 - DNA, 1433 bp, Homo sapiens
cgggagcaaacttaggctaggtacgaggctgggtggtccaagcttattggagggctatcttgccttacggctccaagccgctttttacggcgtttttcagctcgccattcacttcgctgtgaagatggcgtcgggcagcgggacaaaaaacttggactttcgccgaaagtgggacaaagatgaatatgagaaactcgccgagaagaggctcacggaagagagagaaaagaaagatggaaaaccagtgcagcctgtcaagcgagagcttttacggcatagggactacaaggtggacttggaatccaagcttgggaagacaattgtcattaccaagacaacccctcaatctgagatgggaggatattactgcaatgtctgtgactgtgtggtgaaggactccatcaactttctggatcacattaatggaaagaaacatcagagaaacctgggcatgtctatgcgtgtggaacgttccaccctggatcaggtgaagaaacgttttgaggtcaacaagaagaagatggaagagaagcagaaggattatgattttgaggaaaggatgaaggagctcagagaagaggaggaaaaggccaaagcgtacaagaaagagaaacagaaggagaagaaaaggagggctgaggaggacttgacatttgaggaggacgatgagatggcagctgtgatgggcttctctggctttggttccaccaagaagagttactgaggctttctgtgcttggcctgactttggcctatgctggacctaactttgcgtgtgtgtgtgtgtagtagggggtcatttctttttgggtaatgggaaagttcttaagagtgtcaatggggagggatagagggtgggggctcatggtttccctctactttgggagagggcacagattgcagaggtaatgctgtggcatattgcttctgcctcagtgtatcactggagtcacaggaccctgcccacctgagttcccaataaagaaaaacctccccttctgaggctgctttcccaaaaaaaaaaaaaaaaaaaaaaaaaaaaaaaaaaaaaaaaaaaaaaaaaaaaaaaaaaaaaaaaaaaaaaaaaaaaagaagaaaaaaaaagaggggggggggggccatcgaaaaatctcccggggggggggaccaaagaagagcgacgaccatcaatgttgtcgtgaaaagaagaggggggcatcgccacacaagggagagagaggcgcgcatcaatataaacgaaacacgagaggaagggaggggctaagaaaacagcagcgcgggggcggaggaacaaacagaggaagcgcaggggacaacaatctgggggaaagagacgcacacacatggggtgggggtaacaaacacgatggggaacccaagacaccagagggggattagagggccgcggcggaaaacaacaagtggacgaaaga

SEQ ID NO: 324574 - DNA, 1070 bp, Homo sapiens
cgggagcaaacttaggctaggtacgaggctgggtggtccaagcttattggagggctatcttgccttacggctccaagccgctttttacggcgtttttcagctcgccattcacttcgctgtgaagatggcgtcgggcagcgggacaaaaaacttggactttcgccgaaagtgggacaaagatgaatatgagaaactcgccgagaagaggctcacggaagagagagaaaagaaagatggaaaaccagtgcagcctgtcaagcgagagcttttacggcatagggactacaaggtggacttggaatccaagcttgggaagacaattgtcattaccaagacaacccctcaatctgagatgggaggatattactgcaatgtctgtgactgtgtggtgaaggactccatcaactttctggatcacattaatggaaagaaacaaagagaaacagaaggagaagaaaaggagggctgaggaggacttgtctgaacatcccacctttatcctgtgttctgcctttgttttaattttaactcatgttcatcctgcaacagaagcattctctaggtcccagtttccagttgattgcatatccttgatcagccctttttcccatcctgccctatggttctctagccacctgtgcatgcatgtgtatttctgcctggttctatggtgtgtggatgtgtgtgcatgaatctgtcatatagagggggtccgagctggaatcctagagcattgctgccctggggcctgatgttcttggcttcctcagagcatgtaacaggaaattaaatgggatgagtgtttggtgtggtttgtgtctgatgagttttttaacattcaggtgtagattgtttcagcttctcttgtttcattttcctgaagatttatgtttttgtctaccttgtgagcaggcttttggaagaacctgtttgatgcaaaaaagaaaatgaaaaacaaaacaaaaaatccccaaaaccttattatgggagcccttcggtcttagaagctgtttgacatgtataataaatggcattgactgggcctgttttacatttggtgagaacattcc

SEQ ID NO: 324575 - DNA, 853 bp, Homo sapiens
cgggagcaaacttaggctaggtacgaggctgggtggtccaagcttattggagggctatcttgccttacggctccaagccgctttttacggcgtttttcagctcgccattcacttcgctgtgaagatggcgtcgggcagcgggacaaaaaacttggactttcgccgaaagtgggacaaagatgaatatgagaaactcgccgagaagaggctcacggaagagagagaaaagaaagatggaaaaccagtgcagcctgtcaagcgagagcttttacggcatagggactacaaggtggacttggaatccaagcttgggaagacaattgtcattaccaagacaacccctcaatctgagatgggaggatattactgcaatgtctgtgactgtgtggtgaaggactccatcaactttctggatcacattaatggaaagaaacatcagagaaacctgggcatgtctatgcgtgtggaacgttccaccctggatcaggtgaagaaacgttttgaggtcaacaagaagaagatggaagagaagcagaaggattatgattttgaggaaaggatgaaggagctcagagaagaggaggaaaaggccaaagcgtacaagaaagagaaacagaaggagaagaaaaggagggctgaggaggacttgacatttgaggaggacgatgagatggcagctgtgatgggcttctctggctttggttccaccaagaagagttactgaggctttctgtgcttggcctgactttggcctatgctggacctaactttgcgtgtgtgtgtgtgtagtagggggcagggactgcttcagtttctgtcgacccgcccgcgaatttagtagtagtagtcgacc

SEQ ID NO: 324576 - DNA, 995 bp, Homo sapiens
cgggagcaaacttaggctaggtacgaggctgggtggtccaagcttattggagggctatcttgccttacggctccaagccgctttttacggcgtttttcagctcgccattcacttcgctgtgaagatggcgtcgggcagcgggacaaaaaacttggactttcgccgaaagtgggacaaagatgaatatgagaaactcgccgagaagaggctcacggaagagagagaaaagaaagatggaaaaccagtgcagcctgtcaagcgagagcttttacggcatagggactacaaggtggacttggaatccaagcttgggaagacaattgtcattaccaagacaacccctcaatctgagatgggaggatattactgcaatgtctgtgactgtgtggtgaaggactccatcaactttctggatcacattaatggaaagaaacatcagagaaacctgggcatgtctatgcgtgtggaacgttccaccctggatcaggtgaagaaacgttttgaggtcaacaagaagaagatggaagagaagcagaaggattatgattttgaggaaaggatgaaggagctcagagaagagaaaaaaaaaaaaaaaaaaaaaaaaaaaaaaaaaaaaaaaaaaaaaaaaaaaaaaaaaaaaaaaaaaaaaaaaagaagaaaaaaaaagaggggggggggggccatcgaaaaatctcccggggggggggaccaaagaagagcgacgaccatcaatgttgtcgtgaaaagaagaggggggcatcgccacacaagggagagagaggcgcgcatcaatataaacgaaacacgagaggaagggaggggctaagaaaacagcagcgcgggggcggaggaacaaacagaggaagcgcaggggacaacaatctgggggaaagagacgcacacacatggggtgggggtaacaaacacgatggggaacccaagacaccagagggggattagagggccgcggcggaaaacaacaagtggacgaaaga

SEQ ID NO: 324577 - DNA, 581 bp, Homo sapiens
aatgtgatgacctgccatcgggcagctcgtagctttctccagagaagagagatgcgtcggtggccatctcctgctcgaagtccagggcgacgtagcacagcttctccttgatgtcgcgcacgatttcccgctcggccgtggtggtgaagctgtagcctcgctcagtgaggatcttcatgaggtagtcggtcaggtcccggccagccaggtccagacgcaggatggcgtctggaatcctagagcattgctgccctggggcctgatgttcttggcttcctcagagcatgtaacaggaaattaaatgggatgagtgtttggtgtggtttgtgtctgatgagttttttaacattcaggtgtagattgtttcagcttctcttgtttcattttcctgaagatttatgtttttgtctaccttgtgagcaggcttttggaagaacctgtttgatgcaaaaaagaaaatgaaaaacaaaacaaaaaatccccaaaaccttattatgggagcccttcggtcttagaagctgtttgacatgtataataaatggcattgactgggcctgttttacatttggtgagaacattcc

SEQ ID NO: 324578 - DNA, 1526 bp, Homo sapiens
gctttttcctccccacagacaaaaaacttggactttcgccgaaagtgggacaaagatgaatatgagaaactcgccgagaagaggctcacggaagagagagaaaagaaagatggaaaaccagtgcagcctgtcaagcgagagcttttacggcatagggactacaaggtggacttggaatccaagcttgggaagacaattgtcattaccaagacaacccctcaatctgagatgggaggatattactgcaatgtctgtgactgtgtggtgaaggactccatcaactttctggatcacattaatggaaagaaacatcagagaaacctgggcatgtctatgcgtgtggaacgttccaccctggatcaggtgaagaaacgttttgaggtcaacaagaagaagatggaagagaagcagaaggattatgattttgaggaaaggatgaaggagctcagagaagaggaggaaaaggccaaagcgtacaagaaagagaaacagaaggagaagaaaaggagggctgaggaggacttgacatttgaggaggacgatgagatggcagctgtgatgggcttctctggctttggttccaccaagaagagttactgaggctttctgtgcttggcctgactttggcctatgctggacctaactttgcgtgtgtgtgtgtgtagtagggggtcatttctttttgggtaatgggaaagttcttaagagtgtcaatggggagggatagagggtgggggctcatggtttccctctactttgggagagggcacagattgcagaggtaatgctgtggcatattgcttctgcctcagtgtatcactggagtcacaggaccctgcccacctgagttcccaataaagaaaaacctccccttctgaggctgctttcccaaaactccccctgcatctttatctcttcatctatcccacctcttgtctgaacatcccacctttatcctgtgttctgcctttgttttaattttaactcatgttcatcctgcaacagaagcattctctaggtcccagtttccagttgattgcatatccttgatcagccctttttcccatcctgccctatggttctctagccacctgtgcatgcatgtgtatttctgcctggttctatggtgtgtggatgtgtgtgcatgaatctgtcatatagagggggtccgagctggaatcctagagcattgctgccctggggcctgatgttcttggcttcctcagagcatgtaacaggaaattaaatgggatgagtgtttggtgtggtttgtgtctgatgagttttttaacattcaggtgtagattgtttcagcttctcttgtttcattttcctgaagatttatgtttttgtctaccttgtgagcaggcttttggaagaacctgtttgatgcaaaaaagaaaatgaaaaacaaaacaaaaaatccccaaaaccttattatgggagcccttcggtcttagaagctgtttgacatgtataataaatggcattgactgggcctgttttacatttggtgagaacattcc

SEQ ID NO: 324579 - DNA, 1136 bp, Homo sapiens
  misc_feature (916)..(916): n is a, c, g, or t
  misc_feature (1097)..(1097): n is a, c, g, or t
cgggagcaaacttaggctaggtacgaggctgggtggtccaagcttattggagggctatcttgccttacggctccaagccgctttttacggcgtttttcagctcgccattcacttcgctgtgaagatggcgtcgggcagcgggacaaaaaacttggactttcgccgaaagtgggacaaagatgaatatgagaaactcgccgagaagaggctcacggaagagagagaaaagaaagatggaaaaccagtgcagcctgtcaagcgagagcttttacggcatagggactacaaggtggacttggaatccaagcttgggaagacaattgtcattaccaagacaacccctcaatctgagatgggaggatattactgcaatgtctgtgactgtgtggtgaaggactccatcaactttctggatcacattaatggaaagaaacatcagagaaacctgggcatgtctatgcgtgtggaacgttccaccctggatcaggtgaagaaacgttttgaggtcaacaagaagaagatggaagagaagcagaaggattatgattttgaggaaaggatgaaggagctcagagaagaggaggaaaaggccaaagcgtacaagaaagagaaacagaaggagaagaaaaggagggctgaggaggacttgacatttgaggaggacgatgagatggcagctgtgatgggcttctctggctttggttccaccaagaagagttactgaggctttctgtgcttggcctgactttggcctatgctggacctaactttgcgtgtgtgtgtgtgtagtagggggtcatttctttttgggtaatgggaaagttcttaagagtgtcaatggggagggatagagggtgcccgcttacgccacaaccgctctctccgccagaccaccgcctcccccgcccaatatacnccactcgtccttccccgcccggcccaccgtgcccaccatcgcgccgaccccacctttctcgtcactcacacaaccccggcggtctttcacccgaccgtcgaccccgctcctctctgccgcccatccttttcgcgcgctcgctcgctacagctccttcttccccccctgttccgaccgctcngcccacatcactcacccccgcctgcaaccgtcccgcact

SEQ ID NO: 324580 - DNA, 385 bp, Homo sapiens
cgggagcaaacttaggctaggtacgaggctgggtggtccaagcttattggagggctatcttgccttacggctccaagccgctttttacggcgtttttcagctcgccattcacttcgctgtgaagatggcgtcgggcagcggggtaggtgttgtgtctgaggaggaggttttgcggggtggggaatggtttttcagacctgaatagagacaaactcctgcacccgactggcttcccgatatctcctcgagatcccagggttcaggttcaagaactccccagtaataggccttggcagagggtcagtagaatcgcggaggtttctcgggttggggtcttgaggctacctcagtcttctcgtacagtccaaagaggcttcgctttcaa

SEQ ID NO: 324581 - DNA, 3739 bp, Homo sapiens
gaattccttctctcctcctcctcgcccttctcctcgccctcctcctcctcctcgccctcccctcccgatcctcatccccttgccctcccccagcccagggacttttccggaaagtttttattttccgtctgggctctcggagaaagaagctcctggctcagcggctgcaaaactttcctgctgccgcgccgccagcccccgccctccgctgcccggccctgcgccccgccgagcgatgagcgcccctccggtcctgcggccgcccagtccgctgctgcccgtggcggcggcagctgccgcagcggccgccgcactggtcccagggtccgggcccgggcccgcgccgttcttggctcctgtcgcggccccggtcgggggcatctcgttccatctgcagatcggcctgagccgtgagccggtgctgctgctgcaggactcgtccggggactacagcctggcgcacgtccgcgagatggcttgctccattgtcgaccagaagttccctgaatgtggtttctacggaatgtatgataagatcctgctttttcgccatgaccctacctctgaaaacatccttcagctggtgaaagcggccagtgatatccaggaaggcgatcttattgaagtggtcttgtcagcttccgccacctttgaagactttcagattcgtccccacgctctctttgttcattcatacagagctccagctttctgtgatcactgtggagaaatgctgtgggggctggtacgtcaaggtcttaaatgtgaagggtgtggtctgaattaccataagagatgtgcatttaaaatacccaacaattgcagcggtgtgaggcggagaaggctctcaaacgtttccctcactggggtcagcaccatccgcacatcatctgctgaactctctacaagtgcccctgatgagccccttctgcaaaaatcaccatcagagtcgtttattggtcgagagaagaggtcaaattctcaatcatacattggacgaccaattcaccttgacaagattttgatgtctaaagttaaagtgccgcacacatttgtcatccactcctacacccggcccacagtgtgccagtactgcaagaagcttctgaaggggcttttcaggcagggcttgcagtgcaaagattgcagattcaactgccataaacgttgtgcaccgaaagtaccaaacaactgccttggcgaagtgaccattaatggagatttgcttagccctggggcagagtctgatgtggtcatggaagaagggagtgatgacaatgatagtgaaaggaacagtgggctcatggatgatatggaagaagcaatggtccaagatgcagagatggcaatggcagagtgccagaacgacagtggcgagatgcaagatccagacccagaccacgaggacgccaacagaaccatcagtccatcaacaagcaacaatatcccactcatgagggtagtgcagtctgtcaaacacacgaagaggaaaagcagcacagtcatgaaagaaggatggatggtccactacaccagcaaggacacgctgcggaaacggcactattggagattggatagcaaatgtattaccctctttcagaatgacacaggaagcaggtactacaaggaaattcctttatctgaaattttgtctctggaaccagtaaaaacttcagctttaattcctaatggggccaatcctcattgtttcgaaatcactacggcaaatgtagtgtattatgtgggagaaaatgtggtcaatccttccagcccatcaccaaataacagtgttctcaccagtggcgttggtgcagatgtggccaggatgtgggagatagccatccagcatgcccttatgcccgtcattcccaagggctcctccgtgggtacaggaaccaacttgcacagagatatctctgtgagtatttcagtatcaaattgccagattcaagaaaatgtggacatcagcacagtatatcagatttttcctgatgaagtactgggttctggacagtttggaattgtttatggaggaaaacatcgtaaaacaggaagagatgtagctattaaaatcattgacaaattacgatttccaacaaaacaagaaagccagcttcgtaatgaggttgcaattctacagaaccttcatcaccctggtgttgtaaatttggagtgtatgtttgagacgcctgaaagagtgtttgttgttatggaaaaactccatggagacatgctggaaatgatcttgtcaagtgaaaagggcaggttgccagagcacataacgaagtttttaattactcagatactcgtggctttgcggcaccttcattttaaaaatatcgttcactgtgacctcaaaccagaaaatgtgttgctagcctcagctgatccttttcctcaggtgaaactttgtgattttggttttgcccggatcattggagagaagtctttccggaggtcagtggtgggtacccccgcttacctggctcctgaggtcctaaggaacaagggctacaatcgctctctagacatgtggtctgttggggtcatcatctatgtaagcctaagcggcacattcccatttaatgaagatgaagacatacacgaccaaattcagaatgcagctttcatgtatccaccaaatccctggaaggaaatatctcatgaagccattgatcttatcaacaatttgctgcaagtaaaaatgagaaagcgctacagtgtggataagaccttgagccacccttggctacaggactatcagacctggttagatttgcgagagctggaatgcaaaatcggggagcgctacatcacccatgaaagtgatgacctgaggtgggagaagtatgcaggcgagcaggggctgcagtaccccacacacctgatcaatccaagtgctagccacagtgacactcctgagactgaagaaacagaaatgaaagccctcggtgagcgtgtcagcatcctctgagttccatctcctataatctgtcaaaacactgtggaactaataaatacatacggtcaggtttaacatttgccttgcagaactgccattattttctgtcagatgagaacaaagctgttaaactgttagcactgttgatgtatctgagttgccaagacaaatcaacagaagcatttgtattttgtgtgaccaactgtgttgtattaacaaaagttccctgaaacacgaaacttgttattgtgaatgattcatgttatatttaatgcattaaacctgtctccactgtgcctttgcaaatcagtgtttttcttactggagcttcattttggtaagagacagaatgtatctgtgaagtagttctgtttggtgtgtcccattggtgttgtcattgtaaacaaactcttgaagagtcgattatttccagtgttctatgaacaactccaaaacccatgtgggaaaaaaatgaatgaggagggtagggaataaaatcctaagacacaaatgcatgaacaagttttaatgtatagttttgaatcctttgcctgcctggtgtgcctcagtatatttaaactcaagacaatgcacctagctgtgcaagacctagtgctcttaagcctaaatgccttagaaatgtaaactgccatatataacagatacatttccctctttcttataatactctgttgtactatggaaaatcagctgctcagcaacctttcacctttgtgtatttttcaataataaaaaatattcttgtcaaaaaaaaag

SEQ ID NO: 324582 - DNA, 1843 bp, Homo sapiens
gaattccttctctcctcctcctcgcccttctcctcgccctcctcctcctcctcgccctcccctcccgatcctcatccccttgccctcccccagcccagggacttttccggaaagtttttattttccgtctgggctctcggagaaagaagctcctggctcagcggctgcaaaactttcctgctgccgcgccgccagcccccgccctccgctgcccggccctgcgccccgccgagcgatgagcgcccctccggtcctgcggccgcccagtccgctgctgcccgtggcggcggcagctgccgcagcggccgccgcactggtcccagggtccgggcccgggcccgcgccgttcttggctcctgtcgcggccccggtcgggggcatctcgttccatctgcagatcggcctgagccgtgagccggtgctgctgctgcaggactcgtccggggactacagcctggcgcacgtccgcgagatggcttgctccattgtcgaccagaagttccctgaatgtggtttctacggaatgtatgataagatcctgctttttcgccatgaccctacctctgaaaacatccttcagctggtgaaagcggccagtgatatccaggaaggcgatcttattgaagtggtcttgtcagcttccgccacctttgaagactttcagattcgtccccacgctctctttgttcattcatacagagctccagctttctgtgatcactgtggagaaatgctgtgggggctggtacgtcaaggtcttaaatgtgaagggtgtggtctgaattaccataagagatgtgcatttaaaatacccaacaattgcagcggtgtgaggcggagaaggctctcaaacgtttccctcactggggtcagcaccatccgcacatcatctgctgaactctctacaagtgcccctgatgagccccttctgcaaaaatcaccatcagagtcgtttattggtcgagagaagaggtcaaattctcaatcatacattggacgaccaattcaccttgacaagattttgatgtctaaagttaaagtgccgcacacatttgtcatccactcctacacccggcccacagtgtgccagtactgcaagaagcttctgaaggggcttttcaggcagggcttgcagtgcaaagattgcagattcaactgccataaacgttgtgcaccgaaagtaccaaacaactgccttggcgaagtgaccattaatggaggtaggtaaaagatcagctgtcatgtctgtgcttcttccatattagagagtgtggtgatgtaattttagtcagggtttttggttttggttttggttcagatatttcagacacagtctaaagtaaattatggccagtgtttgttctactttacaatagaaaagcatccatggagttttgataacagtcaaagaccctttcatgatctttacatggtgagcagctagtattgaaaacttgggtagccataatttatttcccagttttattatcttatattcttatcctagtttgcccagaaatgtggatgttgttgggctgcctacaagttatagctctcagtctcttttcctctgtccttctcatttcaatcatctttaataataaaaggaactttgtcagccaaaaaaaaatagatgtattttctgtatttggcaatattccttcaagaaaactctaactgtataaattaacttcgaaggactgctaagaaaaatgccatatcttaagcaaagagcttacattttcttcttgggtagcattctaatggatcactaccaaaatatttgacttagaatcccaggttagctttttctgcagatagtggtctttatacctttagcctg

SEQ ID NO: 324583 - DNA, 445 bp, Homo sapiens
accaaatccctggaaggaaatatctcatgaaggtaatatcttccattcaaaaatgataataatctaatccttatttgtttatgttattaatttaaattaatttaattgtaaattattaacttaatacatgctcattgtaaagtgcccaccagagtggagacacaaagacacgaattaatttgggtgggacacatacacataacagaaattgggttatatatattaagaagtaagtgaacaaccagagagaatgtattttggtacatttcattagaacttataaatacttataccttaatataatagtaataatgaattattagtaagggcttacttatatgtgcctagttctgtgttaaaaacttttaaactattatcaacacaagaatgttatgacattgatattttaatgatcatataacatatgttagtataccaagttctt

SEQ ID NO: 324584 - DNA, 311 bp, Homo sapiens
ggccaggatgtgggagatagccatccagcatgcccttatgcccgtcattcccaagggctcctccgtgggtacaggaaccaacttgcacagtgagtctgccagttttctaaccagcccaaagctcatcatgtgcctaccccttgcttagtaaacatgtgccctgcccttcctaagaacagaatgaagaaagacttcttggggatgacttagtttattgtagaatgtagggtgtctaaataaaagctgctgcacatactaagatgtttagtttgttaaattatcctattttattatagctattttatattaaa

SEQ ID NO: 324585 - DNA, 2986 bp, Homo sapiens
gaattccttctctcctcctcctcgcccttctcctcgccctcctcctcctcctcgccctcccctcccgatcctcatccccttgccctcccccagcccagggacttttccggaaagtttttattttccgtctgggctctcggagaaagaagctcctggctcagcggctgcaaaactttcctgctgccgcgccgccagcccccgccctccgctgcccggccctgcgccccgccgagcgatgagcgcccctccggtcctgcggccgcccagtccgctgctgcccgtggcggcggcagctgccgcagcggccgccgcactggtcccagggtccgggcccgggcccgcgccgttcttggctcctgtcgcggccccggtcgggggcatctcgttccatctgcagatcggcctgagccgtgagccggtgctgctgctgcaggactcgtccggggactacagcctggcgcacgtccgcgagatggcttgctccattgtcgaccagaagttccctgaatgtggtttctacggaatgtatgataagatcctgctttttcgccatgaccctacctctgaaaacatccttcagctggtgaaagcggccagtgatatccaggaaggcgatcttattgaagtggtcttgtcagcttccgccacctttgaagactttcagattcgtccccacgctctctttgttcattcatacagagctccagctttctgtgatcactgtggagaaatgctgtgggggctggtacgtcaaggtcttaaatgtgaagggtgtggtctgaattaccataagagatgtgcatttaaaatacccaacaattgcagcggtgtgaggcggagaaggctctcaaacgtttccctcactggggtcagcaccatccgcacatcatctgctgaactctctacaagtgcccctgatgagccccttctgcaaaaatcaccatcagagtcgtttattggtcgagagaagaggtcaaattctcaatcatacattggacgaccaattcaccttgacaagattttgatgtctaaagttaaagtgccgcacacatttgtcatccactcctacacccggcccacagtgtgccagtactgcaagaagcttctgaaggggcttttcaggcagggcttgcagtgcaaagattgcagattcaactgccataaacgttgtgcaccgaaagtaccaaacaactgccttggcgaagtgaccattaatggagatttgcttagccctggggcagagtctgatgtggtcatggaagaagggagtgatgacaatgatagtgaaaggaacagtgggctcatggatgatatggaagaagcaatggtccaagatgcagagatggcaatggcagagtgccagaacgacagtggcgagatgcaagatccagacccagaccacgaggacgccaacagaaccatcagtccatcaacaagcaacaatatcccactcatgagggtagtgcagtctgtcaaacacacgaagaggaaaagcagcacagtcatgaaagaaggatggatggtccactacaccagcaaggacacgctgcggaaacggcactattggagattggatagcaaatgtattaccctctttcagaatgacacaggaagcaggtactacaaggaaattcctttatctgaaattttgtctctggaaccagtaaaaacttcagctttaattcctaatggggccaatcctcattgtttcgaaatcactacggcaaatgtagtgtattatgtgggagaaaatgtggtcaatccttccagcccatcaccaaataacagtgttctcaccagtggcgttggtgcagatgtggccaggatgtgggagatagccatccagcatgcccttatgcccgtcattcccaagggctcctccgtgggtacaggaaccaacttgcacagagatatctctgtgagtatttcagtatcaaattgccagattcaagaaaatgtggacatcagcacagtatatcagatttttcctgatgaagtactgggttctggacagtttggaattgtttatggaggaaaacatcgtaaaacaggaagagatgtagctattaaaatcattgacaaattacgatttccaacaaaacaagaaagccagcttcgtaatgaggttgcaattctacagaaccttcatcaccctggtgttgtaaatttggagtgtatgtttgagacgcctgaaagagtgtttgttgttatggaaaaactccatggagacatgctggaaatgatcttgtcaagtgaaaagggcaggttgccagagcacataacgaagtttttaattactcagatactcgtggctttgcggcaccttcattttaaaaatatcgttcactgtgacctcaaaccagaaaatgtgttgctagcctcagctgatccttttcctcaggtgaaactttgtgattttggttttgcccggatcattggagagaagtctttccggaggtcagtggtgggtacccccgcttacctggctcctgaggtcctaaggaacaagggctacaatcgctctctagacatgtggtctgttggggtcatcatctatgtaagcctaagcggcacattcccatttaatgaagatgaagacatacacgaccaaattcagaatgcagctttcatgtatccaccaaatccctggaaggaaatatctcatgaagatgttgacttgatacaatataatacctatatcttggggtgcttgagtagtcattgcactgcttgatcctcacagcaatcctctggtctcagttttcttttctgatatggtgatgctaattcctaccttactgggttattatatacaatatcaggacatgtaacttgttcatgttacagattgccatgaaaatagtgagaataagaaaagaagcacaagtatcttttttcaggaataaagaagaaacaactataaacaccagggaaatacaaaaagttgtataacaaagtcgtgtataataaagatgcaactaacaaa

SEQ ID NO: 324586 - DNA, 596 bp, Homo sapiens
cgagacaccatctcaaaaaaaaaaaaagaaaaaaagaaaagtaaaaagcaagggcagtagacctggcctgtcagatgagtatatttttttttaaatctaggaattcatataaaattgtctttatggattattttttctgttctttctacctaagtagaagttatcacagtatggaagataaatcctaaactgccaaattgaagatggtttgtagctcatactagatgccacctatgagttgactttttccacagcataccagcattcctgaagtctgttctgtcctctttcagttactcaggggctatttctacatcacagtttgcttgaaatttcagtttgaaaatttgagaaatccagttttttagctctaacttgaaattagatctaacatctgcataatttttatgtttttcttgtgtgtgagccagtagatgagcttaaacctttctaaaaattgggatatactatgtattcgcccttaaaactattttttgatttaagtagcaaaaaatgagaaccttcattttcttaggatagtatttctctcttttgtttttacagtgttacatagtgcttccatttcaagaatagcc

SEQ ID NO: 324587 - DNA, 298 bp, Homo sapiens
tcccgcagaaaaacacagagacacttttgaggctggagccaagggtgtgggtgcctgtgtatgtgtttccgagtgtccccttgtgatgtgcgcatgtgtgtaatgtgtatgtgcatgtgtgtgcacatctatgtgcaaatatatagtgtgtcatattgcacatgtgtggatatgggttggtgtgcacacacatgtggcactgtgcaatccatgcagtacatatgtgtgatatgtgcatattttgcacacagatgtgttgcacatttgtgcatgtgcaaacgtgtgcacccataagaat

SEQ ID NO: 324588 - DNA, 448 bp, Homo sapiens
  misc_feature (25)..(26): n is a, c, g, or t
ggattattctattgacttgggttanncgtgtgttacggtggctggcacgtaattgaacatatctgaacacacaatagctaagacccaaactgggattagataccccactatgcttagccctaaacctcaacagttaaatcaacaaaactgctcgccagaacactacgagccacagcttaaaactcaaaggacctggcggtgcttcatatccctctagaggagcctgttctgtaatcgataaaccccgatcaacctcaccacctcttgctcagccattcctcgcaacagctgttgcgaggaatgctgaggaataaatagctgtgtagcaagttttgctacagaatggtggtgccatgccctgaagtgaacactaaggaagcagcagcagttctgaggcaagaaagaggttcaattttcaacacatttgacttaggagctcgtgagggag

SEQ ID NO: 324589 - DNA, 277 bp, Homo sapiens
gcggccgcctactactactaaattcgcggccggtcgaacatatctgaacacacaatagctaagacccaaactgggattagataccccactatgcttagccctaaacctcaacagttaaatcaacaaaactgctcgccagaacactacgagccacagcttaaaactcaaaggacctggcggtgcttcatatccctctagaggagcctgttctgtaatcgataaaccccgatcaacctcagtcgacgcggccgcgaatttagtagtagtaggcggccgc

SEQ ID NO: 324590 - DNA, 695 bp, Homo sapiens
cacatggctgatgctccagaccccacttatctcccagcaccctctagcagactagcttcatcatggcttccacggcgtcagcccctccccacttccaatctattccacctctagccatgcaccacctactcagcaagttctgccaccccagggttacatgcagccccaaatcaacaaaactgctcgccagaacactacgagccacagcttaaaactcaaaggacctggcggtgcttcatatccctctagaggagcctgttctgtaatcgataaaccccgatcaacctcacttatctcctcgaggagataagcaggaatggagacgggcagggtggaagacatgcgaaggaagtggagcggtcaggactcccttgtttaattggtgatgacaggaagagaaagagaaagagtagactgtgtgggagagagagaagagaaggaaagattggtcattgttactccctggttcttggctggggtaactaggtatatgatgtgtgtgtatttgctgagatgtgggacacataaggactagaagagttgcttggtttttgataaccaagtctgaggtgcttttgggaatcatggcccacttaactttccactccttttcatctgtgaagctctgatgtctgagaaaggtcaagggctccttggtagagaactataagcagtacgatccactttcaatactt

SEQ ID NO: 324591 - DNA, 344 bp, Homo sapiens
gctggaccgggatcttgagagtcgatatgctgaggatgcaaagcgggggatcatggtacgccattatgcatatagtcctgacatgtcaacagcctggatgtacaaatcaacaaaactgctcgccagaacactacgagccacagcttaaaactcaaaggacctggcggtgcttcatatccctctagaggagcctgttctgtaatcgataaaccccgatcaacctcaccacgacacagtgcaccacgacacagtgcaccacgacacaggcaccacgacacagtgcaccacgacacaggcaccacgacacaggcaccacgacacaggcaccacgacacaggaatcct

SEQ ID NO: 324592 - DNA, 918 bp, Homo sapiens
  misc_feature (41)..(41): n is a, c, g, or t
  misc_feature (47)..(47): n is a, c, g, or t
  misc_feature (85)..(85): n is a, c, g, or t
  misc_feature (843)..(843): n is a, c, g, or t
gcacggattagctcttagtagattacacatgcagcatcccnactccnggagttcaccttctaatcacccgatcaaggggacagcntcagcagcaacatgcagctcaaacgcttgcctagccacacccccggggaacagcagtgattacttacaataaacgaaggttaactagctatactaaccccagggttggtcaatttcgtgccagccaccgcggtcacacgattaacccaagtcaatagaagccggcgtaaagagtgttttagatcaccccctccccaataaagctaaaactcacctgagttgtaaaaaactccagttgacacaaaataaactacgaaagtggctttaacatatctgaacacacaatagctaagacccaaactgggattagataccccactatgcttagccctaaacctcaacagttaaatcaacaaaactgctcgccagaacactacgagccacagcttaaaactcaaaggacctggcggtgcttcatatccctctagaggagcctgttctgtaatcgataaaccccgatcaacctcaccacctcttgctcagcctatataccgccatcttcagcaaaccctgatgaaggctacaaagtaagcgcaagtacccacgtaaagacgttaggtcaaggtgtagcccatgaggtggcaagaaatgggctacattttctaccccagaaactacgatagcccttatgaaacttaagggtcgaaggtggatttagcagtaaactgagagtagagtgcttagttgaacagggccctgaagcgcgtacacaccggccgtcaccctcctcaagtatacttcaaaggacatttaactaanacccctacgcatttatatagaggagacaagtcgtaacatggtaaagtgtacttgggaagtgcacttggacgaacc

SEQ ID NO: 324593 - DNA, 954 bp, Homo sapiens
  misc_feature (10)..(10): n is a, c, g, or t
  misc_feature (879)..(879): n is a, c, g, or t
cactatgtgnattggctaccgagcctggtgatagctggttgtccaagatagaatcttagttcaactttaaatttgcccacagaaccctctaaatccccttgtaaatttaactgttagtccaaagaggaacagctctttggacactaggaaaaaaccttgtagagagagtaaaaaatttaacacccatagtaggcctaaaagcagccaccaattaagaaagcgttcaagctcaacacccactacctaaaaaatcccaaacatataactgaactcctcacacccaattggactaatcaacatagttatgttgattggcaataaagctaaaactcacctgagttgtaaaaaactccagttgacacaaaataaactacgaaagtggctttaacatatctgaacacacaatagctaagacccaaactgggattagataccccactatgcttagccctaaacctcaacagttaaatcaacaaaactgctcgccagaacactacgagccacagcttaaaactcaaaggacctggcggtgcttcatatccctctagaggagcctgttctgtaatcgataaaccccgatcaacctcaccacctcttgctcagcctatataccgccatcttcagcaaaccctgatgaaggctacaaagtaagcgcaagtacccacgtaaagacgttaggtcaaggtgtagcccatgaggtggcaagaaatgggctacattttctaccccagaaactacgatagcccttatgaaacttaagggtcgaaggtggatttagcagtaaactgagagtagagtgcttagttgaacagggccctgaagcgcgtacacaccggccgtcaccctcctcaagtatacttcaaaggacatttaactaanacccctacgcatttatatagaggagacaagtcgtaacatggtaaagtgtacttgggaagtgcacttggacgaacc

SEQ ID NO: 324594 - DNA, 759 bp, Homo sapiens
  misc_feature (41)..(41): n is a, c, g, or t
  misc_feature (47)..(47): n is a, c, g, or t
  misc_feature (85)..(85): n is a, c, g, or t
gcacggattagctcttagtagattacacatgcagcatcccnactccnggagttcaccttctaatcacccgatcaaggggacagcntcagcagcaacatgcagctcaaacgcttgcctagccacacccccggggaacagcagtgattacttacaataaacgaaggttaactagctatactaaccccagggttggtcaatttcgtgccagccaccgcggtcacacgattaacccaagtcaatagaagccggcgtaaagagtgttttagatcaccccctccccaataaagctaaaactcacctgagttgtaaaaaactccagttgacacaaaataaactacgaaagtggctttaacatatctgaacacacaatagctaagacccaaactgggattagataccccactatgcttagccctaaacctcaacagttaaatcaacaaaactgctcgccagaacactacgagccacagcttaaaactcaaaggacctggcggtgcttcatatccctctagaggagcctgttctgtaatcgataaaccccgatcaacctcaccacctcttgctcagcctatataccgccatcttcagcaaaccctgatgaaggctacaaagtaagcgcaagtacccacgtaaagacgttaggtcaaggtgtagcccatcaggtggcaacaaatggggtatattttcgtgcccctgtttatctccccccgcccccctcaaactcaaggttcgaatctggtttcagcagttttctaccag

SEQ ID NO: 324595 - DNA, 1140 bp, Homo sapiens
  misc_feature (41)..(41): n is a, c, g, or t
  misc_feature (47)..(47): n is a, c, g, or t
  misc_feature (85)..(85): n is a, c, g, or t
  misc_feature (844)..(844): n is a, c, g, or t
  misc_feature (1056)..(1056): n is a, c, g, or t
gcacggattagctcttagtagattacacatgcagcatcccnactccnggagttcaccttctaatcacccgatcaaggggacagcntcagcagcaacatgcagctcaaacgcttgcctagccacacccccggggaacagcagtgattacttacaataaacgaaggttaactagctatactaaccccagggttggtcaatttcgtgccagccaccgcggtcacacgattaacccaagtcaatagaagccggcgtaaagagtgttttagatcaccccctccccaataaagctaaaactcacctgagttgtaaaaaactccagttgacacaaaataaactacgaaagtggctttaacatatctgaacacacaatagctaagacccaaactgggattagataccccactatgcttagccctaaacctcaacagttaaatcaacaaaactgctcgccagaacactacgagccacagcttaaaactcaaaggacctggcggtgcttcatatccctctagaggagcctgttctgtaatcgataaaccccgatcaacctcaccacctcttgctcagcctatataccgccatcttcagcaaaccctgatgaaggctacatagtcagcgcaagtccccacgctgtgcctacaagtacacggactacgcgatgaggtggcaagaaatgggctacattttctaccccagaaactacgatagcccttatgaaacttaagggtcgaaggtggatttagcagtaaactgagagtagagtgcttagttgaacagggccctgaagcgcgtacacaccggccgtcaccctcctcaagtatacttcaaaggacatttaactaanaccccctgccgctttaaataaaggttggttgggcaagataaaaacattggtcgccccgcccagtgcaaatgaactcttaactgcaagcaagtttaatgctgcccgccccaattacaagctacatttgtcaaaatctttgcagggcccgtatttaccctatagcaccccctctaaccccttttgagaccaaatgttaatatggttgtaataanttaacatgttggccggctcggcctagggactttcttaagcaactttattcattcggccccaatttgcttacttggcctttcgcc

SEQ ID NO: 324596 - DNA, 757 bp, Homo sapiens
  misc_feature (41)..(41): n is a, c, g, or t
  misc_feature (47)..(47): n is a, c, g, or t
  misc_feature (85)..(85): n is a, c, g, or t
gcacggattagctcttagtagattacacatgcagcatcccnactccnggagttcaccttctaatcacccgatcaaggggacagcntcagcagcaacatgcagctcaaacgcttgcctagccacacccccggggaacagcagtgattacttacaataaacgaaggttaactagctatactaaccccagggttggtcaatttcgtgccagccaccgcggtcacacgattaacccaagtcaatagaagccggcgtaaagagtgttttagatcaccccctccccaataaagctaaaactcacctgagttgtaaaaaactccagttgacacaaaataaactacgaaagtggctttaacatatctgaacacacaatagctaagacccaaactgggattagataccccactatgcttagccctaaacctcaacagttaaatcaacaaaactgctcgccagaacactacgagccacagcttaaaactcaaaggacctggcggtgcttcatatccctctagaggagcctgttctgtaatcgataaaccccgatcaacctcaccacctcttgctcagcctatataccgccatcttcagcaaaccctgatgaaggggttctaactaatgcgcgaacgttacgtcacatgacgaccatagctcaaagttgtagcccatcaggtggctgatagtggatcacatcttgtacgtgccggggattgcgtatagtcgttagcatactaaagtctcgaaggtgaatcggagctaa

SEQ ID NO: 324597 - DNA, 687 bp, Homo sapiens
  misc_feature (41)..(41): n is a, c, g, or t
  misc_feature (47)..(47): n is a, c, g, or t
  misc_feature (85)..(85): n is a, c, g, or t
gcacggattagctcttagtagattacacatgcagcatcccnactccnggagttcaccttctaatcacccgatcaaggggacagcntcagcagcaacatgcagctcaaacgcttgcctagccacacccccggggaacagcagtgattacttacaataaacgaaggttaactagctatactaaccccagggttggtcaatttcgtgccagccaccgcggtcacacgattaacccaagtcaatagaagccggcgtaaagagtgttttagatcaccccctccccaataaagctaaaactcacctgagttgtaaaaaactccagttgacacaaaataaactacgaaagtggctttaacatatctgaacacacaatagctaagacccaaactgggattagataccccactatgcttagccctaaacctcaacagttaaatcaacaaaactgctcgccagaacactacgagccacagcttaaaactcaaaggacctggcggtgcttcatatccctctagaggagcctgttctgtaatcgataaaccccgatcaacctcaccacctcttgctcagcctatataccgccatcttcagcaaaccctgatgaaggataacaaagtaaggcgttagtaccctaagtaaaagtacgaataggtctagctgtagaaaaagagcggcgagttctcggcacaa

SEQ ID NO: 324598 - DNA, 763 bp, Homo sapiens
  misc_feature (41)..(41): n is a, c, g, or t
  misc_feature (47)..(47): n is a, c, g, or t
  misc_feature (85)..(85): n is a, c, g, or t
gcacggattagctcttagtagattacacatgcagcatcccnactccnggagttcaccttctaatcacccgatcaaggggacagcntcagcagcaacatgcagctcaaacgcttgcctagccacacccccggggaacagcagtgattacttacaataaacgaaggttaactagctatactaaccccagggttggtcaatttcgtgccagccaccgcggtcacacgattaacccaagtcaatagaagccggcgtaaagagtgttttagatcaccccctccccaataaagctaaaactcacctgagttgtaaaaaactccagttgacacaaaataaactacgaaagtggctttaacatatctgaacacacaatagctaagacccaaactgggattagataccccactatgcttagccctaaacctcaacagttaaatcaacaaaactgctcgccagaacactacgagccacagcttaaaactcaaaggacctggcggtgcttcatatccctctagaggagcctgttctgtaatcgataaaccccgatcaacctcaccacctcttgctcagccattctggttcagctcctctttccatttcctctgagaccacaggacctcctcaagtcccctacccaatgcctatgccctctgtgccccctacccaatgcctatgctcacagatgccttacttcctgcctcatagcatcaaaaaggccatgggaaaggataaccctgtacagcccaaacctgttaggtctacctgg

SEQ ID NO: 324599 - DNA, 591 bp, Homo sapiens
  misc_feature (41)..(41): n is a, c, g, or t
  misc_feature (47)..(47): n is a, c, g, or t
  misc_feature (85)..(85): n is a, c, g, or t
gcacggattagctcttagtagattacacatgcagcatcccnactccnggagttcaccttctaatcacccgatcaaggggacagcntcagcagcaacatgcagctcaaacgcttgcctagccacacccccggggaacagcagtgattacttacaataaacgaaggttaactagctatactaaccccagggttggtcaatttcgtgccagccaccgcggtcacacgattaacccaagtcaatagaagccggcgtaaagagtgttttagatcaccccctccccaataaagctaaaactcacctgagttgtaaaaaactccagttgacacaaaataaactacgaaagtggctttaacatatctgaacacacaatagctaagacccaaactgggattagataccccactatgcttagccctaaacctcaacagttaaatcaacaaaactgctcgccagaacactacgagccacagcttaaaactcaaaggacctggcggtgcttcatatccctctagaggagcctgttctgtaatcgataaaccccgatcaacctcagtcgacgcggccgcgaatttagtagtagtaggcggccgc

SEQ ID NO: 324600 - DNA, 613 bp, Homo sapiens
  misc_feature (41)..(41): n is a, c, g, or t
  misc_feature (47)..(47): n is a, c, g, or t
  misc_feature (85)..(85): n is a, c, g, or t
gcacggattagctcttagtagattacacatgcagcatcccnactccnggagttcaccttctaatcacccgatcaaggggacagcntcagcagcaacatgcagctcaaacgcttgcctagccacacccccggggaacagcagtgattacttacaataaacgaaggttaactagctatactaaccccagggttggtcaatttcgtgccagccaccgcggtcacacgattaacccaagtcaatagaagccggcgtaaagagtgttttagatcaccccctccccaataaagctaaaactcacctgagttgtaaaaaactccagttgacacaaaataaactacgaaagtggctttaacatatctgaacacacaatagctaagacccaaactgggattagataccccactatgcttagccctaaacctcaacagttaaatcaacaaaactgctcgccagaacactacgagccacagcttaaaactcaaaggacctggcggtgcttcatatccctctagaggagcctgttctgtaatcgataaaccccgatcaacctcaccacctcttgaagccatttaggtaacagccatttaggtaacagccatttaggtgacagcca

SEQ ID NO: 324601 - DNA, 769 bp, Homo sapiens
  misc_feature (41)..(41): n is a, c, g, or t
  misc_feature (47)..(47): n is a, c, g, or t
  misc_feature (85)..(85): n is a, c, g, or t
gcacggattagctcttagtagattacacatgcagcatcccnactccnggagttcaccttctaatcacccgatcaaggggacagcntcagcagcaacatgcagctcaaacgcttgcctagccacacccccggggaacagcagtgattacttacaataaacgaaggttaactagctatactaaccccagggttggtcaatttcgtgccagccaccgcggtcacacgattaacccaagtcaatagaagccggcgtaaagagtgttttagatcaccccctccccaataaagctaaaactcacctgagttgtaaaaaactccagttgacacaaaataaactacgaaagtggctttaacatatctgaacacacaatagctaagacccaaactgggattagataccccactatgcttagccctaaacctcaacagttaaatcaacaaaactgctcgccagaacactacgagccacagcttaaaactcaaaggacctggcggtgcttcatatccctctagaggagcctgttctgtaatcgataaaccccgatcaacctcagtacatgcaaggctgatccgcttaagcggatagggtgctgataccccatgcagatgaaaatccatgtataacttttgactccccaaagatgtaactactaacattcgattaacacatattttgtgtgttatgtgtatttgaggctgtcctcttacaataagtaagctagaggaaagaaaattttattaaaaaatcattagacagaaaatacgctacg

SEQ ID NO: 324602 - DNA, 804 bp, Homo sapiens
  misc_feature (41)..(41): n is a, c, g, or t
  misc_feature (47)..(47): n is a, c, g, or t
  misc_feature (85)..(85): n is a, c, g, or t
gcacggattagctcttagtagattacacatgcagcatcccnactccnggagttcaccttctaatcacccgatcaaggggacagcntcagcagcaacatgcagctcaaacgcttgcctagccacacccccggggaacagcagtgattacttacaataaacgaaggttaactagctatactaaccccagggttggtcaatttcgtgccagccaccgcggtcacacgattaacccaagtcaatagaagccggcgtaaagagtgttttagatcaccccctccccaataaagctaaaactcacctgagttgtaaaaaactccagttgacacaaaataaactacgaaagtggctttaacatatctgaacacacaatagctaagacccaaactgggattagataccccactatgcttagccctaaacctcaacagttaaatcaacaaaactgctcgccagaacactacgagccacagcttaaaactcaaaggacctggcggtgcttcatatccctctagaggagcctgttctgtaatcgataaaccccgatcaacctcaccacctcttgctcagccaaccgtggactagtactagtccacggttggctgcttttaggcctactatgggtgttaaatttttttactctctctacaaggttttttcctagtgtccaaagagctgttcctctttggactaacagttaaatttacaaggggatttagagccaaccgtggactagtagccaaccgtggactagtagccaaccgtggacactagtccacggttggctagtacgctggaatggaattg

SEQ ID NO: 324603 - DNA, 677 bp, Homo sapiens
  misc_feature (41)..(41): n is a, c, g, or t
  misc_feature (47)..(47): n is a, c, g, or t
  misc_feature (85)..(85): n is a, c, g, or t
  misc_feature (654)..(654): n is a, c, g, or t
gcacggattagctcttagtagattacacatgcagcatcccnactccnggagttcaccttctaatcacccgatcaaggggacagcntcagcagcaacatgcagctcaaacgcttgcctagccacacccccggggaacagcagtgattacttacaataaacgaaggttaactagctatactaaccccagggttggtcaatttcgtgccagccaccgcggtcacacgattaacccaagtcaatagaagccggcgtaaagagtgttttagatcaccccctccccaataaagctaaaactcacctgagttgtaaaaaactccagttgacacaaaataaactacgaaagtggctttaacatatctgaacacacaatagctaagacccaaactgggattagataccccactatgcttagccctaaacctcaacagttaaatcaacaaaactgctcgccagaacactacgagccacagcttaaaactcaaaggacctggcggtgcttcatatccctctagaggagcctgttctgtaatcgataaaccccgatcaacctcacccgggtacttgcgcttactttgtagccttcatcagggtttgctgaagatggcggtaataggctgagcaagaggtggtgaggttgatcgtttatcgattacngacagctcctctagaggatatgg

SEQ ID NO: 324604 - DNA, 727 bp, Homo sapiens
  misc_feature (41)..(41): n is a, c, g, or t
  misc_feature (47)..(47): n is a, c, g, or t
  misc_feature (85)..(85): n is a, c, g, or t
gcacggattagctcttagtagattacacatgcagcatcccnactccnggagttcaccttctaatcacccgatcaaggggacagcntcagcagcaacatgcagctcaaacgcttgcctagccacacccccggggaacagcagtgattacttacaataaacgaaggttaactagctatactaaccccagggttggtcaatttcgtgccagccaccgcggtcacacgattaacccaagtcaatagaagccggcgtaaagagtgttttagatcaccccctccccaataaagctaaaactcacctgagttgtaaaaaactccagttgacacaaaataaactacgaaagtggctttaacatatctgaacacacaatagctaagacccaaactgggattagataccccactatgcttagccctaaacctcaacagttaaatcaacaaaactgctcgccagaacactacgagccacagcttaaaactcaaaggacctggcggtgcttcatatccctctagaggagcctgttctgtaatcgataaaccccgatcaacctcaccaccaggtggttgagtagtaggaatgcggtagtagttaggataatataaatagttaaattaagaatggttatgttagggttgtacggtagaactgctattattcatcctatgtgggtaatgaggagtatgctaagattttgcgtagctggtttgggaatccacctcaaccacca

SEQ ID NO: 324605 - DNA, 740 bp, Homo sapiens
  misc_feature (41)..(41): n is a, c, g, or t
  misc_feature (47)..(47): n is a, c, g, or t
  misc_feature (85)..(85): n is a, c, g, or t
  misc_feature (572)..(572): n is a, c, g, or t
gcacggattagctcttagtagattacacatgcagcatcccnactccnggagttcaccttctaatcacccgatcaaggggacagcntcagcagcaacatgcagctcaaacgcttgcctagccacacccccggggaacagcagtgattacttacaataaacgaaggttaactagctatactaaccccagggttggtcaatttcgtgccagccaccgcggtcacacgattaacccaagtcaatagaagccggcgtaaagagtgttttagatcaccccctccccaataaagctaaaactcacctgagttgtaaaaaactccagttgacacaaaataaactacgaaagtggctttaacatatctgaacacacaatagctaagacccaaactgggattagataccccactatgcttagccctaaacctcaacagttaaatcaacaaaactgctcgccagaacactacgagccacagcttaaaactcaaaggacctggcggtgcttcatatccctctagaggagcctgttctgtaatcgataaaccccgatcaacctcaatagtcactatgtggatggngggtaatacgaatgtcacttgcagactaagagaatgaaagctctcatgcaatgcttcatgatcctatggtacgatgttggggcacgatttcatggccatctagcaggcatatattctggatgatatagctacagggtgatagagtctccttcaacttggatccttgag

SEQ ID NO: 324606 - DNA, 664 bp, Homo sapiens
  misc_feature (41)..(41): n is a, c, g, or t
  misc_feature (47)..(47): n is a, c, g, or t
  misc_feature (85)..(85): n is a, c, g, or t
gcacggattagctcttagtagattacacatgcagcatcccnactccnggagttcaccttctaatcacccgatcaaggggacagcntcagcagcaacatgcagctcaaacgcttgcctagccacacccccggggaacagcagtgattacttacaataaacgaaggttaactagctatactaaccccagggttggtcaatttcgtgccagccaccgcggtcacacgattaacccaagtcaatagaagccggcgtaaagagtgttttagatcaccccctccccaataaagctaaaactcacctgagttgtaaaaaactccagttgacacaaaataaactacgaaagtggctttaacatatctgaacacacaatagctaagacccaaactgggattagataccccactatgcttagccctaaacctcaacagttaaatcaacaaaactgctcgccagaacactacgagccacagcttaaaactcaaaggacctggcggtgcttcatatccctctagaggagcctgttctgtaatcgataaaccccgatcaacctcaccacctcttgctcaacacaacatacccccagcaggcgtgaccgctccgtttactgacgcttactgacgcttactgaccgcttactgacaacaacatatgctccgcttactga

SEQ ID NO: 324607 - DNA, 784 bp, Homo sapiens
  misc_feature (41)..(41): n is a, c, g, or t
  misc_feature (47)..(47): n is a, c, g, or t
  misc_feature (85)..(85): n is a, c, g, or t
gcacggattagctcttagtagattacacatgcagcatcccnactccnggagttcaccttctaatcacccgatcaaggggacagcntcagcagcaacatgcagctcaaacgcttgcctagccacacccccggggaacagcagtgattacttacaataaacgaaggttaactagctatactaaccccagggttggtcaatttcgtgccagccaccgcggtcacacgattaacccaagtcaatagaagccggcgtaaagagtgttttagatcaccccctccccaataaagctaaaactcacctgagttgtaaaaaactccagttgacacaaaataaactacgaaagtggctttaacatatctgaacacacaatagctaagacccaaactgggattagataccccactatgcttagccctaaacctcaacagttaaatcaacaaaactgctcgccagaacactacgagccacagcttaaaactcaaaggacctggcggtgcttcatatccctctagaggagcctgttctgtaatcgataaaccccgatcaacctcacactctagagggatatgaagcacgcagtcctttgagttttaagctgtggctcgtagtgttctggcgagcagttttgttgatttaactgttgaggtttagggctaagcatagtggggtatctaatcccagtttgggtcttagctattgtgtgttcagatatgttaaagccactactcgagtctattttgtgtcaactggagttttttacaactcaggtgagttttagctgtcg

SEQ ID NO: 324608 - DNA, 621 bp, Homo sapiens
  misc_feature (41)..(41): n is a, c, g, or t
  misc_feature (47)..(47): n is a, c, g, or t
  misc_feature (85)..(85): n is a, c, g, or t
  misc_feature (598)..(598): n is a, c, g, or t
gcacggattagctcttagtagattacacatgcagcatcccnactccnggagttcaccttctaatcacccgatcaaggggacagcntcagcagcaacatgcagctcaaacgcttgcctagccacacccccggggaacagcagtgattacttacaataaacgaaggttaactagctatactaaccccagggttggtcaatttcgtgccagccaccgcggtcacacgattaacccaagtcaatagaagccggcgtaaagagtgttttagatcaccccctccccaataaagctaaaactcacctgagttgtaaaaaactccagttgacacaaaataaactacgaaagtggctttaacatatctgaacacacaatagctaagacccaaactgggattagataccccactatgcttagccctaaacctcaacagttaaatcaacaaaactgctcgccagaacactacgagccacagcttaaaactcaaaggacctggcggtgcttcatatccctctagaggagcctgttctgtaatcgataaaccccgatcaacctcaaataggctgagcaagaggtggtgaggttgatcgtttatcgattacngacagctcctctagaggatatgg

SEQ ID NO: 324609 - DNA, 759 bp, Homo sapiens
  misc_feature (41)..(41): n is a, c, g, or t
  misc_feature (47)..(47): n is a, c, g, or t
  misc_feature (85)..(85): n is a, c, g, or t
  misc_feature (684)..(684): n is a, c, g, or t
gcacggattagctcttagtagattacacatgcagcatcccnactccnggagttcaccttctaatcacccgatcaaggggacagcntcagcagcaacatgcagctcaaacgcttgcctagccacacccccggggaacagcagtgattacttacaataaacgaaggttaactagctatactaaccccagggttggtcaatttcgtgccagccaccgcggtcacacgattaacccaagtcaatagaagccggcgtaaagagtgttttagatcaccccctccccaataaagctaaaactcacctgagttgtaaaaaactccagttgacacaaaataaactacgaaagtggctttaacatatctgaacacacaatagctaagacccaaactgggattagataccccactatgcttagccctaaacctcaacagttaaatcaacaaaactgctcgccagaacactacgagccacagcttaaaactcaaaggacctggcggtgcttcatatccctctagaggagcctgttctgtaatcgataaaccccgatcaacctcatatgaaacttaagggtcgaaggtggatttagcagtaaactgagagtagagtgcttagttgaacagggccctgaagcgcgtacacaccggccgtcaccctcctcaagtatacttcaaaggacatttaactaanacccctacgcatttatatagaggagacaagtcgtaacatggtaaagtgtacttgggaagtgcacttggacgaacc

SEQ ID NO: 324610 - DNA, 607 bp, Homo sapiens
  misc_feature (41)..(41): n is a, c, g, or t
  misc_feature (47)..(47): n is a, c, g, or t
  misc_feature (85)..(85): n is a, c, g, or t
gcacggattagctcttagtagattacacatgcagcatcccnactccnggagttcaccttctaatcacccgatcaaggggacagcntcagcagcaacatgcagctcaaacgcttgcctagccacacccccggggaacagcagtgattacttacaataaacgaaggttaactagctatactaaccccagggttggtcaatttcgtgccagccaccgcggtcacacgattaacccaagtcaatagaagccggcgtaaagagtgttttagatcaccccctccccaataaagctaaaactcacctgagttgtaaaaaactccagttgacacaaaataaactacgaaagtggctttaacatatctgaacacacaatagctaagacccaaactgggattagataccccactatgcttagccctaaacctcaacagttaaatcaacaaaactgctcgccagaacactacgagccacagcttaaaactcaaaggacctggcggtgcttcatatccctctagaggagcctgttctgtaatcgataaaccccgatcaacctcatgatcttctgcacgatgaggtgatcttctgcacgataaggtgatcttctgcacga

SEQ ID NO: 324611 - DNA, 746 bp, Homo sapiens
  misc_feature (671)..(671): n is a, c, g, or t
ccgatcccccaggtagacctaacccaggtaggggccacagttgctggatgtttatatagagagtaggttgatttattttacatgcttttgagttaatgttggaaaactaatcacaagcagtttctaaaccaaaaaatgacatgttgtaaaaggacaataaacgttaggtctacctggcaacatatctgaacacacaatagctaagacccaaactgggattagataccccactatgcttagccctaaacctcaacagttaaatcaacaaaactgctcgccagaacactacgagccacagcttaaaactcaaaggacctggcggtgcttcatatccctctagaggagcctgttctgtaatcgataaaccccgatcaacctcaccacctcttgctcagcctatataccgccatcttcagcaaaccctgatgaaggctacaaagtaagcgcaagtacccacgtaaagacgttaggtcaaggtgtagcccatgaggtggcaagaaatgggctacattttctaccccagaaactacgatagcccttatgaaacttaagggtcgaaggtggatttagcagtaaactgagagtagagtgcttagttgaacagggccctgaagcgcgtacacaccggccgtcaccctcctcaagtatacttcaaaggacatttaactaanacccctacgcatttatatagaggagacaagtcgtaacatggtaaagtgtacttgggaagtgcacttggacgaacc

SEQ ID NO: 324612 - DNA, 623 bp, Homo sapiens
  misc_feature (25)..(26): n is a, c, g, or t
  misc_feature (548)..(548): n is a, c, g, or t
ggattattctattgacttgggttanncgtgtgttacggtggctggcacgtaattgaacatatctgaacacacaatagctaagacccaaactgggattagataccccactatgcttagccctaaacctcaacagttaaatcaacaaaactgctcgccagaacactacgagccacagcttaaaactcaaaggacctggcggtgcttcatatccctctagaggagcctgttctgtaatcgataaaccccgatcaacctcaccacctcttgctcagcctatataccgccatcttcagcaaaccctgatgaaggctacaaagtaagcgcaagtacccacgtaaagacgttaggtcaaggtgtagcccatgaggtggcaagaaatgggctacattttctaccccagaaactacgatagcccttatgaaacttaagggtcgaaggtggatttagcagtaaactgagagtagagtgcttagttgaacagggccctgaagcgcgtacacaccggccgtcaccctcctcaagtatacttcaaaggacatttaactaanacccctacgcatttatatagaggagacaagtcgtaacatggtaaagtgtacttgggaagtgcacttggacgaacc

SEQ ID NO: 324613 - DNA, 837 bp, Homo sapiens
  misc_feature (762)..(762): n is a, c, g, or t
catggatgggttgaaaagagagacaagaacaaaactaagaagaccaaagcagcagcagcagcagcagcagcagcacctgccgcagcagcaacagcagcaacaacagcagcaacaacagcagcaacagcagcacagtaaagggcatacatttcctgctttcaccaattaaccactgaattgctattttttccttttggccagttagctaggtttctggttcccccacagtaggtctagctgggttaggtctacctggccaggtagacctaaacatatctgaacacacaatagctaagacccaaactgggattagataccccactatgcttagccctaaacctcaacagttaaatcaacaaaactgctcgccagaacactacgagccacagcttaaaactcaaaggacctggcggtgcttcatatccctctagaggagcctgttctgtaatcgataaaccccgatcaacctcaccacctcttgctcagcctatataccgccatcttcagcaaaccctgatgaaggctacaaagtaagcgcaagtacccacgtaaagacgttaggtcaaggtgtagcccatgaggtggcaagaaatgggctacattttctaccccagaaactacgatagcccttatgaaacttaagggtcgaaggtggatttagcagtaaactgagagtagagtgcttagttgaacagggccctgaagcgcgtacacaccggccgtcaccctcctcaagtatacttcaaaggacatttaactaanacccctacgcatttatatagaggagacaagtcgtaacatggtaaagtgtacttgggaagtgcacttggacgaacc

SEQ ID NO: 324614 - DNA, 604 bp, Homo sapiens
  misc_feature (529)..(529): n is a, c, g, or t
gcggccgcctactactactaaattcgcggccggtcgaacatatctgaacacacaatagctaagacccaaactgggattagataccccactatgcttagccctaaacctcaacagttaaatcaacaaaactgctcgccagaacactacgagccacagcttaaaactcaaaggacctggcggtgcttcatatccctctagaggagcctgttctgtaatcgataaaccccgatcaacctcaccacctcttgctcagcctatataccgccatcttcagcaaaccctgatgaaggctacaaagtaagcgcaagtacccacgtaaagacgttaggtcaaggtgtagcccatgaggtggcaagaaatgggctacattttctaccccagaaactacgatagcccttatgaaacttaagggtcgaaggtggatttagcagtaaactgagagtagagtgcttagttgaacagggccctgaagcgcgtacacaccggccgtcaccctcctcaagtatacttcaaaggacatttaactaanacccctacgcatttatatagaggagacaagtcgtaacatggtaaagtgtacttgggaagtgcacttggacgaacc

SEQ ID NO: 324615 - DNA, 538 bp, Homo sapiens
  misc_feature (41)..(41): n is a, c, g, or t
  misc_feature (47)..(47): n is a, c, g, or t
  misc_feature (85)..(85): n is a, c, g, or t
  misc_feature (527)..(527): n is a, c, g, or t
gcacggattagctcttagtagattacacatgcagcatcccnactccnggagttcaccttctaatcacccgatcaaggggacagcntcagcagcaacatgcagctcaaacgcttgcctagccacacccccggggaacagcagtgattacttacaataaacgaaggttaactagctatactaaccccagggttggtcaatttcgtgccagccaccgcggtcacacgattaacccaagtcaatagaagccggcgtaaagagtgttttagatcaccccctccccaataaagctaaaactcacctgagttgtaaaaaactccagttgacacaaaataaactacgaaagtggctttaacatatctgaacacacaatagctaagacccaaactgggattagataccccactatgcttagccctaaacctcaacagttaaatcaacaaaactgctcgccagaacactacgagccacagcttaaaactcaaagtattttttcagtttttataccaataaagtgaccctgttttcantggaaaaaaaa

SEQ ID NO: 324616 - DNA, 660 bp, Homo sapiens
  misc_feature (585)..(585): n is a, c, g, or t
taagaggatggctagagacatagatttgtaataaaacatagtaagaaagtctgggaggcggcttctggcgatgccatagtggcttaaggatgtcagagctgaggttccaccattttagttggccttcttccgtcatggtggcgagctagacgttccggtaacgtctacttgcaaatcaacaaaactgctcgccagaacactacgagccacagcttaaaactcaaaggacctggcggtgcttcatatccctctagaggagcctgttctgtaatcgataaaccccgatcaacctcaccacctcttgctcagcctatataccgccatcttcagcaaaccctgatgaaggctacaaagtaagcgcaagtacccacgtaaagacgttaggtcaaggtgtagcccatgaggtggcaagaaatgggctacattttctaccccagaaactacgatagcccttatgaaacttaagggtcgaaggtggatttagcagtaaactgagagtagagtgcttagttgaacagggccctgaagcgcgtacacaccggccgtcaccctcctcaagtatacttcaaaggacatttaactaanacccctacgcatttatatagaggagacaagtcgtaacatggtaaagtgtacttgggaagtgcacttggacgaacc

SEQ ID NO: 324617 - DNA, 655 bp, Homo sapiens
  misc_feature (580)..(580): n is a, c, g, or t
cacatggctgatgctccagaccccacttatctcccagcaccctctagcagactagcttcatcatggcttccacggcgtcagcccctccccacttccaatctattccacctctagccatgcaccacctactcagcaagttctgccaccccagggttacatgcagccccaaatcaacaaaactgctcgccagaacactacgagccacagcttaaaactcaaaggacctggcggtgcttcatatccctctagaggagcctgttctgtaatcgataaaccccgatcaacctcaccacctcttgctcagcctatataccgccatcttcagcaaaccctgatgaaggctacaaagtaagcgcaagtacccacgtaaagacgttaggtcaaggtgtagcccatgaggtggcaagaaatgggctacattttctaccccagaaactacgatagcccttatgaaacttaagggtcgaaggtggatttagcagtaaactgagagtagagtgcttagttgaacagggccctgaagcgcgtacacaccggccgtcaccctcctcaagtatacttcaaaggacatttaactaanacccctacgcatttatatagaggagacaagtcgtaacatggtaaagtgtacttgggaagtgcacttggacgaacc

SEQ ID NO: 324618 - DNA, 225 bp, Homo sapiens
atctgaacacacaatagctaagacccaaactgggattagataccccactatgcttagccctaaacctcaacagttaaatcaacaaaactgctcgccagaacactacgagccacagcttaaaactcaaaggacctggcggtgcttcatatccctctagaggagcctgttctgtaatcgataaaccccgatcaacctcacaacctcaaattagagaccaatttggag

SEQ ID NO: 324619 - DNA, 591 bp, Homo sapiens
  misc_feature (516)..(516): n is a, c, g, or t
gctggaccgggatcttgagagtcgatatgctgaggatgcaaagcgggggatcatggtacgccattatgcatatagtcctgacatgtcaacagcctggatgtacaaatcaacaaaactgctcgccagaacactacgagccacagcttaaaactcaaaggacctggcggtgcttcatatccctctagaggagcctgttctgtaatcgataaaccccgatcaacctcaccacctcttgctcagcctatataccgccatcttcagcaaaccctgatgaaggctacaaagtaagcgcaagtacccacgtaaagacgttaggtcaaggtgtagcccatgaggtggcaagaaatgggctacattttctaccccagaaactacgatagcccttatgaaacttaagggtcgaaggtggatttagcagtaaactgagagtagagtgcttagttgaacagggccctgaagcgcgtacacaccggccgtcaccctcctcaagtatacttcaaaggacatttaactaanacccctacgcatttatatagaggagacaagtcgtaacatggtaaagtgtacttgggaagtgcacttggacgaacc

SEQ ID NO: 324620 - DNA, 688 bp, Homo sapiens
ccggccccggccggccagggaaggcggcccctcctcggtcgccccgcctttcactcccgttacacccgggggaaggtgttcccgagccctctcccaccctcatcccgcctcctcgcttcctcggctccagcctccgccggcggagcccactatgccagacagtttcgacactttgcaaagacaaagagccctagaccggagggaggaggaggaggaagaagagcggagagagaaggaagaggcgatgtgagctgggaagggggcaagtgtccgggacacccacacccctgtattctcctccgaaccccttcatgcccaaatcccggaaactccagcgtgtctccagccgtggagcaccatgcaaagtgcggagatgcagagaggaaagactactcggtccttgttccttgctgtcccagaggtcacagtgctgtggggagggggacaaggacataccctgtcaggctgcgtatataaatacacaggtgctaagcaaaatgggaacggagaagggaaaggttccctccaccttgagagacccacagaagggtgttctagagatggatgagtcagactgcaagagagcaaagatatcttcctgaatacattcaatatcaaagcatcatgtgccctgtgtgtgcaaaataataataatcataataataaagtaaaataaaagattggctgt

SEQ ID NO: 324621 - DNA, 542 bp, Homo sapiens
tacatttctatgggagggactgatgctgtcatcagggagcttgggggacaggcttcttggagtgtccccctggtgggacctggaatgtgttgaacttggctgagtggtgcaagggatcccctggtgccatccctgccaaagaccctatcagtgtcatgagcctgaggatgaaatctcccgatggggaacctcagtttttgcccttaaggccttcaacctattggatgaggcccacctgcattcatctcctttacttaaagttaactgattggagagcttaaccacatctgcatgctaccttccctgaaatacctagacgagtgtctgaccaaactactggactccatggcctagccaagctggctcattacatttatttatttacttagagataagtctcgctcccccaggctggagtatgatcatagctcattgcagccttgaattcctggactcaagtgatcctcctgcctcagcctccacatagctgggatgacaggggcaagccacatgcctgctgatacattaaatctaaccatcac

SEQ ID NO: 324622 - DNA, 2826 bp, Homo sapiens
ccggccccggccggccagggaaggcggcccctcctcggtcgccccgcctttcactcccgttacacccgggggaaggtgttcccgagccctctcccaccctcatcccgcctcctcgcttcctcggctccagcctccgccggcggagcccactatgccagacagtttcgacactttgcaaagacaaagagccctagaccggagggaggaggaggaggaagaagagcggagagagaaggaagaggcgatgtgagctgggaagggggcaagtgtccgggacacccacacccctgtattctcctccgaaccccttcatgcccaaatcccggaaactccagcgtgtctccagccgtgttggtaccattttcagatttcatcttcctaaactggaaatgtcaatgagaggaaattaacacccccaagagctgcagtgagcaaatgcattgagcttgggtcaggacaattccatttggggaccagagatggacggtcactcagcctatggagatgaagaaactgaggttcagagaggttaagagactccactgaggtcacacagccgatgacagacaaccttctgtgccttcatcaagctggttgtgtacccaccatgtccctggcgacaggatgggaaagaaaaagccctaattaaggatcgtcagaaaccacagttggaggaggacggcagagacagtttccctccccgctataccaacacccttccttcgaggtcctcgctcctgagggaccctggactgtcacagagattaatgaccccttatcttctttggatgtgaaaggaaatcactggttaaagcttgatcgagagacattatcagctctttaaggattgcaggagaataggctactttattttctgaaaaggagggagttcctgctacccatcgtgggaggccaccatcaggactgcgaagatggtgaccctgcggaagaggaccctgaaagtgctcaccttcctcgtgctcttcatcttcctcacctccttcttcctgaactactcccacaccatggtggccaccacctggttccccaagcagatggtcctggagctctccgagaacctgaagagactgatcaagcacaggccttgcacctgcacccactgcatcgggcagcgcaagctctcggcctggttcgatgagaggttcaaccagaccatgcagccgctgctgactgcccagaacgcgctcttggaggacgacacctaccgatggtggctgaggctccagcgggagaagaagcccaataacttgaatgacaccatcaaggagctgttcagagtggtgcctgggaatgtggaccctatgctggagaagaggtcggtgggctgccggcgctgcgccgttgtgggcaactcgggcaacctgagggagtcttcttatgggcctgagatagacagtcacgactttgtcctcaggatgaacaaggcgcccacggcagggtttgaagctgatgttgggaccaagaccacccaccatctggtgtaccctgagagcttccgggagctgggagataatgtcagcatgatcctggtgcccttcaagaccatcgacttggagtgggtggtgagcgccatcaccacgggcaccatttcccacacctacatcccggttcctgcaaagatcagagtgaaacaggataagatcctgatctaccacccagccttcatcaagtatgtctttgacaactggctgcaagggcacgggcgatacccatctaccggcatcctctcggtcatcttctcaatgcatgtctgcgatgaggtggacttgtacggcttcggggcagacagcaaagggaactggcaccactactgggagaacaacccatccgcgggggcttttcgcaagacgggggtgcacgatgcagactttgagtctaacgtgacggccaccttggcctccatcaataaaatccggatcttcaaggggagatgacgcagtgaagggctgaggatggacgcactgtcacacctctgcatttccagccccagcatcttgctggagccgttccatcccggagcttggaggggcagcctcaggtgtgtgcctgggcaccgctcacagcctcttgcacccagccgttggcagcatctactcagcaaggtcactaagctctgccagcgtggcagagcatgtcttggaacctgtcttgagtggggacaacgtccccccactgctgccctagagctggggagacgctgggaaaggttcaacctccacacactaaaatcattttggctcctggggcaagcttggggaatgaatgtggaagatgcctatattctgagagacaggacagtttcccaggaagatgggcagagacttgagtggcgattacctccagcacagagacgtgccaggcggtgttggcgctcggggcgagatgctgcccttctttgcacgaagcctggcctcttgcttggcgtgataaccctgtcatcttcccaaagctcatttatgagccaccagaggctcctaccccaaagattttcacagaaacttgaggccaggtgccatggctcacacctgtaatctgaacactttgggaggccgaggcgggaggatcacttgagcccaggagttcaagaccagcctgggcaacatagtgagactcctgtctctacaaaaataaaagatttaaaaaaattagccaggcacggtggcacacacttgtagccccagctactagggaggctgaggagggaggatctcttgtgcctaggagttcgaggctgcagtgggctgtgatcacaccactgcactccagcctgggcaacagagtgagaccctgtctctgaaaaaaaaa

SEQ ID NO: 324623 - DNA, 3029 bp, Homo sapiens
ccggccccggccggccagggaaggcggcccctcctcggtcgccccgcctttcactcccgttacacccgggggaaggtgttcccgagccctctcccaccctcatcccgcctcctcgcttcctcggctccagcctccgccggcggagcccactatgccagacagtttcgacactttgcaaagacaaagagccctagaccggagggaggaggaggaggaagaagagcggagagagaaggaagaggcgatgtgagctgggaagggggcaagtgtccgggacacccacacccctgtattctcctccgaaccccttcatgcccaaatcccggaaactccagcgtgtctccagccgtgttggtaccattttcagatttcatcttcctaaactggaaatgtcaatgagaggaaattaacacccccaagagctgcagtgagcaaatgcattgagcttgggtcaggacaattccatttggggaccagagatggacggtcactcagcctatggagatgaagaaactgaggttcagagaggttaagagactccactgaggtcacacagccgatgacagacaaccttctgtgccttcatcaagctggttgtgtacccaccatgtccctggcgacaggatgggaaagaaaaagccctaattaaggatcgtcagaaaccacagttggaggaggacggcagagacagtttccctccccgctataccaacacccttccttcgaggtcctcgctcctgagggaccctggactgtcacagagattaatgaccccttatcttctttggatgtgaaaggaaatcactggttaaagcttgatcgagagacattatcagctctttaaggattgcaggagaataggctactttattttctgaaaaggtaaatatatgcaagcaaagccaacatgccacgaatggcgttggtctaccacacagccgtgtctgggacacagttgggggtcatcccccagcaggagtgaagtcgagcttagcggcccttgtgtcctcccttggaattcctgccatcccttttgattgagcctccacctctgggatttttcttccatttttctcctctcttaggagggagttcctgctacccatcgtgggaggccaccatcaggactgcgaagatggtgaccctgcggaagaggaccctgaaagtgctcaccttcctcgtgctcttcatcttcctcacctccttcttcctgaactactcccacaccatggtggccaccacctggttccccaagcagatggtcctggagctctccgagaacctgaagagactgatcaagcacaggccttgcacctgcacccactgcatcgggcagcgcaagctctcggcctggttcgatgagaggttcaaccagaccatgcagccgctgctgactgcccagaacgcgctcttggaggacgacacctaccgatggtggctgaggctccagcgggagaagaagcccaataacttgaatgacaccatcaaggagctgttcagagtggtgcctgggaatgtggaccctatgctggagaagaggtcggtgggctgccggcgctgcgccgttgtgggcaactcgggcaacctgagggagtcttcttatgggcctgagatagacagtcacgactttgtcctcaggatgaacaaggcgcccacggcagggtttgaagctgatgttgggaccaagaccacccaccatctggtgtaccctgagagcttccgggagctgggagataatgtcagcatgatcctggtgcccttcaagaccatcgacttggagtgggtggtgagcgccatcaccacgggcaccatttcccacacctacatcccggttcctgcaaagatcagagtgaaacaggataagatcctgatctaccacccagccttcatcaagtatgtctttgacaactggctgcaagggcacgggcgatacccatctaccggcatcctctcggtcatcttctcaatgcatgtctgcgatgaggtggacttgtacggcttcggggcagacagcaaagggaactggcaccactactgggagaacaacccatccgcgggggcttttcgcaagacgggggtgcacgatgcagactttgagtctaacgtgacggccaccttggcctccatcaataaaatccggatcttcaaggggagatgacgcagtgaagggctgaggatggacgcactgtcacacctctgcatttccagccccagcatcttgctggagccgttccatcccggagcttggaggggcagcctcaggtgtgtgcctgggcaccgctcacagcctcttgcacccagccgttggcagcatctactcagcaaggtcactaagctctgccagcgtggcagagcatgtcttggaacctgtcttgagtggggacaacgtccccccactgctgccctagagctggggagacgctgggaaaggttcaacctccacacactaaaatcattttggctcctggggcaagcttggggaatgaatgtggaagatgcctatattctgagagacaggacagtttcccaggaagatgggcagagacttgagtggcgattacctccagcacagagacgtgccaggcggtgttggcgctcggggcgagatgctgcccttctttgcacgaagcctggcctcttgcttggcgtgataaccctgtcatcttcccaaagctcatttatgagccaccagaggctcctaccccaaagattttcacagaaacttgaggccaggtgccatggctcacacctgtaatctgaacactttgggaggccgaggcgggaggatcacttgagcccaggagttcaagaccagcctgggcaacatagtgagactcctgtctctacaaaaataaaagatttaaaaaaattagccaggcacggtggcacacacttgtagccccagctactagggaggctgaggagggaggatctcttgtgcctaggagttcgaggctgcagtgggctgtgatcacaccactgcactccagcctgggcaacagagtgagaccctgtctctgaaaaaaaaa

SEQ ID NO: 324624 - DNA, 2937 bp, Homo sapiens
ccggccccggccggccagggaaggcggcccctcctcggtcgccccgcctttcactcccgttacacccgggggaaggtgttcccgagccctctcccaccctcatcccgcctcctcgcttcctcggctccagcctccgccggcggagcccactatgccagacagtttcgacactttgcaaagacaaagagccctagaccggagggaggaggaggaggaagaagagcggagagagaaggaagaggcgatgtgagctgggaagggggcaagtgtccgggacacccacacccctgtattctcctccgaaccccttcatgcccaaatcccggaaactccagcgtgtctccagccgtgttggtaccattttcagatttcatcttcctaaactggaaatgtcaatgagaggaaattaacacccccaagagctgcagtgagcaaatgcattgagcttgggtcaggacaattccatttggggaccagagatggacggtcactcagcctatggagatgaagaaactgaggttcagagaggttaagagactccactgaggtcacacagccgatgacagacaaccttctgtgccttcatcaagctggttgtgtacccaccatgtccctggcgacaggatgggaaagaaaaagccctaattaaggatcgtcagaaaccacagttggaggaggacggcagagacagtttccctccccgctataccaacacccttccttcgaggtcctcgctcctgagggaccctggactgtcacagagattaatgaccccttatcttctttggatgtgaaaggaaatcactggttaaagcttgatcgagagacattatcagctctttaaggattgcaggagaataggctactttattttctgaaaaggtaaatatatgcaagcaaagccaacatgccacgaatggcgttggtctaccacacagccgtgtctgggacacagttgggggtcatcccccagcaggagtgaagtcgagcttagcggcccttgtgtcctcccttggaattcctgccatcccttttgattgagcctccacctctgggatttttcttccatttttctcctctcttaggagggagttcctgctacccatcgtgggaggccaccatcaggactgcgaagatggtgaccctgcggaagaggaccctgaaagtgctcaccttcctcgtgctcttcatcttcctcacctccttcttcctgaactactcccacaccatggtggccaccacctggttccccaagcagatggtcctggagctctccgagaacctgaagagactgatcaagcacaggccttgcacctgcacccactgcatcgggcagcgcaagctctcggcctggttcgatgagaggttcaaccagaccatgcagccgctgctgactgcccagaacgcgctcttggaggacgacacctaccgatggtggctgaggctccagcgggagaagaagcccaataacttgaatgacaccatcaaggagctgttcagagtggtgcctgggaatgtggaccctatgctggagaagaggtcggtgggctgccggcgctgcgccgttgtgggcaactcgggcaacctgagggagtcttcttatgggcctgagatagacagtcacgactttgtcctcaggatgaacaaggcgcccacggcagggtttgaagctgatgttgggaccaagaccacccaccatctggtgtaccctgagagcttccgggagctgggagataatgtcagcatgatcctggtgcccttcaagaccatcgacttggagtgggtggtgagcgccatcaccacgggcaccatttcccacacctacatcccggttcctgcaaagatcagagtgaaacaggataagatcctgatctaccacccagccttcatcaagtatgtctttgacaactggctgcaagggcacgggcgatacccatctaccggcatcctctcggtcatcttctcaatgcatgtctgcgatgaggtggacttgtacggcttcggggcagacagcaaagggaactggcaccactactgggagaacaacccatccgcgggggcttttcgcaagacgggggtgcacgatgcagactttgagtctaacgtgacggccaccttggcctccatcaataaaatccggatcttcaaggggagatgacgcagtgaagggctgaggatggacgcactgtcacacctctgcatttccagccccagcatcttgctggagccgttccatcccggagcttggaggggcagcctcaggtgtgtgcctgggcaccgctcacagcctcttgcacccagccgttggcagcatctactcagcaaggtcactaagctctgccagcgtggcagagcatgtcttggaacctgtcttgagtggggacaacgtccccccactgctgccctagagctggggagacgctgggaaaggttcaacctccacacactaaaatcattttggctcctggggcaagcttggggaatgaatgtggaagatgcctatattctgagagacaggacagtttcccaggaagatgggcagagacttgcttggcgtgataaccctgtcatcttcccaaagctcatttatgagccaccagaggctcctaccccaaagattttcacagaaacttgaggccaggtgccatggctcacacctgtaatctgaacactttgggaggccgaggcgggaggatcacttgagcccaggagttcaagaccagcctgggcaacatagtgagactcctgtctctacaaaaataaaagatttaaaaaaattagccaggcacggtggcacacacttgtagccccagctactagggaggctgaggagggaggatctcttgtgcctaggagttcgaggctgcagtgggctgtgatcacaccactgcactccagcctgggcaacagagtgagaccctgtctctgaaaaaaaaa

SEQ ID NO: 324625 - DNA, 2451 bp, Homo sapiens
tacatttctatgggagggactgatgctgtcatcagggagcttgggggacaggcttcttggagtgtccccctggtgggacctggaatgtgttgaacttggctgagtggtgcaagggatcccctggtgccatccctgccaaagaccctatcagtgtcatgagcctgaggatgaaatctcccgatggatgacagacaaccttctgtgccttcatcaagctggttgtgtacccaccatgtccctggcgacaggatgggaaagaaaaagccctaattaaggatcgtcagaaaccacagttggaggaggacggcagagacagtttccctccccgctataccaacacccttccttcgaggtcctcgctcctgagggaccctggactgtcacagagattaatgaccccttatcttctttggatgtgaaaggaaatcactggttaaagcttgatcgagagacattatcagctctttaaggattgcaggagaataggctactttattttctgaaaaggagggagttcctgctacccatcgtgggaggccaccatcaggactgcgaagatggtgaccctgcggaagaggaccctgaaagtgctcaccttcctcgtgctcttcatcttcctcacctccttcttcctgaactactcccacaccatggtggccaccacctggttccccaagcagatggtcctggagctctccgagaacctgaagagactgatcaagcacaggccttgcacctgcacccactgcatcgggcagcgcaagctctcggcctggttcgatgagaggttcaaccagaccatgcagccgctgctgactgcccagaacgcgctcttggaggacgacacctaccgatggtggctgaggctccagcgggagaagaagcccaataacttgaatgacaccatcaaggagctgttcagagtggtgcctgggaatgtggaccctatgctggagaagaggtcggtgggctgccggcgctgcgccgttgtgggcaactcgggcaacctgagggagtcttcttatgggcctgagatagacagtcacgactttgtcctcaggatgaacaaggcgcccacggcagggtttgaagctgatgttgggaccaagaccacccaccatctggtgtaccctgagagcttccgggagctgggagataatgtcagcatgatcctggtgcccttcaagaccatcgacttggagtgggtggtgagcgccatcaccacgggcaccatttcccacacctacatcccggttcctgcaaagatcagagtgaaacaggataagatcctgatctaccacccagccttcatcaagtatgtctttgacaactggctgcaagggcacgggcgatacccatctaccggcatcctctcggtcatcttctcaatgcatgtctgcgatgaggtggacttgtacggcttcggggcagacagcaaagggaactggcaccactactgggagaacaacccatccgcgggggcttttcgcaagacgggggtgcacgatgcagactttgagtctaacgtgacggccaccttggcctccatcaataaaatccggatcttcaaggggagatgacgcagtgaagggctgaggatggacgcactgtcacacctctgcatttccagccccagcatcttgctggagccgttccatcccggagcttggaggggcagcctcaggtgtgtgcctgggcaccgctcacagcctcttgcacccagccgttggcagcatctactcagcaaggtcactaagctctgccagcgtggcagagcatgtcttggaacctgtcttgagtggggacaacgtccccccactgctgccctagagctggggagacgctgggaaaggttcaacctccacacactaaaatcattttggctcctggggcaagcttggggaatgaatgtggaagatgcctatattctgagagacaggacagtttcccaggaagatgggcagagacttgagtggcgattacctccagcacagagacgtgccaggcggtgttggcgctcggggcgagatgctgcccttctttgcacgaagcctggcctcttgcttggcgtgataaccctgtcatcttcccaaagctcatttatgagccaccagaggctcctaccccaaagattttcacagaaacttgaggccaggtgccatggctcacacctgtaatctgaacactttgggaggccgaggcgggaggatcacttgagcccaggagttcaagaccagcctgggcaacatagtgagactcctgtctctacaaaaataaaagatttaaaaaaattagccaggcacggtggcacacacttgtagccccagctactagggaggctgaggagggaggatctcttgtgcctaggagttcgaggctgcagtgggctgtgatcacaccactgcactccagcctgggcaacagagtgagaccctgtctctgaaaaaaaaa

SEQ ID NO: 324626 - DNA, 2518 bp, Homo sapiens
ctggctcccatccagtgctctttaggtgactctcttctctccccacactgagtggcttgaaagggctcagaggcttcacatgagcacttaacatttactgtgtatatctgagccaagtagggaaagaaactgtctcaccaatcctcacgccctctccccatgctaagtctcccgagtattttcttctgtttttcagatgaagaaactgaggttcagagaggttaagagactccactgaggtcacacagccgatgacagacaaccttctgtgccttcatcaagctggttgtgtacccaccatgtccctggcgacaggatgggaaagaaaaagccctaattaaggatcgtcagaaaccacagttggaggaggacggcagagacagtttccctccccgctataccaacacccttccttcgaggtcctcgctcctgagggaccctggactgtcacagagattaatgaccccttatcttctttggatgtgaaaggaaatcactggttaaagcttgatcgagagacattatcagctctttaaggattgcaggagaataggctactttattttctgaaaaggagggagttcctgctacccatcgtgggaggccaccatcaggactgcgaagatggtgaccctgcggaagaggaccctgaaagtgctcaccttcctcgtgctcttcatcttcctcacctccttcttcctgaactactcccacaccatggtggccaccacctggttccccaagcagatggtcctggagctctccgagaacctgaagagactgatcaagcacaggccttgcacctgcacccactgcatcgggcagcgcaagctctcggcctggttcgatgagaggttcaaccagaccatgcagccgctgctgactgcccagaacgcgctcttggaggacgacacctaccgatggtggctgaggctccagcgggagaagaagcccaataacttgaatgacaccatcaaggagctgttcagagtggtgcctgggaatgtggaccctatgctggagaagaggtcggtgggctgccggcgctgcgccgttgtgggcaactcgggcaacctgagggagtcttcttatgggcctgagatagacagtcacgactttgtcctcaggatgaacaaggcgcccacggcagggtttgaagctgatgttgggaccaagaccacccaccatctggtgtaccctgagagcttccgggagctgggagataatgtcagcatgatcctggtgcccttcaagaccatcgacttggagtgggtggtgagcgccatcaccacgggcaccatttcccacacctacatcccggttcctgcaaagatcagagtgaaacaggataagatcctgatctaccacccagccttcatcaagtatgtctttgacaactggctgcaagggcacgggcgatacccatctaccggcatcctctcggtcatcttctcaatgcatgtctgcgatgaggtggacttgtacggcttcggggcagacagcaaagggaactggcaccactactgggagaacaacccatccgcgggggcttttcgcaagacgggggtgcacgatgcagactttgagtctaacgtgacggccaccttggcctccatcaataaaatccggatcttcaaggggagatgacgcagtgaagggctgaggatggacgcactgtcacacctctgcatttccagccccagcatcttgctggagccgttccatcccggagcttggaggggcagcctcaggtgtgtgcctgggcaccgctcacagcctcttgcacccagccgttggcagcatctactcagcaaggtcactaagctctgccagcgtggcagagcatgtcttggaacctgtcttgagtggggacaacgtccccccactgctgccctagagctggggagacgctgggaaaggttcaacctccacacactaaaatcattttggctcctggggcaagcttggggaatgaatgtggaagatgcctatattctgagagacaggacagtttcccaggaagatgggcagagacttgagtggcgattacctccagcacagagacgtgccaggcggtgttggcgctcggggcgagatgctgcccttctttgcacgaagcctggcctcttgcttggcgtgataaccctgtcatcttcccaaagctcatttatgagccaccagaggctcctaccccaaagattttcacagaaacttgaggccaggtgccatggctcacacctgtaatctgaacactttgggaggccgaggcgggaggatcacttgagcccaggagttcaagaccagcctgggcaacatagtgagactcctgtctctacaaaaataaaagatttaaaaaaattagccaggcacggtggcacacacttgtagccccagctactagggaggctgaggagggaggatctcttgtgcctaggagttcgaggctgcagtgggctgtgatcacaccactgcactccagcctgggcaacagagtgagaccctgtctctgaaaaaaaaa

SEQ ID NO: 324627 - DNA, 2876 bp, Homo sapiens
ccattgttgttgtgcttgttgctgaaatccaaaatctggaagagaatgaagtagagagaaaggcaaataacatgcatttaacaattcctgtgtatattgtacctacatgcatcacgagctctttgacaaatgtttgttgagtgtgtcaatgtgctaggttcttgttggaaacatggaggggacaccttctgcatcccataataaccttgcaaagagatgataacatccattgtatgcacgcactcaggctcacaaaggtagataaaccatccagagccacctgccaggttggcatgacaccagaaggaagaccacggaatacgtcctggtggagatgtggagagaaacattttttatagcaggatcacagaatctcacgctgttttcttcctccttttctttgcagatgacagacaaccttctgtgccttcatcaagctggttgtgtacccaccatgtccctggcgacaggatgggaaagaaaaagccctaattaaggatcgtcagaaaccacagttggaggaggacggcagagacagtttccctccccgctataccaacacccttccttcgaggtcctcgctcctgagggaccctggactgtcacagagattaatgaccccttatcttctttggatgtgaaaggaaatcactggttaaagcttgatcgagagacattatcagctctttaaggattgcaggagaataggctactttattttctgaaaaggtaaatatatgcaagcaaagccaacatgccacgaatggcgttggtctaccacacagccgtgtctgggacacagttgggggtcatcccccagcaggagtgaagtcgagcttagcggcccttgtgtcctcccttggaattcctgccatcccttttgattgagcctccacctctgggatttttcttccatttttctcctctcttaggagggagttcctgctacccatcgtgggaggccaccatcaggactgcgaagatggtgaccctgcggaagaggaccctgaaagtgctcaccttcctcgtgctcttcatcttcctcacctccttcttcctgaactactcccacaccatggtggccaccacctggttccccaagcagatggtcctggagctctccgagaacctgaagagactgatcaagcacaggccttgcacctgcacccactgcatcgggcagcgcaagctctcggcctggttcgatgagaggttcaaccagaccatgcagccgctgctgactgcccagaacgcgctcttggaggacgacacctaccgatggtggctgaggctccagcgggagaagaagcccaataacttgaatgacaccatcaaggagctgttcagagtggtgcctgggaatgtggaccctatgctggagaagaggtcggtgggctgccggcgctgcgccgttgtgggcaactcgggcaacctgagggagtcttcttatgggcctgagatagacagtcacgactttgtcctcaggatgaacaaggcgcccacggcagggtttgaagctgatgttgggaccaagaccacccaccatctggtgtaccctgagagcttccgggagctgggagataatgtcagcatgatcctggtgcccttcaagaccatcgacttggagtgggtggtgagcgccatcaccacgggcaccatttcccacacctacatcccggttcctgcaaagatcagagtgaaacaggataagatcctgatctaccacccagccttcatcaagtatgtctttgacaactggctgcaagggcacgggcgatacccatctaccggcatcctctcggtcatcttctcaatgcatgtctgcgatgaggtggacttgtacggcttcggggcagacagcaaagggaactggcaccactactgggagaacaacccatccgcgggggcttttcgcaagacgggggtgcacgatgcagactttgagtctaacgtgacggccaccttggcctccatcaataaaatccggatcttcaaggggagatgacgcagtgaagggctgaggatggacgcactgtcacacctctgcatttccagccccagcatcttgctggagccgttccatcccggagcttggaggggcagcctcaggtgtgtgcctgggcaccgctcacagcctcttgcacccagccgttggcagcatctactcagcaaggtcactaagctctgccagcgtggcagagcatgtcttggaacctgtcttgagtggggacaacgtccccccactgctgccctagagctggggagacgctgggaaaggttcaacctccacacactaaaatcattttggctcctggggcaagcttggggaatgaatgtggaagatgcctatattctgagagacaggacagtttcccaggaagatgggcagagacttgagtggcgattacctccagcacagagacgtgccaggcggtgttggcgctcggggcgagatgctgcccttctttgcacgaagcctggcctcttgcttggcgtgataaccctgtcatcttcccaaagctcatttatgagccaccagaggctcctaccccaaagattttcacagaaacttgaggccaggtgccatggctcacacctgtaatctgaacactttgggaggccgaggcgggaggatcacttgagcccaggagttcaagaccagcctgggcaacatagtgagactcctgtctctacaaaaataaaagatttaaaaaaattagccaggcacggtggcacacacttgtagccccagctactagggaggctgaggagggaggatctcttgtgcctaggagttcgaggctgcagtgggctgtgatcacaccactgcactccagcctgggcaacagagtgagaccctgtctctgaaaaaaaaa

SEQ ID NO: 324628 - DNA, 1839 bp, Homo sapiens
ctggctcccatccagtgctctttaggtgactctcttctctccccacactgagtggcttgaaagggctcagaggcttcacatgagcacttaacatttactgtgtatatctgagccaagtagggaaagaaactgtctcaccaatcctcacgccctctccccatgctaagtctcccgagtattttcttctgtttttcagatgaagaaactgaggttcagagaggttaagagactccactgaggtcacacagccgaggctccagcgggagaagaagcccaataacttgaatgacaccatcaaggagctgttcagagtggtgcctgggaatgtggaccctatgctggagaagaggtcggtgggctgccggcgctgcgccgttgtgggcaactcgggcaacctgagggagtcttcttatgggcctgagatagacagtcacgactttgtcctcaggatgaacaaggcgcccacggcagggtttgaagctgatgttgggaccaagaccacccaccatctggtgtaccctgagagcttccgggagctgggagataatgtcagcatgatcctggtgcccttcaagaccatcgacttggagtgggtggtgagcgccatcaccacgggcaccatttcccacacctacatcccggttcctgcaaagatcagagtgaaacaggataagatcctgatctaccacccagccttcatcaagtatgtctttgacaactggctgcaagggcacgggcgatacccatctaccggcatcctctcggtcatcttctcaatgcatgtctgcgatgaggtggacttgtacggcttcggggcagacagcaaagggaactggcaccactactgggagaacaacccatccgcgggggcttttcgcaagacgggggtgcacgatgcagactttgagtctaacgtgacggccaccttggcctccatcaataaaatccggatcttcaaggggagatgacgcagtgaagggctgaggatggacgcactgtcacacctctgcatttccagccccagcatcttgctggagccgttccatcccggagcttggaggggcagcctcaggtgtgtgcctgggcaccgctcacagcctcttgcacccagccgttggcagcatctactcagcaaggtcactaagctctgccagcgtggcagagcatgtcttggaacctgtcttgagtggggacaacgtccccccactgctgccctagagctggggagacgctgggaaaggttcaacctccacacactaaaatcattttggctcctggggcaagcttggggaatgaatgtggaagatgcctatattctgagagacaggacagtttcccaggaagatgggcagagacttgagtggcgattacctccagcacagagacgtgccaggcggtgttggcgctcggggcgagatgctgcccttctttgcacgaagcctggcctcttgcttggcgtgataaccctgtcatcttcccaaagctcatttatgagccaccagaggctcctaccccaaagattttcacagaaacttgaggccaggtgccatggctcacacctgtaatctgaacactttgggaggccgaggcgggaggatcacttgagcccaggagttcaagaccagcctgggcaacatagtgagactcctgtctctacaaaaataaaagatttaaaaaaattagccaggcacggtggcacacacttgtagccccagctactagggaggctgaggagggaggatctcttgtgcctaggagttcgaggctgcagtgggctgtgatcacaccactgcactccagcctgggcaacagagtgagaccctgtctctgaaaaaaaaa

SEQ ID NO: 324629 - DNA, 886 bp, Homo sapiens
ctggctcccatccagtgctctttaggtgactctcttctctccccacactgagtggcttgaaagggctcagaggcttcacatgagcacttaacatttactgtgtatatctgagccaagtagggaaagaaactgtctcaccaatcctcacgccctctccccatgctaagtctcccgagtattttcttctgtttttcagatgaagaaactgaggttcagagaggttaagagactccactgaggtcacacagccggtaagtggcagagctgggattcgaacccagctctctttcactccagaacctgtgctctaaattgccttgctttctttgccttaaaaaggggagacctgcgactttgttttctgttttgatggtactcacacagattcctgggttgaaaggagagggcccctgggtccaaaaattcagaagggtggtggcatttgagaaaaacatccccattcccagtgggtgccgtggccgggacaaacccggagcttaggcgcacctgggttcaggatcgagctcactgtagccagcaggagcctgggtctgttctcccaggagggttgctccgaggccccaggagctctaggaaccagacccctgggaccccacagcagggcccaggtgcctcgtcgtgtgctgtgtgcctcacattctgcctcagccacagaggagcccggcaggcaggactcaatctcactcagcaccactctggatggttgcgtagttacaccgtgtggttgtagtatttatggtttagttgttttgcaaaagccaaaggaagtctgtgggctgagttctaccttcccttctttgaggatagttggtctgctcagtcagggacaagcagagctcagctagagaaaaaaaaaaccctccaa

SEQ ID NO: 324630 - DNA, 2721 bp, Homo sapiens
ctggctcccatccagtgctctttaggtgactctcttctctccccacactgagtggcttgaaagggctcagaggcttcacatgagcacttaacatttactgtgtatatctgagccaagtagggaaagaaactgtctcaccaatcctcacgccctctccccatgctaagtctcccgagtattttcttctgtttttcagatgaagaaactgaggttcagagaggttaagagactccactgaggtcacacagccgatgacagacaaccttctgtgccttcatcaagctggttgtgtacccaccatgtccctggcgacaggatgggaaagaaaaagccctaattaaggatcgtcagaaaccacagttggaggaggacggcagagacagtttccctccccgctataccaacacccttccttcgaggtcctcgctcctgagggaccctggactgtcacagagattaatgaccccttatcttctttggatgtgaaaggaaatcactggttaaagcttgatcgagagacattatcagctctttaaggattgcaggagaataggctactttattttctgaaaaggtaaatatatgcaagcaaagccaacatgccacgaatggcgttggtctaccacacagccgtgtctgggacacagttgggggtcatcccccagcaggagtgaagtcgagcttagcggcccttgtgtcctcccttggaattcctgccatcccttttgattgagcctccacctctgggatttttcttccatttttctcctctcttaggagggagttcctgctacccatcgtgggaggccaccatcaggactgcgaagatggtgaccctgcggaagaggaccctgaaagtgctcaccttcctcgtgctcttcatcttcctcacctccttcttcctgaactactcccacaccatggtggccaccacctggttccccaagcagatggtcctggagctctccgagaacctgaagagactgatcaagcacaggccttgcacctgcacccactgcatcgggcagcgcaagctctcggcctggttcgatgagaggttcaaccagaccatgcagccgctgctgactgcccagaacgcgctcttggaggacgacacctaccgatggtggctgaggctccagcgggagaagaagcccaataacttgaatgacaccatcaaggagctgttcagagtggtgcctgggaatgtggaccctatgctggagaagaggtcggtgggctgccggcgctgcgccgttgtgggcaactcgggcaacctgagggagtcttcttatgggcctgagatagacagtcacgactttgtcctcaggatgaacaaggcgcccacggcagggtttgaagctgatgttgggaccaagaccacccaccatctggtgtaccctgagagcttccgggagctgggagataatgtcagcatgatcctggtgcccttcaagaccatcgacttggagtgggtggtgagcgccatcaccacgggcaccatttcccacacctacatcccggttcctgcaaagatcagagtgaaacaggataagatcctgatctaccacccagccttcatcaagtatgtctttgacaactggctgcaagggcacgggcgatacccatctaccggcatcctctcggtcatcttctcaatgcatgtctgcgatgaggtggacttgtacggcttcggggcagacagcaaagggaactggcaccactactgggagaacaacccatccgcgggggcttttcgcaagacgggggtgcacgatgcagactttgagtctaacgtgacggccaccttggcctccatcaataaaatccggatcttcaaggggagatgacgcagtgaagggctgaggatggacgcactgtcacacctctgcatttccagccccagcatcttgctggagccgttccatcccggagcttggaggggcagcctcaggtgtgtgcctgggcaccgctcacagcctcttgcacccagccgttggcagcatctactcagcaaggtcactaagctctgccagcgtggcagagcatgtcttggaacctgtcttgagtggggacaacgtccccccactgctgccctagagctggggagacgctgggaaaggttcaacctccacacactaaaatcattttggctcctggggcaagcttggggaatgaatgtggaagatgcctatattctgagagacaggacagtttcccaggaagatgggcagagacttgagtggcgattacctccagcacagagacgtgccaggcggtgttggcgctcggggcgagatgctgcccttctttgcacgaagcctggcctcttgcttggcgtgataaccctgtcatcttcccaaagctcatttatgagccaccagaggctcctaccccaaagattttcacagaaacttgaggccaggtgccatggctcacacctgtaatctgaacactttgggaggccgaggcgggaggatcacttgagcccaggagttcaagaccagcctgggcaacatagtgagactcctgtctctacaaaaataaaagatttaaaaaaattagccaggcacggtggcacacacttgtagccccagctactagggaggctgaggagggaggatctcttgtgcctaggagttcgaggctgcagtgggctgtgatcacaccactgcactccagcctgggcaacagagtgagaccctgtctctgaaaaaaaaa

SEQ ID NO: 324631 - DNA, 2747 bp, Homo sapiens
gcagagggagtcagccgtgaccctgagggcagtgactggctcgccgcgtccctgcatcaggcattcgcccggctttctcgtgattgtttccgggcacccctggcctctcccgacttctccccctcgcgggtccccaagccccgcaagtttgcgacgagctggttctccagggagacagcgagcgcccacccccgctctgcggctgggtgtgtgtggtgagaggaagagacgggaggaggaggcgaggccgactcgccaacgaggaaaacgggttggtaccattttcagatttcatcttcctaaactggaaatgtcaatgagaggaaattaacacccccaagagctgcagtgagcaaatgcattgagcttgggtcaggacaattccatttggggaccagagatggacggtcactcagcctatggagatgaagaaactgaggttcagagaggttaagagactccactgaggtcacacagccgatgacagacaaccttctgtgccttcatcaagctggttgtgtacccaccatgtccctggcgacaggatgggaaagaaaaagccctaattaaggatcgtcagaaaccacagttggaggaggacggcagagacagtttccctccccgctataccaacacccttccttcgaggtcctcgctcctgagggaccctggactgtcacagagattaatgaccccttatcttctttggatgtgaaaggaaatcactggttaaagcttgatcgagagacattatcagctctttaaggattgcaggagaataggctactttattttctgaaaaggagggagttcctgctacccatcgtgggaggccaccatcaggactgcgaagatggtgaccctgcggaagaggaccctgaaagtgctcaccttcctcgtgctcttcatcttcctcacctccttcttcctgaactactcccacaccatggtggccaccacctggttccccaagcagatggtcctggagctctccgagaacctgaagagactgatcaagcacaggccttgcacctgcacccactgcatcgggcagcgcaagctctcggcctggttcgatgagaggttcaaccagaccatgcagccgctgctgactgcccagaacgcgctcttggaggacgacacctaccgatggtggctgaggctccagcgggagaagaagcccaataacttgaatgacaccatcaaggagctgttcagagtggtgcctgggaatgtggaccctatgctggagaagaggtcggtgggctgccggcgctgcgccgttgtgggcaactcgggcaacctgagggagtcttcttatgggcctgagatagacagtcacgactttgtcctcaggatgaacaaggcgcccacggcagggtttgaagctgatgttgggaccaagaccacccaccatctggtgtaccctgagagcttccgggagctgggagataatgtcagcatgatcctggtgcccttcaagaccatcgacttggagtgggtggtgagcgccatcaccacgggcaccatttcccacacctacatcccggttcctgcaaagatcagagtgaaacaggataagatcctgatctaccacccagccttcatcaagtatgtctttgacaactggctgcaagggcacgggcgatacccatctaccggcatcctctcggtcatcttctcaatgcatgtctgcgatgaggtggacttgtacggcttcggggcagacagcaaagggaactggcaccactactgggagaacaacccatccgcgggggcttttcgcaagacgggggtgcacgatgcagactttgagtctaacgtgacggccaccttggcctccatcaataaaatccggatcttcaaggggagatgacgcagtgaagggctgaggatggacgcactgtcacacctctgcatttccagccccagcatcttgctggagccgttccatcccggagcttggaggggcagcctcaggtgtgtgcctgggcaccgctcacagcctcttgcacccagccgttggcagcatctactcagcaaggtcactaagctctgccagcgtggcagagcatgtcttggaacctgtcttgagtggggacaacgtccccccactgctgccctagagctggggagacgctgggaaaggttcaacctccacacactaaaatcattttggctcctggggcaagcttggggaatgaatgtggaagatgcctatattctgagagacaggacagtttcccaggaagatgggcagagacttgagtggcgattacctccagcacagagacgtgccaggcggtgttggcgctcggggcgagatgctgcccttctttgcacgaagcctggcctcttgcttggcgtgataaccctgtcatcttcccaaagctcatttatgagccaccagaggctcctaccccaaagattttcacagaaacttgaggccaggtgccatggctcacacctgtaatctgaacactttgggaggccgaggcgggaggatcacttgagcccaggagttcaagaccagcctgggcaacatagtgagactcctgtctctacaaaaataaaagatttaaaaaaattagccaggcacggtggcacacacttgtagccccagctactagggaggctgaggagggaggatctcttgtgcctaggagttcgaggctgcagtgggctgtgatcacaccactgcactccagcctgggcaacagagtgagaccctgtctctgaaaaaaaaa

SEQ ID NO: 324632 - DNA, 2976 bp, Homo sapiens
ccggccccggccggccagggaaggcggcccctcctcggtcgccccgcctttcactcccgttacacccgggggaaggtgttcccgagccctctcccaccctcatcccgcctcctcgcttcctcggctccagcctccgccggcggagcccactatgccagacagtttcgacactttgcaaagacaaagagccctagaccggagggaggaggaggaggaagaagagcggagagagaaggaagaggcgatgtgagctgggaagggggcaagtgtccgggacacccacacccctgtattctcctccgaaccccttcatgcccaaatcccggaaactccagcgtgtctccagccgtgttggtaccattttcagatttcatcttcctaaactggaaatgtcaatgagaggaaattaacacccccaagagctgcagtgagcaaatgcattgagcttgggtcaggacaattccatttggggaccagagatggacggtcactcagcctatggagatgaagaaactgaggttcagagaggttaagagactccactgaggtcacacagccgatgacagacaaccttctgtgccttcatcaagctggttgtgtacccaccatgtccctggcgacaggatgggaaagaaaaagccctaattaaggatcgtcagaaaccacagttggaggaggacggcagagacagtttccctccccgctataccaacacccttccttcgaggtcctcgctcctgagggaccctggactgtcacagagattaatgaccccttatcttctttggatgtgaaaggaaatcactggttaaagcttgatcgagagacattatcagctctttaaggattgcaggagaataggctactttattttctgaaaaggtaaatatatgcaagcaaagccaacatgccacgaatggcgttggtctaccacacagccgtgtctgggacacagttgggggtcatcccccagcaggagtgaagtcgagcttagcggcccttgtgtcctcccttggaattcctgccatcccttttgattgagcctccacctctgggatttttcttccatttttctcctctcttaggagggagttcctgctacccatcgtgggaggccaccatcaggactgcgaagatggtgaccctgcggaagaggaccctgaaagtgctcaccttcctcgtgctcttcatcttcctcacctccttcttcctgaactactcccacaccatggtggccaccacctggttccccaagcagatggtcctggagctctccgagaacctgaagagactgatcaagcacaggccttgcacctgcacccactgcatcgggcagcgcaagctctcggcctggttcgatgagaggttcaaccagaccatgcagccgctgctgactgcccagaacgcgctcttggaggacgacacctaccgatggtggctgaggctccagcgggagaagaagcccaataacttgaatgacaccatcaaggagctgttcagagtggtgcctgggaatgtggaccctatgctggagaagaggtcggtgggctgccggcgctgcgccgttgtgggcaactcgggcaacctgagggagtcttcttatgggcctgagatagacagtcacgactttgtcctcaggatgaacaaggcgcccacggcagggtttgaagctgatgttgggaccaagaccacccaccatctggtgtaccctgagagcttccgggagctgggagataatgtcagcatgatcctggtgcccttcaagaccatcgacttggagtgggtggtgagcgccatcaccacgggcaccatttcccacacctacatcccggttcctgcaaagatcagagtgaaacaggataagatcctgatctaccacccagccttcatcaagtatgtctttgacaactggctgcaagggcacgggcgatacccatctaccggcatcctctcggtcatcttctcaatgcatgtctgcgatgaggtggacttgtacggcttcggggcagacagcaaagggaactggcaccactactgggagaacaacccatccgcgggggcttttcgcaagacgggggtgcacgatgcagactttgagtctaacgtgacggccaccttggcctccatcaataaaatccggatcttcaaggggagatgacgcagtgaagggctgaggatggacgcactgtcacacctctgcatttccagccccagcatcttgctggagccgttccatcccggagcttggaggggcagcctcaggtgtgtgcctgggcaccgctcacagcctcttgcacccagccgttggcagcatctactcagcaaggtcactaagctctgccagcgtggcagagcatgtcttggaacctgtcttgagtggggacaacgtccccccactgctgccctagagctggggagacgctgggaaaggttcaacctccacacactatattctgagagacaggacagtttcccaggaagatgggcagagacttgagtggcgattacctccagcacagagacgtgccaggcggtgttggcgctcggggcgagatgctgcccttctttgcacgaagcctggcctcttgcttggcgtgataaccctgtcatcttcccaaagctcatttatgagccaccagaggctcctaccccaaagattttcacagaaacttgaggccaggtgccatggctcacacctgtaatctgaacactttgggaggccgaggcgggaggatcacttgagcccaggagttcaagaccagcctgggcaacatagtgagactcctgtctctacaaaaataaaagatttaaaaaaattagccaggcacggtggcacacacttgtagccccagctactagggaggctgaggagggaggatctcttgtgcctaggagttcgaggctgcagtgggctgtgatcacaccactgcactccagcctgggcaacagagtgagaccctgtctctgaaaaaaaaa

SEQ ID NO: 324633 - DNA, 2654 bp, Homo sapiens
tacatttctatgggagggactgatgctgtcatcagggagcttgggggacaggcttcttggagtgtccccctggtgggacctggaatgtgttgaacttggctgagtggtgcaagggatcccctggtgccatccctgccaaagaccctatcagtgtcatgagcctgaggatgaaatctcccgatggatgacagacaaccttctgtgccttcatcaagctggttgtgtacccaccatgtccctggcgacaggatgggaaagaaaaagccctaattaaggatcgtcagaaaccacagttggaggaggacggcagagacagtttccctccccgctataccaacacccttccttcgaggtcctcgctcctgagggaccctggactgtcacagagattaatgaccccttatcttctttggatgtgaaaggaaatcactggttaaagcttgatcgagagacattatcagctctttaaggattgcaggagaataggctactttattttctgaaaaggtaaatatatgcaagcaaagccaacatgccacgaatggcgttggtctaccacacagccgtgtctgggacacagttgggggtcatcccccagcaggagtgaagtcgagcttagcggcccttgtgtcctcccttggaattcctgccatcccttttgattgagcctccacctctgggatttttcttccatttttctcctctcttaggagggagttcctgctacccatcgtgggaggccaccatcaggactgcgaagatggtgaccctgcggaagaggaccctgaaagtgctcaccttcctcgtgctcttcatcttcctcacctccttcttcctgaactactcccacaccatggtggccaccacctggttccccaagcagatggtcctggagctctccgagaacctgaagagactgatcaagcacaggccttgcacctgcacccactgcatcgggcagcgcaagctctcggcctggttcgatgagaggttcaaccagaccatgcagccgctgctgactgcccagaacgcgctcttggaggacgacacctaccgatggtggctgaggctccagcgggagaagaagcccaataacttgaatgacaccatcaaggagctgttcagagtggtgcctgggaatgtggaccctatgctggagaagaggtcggtgggctgccggcgctgcgccgttgtgggcaactcgggcaacctgagggagtcttcttatgggcctgagatagacagtcacgactttgtcctcaggatgaacaaggcgcccacggcagggtttgaagctgatgttgggaccaagaccacccaccatctggtgtaccctgagagcttccgggagctgggagataatgtcagcatgatcctggtgcccttcaagaccatcgacttggagtgggtggtgagcgccatcaccacgggcaccatttcccacacctacatcccggttcctgcaaagatcagagtgaaacaggataagatcctgatctaccacccagccttcatcaagtatgtctttgacaactggctgcaagggcacgggcgatacccatctaccggcatcctctcggtcatcttctcaatgcatgtctgcgatgaggtggacttgtacggcttcggggcagacagcaaagggaactggcaccactactgggagaacaacccatccgcgggggcttttcgcaagacgggggtgcacgatgcagactttgagtctaacgtgacggccaccttggcctccatcaataaaatccggatcttcaaggggagatgacgcagtgaagggctgaggatggacgcactgtcacacctctgcatttccagccccagcatcttgctggagccgttccatcccggagcttggaggggcagcctcaggtgtgtgcctgggcaccgctcacagcctcttgcacccagccgttggcagcatctactcagcaaggtcactaagctctgccagcgtggcagagcatgtcttggaacctgtcttgagtggggacaacgtccccccactgctgccctagagctggggagacgctgggaaaggttcaacctccacacactaaaatcattttggctcctggggcaagcttggggaatgaatgtggaagatgcctatattctgagagacaggacagtttcccaggaagatgggcagagacttgagtggcgattacctccagcacagagacgtgccaggcggtgttggcgctcggggcgagatgctgcccttctttgcacgaagcctggcctcttgcttggcgtgataaccctgtcatcttcccaaagctcatttatgagccaccagaggctcctaccccaaagattttcacagaaacttgaggccaggtgccatggctcacacctgtaatctgaacactttgggaggccgaggcgggaggatcacttgagcccaggagttcaagaccagcctgggcaacatagtgagactcctgtctctacaaaaataaaagatttaaaaaaattagccaggcacggtggcacacacttgtagccccagctactagggaggctgaggagggaggatctcttgtgcctaggagttcgaggctgcagtgggctgtgatcacaccactgcactccagcctgggcaacagagtgagaccctgtctctgaaaaaaaaa

SEQ ID NO: 324634 - DNA, 2646 bp, Homo sapiens
agttcgacggagactctcattgattggtaccattttcagatttcatcttcctaaactggaaatgtcaatgagaggaaattaacacccccaagagctgcagtgagcaaatgcattgagcttgggtcaggacaattccatttggggaccagagatggacggtcactcagcctatggagatgacagacaaccttctgtgccttcatcaagctggttgtgtacccaccatgtccctggcgacaggatgggaaagaaaaagccctaattaaggatcgtcagaaaccacagttggaggaggacggcagagacagtttccctccccgctataccaacacccttccttcgaggtcctcgctcctgagggaccctggactgtcacagagattaatgaccccttatcttctttggatgtgaaaggaaatcactggttaaagcttgatcgagagacattatcagctctttaaggattgcaggagaataggctactttattttctgaaaaggtaaatatatgcaagcaaagccaacatgccacgaatggcgttggtctaccacacagccgtgtctgggacacagttgggggtcatcccccagcaggagtgaagtcgagcttagcggcccttgtgtcctcccttggaattcctgccatcccttttgattgagcctccacctctgggatttttcttccatttttctcctctcttaggagggagttcctgctacccatcgtgggaggccaccatcaggactgcgaagatggtgaccctgcggaagaggaccctgaaagtgctcaccttcctcgtgctcttcatcttcctcacctccttcttcctgaactactcccacaccatggtggccaccacctggttccccaagcagatggtcctggagctctccgagaacctgaagagactgatcaagcacaggccttgcacctgcacccactgcatcgggcagcgcaagctctcggcctggttcgatgagaggttcaaccagaccatgcagccgctgctgactgcccagaacgcgctcttggaggacgacacctaccgatggtggctgaggctccagcgggagaagaagcccaataacttgaatgacaccatcaaggagctgttcagagtggtgcctgggaatgtggaccctatgctggagaagaggtcggtgggctgccggcgctgcgccgttgtgggcaactcgggcaacctgagggagtcttcttatgggcctgagatagacagtcacgactttgtcctcaggatgaacaaggcgcccacggcagggtttgaagctgatgttgggaccaagaccacccaccatctggtgtaccctgagagcttccgggagctgggagataatgtcagcatgatcctggtgcccttcaagaccatcgacttggagtgggtggtgagcgccatcaccacgggcaccatttcccacacctacatcccggttcctgcaaagatcagagtgaaacaggataagatcctgatctaccacccagccttcatcaagtatgtctttgacaactggctgcaagggcacgggcgatacccatctaccggcatcctctcggtcatcttctcaatgcatgtctgcgatgaggtggacttgtacggcttcggggcagacagcaaagggaactggcaccactactgggagaacaacccatccgcgggggcttttcgcaagacgggggtgcacgatgcagactttgagtctaacgtgacggccaccttggcctccatcaataaaatccggatcttcaaggggagatgacgcagtgaagggctgaggatggacgcactgtcacacctctgcatttccagccccagcatcttgctggagccgttccatcccggagcttggaggggcagcctcaggtgtgtgcctgggcaccgctcacagcctcttgcacccagccgttggcagcatctactcagcaaggtcactaagctctgccagcgtggcagagcatgtcttggaacctgtcttgagtggggacaacgtccccccactgctgccctagagctggggagacgctgggaaaggttcaacctccacacactaaaatcattttggctcctggggcaagcttggggaatgaatgtggaagatgcctatattctgagagacaggacagtttcccaggaagatgggcagagacttgagtggcgattacctccagcacagagacgtgccaggcggtgttggcgctcggggcgagatgctgcccttctttgcacgaagcctggcctcttgcttggcgtgataaccctgtcatcttcccaaagctcatttatgagccaccagaggctcctaccccaaagattttcacagaaacttgaggccaggtgccatggctcacacctgtaatctgaacactttgggaggccgaggcgggaggatcacttgagcccaggagttcaagaccagcctgggcaacatagtgagactcctgtctctacaaaaataaaagatttaaaaaaattagccaggcacggtggcacacacttgtagccccagctactagggaggctgaggagggaggatctcttgtgcctaggagttcgaggctgcagtgggctgtgatcacaccactgcactccagcctgggcaacagagtgagaccctgtctctgaaaaaaaaa

SEQ ID NO: 324635 - DNA, 1881 bp, Homo sapiens
tgagaggtgaatggtttaccagagacccacagaatccacccttccagtccattcctaggggctggagtttggctttctggacgtgcacgccctctcctgcctgagaattccctttcgttgtgctcaaggcaggctttgggtggtggaatcaaggccaggcctgatatcggcctcctcccagctcagccactgctggctgtgtgacattgggcagatcacttagcctctctgggcttcagttttcttatctgcagcatgaggagagggaaacctgggacatgaggtcattttaaggattggcgatgattccagccatcatcaggtggcttggtgcatatgtcttcactcactgacagtgtctagtcccacctcacactgttccctggagcccccttctcctgagcagcctcccatctcactccctggcctccttggatttttctgtgtgtcagctcagtgatcctcctcacacggtcctgtagggccctcctctgcatcattgctctccatagcacttattagctcagcacctctgtctcttagtgatgtggatgagtgtccatctttcctacgagcatggaagcccacaagtgcaggcgtatctattaggctcatggctgtgcctccatggccacaacagtatgtacatctgacaggcgctccatgtcctttgccccccagaactcactaagggccgtgtcttcccatccccgcagatcctgatctaccacccagccttcatcaagtatgtctttgacaactggctgcaagggcacgggcgatacccatctaccggcatcctctcggtcatcttctcaatgcatgtctgcgatgaggtggacttgtacggcttcggggcagacagcaaagggaactggcaccactactgggagaacaacccatccgcgggggcttttcgcaagacgggggtgcacgatgcagactttgagtctaacgtgacggccaccttggcctccatcaataaaatccggatcttcaaggggagatgacgcagtgaagggctgaggatggacgcactgtcacacctctgcatttccagccccagcatcttgctggagccgttccatcccggagcttggaggggcagcctcaggtgtgtgcctgggcaccgctcacagcctcttgcacccagccgttggcagcatctactcagcaaggtcactaagctctgccagcgtggcagagcatgtcttggaacctgtcttgagtggggacaacgtccccccactgctgccctagagctggggagacgctgggaaaggttcaacctccacacactaaaatcattttggctcctggggcaagcttggggaatgaatgtggaagatgcctatattctgagagacaggacagtttcccaggaagatgggcagagacttgagtggcgattacctccagcacagagacgtgccaggcggtgttggcgctcggggcgagatgctgcccttctttgcacgaagcctggcctcttgcttggcgtgataaccctgtcatcttcccaaagctcatttatgagccaccagaggctcctaccccaaagattttcacagaaacttgaggccaggtgccatggctcacacctgtaatctgaacactttgggaggccgaggcgggaggatcacttgagcccaggagttcaagaccagcctgggcaacatagtgagactcctgtctctacaaaaataaaagatttaaaaaaattagccaggcacggtggcacacacttgtagccccagctactagggaggctgaggagggaggatctcttgtgcctaggagttcgaggctgcagtgggctgtgatcacaccactgcactccagcctgggcaacagagtgagaccctgtctctgaaaaaaaaa

SEQ ID NO: 324636 - DNA, 1818 bp, Homo sapiens
ttgtacaaacataaaaatatacaaaagctattgtctacttgaaatttatagttaataaaagcattataaatgtaatttctgttgaaagaccttttagaaaatataggccattaaagtgaagaatagtcttaagacagagaatacaaagataaagagggctctagtacctgtacttgtatcccagaacttactatatgcattttgtactagaggaaaactctgaagcagttgcttaaactttgttcaacatcagagaatttatattggagagaaatcctacaaatgtaataaatgtggaaaaacctctgttcagaaactgcaggttaagaaaccagaggccaggcgcggtggctcacgcctgtaatcccaacactttgggaggccaaggagggtggatcacctgaggtcgggagttcaaggacagcctgaccaatatggagaaacctcgtctgtactaaaaatacaaaaattagcaggacatggtggtgcatggctgtaatcccagctactcaggaggctgagacaggagaatggcttgaacccaggaggtggaggttgcggtgagctgagaatcgtgccattgcactccagcctgggtaacaagagtgaaactctgtctcaaaacaagataaaaagaaaagaaacaccagagaatttttactagaatataatttgtaggtgcagtaaatgtgaagaaatatttaggctaaaattaagactatgtaaacatcagaggatttacagtagaaagaactaaggaactaacacttcagactttaaaataaatcagagtattaagtataacaaaagttgaacctgttagaaaatttccttgtatataagttgaaaagtaggtttttgaagagatatattcgaaatatattttttcacttgaaaaaagtaaaaatttttttcaaaagcaaataattcaactctaaaattatactatttcaacattctcatttatgtgaaagcatgtgataaattgttgctgcgtcagagatatgagaaactcctttgcattaggtgggcattattcatagacttctacatgaaagagaagagaaataaaagatgcaccaggaaaatctgagcagagaggcttttagtggttgacttactgagtgatgcctgaagtaggtgttcagagtaatactttgcgttatactgagagagaatctgaattttagtagtaaattgttttgccaactgtatatttatgtaataagtgcaataaaatgcagtaaattttaaaattctcttaagataatgtgtgaacttaatttttgaaataaaaattgttattgtgttaaaatttttgtgccgtgaatgaagtgttttattatgccaccaactttcacctatccaaccttactcaagggtgtacgttaaagatggtaacaatgtactatctggtaatataattgaatgacatctctagtcttttttagtggctttcaacagcaaataaattgaagaatattgtttgcatgttacatttttattcttattgaaatttttcaaaaggttttgtgagtacatagtatgtgtatatatttatggtatatatgggttattttgatacaggcatacagtatgtaataatcacaccacagtaaatgagttattatcacctcaagcatttatcctttgtattacacacaatccagttacacactttaattatttttaactacaggtcattttatgtttgtaataaacattcatacattcctgagtcttgaatacttttaaaaaatgtttcatatatatctttgaacatgtggcatgtcctcctgcaaacacatacagacattt

SEQ ID NO: 324637 - DNA, 1060 bp, Homo sapiens
caaagcctttggatggtccatagccctgaatcaacacaagaaaattcatactggagaaaaaccttacaaatgtgaagagtgtggcaaagcctttagtaggtcaagaaaccttactacacataggagagttcacactagggagaaaccctacaaatgtgaagatcgtggcagatcctttggatggtccacaaacctgaacgaatataagaaaattcatactggagataaactctacaaatgtaaagaatgtgggaaagtgtttaaacagtcctcacacctgaatagacatgagaaaattcatactggaaagaaaccctacaaatgtaaggaatgtggcaaagtcattacgtcatcctcaagctttgctaaacataagaggattcatacaggtgagaaaccctttaaatgtttagaatgtggtaaagcgtttactagttccacaacccttactaaacataggagaattcatactggagagaaaccctacacatgtgaagaatgtggcaaagcctttagacagtcagcaatcctttatgtacataggagaattcatactggagagaaaccctacacatgtggagaatgtggcaaaacctttagacagtctgcaaatctttatgcgcataagaaaattcatactggagagaaaccctacacgtgtggagactgtggcaaaacctttagacagtctgcaaatctttatgcacataagaaaattcatactggagataaaaccatacaagtgtaaagaatgtggcaaagcctttaagtcatactacagcattcttaaacataagagaactcataccaggggaatgtcttacgaaggtgacgaatgtcgcggtctttaaatgctcctcaatcctttctaatcataagataattcataatgaagagaaactctaaaatgtgaaacacatgtgagaaggcttttaatcacacctcaatctgttgtagacataagagtaattatattgatgagaagccaaattaaaattaaaaatgtggcaaagacttccaattctagtcagttcttaatgtaattcctactgaagaaaac

SEQ ID NO: 324638 - DNA, 2204 bp, Homo sapiens
caaagcctttggatggtccatagccctgaatcaacacaagaaaattcatactggagaaaaaccttacaaatgtgaagagtgtggcaaagcctttagtaggtcaagaaaccttactacacataggagagttcacactagggagaaaccctacaaatgtgaagatcgtggcagatcctttggatggtccacaaacctgaacgaatataagaaaattcatactggagataaactctacaaatgtaaagaatgtgggaaagtgtttaaacagtcctcacacctgaatagacatgagaaaattcatactggaaagaaaccctacaaatgtaaggaatgtggcaaagtcattacgtcatcctcaagctttgctaaacataagaggattcatacaggtgagaaaccctttaaatgtttagaatgtggtaaagcgtttactagttccacaacccttactaaacataggagaattcatactggagagaaaccctacacatgtgaagaatgtggcaaagcctttagacagtcagcaatcctttatgtacataggagaattcatactggagagaaaccctacacatgtggagaatgtggcaaaacctttagacagtctgcaaatctttatgcgcataagaaaattcatactggagagaaaccctacacgtgtggagactgtggcaaaacctttagacagtctgcaaatctttatgcacataagaaaattcatactggagataaaaccatacaagtgtaaagaatgtggcaaagcctttaagtcatactacagcattcttaaacataagagaactcataccaggggaatgtcttacgaaggtgacgaatgtcgcggtctttaaatgctcctcaatcctttctaatcataagataattcataatgaagagaaactctaaaatgtgaaacacatgtgagaaggcttttaatcacacctcaatctgttgtagacataagagtaattatattgatgagaagccaaaagtgaaactctgtctcaaaacaagataaaaagaaaagaaacaccagagaatttttactagaatataatttgtaggtgcagtaaatgtgaagaaatatttaggctaaaattaagactatgtaaacatcagaggatttacagtagaaagaactaaggaactaacacttcagactttaaaataaatcagagtattaagtataacaaaagttgaacctgttagaaaatttccttgtatataagttgaaaagtaggtttttgaagagatatattcgaaatatattttttcacttgaaaaaagtaaaaatttttttcaaaagcaaataattcaactctaaaattatactatttcaacattctcatttatgtgaaagcatgtgataaattgttgctgcgtcagagatatgagaaactcctttgcattaggtgggcattattcatagacttctacatgaaagagaagagaaataaaagatgcaccaggaaaatctgagcagagaggcttttagtggttgacttactgagtgatgcctgaagtaggtgttcagagtaatactttgcgttatactgagagagaatctgaattttagtagtaaattgttttgccaactgtatatttatgtaataagtgcaataaaatgcagtaaattttaaaattctcttaagataatgtgtgaacttaatttttgaaataaaaattgttattgtgttaaaatttttgtgccgtgaatgaagtgttttattatgccaccaactttcacctatccaaccttactcaagggtgtacgttaaagatggtaacaatgtactatctggtaatataattgaatgacatctctagtcttttttagtggctttcaacagcaaataaattgaagaatattgtttgcatgttacatttttattcttattgaaatttttcaaaaggttttgtgagtacatagtatgtgtatatatttatggtatatatgggttattttgatacaggcatacagtatgtaataatcacaccacagtaaatgagttattatcacctcaagcatttatcctttgtattacacacaatccagttacacactttaattatttttaactacaggtcattttatgtttgtaataaacattcatacattcctgagtcttgaatacttttaaaaaatgtttcatatatatctttgaacatgtggcatgtcctcctgcaaacacatacagacattt

SEQ ID NO: 324639 - DNA, 281 bp, Homo sapiens
ctcataccttttctctgcacacacagatacatgtatattttagccttggtaatttatatgcttctctgtggtcctggctcatcctttttgttgagtcatcgcatggcaggagtgcaagagagtgaacccagtcctgcaagatccaaggcgctttcaaaccataacaaattctaaacttaggtgtatagagtagaataggttaatatattaacaaatgtgcattgagtgtttgcattggccaaggcatgcaaatgtctcagtataaaatcagacagatttta

SEQ ID NO: 324640 - DNA, 736 bp, Homo sapiens
aaagaggcgccgcgccagttttgtgacgttcagcacggggcggtggcgggggctcccggcccattcggagggtttcctagtcttggagtggaagaattaatattcctcattggggcatgagccaggatgggggttacctgggagttgggaaccacaaaggggagccgatagccgagttgtattccaggtcacggcctttttatttttatggcgccttttttttttttggcccctcatttaattgggaagcttctcagaatgtttttgtaaagtcactaaccaagaccggacctttcagttcatattaaatggcccccgtagtcaccttactttcatgtagtttcagattttgcagcctgaatctaatcacctttttctaagaccgaaagatcttccttgaacttaagattcgttctttcatcgcttccccattaaaatggaggcttaagacaggtgcccagcagtgtttttaaaaattttcaccagtggtttggtcttagaacttactccctgggcacagggtgtggtcacggcaaataggatgtgtctggactggatattttaattagacaagcccagagtaagaagaacgtggtgtttatggaaagcacttcagctgaattattgagtagatggtttttatgtaattgaaactggtctacaagtttatcagattcatcgtcgaagtgactcagtaataaagctttatcaaatacaagtccgccaaggaagaaca

SEQ ID NO: 324641 - DNA, 949 bp, Homo sapiens
gtataaataaaggcgaggagaaggcggtggtccgccatttcgtggacgccgggtgagtgagagagttggttggtgttgggccggaggaaagcgggaagactcatcggagcgtgtggatttgagccgccgcattttttaaccctagatctcgaaatgcatcgtgattcctgtccattggactgtaaggtttatgtaggcaatcttggaaacaatggcaacaagacggaattggaacgggcttttggctactatggaccactccgaagtgtgtgggttgctagaaacccacccggctttgcttttgttgaatttgaagatccccgagatgcagctgatgcagtccgagagctagatggaagaacactatgtggctgccgtgtaagagtggaactgtcgaatggtgaaaaaagaagtagaaatcgtggcccacctccctcttggggtcgtcgccctcgagatgattatcgtaggaggagtcctccacctcgtcgcagatctccaagaaggagaagcttctctcgcagccggagcaggtccctttctagagataggagaagagagagatcgctgtctcgggagagaaatcacaagccgtcccgatccttctctaggtctcgtagtcgatctaggtcaaatgaaaggaaatagaagacagtttgcaagagaagtggtgtacaggaaattacttcatttgacaggagtatgtacagaaaattcaagttttgtttgagacttcataagcttggtgcatttttaagatgttttagctgttcaaatctgtttgtctcttgaaacagtgacacaaaggtgtaattctctatggtttgaaatggatcatacgaggcatgtaataccaagaattgttactttacaatgttcccttaagcaaaattgaatttgctttgaacttttagttatgcacagactgataataaacctctaaacctgc

SEQ ID NO: 324642 - DNA, 1009 bp, Homo sapiens
gtataaataaaggcgaggagaaggcggtggtccgccatttcgtggacgccgggtgagtgagagagttggttggtgttgggccggaggaaagcgggaagactcatcggagcgtgtggatttgagccgccgcattttttaaccctagatctcgaaatgcatcgtgattcctgtccattggactgtaaggtttatgtaggcaatcttggaaacaatggcaacaagacggaattggaacgggcttttggctactatggaccactccgaagtgtgtgggttgctagaaacccacccggctttgcttttgttgaatttgaagatccccgagatgcagctgatgcagtccgagagctagatggaagaacactatgtggctgccgtgtaagagtggaactgtcgaatggtgaaaaaagaagtagaaatcgtggcccacctccctcttggggtcgtcgccctcgagatgattatcgtaggaggagtcctccacctcgtcgcagatctccaagaaggagaagcttctctcgcagccggagcaggtaggtccctttctagagataggagaagagagagatcgctgtctcgggagagaaatcacaagccgtcccgatccttctctaggtctcgtagtcgatctaggtcaaatgaaaggaaatagaagacagtttgcaagagaagtggtgtacaggaaattacttcatttgacaggagtatgtacagaaaattcaagttttgtttgagacttcataagcttggtgcatttttaagatgttttagctgttcaaatctggttggctcttgacaggacacggtgtactcccatggtgcaaggggctatacagggtatacccagatgtcttcaatgttccttaacaaggattggttgcctattttcacacggtatatcctaccgccggggagttttaattaccaacagggaacgcaatactccacgacggaacactaggtgcaccaggcaagtaaccggaaaatctttgttgatacactattatcg

SEQ ID NO: 324643 - DNA, 891 bp, Homo sapiens
  misc_feature (783)..(783): n is a, c, g, or t
gtataaataaaggcgaggagaaggcggtggtccgccatttcgtggacgccgggtgagtgagagagttggttggtgttgggccggaggaaagcgggaagactcatcggagcgtgtggatttgagccgccgcattttttaaccctagatctcgaaatgcatcgtgattcctgtccattggactgtaaggtttatgtaggcaatcttggaaacaatggcaacaagacggaattggaacgggcttttggctactatggaccactccgaagtgtgtgggttgctagaaacccacccggctttgcttttgttgaatttgaagatccccgagatgcagctgatgcagtccgagagctagatggaagaacactatgtggctgccgtgtaagagtggaactgtcgaatggtgaaaaaagaagtagaaatcgtggcccacctccctcttggggtcgtcgccctcgagatgattatcgtaggaggagtcctccacctcgtcgcagatctccaagaaggagaagcttctctcgcagccggagcaggtccctttctagagataggagaagagagagatcgctgtctcgggagagaaatcacaagccgtcccgatccttctctaggtctcgtagtcgatctaggtcacatgaacggactagaagaccgtttgcaagagaagtggtgtccggaaattacttcatttgacagggtttgtccgaaattcacgttggtgggacttcataaggtgggcctttacgagtttgcgtcaacactgttgtctgaccgggccagggntcctggtgaggctcggctttaccaagtttcagtcctgcaaaatgtgagtttcagggaacccagcgggggtcaaacacaccaaacattccgaggcgaccggcccatttt

SEQ ID NO: 324644 - DNA, 355 bp, Homo sapiens
atctttagcatgaaaactttccacaggtctaaaaataaaagccattgttaatgggcaacttacttgtgtttaagaaccaggttgctgctatactttaaaatgttggtcactaacaaatggcttttatctttagcatgaaaactttccacaggtctaaaaattgcttccattttataatttgaggtgttgcatgggaattctaagctgatccatcatgatgtaaaagttcacaatatggttcaaatgtaacagtgcagaattgaatatggaggcatgcataaccttcctcttagaaaatggcaggtgttgtaatttcaaatttttgtgcaattagattaaatcataatgcaacagt

SEQ ID NO: 324645 - DNA, 1443 bp, Homo sapiens
gtataaataaaggcgaggagaaggcggtggtccgccatttcgtggacgccgggtgagtgagagagttggttggtgttgggccggaggaaagcgggaagactcatcggagcgtgtggatttgagccgccgcattttttaaccctagatctcgaaatgcatcgtgattcctgtccattggactgtaaggtttatgtaggcaatcttggaaacaatggcaacaagacggaattggaacgggcttttggctactatggaccactccgaagtgtgtgggttgctagaaacccacccggctttgcttttgttgaatttgaagatccccgagatgcagctgatgcagtccgagagctagatggaagaacactatgtggctgccgtgtaagagtggaactgtcgaatggtgaaaaaagaagtagaaatcgtggcccacctccctcttggggtcgtcgccctcgagatgattatcgtaggaggagtcctccacctcgtcgcagatctccaagaaggagaagcttctctcgcagccggagcaggtccctttctagagataggagaagagagagatcgctgtctcgggagagaaatcacaagccgtcccgatccttctctaggtctcgtagtcgatctaggtcaaatgaaaggaaatagaagacagtttgcaagagaagtggtgtacaggaaattacttcatttgacaggagtatgtacagaaaattcaagttttgtttgagacttcataagcttggtgcatttttaagatgttttagctgttcaaatctgtttgtctcttgaaacagtgacacaaaggtgtaattctctatggtttgaaatggatcatacgaggcatgtaataccaagaattgttactttacaatgttcccttaagcaaaattgaatttgctttgaacttttagttatgcacagactgataataaacctctaaacctgcccagcggaagtgtgtttttttttaaatttaaatacagaaacaactggcaaaaattgaactaagatttacttttttttccatagctgggatataggctgcagctatagttgaacaagcagtctttaaaaactgctgtgaaacacaggccatcagggaaaacgaaatgctgcactattaaattagaggtttttgaaaaatccaactctcatcctgggcagaggttgcctagttggtatagaatgttaagtttcaagaaagtttacctttgctttaggtcataagttccttatttgattgctgtatatggatacatggctgttcgtgacattctttatgtgcaaatttgtgatttcaaaaatgtcctgccagtttaagggtacattgtagagccgaactttgagttactgtgcaagatttttttttcatgctgtcatttgtaatatgttttgtgagaatccttgggattaaagttttggttacaaattgttctttaa

SEQ ID NO: 324646 - DNA, 2090 bp, Homo sapiens
gtataaataaaggcgaggagaaggcggtggtccgccatttcgtggacgccgggtgagtgagagagttggttggtgttgggccggaggaaagcgggaagactcatcggagcgtgtggatttgagccgccgcattttttaaccctagatctcgaaatgcatcgtgattcctgtccattggactgtaaggtttatgtaggcaatcttggaaacaatggcaacaagacggaattggaacgggcttttggctactatggaccactccgaagtgtgtgggttgctagaaacccacccggctttgcttttgttgaatttgaagatccccgagatgcagctgatgcagtccgagagctagatggaagaacactatgtggctgccgtgtaagagtggaactgtcgaatggtgaaaaaagaagtagaaatcgtggcccacctccctcttggggtcgtcgccctcgagatgattatcgtaggaggagtcctccacctcgtcgcagatctccaagaaggagaagcttctctcgcagccggagcaggtccctttctagagataggagaagagagagatcgctgtctcgggagagaaatcacaagccgtcccgatccttctctaggtctcgtagtcgatctaggtcaaatgaaaggaaatagaagacagtttgcaagagaagtggtgtacaggaaattacttcatttgacaggagtatgtacagaaaattcaagttttgtttgagacttcataagcttggtgcatttttaagatgttttagctgttcaaatctgtttgtctcttgaaacagtgacacaaaggtgtaattctctatggtttgaaatggatcatacgaggcatgtaataccaagaattgttactttacaatgttcccttaagcaaaattgaatttgctttgaacttttagttatgcacagactgataataaacctctaaacctgcccagcggaagtgtgtttttttttaaatttaaatacagaaacaactggcaaaaattgaactaagatttacttttttttccatagctgggatataggctgcagctatagttgaacaagcagtctttaaaaactgctgtgaaacacaggccatcagggaaaacgaaatgctgcactattaaattagaggtttttgaaaaatccaactctcatcctgggcagaggttgcctagttggtatagaatgttaagtttcaagaaagtttacctttgctttaggtcataagttccttatttgattgctgtatatggatacatggctgttcgtgacattctttatgtgcaaatttgtgatttcaaaaatgtcctgccagtttaagggtacattgtagagccgaactttgagttactgtgcaagatttttttttcatgctgtcatttgtaatatgttttgtgagaatccttgggattaaagttttggttacaaattgttctttaacttgaaagcctgtttttccttgcaaactcaaatctgtgagcttggtaccaagtccaggtataacattcctattggaagccatacttatattttcttgtaaagtgcttttgaattaataaaatattagcataattgtgtatagtcagttgaacccactgttaccattgttcttatcccatgggaagcagttggttacacgattcttattttataagaaacagctgagaggcactatggattagtcttctgaagtgaaggaaatatagatgtcacctaagtgatagttaacccattttttttttttttaggcatagaagccagttcagggtccataatatttagtgaccaacattttaaagtatagcagcaacctggttcttaaacacaaagtaagttgcccattaacaaatggcttttatctttagcatgaaaactttccacaggtctaaaaattgcttccattttataatttgaggtgttgcatgggaattctaagctgatccatcatgatgtaaaagttcacaatatggttcaaatgtaacagtgcagaattgaatatggaggcatgcataaccttcctcttagaaaatggcaggtgttgtaatttcaaatttttgtgcaattagattaaatcataatgcaacagt

SEQ ID NO: 324647 - DNA, 1593 bp, Homo sapiens
gtataaataaaggcgaggagaaggcggtggtccgccatttcgtggacgccgggtgagtgagagagttggttggtgttgggccggaggaaagcgggaagactcatcggagcgtgtggatttgagccgccgcattttttaaccctagatctcgaaatgcatcgtgattcctgtccattggactgtaaggtttatgtaggcaatcttggaaacaatggcaacaagacggaattggaacgggcttttggctactatggaccactccgaagtgtgtgggttgctagaaacccacccggctttgcttttgttgaatttgaagatccccgagatgcagctgatgcagtccgagagctagatggaagaacactatgtggctgccgtgtaagagtggaactgtcgaatggtgaaaaaagaagtagaaatcgtggcccacctccctcttggggtcgtcgccctcgagatgattatcgtaggaggagtcctccacctcgtcgcagatctccaagaaggagaagcttctctcgcagccggagcaggtccctttctagagataggagaagagagagatcgctgtctcgggagagaaatcacaagccgtcccgatccttctctaggtctcgtagtcgatctaggtcaaatgaaaggaaatagaagacagtttgcaagagaagtggtgtacaggaaattacttcatttgacaggagtatgtacagaaaattcaagttttgtttgagacttcataagcttggtgcatttttaagatgttttagctgttcaaatctgtttgtctcttgaaacagtgacacaaaggtgtaattctctatggtttgaaatggatcatacgaggcatgtaataccaagaattgttactttacaatgttcccttaagcaaaattgaatttgctttgaacttttagttatgcacagactgataataaacctctaaacctgcccagcggaagtgtgtttttttttaaatttaaatacagaaacaactggcaaaaattgaactaagatttacttttttttccatagctgggatataggctgcagctatagttgaacaagcagtctttaaaaactgctgtgaaacacaggccatcagggaaaacgaaatgctgcactattaaattagaggtttttgaaaaatccaactctcatcctgggcagaggttgcctagttggtatagaatgttaagtttcaagaaagtttacctttgctttaggtcataagttccttatttgattgctgtatatggatacatggctgttcgtgacattctttatgtgcaaatttgtgatttcaaaaatgtcctgccagtttaagggtacattgtagagccgaactttgagttactgtgcaagatttttttttcatgctgtcatttgtaatatgttttgtgagaatccttgggattaaagttttggttacaaattgttctttaacttgaaagcctgtttttccttgcaaactcaaatctgtgagcttggtaccaagtccaggtataacattcctattggaagccatacttatattttcttgtaaagtgcttttgaattaataaaatattagcataattgtgtatagtcagttga

SEQ ID NO: 324648 - DNA, 2202 bp, Homo sapiens
gtataaataaaggcgaggagaaggcggtggtccgccatttcgtggacgccgggtgagtgagagagttggttggtgttgggccggaggaaagcgggaagactcatcggagcgtgtggatttgagccgccgcattttttaaccctagatctcgaaatgcatcgtgattcctgtccattggactgtaaggtttatgtaggcaatcttggaaacaatggcaacaagacggaattggaacgggcttttggctactatggaccactccgaagtgtgtgggttgctagaaacccacccggctttgcttttgttgaatttgaagatccccgagatgcagctgatgcagtccgagagctagatggaagaacactatgtggctgccgtgtaagagtggaactgtcgaatggtgaaaaaagaagtagaaatcgtggcccacctccctcttggggtcgtcgccctcgagatgattatcgtaggaggagtcctccacctcgtcgcagatctccaagaaggagaagcttctctcgcagccggagcaggtccctttctagagataggagaagagagagatcgctgtctcgggagagaaatcacaagccgtcccgatccttctctaggtctcgtagtcgatctaggtcaaatgaaaggaaatagaagacagtttgcaagagaagtggtgtacaggaaattacttcatttgacaggagtatgtacagaaaattcaagttttgtttgagacttcataagcttggtgcatttttaagatgttttagctgttcaaatctgtttgtctcttgaaacagtgacacaaaggtgtaattctctatggtttgaaatggatcatacgaggcatgtaataccaagaattgttactttacaatgttcccttaagcaaaattgaatttgctttgaacttttagttatgcacagactgataataaacctctaaacctgcccagcggaagtgtgtttttttttaaatttaaatacagaaacaactggcaaaaattgaactaagatttacttttttttccatagctgggatataggctgcagctatagttgaacaagcagtctttaaaaactgctgtgaaacacaggccatcagggaaaacgaaatgctgcactattaaattagaggtttttgaaaaatccaactctcatcctgggcagaggttgcctagttggtatagaatgttaagtttcaagaaagtttacctttgctttaggtcataagttccttatttgattgctgtatatggatacatggctgttcgtgacattctttatgtgcaaatttgtgatttcaaaaatgtcctgccagtttaagggtacattgtagagccgaactttgagttactgtgcaagatttttttttcatgctgtcatttgtaatatgttttgtgagaatccttgggattaaagttttggttacaaattgttctttaacttgaaagcctgtttttccttgcaaactcaaatctgtgagcttggtaccaagtccaggtataacattcctattggaagccatacttatattttcttgtaaagtgcttttgaattaataaaatattagcataattgtgtatagtcagttgaacccactgttaccattgttcttatcccatgggaagcagttggttacacgattcttattttataagaaacagctgagaggcactatggattagtcttctgaagtgaaggaaatatagatgtcacctaagtgatagttaacccattttttttttttttaggcatagaagccagttcagggtccataatatttagtgaccaacattttaaagtatagcagcaacctggttcttaaacacaaagtaagttgcccattaacaaatggcttttatctttagcatgaaaactttccacaggtctaaaaattgcttccattttataatttgaggtgttgcatgggaattctaagctgatccatcatgatgtaaaagttcacaatatggttcaaatgtaacagtgcagaattgaatatggaggcatgcataaccttcctcttagaaaatggcaggtgttgtaatttcaaatttttgtgcaattagattaaatcataatgcaacagtaaaaaaaaaacaaaaaacaaaacaaatataaaaaaaactttgtggggggcttgggcccttagaaaagttttaaaaacaatcgtgggggggggggcccaagttggttatatga

SEQ ID NO: 324649 - DNA, 1816 bp, Homo sapiens
gtataaataaaggcgaggagaaggcggtggtccgccatttcgtggacgccgggtgagtgagagagttggttggtgttgggccggaggaaagcgggaagactcatcggagcgtgtggatttgagccgccgcattttttaaccctagatctcgaaatgcatcgtgattcctgtccattggactgtaaggtttatgtaggcaatcttggaaacaatggcaacaagacggaattggaacgggcttttggctactatggaccactccgaagtgtgtgggttgctagaaacccacccggctttgcttttgttgaatttgaagatccccgagatgcagctgatgcagtccgagagctagatggaagaacactatgtggctgccgtgtaagagtggaactgtcgaatggtgaaaaaagaagtagaaatcgtggcccacctccctcttggggtcgtcgccctcgagatgattatcgtaggaggagtcctccacctcgtcgcagatctccaagaaggagaagcttctctcgcagccggagcaggtccctttctagagataggagaagagagagatcgctgtctcgggagagaaatcacaagccgtcccgatccttctctaggtctcgtagtcgatctaggtcaaatgaaaggaaatagaagacagtttgcaagagaagtggtgtacaggaaattacttcatttgacaggagtatgtacagaaaattcaagttttgtttgagacttcataagcttggtgcatttttaagatgttttagctgttcaaatctgtttgtctcttgaaacagtgacacaaaggtgtaattctctatggtttgaaatggatcatacgaggcatgtaataccaagaattgttactttacaatgttcccttaagcaaaattgaatttgctttgaacttttagttatgcacagactgataataaacctctaaacctgcccagcggaagtgtgtttttttttaaatttaaatacagaaacaactggcaaaaattgaactaagatttacttttttttccatagctgggatataggctgcagctatagttgaacaagcagtctttaaaaactgctgtgaaacacaggccatcagggaaaacgaaatgctgcactattaaattagaggtttttgaaaaatccaactctcatcctgggcagaggttgcctagttggtatagaatgttaagtttcaagaaagtttacctttgctttaggtcataagttccttatttgattgctgtatatggatacatggctgttcgtgacattctttatgtgcaaatttgtgatttcaaaaatgtcctgccagtttaagggtacattgtagagccgaactttgagttactgtgcaagatttttttttcatgctgtcatttgtaatatgttttgtgagaatccttgggattaaagttttggttacaaattgttctttaaaaaaaaaaaaaaaaaaaaaaacaaaaaacgtgtgtgtgggcgcgcgcccgcgcggcccccgcgaagaagagctttcttagaaaccacattcgcgggggggcgcgcgcggggcccgcggggggtataggggaaaccgtgggcccaaagagtgggtgttccacagagggagaatccgcgggaacagggaacaaagggggcgggggatttctcccccacaaataaaaaaggcccgcggggggaaaaccagagggcgttctgtgcaaaaattctcaaagagggggttccggggggggccatagaggggggaccttattcaagggggagtcccagggagagccggaaatttaaaattggcccccaaaccggggggaga

SEQ ID NO: 324650 - DNA, 2138 bp, Homo sapiens
  misc_feature (1464)..(1464): n is a, c, g, or t
  misc_feature (1509)..(1509): n is a, c, g, or t
  misc_feature (1518)..(1518): n is a, c, g, or t
gtataaataaaggcgaggagaaggcggtggtccgccatttcgtggacgccgggtgagtgagagagttggttggtgttgggccggaggaaagcgggaagactcatcggagcgtgtggatttgagccgccgcattttttaaccctagatctcgaaatgcatcgtgattcctgtccattggactgtaaggtttatgtaggcaatcttggaaacaatggcaacaagacggaattggaacgggcttttggctactatggaccactccgaagtgtgtgggttgctagaaacccacccggctttgcttttgttgaatttgaagatccccgagatgcagctgatgcagtccgagagctagatggaagaacactatgtggctgccgtgtaagagtggaactgtcgaatggtgaaaaaagaagtagaaatcgtggcccacctccctcttggggtcgtcgccctcgagatgattatcgtaggaggagtcctccacctcgtcgcagatctccaagaaggagaagcttctctcgcagccggagcaggtccctttctagagataggagaagagagagatcgctgtctcgggagagaaatcacaagccgtcccgatccttctctaggtctcgtagtcgatctaggtcaaatgaaaggaaatagaagacagtttgcaagagaagtggtgtacaggaaattacttcatttgacaggagtatgtacagaaaattcaagttttgtttgagacttcataagcttggtgcatttttaagatgttttagctgttcaaatctgtttgtctcttgaaacagtgacacaaaggtgtaattctctatggtttgaaatggatcatacgaggcatgtaataccaagaattgttactttacaatgttcccttaagcaaaattgaatttgctttgaacttttagttatgcacagactgataataaacctctaaacctgcccagcggaagtgtgtttttttttaaatttaaatacagaaacaactggcaaaaattgaactaagatttacttttttttccatagctgggatataggctgcagctatagttgaacaagcagtctttaaaaactgctgtgaaacacaggccatcagggaaaacgaaatgctgcactattaaattagaggtttttgaaaaatccaactctcatcctgggcagaggttgcctagttggtatagaatgttaagtttcaagaaagtttacctttgctttaggtcataagttccttatttgattgctgtatatggatacatggctgttcgtgacattctttatgtgcaaatttgtgatttcaaaaatgtcctgccagtttaagggtacattgtagagccgaactttgagttactgtgcaagatttttttttcatgctgtcatttgtaatatgttttgtgagaatccttgggattaaagttttggttacaaattgttctttaacttgaaaaaaaaaaaaaaaanaaaaaaaaaaaagaaaaaaaaaaaaaaaaaaaaaaaaaaaaaaanaaaaaaaanaaaaaaaaaagtttgggggggcggggccgaggagaattaaaaaaaccggtgggggggggcggagcgcgaaatataaagaaggaacaactatgcggcccgttgctcccagagaagaacctggaggcggaaagtaaaggaggcggggggcttgctgcccaaaaaaaaagaagcggcggcgggggggaaaggccagggcgtgtcacaaaccacaaaaagaggggcctgggagacggcaaaaggggcggcgtcaacaacgaagggggacagaaggggcggcataatatatactcccgccgcccgcggggggagacacaccagacaaaaacgaaagcaaagaggcaacagagaaacaacgtaatagaaagacacagaaagaaaaaaaacgaaaacaaaagacagcaaggagaacacacaagcaaatgaagcacaagcacacacaaacaacgggagaaagcgaaagacaaggaaaaaaaaaaaaacaaaaacaaaagacaaacgaacacagaaaaaagaagcagaagctcaaccacaacgaacaaagagaaaacaaagagaacgaggagagagcaagagaacggggataaacatgaaacaaacaaacaaaaagacaacggcaaata

SEQ ID NO: 324651 - DNA, 1459 bp, Homo sapiens
ggcccaccgggcgatgagcaaggtgggtcccagaggtgttcggcgatctcgtgccgaattcggcccgggtgagtgagagagttggttggtgttgggccggaggaaagcgggaagactcatcggagcgtgtggatttgagccgccgcattttttaaccctagatctcgaaatgcatcgtgattcctgtccattggactgtaaggtttatgtaggcaatcttggaaacaatggcaacaagacggaattggaacgggcttttggctactatggaccactccgaagtgtgtgggttgctagaaacccacccggctttgcttttgttgaatttgaagatccccgagatgcagctgatgcagtccgagagctagatggaagaacactatgtggctgccgtgtaagagtggaactgtcgaatggtgaaaaaagaagtagaaatcgtggcccacctccctcttggggtcgtcgccctcgagatgattatcgtaggaggagtcctccacctcgtcgcagatctccaagaaggagaagcttctctcgcagccggagcaggtccctttctagagataggagaagagagagatcgctgtctcgggagagaaatcacaagccgtcccgatccttctctaggtctcgtagtcgatctaggtcaaatgaaaggaaatagaagacagtttgcaagagaagtggtgtacaggaaattacttcatttgacaggagtatgtacagaaaattcaagttttgtttgagacttcataagcttggtgcatttttaagatgttttagctgttcaaatctgtttgtctcttgaaacagtgacacaaaggtgtaattctctatggtttgaaatggatcatacgaggcatgtaataccaagaattgttactttacaatgttcccttaagcaaaattgaatttgctttgaacttttagttatgcacagactgataataaacctctaaacctgcccagcggaagtgtgtttttttttaaatttaaatacagaaacaactggcaaaaattgaactaagatttacttttttttccatagctgggatataggctgcagctatagttgaacaagcagtctttaaaaactgctgtgaaacacaggccatcagggaaaacgaaatgctgcactattaaattagaggtttttgaaaaatccaactctcatcctgggcagaggttgcctagttggtatagaatgttaagtttcaagaaagtttacctttgctttaggtcataagttccttatttgattgctgtatatggatacatggctgttcgtgacattctttatgtgcaaatttgtgatttcaaaaatgtcctgccagtttaagggtacattgtagagccgaactttgagttactgtgcaagatttttttttcatgctgtcatttgtaatatgttttgtgagaatccttgggattaaagttttggttacaaattgttctttaa

SEQ ID NO: 324652 - DNA, 1221 bp, Homo sapiens
  misc_feature (994)..(994): n is a, c, g, or t
  misc_feature (1003)..(1003): n is a, c, g, or t
gtataaataaaggcgaggagaaggcggtggtccgccatttcgtggacgccgggtgagtgagagagttggttggtgttgggccggaggaaagcgggaagactcatcggagcgtgtggatttgagccgccgcattttttaaccctagatctcgaaatgcatcgtgattcctgtccattggactgtaaggtttatgtaggcaatcttggaaacaatggcaacaagacggaattggaacgggcttttggctactatggaccactccgaagtgtgtgggttgctagaaacccacccggctttgcttttgttgaatttgaagatccccgagatgcagctgatgcagtccgagagctagatggaagaacactatgtggctgccgtgtaagagtggaactgtcgaatggtgaaaaaagaagtagaaatcgtggcccacctccctcttggggtcgtcgccctcgagatgattatcgtaggaggagtcctccacctcgtcgcagatctccaagaaggagaagcttctctcgcagccggagcaggtccctttctagagataggagaagagagagatcgctgtctcgggagagaaatcacaagccgtcccgatccttctctaggtctcgtagtcgatctaggtcaaatgaaaggaaatagaagacagtttgcaagagaagtggtgtacaggaaattacttcatttgacaggagtatgtacagaaaattcaagttttgtttgagacttcataagcttggtgcatttttaagatgttttagctgttcaaatctgtttgtctcttgaaacagtgacacaaaggtgtaattctctatggtttgaaatggatcatacgaggcatgtaataccaagaattgttactttacaatgttcccttaagcaaaattgaatttgctttgaacttttagttatgcacagactgataataaacctctaaacctgcaaaaaaaaaaaagaaaaaaaaaaaaaaaaaaaaaaaaaaaaaaanaaaaaaaanaaaaaaaaaaaaaaaaaaaaaaaaaaaaaaaaaaagaaaaaaaagaaaaaaccaaaaagagcacaaaaacgacgcgacgcaaaaatagaacaaacaagaacgagcgacacacccatattaagcaaggaagaacaaagcagaatataagtagagacgagggccgacagtatcgaacgcaccctcaagaacagagctgagccaatagagaacacaatgcg

SEQ ID NO: 324653 - DNA, 1447 bp, Homo sapiens
gtataaataaaggcgaggagaaggcggtggtccgccatttcgtggacgccgggtgagtgagagagttggttggtgttgggccggaggaaagcgggaagactcatcggagcgtgtggatttgagccgccgcattttttaaccctagatctcgaaatgcatcgtgattcctgtccattggactgtaaggtttatgtaggcaatcttggaaacaatggcaacaagacggaattggaacgggcttttggctactatggaccactccgaagtgtgtgggttgctagaaacccacccggctttgcttttgttgaatttgaagatccccgagatgcagctgatgcagtccgagagctagatggaagaacactatgtggctgccgtgtaagagtggaactgtcgaatggtgaaaaaagaagtagaaatcgtggcccacctccctcttggggtcgtcgccctcgagatgattatcgtaggaggagtcctccacctcgtcgcagatctccaagaaggagaagcttctctcgcagccggagcaggtaggtccctttctagagataggagaagagagagatcgctgtctcgggagagaaatcacaagccgtcccgatccttctctaggtctcgtagtcgatctaggtcaaatgaaaggaaatagaagacagtttgcaagagaagtggtgtacaggaaattacttcatttgacaggagtatgtacagaaaattcaagttttgtttgagacttcataagcttggtgcatttttaagatgttttagctgttcaaatctgtttgtctcttgaaacagtgacacaaaggtgtaattctctatggtttgaaatggatcatacgaggcatgtaataccaagaattgttactttacaatgttcccttaagcaaaattgaatttgctttgaacttttagttatgcacagactgataataaacctctaaacctgcccagcggaagtgtgtttttttttaaatttaaatacagaaacaactggcaaaaattgaactaagatttacttttttttccatagctgggatataggctgcagctatagttgaacaagcagtctttaaaaactgctgtgaaacacaggccatcagggaaaacgaaatgctgcactattaaattagaggtttttgaaaaatccaactctcatcctgggcagaggttgcctagttggtatagaatgttaagtttcaagaaagtttacctttgctttaggtcataagttccttatttgattgctgtatatggatacatggctgttcgtgacattctttatgtgcaaatttgtgatttcaaaaatgtcctgccagtttaagggtacattgtagagccgaactttgagttactgtgcaagatttttttttcatgctgtcatttgtaatatgttttgtgagaatccttgggattaaagttttggttacaaattgttctttaa

SEQ ID NO: 324654 - DNA, 2094 bp, Homo sapiens
gtataaataaaggcgaggagaaggcggtggtccgccatttcgtggacgccgggtgagtgagagagttggttggtgttgggccggaggaaagcgggaagactcatcggagcgtgtggatttgagccgccgcattttttaaccctagatctcgaaatgcatcgtgattcctgtccattggactgtaaggtttatgtaggcaatcttggaaacaatggcaacaagacggaattggaacgggcttttggctactatggaccactccgaagtgtgtgggttgctagaaacccacccggctttgcttttgttgaatttgaagatccccgagatgcagctgatgcagtccgagagctagatggaagaacactatgtggctgccgtgtaagagtggaactgtcgaatggtgaaaaaagaagtagaaatcgtggcccacctccctcttggggtcgtcgccctcgagatgattatcgtaggaggagtcctccacctcgtcgcagatctccaagaaggagaagcttctctcgcagccggagcaggtaggtccctttctagagataggagaagagagagatcgctgtctcgggagagaaatcacaagccgtcccgatccttctctaggtctcgtagtcgatctaggtcaaatgaaaggaaatagaagacagtttgcaagagaagtggtgtacaggaaattacttcatttgacaggagtatgtacagaaaattcaagttttgtttgagacttcataagcttggtgcatttttaagatgttttagctgttcaaatctgtttgtctcttgaaacagtgacacaaaggtgtaattctctatggtttgaaatggatcatacgaggcatgtaataccaagaattgttactttacaatgttcccttaagcaaaattgaatttgctttgaacttttagttatgcacagactgataataaacctctaaacctgcccagcggaagtgtgtttttttttaaatttaaatacagaaacaactggcaaaaattgaactaagatttacttttttttccatagctgggatataggctgcagctatagttgaacaagcagtctttaaaaactgctgtgaaacacaggccatcagggaaaacgaaatgctgcactattaaattagaggtttttgaaaaatccaactctcatcctgggcagaggttgcctagttggtatagaatgttaagtttcaagaaagtttacctttgctttaggtcataagttccttatttgattgctgtatatggatacatggctgttcgtgacattctttatgtgcaaatttgtgatttcaaaaatgtcctgccagtttaagggtacattgtagagccgaactttgagttactgtgcaagatttttttttcatgctgtcatttgtaatatgttttgtgagaatccttgggattaaagttttggttacaaattgttctttaacttgaaagcctgtttttccttgcaaactcaaatctgtgagcttggtaccaagtccaggtataacattcctattggaagccatacttatattttcttgtaaagtgcttttgaattaataaaatattagcataattgtgtatagtcagttgaacccactgttaccattgttcttatcccatgggaagcagttggttacacgattcttattttataagaaacagctgagaggcactatggattagtcttctgaagtgaaggaaatatagatgtcacctaagtgatagttaacccattttttttttttttaggcatagaagccagttcagggtccataatatttagtgaccaacattttaaagtatagcagcaacctggttcttaaacacaaagtaagttgcccattaacaaatggcttttatctttagcatgaaaactttccacaggtctaaaaattgcttccattttataatttgaggtgttgcatgggaattctaagctgatccatcatgatgtaaaagttcacaatatggttcaaatgtaacagtgcagaattgaatatggaggcatgcataaccttcctcttagaaaatggcaggtgttgtaatttcaaatttttgtgcaattagattaaatcataatgcaacagt

SEQ ID NO: 324655 - DNA, 1899 bp, Homo sapiens
gtataaataaaggcgaggagaaggcggtggtccgccatttcgtggacgccgggtgagtgagagagttggttggtgttgggccggaggaaagcgggaagactcatcggagcgtgtggatttgagccgccgcattttttaaccctagatctcgaaatgcatcgtgattcctgtccattggactgtaaggtttatgtaggcaatcttggaaacaatggcaacaagacggaattggaacgggcttttggctactatggaccactccgaagtgtgtgggttgctagaaacccacccggctttgcttttgttgaatttgaagatccccgagatgcagctgatgcagtccgagagctagatggaagaacactatgtggctgccgtgtaagagtggaactgtcgaatggtgaaaaaagaagtagaaatcgtggcccacctccctcttggggtcgtcgccctcgagatgattatcgtaggaggagtcctccacctcgtcgcagagtcaccatcatgtctcttctcaccaccctctgaatctgcattagccagtcaactagccctttcagcgtcatgtgaccagcgcgccccattcagcttggctggtgtcgtttcacatgacccaggctggccagtcgtcaggttgcaccgccctttggttcccgagcatgctgttttctctcagccttctctccaaccttaaccaaatcggcagcagccacctcgaccgcccacacattcctggccaatcagctcagctgtttatttaccaaatgtcttcacaacaactacagcagcagccttcggctaacaaaaaagcaggaaaaatccacaacacccccttcgccaaccaactaaatccaacgcaacatctggcaaaaccttttcagcaaattcttcctggccgtcagtccggcagcctcacctcaccatttctagcttgttgaaacccaaaactaatctccaagaaggagaagcttctctcgcagccggagcaggtccctttctagagataggagaagagagagatcgctgtctcgggagagaaatcacaagccgtcccgatccttctctaggtctcgtagtcgatctaggtcaaatgaaaggaaatagaagacagtttgcaagagaagtggtgtacaggaaattacttcatttgacaggagtatgtacagaaaattcaagttttgtttgagacttcataagcttggtgcatttttaagatgttttagctgttcaaatctgtttgtctcttgaaacagtgacacaaaggtgtaattctctatggtttgaaatggatcatacgaggcatgtaataccaagaattgttactttacaatgttcccttaagcaaaattgaatttgctttgaacttttagttatgcacagactgataataaacctctaaacctgcccagcggaagtgtgtttttttttaaatttaaatacagaaacaactggcaaaaattgaactaagatttacttttttttccatagctgggatataggctgcagctatagttgaacaagcagtctttaaaaactgctgtgaaacacaggccatcagggaaaacgaaatgctgcactattaaattagaggtttttgaaaaatccaactctcatcctgggcagaggttgcctagttggtatagaatgttaagtttcaagaaagtttacctttgctttaggtcataagttccttatttgattgctgtatatggatacatggctgttcgtgacattctttatgtgcaaatttgtgatttcaaaaatgtcctgccagtttaagggtacattgtagagccgaactttgagttactgtgcaagatttttttttcatgctgtcatttgtaatatgttttgtgagaatccttgggattaaagttttggttacaaattgttctttaa

SEQ ID NO: 324656 - DNA, 2740 bp, Homo sapiens
gtataaataaaggcgaggagaaggcggtggtccgccatttcgtggacgccgggtgagtgagagagttggttggtgttgggccggaggaaagcgggaagactcatcggagcgtgtggatttgagccgccgcattttttaaccctagatctcgaaatgcatcgtgattcctgtccattggactgtaaggtttatgtaggcaatcttggaaacaatggcaacaagacggaattggaacgggcttttggctactatggaccactccgaagtgtgtgggttgctagaaacccacccggctttgcttttgttgaatttgaagatccccgagatgcagctgatgcagtccgagagctagatggaagaacactatgtggctgccgtgtaagagtggaactgtcgaatggtgaaaaaagaagtagaaatcgtggcccacctccctcttggggtcgtcgccctcgagatgattatcgtaggaggagtcctccacctcgtcgcagacaggtacttgagagaaagcttgttaagaggtattggtgtaatggagtagctagtaggagcaggtatttctcttaagtttgttggtgggttttaaactttggaagaatcggaggtttctgtgaaacatttgttgggtgtaatttggggtatgtgagttgtgctgagtgttggcttttgtctttaggtcactgttcatgttggtagtcagtaacttctatcttggatctgtcttctagttcatctttctagttgcatctttccaaatcttcccttatacttcagtttaggcctttttccatttcttggctccataatgacaaacattacattcaactctagctcttcacaaatttgtgttttctactattagcacaattgtaatatttatcaaacaggcagctgttttaatgttacaactggtaaagtagaaatcattctgagactaacttaagtcactgaccaataaagggggctaaaaaagaagtaatcccagtcatctgttcttcaatcccaaataggagaaaattcagtttttttataattgaaaatggcatcattcttggaccaggcagtattgtctgggtgctaactccacatctcctcagacctccaaaatagtttctataggactaaatttacctcttacaggtgagtggagtccttctaggagacaggagttcaaaatcttgccccttttgctattttgaaaaacaacagcacactgttgcccatcataataaagagtatttgttagctaatagatggttgtactgatggcttgtttttcattttttttgtgctttttggtccatctattaataaaaatgaaccccgttacagagtcaccatcatgtctcttctcaccaccctctgaatctgcattagccagtcaactagccctttcagcgtcatgtgaccagcgcgccccattcagcttggctggtgtcgtttcacatgacccaggctggccagtcgtcaggttgcaccgccctttggttcccgagcatgctgttttctctcagccttctctccaaccttaaccaaatcggcagcagccacctcgaccgcccacacattcctggccaatcagctcagctgtttatttaccaaatgtcttcacaacaactacagcagcagccttcggctaacaaaaaagcaggaaaaatccacaacacccccttcgccaaccaactaaatccaacgcaacatctggcaaaaccttttcagcaaattcttcctggccgtcagtccggcagcctcacctcaccatttctagcttgttgaaacccaaaactaatctccaagaaggagaagcttctctcgcagccggagcaggtccctttctagagataggagaagagagagatcgctgtctcgggagagaaatcacaagccgtcccgatccttctctaggtctcgtagtcgatctaggtcaaatgaaaggaaatagaagacagtttgcaagagaagtggtgtacaggaaattacttcatttgacaggagtatgtacagaaaattcaagttttgtttgagacttcataagcttggtgcatttttaagatgttttagctgttcaaatctgtttgtctcttgaaacagtgacacaaaggtgtaattctctatggtttgaaatggatcatacgaggcatgtaataccaagaattgttactttacaatgttcccttaagcaaaattgaatttgctttgaacttttagttatgcacagactgataataaacctctaaacctgcccagcggaagtgtgtttttttttaaatttaaatacagaaacaactggcaaaaattgaactaagatttacttttttttccatagctgggatataggctgcagctatagttgaacaagcagtctttaaaaactgctgtgaaacacaggccatcagggaaaacgaaatgctgcactattaaattagaggtttttgaaaaatccaactctcatcctgggcagaggttgcctagttggtatagaatgttaagtttcaagaaagtttacctttgctttaggtcataagttccttatttgattgctgtatatggatacatggctgttcgtgacattctttatgtgcaaatttgtgatttcaaaaatgtcctgccagtttaagggtacattgtagagccgaactttgagttactgtgcaagatttttttttcatgctgtcatttgtaatatgttttgtgagaatccttgggattaaagttttggttacaaattgttctttaa

SEQ ID NO: 324657 - DNA, 1610 bp, Homo sapiens
gtataaataaaggcgaggagaaggcggtggtccgccatttcgtggacgccgggtgagtgagagagttggttggtgttgggccggaggaaagcgggaagactcatcggagcgtgtggatttgagccgccgcattttttaaccctagatctcgaaatgcatcgtgattcctgtccattggactgtaaggtttatgtaggcaatcttggaaacaatggcaacaagacggaattggaacgggcttttggctactatggaccactccgaagtgtgtgggttgctagaaacccacccggctttgcttttgttgaatttgaagatccccgagatgcagctgatgcagtccgagagctagatggaagaacactatgtggctgccgtgtaagagtggaactgtcgaatggtgaaaaaagaagtagaaatcgtggcccacctccctcttggggtcgtcgccctcgagatgattatcgtaggaggagtcctccacctcgtcgcagatctccaagaaggagaagcttctctcgcagccggagcaggtccctttctagagataggagaagagagagatcgctgtctcgggagagaaatcacaagccgtcccgatccttctctaggtctcgtaggtaagatctttgataacttgtatttaagactttgcatacatagtatgctaaggcctgtcttctaagccataaattttttaccttaaagttctatttcgatatgtcactaaagtgtcaccaagttacagatgtaatgttttgttttctttttttttttttttttttagtcgatctaggtcaaatgaaaggaaatagaagacagtttgcaagagaagtggtgtacaggaaattacttcatttgacaggagtatgtacagaaaattcaagttttgtttgagacttcataagcttggtgcatttttaagatgttttagctgttcaaatctgtttgtctcttgaaacagtgacacaaaggtgtaattctctatggtttgaaatggatcatacgaggcatgtaataccaagaattgttactttacaatgttcccttaagcaaaattgaatttgctttgaacttttagttatgcacagactgataataaacctctaaacctgcccagcggaagtgtgtttttttttaaatttaaatacagaaacaactggcaaaaattgaactaagatttacttttttttccatagctgggatataggctgcagctatagttgaacaagcagtctttaaaaactgctgtgaaacacaggccatcagggaaaacgaaatgctgcactattaaattagaggtttttgaaaaatccaactctcatcctgggcagaggttgcctagttggtatagaatgttaagtttcaagaaagtttacctttgctttaggtcataagttccttatttgattgctgtatatggatacatggctgttcgtgacattctttatgtgcaaatttgtgatttcaaaaatgtcctgccagtttaagggtacattgtagagccgaactttgagttactgtgcaagatttttttttcatgctgtcatttgtaatatgttttgtgagaatccttgggattaaagttttggttacaaattgttctttaa

SEQ ID NO: 324658 - DNA, 3291 bp, Homo sapiens
  misc_feature (2177)..(2177): n is a, c, g, or t
gtataaataaaggcgaggagaaggcggtggtccgccatttcgtggacgccgggtgagtgagagagttggttggtgttgggccggaggaaagcgggaagactcatcggagcgtgtggatttgagccgccgcattttttaaccctagatctcgaaatgcatcgtgattcctgtccattggactgtaaggtttatgtaggcaatcttggaaacaatggcaacaagacggaattggaacgggcttttggctactatggaccactccgaagtgtgtgggttgctagaaacccacccggctttgcttttgttgaatttgaagatccccgagatgcagctgatgcagtccgagagctagatggaagaacactatgtggctgccgtgtaagagtggaactgtcgaatggtgaaaaaagaagtagaaatcgtggcccacctccctcttggggtcgtcgccctcgagatgattatcgtaggaggagtcctccacctcgtcgcagagtcaccatcatgtctcttctcaccaccctctgaatctgcattagccagtcaactagccctttcagcgtcatgtgaccagcgcgccccattcagcttggctggtgtcgtttcacatgacccaggctggccagtcgtcaggttgcaccgccctttggttcccgagcatgctgttttctctcagccttctctccaaccttaaccaaatcggcagcagccacctcgaccgcccacacattcctggccaatcagctcagctgtttatttaccaaatgtcttcacaacaactacagcagcagccttcggctaacaaaaaagcaggaaaaatccacaacacccccttcgccaaccaactaaatccaacgcaacatctggcaaaaccttttcagcaaattcttcctggccgtcagtccggcagcctcacctcaccatttctagcttgttgaaacccaaaactaagtaagtttttcctgcttatacagtttactgctggttaaaataaggagtaagcggcttaaagtaattcttttttctggatcaaaggctggctgtgcataattgaatggtaacgtacatatatattgcttgaaaaacttttaagggtgatagggaactcgtaatgtaactaggccttcaagtgaaacttatttgcatgtgcaagatgccaaactaaaaattttaatatctctaacagattagcttttctggcaaaaatttgttgaatcctatcacctttaaatggttttactaacagtttcaaaatttaaaattttggggttgaagtgtgggccaagctaaggtaattttggtaagcctaaacacactcttaaatgtgacgatcacaaatgcagttctaatgtagcacttaatggcatcaatatttacacctaccgcgttttcacaaaattacactatccacctggtacctaagtcttgtcatggacttacaggtttgcatgggttccaaatactggtttatggtactgtttttggaactacttgtgggactatattttggtgtggtgtttgggtagtgaagttagtttgacatgaagttttgcattggacagatctgctgtgaagcattctttgttaaagtgaatccatggttggaatacctgcttttcacttgagctttttgtttcttaatccttctgtgccttttttttcttttcttttttttctttttttttttttttttttttttttgacgatgggtgccagttcttcggcacattcactgggcccaacagtgagattgaaaagttgggaaatgcctcacgccataaatactaattgatgatgagcctaattttcctgtttctgcttttagatctccaagaaggagaagcttctctcgcagccggagcaggtaaatgactaccttttttggctacgttcttagaaatggcagtgtttctgctattcctaaacttttccaggtggcttagttaatgggaataaaccttggctttaatagtgaatcaagttgtaaggatgagtcagctttctttgagttttcaaaggctttttagaaagtatttaattttttaaaaaaggatctgtcacccaggctggagtgcagtggtgtgattatagctcactgtagcctttaactcctggccttggagtgatcctccctcttcagcctcctgagtagcttggactacaggcaagtactgccntacctggctaatttattttttgtggagatgggatctcactttgttgtccaatctgttctcaaactcttggcttcaagtgagcctcctgcctctgcctcccaaaatattggaattattggcatgagtcaccatgccagatcaagaaaatatttatgtataattttatcatacctcattggtcctaatgtttttttgcttgtttaggtccctttctagagataggagaagagagagatcgctgtctcgggagagaaatcacaagccgtcccgatccttctctaggtctcgtagtcgatctaggtcaaatgaaaggaaatagaagacagtttgcaagagaagtggtgtacaggaaattacttcatttgacaggagtatgtacagaaaattcaagttttgtttgagacttcataagcttggtgcatttttaagatgttttagctgttcaaatctgtttgtctcttgaaacagtgacacaaaggtgtaattctctatggtttgaaatggatcatacgaggcatgtaataccaagaattgttactttacaatgttcccttaagcaaaattgaatttgctttgaacttttagttatgcacagactgataataaacctctaaacctgcccagcggaagtgtgtttttttttaaatttaaatacagaaacaactggcaaaaattgaactaagatttacttttttttccatagctgggatataggctgcagctatagttgaacaagcagtctttaaaaactgctgtgaaacacaggccatcagggaaaacgaaatgctgcactattaaattagaggtttttgaaaaatccaactctcatcctgggcagaggttgcctagttggtatagaatgttaagtttcaagaaagtttacctttgctttaggtcataagttccttatttgattgctgtatatggatacatggctgttcgtgacattctttatgtgcaaatttgtgatttcaaaaatgtcctgccagtttaagggtacattgtagagccgaactttgagttactgtgcaagatttttttttcatgctgtcatttgtaatatgttttgtgagaatccttgggattaaagttttggttacaaattgttctttaa

SEQ ID NO: 324659 - DNA, 3458 bp, Homo sapiens
  misc_feature (2177)..(2177): n is a, c, g, or t
gtataaataaaggcgaggagaaggcggtggtccgccatttcgtggacgccgggtgagtgagagagttggttggtgttgggccggaggaaagcgggaagactcatcggagcgtgtggatttgagccgccgcattttttaaccctagatctcgaaatgcatcgtgattcctgtccattggactgtaaggtttatgtaggcaatcttggaaacaatggcaacaagacggaattggaacgggcttttggctactatggaccactccgaagtgtgtgggttgctagaaacccacccggctttgcttttgttgaatttgaagatccccgagatgcagctgatgcagtccgagagctagatggaagaacactatgtggctgccgtgtaagagtggaactgtcgaatggtgaaaaaagaagtagaaatcgtggcccacctccctcttggggtcgtcgccctcgagatgattatcgtaggaggagtcctccacctcgtcgcagagtcaccatcatgtctcttctcaccaccctctgaatctgcattagccagtcaactagccctttcagcgtcatgtgaccagcgcgccccattcagcttggctggtgtcgtttcacatgacccaggctggccagtcgtcaggttgcaccgccctttggttcccgagcatgctgttttctctcagccttctctccaaccttaaccaaatcggcagcagccacctcgaccgcccacacattcctggccaatcagctcagctgtttatttaccaaatgtcttcacaacaactacagcagcagccttcggctaacaaaaaagcaggaaaaatccacaacacccccttcgccaaccaactaaatccaacgcaacatctggcaaaaccttttcagcaaattcttcctggccgtcagtccggcagcctcacctcaccatttctagcttgttgaaacccaaaactaagtaagtttttcctgcttatacagtttactgctggttaaaataaggagtaagcggcttaaagtaattcttttttctggatcaaaggctggctgtgcataattgaatggtaacgtacatatatattgcttgaaaaacttttaagggtgatagggaactcgtaatgtaactaggccttcaagtgaaacttatttgcatgtgcaagatgccaaactaaaaattttaatatctctaacagattagcttttctggcaaaaatttgttgaatcctatcacctttaaatggttttactaacagtttcaaaatttaaaattttggggttgaagtgtgggccaagctaaggtaattttggtaagcctaaacacactcttaaatgtgacgatcacaaatgcagttctaatgtagcacttaatggcatcaatatttacacctaccgcgttttcacaaaattacactatccacctggtacctaagtcttgtcatggacttacaggtttgcatgggttccaaatactggtttatggtactgtttttggaactacttgtgggactatattttggtgtggtgtttgggtagtgaagttagtttgacatgaagttttgcattggacagatctgctgtgaagcattctttgttaaagtgaatccatggttggaatacctgcttttcacttgagctttttgtttcttaatccttctgtgccttttttttcttttcttttttttctttttttttttttttttttttttttgacgatgggtgccagttcttcggcacattcactgggcccaacagtgagattgaaaagttgggaaatgcctcacgccataaatactaattgatgatgagcctaattttcctgtttctgcttttagatctccaagaaggagaagcttctctcgcagccggagcaggtaaatgactaccttttttggctacgttcttagaaatggcagtgtttctgctattcctaaacttttccaggtggcttagttaatgggaataaaccttggctttaatagtgaatcaagttgtaaggatgagtcagctttctttgagttttcaaaggctttttagaaagtatttaattttttaaaaaaggatctgtcacccaggctggagtgcagtggtgtgattatagctcactgtagcctttaactcctggccttggagtgatcctccctcttcagcctcctgagtagcttggactacaggcaagtactgccntacctggctaatttattttttgtggagatgggatctcactttgttgtccaatctgttctcaaactcttggcttcaagtgagcctcctgcctctgcctcccaaaatattggaattattggcatgagtcaccatgccagatcaagaaaatatttatgtataattttatcatacctcattggtcctaatgtttttttgcttgtttaggtccctttctagagataggagaagagagagatcgctgtctcgggagagaaatcacaagccgtcccgatccttctctaggtctcgtaggtaagatctttgataacttgtatttaagactttgcatacatagtatgctaaggcctgtcttctaagccataaattttttaccttaaagttctatttcgatatgtcactaaagtgtcaccaagttacagatgtaatgttttgttttctttttttttttttttttttagtcgatctaggtcaaatgaaaggaaatagaagacagtttgcaagagaagtggtgtacaggaaattacttcatttgacaggagtatgtacagaaaattcaagttttgtttgagacttcataagcttggtgcatttttaagatgttttagctgttcaaatctgtttgtctcttgaaacagtgacacaaaggtgtaattctctatggtttgaaatggatcatacgaggcatgtaataccaagaattgttactttacaatgttcccttaagcaaaattgaatttgctttgaacttttagttatgcacagactgataataaacctctaaacctgcccagcggaagtgtgtttttttttaaatttaaatacagaaacaactggcaaaaattgaactaagatttacttttttttccatagctgggatataggctgcagctatagttgaacaagcagtctttaaaaactgctgtgaaacacaggccatcagggaaaacgaaatgctgcactattaaattagaggtttttgaaaaatccaactctcatcctgggcagaggttgcctagttggtatagaatgttaagtttcaagaaagtttacctttgctttaggtcataagttccttatttgattgctgtatatggatacatggctgttcgtgacattctttatgtgcaaatttgtgatttcaaaaatgtcctgccagtttaagggtacattgtagagccgaactttgagttactgtgcaagatttttttttcatgctgtcatttgtaatatgttttgtgagaatccttgggattaaagttttggttacaaattgttctttaa

SEQ ID NO: 324660 - DNA, 1420 bp, Homo sapiens
tggtccgccatttcgtggacgccgggtgagtgagagagttggttggtgttgggccggaggaaagcgggaagactcatcggagcgtgtggatttgagccgccgcattttttaaccctagatctcgaaatgcatcgtgattcctgtccattggactgtaaggtttatgtaggcaatcttggaaacaatggcaacaagacggaattggaacgggcttttggctactatggaccactccgaagtgtgtgggttgctagaaacccacccggctttgcttttgttgaatttgaagatccccgagatgcagctgatgcagtccgagagctagatggaagaacactatgtggctgccgtgtaagagtggaactgtcgaatggtgaaaaaagaagtagaaatcgtggcccacctccctcttggggtcgtcgccctcgagatgattatcgtaggaggagtcctccacctcgtcgcagatctccaagaaggagaagcttctctcgcagccggagcaggtaggtccctttctagagataggagaagagagagatcgctgtctcgggagagaaatcacaagccgtcccgatccttctctaggtctcgtagtcgatctaggtcaaatgaaaggaaatagaagacagtttgcaagagaagtggtgtacaggaaattacttcatttgacaggagtatgtacagaaaattcaagttttgtttgagacttcataagcttggtgcatttttaagatgttttagctgttcaaatctgtttgtctcttgaaacagtgacacaaaggtgtaattctctatggtttgaaatggatcatacgaggcatgtaataccaagaattgttactttacaatgttcccttaagcaaaattgaatttgctttgaacttttagttatgcacagactgataataaacctctaaacctgcccagcggaagtgtgtttttttttaaatttaaatacagaaacaactggcaaaaattgaactaagatttacttttttttccatagctgggatataggctgcagctatagttgaacaagcagtctttaaaaactgctgtgaaacacaggccatcagggaaaacgaaatgctgcactattaaattagaggtttttgaaaaatccaactctcatcctgggcagaggttgcctagttggtatagaatgttaagtttcaagaaagtttacctttgctttaggtcataagttccttatttgattgctgtatatggatacatggctgttcgtgacattctttatgtgcaaatttgtgatttcaaaaatgtcctgccagtttaagggtacattgtagagccgaactttgagttactgtgcaagatttttttttcatgctgtcatttgtaatatgttttgtgagaatccttgggattaaagttttggttacaaattgttctttaa

SEQ ID NO: 324661 - DNA, 1393 bp, Homo sapiens
gtataaataaaggcgaggagaaggcggtggtccgccatttcgtggacgccgggtgagtgagagagttggttggtgttgggccggaggaaagcgggaagactcatcggagcgtgtggatttgagccgccgcattttttaaccctagatctcgaaatgcatcgtgattcctgtccattggactgtaaggtttatgtaggcaatcttggaaacaatggcaacaagacggaattggaacgggcttttggctactatggaccactccgaagtgtgtgggttgctagaaacccacccggctttgcttttgttgaatttgaagatccccgagatgcagctgatgcagtccgagagctagatggaagaacactatgtggctgccgtgtaagagtggaactgtcgaatggtgaagattatcgtaggaggagtcctccacctcgtcgcagatctccaagaaggagaagcttctctcgcagccggagcaggtaggtccctttctagagataggagaagagagagatcgctgtctcgggagagaaatcacaagccgtcccgatccttctctaggtctcgtagtcgatctaggtcaaatgaaaggaaatagaagacagtttgcaagagaagtggtgtacaggaaattacttcatttgacaggagtatgtacagaaaattcaagttttgtttgagacttcataagcttggtgcatttttaagatgttttagctgttcaaatctgtttgtctcttgaaacagtgacacaaaggtgtaattctctatggtttgaaatggatcatacgaggcatgtaataccaagaattgttactttacaatgttcccttaagcaaaattgaatttgctttgaacttttagttatgcacagactgataataaacctctaaacctgcccagcggaagtgtgtttttttttaaatttaaatacagaaacaactggcaaaaattgaactaagatttacttttttttccatagctgggatataggctgcagctatagttgaacaagcagtctttaaaaactgctgtgaaacacaggccatcagggaaaacgaaatgctgcactattaaattagaggtttttgaaaaatccaactctcatcctgggcagaggttgcctagttggtatagaatgttaagtttcaagaaagtttacctttgctttaggtcataagttccttatttgattgctgtatatggatacatggctgttcgtgacattctttatgtgcaaatttgtgatttcaaaaatgtcctgccagtttaagggtacattgtagagccgaactttgagttactgtgcaagatttttttttcatgctgtcatttgtaatatgttttgtgagaatccttgggattaaagttttggttacaaattgttctttaa

SEQ ID NO: 324662 - DNA, 1196 bp, Homo sapiens
gtataaataaaggcgaggagaaggcggtggtccgccatttcgtggacgccgggtgagtgagagagttggttggtgttgggccggaggaaagcgggaagactcatcggagcgtgtggatttgagccgccgcattttttaaccctagatctcgaaatgcatcgtgattcctgtccattggactgtaaggtttatgtaggcaatcttggaaacaatggcaacaagacggaattggaacgggcttttggctactatggaccactccgaagtgtgtgggttgctagaaaaggtccctttctagagataggagaagagagagatcgctgtctcgggagagaaatcacaagccgtcccgatccttctctaggtctcgtagtcgatctaggtcaaatgaaaggaaatagaagacagtttgcaagagaagtggtgtacaggaaattacttcatttgacaggagtatgtacagaaaattcaagttttgtttgagacttcataagcttggtgcatttttaagatgttttagctgttcaaatctgtttgtctcttgaaacagtgacacaaaggtgtaattctctatggtttgaaatggatcatacgaggcatgtaataccaagaattgttactttacaatgttcccttaagcaaaattgaatttgctttgaacttttagttatgcacagactgataataaacctctaaacctgcccagcggaagtgtgtttttttttaaatttaaatacagaaacaactggcaaaaattgaactaagatttacttttttttccatagctgggatataggctgcagctatagttgaacaagcagtctttaaaaactgctgtgaaacacaggccatcagggaaaacgaaatgctgcactattaaattagaggtttttgaaaaatccaactctcatcctgggcagaggttgcctagttggtatagaatgttaagtttcaagaaagtttacctttgctttaggtcataagttccttatttgattgctgtatatggatacatggctgttcgtgacattctttatgtgcaaatttgtgatttcaaaaatgtcctgccagtttaagggtacattgtagagccgaactttgagttactgtgcaagatttttttttcatgctgtcatttgtaatatgttttgtgagaatccttgggattaaagttttggttacaaattgttctttaa

SEQ ID NO: 324663 - DNA, 3831 bp, Homo sapiens
  misc_feature (2177)..(2177): n is a, c, g, or t
gtataaataaaggcgaggagaaggcggtggtccgccatttcgtggacgccgggtgagtgagagagttggttggtgttgggccggaggaaagcgggaagactcatcggagcgtgtggatttgagccgccgcattttttaaccctagatctcgaaatgcatcgtgattcctgtccattggactgtaaggtttatgtaggcaatcttggaaacaatggcaacaagacggaattggaacgggcttttggctactatggaccactccgaagtgtgtgggttgctagaaacccacccggctttgcttttgttgaatttgaagatccccgagatgcagctgatgcagtccgagagctagatggaagaacactatgtggctgccgtgtaagagtggaactgtcgaatggtgaaaaaagaagtagaaatcgtggcccacctccctcttggggtcgtcgccctcgagatgattatcgtaggaggagtcctccacctcgtcgcagagtcaccatcatgtctcttctcaccaccctctgaatctgcattagccagtcaactagccctttcagcgtcatgtgaccagcgcgccccattcagcttggctggtgtcgtttcacatgacccaggctggccagtcgtcaggttgcaccgccctttggttcccgagcatgctgttttctctcagccttctctccaaccttaaccaaatcggcagcagccacctcgaccgcccacacattcctggccaatcagctcagctgtttatttaccaaatgtcttcacaacaactacagcagcagccttcggctaacaaaaaagcaggaaaaatccacaacacccccttcgccaaccaactaaatccaacgcaacatctggcaaaaccttttcagcaaattcttcctggccgtcagtccggcagcctcacctcaccatttctagcttgttgaaacccaaaactaagtaagtttttcctgcttatacagtttactgctggttaaaataaggagtaagcggcttaaagtaattcttttttctggatcaaaggctggctgtgcataattgaatggtaacgtacatatatattgcttgaaaaacttttaagggtgatagggaactcgtaatgtaactaggccttcaagtgaaacttatttgcatgtgcaagatgccaaactaaaaattttaatatctctaacagattagcttttctggcaaaaatttgttgaatcctatcacctttaaatggttttactaacagtttcaaaatttaaaattttggggttgaagtgtgggccaagctaaggtaattttggtaagcctaaacacactcttaaatgtgacgatcacaaatgcagttctaatgtagcacttaatggcatcaatatttacacctaccgcgttttcacaaaattacactatccacctggtacctaagtcttgtcatggacttacaggtttgcatgggttccaaatactggtttatggtactgtttttggaactacttgtgggactatattttggtgtggtgtttgggtagtgaagttagtttgacatgaagttttgcattggacagatctgctgtgaagcattctttgttaaagtgaatccatggttggaatacctgcttttcacttgagctttttgtttcttaatccttctgtgccttttttttcttttcttttttttctttttttttttttttttttttttttgacgatgggtgccagttcttcggcacattcactgggcccaacagtgagattgaaaagttgggaaatgcctcacgccataaatactaattgatgatgagcctaattttcctgtttctgcttttagatctccaagaaggagaagcttctctcgcagccggagcaggtaaatgactaccttttttggctacgttcttagaaatggcagtgtttctgctattcctaaacttttccaggtggcttagttaatgggaataaaccttggctttaatagtgaatcaagttgtaaggatgagtcagctttctttgagttttcaaaggctttttagaaagtatttaattttttaaaaaaggatctgtcacccaggctggagtgcagtggtgtgattatagctcactgtagcctttaactcctggccttggagtgatcctccctcttcagcctcctgagtagcttggactacaggcaagtactgccntacctggctaatttattttttgtggagatgggatctcactttgttgtccaatctgttctcaaactcttggcttcaagtgagcctcctgcctctgcctcccaaaatattggaattattggcatgagtcaccatgccagatcaagaaaatatttatgtataattttatcatacctcattggtcctaatgtttttttgcttgtttaggtccctttctagagataggagaagagagagatcgctgtctcgggagagaaatcacaagccgtcccgatccttctctaggtctcgtaggtaagatctttgataacttgtatttaagactttgcatacatagtatgctaaggcctgtcttctaagccataaattttttaccttaaagttctatttcgatatgtcactaaagtgtcaccaagttacagatgtaatgttttgttttctttttttttttttttttttagtcgatctaggtcaaatgaaaggaaatagaagacagtttgcaagagaagtggtgtacaggaaattacttcatttgacaggagtatgtacagaaaattcaagttttgtttgagacttcataagcttggtgcatttttaagatgttttagctgttcaaatctgtttgtctcttgaaacagtgacacaaaggtgtaattctctatggtttgaaatggatcatacgaggcatgtaataccaagaattgttactttacaatgttcccttaagcaaaattgaatttgctttgaacttttagttatgcacagactgataataaacctctaaacctgcccagcggaagtgtgtttttttttaaatttaaatacagaaacaactggcaaaaattgaactaagatttacttttttttccatagctgggatataggctgcagctatagttgaacaagcagtctttaaaaactgctgtgaaacacaggccatcagggaaaacgaaatgctgcactattaaattagaggtttttgaaaaatccaactctcatcctgggcagaggttgcctagttggtatagaatgttaagtttcaagaaagtttacctttgctttaggtcataagttccttatttgattgctgtatatggatacatggctgttcgtgacattctttatgtgcaaatttgtgatttcaaaaatgtcctgccagtttaagggtacattgtagagccgaactttgagttactgtgcaagatttttttttcatgctgtcatttgtaatatgttttgtgagaatccttgggattaaagttttggttacaaattgttctttaaaaaaaaaaaaaaaaaaaaaaacaaaaaacgtgtgtgtgggcgcgcgcccgcgcggcccccgcgaagaagagctttcttagaaaccacattcgcgggggggcgcgcgcggggcccgcggggggtataggggaaaccgtgggcccaaagagtgggtgttccacagagggagaatccgcgggaacagggaacaaagggggcgggggatttctcccccacaaataaaaaaggcccgcggggggaaaaccagagggcgttctgtgcaaaaattctcaaagagggggttccggggggggccatagaggggggaccttattcaagggggagtcccagggagagccggaaatttaaaattggcccccaaaccggggggaga

SEQ ID NO: 324664 - DNA, 953 bp, Homo sapiens
gtataaataaaggcgaggagaaggcggtggtccgccatttcgtggacgccgggtgagtgagagagttggttggtgttgggccggaggaaagcgggaagactcatcggagcgtgtggatttgagccgccgcattttttaaccctagatctcgaaatgcatcgtgattcctgtccattggactgtaaggtttatgtaggcaatcttggaaacaatggcaacaagacggaattggaacgggcttttggctactatggaccactccgaagtgtgtgggttgctagaaacccacccggctttgcttttgttgaatttgaagatccccgagatgcagctgatgcagtccgagagctagatggaagaacactatgtggctgccgtgtaagagtggaactgtcgaatggtgaaaaaagaagtagaaatcgtggcccacctccctcttggggtcgtcgccctcgagatgattatcgtaggaggagtcctccacctcgtcgcagatctccaagaaggagaagcttctctcgcagccggagcaggtaggtccctttctagagataggagaagagagagatcgctgtctcgggagagaaatcacaagccgtcccgatccttctctaggtctcgtagtcgatctaggtcaaatgaaaggaaatagaagacagtttgcaagagaagtggtgtacaggaaattacttcatttgacaggagtatgtacagaaaattcaagttttgtttgagacttcataagcttggtgcatttttaagatgttttagctgttcaaatctgtttgtctcttgaaacagtgacacaaaggtgtaattctctatggtttgaaatggatcatacgaggcatgtaataccaagaattgttactttacaatgttcccttaagcaaaattgaatttgctttgaacttttagttatgcacagactgataataaacctctaaacctgc

SEQ ID NO: 324665 - DNA, 1225 bp, Homo sapiens
  misc_feature (998)..(998): n is a, c, g, or t
  misc_feature (1007)..(1007): n is a, c, g, or t
gtataaataaaggcgaggagaaggcggtggtccgccatttcgtggacgccgggtgagtgagagagttggttggtgttgggccggaggaaagcgggaagactcatcggagcgtgtggatttgagccgccgcattttttaaccctagatctcgaaatgcatcgtgattcctgtccattggactgtaaggtttatgtaggcaatcttggaaacaatggcaacaagacggaattggaacgggcttttggctactatggaccactccgaagtgtgtgggttgctagaaacccacccggctttgcttttgttgaatttgaagatccccgagatgcagctgatgcagtccgagagctagatggaagaacactatgtggctgccgtgtaagagtggaactgtcgaatggtgaaaaaagaagtagaaatcgtggcccacctccctcttggggtcgtcgccctcgagatgattatcgtaggaggagtcctccacctcgtcgcagatctccaagaaggagaagcttctctcgcagccggagcaggtaggtccctttctagagataggagaagagagagatcgctgtctcgggagagaaatcacaagccgtcccgatccttctctaggtctcgtagtcgatctaggtcaaatgaaaggaaatagaagacagtttgcaagagaagtggtgtacaggaaattacttcatttgacaggagtatgtacagaaaattcaagttttgtttgagacttcataagcttggtgcatttttaagatgttttagctgttcaaatctgtttgtctcttgaaacagtgacacaaaggtgtaattctctatggtttgaaatggatcatacgaggcatgtaataccaagaattgttactttacaatgttcccttaagcaaaattgaatttgctttgaacttttagttatgcacagactgataataaacctctaaacctgcaaaaaaaaaaaagaaaaaaaaaaaaaaaaaaaaaaaaaaaaaaanaaaaaaaanaaaaaaaaaaaaaaaaaaaaaaaaaaaaaaaaaaagaaaaaaaagaaaaaaccaaaaagagcacaaaaacgacgcgacgcaaaaatagaacaaacaagaacgagcgacacacccatattaagcaaggaagaacaaagcagaatataagtagagacgagggccgacagtatcgaacgcaccctcaagaacagagctgagccaatagagaacacaatgcg

SEQ ID NO: 324666 - DNA, 895 bp, Homo sapiens
gtataaataaaggcgaggagaaggcggtggtccgccatttcgtggacgccgggtgagtgagagagttggttggtgttgggccggaggaaagcgggaagactcatcggagcgtgtggatttgagccgccgcattttttaaccctagatctcgaaatgcatcgtgattcctgtccattggactgtaaggtttatgtaggcaatcttggaaacaatggcaacaagacggaattggaacgggcttttggctactatggaccactccgaagtgtgtgggttgctagaaacccacccggctttgcttttgttgaatttgaagatccccgagatgcagctgatgcagtccgagagctagatggaagaacactatgtggctgccgtgtaagagtggaactgtcgaatggtgaaaaaagaagtagaaatcgtggcccacctccctcttggggtcgtcgccctcgagatgattatcgtaggaggagtcctccacctcgtcgcagatctccaagaaggagaagcttctctcgcagccggagcaggtaggtccctttctagagataggagaagagagagatcgctgtctcgggagagaaatcacaagccgtcccgatccttctctaggtctcgtagtcgatctaggtcaaatgaaaggaaatagaagacagtttgcaagagaagtggtgtacaggaaattacttcatttgacaggagtatgtacagaaaattcaagttttgtttgagacttcataagcttggtgcatttttaagatgttttagctgttcaaatctgtttgtctcttgaaacagtgacacaaaggtgtaattctctatggtttgaaacggcatcttcatcgaggaaaacggcatcttcatcggcgaaaacggcatcttcatcggcgaa

SEQ ID NO: 324667 - DNA, 1405 bp, Homo sapiens
gtataaataaaggcgaggagaaggcggtggtccgccatttcgtggacgccgggtgagtgagagagttggttggtgttgggccggaggaaagcgggaagactcatcggagcgtgtggatttgagccgccgcattttttaaccctagatctcgaaatgcatcgtgattcctgtccattggactgtaaggtttatgtaggcaatcttggaaacaatggcaacaagacggaattggaacgggcttttggctactatggaccactccgaagtgtgtgggttgctagaaacccacccggctttgcttttgttgaatttgaagatccccgagatgcagctgatgcagtccgagagctagatggaagaacactatgtggctgccgtgtaagagtggaactgtcgaatggtgaaaaaagaagtagaaatcgtggcccacctccctcttggggtcgtcgccctcgagatgattatcgtaggaggagtcctccacctcgtcgcagagtcaccatcatgtctcttctcaccaccctctgaatctgcattagccagtcaactagccctttcagcgtcatgtgaccagcgcgccccattcagcttggctggtgtcgtttcacatgacccaggctggccagtcgtcaggttgcaccgccctttggttcccgagcatgctgttttctctcagccttctctccaaccttaaccaaatcggcagcagccacctcgaccgcccacacattcctggccaatcagctcagctgtttatttaccaaatgtcttcacaacaactacagcagcagccttcggctaacaaaaaagcaggaaaaatccacaacacccccttcgccaaccaactaaatccaacgcaacatctggcaaaaccttttcagcaaattcttcctggccgtcagtccggcagcctcacctcaccatttctagcttgttgaaacccaaaactaatctccaagaaggagaagcttctctcgcagccggagcaggtccctttctagagataggagaagagagagatcgctgtctcgggagagaaatcacaagccgtcccgatccttctctaggtctcgtagtcgatctaggtcaaatgaaaggaaatagaagacagtttgcaagagaagtggtgtacaggaaattacttcatttgacaggagtatgtacagaaaattcaagttttgtttgagacttcataagcttggtgcatttttaagatgttttagctgttcaaatctgtttgtctcttgaaacagtgacacaaaggtgtaattctctatggtttgaaatggatcatacgaggcatgtaataccaagaattgttactttacaatgttcccttaagcaaaattgaatttgctttgaacttttagttatgcacagactgataataaacctctaaacctgc

SEQ ID NO: 324668 - DNA, 1116 bp, Homo sapiens
gtataaataaaggcgaggagaaggcggtggtccgccatttcgtggacgccgggtgagtgagagagttggttggtgttgggccggaggaaagcgggaagactcatcggagcgtgtggatttgagccgccgcattttttaaccctagatctcgaaatgcatcgtgattcctgtccattggactgtaaggtttatgtaggcaatcttggaaacaatggcaacaagacggaattggaacgggcttttggctactatggaccactccgaagtgtgtgggttgctagaaacccacccggctttgcttttgttgaatttgaagatccccgagatgcagctgatgcagtccgagagctagatggaagaacactatgtggctgccgtgtaagagtggaactgtcgaatggtgaaaaaagaagtagaaatcgtggcccacctccctcttggggtcgtcgccctcgagatgattatcgtaggaggagtcctccacctcgtcgcagatctccaagaaggagaagcttctctcgcagccggagcaggtccctttctagagataggagaagagagagatcgctgtctcgggagagaaatcacaagccgtcccgatccttctctaggtctcgtaggtaagatctttgataacttgtatttaagactttgcatacatagtatgctaaggcctgtcttctaagccataaattttttaccttaaagttctatttcgatatgtcactaaagtgtcaccaagttacagatgtaatgttttgttttctttttttttttttttttttagtcgatctaggtcaaatgaaaggaaatagaagacagtttgcaagagaagtggtgtacaggaaattacttcatttgacaggagtatgtacagaaaattcaagttttgtttgagacttcataagcttggtgcatttttaagatgttttagctgttcaaatctgtttgtctcttgaaacagtgacacaaaggtgtaattctctatggtttgaaatggatcatacgaggcatgtaataccaagaattgttactttacaatgttcccttaagcaaaattgaatttgctttgaacttttagttatgcacagactgataataaacctctaaacctgc

SEQ ID NO: 324669 - DNA, 743 bp, Homo sapiens
acagagtcttgctccatcacccagactggagcacagtggcatacttcatggctcattgcagcctcgacctcccaggctcaagcaatcctcccacctcagcctccctagtggctggctaatttttgtatttttgatagagatggggtttcaccatgttgcccaggctggtctcaaactcctgagctcaagcgatctgcctgcctcggtctcccaaagtgctgggattacaggtgtgagccactgtactcagcccttaatctagttttttaattaaatttaaatacagaaacaactggcaaaaattgaactaagatttacttttttttccatagctgggatataggctgcagctatagttgaacaagcagtctttaaaaactgctgtgaaacacaggccatcagggaaaacgaaatgctgcactattaaattagaggtttttgaaaaatccaactctcatcctgggcagaggttgcctagttggtatagaatgttaagtttcaagaaagtttacctttgctttaggtcataagttccttatttgattgctgtatatggatacatggctgttcgtgacattctttatgtgcaaatttgtgatttcaaaaatgtcctgccagtttaagggtacattgtagagccgaactttgagttactgtgcaagatttttttttcatgctgtcatttgtaatatgttttgtgagaatccttgggattaaagttttggttacaaattgttctttaa

SEQ ID NO: 324670 - DNA, 408 bp, Homo sapiens
  misc_feature (346)..(346): n is a, c, g, or t
  misc_feature (365)..(365): n is a, c, g, or t
  misc_feature (375)..(375): n is a, c, g, or t
gtataaataaaggcgaggagaaggcggtggtccgccatttcgtggacgccgggtgagtgagagagttggttggtgttgggccggaggaaagcgggaagactcatcggagcgtgtggatttgagccgccgcattttttaaccctagatctcgaaatgcatcgtgattcctgtccattggactgtaaggtttatgtaggcaatcttggaaacaatggcaacaagacggaattggaacgggcttttggctactatggaccactccgaagtgtgtgggttgctagaaaccaccgcttgttttgtgattgagatccgagatcactgatcagccagagtgatgagacctatnggtgcggaaatggactgcnatgtagaganaatggcactcttgggcgcgctcaatatatgagg

SEQ ID NO: 324671 - DNA, 2778 bp, Homo sapiens
gtataaataaaggcgaggagaaggcggtggtccgccatttcgtggacgccgggtgagtgagagagttggttggtgttgggccggaggaaagcgggaagactcatcggagcgtgtggatttgagccgccgcattttttaaccctagatctcgaaatgcatcgtgattcctgtccattggactgtaaggtttatgtaggcaatcttggaaacaatggcaacaagacggaattggaacgggcttttggctactatggaccactccgaagtgtgtgggttgctagaaacccacccggctttgcttttgttgaatttgaagatccccgagatgcagctgatgcagtccgagagctagatggaagaacactatgtggctgccgtgtaagagtggaactgtcgaatggtgaaaaaagaagtagaaatcgtggcccacctccctcttggggtcgtcgccctcgagatgattatcgtaggaggagtcctccacctcgtcgcagagtcaccatcatgtctcttctcaccaccctctgaatctgcattagccagtcaactagccctttcagcgtcatgtgaccagcgcgccccattcagcttggctggtgtcgtttcacatgacccaggctggccagtcgtcaggttgcaccgccctttggttcccgagcatgctgttttctctcagccttctctccaaccttaaccaaatcggcagcagccacctcgaccgcccacacattcctggccaatcagctcagctgtttatttaccaaatgtcttcacaacaactacagcagcagccttcggctaacaaaaaagcaggaaaaatccacaacacccccttcgccaaccaactaaatccaacgcaacatctggcaaaaccttttcagcaaattcttcctggccgtcagtccggcagcctcacctcaccatttctagcttgttgaaacccaaaactaagtaagtttttcctgcttatacagtttactgctggttaaaataaggagtaagcggcttaaagtaattcttttttctggatcaaaggctggctgtgcataattgaatggtaacgtacatatatattgcttgaaaaacttttaagggtgatagggaactcgtaatgtaactaggccttcaagtgaaacttatttgcatgtgcaagatgccaaactaaaaattttaatatctctaacagattagcttttctggcaaaaatttgttgaatcctatcacctttaaatggttttactaacagtttcaaaatttaaaattttggggttgaagtgtgggccaagctaaggtaattttggtaagcctaaacacactcttaaatgtgacgatcacaaatgcagttctaatgtagcacttaatggcatcaatatttacacctaccgcgttttcacaaaattacactatccacctggtacctaagtcttgtcatggacttacaggtttgcatgggttccaaatactggtttatggtactgtttttggaactacttgtgggactatattttggtgtggtgtttgggtagtgaagttagtttgacatgaagttttgcattggacagatctgctgtgaagcattctttgttaaagtgaatccatggttggaatacctgcttttcacttgagctttttgtttcttaatccttctgtgccttttttttcttttcttttttttctttttttttttttttttttttttttgacgatgggtgccagttcttcggcacattcactgggcccaacagtgagattgaaaagttgggaaatgcctcacgccataaatactaattgatgatgagcctaattttcctgtttctgcttttagatctccaagaaggagaagcttctctcgcagccggagcaggtaggtccctttctagagataggagaagagagagatcgctgtctcgggagagaaatcacaagccgtcccgatccttctctaggtctcgtagtcgatctaggtcaaatgaaaggaaatagaagacagtttgcaagagaagtggtgtacaggaaattacttcatttgacaggagtatgtacagaaaattcaagttttgtttgagacttcataagcttggtgcatttttaagatgttttagctgttcaaatctgtttgtctcttgaaacagtgacacaaaggtgtaattctctatggtttgaaatggatcatacgaggcatgtaataccaagaattgttactttacaatgttcccttaagcaaaattgaatttgctttgaacttttagttatgcacagactgataataaacctctaaacctgcccagcggaagtgtgtttttttttaaatttaaatacagaaacaactggcaaaaattgaactaagatttacttttttttccatagctgggatataggctgcagctatagttgaacaagcagtctttaaaaactgctgtgaaacacaggccatcagggaaaacgaaatgctgcactattaaattagaggtttttgaaaaatccaactctcatcctgggcagaggttgcctagttggtatagaatgttaagtttcaagaaagtttacctttgctttaggtcataagttccttatttgattgctgtatatggatacatggctgttcgtgacattctttatgtgcaaatttgtgatttcaaaaatgtcctgccagtttaagggtacattgtagagccgaactttgagttactgtgcaagatttttttttcatgctgtcatttgtaatatgttttgtgagaatccttgggattaaagttttggttacaaattgttctttaa

SEQ ID NO: 324672 - DNA, 2686 bp, Homo sapiens
gtataaataaaggcgaggagaaggcggtggtccgccatttcgtggacgccgggtgagtgagagagttggttggtgttgggccggaggaaagcgggaagactcatcggagcgtgtggatttgagccgccgcattttttaaccctagatctcgaaatgcatcgtgattcctgtccattggactgtaaggtttatgtaggcaatcttggaaacaatggcaacaagacggaattggaacgggcttttggctactatggaccactccgaagtgtgtgggttgctagaaacccacccggctttgcttttgttgaatttgaagatccccgagatgcagctgatgcagtccgagagctagatggaagaacactatgtggctgccgtgtaagagtggaactgtcgaatggtgaagattatcgtaggaggagtcctccacctcgtcgcagacaggtacttgagagaaagcttgttaagaggtattggtgtaatggagtagctagtaggagcaggtatttctcttaagtttgttggtgggttttaaactttggaagaatcggaggtttctgtgaaacatttgttgggtgtaatttggggtatgtgagttgtgctgagtgttggcttttgtctttaggtcactgttcatgttggtagtcagtaacttctatcttggatctgtcttctagttcatctttctagttgcatctttccaaatcttcccttatacttcagtttaggcctttttccatttcttggctccataatgacaaacattacattcaactctagctcttcacaaatttgtgttttctactattagcacaattgtaatatttatcaaacaggcagctgttttaatgttacaactggtaaagtagaaatcattctgagactaacttaagtcactgaccaataaagggggctaaaaaagaagtaatcccagtcatctgttcttcaatcccaaataggagaaaattcagtttttttataattgaaaatggcatcattcttggaccaggcagtattgtctgggtgctaactccacatctcctcagacctccaaaatagtttctataggactaaatttacctcttacaggtgagtggagtccttctaggagacaggagttcaaaatcttgccccttttgctattttgaaaaacaacagcacactgttgcccatcataataaagagtatttgttagctaatagatggttgtactgatggcttgtttttcattttttttgtgctttttggtccatctattaataaaaatgaaccccgttacagagtcaccatcatgtctcttctcaccaccctctgaatctgcattagccagtcaactagccctttcagcgtcatgtgaccagcgcgccccattcagcttggctggtgtcgtttcacatgacccaggctggccagtcgtcaggttgcaccgccctttggttcccgagcatgctgttttctctcagccttctctccaaccttaaccaaatcggcagcagccacctcgaccgcccacacattcctggccaatcagctcagctgtttatttaccaaatgtcttcacaacaactacagcagcagccttcggctaacaaaaaagcaggaaaaatccacaacacccccttcgccaaccaactaaatccaacgcaacatctggcaaaaccttttcagcaaattcttcctggccgtcagtccggcagcctcacctcaccatttctagcttgttgaaacccaaaactaatctccaagaaggagaagcttctctcgcagccggagcaggtccctttctagagataggagaagagagagatcgctgtctcgggagagaaatcacaagccgtcccgatccttctctaggtctcgtagtcgatctaggtcaaatgaaaggaaatagaagacagtttgcaagagaagtggtgtacaggaaattacttcatttgacaggagtatgtacagaaaattcaagttttgtttgagacttcataagcttggtgcatttttaagatgttttagctgttcaaatctgtttgtctcttgaaacagtgacacaaaggtgtaattctctatggtttgaaatggatcatacgaggcatgtaataccaagaattgttactttacaatgttcccttaagcaaaattgaatttgctttgaacttttagttatgcacagactgataataaacctctaaacctgcccagcggaagtgtgtttttttttaaatttaaatacagaaacaactggcaaaaattgaactaagatttacttttttttccatagctgggatataggctgcagctatagttgaacaagcagtctttaaaaactgctgtgaaacacaggccatcagggaaaacgaaatgctgcactattaaattagaggtttttgaaaaatccaactctcatcctgggcagaggttgcctagttggtatagaatgttaagtttcaagaaagtttacctttgctttaggtcataagttccttatttgattgctgtatatggatacatggctgttcgtgacattctttatgtgcaaatttgtgatttcaaaaatgtcctgccagtttaagggtacattgtagagccgaactttgagttactgtgcaagatttttttttcatgctgtcatttgtaatatgttttgtgagaatccttgggattaaagttttggttacaaattgttctttaa

SEQ ID NO: 324673 - DNA, 1833 bp, Homo sapiens
gtataaataaaggcgaggagaaggcggtggtccgccatttcgtggacgccgggtgagtgagagagttggttggtgttgggccggaggaaagcgggaagactcatcggagcgtgtggatttgagccgccgcattttttaaccctagatctcgaaatgcatcgtgattcctgtccattggactgtaaggtttatgtaggcaatcttggaaacaatggcaacaagacggaattggaacgggcttttggctactatggaccactccgaagtgtgtgggttgctagaaacccacccggctttgcttttgttgaatttgaagatccccgagatgcagctgatgcagtccgagagctagatggaagaacactatgtggctgccgtgtaagagtggaactgtcgaatggtgaaaaaagaagtagaaatcgtggcccacctccctcttggggtcgtcgccctcgagatgattatcgtaggaggagtcctccacctcgtcgcagagtcaccatcatgtctcttctcaccaccctctgaatctgcattagccagtcaactagccctttcagcgtcatgtgaccagcgcgccccattcagcttggctggtgtcgtttcacatgacccaggctggccagtcgtcaggttgcaccgccctttggttcccgagcatgctgttttctctcagccttctctccaaccttaaccaaatcggcagcagccacctcgaccgcccacacattcctggccaatcagctcagctgtttatttaccaaatgtcttcacaacaactacagcagcagccttcggctaacaaaaaagcaggaaaaatccacaacacccccttcgccaaccaactaaatccaacgcaacatctggcaaaaccttttcagcaaattcttcctggccgtcagtccggcagcctcacctcaccatttctagcttgttgaaacccaaaactaatctccaagaaggagaagcttctctcgcagccggagcaggtaggtccctttctagagataggagaagagagagatcgctgtctcgggagagaaatcacaagccgtcccgatccttctctaggtctcgtagtcgatctaggtcaaatgaaaggaaatagaagacagtttgcaagagaagtggtgtacaggaaattacttcatttgacaggagtatgtacagtttgtctcttgaaacagtgacacaaaggtgtaattctctatggtttgaaatggatcatacgaggcatgtaataccaagaattgttactttacaatgttcccttaagcaaaattgaatttgctttgaacttttagttatgcacagactgataataaacctctaaacctgcccagcggaagtgtgtttttttttaaatttaaatacagaaacaactggcaaaaattgaactaagatttacttttttttccatagctgggatataggctgcagctatagttgaacaagcagtctttaaaaactgctgtgaaacacaggccatcagggaaaacgaaatgctgcactattaaattagaggtttttgaaaaatccaactctcatcctgggcagaggttgcctagttggtatagaatgttaagtttcaagaaagtttacctttgctttaggtcataagttccttatttgattgctgtatatggatacatggctgttcgtgacattctttatgtgcaaatttgtgatttcaaaaatgtcctgccagtttaagggtacattgtagagccgaactttgagttactgtgcaagatttttttttcatgctgtcatttgtaatatgttttgtgagaatccttgggattaaagttttggttacaaattgttctttaa

SEQ ID NO: 324674 - DNA, 1490 bp, Homo sapiens
aaagaggcgccgcgccagttttgtgacgttcagcacggggcggtggcgggggctcccggcccattcggagggtttcctagtcttggagtggaagaattaatattcctcattggggcatgagccaggatgggggttacctgggagttgggaaccacaaaggggagccgatagccgagttgtattcgaaatgcatcgtgattcctgtccattggactgtaaggtttatgtaggcaatcttggaaacaatggcaacaagacggaattggaacgggcttttggctactatggaccactccgaagtgtgtgggttgctagaaacccacccggctttgcttttgttgaatttgaagatccccgagatgcagctgatgcagtccgagagctagatggaagaacactatgtggctgccgtgtaagagtggaactgtcgaatggtgaaaaaagaagtagaaatcgtggcccacctccctcttggggtcgtcgccctcgagatgattatcgtaggaggagtcctccacctcgtcgcagatctccaagaaggagaagcttctctcgcagccggagcaggtaggtccctttctagagataggagaagagagagatcgctgtctcgggagagaaatcacaagccgtcccgatccttctctaggtctcgtagtcgatctaggtcaaatgaaaggaaatagaagacagtttgcaagagaagtggtgtacaggaaattacttcatttgacaggagtatgtacagcaaacaattccacgttttgtttgacgacttccataaggcttggtgccattttcagatgtttttagctggtccaaatctgtttgtctcttgaaacagtgacacaaaggtgtaattctctatggtttgaaatggatcatacgaggcatgtaataccaagaattgttactttacaatgttcccttaagcaaaattgaatttgctttgaacttttagttatgcacagactgataataaacctctaaacctgcccagcggaagtgtgtttttttttaaatttaaatacagaaacaactggcaaaaattgaactaagatttacttttttttccatagctgggatataggctgcagctatagttgaacaagcagtctttaaaaactgctgtgaaacacaggccatcagggaaaacgaaatgctgcactattaaattagaggtttttgaaaaatccaactctcatcctgggcagaggttgcctagttggtatagaatgttaagtttcaagaaagtttacctttgctttaggtcataagttccttatttgattgctgtatatggatacatggctgttcgtgacattctttatgtgcaaatttgtgatttcaaaaatgtcctgccagtttaagggtacattgtagagccgaactttgagttactgtgcaagatttttttttcatgctgtcatttgtaatatgttttgtgagaatccttgggattaaagttttggttacaaattgttctttaa

SEQ ID NO: 324675 - DNA, 2583 bp, Homo sapiens
tctattgcactttagtaaaacgaattgcttgtctagtccgtgtttaattggcacgagggccgggcgtgcggaggcggctgaggaggcgggaaggcggcagtggttgaaggggtgattgctgactagcggggagggagtgggcagcgatggtgatggcggcgaagaagggcccgggcccgggcggcggggtcagcgggggcaaggcggaggcggaggcggcctcggaggtgtggtgccgtcgggtgcgggagctgggtggctgcagccaggccgggaaccgccactgcttcgagtgcgcccagcgcggggtcacctacgtggatatcaccgtgggcagcttcgtgtgcaccacctgctccggcctcctgagagggctgaacccccctcatcgtgtcaagtcaatctccatgacaactttcactgagcctgaagtagtattcctgcaatcccgtggaaatgaggtttgccggaagatttggttgggtctgtttgatgctcggacatctttagtaccagattccagggatcctcagaaagtgaaggagtttctccaggaaaaatatgagaagaagagatggtatgtccccccagaccaagtcaaggggcccacttataccaaaggcagtgcctccacccctgtgcagggctccatcccagaagggaagccccttcggacacttctgggtgatcctgcaccgtctctctcagttgctgcctccacctcgagccagcccgtcagtcagtctcacgctcggacatcccaggcccggagcactcagccacctccccactcctctgtcaaaaaagccagtactgacctgctggctgacatcggtggagacccctttgctgcaccccagatggcaccagcttttgctgcattccctgcctttgggggccagacaccttcccaaggaggctttgccaactttgatgcctttagcagtggccccagctcttctgtgtttggaagcctccctccagctggtcaagcctcgttccaggcccagccaactcctgcagggagcagccaggggactccatttggtgccactcccctggcacccgccagtcagccaaacagcctcgcagacgtgggcagcttcctgggacccggggtgcccgctgcaggtgttcctagcagcctcttcgggatggctggccaggtccccccgctccagtctgtcacgatgggcggcggcggcggcagcagcacagggctggcctttggagccttcactaaccctttcacagctcccgccgcccagtccccgctgccttccaccaacccgttccagcccaatggcttggcgccagggcccggctttgggatgagcagtgctgggcctggcttcccccaggcagtgccacccactggggcctttgccagctccttcccagcaccgctgttccccccgcagaccccgcttgttcagcagcagaatggctcttccttcggggacttaggatcagccaagttggggcagaggccactgagccagccagctgggatctccaccaaccccttcatgactggaccctcatcaagcccattcgcctccaaacctccaaccaccaaccccttcttgtagcactgtgtttttggggggcctcttccctgccttctggggcccctctgctccctagagctctggtgaccacttgcctgtgggcatttctatgggccttggggatggtggaggtgctaatgctttgcttggggcctacaggtgaaaggtggctgccctcagattccacaaagcctctctcccctccctcgtcccacccccacccaggcaggaagcccaggaggagtgcgggcagggcctgacctggaggagtgatggttgagggggagggatttttttcaaatgatcagtcccctgtggaacagctcttccctgggcctagctcgccagcgctgtgctcctcatggacgggagcgcagtggggaaggtaggggaaagatgaggcacagtgttgatggggcagtgaccagacagtcctgagacccagaaggcccaggtggcccaagtgctcttggtggcccagcttggccagcacacactttcctcctgcagcaccccctgctgaaggggtcccccattgttttgcttccccagcgcccaggatgagcggtttaccatcgagcttacccgggcccggctcctgtcaagcactttagttagctgttggtgtcatgtttggataccagtgttttatatttatacatagagaggattttctaatatagcctattatatataaatagatctatctatatgcacatacatacatatatacacacacccagccgatctcccgctcccagactgctctcgtatgtggggaatgggatgaatccccatctgtgcctcgaccatcaaagccggagctccagggctggagggggggcagccatgtgtcctgacccccaccatccccagagcctgggttttccagggaaaggctttgtgcaattgcctggtcttttttttttttttttttctccatgtgcctccctgtccccaaatctctgcaccaaagctcattgcaggcaatgttggaaaagaactgcatttg

SEQ ID NO: 324676 - DNA, 2578 bp, Homo sapiens
ggacggcgaagtctcctgcggatgccgcccgctcccgagcttctgtcaggggagccgggcgtgcggaggcggctgaggaggcgggaaggcggcagtggttgaaggggtgattgctgactagcggggagggagtgggcagcgatggtgatggcggcgaagaagggcccgggcccgggcggcggggtcagcgggggcaaggcggaggcggaggcggcctcggaggtgtggtgccgtcgggtgcgggagctgggtggctgcagccaggccgggaaccgccactgcttcgagtgcgcccagcgcggggtcacctacgtggatatcaccgtgggcagcttcgtgtgcaccacctgctccggcctcctgagagggctgaacccccctcatcgtgtcaagtcaatctccatgacaactttcactgagcctgaagtagtattcctgcaatcccgtggaaatgaggtttgccggaagatttggttgggtctgtttgatgctcggacatctttagtaccagattccagggatcctcagaaagtgaaggagtttctccaggaaaaatatgagaagaagagatggtatgtccccccagaccaagtcaaggggcccacttataccaaaggcagtgcctccacccctgtgcagggctccatcccagaagggaagccccttcggacacttctgggtgatcctgcaccgtctctctcagttgctgcctccacctcgagccagcccgtcagtcagtctcacgctcggacatcccaggcccggagcactcagccacctccccactcctctgtcaaaaaagccagtactgacctgctggctgacatcggtggagacccctttgctgcaccccagatggcaccagcttttgctgcattccctgcctttgggggccagacaccttcccaaggaggctttgccaactttgatgcctttagcagtggccccagctcttctgtgtttggaagcctccctccagctggtcaagcctcgttccaggcccagccaactcctgcagggagcagccaggggactccatttggtgccactcccctggcacccgccagtcagccaaacagcctcgcagacgtgggcagcttcctgggacccggggtgcccgctgcaggtgttcctagcagcctcttcgggatggctggccaggtccccccgctccagtctgtcacgatgggcggcggcggcggcagcagcacagggctggcctttggagccttcactaaccctttcacagctcccgccgcccagtccccgctgccttccaccaacccgttccagcccaatggcttggcgccagggcccggctttgggatgagcagtgctgggcctggcttcccccaggcagtgccacccactggggcctttgccagctccttcccagcaccgctgttccccccgcagaccccgcttgttcagcagcagaatggctcttccttcggggacttaggatcagccaagttggggcagaggccactgagccagccagctgggatctccaccaaccccttcatgactggaccctcatcaagcccattcgcctccaaacctccaaccaccaaccccttcttgtagcactgtgtttttggggggcctcttccctgccttctggggcccctctgctccctagagctctggtgaccacttgcctgtgggcatttctatgggccttggggatggtggaggtgctaatgctttgcttggggcctacaggtgaaaggtggctgccctcagattccacaaagcctctctcccctccctcgtcccacccccacccaggcaggaagcccaggaggagtgcgggcagggcctgacctggaggagtgatggttgagggggagggatttttttcaaatgatcagtcccctgtggaacagctcttccctgggcctagctcgccagcgctgtgctcctcatggacgggagcgcagtggggaaggtaggggaaagatgaggcacagtgttgatggggcagtgaccagacagtcctgagacccagaaggcccaggtggcccaagtgctcttggtggcccagcttggccagcacacactttcctcctgcagcaccccctgctgaaggggtcccccattgttttgcttccccagcgcccaggatgagcggtttaccatcgagcttacccgggcccggctcctgtcaagcactttagttagctgttggtgtcatgtttggataccagtgttttatatttatacatagagaggattttctaatatagcctattatatataaatagatctatctatatgcacatacatacatatatacacacacccagccgatctcccgctcccagactgctctcgtatgtggggaatgggatgaatccccatctgtgcctcgaccatcaaagccggagctccagggctggagggggggcagccatgtgtcctgacccccaccatccccagagcctgggttttccagggaaaggctttgtgcaattgcctggtcttttttttttttttttttctccatgtgcctccctgtccccaaatctctgcaccaaagctcattgcaggcaatgttggaaaagaactgcatttg

SEQ ID NO: 324677 - DNA, 2378 bp, Homo sapiens
tctattgcactttagtaaaacgaattgcttgtctagtccgtgtttaattggcacgagggccgggcgtgcggaggcggctgaggaggcgggaaggcggcagtggttgaaggggtgattgctgactagcggggagggagtgggcagcgatggtgatggcggcgaagaagggcccgggcccgggcggcggggtcagcgggggcaaggcggaggcggaggcggcctcggaggtgtggtgccgtcgggtgcgggagctgggtggctgcagccaggccgggaaccgccactgcttcgagtgcgcccagcgcggggtcacctacgtggatatcaccgtgggcagcttcgtgtgcaccacctgctccggcctcctgagagggctgaacccccctcatcgtgtcaagtcaatctccatgacaactttcactgagcctgaagtagtattcctgcaatcccgtggaaatgaggtttgccggaagatttggttgggtctgtttgatgctcggacatctttagtaccagattccagggatcctcagaaagtgaaggagtttctccaggaaaaatatgagaagaagagatggtatgtccccccagaccaagtcaaggggcccacttataccaaaggcagtgcctccacccctgtgcagggctccatcccagaagggaagccccttcggacacttctgggtgatcctgcaccgtctctctcagttgctgcctccacctcgagccagcccgtcagtcagtctcacgctcggacatcccaggcccggagcactcagccacctccccactcctctgtcaaaaaagccagtactgacctgctggctgacatcggtggagacccctttgctgcaccccagatggcaccagcttttgctgcattccctgcctttgggggccagacaccttcccaaggaggctttgccaactttgatgcctttagcagtggccccagctcttctgtgtttggaagcctccctccagctggtcaagcctcgttccaggcccagccaactcctgcagggagcagccaggggactccatttggtgccactcccctggcacccgccagtcagccaaacagcctcgcagacgtgggcagcttcctgggacccggggtgcccgctgcaggtgttcctagcagcctcttcgggatggctggccaggtccccccgctccagtctgtcacgatgggcggcggcggcggcagcagcacagggctggcctttggagccttcactaaccctttcacagctcccgccgcccagtccccgctgccttccaccaacccgttccaccagctgggatctccaccaaccccttcatgactggaccctcatcaagcccattcgcctccaaacctccaaccaccaaccccttcttgtagcactgtgtttttggggggcctcttccctgccttctggggcccctctgctccctagagctctggtgaccacttgcctgtgggcatttctatgggccttggggatggtggaggtgctaatgctttgcttggggcctacaggtgaaaggtggctgccctcagattccacaaagcctctctcccctccctcgtcccacccccacccaggcaggaagcccaggaggagtgcgggcagggcctgacctggaggagtgatggttgagggggagggatttttttcaaatgatcagtcccctgtggaacagctcttccctgggcctagctcgccagcgctgtgctcctcatggacgggagcgcagtggggaaggtaggggaaagatgaggcacagtgttgatggggcagtgaccagacagtcctgagacccagaaggcccaggtggcccaagtgctcttggtggcccagcttggccagcacacactttcctcctgcagcaccccctgctgaaggggtcccccattgttttgcttccccagcgcccaggatgagcggtttaccatcgagcttacccgggcccggctcctgtcaagcactttagttagctgttggtgtcatgtttggataccagtgttttatatttatacatagagaggattttctaatatagcctattatatataaatagatctatctatatgcacatacatacatatatacacacacccagccgatctcccgctcccagactgctctcgtatgtggggaatgggatgaatccccatctgtgcctcgaccatcaaagccggagctccagggctggagggggggcagccatgtgtcctgacccccaccatccccagagcctgggttttccagggaaaggctttgtgcaattgcctggtcttttttttttttttttttctccatgtgcctccctgtccccaaatctctgcaccaaagctcattgcaggcaatgttggaaaagaactgcatttg

SEQ ID NO: 324678 - DNA, 744 bp, Homo sapiens
ggacggcgaagtctcctgcggatgccgcccgctcccgagcttctgtcaggggagccgggcgtgcggaggcggctgaggaggcgggaaggcggcagtggttgaaggggtgattgctgactagcggggagggagtgggcagcgatggtgatggcggcgaagaagggcccgggcccgggcggcggggtcagcgggggcaaggcggaggcggaggcggcctcggaggtgtggtgccgtcgggtgcgggagctgggtggctgcagccaggccgggaaccgccactgcttcgagtgcgcccagcgcggggtcacctacgtggatatcaccgtgggcagcttcgtgtgcaccacctgctccggcctcctgagagggctgaacccccctcatcgtgtcaagtcaatctccatgacaactttcactgagcctgaagtagtattcctgcaatcccgtggaaatgaggtttgccggaagatttggttgggtctgtttgatgctcggacatctttagtaccagattccagggatcctcagaaagtgaaggagtttctccaggaaaaatatgagaagaagagatggtatgtccccccagaccaagtcaaggggcccacttataccaaaggcagtgcctccacccctgtgcagggctccatcccagaagggaagccccttcggacacttctgggtgatcctgcaccgtctctctcagttgctgcctccacctcgagccaggtaactctcagatctgct

SEQ ID NO: 324679 - DNA, 482 bp, Homo sapiens
tctccatgtgcctccctgtccccaaatctctgcaccaaagctcattgcaggcaatgttggaaaagaactgcatttgaacgaaagagaaaacggcgcctgtggttttgcttcaggccactttgaggggttgcaggtcagtcaacatgactgatccttgacctggctctgctgggctggactgcctgggccagtgataatgctgccattggccagagacagggcagagcccgtccctgtctgaacaagagtcccgcattagcaatgagaagaagcgtggcgggagaggagccaccactgccggggactggagtttgttggatgtgaggggaatgcccactggggccagggtgggcaaaggaggttggtgccaatgtggtgctggaagtagacccctcctgggtctggaacattctctgccccaggctctttccacctggggatgttgtgacaacatccagctgtggtgtctgggctatttgtgt

SEQ ID NO: 324680 - DNA, 1328 bp, Homo sapiens
ggacggcgaagtctcctgcggatgccgcccgctcccgagcttctgtcaggggagccgggcgtgcggaggcggctgaggaggcgggaaggcggcagtggttgaaggggtgattgctgactagcggggagggagtgggcagcgatggtgatggcggcgaagaagggcccgggcccgggcggcggggtcagcgggggcaaggcggaggcggaggcggcctcggaggtgtggtgccgtcgggtgcgggagctgggtggctgcagccaggccgggaaccgccactgcttcgagtgcgcccagcgcggggtcacctacgtggatatcaccgtgggcagcttcgtgtgcaccacctgctccggcctcctgagagggctgaacccccctcatcgtgtcaagtcaatctccatgacaactttcactgagcctgaagtagtattcctgcaatcccgtggaaatgaggtttgccggaagatttggttgggtctgtttgatgctcggacatctttagtaccagattccagggatcctcagaaagtgaaggagtttctccaggaaaaatatgagaagaagagatggccagacaccttcccaaggaggctttgccaactttgatgcctttagcagtggccccagctcttctgtgtttggaagcctccctccagctggtcaagcctcgttccaggcccagccaactcctgcaggtaaactctgccccactggttcctttctcttccaaccgtgtccatttgtcatgtctataaatcaccattcatatcctcactatcctaaagaactgctcaaagcagcaaagcacaaagagaagcagctccaggagaggatgagcgtgtctgacacattcttgtcagggagagggggctctactgttctgctttttcatgaaaggaaaatgactaagattgcagcaggagctgtgtgggttatacactaggaaacttttcactaggaagtatggaagacctgagtcctagaaaaattgaaaatggacgtgactttttctctaaggtgctcttgtctgcatagtacgctgtcccaaagggtcaagggtcaaggtagtctccagaagtcctcatccatccctctaagaccaaaggcctgtaaactctatgttgctgccagccacaatggctcacgcctgcaatcctaacactttgggaggccgaggtgggaggatcgcttgagcccaggagtttgaggctgtagtgagtgattattgtgccattgcactccagtctgggtgacagagtgagaccccatctcaaaacaaacgaacgaacaaacaaaaccaaataaactatgttatttagccattg

SEQ ID NO: 324681 - DNA, 2110 bp, Homo sapiens
  misc_feature (2099)..(2099): n is a, c, g, or t
  misc_feature (2104)..(2104): n is a, c, g, or t
tctattgcactttagtaaaacgaattgcttgtctagtccgtgtttaattggcacgagggccgggcgtgcggaggcggctgaggaggcgggaaggcggcagtggttgaaggggtgattgctgactagcggggagggagtgggcagcgatggtgatggcggcgaagaagggcccgggcccgggcggcggggtcagcgggggcaaggcggaggcggaggcggcctcggaggtgtggtgccgtcgggtgcgggagctgggtggctgcagccaggccgggaaccgccactgcttcgagtgcgcccagcgcggggtcacctacgtggatatcaccgtgggcagcttcgtgtgcaccacctgctccggcctcctgagagggctgaacccccctcatcgtgtcaagtcaatctccatgacaactttcactgagcctgaagtagtattcctgcaatcccgtggaaatgaggtttgccggaagatttggttgggtctgtttgatgctcggacatctttagtaccagattccagggatcctcagaaagtgaaggagtttctccaggaaaaatatgagaagaagagatggtatgtccccccagaccaagtcaaggggcccacttataccaaaggcagtgcctccacccctgtgcagggctccatcccagaagggaagccccttcggacacttctgggtgatcctgcaccgtctctctcagttgctgcctccacctcgagccagcccgtcagtcagtctcacgctcggacatcccaggcccggagcactcagccacctccccactcctctgtcaaaaaagccagtactgacctgctggctgacatcggtggagacccctttgctgcaccccagatggcaccagcttttgctgcattccctgcctttgggggccagacaccttcccaaggaggctttgccaactttgatgcctttagcagtggccccagctcttctgtgtttggaagcctccctccagctggtcaagcctcgttccaggcccagccaactcctgcagggagcagccaggggactccatttggtgccactcccctggcacccgccagtcagccaaacagcctcgcagacgtgggcagcttcctgggacccggggtgcccgctgcaggtgttcctagcagcctcttcgggatggctggccaggtccccccgctccagtctgtcacgatgggcggcggcggcggcagcagcacagggctggcctttggagccttcactaaccctttcacagctcccgccgcccagtccccgctgccttccaccaacccgttccagcccaatggcttggcgccagggcccggctttgggatgagcagtgctgggcctggcttcccccaggcagtgccacccactggggcctttgccagctccttcccagcaccgctgttccccccgcagaccccgcttgttcagcagcagaatggctcttccttcggggacttaggatcagccaagttggggcagaggccactgagccagccagctgggatctccaccaaccccttcatgactggaccctcatcaagcccattcgcctccaaacctccaaccaccaaccccttcttgtagcactgtgtttttggggggcctcttccctgccttctggggcccctctgctccctagagctctggtgaccacttgcctgtgggcatttctatgggccttggggatggtggaggtgctaatgctttgcttggggcctacaggtgaaaggtggctgccctcagattccacaaagcctctctcccctccctcgtcccacccccacccaggcaggaagcccaggaggagtgcgggcagggcctgacctggaggagtgatggttgagggggagggatttttttcaaatgatcagtcccctgtggaacagctcttccctgggcctagctcgccagcgctgtgctcctcatggacgggagcgcagtggggaaggtaggggaaagatgaggcacagtgttgatggggcagtgaccagacagtcctgagacccagaaggcccaggtggcccaagtgctcttggtggcccagcttggccagcacacactttcctcctgcagcaccccctctaccccctntaganccaaaa

SEQ ID NO: 324682 - DNA, 2222 bp, Homo sapiens
gcccgcccgcaggccagcttctctcgggagcctccacccaggcgcatggctccatgaagcaagaggaggaggcagagtcgcgagagatcccgtccgccccagccgcgtctgggccaggagaaaagcaaaaccatattcctgctgctgtcagttttgatgcactgagaaaacttcagagacctaagctttttccagagaagagaagctttactggtgttccagccctaaggctcatataacattaacagacaagacacttttcagaaagacaggcaacgtgttggaccttccggagcttctcagaagacagagggttttcttttgaggagagggctgaacccccctcatcgtgtcaagtcaatctccatgacaactttcactgagcctgaagtagtattcctgcaatcccgtggaaatgaggtttgccggaagatttggttgggtctgtttgatgctcggacatctttagtaccagattccagggatcctcagaaagtgaaggagtttctccaggaaaaatatgagaagaagagatggccagacaccttcccaaggaggctttgccaactttgatgcctttagcagtggccccagctcttctgtgtttggaagcctccctccagctggtcaagcctcgttccaggcccagccaactcctgcagggagcagccaggggactccatttggtgccactcccctggcacccgccagtcagccaaacagcctcgcagacgtgggcagcttcctgggacccggggtgcccgctgcaggtgttcctagcagcctcttcgggatggctggccaggtccccccgctccagtctgtcacgatgggcggcggcggcggcagcagcacagggctggcctttggagccttcactaaccctttcacagctcccgccgcccagtccccgctgccttccaccaacccgttccagcccaatggcttggcgccagggcccggctttgggatgagcagtgctgggcctggcttcccccaggcagtgccacccactggggcctttgccagctccttcccagcaccgctgttccccccgcagaccccgcttgttcagcagcagaatggctcttccttcggggacttaggatcagccaagttggggcagaggccactgagccagccagctgggatctccaccaaccccttcatgactggaccctcatcaagcccattcgcctccaaacctccaaccaccaaccccttcttgtagcactgtgtttttggggggcctcttccctgccttctggggcccctctgctccctagagctctggtgaccacttgcctgtgggcatttctatgggccttggggatggtggaggtgctaatgctttgcttggggcctacaggtgaaaggtggctgccctcagattccacaaagcctctctcccctccctcgtcccacccccacccaggcaggaagcccaggaggagtgcgggcagggcctgacctggaggagtgatggttgagggggagggatttttttcaaatgatcagtcccctgtggaacagctcttccctgggcctagctcgccagcgctgtgctcctcatggacgggagcgcagtggggaaggtaggggaaagatgaggcacagtgttgatggggcagtgaccagacagtcctgagacccagaaggcccaggtggcccaagtgctcttggtggcccagcttggccagcacacactttcctcctgcagcaccccctgctgaaggggtcccccattgttttgcttccccagcgcccaggatgagcggtttaccatcgagcttacccgggcccggctcctgtcaagcactttagttagctgttggtgtcatgtttggataccagtgttttatatttatacatagagaggattttctaatatagcctattatatataaatagatctatctatatgcacatacatacatatatacacacacccagccgatctcccgctcccagactgctctcgtatgtggggaatgggatgaatccccatctgtgcctcgaccatcaaagccggagctccagggctggagggggggcagccatgtgtcctgacccccaccatccccagagcctgggttttccagggaaaggctttgtgcaattgcctggtcttttttttttttttttttctccatgtgcctccctgtccccaaatctctgcaccaaagctcattgcaggcaatgttggaaaagaactgcatttg

SEQ ID NO: 324683 - DNA, 1623 bp, Homo sapiens
tctattgcactttagtaaaacgaattgcttgtctagtccgtgtttaattggcacgagggccgggcgtgcggaggcggctgaggaggcgggaaggcggcagtggttgaaggggtgattgctgactagcggggagggagtgggcagcgatggtgatggcggcgaagaagggcccgggcccgggcggcggggtcagcgggggcaaggcggaggcggaggcggcctcggaggtgtggtgccgtcgggtgcgggacagcacagggctggcctttggagccttcactaaccctttcacagctcccgccgcccagtccccgctgccttccaccaacccgttccagcccaatggcttggcgccagggcccggctttgggatgagcagtgctgggcctggcttcccccaggcagtgccacccactggggcctttgccagctccttcccagcaccgctgttccccccgcagaccccgcttgttcagcagcagaatggctcttccttcggggacttaggatcagccaagttggggcagaggccactgagccagccagctgggatctccaccaaccccttcatgactggaccctcatcaagcccattcgcctccaaacctccaaccaccaaccccttcttgtagcactgtgtttttggggggcctcttccctgccttctggggcccctctgctccctagagctctggtgaccacttgcctgtgggcatttctatgggccttggggatggtggaggtgctaatgctttgcttggggcctacaggtgaaaggtggctgccctcagattccacaaagcctctctcccctccctcgtcccacccccacccaggcaggaagcccaggaggagtgcgggcagggcctgacctggaggagtgatggttgagggggagggatttttttcaaatgatcagtcccctgtggaacagctcttccctgggcctagctcgccagcgctgtgctcctcatggacgggagcgcagtggggaaggtaggggaaagatgaggcacagtgttgatggggcagtgaccagacagtcctgagacccagaaggcccaggtggcccaagtgctcttggtggcccagcttggccagcacacactttcctcctgcagcaccccctgctgaaggggtcccccattgttttgcttccccagcgcccaggatgagcggtttaccatcgagcttacccgggcccggctcctgtcaagcactttagttagctgttggtgtcatgtttggataccagtgttttatatttatacatagagaggattttctaatatagcctattatatataaatagatctatctatatgcacatacatacatatatacacacacccagccgatctcccgctcccagactgctctcgtatgtggggaatgggatgaatccccatctgtgcctcgaccatcaaagccggagctccagggctggagggggggcagccatgtgtcctgacccccaccatccccagagcctgggttttccagggaaaggctttgtgcaattgcctggtcttttttttttttttttttctccatgtgcctccctgtccccaaatctctgcaccaaagctcattgcaggcaatgttggaaaagaactgcatttg

SEQ ID NO: 324684 - DNA, 739 bp, Homo sapiens
caatcgcgaggcggcgggcgatcccgggctccccgggctgtgggctacaggcgcagagcgggccaggcgcggagctggcggcagtgacaggaggcgcgaacccgcagcgcttaccgcgcggcgccgcaccatggagcccgccgtgtcgctggccgtgtgcgcgctgctcttcctgctgtgggtgcgcctgaaggggctggagttcgtgctcatccaccagcgctgggtgttcgtgtgcctcttcctcctgccgctctcgcttatcttcgatatctactactacgtgcgcgcctgggtggtgttcaagctcagcagcgctccgcgcctgcacgagcagcgcgtgcgggacatccagaagcaggtgcgggaatggaaggagcagggtagcaagaccttcatgtgcacggggcgccctggctggctcactgtctcactacgtgtcgggaagtacaagaagacacacaaaaacatcatgatcaacctgatggacattctggaagtggacaccaagaaacagattgtccgtgtggagcccttggtgaccatgggccaggtgactgccctgctgacctccattgcactcagaaggcaaaggaaccaccctacccatttggcctctggagggggcagaagaaagaaagaaacctcatcctatattttacaaagcatgtgaattctggaagacatgtccccgtggctgtggggccgctgcttctgtttaaataaaagtggcctggaa

SEQ ID NO: 324685 - DNA, 873 bp, Homo sapiens
  misc_feature (744)..(744): n is a, c, g, or t
caatcgcgaggcggcgggcgatcccgggctccccgggctgtgggctacaggcgcagagcgggccaggcgcggagctggcggcagtgacaggaggcgcgaacccgcagcgcttaccgcgcggcgccgcaccatggagcccgccgtgtcgctggccgtgtgcgcgctgctcttcctgctgtgggtgcgcctgaaggggctggagttcgtgctcatccaccagcgctgggtgttcgtgtgcctcttcctcctgccgctctcgcttatcttcgatatctactactacgtgcgcgcctgggtggtgttcaagctcagcagcgctccgcgcctgcacgagcagcgcgtgcgggacatccagaagcaggtgcgggaatggaaggagcagggtagcaagaccttcatgtgcacggggcgccctggctggctcactgtctcactacgtgtcgggaagtacaagaagacacacaaaaacatcatgatcaacctgatggacattctggaagtggacaccaagaaacagattgtccgtgtggagcccttggtgaccatgggccaggtgactgccctgctgacctccattggctggactctccccgtgttgcctgagcttgatgacctcacagtggggggcttgatcatgggcacaggcatcgagtcatcatcccacaagtacggcctgttccaacacatctgcactgcttacgagctggtcctggctgatggcagctttgtgcgatgcactccgtncgaaaactcagacctgttctatgccgtgaaacctttacctagatcagccatcagcctgtcaactcagttaacaagttaaggaccgcagtgtttcaagtggatctcagtaaaggatcattggagccagaa

SEQ ID NO: 324686 - DNA, 3242 bp, Homo sapiens
  misc_feature (2)..(2): n is a, c, g, or t
tnaggctaggtacgaggccgggtggtaatcggccgacgagagggcctggagtacattcccttgagacactactaccaccgccacacgcgcagcatcttctgggagctccaggacatcatcccctttggcaacaaccccatcttccgctacctctttggctggatggtgcctcccaagatctccctcctgaagctgacccagggtgagaccctgcgcaagctgtacgagcagcaccacgtggtgcaggacatgctggtgcccatgaagtgcctgcagcaggccctgcacaccttccaaaacgacatccacgtctaccccatctggctgtgtccgttcatcctgcccagccagccaggcctagtgcaccccaaaggaaatgaggcagagctctacatcgacattggagcatatggggagccgcgtgtgaaacactttgaagccaggtcctgcatgaggcagctggagaagtttgtccgcagcgtgcatggcttccagatgctgtatgccgactgctacatgaaccgggaggagttctgggagatgtttgatggctccttgtaccacaagctgcgagagaagctgggttgccaggacgccttccccgaggtgtacgacaagatctgcaaggccgccaggcactgagctggagcccgcctggagagacagacacgtgtgagtggtcaggcatcttcccttcactcaagcttggctgctttcctagatccacactttcaaagagaaacccctccagaactcccaccctgacagcccaacaccaccttcctcctggcttccagggggcagcccagtggaatggaaagaatgtgggatttggagtcagacaagcctgagtccagttccccgtttagaactcattagctgtgtgactctgggtgagtcccttaacccctctgagcccgggtctcttcattagttgaaagggatagtaatacctacttgcaggttgttgtcatctgagttgagcactggtcacattgaaggtgctgggtaagtggtagctcttgttgcttcccgttcagcgtcacatctgcagtggagcctgaaaaggctccacattaggtcacctgtgcacagccatggctggaatgatgaaggggatacgctggagttgccctgccatcgcctccatcagccagacgaggtcctcacaggagaaggacagctcttccccaccctgggatctcaggagggcagccacggagtggggaggccccagatgcgctgtgccaaagccaggtccgaggccaaagttctccctgccatccttggtgccgtcctgccccttcctccttcatgcctgggcctgcaggcccaccccagccaccactgagtccactcggagtgccctgtgttcctggagaaggcattccagggttgaatcttgtcccagcctcagcctgggacacctaggtggagagagtggtctccgctctgaattggatccaggggacctgggctcattcttcttggctcaccaaccctgcaggcctcatctttcccaaaacccactttgtcttggtgggagtgggtccgcgctgctctgcagcaggggctggggagtggacagcatcaggtgggaaagtggagtccaccctcatgtttctgtaggattctcaccgtggggctggaagaaaagagcatcgacttgatttctccaaccactcatccctctttttctttcttccaccactccccaccccagctgtagttaatttcagtgccttacaaatcctaagctcagagaaagttccatttccgttccagagggaagggaacctccctaggtccttccctggcttgttataacgcaaagcttggttgtttatgcaactctatcttaagaactgcccagcctcagctgaaaacccgaatctgagaaggaattgcgtcatgtaagggaagctggaattaagggagctgagccagtcatggttgtggcgtgtgagtcaggagacctaggtttcagcccctctctactgtcagcgagctgtgcaacgtgggcaagtcattgtcctctgagctgcagtttcctcatctgtcacatcgctacagacaagacctccctggaacccttctgattgtcttagacactgtggttgcaaaacccacggaaagcctcatttgtgtggaaagtcagaggaaaaatgatccagtggacacttggggattatctgtcattcaagatccttccttcaaccccaaggtcagctcccatctcatttccagaaaggctcatacctggcttgcagggaagcatctgtcttgtcattccaggtgccagaatcctctcagagtcattgaagggtgttcacccatcccacccaaggcttggcacactgccagtgtcttagcagggtcttgtgagggctgggggcatccaggcactcagaaggcaaaggaaccaccctacccatttggcctctggagggggcagaagaaagaaagaaacctcatcctatattttacaaagcatgtgaattctggcattagctctcataggagacccatgtgcttccttgctcagtgcaaaactgatgattctacttgctgtagatgaatggttaacacgagctagttaaacagtgccattgttttgccagtgaagcctccaaccctaagccactgggacggtggccagagatgccagcagcctctgtcgcccttagtcatataaccaaaatccagaccttatccacaacccggggcttggaaaggaaggtattttggaatcacaccctccggttatgttgctccagtaaaatcttgcctggaaagaggcagtcttcttagcatggtgagctgagttcatggcttttttttgtagccagtcctgtccctggccatccatgtgatggttttggatggagttaaacttgatgccagtgggcagtgcatgtggaaagtatcagagtaaggctctcccctccagagccctgagtttcttggctgcatgaaggttttctttagaatcagaattgtagccagtttctttggccagaaggatgaatacttggatattactgaaagggaggggtggagatgggtgtggcagtgtatggtgtgtgatttttattttcttctttggtcatgggggccaaggagaaaggcatgaatcttccctgtcaggctcttacagccacaggcactgtgtctactgtctggaagacatgtccccgtggctgtggggccgctgcttctgtttaaataaaagtggcctggaa

SEQ ID NO: 324687 - DNA, 3715 bp, Homo sapiens
  misc_feature (2)..(2): n is a, c, g, or t
tnaggctaggtacgaggccgggtggtaatcggccgaatcgagtcatcatcccacaagtacggcctgttccaacacatctgcactgcttacgagctggtcctggctgatggcagctttgtgcgatgcactccgtccgaaaactcagacctgttctatgccgtaccctggtcctgtgggacgctgggtttcctggtggccgctgagatccgcatcatccctgccaagaagtacgtcaagctgcgtttcgagccagtgcggggcctggaggctatctgtgccaagttcacccacgagtcccagcggcaggagaaccacttcgtggaagggctgctctactccctggatgaggctgtcattatgacaggggtcatgacagatgaggcagagcccagcaagctgaatagcattggcaattactacaagccgtggttctttaagcatgtggagaactatctgaagacaaaccgagagggcctggagtacattcccttgagacactactaccaccgccacacgcgcagcatcttctgggagctccaggacatcatcccctttggcaacaaccccatcttccgctacctctttggctggatggtgcctcccaagatctccctcctgaagctgacccagggtgagaccctgcgcaagctgtacgagcagcaccacgtggtgcaggacatgctggtgcccatgaagtgcctgcagcaggccctgcacaccttccaaaacgacatccacgtctaccccatctggctgtgtccgttcatcctgcccagccagccaggcctagtgcaccccaaaggaaatgaggcagagctctacatcgacattggagcatatggggagccgcgtgtgaaacactttgaagccaggtcctgcatgaggcagctggcaggcagaggggttttcttgggggttttccccccccgggggggacccaaaatcggaccggtgccatggtcttccagatgctgtatgccgactgctacatgaaccgggaggagttctgggagatgtttgatggctccttgtaccacaagctgcgagagaagctgggttgccaggacgccttccccgaggtgtacgacaagatctgcaaggccgccaggcactgagctggagcccgcctggagagacagacacgtgtgagtggtcaggcatcttcccttcactcaagcttggctgctttcctagatccacactttcaaagagaaacccctccagaactcccaccctgacagcccaacaccaccttcctcctggcttccagggggcagcccagtggaatggaaagaatgtgggatttggagtcagacaagcctgagtccagttccccgtttagaactcattagctgtgtgactctgggtgagtcccttaacccctctgagcccgggtctcttcattagttgaaagggatagtaatacctacttgcaggttgttgtcatctgagttgagcactggtcacattgaaggtgctgggtaagtggtagctcttgttgcttcccgttcagcgtcacatctgcagtggagcctgaaaaggctccacattaggtcacctgtgcacagccatggctggaatgatgaaggggatacgctggagttgccctgccatcgcctccatcagccagacgaggtcctcacaggagaaggacagctcttccccaccctgggatctcaggagggcagccacggagtggggaggccccagatgcgctgtgccaaagccaggtccgaggccaaagttctccctgccatccttggtgccgtcctgccccttcctccttcatgcctgggcctgcaggcccaccccagccaccactgagtccactcggagtgccctgtgttcctggagaaggcattccagggttgaatcttgtcccagcctcagcctgggacacctaggtggagagagtggtctccgctctgaattggatccaggggacctgggctcattcttcttggctcaccaaccctgcaggcctcatctttcccaaaacccactttgtcttggtgggagtgggtccgcgctgctctgcagcaggggctggggagtggacagcatcaggtgggaaagtggagtccaccctcatgtttctgtaggattctcaccgtggggctggaagaaaagagcatcgacttgatttctccaaccactcatccctctttttctttcttccaccactccccaccccagctgtagttaatttcagtgccttacaaatcctaagctcagagaaagttccatttccgttccagagggaagggaacctccctaggtccttccctggcttgttataacgcaaagcttggttgtttatgcaactctatcttaagaactgcccagcctcagctgaaaacccgaatctgagaaggaattgcgtcatgtaagggaagctggaattaagggagctgagccagtcatggttgtggcgtgtgagtcaggagacctaggtttcagcccctctctactgtcagcgagctgtgcaacgtgggcaagtcattgtcctctgagctgcagtttcctcatctgtcacatcgctacagacaagacctccctggaacccttctgattgtcttagacactgtggttgcaaaacccacggaaagcctcatttgtgtggaaagtcagaggaaaaatgatccagtggacacttggggattatctgtcattcaagatccttccttcaaccccaaggtcagctcccatctcatttccagaaaggctcatacctggcttgcagggaagcatctgtcttgtcattccaggtgccagaatcctctcagagtcattgaagggtgttcacccatcccacccaaggcttggcacactgccagtgtcttagcagggtcttgtgagggctgggggcatccaggcactcagaaggcaaaggaaccaccctacccatttggcctctggagggggcagaagaaagaaagaaacctcatcctatattttacaaagcatgtgaattctggcattagctctcataggagacccatgtgcttccttgctcagtgcaaaactgatgattctacttgctgtagatgaatggttaacacgagctagttaaacagtgccattgttttgccagtgaagcctccaaccctaagccactgggacggtggccagagatgccagcagcctctgtcgcccttagtcatataaccaaaatccagaccttatccacaacccggggcttggaaaggaaggtattttggaatcacaccctccggttatgttgctccagtaaaatcttgcctggaaagaggcagtcttcttagcatggtgagctgagttcatggcttttttttgtagccagtcctgtccctggccatccatgtgatggttttggatggagttaaacttgatgccagtgggcagtgcatgtggaaagtatcagagtaaggctctcccctccagagccctgagtttcttggctgcatgaaggttttctttagaatcagaattgtagccagtttctttggccagaaggatgaatacttggatattactgaaagggaggggtggagatgggtgtggcagtgtatggtgtgtgatttttattttcttctttggtcatgggggccaaggagaaaggcatgaatcttccctgtcaggctcttacagccacaggcactgtgtctactgtctggaagacatgtccccgtggctgtggggccgctgcttctgtttaaataaaagtggcctggaa

SEQ ID NO: 324688 - DNA, 4118 bp, Homo sapiens
caatcgcgaggcggcgggcgatcccgggctccccgggctgtgggctacaggcgcagagcgggccaggcgcggagctggcggcagtgacaggaggcgcgaacccgcagcgcttaccgcgcggcgccgcaccatggagcccgccgtgtcgctggccgtgtgcgcgctgctcttcctgctgtgggtgcgcctgaaggggctggagttcgtgctcatccaccagcgctgggtgttcgtgtgcctcttcctcctgccgctctcgcttatcttcgatatctactactacgtgcgcgcctgggtggtgttcaagctcagcagcgctccgcgcctgcacgagcagcgcgtgcgggacatccagaagcaggtgcgggaatggaaggagcagggtagcaagaccttcatgtgcacggggcgccctggctggctcactgtctcactacgtgtcgggaagtacaagaagacacacaaaaacatcatgatcaacctgatggacattctggaagtggacaccaagaaacagattgtccgtgtggagcccttggtgaccatgggccaggtgactgccctgctgacctccattggctggactctccccgtgttgcctgagcttgatgacctcacagtggggggcttgatcatgggcacaggcatcgagtcatcatcccacaagtacggcctgttccaacacatctgcactgcttacgagctggtcctggctgatggcagctttgtgcgatgcactccgtccgaaaactcagacctgttctatgccgtaccctggtcctgtgggacgctgggtttcctggtggccgctgagatccgcatcatccctgccaagaagtacgtcaagctgcgtttcgagccagtgcggggcctggaggctatctgtgccaagttcacccacgagtcccagcggcaggagaaccacttcgtggaagggctgctctactccctggatgaggctgtcattatgacaggggtcatgacagatgaggcagagcccagcaagctgaatagcattggcaattactacaagccgtggttctttaagcatgtggagaactatctgaagacaaaccgagagggcctggagtacattcccttgagacactactaccaccgccacacgcgcagcatcttctgggagctccaggacatcatcccctttggcaacaaccccatcttccgctacctctttggctggatggtgcctcccaagatctccctcctgaagctgacccagggtgagaccctgcgcaagctgtacgagcagcaccacgtggtgcaggacatgctggtgcccatgaagtgcctgcagcaggccctgcacaccttccaaaacgacatccacgtctaccccatctggctgtgtccgttcatcctgcccagccagccaggcctagtgcaccccaaaggaaatgaggcagagctctacatcgacattggagcatatggggagccgcgtgtgaaacactttgaagccaggtcctgcatgaggcagctggagaagtttgtccgcagcgtgcatggcttccagatgctgtatgccgactgctacatgaaccgggaggagttctgggagatgtttgatggctccttgtaccacaagctgcgagagaagctgggttgccaggacgccttccccgaggtgtacgacaagatctgcaaggccgccaggcactgagctggagcccgcctggagagacagacacgtgtgagtggtcaggcatcttcccttcactcaagcttggctgctttcctagatccacactttcaaagagaaacccctccagaactcccaccctgacagcccaacaccaccttcctcctggcttccagggggcagcccagtggaatggaaagaatgtgggatttggagtcagacaagcctgagtccagttccccgtttagaactcattagctgtgtgactctgggtgagtcccttaacccctctgagcccgggtctcttcattagttgaaagggatagtaatacctacttgcaggttgttgtcatctgagttgagcactggtcacattgaaggtgctgggtaagtggtagctcttgttgcttcccgttcagcgtcacatctgcagtggagcctgaaaaggctccacattaggtcacctgtgcacagccatggctggaatgatgaaggggatacgctggagttgccctgccatcgcctccttcatgcctgggcctgcaggcccaccccagccaccactgagtccactcggagtgccctgtgttcctggagaaggcattccagggttgaatcttgtcccagcctcagcctgggacacctaggtggagagagtggtctccgctctgaattggatccaggggacctgggctcattcttcttggctcaccaaccctgcaggcctcatctttcccaaaacccactttgtcttggtgggagtgggtccgcgctgctctgcagcaggggctggggagtggacagcatcaggtgggaaagtggagtccaccctcatgtttctgtaggattctcaccgtggggctggaagaaaagagcatcgacttgatttctccaaccactcatccctctttttctttcttccaccactccccaccccagctgtagttaatttcagtgccttacaaatcctaagctcagagaaagttccatttccgttccagagggaagggaacctccctaggtccttccctggcttgttataacgcaaagcttggttgtttatgcaactctatcttaagaactgcccagcctcagctgaaaacccgaatctgagaaggaattgcgtcatgtaagggaagctggaattaagggagctgagccagtcatggttgtggcgtgtgagtcaggagacctaggtttcagcccctctctactgtcagcgagctgtgcaacgtgggcaagtcattgtcctctgagctgcagtttcctcatctgtcacatcgctacagacaagacctccctggaacccttctgattgtcttagacactgtggttgcaaaacccacggaaagcctcatttgtgtggaaagtcagaggaaaaatgatccagtggacacttggggattatctgtcattcaagatccttccttcaaccccaaggtcagctcccatctcatttccagaaaggctcatacctggcttgcagggaagcatctgtcttgtcattccaggtgccagaatcctctcagagtcattgaagggtgttcacccatcccacccaaggcttggcacactgccagtgtcttagcagggtcttgtgagggctgggggcatccaggcactcagaaggcaaaggaaccaccctacccatttggcctctggagggggcagaagaaagaaagaaacctcatcctatattttacaaagcatgtgaattctggcattagctctcataggagacccatgtgcttccttgctcagtgcaaaactgatgattctacttgctgtagatgaatggttaacacgagctagttaaacagtgccattgttttgccagtgaagcctccaaccctaagccactgggacggtggccagagatgccagcagcctctgtcgcccttagtcatataaccaaaatccagaccttatccacaacccggggcttggaaaggaaggtattttggaatcacaccctccggttatgttgctccagtaaaatcttgcctggaaagaggcagtcttcttagcatggtgagctgagttcatggcttttttttgtagccagtcctgtccctggccatccatgtgatggttttggatggagttaaacttgatgccagtgggcagtgcatgtggaaagtatcagagtaaggctctcccctccagagccctgagtttcttggctgcatgaaggttttctttagaatcagaattgtagccagtttctttggccagaaggatgaatacttggatattactgaaagggaggggtggagatgggtgtggcagtgtatggtgtgtgatttttattttcttctttggtcatgggggccaaggagaaaggcatgaatcttccctgtcaggctcttacagccacaggcactgtgtctactgtctggaagacatgtccccgtggctgtggggccgctgcttctgtttaaataaaagtggcctggaa

SEQ ID NO: 324689 - DNA, 4595 bp, Homo sapiens
caatcgcgaggcggcgggcgatcccgggctccccgggctgtgggctacaggcgcagagcgggccaggcgcggagctggcggcagtgacaggaggcgcgaacccgcagcgcttaccgcgcggcgccgcaccatggagcccgccgtgtcgctggccgtgtgcgcgctgctcttcctgctgtgggtgcgcctgaaggggctggagttcgtgctcatccaccagcgctgggtgttcgtgtgcctcttcctcctgccgctctcgcttatcttcgatatctactactacgtgcgcgcctgggtggtgttcaagctcagcagcgctccgcgcctgcacgagcagcgcgtgcgggacatccagaagcaggtgcgggaatggaaggagcagggtagcaagaccttcatgtgcacggggcgccctggctggctcactgtctcactacgtgtcgggaagtacaagaagacacacaaaaacatcatgatcaacctgatggacattctggaagtggacaccaagaaacagattgtccgtgtggagcccttggtgaccatgggccaggtgactgccctgctgacctccattggctggactctccccgtgttgcctgagcttgatgacctcacagtggggggcttgatcatgggcacaggcatcgagtcatcatcccacaagtacggcctgttccaacacatctgcactgcttacgagctggtcctggctgatggcagctttgtgcgatgcactccgtccgaaaactcagacctgttctatgccgtaccctggtcctgtgggacgctgggtttcctggtggccgctgagatccgcatcatccctgccaagaagtacgtcaagctgcgtttcgagccagtgcggggcctggaggctatctgtgccaagttcacccacgagtcccagcggcaggagaaccacttcgtggaagggctgctctactccctggatgaggctgtcattatgacaggggtcatgacagatgaggcagagcccagcaagctgaatagcattggcaattactacaagccgtggttctttaagcatgtggagaactatctgaagacaaaccgagagggcctggagtacattcccttgagacactactaccaccgccacacgcgcagcatcttctgggagctccaggacatcatcccctttggcaacaaccccatcttccgctacctctttggctggatggtgcctcccaagatctccctcctgaagctgacccagggtgagaccctgcgcaagctgtacgagcagcaccacgtggtgcaggacatgctggtgcccatgaagtgcctgcagcaggccctgcacaccttccaaaacgacatccacgtctaccccatctggctgtgtccgttcatcctgcccagccagccaggcctagtgcaccccaaaggaaatgaggcagagctctacatcgacattggagcatatggggagccgcgtgtgaaacactttgaagccaggtcctgcatgaggcagctggagaagtttgtccgcagcgtgcatggcttccagatgctgtatgccgactgctacatgaaccgggaggagttctgggagatgtttgatggctccttgtaccacaagctgcgagagaagctgggttgccaggacgccttccccgaggtgtacgacaagatctgcaaggccgccaggcactgagctggagcccgcctggagagacagacacgtgtgagtggtcaggcatcttcccttcactcaagcttggctgctttcctagatccacactttcaaagagaaacccctccagaactcccaccctgacagcccaacaccaccttcctcctggcttccagggggcagcccagtggaatggaaagaatgtgggatttggagtcagacaagcctgagtccagttccccgtttagaactcattagctgtgtgactctgggtgagtcccttaacccctctgagcccgggtctcttcattagttgaaagggatagtaatacctacttgcaggttgttgtcatctgagttgagcactggtcacattgaaggtgctgggtaagtggtagctcttgttgcttcccgttcagcgtcacatctgcagtggagcctgaaaaggctccacattaggtcacctgtgcacagccatggctggaatgatgaaggggatacgctggagttgccctgccatcgcctccatcagccagacgaggtcctcacaggagaaggacagctcttccccaccctgggatctcaggagggcagccacggagtggggaggccccagatgcgctgtgccaaagccaggtccgaggccaaagttctccctgccatccttggtgccgtcctgccccttcctccttcatgcctgggcctgcaggcccaccccagccaccactgagtccactcggagtgccctgtgttcctggagaaggcattccagggttgaatcttgtcccagcctcagcctgggacacctaggtggagagagtggtctccgctctgaattggatccaggggacctgggctcattcttcttggctcaccaaccctgcaggcctcatctttcccaaaacccactttgtcttggtgggagtgggtccgcgctgctctgcagcaggggctggggagtggacagcatcaggtgggaaagtggagtccaccctcatgtttctgtaggattctcaccgtggggctggaagaaaagagcatcgacttgatttctccaaccactcatccctctttttctttcttccaccactccccaccccagctgtagttaatttcagtgccttacaaatcctaagctcagagaaagttccatttccgttccagagggaagggaacctccctaggtccttccctggcttgttataacgcaaagcttggttgtttatgcaactctatcttaagaactgcccagcctcagctgaaaacccgaatctgagaaggaattgcgtcatgtaagggaagctggaattaagggagctgagccagtcatggttgtggcgtgtgagtcaggagacctaggtttcagcccctctctactgtcagcgagctgtgcaacgtgggcaagtcattgtcctctgagctgcagtttcctcatctgtcacatcgctacagacaagacctccctggaacccttctgattgtcttagacactgtggttgcaaaacccacggaaagcctcatttgtgtggaaagtcagaggaaaaatgatccagtggacacttggggattatctgtcattcaagatccttccttcaaccccaaggtcagctcccatctcatttccagaaaggctcatacctggcttgcagggaagcatctgtcttgtcattccaggtgccagaatcctctcagagtcattgaagggtgttcacccatcccacccaaggcttggcacactgccagtgtcttagcagggtcttgtgagggctgggggcatccaggcactcagaaggcaaaggaaccaccctacccatttggcctctggagggggcagaagaaagaaagaaacctcatcctatattttacaaagcatgtgaattctggcattagctctcataggagacccatgtgcttccttgctcagtgcaaaactgatgattctacttgctgtagatgaatggttaacacgagctagttaaacagtgccattgttttgccagtgaagcctccaaccctaagccactgggacggtggccagagatgccagcagcctctgtcgcccttagtcatataaccaaaatccagaccttatccacaacccggggcttggaaaggaaggtattttggaatcacaccctccggttatgttgctccagtaaaatcttgcctggaaagaggcagtcttcttagcatggtgagctgagttcatggcttttttttgtagccagtcctgtccctggccatccatgtgatggttttggatggagttaaacttgatgccagtgggcagtgcatgtggaaagtatcagagtaaggctctcccctccagagccctgagtttcttggctgcatgaaggttttctttagaatcagaattgtagccagtttctttggccagaaggatgaatacttggatattactgaaagggaggggtggagatgggtgtggcagtgtatggtgtgtgatttttattttcttctttggtcatgggggccaaggagaaaggcatgaatcttccctgtcaggctcttacagccacaggcactgtgtctactgtctggaagacatgtccccgtggctgtggggccgctgcttctgtttaaataaaagtggcctggaagaaaaaaaaaacaaacaactaactaaccacacaaacaccacaacaaccccaggcgcctatcggcggggggcgcgacaaacggttcacacagggcagggccaccactgggctcggccccccctgtgaccaggggcaaccgcggcccaggggcggaaaagcaagccggccgagcgaccggaacccgacgacgagagacgacgcggagaagcgagagcacacaggccagagaacgacggtcccatagcacatgagcagaactaaccgacagcgcagaccgagagcgaagaacctcacagcgcagccacgcagccgcg

SEQ ID NO: 324690 - DNA, 4468 bp, Homo sapiens
caatcgcgaggcggcgggcgatcccgggctccccgggctgtgggctacaggcgcagagcgggccaggcgcggagctggcggcagtgacaggaggcgcgaacccgcagcgcttaccgcgcggcgccgcaccatggagcccgccgtgtcgctggccgtgtgcgcgctgctcttcctgctgtgggtgcgcctgaaggggctggagttcgtgctcatccaccagcgctgggtgttcgtgtgcctcttcctcctgccgctctcgcttatcttcgatatctactactacgtgcgcgcctgggtggtgttcaagctcagcagcgctccgcgcctgcacgagcagcgcgtgcgggacatccagaagcaggtgcgggaatggaaggagcagggtagcaagaccttcatgtgcacggggcgccctggctggctcactgtctcactacgtgtcgggaagtacaagaagacacacaaaaacatcatgatcaacctgatggacattctggaagtggacaccaagaaacagattgtccgtgtggagcccttggtgaccatgggccaggtgactgccctgctgacctccattggctggactctccccgtgttgcctgagcttgatgacctcacagtggggggcttgatcatgggcacaggcatcgagtcatcatcccacaagtacggcctgttccaacacatctgcactgcttacgagctggtcctggctgatggcagctttgtgcgatgcactccgtccgaaaactcagacctgttctatgccgtaccctggtcctgtgggacgctgggtttcctggtggccgctgagatccgcatcatccctgccaagaagtacgtcaagctgcgtttcgagccagtgcggggcctggaggctatctgtgccaagttcacccacgagtcccagcggcaggagaaccacttcgtggaagggctgctctactccctggatgaggctgtcattatgacaggggtcatgacagatgaggcagagcccagcaagctgaatagcattggcaattactacaagccgtggttctttaagcatgtggagaactatctgaagacaaaccgagagggcctggagtacattcccttgagacactactaccaccgccacacgcgcagcatcttctgggagctccaggacatcatcccctttggcaacaaccccatcttccgctacctctttggctggatggtgcctcccaagatctccctcctgaagctgacccagggtgagaccctgcgcaagctgtacgagcagcaccacgtggtgcaggacatgctggtgcccatgaagtgcctgcagcaggccctgcacaccttccaaaacgacatccacgtctaccccatctggctgtgtccgttcatcctgcccagccagccaggcctagtgcaccccaaaggaaatgaggcagagctctacatcgacattggagcatatggggagccgcgtgtgaaacactttgaagccaggtcctgcatgaggcagctggagaagtttgtccgcagcgtgcatggcttccagatgctgtatgccgactgctacatgaaccgggaggagttctgggagatgtttgatggctccttgtaccacaagctgcgagagaagctgggttgccaggacgccttccccgaggtgtacgacaagatctgcaaggccgccaggcactgagctggagcccgcctggagagacagacacgtgtgagtggtcaggcatcttcccttcactcaagcttggctgctttcctagatccacactttcaaagagaaacccctccagaactcccaccctgacagcccaacaccaccttcctcctggcttccagggggcagcccagtggaatggaaagaatgtgggatttggagtcagacaagcctgagtccagttccccgtttagaactcattagctgtgtgactctgggtgagtcccttaacccctctgagcccgggtctcttcattagttgaaagggatagtaatacctacttgcaggttgttgtcatctgagttgagcactggtcacattgaaggtgctgggtaagtggtagctcttgttgcttcccgttcagcgtcacatctgcagtggagcctgaaaaggctccacattaggtcacctgtgcacagccatggctggaatgatgaaggggatacgctggagttgccctgccatcgcctccatcagccagacgaggtcctcacaggagaaggacagctcttccccaccctgggatctcaggagggcagccacggagtggggaggccccagatgcgctgtgccaaagccaggtccgaggccaaagttctccctgccatccttggtgccgtcctgccccttcctccttcatgcctgggcctgcaggcccaccccagccaccactgagtccactcggagtgccctgtgttcctggagaaggcattccagggttgaatcttgtcccagcctcagcctgggacacctaggtggagagagtggtctccgctctgaattggatccaggggacctgggctcattcttcttggctcaccaaccctgcaggcctcatctttcccaaaacccactttgtcttggtgggagtgggtccgcgctgctctgcagcaggggctggggagtggacagcatcaggtgggaaagtggagtccaccctcatgtttctgtaggattctcaccgtggggctggaagaaaagagcatcgacttgatttctccaaccactcatccctctttttctttcttccaccactccccaccccagctgtagttaatttcagtgccttacaaatcctaagctcagagaaagttccatttccgttccagagggaagggaacctccctaggtccttccctggcttgttataacgcaaagcttggttgtttatgcaactctatcttaagaactgcccagcctcagctgaaaacccgaatctgagaaggaattgcgtcatgtaagggaagctggaattaagggagctgagccagtcatggttgtggcgtgtgagtcaggagacctaggtttcagcccctctctactgtcagcgagctgtgcaacgtgggcaagtcattgtcctctgagctgcagtttcctcatctgtcacatcgctacagacaagacctccctggaacccttctgattgtcttagacactgtggttgcaaaacccacggaaagcctcatttgtgtggaaagtcagaggaaaaatgatccagtggacacttggggattatctgtcattcaagatccttccttcaaccccaaggtcagctcccatctcatttccagaaaggctcatacctggcttgcagggaagcatctgtcttgtcattccaggtgccagaatcctctcagagtcattgaagggtgttcacccatcccacccaaggcttggcacactgccagtgtcttagcagggtcttgtgagggctgggggcatccaggcactcagaaggcaaaggaaccaccctacccatttggcctctggagggggcagaagaaagaaagaaacctcatcctatattttacaaagcatgtgaattctggcattagctctcataggagacccatgtgcttccttgctcagtgcaaaactgatgattctacttgctgtagatgaatggttaacacgagctagttaaacagtgccattgttttgccagtgaagcctccaaccctaagccactgggacggtggccagagatgccagcagcctctgtcgcccttagtcatataaccaaaatccagaccttatccacaacccggggcttggaaaggaaggtattttggaatcacaccctccggttatgttgctccagtaaaatcttgcctggaaagaggcagtcttcttagcatggtgagctgagttcatggcttttttttgtagccagtcctgtccctggccatccatgtgatggttttggatggagttaaacttgatgccagtgggcagtgcatgtggaaagtatcagagtaaggctctcccctccagagccctgagtttcttggctgcatgaaggttttctttagaatcagaattgtagccagtttctttggccagaaggatgaatacttggatattactgaaagggaggggtggagatgggtgtggcagtgtatggtgtgtgatttttattttcttctttggtcatgggggccaaggagaaaggcatgaatcttccctgtcaggctcttacagccacaggcactgtgtctactgtctggaagacatgtccccgtggctgtggggccgctgcttctgtttaaataaaagtggcctggaaaaaaaaagaaatacattaaataaaaaaaaataatgattacttttcttatcacaaattagctttcttcattcaaatagaaactaaaatatatccaacgtataattttattcgaatgattttcaattaaaaaacaattaaaataatatcaatcttccgcttattcaaattctttactccattatttata

SEQ ID NO: 324691 - DNA, 4313 bp, Homo sapiens
caatcgcgaggcggcgggcgatcccgggctccccgggctgtgggctacaggcgcagagcgggccaggcgcggagctggcggcagtgacaggaggcgcgaacccgcagcgcttaccgcgcggcgccgcaccatggagcccgccgtgtcgctggccgtgtgcgcgctgctcttcctgctgtgggtgcgcctgaaggggctggagttcgtgctcatccaccagcgctgggtgttcgtgtgcctcttcctcctgccgctctcgcttatcttcgatatctactactacgtgcgcgcctgggtggtgttcaagctcagcagcgctccgcgcctgcacgagcagcgcgtgcgggacatccagaagcaggtgcgggaatggaaggagcagggtagcaagaccttcatgtgcacggggcgccctggctggctcactgtctcactacgtgtcgggaagtacaagaagacacacaaaaacatcatgatcaacctgatggacattctggaagtggacaccaagaaacagattgtccgtgtggagcccttggtgaccatgggccaggtgactgccctgctgacctccattggctggactctccccgtgttgcctgagcttgatgacctcacagtggggggcttgatcatgggcacaggcatcgagtcatcatcccacaagtacggcctgttccaacacatctgcactgcttacgagctggtcctggctgatggcagctttgtgcgatgcactccgtccgaaaactcagacctgttctatgccgtaccctggtcctgtgggacgctgggtttcctggtggccgctgagatccgcatcatccctgccaagaagtacgtcaagctgcgtttcgagccagtgcggggcctggaggctatctgtgccaagttcacccacgagtcccagcggcaggagaaccacttcgtggaagggctgctctactccctggatgaggctgtcattatgacaggggtcatgacagatgaggcagagcccagcaagctgaatagcattggcaattactacaagccgtggttctttaagcatgtggagaactatctgaagacaaaccgagagggcctggagtacattcccttgagacactactaccaccgccacacgcgcagcatcttctgggagctccaggacatcatcccctttggcaacaaccccatcttccgctacctctttggctggatggtgcctcccaagatctccctcctgaagctgacccagggtgagaccctgcgcaagctgtacgagcagcaccacgtggtgcaggacatgctggtgcccatgaagtgcctgcagcaggccctgcacaccttccaaaacgacatccacgtctaccccatctggctgtgtccgttcatcctgcccagccagccaggcctagtgcaccccaaaggaaatgaggcagagctctacatcgacattggagcatatggggagccgcgtgtgaaacactttgaagccaggtcctgcatgaggcagctggagaagtttgtccgcagcgtgcatggcttccagatgctgtatgccgactgctacatgaaccgggaggagttctgggagatgtttgatggctccttgtaccacaagctgcgagagaagctgggttgccaggacgccttccccgaggtgtacgacaagatctgcaaggccgccaggcactgagctggagcccgcctggagagacagacacgtgtgagtggtcaggcatcttcccttcactcaagcttggctgctttcctagatccacactttcaaagagaaacccctccagaactcccaccctgacagcccaacaccaccttcctcctggcttccagggggcagcccagtggaatggaaagaatgtgggatttggagtcagacaagcctgagtccagttccccgtttagaactcattagctgtgtgactctgggtgagtcccttaacccctctgagcccgggtctcttcattagttgaaagggatagtaatacctacttgcaggttgttgtcatctgagttgagcactggtcacattgaaggtgctgggtaagtggtagctcttgttgcttcccgttcagcgtcacatctgcagtggagcctgaaaaggctccacattaggtcacctgtgcacagccatggctggaatgatgaaggggatacgctggagttgccctgccatcgcctccatcagccagacgaggtcctcacaggagaaggacagctcttccccaccctgggatctcaggagggcagccacggagtggggaggccccagatgcgctgtgccaaagccaggtccgaggccaaagttctccctgccatccttggtgccgtcctgccccttcctccttcatgcctgggcctgcaggcccaccccagccaccactgagtccactcggagtgccctgtgttcctggagaaggcattccagggttgaatcttgtcccagcctcagcctgggacacctaggtggagagagtggtctccgctctgaattggatccaggggacctgggctcattcttcttggctcaccaaccctgcaggcctcatctttcccaaaacccactttgtcttggtgggagtgggtccgcgctgctctgcagcaggggctggggagtggacagcatcaggtgggaaagtggagtccaccctcatgtttctgtaggattctcaccgtggggctggaagaaaagagcatcgacttgatttctccaaccactcatccctctttttctttcttccaccactccccaccccagctgtagttaatttcagtgccttacaaatcctaagctcagagaaagttccatttccgttccagagggaagggaacctccctaggtccttccctggcttgttataacgcaaagcttggttgtttatgcaactctatcttaagaactgcccagcctcagctgaaaacccgaatctgagaaggaattgcgtcatgtaagggaagctggaattaagggagctgagccagtcatggttgtggcgtgtgagtcaggagacctaggtttcagcccctctctactgtcagcgagctgtgcaacgtgggcaagtcattgtcctctgagctgcagtttcctcatctgtcacatcgctacagacaagacctccctggaacccttctgattgtcttagacactgtggttgcaaaacccacggaaagcctcatttgtgtggaaagtcagaggaaaaatgatccagtggacacttggggattatctgtcattcaagatccttccttcaaccccaaggtcagctcccatctcatttccagaaaggctcatacctggcttgcagggaagcatctgtcttgtcattccaggtgccagaatcctctcagagtcattgaagggtgttcacccatcccacccaaggcttggcacactgccagtgtcttagcagggtcttgtgagggctgggggcatccaggcactcagaaggcaaaggaaccaccctacccatttggcctctggagggggcagaagaaagaaagaaacctcatcctatattttacaaagcatgtgaattctggcattagctctcataggagacccatgtgcttccttgctcagtgcaaaactgatgattctacttgctgtagatgaatggttaacacgagctagttaaacagtgccattgttttgccagtgaagcctccaaccctaagccactgggacggtggccagagatgccagcagcctctgtcgcccttagtcatataaccaaaatccagaccttatccacaacccggggcttggaaaggaaggtattttggaatcacaccctccggttatgttgctccagtaaaatcttgcctggaaagaggcagtcttcttagcatggtgagctgagttcatggcttttttttgtagccagtcctgtccctggccatccatgtgatggttttggatggagttaaacttgatgccagtgggcagtgcatgtggaaagtatcagagtaaggctctcccctccagagccctgagtttcttggctgcatgaaggttttctttagaatcagaattgtagccagtttctttggccagaaggatgaatacttggatattactgaaagggaggggtggagatgggtgtggcagtgtatggtgtgtgatttttattttcttctttggtcatgggggccaaggagaaaggcatgaatcttccctgtcaggctcttacagccacaggcactgtgtctactgtctggaagacatgtccccgtggctgtggggccgctgcttctgtttaaataaaagtggcctggaacaaaaaaaaaaaaaaaaaaaaaaaaaaaaaac

SEQ ID NO: 324692 - DNA, 4230 bp, Homo sapiens
caatcgcgaggcggcgggcgatcccgggctccccgggctgtgggctacaggcgcagagcgggccaggcgcggagctggcggcagtgacaggaggcgcgaacccgcagcgcttaccgcgcggcgccgcaccatggagcccgccgtgtcgctggccgtgtgcgcgctgctcttcctgctgtgggtgcgcctgaaggggctggagttcgtgctcatccaccagcgctgggtgttcgtgtgcctcttcctcctgccgctctcgcttatcttcgatatctactactacgtgcgcgcctgggtggtgttcaagctcagcagcgctccgcgcctgcacgagcagcgcgtgcgggacatccagaagcaggtgcgggaatggaaggagcagggtagcaagaccttcatgtgcacggggcgccctggctggctcactgtctcactacgtgtcgggaagtacaagaagacacacaaaaacatcatgatcaacctgatggacattctggaagtggacaccaagaaacagattgtccgtgtggagcccttggtgaccatgggccaggtgactgccctgctgacctccattggctggactctccccgtgttgcctgagcttgatgacctcacagtggggggcttgatcatgggcacaggcatcgagtcatcatcccacaagtacggcctgttccaacacatctgcactgcttacgagctggtcctggctgatggcagctttgtgcgatgcactccgtccgaaaactcagacctgttctatgccgtaccctggtcctgtgggacgctgggtttcctggtggccgctgagatccgcatcatccctgccaagaagtacgtcaagctgcgtttcgagccagtgcggggcctggaggctatctgtgccaagttcacccacgagtcccagcggcaggagaaccacttcgtggaagggctgctctactccctggatgaggctgtcattatgacaggggtcatgacagatgaggcagagcccagcaagctgaatagcattggcaattactacaagccgtggttctttaagcatgtggagaactatctgaagacaaaccgagagggcctggagtacattcccttgagacactactaccaccgccacacgcgcagcatcttctgggagctccaggacatcatcccctttggcaacaaccccatcttccgctacctctttggctggatggtgcctcccaagatctccctcctgaagctgacccagggtgagaccctgcgcaagctgtacgagcagcaccacgtggtgcaggacatgctggtgcccatgaagtgcctgcagcaggccctgcacaccttccaaaacgacatccacgtctaccccatctggctgtgtccgttcatcctgcccagccagccaggcctagtgcaccccaaaggaaatgaggcagagctctacatcgacattggagcatatggggagccgcgtgtgaaacactttgaagccaggtcctgcatgaggcagctggagaagtttgtccgcagcgtgcatggcttccagatgctgtatgccgactgctacatgaaccgggaggagttctgggagatgtttgatggctccttgtaccacaagctgcgagagaagctgggttgccaggacgccttccccgaggtgtacgacaagatctgcaaggccgccaggcactgagctggagcccgcctggagagacagacacgtgtgagtggtcaggcatcttcccttcactcaagcttggctgctttcctagatccacactttcaaagagaaacccctccagaactcccaccctgacagcccaacaccaccttcctcctggcttccagggggcagcccagtggaatggaaagaatgtgggatttggagtcagacaagcctgagtccagttccccgtttagaactcattagctgtgtgactctgggtgagtcccttaacccctctgagcccgggtctcttcattagttgaaagggatagtaatacctacttgcaggttgttgtcatctgagttgagcactggtcacattgaaggtgctgggtaagtggtagctcttgttgcttcccgttcagcgtcacatctgcagtggagcctgaaaaggctccacattaggtcacctgtgcacagccatggctggaatgatgaaggggatacgctggagttgccctgccatcgcctccatcagccagacgaggtcctcacaggagaaggacagctcttccccaccctgggatctcaggagggcagccacggagtggggaggccccagatgcgctgtgccaaagccaggtccgaggccaaagttctccctgccatccttggtgccgtcctgccccttcctccttcatgcctgggcctgcaggcccaccccagccaccactgagtccactcggagtgccctgtgttcctggagaaggcattccagggttgaatcttgtcccagcctcagcctgggacacctaggtggagagagtggtctccgctctgaattggatccaggggacctgggctcattcttcttggctcaccaaccctgcaggcctcatctttcccaaaacccactttgtcttggtgggagtgggtccgcgctgctctgcagcaggggctggggagtggacagcatcaggtgggaaagtggagtccaccctcatgtttctgtaggattctcaccgtggggctggaagaaaagagcatcgacttgatttctccaaccactcatccctctttttctttcttccaccactccccaccccagctgtagttaatttcagtgccttacaaatcctaagctcagagaaagttccatttccgttccagagggaagggaacctccctaggtccttccctggcttgttataacgcaaagcttggttgtttatgcaactctatcttaagaactgcccagcctcagctgaaaacccgaatctgagaaggaattgcgtcatgtaagggaagctggaattaagggagctgagccagtcatggttgtggcgtgtgagtcaggagacctaggtttcagcccctctctactgtcagcgagctgtgcaacgtgggcaagtcattgtcctctgagctgcagtttcctcatctgtcacatcgctacagacaagacctccctggaacccttctgattgtcttagacactgtggttgcaaaacccacggaaagcctcatttgtgtggaaagtcagaggaaaaatgatccagtggacacttggggattatctgtcattcaagatccttccttcaaccccaaggtcagctcccatctcatttccagaaaggctcatacctggcttgcagggaagcatctgtcttgtcattccaggtgccagaatcctctcagagtcattgaagggtgttcacccatcccacccaaggcttggcacactgccagtgtcttagcagggtcttgtgagggctgggggcatccaggcactcagaaggcaaaggaaccaccctacccatttggcctctggagggggcagaagaaagaaagaaacctcatcctatattttacaaagcatgtgaattctggcattagctctcataggagacccatgtgcttccttgctcagtgcaaaactgatgattctacttgctgtagatgaatggttaacacgagctagttaaacagtgccattgttttgccagtgaagcctccaaccctaagccactgggacggtggccagagatgccagcagcctctgtcgcccttagtcatataaccaaaatccagaccttatccacaacccggggcttggaaaggaaggtattttggaatcacaccctccggttatgttgctccagtaaaatcttgcctggaaagaggcagtcttcttagcatggtgagctgagttcatggcttttttttgtagccagtcctgtccctggccatccatgtgatggttttggatggagttaaacttgatgccagtgggcagtgcatgtggaaagtatcagagtaaggctctcccctccagagccctgagtttcttggctgcatgaaggttttctttagaatcagaattgtagccagtttctttggccagaaggatgaatacttggatattactgaaagggaggggtggagatgggtgtggcagtgtatggtgtgtgatttttattttcttctttggtcatgggggccaaggagaaaggcatggctgcttctgtttaaataaagtggctgcaaaaaaaaaaaaaaaaaaaaaaaaaaaaaac

SEQ ID NO: 324693 - DNA, 4337 bp, Homo sapiens
caatcgcgaggcggcgggcgatcccgggctccccgggctgtgggctacaggcgcagagcgggccaggcgcggagctggcggcagtgacaggaggcgcgaacccgcagcgcttaccgcgcggcgccgcaccatggagcccgccgtgtcgctggccgtgtgcgcgctgctcttcctgctgtgggtgcgcctgaaggggctggagttcgtgctcatccaccagcgctgggtgttcgtgtgcctcttcctcctgccgctctcgcttatcttcgatatctactactacgtgcgcgcctgggtggtgttcaagctcagcagcgctccgcgcctgcacgagcagcgcgtgcgggacatccagaagcaggtgcgggaatggaaggagcagggtagcaagaccttcatgtgcacggggcgccctggctggctcactgtctcactacgtgtcgggaagtacaagaagacacacaaaaacatcatgatcaacctgatggacattctggaagtggacaccaagaaacagattgtccgtgtggagcccttggtgaccatgggccaggtgactgccctgctgacctccattggctggactctccccgtgttgcctgagcttgatgacctcacagtggggggcttgatcatgggcacaggcatcgagtcatcatcccacaagtacggcctgttccaacacatctgcactgcttacgagctggtcctggctgatggcagctttgtgcgatgcactccgtccgaaaactcagacctgttctatgccgtaccctggtcctgtgggacgctgggtttcctggtggccgctgagatccgcatcatccctgccaagaagtacgtcaagctgcgtttcgagccagtgcggggcctggaggctatctgtgccaagttcacccacgagtcccagcggcaggagaaccacttcgtggaagggctgctctactccctggatgaggctgtcattatgacaggggtcatgacagatgaggcagagcccagcaagctgaatagcattggcaattactacaagccgtggttctttaagcatgtggagaactatctgaagacaaaccgagagggcctggagtacattcccttgagacactactaccaccgccacacgcgcagcatcttctgggagctccaggacatcatcccctttggcaacaaccccatcttccgctacctctttggctggatggtgcctcccaagatctccctcctgaagctgacccagggtgagaccctgcgcaagctgtacgagcagcaccacgtggtgcaggacatgctggtgcccatgaagtgcctgcagcaggccctgcacaccttccaaaacgacatccacgtctaccccatctggctgtgtccgttcatcctgcccagccagccaggcctagtgcaccccaaaggaaatgaggcagagctctacatcgacattggagcatatggggagccgcgtgtgaaacactttgaagccaggtcctgcatgaggcagctggagaagtttgtccgcagcgtgcatggcttccagatgctgtatgccgactgctacatgaaccgggaggagttctgggagatgtttgatggctccttgtaccacaagctgcgagagaagctgggttgccaggacgccttccccgaggtgtacgacaagatctgcaaggccgccaggcactgagctggagcccgcctggagagacagacacgtgtgagtggtcaggcatcttcccttcactcaagcttggctgctttcctagatccacactttcaaagagaaacccctccagaactcccaccctgacagcccaacaccaccttcctcctggcttccagggggcagcccagtggaatggaaagaatgtgggatttggagtcagacaagcctgagtccagttccccgtttagaactcattagctgtgtgactctgggtgagtcccttaacccctctgagcccgggtctcttcattagttgaaagggatagtaatacctacttgcaggttgttgtcatctgagttgagcactggtcacattgaaggtgctgggtaagtggtagctcttgttgcttcccgttcagcgtcacatctgcagtggagcctgaaaaggctccacattaggtcacctgtgcacagccatggctggaatgatgaaggggatacgctggagttgccctgccatcgcctccatcagccagacgaggtcctcacaggagaaggacagctcttccccaccctgggatctcaggagggcagccacggagtggggaggccccagatgcgctgtgccaaagccaggtccgaggccaaagttctccctgccatccttggtgccgtcctgccccttcctccttcatgcctgggcctgcaggcccaccccagccaccactgagtccactcggagtgccctgtgttcctggagaaggcattccagggttgaatcttgtcccagcctcagcctgggacacctaggtggagagagtggtctccgctctgaattggatccaggggacctgggctcattcttcttggctcaccaaccctgcaggcctcatctttcccaaaacccactttgtcttggtgggagtgggtccgcgctgctctgcagcaggggctggggagtggacagcatcaggtgggaaagtggagtccaccctcatgtttctgtaggattctcaccgtggggctggaagaaaagagcatcgacttgatttctccaaccactcatccctctttttctttcttccaccactccccaccccagctgtagttaatttcagtgccttacaaatcctaagctcagagaaagttccatttccgttccagagggaagggaacctccctaggtccttccctggcttgttataacgcaaagcttggttgtttatgcaactctatcttaagaactgcccagcctcagctgaaaacccgaatctgagaaggaattgcgtcatgtaagggaagctggaattaagggagctgagccagtcatggttgtggcgtgtgagtcaggagacctaggtttcagcccctctctactgtcagcgagctgtgcaacgtgggcaagtcattgtcctctgagctgcagtttcctcatctgtcacatcgctacagacaagacctccctggaacccttctgattgtcttagacactgtggttgcaaaacccacggaaagcctcatttgtgtggaaagtcagaggaaaaatgatccagtggacacttggggattatctgtcattcaagatccttccttcaaccccaaggtcagctcccatctcatttccagaaaggctcatacctggcttgcagggaagcatctgtcttgtcattccaggtgccagaatcctctcagagtcattgaagggtgttcacccatcccacccaaggcttggcacactgccagtgtcttagcagggtcttgtgagggctgggggcatccaggcactcagaaggcaaaggaaccaccctacccatttggcctctggagggggcagaagaaagaaagaaacctcatcctatattttacaaagcatgtgaattctggcattagctctcataggagacccatgtgcttccttgctcagtgcaaaactgatgattctacttgctgtagatgaatggttaacacgagctagttaaacagtgccattgttttgccagtgaagcctccaaccctaagccactgggacggtggccagagatgccagcagcctctgtcgcccttagtcatataaccaaaatccagaccttatccacaacccggggcttggaaaggaaggtattttggaatcacaccctccggttatgttgctccagtaaaatcttgcctggaaagaggcagtcttcttagcatggtgagctgagttcatggcttttttttgtagccagtcctgtccctggccatccatgtgatggttttggatggagttaaacttgatgccagtgggcagtgcatgtggaaagtatcagagtaaggctctcccctccagagccctgagtttcttggctgcatgaaggttttctttagaatcagaattgtagccagtttctttggccagaaggatgaatacttggatattactgaaagggaggggtggagatgggtgtggcagtgtatggcggttatgtggagtgcatgttcttttcacagtaatatatgccttttgtaacttcacttggttattttattgtaaatgagtacaaaattcttaatttaagagattgtatgtaatatttatttcatgaatttctttccttgtttacgtaaattttgaaagattgcatgatttctgacagaaatcgatcttgatgctgtgaagtagtttgaggacatccta

SEQ ID NO: 324694 - DNA, 4231 bp, Homo sapiens
caatcgcgaggcggcgggcgatcccgggctccccgggctgtgggctacaggcgcagagcgggccaggcgcggagctggcggcagtgacaggaggcgcgaacccgcagcgcttaccgcgcggcgccgcaccatggagcccgccgtgtcgctggccgtgtgcgcgctgctcttcctgctgtgggtgcgcctgaaggggctggagttcgtgctcatccaccagcgctgggtgttcgtgtgcctcttcctcctgccgctctcgcttatcttcgatatctactactacgtgcgcgcctgggtggtgttcaagctcagcagcgctccgcgcctgcacgagcagcgcgtgcgggacatccagaagcaggtgcgggaatggaaggagcagggtagcaagaccttcatgtgcacggggcgccctggctggctcactgtctcactacgtgtcgggaagtacaagaagacacacaaaaacatcatgatcaacctgatggacattctggaagtggacaccaagaaacagattgtccgtgtggagcccttggtgaccatgggccaggtgactgccctgctgacctccattggctggactctccccgtgttgcctgagcttgatgacctcacagtggggggcttgatcatgggcacaggcatcgagtcatcatcccacaagtacggcctgttccaacacatctgcactgcttacgagctggtcctggctgatggcagctttgtgcgatgcactccgtccgaaaactcagacctgttctatgccgtaccctggtcctgtgggacgctgggtttcctggtggccgctgagatccgcatcatccctgccaagaagtacgtcaagctgcgtttcgagccagtgcggggcctggaggctatctgtgccaagttcacccacgagtcccagcggcaggagaaccacttcgtggaagggctgctctactccctggatgaggctgtcattatgacaggggtcatgacagatgaggcagagcccagcaagctgaatagcattggcaattactacaagccgtggttctttaagcatgtggagaactatctgaagacaaaccgagagggcctggagtacattcccttgagacactactaccaccgccacacgcgcagcatcttctgggagctccaggacatcatcccctttggcaacaaccccatcttccgctacctctttggctggatggtgcctcccaagatctccctcctgaagctgacccagggtgagaccctgcgcaagctgtacgagcagcaccacgtggtgcaggacatgctggtgcccatgaagtgcctgcagcaggccctgcacaccttccaaaacgacatccacgtctaccccatctggctgtgtccgttcatcctgcccagccagccaggcctagtgcaccccaaaggaaatgaggcagagctctacatcgacattggagcatatggggagccgcgtgtgaaacactttgaagccaggtcctgcatgaggcagctggagaagtttgtccgcagcgtgcatggcttccagatgctgtatgccgactgctacatgaaccgggaggagttctgggagatgtttgatggctccttgtaccacaagctgcgagagaagctgggttgccaggacgccttccccgaggtgtacgacaagatctgcaaggccgccaggcactgagctggagcccgcctggagagacagacacgtgtgagtggtcaggcatcttcccttcactcaagcttggctgctttcctagatccacactttcaaagagaaacccctccagaactcccaccctgacagcccaacaccaccttcctcctggcttccagggggcagcccagtggaatggaaagaatgtgggatttggagtcagacaagcctgagtccagttccccgtttagaactcattagctgtgtgactctgggtgagtcccttaacccctctgagcccgggtctcttcattagttgaaagggatagtaatacctacttgcaggttgttgtcatctgagttgagcactggtcacattgaaggtgctgggtaagtggtagctcttgttgcttcccgttcagcgtcacatctgcagtggagcctgaaaaggctccacattaggtcacctgtgcacagccatggctggaatgatgaaggggatacgctggagttgccctgccatcgcctccatcagccagacgaggtcctcacaggagaaggacagctcttccccaccctgggatctcaggagggcagccacggagtggggaggccccagatgcgctgtgccaaagccaggtccgaggccaaagttctccctgccatccttggtgccgtcctgccccttcctccttcatgcctgggcctgcaggcccaccccagccaccactgagtccactcggagtgccctgtgttcctggagaaggcattccagggttgaatcttgtcccagcctcagcctgggacacctaggtggagagagtggtctccgctctgaattggatccaggggacctgggctcattcttcttggctcaccaaccctgcaggcctcatctttcccaaaacccactttgtcttggtgggagtgggtccgcgctgctctgcagcaggggctggggagtggacagcatcaggtgggaaagtggagtccaccctcatgtttctgtaggattctcaccgtggggctggaagaaaagagcatcgacttgatttctccaaccactcatccctctttttctttcttccaccactccccaccccagctgtagttaatttcagtgccttacaaatcctaagctcagagaaagttccatttccgttccagagggaagggaacctccctaggtccttccctggcttgttataacgcaaagcttggttgtttatgcaactctatcttaagaactgcccagcctcagctgaaaacccgaatctgagaaggaattgcgtcatgtaagggaagctggaattaagggagctgagccagtcatggttgtggcgtgtgagtcaggagacctaggtttcagcccctctctactgtcagcgagctgtgcaacgtgggcaagtcattgtcctctgagctgcagtttcctcatctgtcacatcgctacagacaagacctccctggaacccttctgattgtcttagacactgtggttgcaaaacccacggaaagcctcatttgtgtggaaagtcagaggaaaaatgatccagtggacacttggggattatctgtcattcaagatccttccttcaaccccaaggtcagctcccatctcatttccagaaaggctcatacctggcttgcagggaagcatctgtcttgtcattccaggtgccagaatcctctcagagtcattgaagggtgttcacccatcccacccaaggcttggcacactgccagtgtcttagcagggtcttgtgagggctgggggcatccaggcactcagaaggcaaaggaaccaccctacccatttggcctctggagggggcagaagaaagaaagaaacctcatcctatattttacaaagcatgtgaattctggcattagctctcataggagacccatgtgcttccttgctcagtgcaaaaagtgccattgttttgccagtgaagcctccaaccctaagccactgggacggtggccagagatgccagcagcctctgtcgcccttagtcatataaccaaaatccagaccttatccacaacccggggcttggaaaggaaggtattttggaatcacaccctccggttatgttgctccagtaaaatcttgcctggaaagaggcagtcttcttagcatggtgagctgagttcatggcttttttttgtagccagtcctgtccctggccatccatgtgatggttttggatggagttaaacttgatgccagtgggcagtgcatgtggaaagtatcagagtaaggctctcccctccagagccctgagtttcttggctgcatgaaggttttctttagaatcagaattgtagccagtttctttggccagaaggatgaatacttggatattactgaaagggaggggtggagatgggtgtggcagtgtatggtgtgtgatttttattttcttctttggtcatgggggccaaggagaaaggcatgaatcttccctgtcaggctcttacagccacaggcactgtgtctactgtctggaagacatgtccccgtggctgtggggccgctgcttctgtttaaataaaagtggcctggaa

SEQ ID NO: 324695 - DNA, 2870 bp, Homo sapiens
  misc_feature (2)..(2): n is a, c, g, or t
tnaggctaggtacgaggccgggtggtaatcggccgaatcgagtcatcatcccacaagtacggcctgttccaacacatctgcactgcttacgagctggtcctggctgatggcagctttgtgcgatgcactccgtccgaaaactcagacctgttctatgccgtaccctggtcctgtgggacgctgggtttcctggtggccgctgagatccgcatcatccctgccaagaagtacgtcaagctgcgtttcgagccagtgcggggcctggaggctatctgtgccaagttcacccacgagtcccagcggcaggagaaccacttcgtggaagggctgctctactccctggatgaggctgtcattatgacaggggtcatgacagatgaggcagagcccagcaagctgaatagcattggcaattactacaagccgtggttctttaagcatgtggagaactatctgaagacaaaccgagagggcctggagtacattcccttgagacactactaccaccgccacacgcgcagcatcttctgggagctccaggacatcatcccctttggcaacaaccccatcttccgctacctctttggctggatggtgcctcccaagatctccctcctgaagctgacccagggtgagaccctgcgcaagctgtacgagcagcaccacgtggtgcaggacatgctggtgcccatgaagtgcctgcagcaggccctgcacaccttccaaaacgacatccacgtctaccccatctggctgtgtccgttcatcctgcccagccagccaggcctagtgcaccccaaaggaaatgaggcagagctctacatcgacattggagcatatggggagccgcgtgtgaaacactttgaagccaggtcctgcatgaggcagctggagaagtttgtccgcagcgtgcatggcttccagatgctgtatgccgactgctacatgaaccgggaggagttctgggagatgtttgatggctccttgtaccacaagctgcgagagaagctgggttgccaggacgccttccccgaggtgtacgacaagatctgcaaggccgccaggcactgagctggagcccgcctggagagacagacacgtgtgagtggtcaggcatcttcccttcactcaagcttggctgctttcctagatccacactttcaaagagaaacccctccagaactcccaccctgacagcccaacaccaccttcctcctggcttccagggggcagcccagtggaatggaaagaatgtgggatttggagtcagacaagcctgagtccagttccccgtttagaactcattagctgtgtgactctgggtgagtcccttaacccctctgagcccgggtctcttcattagttgaaagggataaaatcctaagctcagagaaagttccatttccgttccagagggaagggaacctccctaggtccttccctggcttgttataacgcaaagcttggttgtttatgcaactctatcttaagaactgcccagcctcagctgaaaacccgaatctgagaaggaattgcgtcatgtaagggaagctggaattaagggagctgagccagtcatggttgtggcgtgtgagtcaggagacctaggtttcagcccctctctactgtcagcgagctgtgcaacgtgggcaagtcattgtcctctgagctgcagtttcctcatctgtcacatcgctacagacaagacctccctggaacccttctgattgtcttagacactgtggttgcaaaacccacggaaagcctcatttgtgtggaaagtcagaggaaaaatgatccagtggacacttggggattatctgtcattcaagatccttccttcaaccccaaggtcagctcccatctcatttccagaaaggctcatacctggcttgcagggaagcatctgtcttgtcattccaggtgccagaatcctctcagagtcattgaagggtgttcacccatcccacccaaggcttggcacactgccagtgtcttagcagggtcttgtgagggctgggggcatccaggcactcagaaggcaaaggaaccaccctacccatttggcctctggagggggcagaagaaagaaagaaacctcatcctatattttacaaagcatgtgaattctggcattagctctcataggagacccatgtgcttccttgctcagtgcaaaactgatgattctacttgctgtagatgaatggttaacacgagctagttaaacagtgccattgttttgccagtgaagcctccaaccctaagccactgggacggtggccagagatgccagcagcctctgtcgcccttagtcatataaccaaaatccagaccttatccacaacccggggcttggaaaggaaggtattttggaatcacaccctccggttatgttgctccagtaaaatcttgcctggaaagaggcagtcttcttagcatggtgagctgagttcatggcttttttttgtagccagtcctgtccctggccatccatgtgatggttttggatggagttaaacttgatgccagtgggcagtgcatgtggaaagtatcagagtaaggctctcccctccagagccctgagtttcttggctgcatgaaggttttctttagaatcagaattgtagccagtttctttggccagaaggatgaatacttggatattactgaaagggaggggtggagatgggtgtggcagtgtatggtgtgtgatttttattttcttctttggtcatgggggccaaggagaaaggcatgaatcttccctgtcaggctcttacagccacaggcactgtgtctactgtctggaagacatgtccccgtggctgtggggccgctgcttctgtttaaataaaagtggcctggaa

SEQ ID NO: 324696 - DNA, 1684 bp, Homo sapiens
  misc_feature (2)..(2): n is a, c, g, or t
tnaggctaggtacgaggccgggtggtaatcggccgagtgggaaagtggagtccaccctcatgtttctgtaggattctcaccgtggggctggaagaaaagagcatcgacttgatttctccaaccactcatccctctttttctttcttccaccactccccaccccagctgtagttaatttcagtgccttacaaatcctaagctcagagaaagttccatttccgttccagagggaagggaacctccctaggtccttccctggcttgttataacgcaaagcttggttgtttatgcaactctatcttaagaactgcccagcctcagctgaaaacccgaatctgagaaggaattgcgtcatgtaagggaagctggaattaagggagctgagccagtcatggttgtggcgtgtgagtcaggagacctaggtttcagcccctctctactgtcagcgagctgtgcaacgtgggcaagtcattgtcctctgagctgcagtttcctcatctgtcacatcgctacagacaagacctccctggaacccttctgattgtcttagacactgtggttgcaaaacccacggaaagcctcatttgtgtggaaagtcagaggaaaaatgatccagtggacacttggggattatctgtcattcaagatccttccttcaaccccaaggtcagctcccatctcatttccagaaaggctcatacctggcttgcagggaagcatctgtcttgtcattccaggtgccagaatcctctcagagtcattgaagggtgttcacccatcccacccaaggcttggcacactgccagtgtcttagcagggtcttgtgagggctgggggcatccaggcactcagaaggcaaaggaaccaccctacccatttggcctctggagggggcagaagaaagaaagaaacctcatcctatattttacaaagcatgtgaattctggcattagctctcataggagacccatgtgcttccttgctcagtgcaaaactgatgattctacttgctgtagatgaatggttaacacgagctagttaaacagtgccattgttttgccagtgaagcctccaaccctaagccactgggacggtggccagagatgccagcagcctctgtcgcccttagtcatataaccaaaatccagaccttatccacaacccggggcttggaaaggaaggtattttggaatcacaccctccggttatgttgctccagtaaaatcttgcctggaaagaggcagtcttcttagcatggtgagctgagttcatggcttttttttgtagccagtcctgtccctggccatccatgtgatggttttggatggagttaaacttgatgccagtgggcagtgcatgtggaaagtatcagagtaaggctctcccctccagagccctgagtttcttggctgcatgaaggttttctttagaatcagaattgtagccagtttctttggccagaaggatgaatacttggatattactgaaagggaggggtggagatgggtgtggcagtgtatggtgtgtgatttttattttcttctttggtcatgggggccaaggagaaaggcatgaatcttccctgtcaggctcttacagccacaggcactgtgtctactgtctggaagacatgtccccgtggctgtggggccgctgcttctgtttaaataaaagtggcctggaa

SEQ ID NO: 324697 - DNA, 4076 bp, Homo sapiens
caatcgcgaggcggcgggcgatcccgggctccccgggctgtgggctacaggcgcagagcgggccaggcgcggagctggcggcagtgacaggaggcgcgaacccgcagcgcttaccgcgcggcgccgcaccatggagcccgccgtgtcgctggccgtgtgcgcgctgctcttcctgctgtgggtgcgcctgaaggggctggagttcgtgctcatccaccagcgctgggtgttcgtgtgcctcttcctcctgccgctctcgcttatcttcgatatctactactacgtgcgcgcctgggtggtgttcaagctcagcagcgctccgcgcctgcacgagcagcgcgtgcgggacatccagaagcaggtgcgggaatggaaggagcagggtagcaagaccttcatgtgcacggggcgccctggctggctcactgtctcactacgtgtcgggaagtacaagaagacacacaaaaacatcatgatcaacctgatggacattctggaagtggacaccaagaaacagattgtccgtgtggagcccttggtgaccatgggccaggtgactgccctgctgacctccattggctggactctccccgtgttgcctgagcttgatgacctcacagtggggggcttgatcatgggcacaggcatcgagtcatcatcccacaagtacggcctgttccaacacatctgcactgcttacgagctggtcctggctgatggcagctttgtgcgatgcactccgtccgaaaactcagacctgttctatgccgtaccctggtcctgtgggacgctgggtttcctggtggccgctgagatccgcatcatccctgccaagaagtacgtcaagctgcgtttcgagccagtgcggggcctggaggctatctgtgccaagttcacccacgagtcccagcggcaggagaaccacttcgtggaagggctgctctactccctggatgaggctgtcattatgacaggggtcatgacagatgaggcagagcccagcaagctgaatagcattggcaattactacaagccgtggttctttaagcatgtggagaactatctgaagacaaaccgagagggcctggagtacattcccttgagacactactaccaccgccacacgcgcagcatcttctgggagctccaggacatcatcccctttggcaacaaccccatcttccgctacctctttggctggatggtgcctcccaagatctccctcctgaagctgacccagggtgagaccctgcgcaagctgtacgagcagcaccacgtggtgcaggacatgctggtgcccatgaagtgcctgcagcaggccctgcacaccttccaaaacgacatccacgtctaccccatctggctgtgtccgttcatcctgcccagccagccaggcctagtgcaccccaaaggaaatgaggcagagctctacatcgacattggagcatatggggagccgcgtgtgaaacactttgaagccaggtcctgcatgaggcagctggagaagtttgtccgcagcgtgcatggcttccagatgctgtatgccgactgctacatgaaccgggaggagttctgggagatgtttgatggctccttgtaccacaagctgcgagagaagctgggttgccaggacgccttccccgaggtgtacgacaagatctgcaaggccgccaggcactgagctggagcccgcctggagagacagacacgtgtgagtggtcaggcatcttcccttcactcaagcttggctgctttcctagatccacactttcaaagagaaacccctccagaactcccaccctgacagcccaacaccaccttcctcctggcttccagggggcagcccagtggaatggaaagaatgtgggatttggagtcagacaagcctgagtccagttccccgtttagaactcattagctgtgtgactctgggtgagtcccttaacccctctgagcccgggtctcttcattagttgaaagggatagtaatacctacttgcaggttgttgtcatctgagttgagcactggtcacattgaaggtgctgggtaagtggtagctcttgttgcttcccgttcagcgtcacatctgcagtggagcctgaaaaggctccacattaggtcacctgtgcacagccatggctggaatgatgaaggggatacgctggagttgccctgccatcgcctccatcagccagacgaggtcctcacaggagaaggacagctcttccccaccctgggatctcaggagggcagccacggagtggggaggccccagatgcgctgtgccaaagccaggtccgaggccaaagttctccctgccatccttggtgccgtcctgccccttcctccttcatgcctgggcctgcaggcccaccccagccaccactgagtccactcggagtgccctgtgttcctggagaaggcattccagggttgaatcttgtcccagcctcagcctgggacacctaggtggagagagtggtctccgctctgaattggatccaggggacctgggctcattcttcttggctcaccaaccctgcaggcctcatctttcccaaaacccactttgtcttggtgggagtgggtccgcgctgctctgcagcaggggctggggagtggacagcatcaggtgggaaagtggagtccaccctcatgtttctgtaggattctcaccgtggggctggaagaaaagagcatcgacttgatttctccaaccactcatccctctttttctttcttccaccactccccaccccagctgtagttaatttcagtgccttacaaatcctaagctcagagaaagttccatttccgttccagagggaagggaacctccctaggtccttccctggcttgttataacgcaaagcttggttgtttatgcaactctatcttaagaactgcccagcctcagctgaaaacccgaatctgagaaggaattgcgtcatgtaagggaagctggaattaagggagctgagccagtcatggttgtggcgtgtgagtcaggagacctaggtttcagcccctctctactgtcagcgagctgtgcaacgtgggcaagtcattgtcctctgagctgcagtttcctcatctgtcacatcgctacagacaagacctccctggaacccttctgattgtcttagacactgtggttgcaaaacccacggaaagcctcatttgtgtggaaagtcagaggaaaaatgatccagtggacacttggggattatctgtcattcaagatccttccttcaaccccaaggtcagctcccatctcatttccagaaaggctcatacctggcttgcagggaagcatctgtcttgtcattccaggtgccagaatcctctcagagtcattgaagggtgttcacccatcccacccaaggcttggcacactgccagtgtcttagcagggtcttgtgagggctgggggcatccaggcactcagaaggcaaaggaaccaccctacccatttggcctctggagggggcagaagaaagaaagaaacctcatcctccaaccctaagccactgggacggtggccagagatgccagcagcctctgtcgcccttagtcatataaccaaaatccagaccttatccacaacccggggcttggaaaggaaggtattttggaatcacaccctccggttatgttgctccaggcttttttttgtagccagtcctgtccctggccatccatgtgatggttttggatggagttaaacttgatgccagtgggcagtgcatgtggaaagtatcagagtaaggctctcccctccagagccctgagtttcttggctgcatgaaggttttctttagaatcagaattgtagccagtttctttggccagaaggatgaatacttggatattactgaaagggaggggtggagatgggtgtggcagtgtatggtgtgtgatttttattttcttctttggtcatgggggccaaggagaaaggcatgaatcttccctgtcaggctcttacagccacaggcactgtgtctactgtctggaagacatgtccccgtggctgtggggccgctgcttctgtttaaataaaagtggcctggaa

SEQ ID NO: 324698 - DNA, 3522 bp, Homo sapiens
caatcgcgaggcggcgggcgatcccgggctccccgggctgtgggctacaggcgcagagcgggccaggcgcggagctggcggcagtgacaggaggcgcgaacccgcagcgcttaccgcgcggcgccgcaccatggagcccgccgtgtcgctggccgtgtgcgcgctgctcttcctgctgtgggtgcgcctgaaggggctggagttcgtgctcatccaccagcgctgggtgttcgtgtgcctcttcctcctgccgctctcgcttatcttcgatatctactactacgtgcgcgcctgggtggtgttcaagctcagcagcgctccgcgcctgcacgagcagcgcgtgcgggacatccagaagcaggtgcgggaatggaaggagcagggtagcaagaccttcatgtgcacggggcgccctggctggctcactgtctcactacgtgtcgggaagtacaagaagacacacaaaaacatcatgatcaacctgatggacattctggaagtggacaccaagaaacagattgtccgtgtggagcccttggtgaccatgggccaggtgactgccctgctgacctccattggctggactctccccgtgttgcctgagcttgatgacctcacagtggggggcttgatcatgggcacaggcatcgagtcatcatcccacaagtacggcctgttccaacacatctgcactgcttacgagctggtcctggctgatggcagctttgtgcgatgcactccgtccgaaaactcagacctgttctatgccgtaccctggtcctgtgggacgctgggtttcctggtggccgctgagatccgcatcatccctgccaagaagtacgtcaagctgcgtttcgagccagtgcggggcctggaggctatctgtgccaagttcacccacgagtcccagcggcaggagaaccacttcgtggaagggctgctctactccctggatgaggctgtcattatgacaggggtcatgacagatgaggcagagcccagcaagctgaatagcattggcaattactacaagccgtggttctttaagcatgtggagaactatctgaagacaaaccgagagggcctggagtacattcccttgagacactactaccaccgccacacgcgcagcatcttctgggagctccaggacatcatcccctttggcaacaaccccatcttccgctacctctttggctggatggtgcctcccaagatctccctcctgaagctgacccagggtgagaccctgcgcaagctgtacgagcagcaccacgtggtgcaggacatgctggtgcccatgaagtgcctgcagcaggccctgcacaccttccaaaacgacatccacgtctaccccatctggctgtgtccgttcatcctgcccagccagccaggcctagtgcaccccaaaggaaatgaggcagagctctacatcgacattggagcatatggggagccgcgtgtgaaacactttgaagccaggtcctgcatgaggcagctggagaagtttgtccgcagcgtgcatggcttccagatgctgtatgccgactgctacatgaaccgggaggagttctgggagatgtttgatggctccttgtaccacaagctgcgagagaagctgggttgccaggacgccttccccgaggtgtacgacaagatctgcaaggccgccaggcactgagctggagcccgcctggagagacagacacgtgtgagtggtcaggcatcttcccttcactcaagcttggctgctttcctagatccacactttcaaagagaaacccctccagaactcccaccctgacagcccaacaccaccttcctcctggcttccagggggcagcccagtggaatggaaagaatgtgggatttggagtcagacaagcctgagtccagttccccgtttagaactcattagctgtgtgactctgggtgagtcccttaacccctctgagcccgggtctcttcattagttgaaagggatagtaatacctacttgcaggttgttgtcatctgagttgagcactggtcacattgaaggtgctgggtaagtggtagctcttgttgcttcccgttcagcgtcacatctgcagtggagcctgaaaaggctccacattaggtcacctgtgcacagccatggctggaatgatgaaggggatacgctggagttgccctgccatcgcctccatcagccagacgaggtcctcacaggagaaggacagctcttccccaccctgggatctcaggagggcagccacggagtggggaggccccagatgcgctgtgccaaagccaggtccgaggccaaagttctccctgccatccttggtgccgtcctgccccttcctccttcatgcctgggcctgcaggcccaccccagccaccactgagtccactcggagtgccctgtgttcctggagaaggcattccagggttgaatcttgtcccagcctcagcctgggacacctaggtggagagagtggtctccgctctgaattggatccaggggacctgggctcattcttcttggctcaccaaccctgcaggcctcatctttcccaaaacccactttgtcttggtgggagtgggtccgcgctgctctgcagcaggggctggggagtggacagcatcaggtgggaaagtggagtccaccctcatgtttctgtaggattctcaccgtggggctggaagaaaagagcatcgacttgatttctccaaccactcatccctctttttctttcttccaccactccccaccccagctgtagttaatttcagtgccttacaaatcctaagctcagagaaagttccatttccgttccagagggaagggaacctccctaggtccttccctggcttgttataacgcaaagcttggttgtttatgcaactctatcttaagaactgcccagcctcagctgaaaacccgaatctgagaaggaattgcgtcatgtaagggaagctggaattaagggagctgagccagtcatggttgtggcgtgtgagtcaggagacctaggtttcagcccctctctactgtcagcgagctgtgcaacgtgggcaagtcattgtcctctgagctgcagtttcctcatctgtcacatcgctacagacaagacctccctggaacccttctgattgtcttagacactgtggttgcaaaacccacggaaagcctcatttgtgtggaaagtcagaggaaaaatgatccagtggacacttggggattatctgtcattcaagatccttccttcaaccccaaggtcagctcccatctcatttccagaaaggctcatacctggcttgcagggaagcatctgtcttgtcattccaggtgccagaatcctctcagagtcattgtgtgtgatttttattttcttctttggtcatgggggccaaggagaaaggcatgaatcttccctgtcaggctcttacagccacaggcactgtgtctactgtctggaagacatgtccccgtggctgtggggccgctgcttctgtttaaataaaagtggcctggaa

SEQ ID NO: 324699 - DNA, 955 bp, Homo sapiens
ccgacgactatgtctcggagttgtcagggtgtatcacccacttgccacgcatggacttgttgacactggcaggtttcttagacagaggtcctgtactggcaaacccctgtgcgaggcactcagaaggcaaaggaaccaccctacccatttggcctctggagggggcagaagaaagaaagaaacctcatcctatattttacaaagcatgtgaattctggcattagctctcataggagacccatgtgcttccttgctcagtgcaaaactgatgattctacttgctgtagatgaatggttaacacgagctagttaaacagtgccattgttttgccagtgaagcctccaaccctaagccactgggacggtggccagagatgccagcagcctctgtcgcccttagtcatataaccaaaatccagaccttatccacaacccggggcttggaaaggaaggtattttggaatcacaccctccggttatgttgctccagtaaaatcttgcctggaaagaggcagtcttcttagcatggtgagctgagttcatggcttttttttgtagccagtcctgtccctggccatccatgtgatggttttggatggagttaaacttgatgccagtgggcagtgcatgtggaaagtatcagagtaaggctctcccctccagagccctgagtttcttggctgcatgaaggttttctttagaatcagaattgtagccagtttctttggccagaaggatgaatacttggatattactgaaagggaggggtggagatgggtgtggcagtgtatggtgtgtgatttttattttcttctttggtcatgggggccaaggagaaaggcatgaatcttccctgtcaggctcttacagccacaggcactgtgtctactgtctggaagacatgtccccgtggctgtggggccgctgcttctgtttaaataaaagtggcctggaa

SEQ ID NO: 324700 - DNA, 1580 bp, Homo sapiens
  misc_feature (2)..(2): n is a, c, g, or t
tnaggctaggtacgaggccgggtggtaatcggccgaatcgagtcatcatcccacaagtacggcctgttccaacacatctgcactgcttacgagctggtcctggctgatggcagctttgtgcgatgcactccgtccgaaaactcagacctgttctatgccgtaccctggtcctgtgggacgctgggtttcctggtggccgctgagatccgcatcatccctgccaagaagtacgtcaagctgcgtttcgagccagtgcggggcctggaggctatctgtgccaagttcacccacgagtcccagcggcaggagaaccacttcgtggaagggctgctctactccctggatgaggctgtcattatgacaggggtcatgacagatgaggcagagcccagcaagctgaatagcattggcaattactacaagccgtggttctttaagcatgtggagaactatctgaagacaaaccgagagggcctggagtacattcccttgagacactactaccaccgccacacgcgcagcatcttctgggagctccaggacatcatcccctttggcaacaaccccatcttccgctacctctttggctggatggtgcctcccaagatctccctcctgaagctgacccagggtgagaccctgcgcaagctgtacgagcagcaccacgtggtgcaggacatgctggtgcccatgaagtgcctgcagcaggccctgcacaccttccaaaacgacatccacgtctaccccatctggctgtgtccgttcatcctgcccagccagccaggcctagtgcaccccaaaggaaatgaggcagagctctacatcgacattggagcatatggggagccgcgtgtgaaacactttgaagccaggtcctgcatgaggcagctggagaagtttgtccgcagcgtgcatggcttccagatgctgtatgccgactgctacatgaaccgggaggagttctgggagatgtttgatggctccttgtaccacaagctgcgagagaagctgggttgccaggacgccttccccgaggtgtacgacaagatctgcaaggccgccaggcactgagctggagcccgcctggagagacagacacgtgtgagtggtcaggcatcttcccttcactcaagcttggctgctttcctagatccacactttcaaagagaaacccctccagaactcccaccctgacagcccaacaccaccttcctcctggcttccagggggcagcccagtggaatggaaagaatgtgggatttggagtcagacaagcctgagtccagttccccgtttagaactcattagctgtgtgactctgggtgagtcccttaacccctctgagcccgggtctcttcattagttgaaagggatagtaatacctacttgcaggttgttgtcatctgagttgagcactggtcacattgaaggtgctgggtaagtggtagctcttgttgcttcccgttcagcgtcacatctgcagtggagcctgaaaaggctccacattaggtcacctgtgaggacctcgtctggctgatggaggcgatggcagggcaactccagcgtatccccttcgtcga

SEQ ID NO: 324701 - DNA, 629 bp, Homo sapiens
atttggcctctggagggggcagaagaaagacagaaacctcatcctatattttacaaaggtcttgtcattccaggtgccagaatcctctcagagtcattgaagggtgttcacccatcccacccaaggcttggcacactgccagtgtcttagcagggtcttgtgagggctgggggcatccaggtattttggaatcacaccctccggttatgttgctccaggcttttttttgtagccagtcctgtccctggccatccatgtgatggttttggatggagttaaacttgatgccagtgggcagtgcatgtggaaagtatcagagtaaggctctcccctccagagccctgagtttcttggctgcatgaaggttttctttagaatcagaattgtagccagtttctttggccagaaggatgaatacttggatattactgaaagggaggggtggagatgggtgtggcagtgtatggtgtgtgatttttattttcttctttggtcatgggggccaaggagaaaggcatgaatcttccctgtcaggctcttacagccacaggcactgtgtctactgtctggaagacatgtccccgtggctgtggggccgctgcttctgtttaaataaaagtggcctggaa

SEQ ID NO: 324702 - DNA, 1632 bp, Homo sapiens
  misc_feature (2)..(2): n is a, c, g, or t
tnaggctaggtacgaggccgggtggtaatcggccgaatcgagtcatcatcccacaagtacggcctgttccaacacatctgcactgcttacgagctggtcctggctgatggcagctttgtgcgatgcactccgtccgaaaactcagacctgttctatgccgtaccctggtcctgtgggacgctgggtttcctggtggccgctgagatccgcatcatccctgccaagaagtacgtcaagctgcgtttcgagccagtgcggggcctggaggctatctgtgccaagttcacccacgagtcccagcggcaggagaaccacttcgtggaagggctgctctactccctggatgaggctgtcattatgacaggggtcatgacagatgaggcagagcccagcaagctgaatagcattggcaattactacaagccgtggttctttaagcatgtggagaactatctgaagacaaaccgagagggcctggagtacattcccttgagacactactaccaccgccacacgcgcagcatcttctgggagctccaggacatcatcccctttggcaacaaccccatcttccgctacctctttggctggatggtgcctcccaagatctccctcctgaagctgacccagggtgagaccctgcgcaagctgtacgagcagcaccacgtggtgcaggacatgctggtgcccatgaagtgcctgcagcaggccctgcacaccttccaaaacgacatccacgtctaccccatctggctgtgtccgttcatcctgcccagccagccaggcctagtgcaccccaaaggaaatgaggcagagctctacatcgacattggagcatatggggagccgcgtgtgaaacactttgaagccaggtcctgcatgaggcagctggagaagtttgtccgcagcgtgcatggcttccagatgctgtatgccgactgctacatgaaccgggaggagttctgggagatgtttgatggctccttgtaccacaagctgcgagagaagctgggttgccaggacgccttccccgaggtgtacgacaagatctgcaaggccgccaggcactgagctggagcccgcctggagagacagacacgtgtgagtggtcaggcatcttcccttcactcaagcttggctgctttcctagatccacactttcaaagagaaacccctccagaactcccaccctgacagcccaacaccaccttcctcctggcttccaaacttgatgccagtgggcagtgcatgtggaaagtatcagagtaaggctctcccctccagagccctgagtttcttggctgcatgaaggttttctttagaatcagaattgtagccagtttctttggccagaaggatgaatacttggatattactgaaagggaggggtggagatgggtgtggcagtgtatggtgtgtgatttttattttcttctttggtcatgggggccaaggagaaaggcatgaaaagtggctggaaagaaaataacataaaatccgaggaaataaagacggggcggcgacaagagcgtatcggatgcgcaagggcaataggtggcctgacaagttcctggtccagcggaaattcgggccaaaggaggcgatatcgcaccggactaaaaaaacaaaaga

SEQ ID NO: 324703 - DNA, 1475 bp, Homo sapiens
  misc_feature (2)..(2): n is a, c, g, or t
tnaggctaggtacgaggccgggtggtaatcggccgaatcgagtcatcatcccacaagtacggcctgttccaacacatctgcactgcttacgagctggtcctggctgatggcagctttgtgcgatgcactccgtccgaaaactcagacctgttctatgccgtaccctggtcctgtgggacgctgggtttcctggtggccgctgagatccgcatcatccctgccaagaagtacgtcaagctgcgtttcgagccagtgcggggcctggaggctatctgtgccaagttcacccacgagtcccagcggcaggagaaccacttcgtggaagggctgctctactccctggatgaggctgtcattatgacaggggtcatgacagatgaggcagagcccagcaagctgaatagcattggcaattactacaagccgtggttctttaagcatgtggagaactatctgaagacaaaccgagagggcctggagtacattcccttgagacactactaccaccgccacacgcgcagcatcttctgggagctccaggacatcatcccctttggcaacaaccccatcttccgctacctctttggctggatggtgcctcccaagatctccctcctgaagctgacccagggtgagaccctgcgcaagctgtacgagcagcaccacgtggtgcaggacatgctggtgcccatgaagtgcctgcagcaggccctgcacaccttccaaaacgacatccacgtctaccccatctggctgtgtccgttcatcctgcccagccagccaggcctagtgcaccccaaaggaaatgaggcagagctctacatcgacattggagcatatggggagccgcgtgtgaaacactttgaagccaggtcctgcatgaggcagctggagaagtttgtccgcagcgtgcatggcttccagatgctgtatgccgactgctacatgaaccgggaggagttctgggagatgtttgatggctccttgtaccacaagctgcgagagaagctgggttgccaggacgccttccccgaggtgtacgacaagatctgcaaggccgccaggcactgagctggagcccgcctggagagacagacacgtgtattcatcagcagagaccagactcctccatcaagactcggctgatcccaccccacctgattcacctggcttcgttcttccatatcccctgccacaccccaccctcccgctgctcggccatccctgatcaggccaggctcgtttacccctcacggccaggctaaggatattccagcccagaatatcctccatctctccaggccacctttccaggtagacatgggcatttctgccccacacgcttatggcacctggctgagccctccttcatgtacctgatgctaaatcaatccttcctgtctgccccgtttgcctgagaccttctgtgttctgacccctagcaaatgtccactaaattcaattaaatcatcaac

SEQ ID NO: 324704 - DNA, 4281 bp, Homo sapiens
caatcgcgaggcggcgggcgatcccgggctccccgggctgtgggctacaggcgcagagcgggccaggcgcggagctggcggcagtgacaggaggcgcgaacccgcagcgcttaccgcgcggcgccgcaccatggagcccgccgtgtcgctggccgtgtgcgcgctgctcttcctgctgtgggtgcgcctgaaggggctggagttcgtgctcatccaccagcgctgggtgttcgtgtgcctcttcctcctgccgctctcgcttatcttcgatatctactactacgtgcgcgcctgggtggtgttcaagctcagcagcgctccgcgcctgcacgagcagcgcgtgcgggacatccagaagcaggtgcgggaatggaaggagcagggtagcaagaccttcatgtgcacggggcgccctggctggctcactgtctcactacgtgtcgggaagtacaagaagacacacaaaaacatcatgatcaacctgatggacattctggaagtggacaccaagaaacagattgtccgtgtggagcccttggtgaccatgggccaggtgactgccctgctgacctccattggctggactctccccgtgttgcctgagcttgatgacctcacagtggggggcttgatcatgggcacaggcatcgagtcatcatcccacaagtacggcctgttccaacacatctgcactgcttacgagctggtcctggctgatggcagctttgtgcgatgcactccgtccgaaaactcagacctgttctatgccgtaccctggtcctgtgggacgctgggtttcctggtggccgctgagatccgcatcatccctgccaagaagtacgtcaagctgcgtttcgagccagtgcggggcctggaggctatctgtgccaagttcacccacgagtcccagcggcaggagaaccacttcgtggaagggctgctctactccctggatgaggctgtcattatgacaggggtcatgacagatgaggcagagcccagcaagctgaatagcattggcaattactacaagccgtggttctttaagcatgtggagaactatctgaagacaaaccgagagggcctggagtacattcccttgagacactactaccaccgccacacgcgcagcatcttctgggagctccaggacatcatcccctttggcaacaaccccatcttccgctacctctttggctggatggtgcctcccaagatctccctcctgaagctgacccagggtgagaccctgcgcaagctgtacgagcagcaccacgtggtgcaggacatgctggtgcccatgaagtgcctgcagcaggccctgcacaccttccaaaacgacatccacgtctaccccatctggctgtgtccgttcatcctgcccagccagccaggcctagtgcaccccaaaggaaatgaggcagagctctacatcgacattggagcatatggggagccgcgtgtgaaacactttgaagccaggtcctgcatgaggcagctggagaagtttgtccgcagcgtgcatggcttccagatgctgtatgccgactgctacatgaaccgggaggagttctgggagatgtttgatggctccttgtaccacaagctgcgagagaagctgggttgccaggacgccttccccgaggtgtacgacaagatctgcaaggccgccaggcactgagctggagcccgcctggagagacagacacgtgtgagtggtcaggcatcttcccttcactcaagcttggctgctttcctagatccacactttcaaagagaaacccctccagaactcccaccctgacagcccaacaccaccttcctcctggcttccagggggcagcccagtggaatggaaagaatgtgggatttggagtcagacaagcctgagtccagttccccgtttagaactcattagctgtgtgactctgggtgagtcccttaacccctctgagcccgggtctcttcattagttgaaagggatagtaatacctacttgcaggttgttgtcatctgagttgagcactggtcacattgaaggtgctgggtaagtggtagctcttgttgcttcccgttcagcgtcacatctgcagtggagcctgaaaaggctccacattaggtcacctgtgcacagccatggctggaatgatgaaggggatacgctggagttgccctgccatcgcctccatcagccagacgaggtcctcacaggagaaggacagctcttccccaccctgggatctcaggagggcagccacggagtggggaggccccagatgcgctgtgccaaagccaggtccgaggccaaagttctccctgccatccttggtgccgtcctgccccttcctccttcatgcctgggcctgcaggcccaccccagccaccactgagtccactcggagtgccctgtgttcctggagaaggcattccagggttgaatcttgtcccagcctcagcctgggacacctaggtggagagagtggtctccgctctgaattggatccaggggacctgggctcattcttcttggctcaccaaccctgcaggcctcatctttcccaaaacccactttgtcttggtgggagtgggtccgcgctgctctgcagcaggggctggggagtggacagcatcaggtgggaaagtggagtccaccctcatgtttctgtaggattctcaccgtggggctggaagaaaagagcatcgacttgatttctccaaccactcatccctctttttctttcttccaccactccccaccccagctgtagttaatttcagtgccttacaaatcctaagctcagagaaagttccatttccgttccagagggaagggaacctccctaggtccttccctggcttgttataacgcaaagcttggttgtttatgcaactctatcttaagaactgcccagcctcagctgaaaacccgaatctgagaaggaattgcgtcatgtaagggaagctggaattaagggagctgagccagtcatggttgtggcgtgtgagtcaggagacctaggtttcagcccctctctactgtcagcgagctgtgcaacgtgggcaagtcattgtcctctgagctgcagtttcctcatctgtcacatcgctacagacaagacctccctggaacccttctgattgtcttagacactgtggttgcaaaacccacggaaagcctcatttgtgtggaaagtcagaggaaaaatgatccagtggacacttggggattatctgtcattcaagatccttccttcaaccccaaggtcagctcccatctcatttccagaaaggctcatacctggcttgcagggaagcatctgtcttgtcattccaggtgccagaatcctctcagagtcattgaagggtgttcacccatcccacccaaggcttggcacactgccagtgtcttagcagggtcttgtgagggctgggggcatccaggcactcagaaggcaaaggaaccaccctacccatttggcctctggagggggcagaagaaagaaagaaacctcatcctatattttacaaagcatgtgaattctggcattagctctcataggagacccatgtgcttccttgctcagtgcaaaactgatgattctacttgctgtagatgaatggttaacacgagctagttaaacagtgccattgttttgccagtgaagcctccaaccctaagccactgggacggtggccagagatgccagcagcctctgtcgcccttagtcatataaccaaaatccagaccttatccacaacccggggcttggaaaggaaggtattttggaatcacaccctccggttatgttgctccagtaaaatcttgcctggaaagaggcagtcttcttagcatggtgagctgagttcatggcttttttttgtagccagtcctgtccctggccatccatgtgatggttttggatggagttaaacttgatgccagtgggcagtgcatgtggaaagtatcagagtaaggctctcccctccagagccctgagtttcttggctgcatgaaggttttctttagaatcagaattgtagccagtttctttggccagaaggatgaatacttggatattactgaaagggaggggtggagatgggtgtggcagtgtatggtgtgtgatttttattttcttctttggtcatgggggccaaggagaaaggcatgaatcttccctgtcaggctcttacagccacaggcactgtgtctactgtctggaagacatgtccccgtggctgtggggccgctgcttctgtttaaataaaagtggcctggaa

SEQ ID NO: 324705 - DNA, 834 bp, Homo sapiens
cttcctgcttctgccaccactgttgtgctggagtcctcactgcacctcacatgagttatctggagcttcagttctcccaagccaaaacgacatccacgtctaccccatctggctgtgtccgttcatcctgcccagccagccaggcctagtgcaccccaaaggaaatgaggcagagctctacatcgacattggagcatatggggagccgcgtgtgaaacactttgaagccaggtcctgcatgaggcagctggagaagtttgtccgcagcgtgcatggcttccagatgctgtatgccgactgctacatgaaccgggaggagttctgggagatgtttgatggctccttgtaccacaagctgcgagagaagctgggttgccaggacgccttccccgaggtgtacgacaagatctgcaaggccgccaggcactgagctggagcccgcctggagagacagacacgtgtattcatcagcagagaccagactcctccatcaagactcggctgatcccaccccacctgattcacctggcttcgttcttccatatcccctgccacaccccaccctcccgctgctcggccatccctgatcaggccaggctcgtttacccctcacggccaggctaaggatattccagcccagaatatcctccatctctccaggccacctttccaggtagacatgggcatttctgccccacacgcttatggcacctggctgagccctccttcatgtacctgatgctaaatcaatccttcctgtctgccccgtttgcctgagaccttctgtgttctgacccctagcaaatgtccactaaattcaattaaatcatcaac

SEQ ID NO: 324706 - DNA, 3671 bp, Homo sapiens
  misc_feature (2)..(2): n is a, c, g, or t
tnaggctaggtacgaggccgggtggtaatcggccgaatcgagtcatcatcccacaagtacggcctgttccaacacatctgcactgcttacgagctggtcctggctgatggcagctttgtgcgatgcactccgtccgaaaactcagacctgttctatgccgtaccctggtcctgtgggacgctgggtttcctggtggccgctgagatccgcatcatccctgccaagaagtacgtcaagctgcgtttcgagccagtgcggggcctggaggctatctgtgccaagttcacccacgagtcccagcggcaggagaaccacttcgtggaagggctgctctactccctggatgaggctgtcattatgacaggggtcatgacagatgaggcagagcccagcaagctgaatagcattggcaattactacaagccgtggttctttaagcatgtggagaactatctgaagacaaaccgagagggcctggagtacattcccttgagacactactaccaccgccacacgcgcagcatcttctgggagctccaggacatcatcccctttggcaacaaccccatcttccgctacctctttggctggatggtgcctcccaagatctccctcctgaagctgacccagggtgagaccctgcgcaagctgtacgagcagcaccacgtggtgcaggacatgctggtgcccatgaagtgcctgcagcaggccctgcacaccttccaaaacgacatccacgtctaccccatctggctgtgtccgttcatcctgcccagccagccaggcctagtgcaccccaaaggaaatgaggcagagctctacatcgacattggagcatatggggagccgcgtgtgaaacactttgaagccaggtcctgcatgaggcagctggagaagtttgtccgcagcgtgcatggcttccagatgctgtatgccgactgctacatgaaccgggaggagttctgggagatgtttgatggctccttgtaccacaagctgcgagagaagctgggttgccaggacgccttccccgaggtgtacgacaagatctgcaaggccgccaggcactgagctggagcccgcctggagagacagacacgtgtgagtggtcaggcatcttcccttcactcaagcttggctgctttcctagatccacactttcaaagagaaacccctccagaactcccaccctgacagcccaacaccaccttcctcctggcttccagggggcagcccagtggaatggaaagaatgtgggatttggagtcagacaagcctgagtccagttccccgtttagaactcattagctgtgtgactctgggtgagtcccttaacccctctgagcccgggtctcttcattagttgaaagggatagtaatacctacttgcaggttgttgtcatctgagttgagcactggtcacattgaaggtgctgggtaagtggtagctcttgttgcttcccgttcagcgtcacatctgcagtggagcctgaaaaggctccacattaggtcacctgtgcacagccatggctggaatgatgaaggggatacgctggagttgccctgccatcgcctccatcagccagacgaggtcctcacaggagaaggacagctcttccccaccctgggatctcaggagggcagccacggagtggggaggccccagatgcgctgtgccaaagccaggtccgaggccaaagttctccctgccatccttggtgccgtcctgccccttcctccttcatgcctgggcctgcaggcccaccccagccaccactgagtccactcggagtgccctgtgttcctggagaaggcattccagggttgaatcttgtcccagcctcagcctgggacacctaggtggagagagtggtctccgctctgaattggatccaggggacctgggctcattcttcttggctcaccaaccctgcaggcctcatctttcccaaaacccactttgtcttggtgggagtgggtccgcgctgctctgcagcaggggctggggagtggacagcatcaggtgggaaagtggagtccaccctcatgtttctgtaggattctcaccgtggggctggaagaaaagagcatcgacttgatttctccaaccactcatccctctttttctttcttccaccactccccaccccagctgtagttaatttcagtgccttacaaatcctaagctcagagaaagttccatttccgttccagagggaagggaacctccctaggtccttccctggcttgttataacgcaaagcttggttgtttatgcaactctatcttaagaactgcccagcctcagctgaaaacccgaatctgagaaggaattgcgtcatgtaagggaagctggaattaagggagctgagccagtcatggttgtggcgtgtgagtcaggagacctaggtttcagcccctctctactgtcagcgagctgtgcaacgtgggcaagtcattgtcctctgagctgcagtttcctcatctgtcacatcgctacagacaagacctccctggaacccttctgattgtcttagacactgtggttgcaaaacccacggaaagcctcatttgtgtggaaagtcagaggaaaaatgatccagtggacacttggggattatctgtcattcaagatccttccttcaaccccaaggtcagctcccatctcatttccagaaaggctcatacctggcttgcagggaagcatctgtcttgtcattccaggtgccagaatcctctcagagtcattgaagggtgttcacccatcccacccaaggcttggcacactgccagtgtcttagcagggtcttgtgagggctgggggcatccaggcactcagaaggcaaaggaaccaccctacccatttggcctctggagggggcagaagaaagaaagaaacctcatcctatattttacaaagcatgtgaattctggcattagctctcataggagacccatgtgcttccttgctcagtgcaaaactgatgattctacttgctgtagatgaatggttaacacgagctagttaaacagtgccattgttttgccagtgaagcctccaaccctaagccactgggacggtggccagagatgccagcagcctctgtcgcccttagtcatataaccaaaatccagaccttatccacaacccggggcttggaaaggaaggtattttggaatcacaccctccggttatgttgctccagtaaaatcttgcctggaaagaggcagtcttcttagcatggtgagctgagttcatggcttttttttgtagccagtcctgtccctggccatccatgtgatggttttggatggagttaaacttgatgccagtgggcagtgcatgtggaaagtatcagagtaaggctctcccctccagagccctgagtttcttggctgcatgaaggttttctttagaatcagaattgtagccagtttctttggccagaaggatgaatacttggatattactgaaagggaggggtggagatgggtgtggcagtgtatggtgtgtgatttttattttcttctttggtcatgggggccaaggagaaaggcatgaatcttccctgtcaggctcttacagccacaggcactgtgtctactgtctggaagacatgtccccgtggctgtggggccgctgcttctgtttaaataaaagtggcctggaa

SEQ ID NO: 324707 - DNA, 3030 bp, Homo sapiens
cttcctgcttctgccaccactgttgtgctggagtcctcactgcacctcacatgagttatctggagcttcagttctcccaagccaaaacgacatccacgtctaccccatctggctgtgtccgttcatcctgcccagccagccaggcctagtgcaccccaaaggaaatgaggcagagctctacatcgacattggagcatatggggagccgcgtgtgaaacactttgaagccaggtcctgcatgaggcagctggagaagtttgtccgcagcgtgcatggcttccagatgctgtatgccgactgctacatgaaccgggaggagttctgggagatgtttgatggctccttgtaccacaagctgcgagagaagctgggttgccaggacgccttccccgaggtgtacgacaagatctgcaaggccgccaggcactgagctggagcccgcctggagagacagacacgtgtgagtggtcaggcatcttcccttcactcaagcttggctgctttcctagatccacactttcaaagagaaacccctccagaactcccaccctgacagcccaacaccaccttcctcctggcttccagggggcagcccagtggaatggaaagaatgtgggatttggagtcagacaagcctgagtccagttccccgtttagaactcattagctgtgtgactctgggtgagtcccttaacccctctgagcccgggtctcttcattagttgaaagggatagtaatacctacttgcaggttgttgtcatctgagttgagcactggtcacattgaaggtgctgggtaagtggtagctcttgttgcttcccgttcagcgtcacatctgcagtggagcctgaaaaggctccacattaggtcacctgtgcacagccatggctggaatgatgaaggggatacgctggagttgccctgccatcgcctccatcagccagacgaggtcctcacaggagaaggacagctcttccccaccctgggatctcaggagggcagccacggagtggggaggccccagatgcgctgtgccaaagccaggtccgaggccaaagttctccctgccatccttggtgccgtcctgccccttcctccttcatgcctgggcctgcaggcccaccccagccaccactgagtccactcggagtgccctgtgttcctggagaaggcattccagggttgaatcttgtcccagcctcagcctgggacacctaggtggagagagtggtctccgctctgaattggatccaggggacctgggctcattcttcttggctcaccaaccctgcaggcctcatctttcccaaaacccactttgtcttggtgggagtgggtccgcgctgctctgcagcaggggctggggagtggacagcatcaggtgggaaagtggagtccaccctcatgtttctgtaggattctcaccgtggggctggaagaaaagagcatcgacttgatttctccaaccactcatccctctttttctttcttccaccactccccaccccagctgtagttaatttcagtgccttacaaatcctaagctcagagaaagttccatttccgttccagagggaagggaacctccctaggtccttccctggcttgttataacgcaaagcttggttgtttatgcaactctatcttaagaactgcccagcctcagctgaaaacccgaatctgagaaggaattgcgtcatgtaagggaagctggaattaagggagctgagccagtcatggttgtggcgtgtgagtcaggagacctaggtttcagcccctctctactgtcagcgagctgtgcaacgtgggcaagtcattgtcctctgagctgcagtttcctcatctgtcacatcgctacagacaagacctccctggaacccttctgattgtcttagacactgtggttgcaaaacccacggaaagcctcatttgtgtggaaagtcagaggaaaaatgatccagtggacacttggggattatctgtcattcaagatccttccttcaaccccaaggtcagctcccatctcatttccagaaaggctcatacctggcttgcagggaagcatctgtcttgtcattccaggtgccagaatcctctcagagtcattgaagggtgttcacccatcccacccaaggcttggcacactgccagtgtcttagcagggtcttgtgagggctgggggcatccaggcactcagaaggcaaaggaaccaccctacccatttggcctctggagggggcagaagaaagaaagaaacctcatcctatattttacaaagcatgtgaattctggcattagctctcataggagacccatgtgcttccttgctcagtgcaaaactgatgattctacttgctgtagatgaatggttaacacgagctagttaaacagtgccattgttttgccagtgaagcctccaaccctaagccactgggacggtggccagagatgccagcagcctctgtcgcccttagtcatataaccaaaatccagaccttatccacaacccggggcttggaaaggaaggtattttggaatcacaccctccggttatgttgctccagtaaaatcttgcctggaaagaggcagtcttcttagcatggtgagctgagttcatggcttttttttgtagccagtcctgtccctggccatccatgtgatggttttggatggagttaaacttgatgccagtgggcagtgcatgtggaaagtatcagagtaaggctctcccctccagagccctgagtttcttggctgcatgaaggttttctttagaatcagaattgtagccagtttctttggccagaaggatgaatacttggatattactgaaagggaggggtggagatgggtgtggcagtgtatggtgtgtgatttttattttcttctttggtcatgggggccaaggagaaaggcatgaatcttccctgtcaggctcttacagccacaggcactgtgtctactgtctggaagacatgtccccgtggctgtggggccgctgcttctgtttaaataaaagtggcctggaa

SEQ ID NO: 324708 - DNA, 4506 bp, Homo sapiens
caatcgcgaggcggcgggcgatcccgggctccccgggctgtgggctacaggcgcagagcgggccaggcgcggagctggcggcagtgacaggaggcgcgaacccgcagcgcttaccgcgcggcgccgcaccatggagcccgccgtgtcgctggccgtgtgcgcgctgctcttcctgctgtgggtgcgcctgaaggggctggagttcgtgctcatccaccagcgctgggtgttcgtgtgcctcttcctcctgccgctctcgcttatcttcgatatctactactacgtgcgcgcctgggtggtgttcaagctcagcagcgctccgcgcctgcacgagcagcgcgtgcgggacatccagaagcaggtgcgggaatggaaggagcagggtagcaagaccttcatgtgcacggggcgccctggctggctcactgtctcactacgtgtcgggaagtacaagaagacacacaaaaacatcatgatcaacctgatggacattctggaagtggacaccaagaaacagattgtccgtgtggagcccttggtgaccatgggccaggtgactgccctgctgacctccattggctggactctccccgtgttgcctgagcttgatgacctcacagtggggggcttgatcatgggcacaggcatcgagtcatcatcccacaagtacggcctgttccaacacatctgcactgcttacgagctggtcctggctgatggcagctttgtgcgatgcactccgtccgaaaactcagacctgttctatgccgtaccctggtcctgtgggacgctgggtttcctggtggccgctgagatccgcatcatccctgccaagaagtacgtcaagctgcgtttcgagccagtgcggggcctggaggctatctgtgccaagttcacccacgagtcccagcggcaggagaaccacttcgtggaagggctgctctactccctggatgaggctgtcattatgacaggggtcatgacagatgaggcagagcccagcaagctgaatagcattggcaattactacaagccgtggttctttaagcatgtggagaactatctgaagacaaaccgagagggcctggagtacattcccttgagacactactaccaccgccacacgcgcagcatcttctgggagctccaggacatcatcccctttggcaacaaccccatcttccgctacctctttggctggatggtgcctcccaagatctccctcctgaagctgacccagggtgagaccctgcgcaagctgtacgagcagcaccacgtggtgcaggacatgctggtgcccatgaagtgcctgcagcaggccctgcacaccttccaaaacgacatccacgtctaccccatctggctgtgtccgttcatcctgcccagccagccaggcctagtgcaccccaaaggaaatgaggcagagctctacatcgacattggagcatatggggagccgcgtgtgaaacactttgaagccaggtcctgcatgaggcagctggagaagtttgtccgcagcgtgcatggcttccagatgctgtatgccgactgctacatgaaccgggaggagttctgggagatgtttgatggctccttgtaccacaagctgcgagagaagctgggttgccaggacgccttccccgaggtgtacgacaagatctgcaaggccgccaggcactgagctggagcccgcctggagagacagacacgtgtgagtggtcaggcatcttcccttcactcaagcttggctgctttcctagatccacactttcaaagagaaacccctccagaactcccaccctgacagcccaacaccaccttcctcctggcttccagggggcagcccagtggaatggaaagaatgtgggatttggagtcagacaagcctgagtccagttccccgtttagaactcattagctgtgtgactctgggtgagtcccttaacccctctgagcccgggtctcttcattagttgaaagggatagtaatacctacttgcaggttgttgtcatctgagttgagcactggtcacattgaaggtgctgggtaagtggtagctcttgttgcttcccgttcagcgtcacatctgcagtggagcctgaaaaggctccacattaggtcacctgtgcacagccatggctggaatgatgaaggggatacgctggagttgccctgccatcgcctccatcagccagacgaggtcctcacaggagaaggacagctcttccccaccctgggatctcaggagggcagccacggagtggggaggccccagatgcgctgtgccaaagccaggtccgaggccaaagttctccctgccatccttggtgccgtcctgccccttcctccttcatgcctgggcctgcaggcccaccccagccaccactgagtccactcggagtgccctgtgttcctggagaaggcattccagggttgaatcttgtcccagcctcagcctgggacacctaggtggagagagtggtctccgctctgaattggatccaggggacctgggctcattcttcttggctcaccaaccctgcaggcctcatctttcccaaaacccactttgtcttggtgggagtgggtccgcgctgctctgcagcaggggctggggagtggacagcatcaggtgggaaagtggagtccaccctcatgtttctgtaggattctcaccgtggggctggaagaaaagagcatcgacttgatttctccaaccactcatccctctttttctttcttccaccactccccaccccagctgtagttaatttcagtgccttacaaatcctaagctcagagaaagttccatttccgttccagagggaagggaacctccctaggtccttccctggcttgttataacgcaaagcttggttgtttatgcaactctatcttaagaactgcccagcctcagctgaaaacccgaatctgagaaggaattgcgtcatgtaagggaagctggaattaagggagctgagccagtcatggttgtggcgtgtgagtcaggagacctaggtttcagcccctctctactgtcagcgagctgtgcaacgtgggcaagtcattgtcctctgagctgcagtttcctcatctgtcacatcgctacagacaagacctccctggaacccttctgattgtcttagacactgtggttgcaaaacccacggaaagcctcatttgtgtggaaagtcagaggaaaaatgatccagtggacacttggggattatctgtcattcaagatccttccttcaaccccaaggtcagctcccatctcatttccagaaaggctcatacctggcttgcagggaagcatctgtcttgtcattccaggtgccagaatcctctcagagtcattgaagggtgttcacccatcccacccaaggcttggcacactgccagtgtcttagcagggtcttgtgagggctgggggcatccaggcactcagaaggcaaaggaaccaccctacccatttggcctctggagggggcagaagaaagaaagaaacctcatcctatattttacaaagcatgtgaattctggcattagctctcataggagacccatgtgcttccttgctcagtgcaaaactgatgattctacttgctgtagatgaatggttaacacgagctagttaaacagtgccattgttttgccagtgaagcctccaaccctaagccactgggacggtggccagagatgccagcagcctctgtcgcccttagtcatataaccaaaatccagaccttatccacaacccggggcttggaaaggaaggtattttggaatcacaccctccggttatgttgctccagtaaaatcttgcctggaaagaggcagtcttcttagcatggtgagctgagttcatggcttttttttgtagccagtcctgtccctggccatccatgtgatggttttggatggagttaaacttgatgccagtgggcagtgcatgtggaaagtatcagagtaaggctctcccctccagagccctgagtttcttggctgcatgaaggttttctttagaatcagaattgtagccagtttctttggccagaaggatgaatacttggatattactgaaagggaggggtggagatgggtgtggcagtgtatggtgtgtgatttttattttcttctttggtcatgggggccaaggagaaaggcatgaatcttccctgtcaggctcttacagccacaggcactgtgtctactgtctggaagacatgtccccgtggctgtggggccgctgcttctgtttaaataaaagtggcctggaaaaacctactcctccacaaacacttcaggggtgcccccgcacccaattcgccctatagcgagcccattacaactcactgtccgtcttttcccaccttctgactggctaaacccttgcttcccccacttaattcccttgcgtacatctccctttcccagccgctctattacgaacaggcctctacccttggccttccacaacatggccaccctgaatggcacatgtc

SEQ ID NO: 324709 - DNA, 4227 bp, Homo sapiens
caatcgcgaggcggcgggcgatcccgggctccccgggctgtgggctacaggcgcagagcgggccaggcgcggagctggcggcagtgacaggaggcgcgaacccgcagcgcttaccgcgcggcgccgcaccatggagcccgccgtgtcgctggccgtgtgcgcgctgctcttcctgctgtgggtgcgcctgaaggggctggagttcgtgctcatccaccagcgctgggtgttcgtgtgcctcttcctcctgccgctctcgcttatcttcgatatctactactacgtgcgcgcctgggtggtgttcaagctcagcagcgctccgcgcctgcacgagcagcgcgtgcgggacatccagaagcaggtgcgggaatggaaggagcagggtagcaagaccttcatgtgcacggggcgccctggctggctcactgtctcactacgtgtcgggaagtacaagaagacacacaaaaacatcatgatcaacctgatggacattctggaagtggacaccaagaaacagattgtccgtgtggagcccttggtgaccatgggccaggtgactgccctgctgacctccattggctggactctccccgtgttgcctgagcttgatgacctcacagtggggggcttgatcatgggcacaggcatcgagtcatcatcccacaagtacggcctgttccaacacatctgcactgcttacgagctggtcctggctgatggcagctttgtgcgatgcactccgtccgaaaactcagacctgttctatgccgtaccctggtcctgtgggacgctgggtttcctggtggccgctgagatccgcatcatccctgccaagaagtacgtcaagctgcgtttcgagccagtgcggggcctggaggctatctgtgccaagttcacccacgagtcccagcggcaggagaaccacttcgtggaagggctgctctactccctggatgaggctgtcattatgacaggggtcatgacagatgaggcagagcccagcaagctgaatagcattggcaattactacaagccgtggttctttaagcatgtggagaactatctgaagacaaaccgagagggcctggagtacattcccttgagacactactaccaccgccacacgcgcagcatcttctgggagctccaggacatcatcccctttggcaacaaccccatcttccgctacctctttggctggatggtgcctcccaagatctccctcctgaagctgacccagggtgagaccctgcgcaagctgtacgagcagcaccacgtggtgcaggacatgctggtgcccatgaagtgcctgcagcaggccctgcacaccttccaaaacgacatccacgtctaccccatctggctgtgtccgttcatcctgcccagccagccaggcctagtgcaccccaaaggaaatgaggcagagctctacatcgacattggagcatatggggagccgcgtgtgaaacactttgaagccaggtcctgcatgaggcagctggagaagtttgtccgcagcgtgcatggcttccagatgctgtatgccgactgctacatgaaccgggaggagttctgggagatgtttgatggctccttgtaccacaagctgcgagagaagctgggttgccaggacgccttccccgaggtgtacgacaagatctgcaaggccgccaggcactgagctggagcccgcctggagagacagacacgtgtgagtggtcaggcatcttcccttcactcaagcttggctgctttcctagatccacactttcaaagagaaacccctccagaactcccaccctgacagcccaacaccaccttcctcctggcttccagggggcagcccagtggaatggaaagaatgtgggatttggagtcagacaagcctgagtccagttccccgtttagaactcattagctgtgtgactctgggtgagtcccttaacccctctgagcccgggtctcttcattagttgaaagggatagtaatacctacttgcaggttgttgtcatctgagttgagcactggtcacattgaaggtgctgggtaagtggtagctcttgttgcttcccgttcagcgtcacatctgcagtggagcctgaaaaggctccacattaggtcacctgtgcacagccatggctggaatgatgaaggggatacgctggagttgccctgccatcgcctccatcagccagacgaggtcctcacaggagaaggacagctcttccccaccctgggatctcaggagggcagccacggagtggggaggccccagatgcgctgtgccaaagccaggtccgaggccaaagttctccctgccatccttggtgccgtcctgccccttcctccttcatgcctgggcctgcaggcccaccccagccaccactgagtccactcggagtgccctgtgttcctggagaaggcattccagggttgaatcttgtcccagcctcagcctgggacacctaggtggagagagtggtctccgctctgaattggatccaggggacctgggctcattcttcttggctcaccaaccctgcaggcctcatctttcccaaaacccactttgtcttggtgggagtgggtccgcgctgctctgcagcaggggctggggagtggacagcatcaggtgggaaagtggagtccaccctcatgtttctgtaggattctcaccgtggggctggaagaacactccccaccccagctgtagttaatttcagtgccttacaaatcctaagctcagagaaagttccatttccgttccagagggaagggaacctccctaggtccttccctggcttgttataacgcaaagcttggttgtttatgcaactctatcttaagaactgcccagcctcagctgaaaacccgaatctgagaaggaattgcgtcatgtaagggaagctggaattaagggagctgagccagtcatggttgtggcgtgtgagtcaggagacctaggtttcagcccctctctactgtcagcgagctgtgcaacgtgggcaagtcattgtcctctgagctgcagtttcctcatctgtcacatcgctacagacaagacctccctggaacccttctgattgtcttagacactgtggttgcaaaacccacggaaagcctcatttgtgtggaaagtcagaggaaaaatgatccagtggacacttggggattatctgtcattcaagatccttccttcaaccccaaggtcagctcccatctcatttccagaaaggctcatacctggcttgcagggaagcatctgtcttgtcattccaggtgccagaatcctctcagagtcattgaagggtgttcacccatcccacccaaggcttggcacactgccagtgtcttagcagggtcttgtgagggctgggggcatccaggcactcagaaggcaaaggaaccaccctacccatttggcctctggagggggcagaagaaagaaagaaacctcatcctatattttacaaagcatgtgaattctggcattagctctcataggagacccatgtgcttccttgctcagtgcaaaactgatgattctacttgctgtagatgaatggttaacacgagctagttaaacagtgccattgttttgccagtgaagcctccaaccctaagccactgggacggtggccagagatgccagcagcctctgtcgcccttagtcatataaccaaaatccagaccttatccacaacccggggcttggaaaggaaggtattttggaatcacaccctccggttatgttgctccagtaaaatcttgcctggaaagaggcagtcttcttagcatggtgagctgagttcatggcttttttttgtagccagtcctgtccctggccatccatgtgatggttttggatggagttaaacttgatgccagtgggcagtgcatgtggaaagtatcagagtaaggctctcccctccagagccctgagtttcttggctgcatgaaggttttctttagaatcagaattgtagccagtttctttggccagaaggatgaatacttggatattactgaaagggaggggtggagatgggtgtggcagtgtatggtgtgtgatttttattttcttctttggtcatgggggccaaggagaaaggcatgaatcttccctgtcaggctcttacagccacaggcactgtgtctactgtctggaagacatgtccccgtggctgtggggccgctgcttctgtttaaataaaagtggcctggaa

SEQ ID NO: 324710 - DNA, 4595 bp, Homo sapiens
caatcgcgaggcggcgggcgatcccgggctccccgggctgtgggctacaggcgcagagcgggccaggcgcggagctggcggcagtgacaggaggcgcgaacccgcagcgcttaccgcgcggcgccgcaccatggagcccgccgtgtcgctggccgtgtgcgcgctgctcttcctgctgtgggtgcgcctgaaggggctggagttcgtgctcatccaccagcgctgggtgttcgtgtgcctcttcctcctgccgctctcgcttatcttcgatatctactactacgtgcgcgcctgggtggtgttcaagctcagcagcgctccgcgcctgcacgagcagcgcgtgcgggacatccagaagcaggtgcgggaatggaaggagcagggtagcaagaccttcatgtgcacggggcgccctggctggctcactgtctcactacgtgtcgggaagtacaagaagacacacaaaaacatcatgatcaacctgatggacattctggaagtggacaccaagaaacagattgtccgtgtggagcccttggtgaccatgggccaggtgactgccctgctgacctccattggctggactctccccgtgttgcctgagcttgatgacctcacagtggggggcttgatcatgggcacaggcatcgagtcatcatcccacaagtacggcctgttccaacacatctgcactgcttacgagctggtcctggctgatggcagctttgtgcgatgcactccgtccgaaaactcagacctgttctatgccgtaccctggtcctgtgggacgctgggtttcctggtggccgctgagatccgcatcatccctgccaagaagtacgtcaagctgcgtttcgagccagtgcggggcctggaggctatctgtgccaagttcacccacgagtcccagcggcaggagaaccacttcgtggaagggctgctctactccctggatgaggctgtcattatgacaggggtcatgacagatgaggcagagcccagcaagctgaatagcattggcaattactacaagccgtggttctttaagcatgtggagaactatctgaagacaaaccgagagggcctggagtacattcccttgagacactactaccaccgccacacgcgcagcatcttctgggagctccaggacatcatcccctttggcaacaaccccatcttccgctacctctttggctggatggtgcctcccaagatctccctcctgaagctgacccagggtgagaccctgcgcaagctgtacgagcagcaccacgtggtgcaggacatgctggtgcccatgaagtgcctgcagcaggccctgcacaccttccaaaacgacatccacgtctaccccatctggctgtgtccgttcatcctgcccagccagccaggcctagtgcaccccaaaggaaatgaggcagagctctacatcgacattggagcatatggggagccgcgtgtgaaacactttgaagccaggtcctgcatgaggcagctggagaagtttgtccgcagcgtgcatggcttccagatgctgtatgccgactgctacatgaaccgggaggagttctgggagatgtttgatggctccttgtaccacaagctgcgagagaagctgggttgccaggacgccttccccgaggtgtacgacaagatctgcaaggccgccaggcactgagctggagcccgcctggagagacagacacgtgtgagtggtcaggcatcttcccttcactcaagcttggctgctttcctagatccacactttcaaagagaaacccctccagaactcccaccctgacagcccaacaccaccttcctcctggcttccagggggcagcccagtggaatggaaagaatgtgggatttggagtcagacaagcctgagtccagttccccgtttagaactcattagctgtgtgactctgggtgagtcccttaacccctctgagcccgggtctcttcattagttgaaagggatagtaatacctacttgcaggttgttgtcatctgagttgagcactggtcacattgaaggtgctgggtaagtggtagctcttgttgcttcccgttcagcgtcacatctgcagtggagcctgaaaaggctccacattaggtcacctgtgcacagccatggctggaatgatgaaggggatacgctggagttgccctgccatcgcctccatcagccagacgaggtcctcacaggagaaggacagctcttccccaccctgggatctcaggagggcagccacggagtggggaggccccagatgcgctgtgccaaagccaggtccgaggccaaagttctccctgccatccttggtgccgtcctgccccttcctccttcatgcctgggcctgcaggcccaccccagccaccactgagtccactcggagtgccctgtgttcctggagaaggcattccagggttgaatcttgtcccagcctcagcctgggacacctaggtggagagagtggtctccgctctgaattggatccaggggacctgggctcattcttcttggctcaccaaccctgcaggcctcatctttcccaaaacccactttgtcttggtgggagtgggtccgcgctgctctgcagcaggggctggggagtggacagcatcaggtgggaaagtggagtccaccctcatgtttctgtaggattctcaccgtggggctggaagaaaagagcatcgacttgatttctccaaccactcatccctctttttctttcttccaccactccccaccccagctgtagttaatttcagtgccttacaaatcctaagctcagagaaagttccatttccgttccagagggaagggaacctccctaggtccttccctggcttgttataacgcaaagcttggttgtttatgcaactctatcttaagaactgcccagcctcagctgaaaacccgaatctgagaaggaattgcgtcatgtaagggaagctggaattaagggagctgagccagtcatggttgtggcgtgtgagtcaggagacctaggtttcagcccctctctactgtcagcgagctgtgcaacgtgggcaagtcattgtcctctgagctgcagtttcctcatctgtcacatcgctacagacaagacctccctggaacccttctgattgtcttagacactgtggttgcaaaacccacggaaagcctcatttgtgtggaaagtcagaggaaaaatgatccagtggacacttggggattatctgtcattcaagatccttccttcaaccccaaggtcagctcccatctcatttccagaaaggctcatacctggcttgcagggaagcatctgtcttgtcattccaggtgccagaatcctctcagagtcattgaagggtgttcacccatcccacccaaggcttggcacactgccagtgtcttagcagggtcttgtgagggctgggggcatccaggcactcagaaggcaaaggaaccaccctacccatttggcctctggagggggcagaagaaagaaagaaacctcatcctatattttacaaagcatgtgaattctggcattagctctcataggagacccatgtgcttccttgctcagtgcaaaactgatgattctacttgctgtagatgaatggttaacacgagctagttaaacagtgccattgttttgccagtgaagcctccaaccctaagccactgggacggtggccagagatgccagcagcctctgtcgcccttagtcatataaccaaaatccagaccttatccacaacccggggcttggaaaggaaggtattttggaatcacaccctccggttatgttgctccagtaaaatcttgcctggaaagaggcagtcttcttagcatggtgagctgagttcatggcttttttttgtagccagtcctgtccctggccatccatgtgatggttttggatggagttaaacttgatgccagtgggcagtgcatgtggaaagtatcagagtaaggctctcccctccagagccctgagtttcttggctgcatgaaggttttctttagaatcagaattgtagccagtttctttggccagaaggatgaatacttggatattactgaaagggaggggtggagatgggtgtggcagtgtatggtgtgtgatttttattttcttctttggtcatgggggccaaggagaaaggcatgaatcttccctgtcaggctcttacagccacaggcactgtgtctactgtctggaagacatgtccccgtggctgtggggccgctgcttctgtttaaataaaagtggcctggaaaaaaaaaaaacaaaacaatataaaaacactaaaaacaaaaaatagaaaataacgctaaaaacaaatcttcacaaccttaagaactaaactaaaaaaaaaacctcgggggggggcccggtaccaaattccccctatagggagcccatttaacaatacttggccgtcttttaacaacgtcgtaactggaaaaaccttgcggttaccaaatttaatggctttggagcacaatccctttttcccaagtggataaaaacccaaaaaggccggaccgaacgcctttcccaacagttgcccaccccggaatggcaaaaggc

SEQ ID NO: 324711 - DNA, 2291 bp, Homo sapiens
ggcctggtaacccgagatccccggggaaaattacaccagggcaagtgtaaaaggtgagataagactcactcttgttgcttcccgttcagcgtcacatctgcagtggagcctgaaaaggctccacattaggtcacctgtgcacagccatggctggaatgatgaaggggatacgctggagttgccctgccatcgcctccatcagccagacgaggtcctcacaggagaaggacagctcttccccaccctgggatctcaggagggcagccacggagtggggaggccccagatgcgctgtgccaaagccaggtccgaggccaaagttctccctgccatccttggtgccgtcctgccccttcctccttcatgcctgggcctgcaggcccaccccagccaccactgagtccactcggagtgccctgtgttcctggagaaggcattccagggttgaatcttgtcccagcctcagcctgggacacctaggtggagagagtggtctccgctctgaattggatccaggggacctgggctcattcttcttggctcaccaaccctgcaggcctcatctttcccaaaacccactttgtcttggtgggagtgggtccgcgctgctctgcagcaggggctggggagtggacagcatcaggtgggaaagtggagtccaccctcatgtttctgtaggattctcaccgtggggctggaagaaaagagcatcgacttgatttctccaaccactcatccctctttttctttcttccaccactccccaccccagctgtagttaatttcagtgccttacaaatcctaagctcagagaaagttccatttccgttccagagggaagggaacctccctaggtccttccctggcttgttataacgcaaagcttggttgtttatgcaactctatcttaagaactgcccagcctcagctgaaaacccgaatctgagaaggaattgcgtcatgtaagggaagctggaattaagggagctgagccagtcatggttgtggcgtgtgagtcaggagacctaggtttcagcccctctctactgtcagcgagctgtgcaacgtgggcaagtcattgtcctctgagctgcagtttcctcatctgtcacatcgctacagacaagacctccctggaacccttctgattgtcttagacactgtggttgcaaaacccacggaaagcctcatttgtgtggaaagtcagaggaaaaatgatccagtggacacttggggattatctgtcattcaagatccttccttcaaccccaaggtcagctcccatctcatttccagaaaggctcatacctggcttgcagggaagcatctgtcttgtcattccaggtgccagaatcctctcagagtcattgaagggtgttcacccatcccacccaaggcttggcacactgccagtgtcttagcagggtcttgtgagggctgggggcatccaggcactcagaaggcaaaggaaccaccctacccatttggcctctggagggggcagaagaaagaaagaaacctcatcctatattttacaaagcatgtgaattctggcattagctctcataggagacccatgtgcttccttgctcagtgcaaaactgatgattctacttgctgtagatgaatggttaacacgagctagttaaacagtgccattgttttgccagtgaagcctccaaccctaagccactgggacggtggccagagatgccagcagcctctgtcgcccttagtcatataaccaaaatccagaccttatccacaacccggggcttggaaaggaaggtattttggaatcacaccctccggttatgttgctccagtaaaatcttgcctggaaagaggcagtcttcttagcatggtgagctgagttcatggcttttttttgtagccagtcctgtccctggccatccatgtgatggttttggatggagttaaacttgatgccagtgggcagtgcatgtggaaagtatcagagtaaggctctcccctccagagccctgagtttcttggctgcatgaaggttttctttagaatcagaattgtagccagtttctttggccagaaggatgaatacttggatattactgaaagggaggggtggagatgggtgtggcagtgtatggtgtgtgatttttattttcttctttggtcatgggggccaaggagaaaggcatgaatcttccctgtcaggctcttacagccacaggcactgtgtctactgtctggaagacatgtccccgtggctgtggggccgctgcttctgtttaaataaaagtggcctggaa

SEQ ID NO: 324712 - DNA, 4227 bp, Homo sapiens
caatcgcgaggcggcgggcgatcccgggctccccgggctgtgggctacaggcgcagagcgggccaggcgcggagctggcggcagtgacaggaggcgcgaacccgcagcgcttaccgcgcggcgccgcaccatggagcccgccgtgtcgctggccgtgtgcgcgctgctcttcctgctgtgggtgcgcctgaaggggctggagttcgtgctcatccaccagcgctgggtgttcgtgtgcctcttcctcctgccgctctcgcttatcttcgatatctactactacgtgcgcgcctgggtggtgttcaagctcagcagcgctccgcgcctgcacgagcagcgcgtgcgggacatccagaagcaggtgcgggaatggaaggagcagggtagcaagaccttcatgtgcacggggcgccctggctggctcactgtctcactacgtgtcgggaagtacaagaagacacacaaaaacatcatgatcaacctgatggacattctggaagtggacaccaagaaacagattgtccgtgtggagcccttggtgaccatgggccaggtgactgccctgctgacctccattggctggactctccccgtgttgcctgagcttgatgacctcacagtggggggcttgatcatgggcacaggcatcgagtcatcatcccacaagtacggcctgttccaacacatctgcactgcttacgagctggtcctggctgatggcagctttgtgcgatgcactccgtccgaaaactcagacctgttctatgccgtaccctggtcctgtgggacgctgggtttcctggtggccgctgagatccgcatcatccctgccaagaagtacgtcaagctgcgtttcgagccagtgcggggcctggaggctatctgtgccaagttcacccacgagtcccagcggcaggagaaccacttcgtggaagggctgctctactccctggatgaggctgtcattatgacaggggtcatgacagatgaggcagagcccagcaagctgaatagcattggcaattactacaagccgtggttctttaagcatgtggagaactatctgaagacaaaccgagagggcctggagtacattcccttgagacactactaccaccgccacacgcgcagcatcttctgggagctccaggacatcatcccctttggcaacaaccccatcttccgctacctctttggctggatggtgcctcccaagatctccctcctgaagctgacccagggtgagaccctgcgcaagctgtacgagcagcaccacgtggtgcaggacatgctggtgcccatgaagtgcctgcagcaggccctgcacaccttccaaaacgacatccacgtctaccccatctggctgtgtccgttcatcctgcccagccagccaggcctagtgcaccccaaaggaaatgaggcagagctctacatcgacattggagcatatggggagccgcgtgtgaaacactttgaagccaggtcctgcatgaggcagctggagaagtttgtccgcagcgtgcatggcttccagatgctgtatgccgactgctacatgaaccgggaggagttctgggagatgtttgatggctccttgtaccacaagctgcgagagaagctgggttgccaggacgccttccccgaggtgtacgacaagatctgcaaggccgccaggcactgagctggagcccgcctggagagacagacacgtgtgagtggtcaggcatcttcccttcactcaagcttggctgctttcctagatccacactttcaaagagaaacccctccagaactcccaccctgacagcccaacaccaccttcctcctggcttccagggggcagcccagtggaatggaaagaatgtgggatttggagtcagacaagcctgagtccagttccccgtttagaactcattagctgtgtgactctgggtgagtcccttaacccctctgagcccgggtctcttcattagttgaaagggatagtaatacctacttgcaggttgttgtcatctgagttgagcactggtcacattgaaggtgctgggtaagtggtagctcttgttgcttcccgttcagcgtcacatctgcagtggagcctgaaaaggctccacattaggtcacctgtgcacagccatggctggaatgatgaaggggatacgctggagttgccctgccatcgcctccatcagccagacgaggtcctcacaggagaaggacagctcttccccaccctgggatctcaggagggcagccacggagtggggaggccccagatgcgctgtgccaaagccaggtccgaggccaaagttctccctgccatccttggtgccgtcctgccccttcctccttcatgcctgggcctgcaggcccaccccagccaccactgagtccactcggagtgccctgtgttcctggagaaggcattccagggttgaatcttgtcccagcctcagcctgggacacctaggtggagagagtggtctccgctctgaattggatccaggggacctgggctcattcttcttggctcaccaaccctgcaggcctcatctttcccaaaacccactttgtcttggtgggagtgggtccgcgctgctctgcagcaggggctggggagtggacagcatcaggtgggaaagtggagtccaccctcatgtttctgtaggattctcaccgtggggctggaagaaaagagcatcgacttgatttctccaaccactcatccctctttttctttcttccaccactccccaccccagctgtagttaatttcagtgccttacaaatcctaagctcagagaaagttccatttccgttccagagggaagggaacctccctaggtccttccctggcttgttataacgcaaagcttggttgtttatgcaactctatcttaagaactgcccagcctcagctgaaaacccgaatctgagaaggaattgcgtcatgtaagggaagctggaattaagggagctgagccagtcatggttgtggcgtgtgagtcaggagacctaggtttcagcccctctctactgtcagcgagctgtgcaacgtgggcaagtcattgtcctctgagctgcagtttcctcatctgtcacatcgctacagacaagacctccctggaacccttctgattgtcttagacactgtggttgcaaaacccacggaaagcctcatttgtgtggaaagtcagaggaaacccaaggtcagctcccatctcatttccagaaaggctcatacctggcttgcagggaagcatctgtcttgtcattccaggtgccagaatcctctcagagtcattgaagggtgttcacccatcccacccaaggcttggcacactgccagtgtcttagcagggtcttgtgagggctgggggcatccaggcactcagaaggcaaaggaaccaccctacccatttggcctctggagggggcagaagaaagaaagaaacctcatcctatattttacaaagcatgtgaattctggcattagctctcataggagacccatgtgcttccttgctcagtgcaaaactgatgattctacttgctgtagatgaatggttaacacgagctagttaaacagtgccattgttttgccagtgaagcctccaaccctaagccactgggacggtggccagagatgccagcagcctctgtcgcccttagtcatataaccaaaatccagaccttatccacaacccggggcttggaaaggaaggtattttggaatcacaccctccggttatgttgctccagtaaaatcttgcctggaaagaggcagtcttcttagcatggtgagctgagttcatggcttttttttgtagccagtcctgtccctggccatccatgtgatggttttggatggagttaaacttgatgccagtgggcagtgcatgtggaaagtatcagagtaaggctctcccctccagagccctgagtttcttggctgcatgaaggttttctttagaatcagaattgtagccagtttctttggccagaaggatgaatacttggatattactgaaagggaggggtggagatgggtgtggcagtgtatggtgtgtgatttttattttcttctttggtcatgggggccaaggagaaaggcatgaatcttccctgtcaggctcttacagccacaggcactgtgtctactgtctggaagacatgtccccgtggctgtggggccgctgcttctgtttaaataaaagtggcctggaa

SEQ ID NO: 324713 - DNA, 4227 bp, Homo sapiens
caatcgcgaggcggcgggcgatcccgggctccccgggctgtgggctacaggcgcagagcgggccaggcgcggagctggcggcagtgacaggaggcgcgaacccgcagcgcttaccgcgcggcgccgcaccatggagcccgccgtgtcgctggccgtgtgcgcgctgctcttcctgctgtgggtgcgcctgaaggggctggagttcgtgctcatccaccagcgctgggtgttcgtgtgcctcttcctcctgccgctctcgcttatcttcgatatctactactacgtgcgcgcctgggtggtgttcaagctcagcagcgctccgcgcctgcacgagcagcgcgtgcgggacatccagaagcaggtgcgggaatggaaggagcagggtagcaagaccttcatgtgcacggggcgccctggctggctcactgtctcactacgtgtcgggaagtacaagaagacacacaaaaacatcatgatcaacctgatggacattctggaagtggacaccaagaaacagattgtccgtgtggagcccttggtgaccatgggccaggtgactgccctgctgacctccattggctggactctccccgtgttgcctgagcttgatgacctcacagtggggggcttgatcatgggcacaggcatcgagtcatcatcccacaagtacggcctgttccaacacatctgcactgcttacgagctggtcctggctgatggcagctttgtgcgatgcactccgtccgaaaactcagacctgttctatgccgtaccctggtcctgtgggacgctgggtttcctggtggccgctgagatccgcatcatccctgccaagaagtacgtcaagctgcgtttcgagccagtgcggggcctggaggctatctgtgccaagttcacccacgagtcccagcggcaggagaaccacttcgtggaagggctgctctactccctggatgaggctgtcattatgacaggggtcatgacagatgaggcagagcccagcaagctgaatagcattggcaattactacaagccgtggttctttaagcatgtggagaactatctgaagacaaaccgagagggcctggagtacattcccttgagacactactaccaccgccacacgcgcagcatcttctgggagctccaggacatcatcccctttggcaacaaccccatcttccgctacctctttggctggatggtgcctcccaagatctccctcctgaagctgacccagggtgagaccctgcgcaagctgtacgagcagcaccacgtggtgcaggacatgctggtgcccatgaagtgcctgcagcaggccctgcacaccttccaaaacgacatccacgtctaccccatctggctgtgtccgttcatcctgcccagccagccaggcctagtgcaccccaaaggaaatgaggcagagctctacatcgacattggagcatatggggagccgcgtgtgaaacactttgaagccaggtcctgcatgaggcagctggagaagtttgtccgcagcgtgcatggcttccagatgctgtatgccgactgctacatgaaccgggaggagttctgggagatgtttgatggctccttgtaccacaagctgcgagagaagctgggttgccaggacgccttccccgaggtgtacgacaagatctgcaaggccgccaggcactgagctggagcccgcctggagagacagacacgtgtgagtggtcaggcatcttcccttcactcaagcttggctgctttcctagatccacactttcaaagagaaacccctccagaactcccaccctgacagcccaacaccaccttcctcctggcttccagggggcagcccagtggaatggaaagaatgtgggatttggagtcagacaagcctgagtccagttccccgtttagaactcattagctgtgtgactctgggtgagtcccttaacccctctgagcccgggtctcttcattagttgaaagggatagtaatacctacttgcaggttgttgtcatctgagttgagcactggtcacattgaaggtgctgggtaagtggtagctcttgttgcttcccgttcagcgtcacatctgcagtggagcctgaaaaggctccacattaggtcacctgtgcacagccatggctggaatgatgaaggggatacgctggagttgccctgccatcgcctccatcagccagacgaggtcctcacaggagaaggacagctcttccccaccctgggatctcaggagggcagccacggagtggggaggccccagatgcgctgtgccaaagccaggtccgaggccaaagttctccctgccatccttggtgccgtcctgccccttcctccttcatgcctgggcctgcaggcccaccccagccaccactgagtccactcggagtgccctgtgttcctggagaaggcattccagggttgaatcttgtcccagcctcagcctgggacacctaggtggagagagtggtctccgctctgaattggatccaggggacctgggctcattcttcttggctcaccaaccctgcaggcctcatctttcccaaaacccactttgtcttggtgggagtgggtccgcgctgctctgcagcaggggctggggagtggacagcatcaggtgggaaagtggagtccaccctcatgtttctgtaggattctcaccgtggggctggaagaaaagagcatcgacttgatttctccaaccactcatccctctttttctttcttccaccactccccaccccagctgtagttaatttcagtgccttacaaatcctaagctcagagaaagttccatttccgttccagagggaagggaacctccctaggtccttccctggcttgttataacgcaaagcttggttgtttatgcaactctatcttaagaactgcccagcctcagctgaaaacccgaatctgagaaggaattgcgtcatgtaagggaagctggaattaagggagctgagccagtcatggttgtggcgtgtgagtcaggagacctaggtttcagcccctctctactgtcagcgagctgtgcaacgtgggcaagtcattgtcctctgagctgcagtttcctcatctgtcacatcgctacagacaagacctccctggaacccttctgattgtcttagacactgtggttgcaaaacccacggaaagcctcatttgtgtggaaagtcagaggaaaaatgatccagtggacacttggggattatctgtcattcaagatccttccttcaaccccaaggtcagctcccatctcatttccagaaaggctcatacctggcttgcagggaagcatctgtcttgtcattccaggtgccagaatcctctcagagtcattgaagggtgttcacccatcccacccaaggcttggcacactgccagtgtcttagcagggtcttgtgagggctgggggcatccaggcactcagaaggcaaaggaaccaccctacccatttggcctctggagggggcagaagaaagaaagaaacctcatcctatattttacaaagcatgtgaattctggcattagctctcataggagacccatgtgcttccttgctcagtgcaaaactgatgattctacttgctgtagatgaatggttaacacgagctagttaaacagtgccattgttttgccagtgaagcctccaaccctaagccactgggacggtggccagagatgccagcagcctctgtcgcccttagtcatataaccaaaatccagaccttatccacaacccggggcttggaaaggaaggtattttggaatcacaccctccggttatgttgctccaggcttttttttgtagccagtcctgtccctggccatccatgtgatggttttggatggagttaaacttgatgccagtgggcagtgcatgtggaaagtatcagagtaaggctctcccctccagagccctgagtttcttggctgcatgaaggttttctttagaatcagaattgtagccagtttctttggccagaaggatgaatacttggatattactgaaagggaggggtggagatgggtgtggcagtgtatggtgtgtgatttttattttcttctttggtcatgggggccaaggagaaaggcatgaatcttccctgtcaggctcttacagccacaggcactgtgtctactgtctggaagacatgtccccgtggctgtggggccgctgcttctgtttaaataaaagtggcctggaa

SEQ ID NO: 324714 - DNA, 4186 bp, Homo sapiens
caatcgcgaggcggcgggcgatcccgggctccccgggctgtgggctacaggcgcagagcgggccaggcgcggagctggcggcagtgacaggaggcgcgaacccgcagcgcttaccgcgcggcgccgcaccatggagcccgccgtgtcgctggccgtgtgcgcgctgctcttcctgctgtgggtgcgcctgaaggggctggagttcgtgctcatccaccagcgctgggtgttcgtgtgcctcttcctcctgccgctctcgcttatcttcgatatctactactacgtgcgcgcctgggtggtgttcaagctcagcagcgctccgcgcctgcacgagcagcgcgtgcgggacatccagaagcaggtgcgggaatggaaggagcagggtagcaagaccttcatgtgcacggggcgccctggctggctcactgtctcactacgtgtcgggaagtacaagaagacacacaaaaacatcatgatcaacctgatggacattctggaagtggacaccaagaaacagattgtccgtgtggagcccttggtgaccatgggccaggtgactgccctgctgacctccattggctggactctccccgtgttgcctgagcttgatgacctcacagtggggggcttgatcatgggcacaggcatcgagtcatcatcccacaagtacggcctgttccaacacatctgcactgcttacgagctggtcctggctgatggcagctttgtgcgatgcactccgtccgaaaactcagacctgttctatgccgtaccctggtcctgtgggacgctgggtttcctggtggccgctgagatccgcatcatccctgccaagaagtacgtcaagctgcgtttcgagccagtgcggggcctggaggctatctgtgccaagttcacccacgagtcccagcggcaggagaaccacttcgtggaagggctgctctactccctggatgaggctgtcattatgacaggggtcatgacagatgaggcagagcccagcaagctgaatagcattggcaattactacaagccgtggttctttaagcatgtggagaactatctgaagacaaaccgagagggcctggagtacattcccttgagacactactaccaccgccacacgcgcagcatcttctgggagctccaggacatcatcccctttggcaacaaccccatcttccgctacctctttggctggatggtgcctcccaagatctccctcctgaagctgacccagggtgagaccctgcgcaagctgtacgagcagcaccacgtggtgcaggacatgctggtgcccatgaagtgcctgcagcaggccctgcacaccttccaaaacgacatccacgtctaccccatctggctgtgtccgttcatcctgcccagccagccaggcctagtgcaccccaaaggaaatgaggcagagctctacatcgacattggagcatatggggagccgcgtgtgaaacactttgaagccaggtcctgcatgaggcagctggagaagtttgtccgcagcgtgcatggcttccagatgctgtatgccgactgctacatgaaccgggaggagttctgggagatgtttgatggctccttgtaccacaagctgcgagagaagctgggttgccaggacgccttccccgaggtgtacgacaagatctgcaaggccgccaggcactgagctggagcccgcctggagagacagacacgtgtgagtggtcaggcatcttcccttcactcaagcttggctgctttcctagatccacactttcaaagagaaacccctccagaactcccaccctgacagcccaacaccaccttcctcctggcttccagggggcagcccagtggaatggaaagaatgtgggatttggagtcagacaagcctgagtccagttccccgtttagaactcattagctgtgtgactctgggtgagtcccttaacccctctgagcccgggtctcttcattagttgaaagggatagtaatacctacttgcaggttgttgtcatctgagttgagcactggtcacattgaaggtgctgggtaagtggtagctcttgttgcttcccgttcagcgtcacatctgcagtggagcctgaaaaggctccacattaggtcacctgtgcacagccatggctggaatgatgaaggggatacgctggagttgccctgccatcgcctccatcagccagacgaggtcctcacaggagaaggacagctcttccccaccctgggatctcaggagggcagccacggagtggggaggccccagatgcgctgtgccaaagccaggtccgaggccaaagttctccctgccatccttggtgccgtcctgccccttcctccttcatgcctgggcctgcaggcccaccccagccaccactgagtccactcggagtgccctgtgttcctggagaaggcattccagggttgaatcttgtcccagcctcagcctgggacacctaggtggagagagtggtctccgctctgaattggatccaggggacctgggctcattcttcttggctcaccaaccctgcaggcctcatctttcccaaaacccactttgtcttggtgggagtgggtccgcgctgctctgcagcaggggctggggagtggacagcatcaggtgggaaagtggagtccaccctcatgtttctgtaggattctcaccgtggggctggaagaaaagagcatcgacttgatttctccaaccactcatccctctttttctttcttccaccactccccaccccagctgtagttaatttcagtgccttacaaatcctaagctcagagaaagttccatttccgttccagagggaagggaacctccctaggtccttccctggcttgttataacgcaaagcttggttgtttatgcaactctatcttaagaactgcccagcctcagctgaaaacccgaatctgagaaggaattgcgtcatgtaagggaagctggaattaagggagctgagccagtcatggttgtggcgtgtgagtcaggagacctaggtttcagcccctctctactgtcagcgagctgtgcaacgtgggcaagtcattgtcctctgagctgcagtttcctcatctgtcacatcgctacagacaagacctccctggaacccttctgattgtcttagacactgtggttgcaaaacccacggaaagcctcatttgtgtggaaagtcagaggaaaaatgatccagtggacacttggggattatctgtcattcaagatccttccttcaaccccaaggtcagctcccatctcatttccagaaaggctcatacctggcttgcagggaagcatctgtcttgtcattccaggtgccagaatcctctcagagtcattgaagggtgttcacccatcccacccaaggcttggcacactgccagtgtcttagcagggtcttgtgagggctgggggcatccaggcactcagaaggcaaaggaaccaccctacccatttggcctctggagggggcagaagaaagaaagaaacctcatcctatattttacaaagcatgtgaattctggcattagctctcataggagacccatgtgcttccttgctcagtgcaaaactgatgattctacttgctgtagatgaatggttaacacgagctagttaaacagtgccattgttttgccagtgaagccagcctctgtcgcccttagtcatataaccaaaatccagaccttatccacaacccggggcttggaaaggaaggtattttggaatcacaccctccggttatgttgctccaggcttttttttgtagccagtcctgtccctggccatccatgtgatggttttggatggagttaaacttgatgccagtgggcagtgcatgtggaaagtatcagagtaaggctctcccctccagagccctgagtttcttggctgcatgaaggttttctttagaatcagaattgtagccagtttctttggccagaaggatgaatacttggatattactgaaagggaggggtggagatgggtgtggcagtgtatggtgtgtgatttttattttcttctttggtcatgggggccaaggagaaaggcatgaatcttccctgtcaggctcttacagccacaggcactgtgtctactgtctggaagacatgtccccgtggctgtggggccgctgcttctgtttaaataaaagtggcctggaa

SEQ ID NO: 324715 - DNA, 3462 bp, Homo sapiens
caatcgcgaggcggcgggcgatcccgggctccccgggctgtgggctacaggcgcagagcgggccaggcgcggagctggcggcagtgacaggaggcgcgaacccgcagcgcttaccgcgcggcgccgcaccatggagcccgccgtgtcgctggccgtgtgcgcgctgctcttcctgctgtgggtgcgcctgaaggggctggagttcgtgctcatccaccagcgctgggtgttcgtgtgcctcttcctcctgccgctctcgcttatcttcgatatctactactacgtgcgcgcctgggtggtgttcaagctcagcagcgctccgcgcctgcacgagcagcgcgtgcgggacatccagaagcaggtgcgggaatggaaggagcagggtagcaagaccttcatgtgcacggggcgccctggctggctcactgtctcactacgtgtcgggaagtacaagaagacacacaaaaacatcatgatcaacctgatggacattctggaagtggacaccaagaaacagattgtccgtgtggagcccttggtgaccatgggccaggtgactgccctgctgacctccattggctggactctccccgtgttgcctgagcttgatgacctcacagtggggggcttgatcatgggcacaggcatcgagtcatcatcccacaagtacggcctgttccaacacatctgcactgcttacgagctggtcctggctgatggcagctttgtgcgatgcactccgtccgaaaactcagacctgttctatgccgtaccctggtcctgtgggacgctgggtttcctggtggccgctgagatccgcatcatccctgccaagaagtacgtcaagctgcgtttcgagccagtgcggggcctggaggctatctgtgccaagttcacccacgagtcccagcggcaggagaaccacttcgtggaagggctgctctactccctggatgaggctgtcattatgacaggggtcatgacagatgaggcagagcccagcaagctgaatagcattggcaattactacaagccgtggttctttaagcatgtggagaactatctgaagacaaaccgagagggcctggagtacattcccttgagacactactaccaccgccacacgcgcagcatcttctgggagctccaggacatcatcccctttggcaacaaccccatcttccgctacctctttggctggatggtgcctcccaagatctccctcctgaagctgacccagggtgagaccctgcgcaagctgtacgagcagcaccacgtggtgcaggacatgctggtgcccatgaagtgcctgcagcaggccctgcacaccttccaaaacgacatccacgtctaccccatctggctgtgtccgttcatcctgcccagccagccaggcctagtgcaccccaaaggaaatgaggcagagctctacatcgacattggagcatatggggagccgcgtgtgaaacactttgaagccaggtcctgcatgaggcagctggagaagtttgtccgcagcgtgcatggcttccagatgctgtatgccgactgctacatgaaccgggaggagttctgggagatgtttgatggctccttgtaccacaagctgcgagagaagctgggttgccaggacgccttccccgaggtgtacgacaagatctgcaaggccgccaggcactgagctggagcccgcctggagagacagacacgtgtgagtggtcaggcatcttcccttcactcaagcttggctgctttcctagatccacactttcaaagagaaacccctccagaactcccaccctgacagcccaacaccaccttcctcctggcttccagggggcagcccagtggaatggaaagaatgtgggatttggagtcagacaagcctgagtccagttccccgtttagaactcattagctgtgtgactctgggtgagtcccttaacccctctgagcccgggtctcttcattagttgaaagggatagtaatacctacttgcaggttgttgtcatctgagttgagcactggtcacattgaaggtgctgggtaagtggtagctcttgttgcttcccgttcagcgtcacatctgcagtggagcctgaaaaggctccacattaggtcacctgtgcacagccatggctggaatgatgaaggggatacgctggagttgccctgccatcgcctccatcagccagacgaggtcctcacaggagaaggacagctcttccccaccctgggatctcaggagggcagccacggagtggggaggccccagatgcgctgtgccaaagccaggtccgaggccaaagttctccctgccatccttggtgccgtcctgccccttcctccttcatgcctgggcctgcaggcccaccccagccaccactgagtccactcggagtgccctgtgttcctggagaaggcattccagggttgaatcttgtcccagcctcagcctgggacacctaggtggagagagtggtctccgctctgaattggatccaggggacctgggctcattcttcttggctcaccaaccctgcaggcctcatctttcccaaaacccactttgtcttggtgggagtgggtccgcgctgctctgcagcaggggctggggagtggacagcatcaggtgggaaagtggagtccaccctcatgtttctgtaggattctcaccgtggggctggaagaaaagagcatcgacttgatttctccaaccactcatccctctttttctttcttccaccactccccaccccagctgtagttaatttcagtgccttacaaatcctaagctcagagaaagttccatttccgttccagagggaagggaacctccctaggtccttccctggcttgttataacgcaaagcttggttgtttatgcaactctatcttaagaactgcccagcctcagctgaaaacccgaatctgagaaggaattgcgtcatgtaagggaagctggaattaagggagctgagccagtcatggttgtggcgtgtgagtcaggagacctaggtttcagcccctctctactgtcagcgagctgtgcaacgtgggcaagtcattgtcctctgagctgcagtttcctcatctgtcacatcgctacagacaagacctccctggaacccttctgattgtcttagacactgtggttgcaaaacccacggaaagcctcatttgtgtggaaagtcagaggaaaaatgatccagtggacacttggggattatctgtcattcaagatccttccttcaaccccaaggtcagctcccatctcatttccagaaaggctcatacctggcttgcagggaagcatcttgccttctgagtgcctggatgcccccagccctcacaagaccctgctaagacactggcagtgtgccaagccttgggtgggatgggtgaacacccttcaatgactctgagcggattctggcacctggaatgacaagacgtcgagc

SEQ ID NO: 324716 - DNA, 1045 bp, Homo sapiens
  misc_feature (343)..(343): n is a, c, g, or t
tctcgtggattccatgtgtcttaatcctcgtcagcaggtcttagctaggtgtgcgacccgagtcgcagcgcaacggcttgtgccaagtagacagtgtgttaccagggtgttgtgagggctggggcgcttccaggcactcagatagtgctgaaggcacatgcagcctagcccatttgggtctctgtggagggggctcgtaccgaacagaaagtgataccgtacaatccgtgaatatctgtagccacacaagcccactgtgacacttcgtggcgattcagcgtctgcgagtatggaggacaccgagtgctgccgtgtcctctgtctccagctgtcttgcatgtgnagtgcatctctacttgcgtgctaggactccgaagtggcttacatccactcagctagttaaacagtgccattgttttgccagtgaagcctccaaccctaagccactgggacggtggccagagatgccagcagcctctgtcgcccttagtcatataaccaaaatccagaccttatccacaacccggggcttggaaaggaaggtattttggaatcacaccctccggttatgttgctccagtaaaatcttgcctggaaagaggcagtcttcttagcatggtgagctgagttcatggcttttttttgtagccagtcctgtccctggccatccatgtgatggttttggatggagttaaacttgatgccagtgggcagtgcatgtggaaagtatcagagtaaggctctcccctccagagccctgagtttcttggctgcatgaaggttttctttagaatcagaattgtagccagtttctttggccagaaggatgaatacttggatattactgaaagggaggggtggagatgggtgtggcagtgtatggtgtgtgatttttattttcttctttggtcatgggggccaaggagaaaggcatgaatcttccctgtcaggctcttacagccacaggcactgtgtctactgtctggaagacatgtccccgtggctgtggggccgctgcttctgtttaaataaaagtggcctggaa

SEQ ID NO: 324717 - DNA, 1522 bp, Homo sapiens
caatcgcgaggcggcgggcgatcccgggctccccgggctgtgggctacaggcgcagagcgggccaggcgcggagctggcggcagtgacaggaggcgcgaacccgcagcgcttaccgcgcggcgccgcaccatggagcccgccgtgtcgctggccgtgtgcgcgctgctcttcctgctgtgggtgcgcctgaaggggctggagttcgtgctcatccaccagcgctgggtgttcgtgtgcctcttcctcctgccgctctcgcttatcttcgatatctactactacgtgcgcgcctgggtggtgttcaagctcagcagcgctccgcgcctgcacgagcagcgcgtgcgggacatccagaagcaggtgcgggaatggaaggagcagggtagcaagaccttcatgtgcacggggcgccctggctggctcactgtctcactacgtgtcgggaagtacaagaagacacacaaaaacatcatgatcaacctgatggacattctggaagtggacaccaagaaacagattgtccgtgtggagcccttggtgaccatgggccaggtgactgccctgctgacctccattggctggactctccccgtgttgcctgagcttgatgacctcacagtggggggcttgatcatgggcacaggcatcgagtcatcatcccacaagtacggcctgttccaacacatctgcactgcttacgagctggtcctggctgatggcagctttgtgcgatgcactccgtccgaaaactcagacctgttctatgccgtaccctggtcctgtgggacgctgggtttcctggtggccgctgagatccgcatcatccctgccaagaagtacgtcaagctgcgtttcgagccagtgcggggcctggaggctatctgtgccaagttcacccacgagtcccagcggcaggagaaccacttcgtggaagggctgctctactccctggatgaggctgtcattatgacaggggtcatgacagatgaggcagagcccagcaagctgaatagcattggcaattactacaagccgtggttctttaagcatgtggagaactatctgaagacaaaccgagagggcctggagtacattcccttgagacactactaccaccgccacacgcgcagcatcttctgggagctccaggtgaggcttgggtttctgtagccctggctcctccaggccagctgggcagggagcccggacagttaacactgtagccatactctctcccttcagggtaaagagtggctttgtcctaaggaactgcaatgccttcttaagcagcaacacagtcgtttccttctgaaggaaccaactaccttcagttcaagcagcaggctcttagcaagcatctgcttggtgctggggagtaagcccctgggccggtactttggggaacacagacctgttccgcccttgaggaagggttagcctctagccacggtgagcagacagatccctgcactgtaaagggccgcaggaacattagtaggaagtggctagttctgcctaggg

SEQ ID NO: 324718 - DNA, 3028 bp, Homo sapiens
  misc_feature (301)..(301): n is a, c, g, or t
cggcgtctctctcccccgcgccagctcccgtacacggagccgcattccttggcccccccacccccctccctcggggcccccccgcccccctcgggaaaaaaatccaccccgaatcactcgaacccgagggaggcttcctttcacccttggggagacgagctttcaacggttacctcttcttcgtctccccccaagcccccgtcccctccccctgctcccacccccttctggcgccgggtgtaaggtccctttaaggcgacggcgccttcctcgggtcagactaccggcggcgacgaccacnggagcatggcggacaccgacctgttcatggaatgtgaggaggaggagttggagccatggcagaaaatcagtgatgtcattgaggactctgtagttgaagattataattcagtggataaaactaccacagtttctgtgagccagcagccagtctcggctccagtgcccatcgctgcccatgcttctgttgctgggcacctctctacatccaccaccgttagtagcagcggggcacagaacagcgacagtacaaagaagactcttgtcacactaattgccaacaacaatgctggcaatcctttggtccagcaaggtggacagccactcatcctgacccagaatccagccccaggtctgggcacaatggttactcaaccagtattgaggcctgttcaggtcatgcagaatgccaatcatgtgactagttcccctgtggcctcacaaccaatatttatcactacgcagggatttcctgtaaggaatgtccggcctgtacaaaatgcaatgaatcaggttgggattgtgctgaacgtacagcaaggccaaacggttagaccaattacactagttccagccccaggtacccagtttgttaagccgacagttggagttccacaagtgttctcccagatgacccctgtgaggccaggctccacaatgcctgtgaggcccaccaccaacaccttcaccaccgtcatcccggccactcttaccattcgaagcaccgtcccacagtcccagtcccagcagaccaagtccactcccagcacttctaccactcccactgccacacagccaacctcactggggcaactagctgttcagtctccaggccagtcaaaccagaccacgaatcccaagctagctccctccttcccctctccacctgcagtgagcattgccagctttgtcactgtgaagcgacctggtgttacaggcgaaaatagcaatgaagtggccaaattggtgaatacccttaacaccatcccttccctgggccagagtcctgggccagtggtggtgtccaacaacagctctgctcatggctctcaaagaaccagcggacctgagtcttcaatgaaaggtacaataacctgaaagactctgagcagccagtcattcaaaaacattaataaagtgtttgttgtatcagagctttatactcagaaatagaaaaataaaataaaatacagctgctgtagtttgttcttacagaaactttagtaaggagaaagccacttacaaaaagtgtaactgaatcagctccaagaaattatgtgtgtaattgtgctttggagattagtgaaattgattgattaaagatgggtgagataatgaaagataacttcatggaagagatggatttctgagcaaggttttaaagttaggatttggtagagagatcttcaggttgagaatgatgagcatgagggttttcagtggtctagagcaggggtcggcaaatgttttctgtaaagggcctagtagtaaagttgtaggctttgtgcacaatatatagcctctgttgcagctattaactgtgctgttgtggtggggaagcagccacagatacataaacgaatgagcatggctgtgctccactaaaaactatttatggactctgaaatttaagtttcataaaattttcatgtgtcgaaaagttttattcttttatttcaaccatttaaaaataaaaaccgcaaggtatagtggctcacacctcatcccagcattatgggaggccaagacgggaggatcacttgagcctaggagtttgagaccagcctgggcaacatggtgagatcccatctctacaaaaaaaaaaaaaaaaaaagattagccaggcgtggtggtgtatgtctgcagtcctcgctactcagaagtctgaggtgagaggatggcttgggcttgaacccagaaggttgagcctgcagtgagccatgagcatgccactgcaacagaacgacaccctgtctcaaaaaaagtaaaaacctttaaaacatggtgttgggaaaactagatatccatgtccaaaagaagttggatcttaccttacaataaatacaaaaattaactcaaaatggatcaaagacctaaatgaactaaaactataagactcttagaaaaattataggacaaaaagcttcatgatactggatttgacagtgattactatttcttggatatgacaccaaaagcatacgcaagaaaagaaaaaatgagtaaattaaattatatcaaaatttaaaacttttgtgcaggacgttgtcaacacagtgaaaagggaagccacagaatgggagaaaatatttgcaaattatgtatctaataaggggttaatatccagaatatataaagaatttgtgcagttcaacaacaaaaaaactcccaaacaacctttttaaaaaatagacaaaggactcgctgggcgtggtggttcatgcctgtaatcccagcactttgagaggccaaggcaggtggatcacgaggtcaggagtccaagaccagcctgaccaataatggtgaaaccccgtctatactaaaaatacaaaaattagccaggcgtggtggtgtgtgcctgtattcccagctgctcgggaggctgagacacaagaattgcttgaacctggaaggcagaggttgtggtgagtcgagatcgtgccactgcactccagtctgggcaacagagaaagaccccatctcaaaaaaaaaaaaaaaagtaggaaag

SEQ ID NO: 324719 - DNA, 6474 bp, Homo sapiens
  misc_feature (301)..(301): n is a, c, g, or t
cggcgtctctctcccccgcgccagctcccgtacacggagccgcattccttggcccccccacccccctccctcggggcccccccgcccccctcgggaaaaaaatccaccccgaatcactcgaacccgagggaggcttcctttcacccttggggagacgagctttcaacggttacctcttcttcgtctccccccaagcccccgtcccctccccctgctcccacccccttctggcgccgggtgtaaggtccctttaaggcgacggcgccttcctcgggtcagactaccggcggcgacgaccacnggagcatggcggacaccgacctgttcatggaatgtgaggaggaggagttggagccatggcagaaaatcagtgatgtcattgaggactctgtagttgaagattataattcagtggataaaactaccacagctggcaatcctttggtccagcaaggtggacagccactcatcctgacccagaatccagccccaggtctgggcacaatggttactcaaccagtattgaggcctgttcaggtcatgcagaatgccaatcatgtgactagttcccctgtggcctcacaaccaatatttatcactacgcagggatttcctgtaaggaatgtccggcctgtacaaaatgcaatgaatcaggttgggattgtgctgaacgtacagcaaggccaaacggttagaccaattacactagttccagccccaggtacccagtttgttaagccgacagttggagttccacaagtgttctcccagatgacccctgtgaggccaggctccacaatgcctgtgaggcccaccaccaacaccttcaccaccgtcatcccggccactcttaccattcgaagcaccgtcccacagtcccagtcccagcagaccaagtccactcccagcacttctaccactcccactgccacacagccaacctcactggggcaactagctgttcagtctccaggccagtcaaaccagaccacgaatcccaagctagctccctccttcccctctccacctgcagtgagcattgccagctttgtcactgtgaagcgacctggtgttacaggcgaaaatagcaatgaagtggccaaattggtgaatacccttaacaccatcccttccctgggccagagtcctgggccagtggtggtgtccaacaacagctctgctcatggctctcaaagaaccagcggacctgagtcttcaatgaaagtgacctcttccatcccagtatttgacctccaggatggtggacggaaaatatgtccacgatgtaatgctcaatttcgtgttactgaagctttgagaggtcacatgtgttactgttgcccagaaatggttgaataccagaagaaaggaaagtccctggattcagaacccagtgtcccatcagcagcaaagcccccatcccctgagaaaacagctcctgttgcttccacaccctcttctacacctattcctgctctgtcaccgcctaccaaagtaccagaaccaaatgagaacgtgggcgatgccgtccagaccaaactcattatgcttgtagatgacttctactatggacgggatggtggcaaagtagcccagctcacaaatttccctaaggtcgccacatctttccgatgcccacattgtaccaaaaggctaaaaaacaatattcgattcatgaaccatatgaaacaccacgtagaactcgatcagcagaacggtgaggtagatggtcacactatctgccagcactgttaccgccagttttccactcccttccagcttcagtgccacttggaaaatgttcatagtccctatgaatctactaccaagtgcaagatctgtgaatgggcgtttgaaagtgagccactatttctccagcatatgaaggatactcataagcctggagagatgccttatgtttgccaggtgtgtcaatatcgctcctcactctactctgaggtagatgtccattttcggatgatccatgaggatacccggcatctgctctgcccttattgcctgaaggtcttcaaaaatggcaatgcattccaacagcattacatgaggcaccagaagagaaatgtttatcactgcaacaaatgccggctgcagtttctctttgccaaggacaaaattgaacacaagcttcaacaccataaaaccttccgtaaacccaagcagctggagggcttgaaaccaggcaccaaggtgacaatccgggcttcccgagggcagccacgaactgttcctgtatcctctaatgatacacctcccagcgccttgcaggaggcagcaccgctgacctcctcaatggaccctctgcctgtcttcctttatccccctgtccagcgcagcatccagaagagagctgttaggaaaatgagtgtcatgggccggcagacatgcctggagtgcagcttcgagatcccagacttccctaatcatttccctacttacgtacactgctctctgtgtcgctatagcacctgctgttctcgagcttatgccaaccacatgatcaacaatcatgttccacggaagagccccaagtatttggctttgtttaaaaattctgtgagtggaatcaagctggcctgcacttcatgtacctttgttacctctgtgggcgatgctatggccaagcatttggtattcaacccctctcacagatccagcagcatcctgccacggggactcacttggatagctcactcaaggcatggccagactcgtgaccgagtgcatgaccggaacgtgaagaatatgtaccctcctccttccttccccactaacaaagctgccactgtgaaatctgcgggggccaccccagctgagcctgaagagctactaactcccttagccccagcactcccatcaccagcctcaactgcaaccccaccaccaacccccactcacccgcaggctttagcccttccaccgctggctacagagggagccgaatgtctgaatgttgatgatcaggatgaagggagcccagtcacccaagaacctgagctagcatcaggtggtggtggtagtggtggagttggcaaaaaggagcagctgtctgtgaagaagcttcgagtagtactgtttgctctatgctgcaatacagaacaggcagctgaacacttccgaaatccccagcgacgtattcgccgttggcttcgacgtttccaggcctcccagggggagaatctagagggcaaatatctgagctttgaggcagaagagaaactggctgagtgggtgctaacccagcgcgaacaacagctacctgtaaatgaggagaccttgttccagaaggccaccaaaataggacgttctttggaaggggggtttaagatctcctatgagtgggctgtgcgtttcatgctgcggcaccacctgactccccatgcccggcgagctgtggcccacaccctacctaaggatgtagcagagaatgcaggactcttcattgattttgtacaacggcagattcacaaccaggacttacccttgtctatgattgtggctattgatgagatctctttgttcctggatacagaggtgctgagcagtgatgatcgaaaggagaatgccctgcagacagtgggcacaggggaaccttggtgtgatgtagtcctagccattctggcagatggcactgtccttcccaccctggttttctacagagggcagatggatcagcctgctaacatgccagactccatattgctagaggcaaaggagagtggctacagtgatgacgagatcatggagctgtggtcaactcgagtgtggcagaagcacacagcttgccagcgcagcaaaggcatgcttgtgatggactgtcatcgcactcacttgtcagaagaggtactggctatgcttagtgcctctagcactttgcctgcagtggtcccagcaggctgtagctccaaaattcagccattagatgtatgcatcaaaagaactgtcaagaacttcctgcataaaaaatggaaggaacaggctcgggaaatggcagatactgcatgtgattctgatgtcctgcttcagctggtgcttgtctggctgggtgaagtgctaggtgtcattggggactgtccagagctagttcagcgctccttcctggtggctagtgttctgcctggccccgatggcaacattaactcacctacaagaaatgctgacatgcaggaggagctaattgcctccctagaggagcaactgaagctgagtggggaacattctgagtcttccactccacgacccagatcatctcctgaagagacaattgagcctgaaagtcttcaccagctctttgagggtgaaagtgagaccgagtctttctatggctttgaagaagctgacctagatctgatggagatttgagtgttggggtcatgagggggtgtggagtgggggtgggaacatgtgagggagggtaaaggggcttagggaaaagggggcataccaggtggggtatttggtttctattttttaattttataccaccactcccccctgaagttgacttacacttccctgtggatttgtggattaattaggaaaaccaatagtaatcacgtctgagccaaggagctggcccattggtcattcacttctgctaaaaacaggtttttgtgactttttttttttttaaatttaaatcactgtgtttggtatttttctgacaaaattaagaaaaagaaaaaaaattatttgtgggcaaatgttaaatttttttgtttccccttttacctcaattgtatcatagtactgggtttttttgtttgttttattgtgtggccaatgtctttgggcatgatgctatctaatcattgttaatgtgagaacatttctgaagatgggaaagacaaattatgtagctcacaaactggtttattatatatatggataaaaaacttttttcattgtggtcttaacacttttatataaaaatgaaaatggaaaaaaagtcccactgaactctctcttccttctccttttctttccttccctctccagagatgttggtttctacagcaaccctagatataaaattgtggctttaaaaatgcatgaaaccacctttaattatccagaatgaatagatttgtcttttcctcaccaccttccctccaaaacatgacataaacaatattttttgcacttgtgatccttggcccctttccccattctcaacaccatccatccctctggacaaaggatcatacaggtgttattagcaagcaagagatactgaagcgatcaaacagttttagggtggaagccattcccagtttgagtcttcatcctgtaagcccccaggggcagtccctgctttactgaacttcatcctgttagatggagagcatgcctgtttaagggattactggtcctacagccaggagctaattgttcaagaagtgttgaactttaaaaagacaagaccacttgttgaaatccagcgtgctctgtggctttcccctatttctcttaatacttagggaagaatctgacaggaagaagcgcacaggggtgtgcacaaagaaaatgacatgaatctttatttttcactgccagcttcaaggaaagaaaattttttctacaatttgcatgagggatttttttaattgtatgtactcatggttgtaaaccaaaacgtactgtaccgtacagagaaaaggagcaaaaaaccaagtcttctgtttatcctgaggctttccacaatgttcccctcctgtgagccaaggaggcaaactgcacaagcttgtaaatggttcgtctttaaaatgtacataagtggaacatttaataaaatgaggggaaatggatttataaacttgttttttttctaggtgaccctgtttaataggctttcacagactggggaatgctcaagatgtgatgggcctggtggtacaggtgtgacatttgttaccacccatttctcccaccccaccctgcttttttgtttgtttgttttttcatcccccagcacactataatatagtgaactggaaaagtcccttccagaaacagcttggccagctttgtgaacctttgacatctgaaaacaaccaaggatccatctgggcttctcttccccagctttttgcctgatgccattttattgacagacaatggactttgaagtcagcctttgcctttgagaaagttcaagaactatggttggtcacgtctatctacaacctaatcctactctttggtagtctctgcagcagccacagccttagcagagctggggttcctgtcttctgcacacgattgactttcttgatgggtaattttttttaagattataccaacagtggatcagctgggttttggccaggaagttgtctttgtggactctgcctgcatggcttagtagtagaaggaaatttttttttggttttgttttttataattcagtttaatcaataaacatgtatttattgactgtttcctgtgttgagactg

SEQ ID NO: 324720 - DNA, 6578 bp, Homo sapiens
  misc_feature (301)..(301): n is a, c, g, or t
cggcgtctctctcccccgcgccagctcccgtacacggagccgcattccttggcccccccacccccctccctcggggcccccccgcccccctcgggaaaaaaatccaccccgaatcactcgaacccgagggaggcttcctttcacccttggggagacgagctttcaacggttacctcttcttcgtctccccccaagcccccgtcccctccccctgctcccacccccttctggcgccgggtgtaaggtccctttaaggcgacggcgccttcctcgggtcagactaccggcggcgacgaccacnggagcatggcggacaccgacctgttcatggaatgtgaggaggaggagttggagccatggcagaaaatcagtgatgtcattgaggactctgtagttgaagattataattcagtggataaaactaccacagtttctgtgagccagcagccagtctcggctccagtgcccatcgctgcccatgcttctgttgctgggcacctctctacatccaccaccgttagtagcagcggggcacagaacagcgacagtacaaagaagactcttgtcacactaattgccaacaacaatgctggcaatcctttggtccagcaaggtggacagccactcatcctgacccagaatccagccccaggtctgggcacaatggttactcaaccagtattgaggcctgttcaggtcatgcagaatgccaatcatgtgactagttcccctgtggcctcacaaccaatatttatcactacgcagggatttcctgtaaggaatgtccggcctgtacaaaatgcaatgaatcaggttgggattgtgctgaacgtacagcaaggccaaacggttagaccaattacactagttccagccccaggtacccagtttgttaagccgacagttggagttccacaagtgttctcccagatgacccctgtgaggccaggctccacaatgcctgtgaggcccaccaccaacaccttcaccaccgtcatcccggccactcttaccattcgaagcaccgtcccacagtcccagtcccagcagaccaagtccactcccagcacttctaccactcccactgccacacagccaacctcactggggcaactagctgttcagtctccaggccagtcaaaccagaccacgaatcccaagctagctccctccttcccctctccacctgcagtgagcattgccagctttgtcactgtgaagcgacctggtgttacaggcgaaaatagcaatgaagtggccaaattggtgaatacccttaacaccatcccttccctgggccagagtcctgggccagtggtggtgtccaacaacagctctgctcatggctctcaaagaaccagcggacctgagtcttcaatgaaagtgacctcttccatcccagtatttgacctccaggatggtggacggaaaatatgtccacgatgtaatgctcaatttcgtgttactgaagctttgagaggtcacatgtgttactgttgcccagaaatggttgaataccagaagaaaggaaagtccctggattcagaacccagtgtcccatcagcagcaaagcccccatcccctgagaaaacagctcctgttgcttccacaccctcttctacacctattcctgctctgtcaccgcctaccaaagtaccagaaccaaatgagaacgtgggcgatgccgtccagaccaaactcattatgcttgtagatgacttctactatggacgggatggtggcaaagtagcccagctcacaaatttccctaaggtcgccacatctttccgatgcccacattgtaccaaaaggctaaaaaacaatattcgattcatgaaccatatgaaacaccacgtagaactcgatcagcagaacggtgaggtagatggtcacactatctgccagcactgttaccgccagttttccactcccttccagcttcagtgccacttggaaaatgttcatagtccctatgaatctactaccaagtgcaagatctgtgaatgggcgtttgaaagtgagccactatttctccagcatatgaaggatactcataagcctggagagatgccttatgtttgccaggtgtgtcaatatcgctcctcactctactctgaggtagatgtccattttcggatgatccatgaggatacccggcatctgctctgcccttattgcctgaaggtcttcaaaaatggcaatgcattccaacagcattacatgaggcaccagaagagaaatgtttatcactgcaacaaatgccggctgcagtttctctttgccaaggacaaaattgaacacaagcttcaacaccataaaaccttccgtaaacccaagcagctggagggcttgaaaccaggcaccaaggtgacaatccgggcttcccgagggcagccacgaactgttcctgtatcctctaatgatacacctcccagcgccttgcaggaggcagcaccgctgacctcctcaatggaccctctgcctgtcttcctttatccccctgtccagcgcagcatccagaagagagctgttaggaaaatgagtgtcatgggccggcagacatgcctggagtgcagcttcgagatcccagacttccctaatcatttccctacttacgtacactgctctctgtgtcgctatagcacctgctgttctcgagcttatgccaaccacatgatcaacaatcatgttccacggaagagccccaagtatttggctttgtttaaaaattctgtgagtggaatcaagctggcctgcacttcatgtacctttgttacctctgtgggcgatgctatggccaagcatttggtattcaacccctctcacagatccagcagcatcctgccacggggactcacttggatagctcactcaaggcatggccagactcgtgaccgagtgcatgaccggaacgtgaagaatatgtaccctcctccttccttccccactaacaaagctgccactgtgaaatctgcgggggccaccccagctgagcctgaagagctactaactcccttagccccagcactcccatcaccagcctcaactgcaaccccaccaccaacccccactcacccgcaggctttagcccttccaccgctggctacagagggagccgaatgtctgaatgttgatgatcaggatgaagggagcccagtcacccaagaacctgagctagcatcaggtggtggtggtagtggtggagttggcaaaaaggagcagctgtctgtgaagaagcttcgagtagtactgtttgctctatgctgcaatacagaacaggcagctgaacacttccgaaatccccagcgacgtattcgccgttggcttcgacgtttccaggcctcccagggggagaatctagagggcaaatatctgagctttgaggcagaagagaaactggctgagtgggtgctaacccagcgcgaacaacagctacctgtaaatgaggagaccttgttccagaaggccaccaaaataggacgttctttggaaggggggtttaagatctcctatgagtgggctgtgcgtttcatgctgcggcaccacctgactccccatgcccggcgagctgtggcccacaccctacctaaggatgtagcagagaatgcaggactcttcattgattttgtacaacggcagattcacaaccaggacttacccttgtctatgattgtggctattgatgagatctctttgttcctggatacagaggtgctgagcagtgatgatcgaaaggagaatgccctgcagacagtgggcacaggggaaccttggtgtgatgtagtcctagccattctggcagatggcactgtccttcccaccctggttttctacagagggcagatggatcagcctgctaacatgccagactccatattgctagaggcaaaggagagtggctacagtgatgacgagatcatggagctgtggtcaactcgagtgtggcagaagcacacagcttgccagcgcagcaaaggcatgcttgtgatggactgtcatcgcactcacttgtcagaagaggtactggctatgcttagtgcctctagcactttgcctgcagtggtcccagcaggctgtagctccaaaattcagccattagatgtatgcatcaaaagaactgtcaagaacttcctgcataaaaaatggaaggaacaggctcgggaaatggcagatactgcatgtgattctgatgtcctgcttcagctggtgcttgtctggctgggtgaagtgctaggtgtcattggggactgtccagagctagttcagcgctccttcctggtggctagtgttctgcctggccccgatggcaacattaactcacctacaagaaatgctgacatgcaggaggagctaattgcctccctagaggagcaactgaagctgagtggggaacattctgagtcttccactccacgacccagatcatctcctgaagagacaattgagcctgaaagtcttcaccagctctttgagggtgaaagtgagaccgagtctttctatggctttgaagaagctgacctagatctgatggagatttgagtgttggggtcatgagggggtgtggagtgggggtgggaacatgtgagggagggtaaaggggcttagggaaaagggggcataccaggtggggtatttggtttctattttttaattttataccaccactcccccctgaagttgacttacacttccctgtggatttgtggattaattaggaaaaccaatagtaatcacgtctgagccaaggagctggcccattggtcattcacttctgctaaaaacaggtttttgtgactttttttttttttaaatttaaatcactgtgtttggtatttttctgacaaaattaagaaaaagaaaaaaaattatttgtgggcaaatgttaaatttttttgtttccccttttacctcaattgtatcatagtactgggtttttttgtttgttttattgtgtggccaatgtctttgggcatgatgctatctaatcattgttaatgtgagaacatttctgaagatgggaaagacaaattatgtagctcacaaactggtttattatatatatggataaaaaacttttttcattgtggtcttaacacttttatataaaaatgaaaatggaaaaaaagtcccactgaactctctcttccttctccttttctttccttccctctccagagatgttggtttctacagcaaccctagatataaaattgtggctttaaaaatgcatgaaaccacctttaattatccagaatgaatagatttgtcttttcctcaccaccttccctccaaaacatgacataaacaatattttttgcacttgtgatccttggcccctttccccattctcaacaccatccatccctctggacaaaggatcatacaggtgttattagcaagcaagagatactgaagcgatcaaacagttttagggtggaagccattcccagtttgagtcttcatcctgtaagcccccaggggcagtccctgctttactgaacttcatcctgttagatggagagcatgcctgtttaagggattactggtcctacagccaggagctaattgttcaagaagtgttgaactttaaaaagacaagaccacttgttgaaatccagcgtgctctgtggctttcccctatttctcttaatacttagggaagaatctgacaggaagaagcgcacaggggtgtgcacaaagaaaatgacatgaatctttatttttcactgccagcttcaaggaaagaaaattttttctacaatttgcatgagggatttttttaattgtatgtactcatggttgtaaaccaaaacgtactgtaccgtacagagaaaaggagcaaaaaaccaagtcttctgtttatcctgaggctttccacaatgttcccctcctgtgagccaaggaggcaaactgcacaagcttgtaaatggttcgtctttaaaattttttctaggtgaccctgtttaataggctttcacagactggggaatgctcaagatgtgatgggcctggtggtacaggtgtgacatttgttaccacccatttctcccaccccaccctgcttttttgtttgtttgttttttcatcccccagcacactataatatagtgaactggaaaagtcccttccagaaacagcttggccagctttgtgaacctttgacatctgaaaacaaccaaggatccatctgggcttctcttccccagctttttgcctgatgccattttattgacagacaatggactttgaagtcagcctttgcctttgagaaagttcaagaactatggttggtcacgtctatctacaacctaatcctactctttggtagtctctgcagcagccacagccttagcagagctggggttcctgtcttctgcacacgattgactttcttgatgggtaattttttttaagattataccaacagtggatcagctgggttttggccaggaagttgtctttgtggactctgcctgcatggcttagtagtagaaggaaatttttttttggttttgttttttataattcagtttaatcaataaacatgtatttattgactgtttcctgtgttgagactg

SEQ ID NO: 324721 - DNA, 6526 bp, Homo sapiens
  misc_feature (301)..(301): n is a, c, g, or t
cggcgtctctctcccccgcgccagctcccgtacacggagccgcattccttggcccccccacccccctccctcggggcccccccgcccccctcgggaaaaaaatccaccccgaatcactcgaacccgagggaggcttcctttcacccttggggagacgagctttcaacggttacctcttcttcgtctccccccaagcccccgtcccctccccctgctcccacccccttctggcgccgggtgtaaggtccctttaaggcgacggcgccttcctcgggtcagactaccggcggcgacgaccacnggagcatggcggacaccgacctgttcatggaatgtgaggaggaggagttggagccatggcagaaaatcagtgatgtcattgaggactctgtagttgaagattataattcagtggataaaactaccacagtttctgtgagccagcagccagtctcggctccagtgcccatcgctgcccatgcttctgttgctgggcacctctctacatccaccaccgttagtagcagcggggcacagaacagcgacagtacaaagaagactcttgtcacactaattgccaacaacaatgctggcaatcctttggtccagcaaggtggacagccactcatcctgacccagaatccagccccaggtctgggcacaatggttactcaaccagtattgaggcctgttcaggtcatgcagaatgccaatcatgtgactagttcccctgtggcctcacaaccaatatttatcactacgcagggatttcctgtaaggaatgtccggcctgtacaaaatgcaatgaatcaggttgggattgtgctgaacgtacagcaaggccaaacggttagaccaattacactagttccagccccaggtacccagtttgttaagccgacagttggagttccacaagtgttctcccagatgacccctgtgaggccaggctccacaatgcctgtgaggcccaccaccaacaccttcaccaccgtcatcccggccactcttaccattcgaagcaccgtcccacagtcccagtcccagcagaccaagtccactcccagcacttctaccactcccactgccacacagccaacctcactggggcaactagctgttcagtctccaggccagtcaaaccagaccacgaatcccaagctagctccctccttcccctctccacctgcagtgagcattgccagctttgtcactgtgaagcgacctggtgttacaggcgaaaatagcaatgaagtggccaaattggtgaatacccttaacaccatcccttccctgggccagagtcctgggccagtggtggtgtccaacaacagctctgctcatggctctcaaagaaccagcggacctgagtcttcaatgaaagtactgttgcccagaaatggttgaataccagaagaaaggaaagtccctggattcagaacccagtgtcccatcagcagcaaagcccccatcccctgagaaaacagctcctgttgcttccacaccctcttctacacctattcctgctctgtcaccgcctaccaaagtaccagaaccaaatgagaacgtgggcgatgccgtccagaccaaactcattatgcttgtagatgacttctactatggacgggatggtggcaaagtagcccagctcacaaatttccctaaggtcgccacatctttccgatgcccacattgtaccaaaaggctaaaaaacaatattcgattcatgaaccatatgaaacaccacgtagaactcgatcagcagaacggtgaggtagatggtcacactatctgccagcactgttaccgccagttttccactcccttccagcttcagtgccacttggaaaatgttcatagtccctatgaatctactaccaagtgcaagatctgtgaatgggcgtttgaaagtgagccactatttctccagcatatgaaggatactcataagcctggagagatgccttatgtttgccaggtgtgtcaatatcgctcctcactctactctgaggtagatgtccattttcggatgatccatgaggatacccggcatctgctctgcccttattgcctgaaggtcttcaaaaatggcaatgcattccaacagcattacatgaggcaccagaagagaaatgtttatcactgcaacaaatgccggctgcagtttctctttgccaaggacaaaattgaacacaagcttcaacaccataaaaccttccgtaaacccaagcagctggagggcttgaaaccaggcaccaaggtgacaatccgggcttcccgagggcagccacgaactgttcctgtatcctctaatgatacacctcccagcgccttgcaggaggcagcaccgctgacctcctcaatggaccctctgcctgtcttcctttatccccctgtccagcgcagcatccagaagagagctgttaggaaaatgagtgtcatgggccggcagacatgcctggagtgcagcttcgagatcccagacttccctaatcatttccctacttacgtacactgctctctgtgtcgctatagcacctgctgttctcgagcttatgccaaccacatgatcaacaatcatgttccacggaagagccccaagtatttggctttgtttaaaaattctgtgagtggaatcaagctggcctgcacttcatgtacctttgttacctctgtgggcgatgctatggccaagcatttggtattcaacccctctcacagatccagcagcatcctgccacggggactcacttggatagctcactcaaggcatggccagactcgtgaccgagtgcatgaccggaacgtgaagaatatgtaccctcctccttccttccccactaacaaagctgccactgtgaaatctgcgggggccaccccagctgagcctgaagagctactaactcccttagccccagcactcccatcaccagcctcaactgcaaccccaccaccaacccccactcacccgcaggctttagcccttccaccgctggctacagagggagccgaatgtctgaatgttgatgatcaggatgaagggagcccagtcacccaagaacctgagctagcatcaggtggtggtggtagtggtggagttggcaaaaaggagcagctgtctgtgaagaagcttcgagtagtactgtttgctctatgctgcaatacagaacaggcagctgaacacttccgaaatccccagcgacgtattcgccgttggcttcgacgtttccaggcctcccagggggagaatctagagggcaaatatctgagctttgaggcagaagagaaactggctgagtgggtgctaacccagcgcgaacaacagctacctgtaaatgaggagaccttgttccagaaggccaccaaaataggacgttctttggaaggggggtttaagatctcctatgagtgggctgtgcgtttcatgctgcggcaccacctgactccccatgcccggcgagctgtggcccacaccctacctaaggatgtagcagagaatgcaggactcttcattgattttgtacaacggcagattcacaaccaggacttacccttgtctatgattgtggctattgatgagatctctttgttcctggatacagaggtgctgagcagtgatgatcgaaaggagaatgccctgcagacagtgggcacaggggaaccttggtgtgatgtagtcctagccattctggcagatggcactgtccttcccaccctggttttctacagagggcagatggatcagcctgctaacatgccagactccatattgctagaggcaaaggagagtggctacagtgatgacgagatcatggagctgtggtcaactcgagtgtggcagaagcacacagcttgccagcgcagcaaaggcatgcttgtgatggactgtcatcgcactcacttgtcagaagaggtactggctatgcttagtgcctctagcactttgcctgcagtggtcccagcaggctgtagctccaaaattcagccattagatgtatgcatcaaaagaactgtcaagaacttcctgcataaaaaatggaaggaacaggctcgggaaatggcagatactgcatgtgattctgatgtcctgcttcagctggtgcttgtctggctgggtgaagtgctaggtgtcattggggactgtccagagctagttcagcgctccttcctggtggctagtgttctgcctggccccgatggcaacattaactcacctacaagaaatgctgacatgcaggaggagctaattgcctccctagaggagcaactgaagctgagtggggaacattctgagtcttccactccacgacccagatcatctcctgaagagacaattgagcctgaaagtcttcaccagctctttgagggtgaaagtgagaccgagtctttctatggctttgaagaagctgacctagatctgatggagatttgagtgttggggtcatgagggggtgtggagtgggggtgggaacatgtgagggagggtaaaggggcttagggaaaagggggcataccaggtggggtatttggtttctattttttaattttataccaccactcccccctgaagttgacttacacttccctgtggatttgtggattaattaggaaaaccaatagtaatcacgtctgagccaaggagctggcccattggtcattcacttctgctaaaaacaggtttttgtgactttttttttttttaaatttaaatcactgtgtttggtatttttctgacaaaattaagaaaaagaaaaaaaattatttgtgggcaaatgttaaatttttttgtttccccttttacctcaattgtatcatagtactgggtttttttgtttgttttattgtgtggccaatgtctttgggcatgatgctatctaatcattgttaatgtgagaacatttctgaagatgggaaagacaaattatgtagctcacaaactggtttattatatatatggataaaaaacttttttcattgtggtcttaacacttttatataaaaatgaaaatggaaaaaaagtcccactgaactctctcttccttctccttttctttccttccctctccagagatgttggtttctacagcaaccctagatataaaattgtggctttaaaaatgcatgaaaccacctttaattatccagaatgaatagatttgtcttttcctcaccaccttccctccaaaacatgacataaacaatattttttgcacttgtgatccttggcccctttccccattctcaacaccatccatccctctggacaaaggatcatacaggtgttattagcaagcaagagatactgaagcgatcaaacagttttagggtggaagccattcccagtttgagtcttcatcctgtaagcccccaggggcagtccctgctttactgaacttcatcctgttagatggagagcatgcctgtttaagggattactggtcctacagccaggagctaattgttcaagaagtgttgaactttaaaaagacaagaccacttgttgaaatccagcgtgctctgtggctttcccctatttctcttaatacttagggaagaatctgacaggaagaagcgcacaggggtgtgcacaaagaaaatgacatgaatctttatttttcactgccagcttcaaggaaagaaaattttttctacaatttgcatgagggatttttttaattgtatgtactcatggttgtaaaccaaaacgtactgtaccgtacagagaaaaggagcaaaaaaccaagtcttctgtttatcctgaggctttccacaatgttcccctcctgtgagccaaggaggcaaactgcacaagcttgtaaatggttcgtctttaaaatgtacataagtggaacatttaataaaatgaggggaaatggatttataaacttgttttttttctaggtgaccctgtttaataggctttcacagactggggaatgctcaagatgtgatgggcctggtggtacaggtgtgacatttgttaccacccatttctcccaccccaccctgcttttttgtttgtttgttttttcatcccccagcacactataatatagtgaactggaaaagtcccttccagaaacagcttggccagctttgtgaacctttgacatctgaaaacaaccaaggatccatctgggcttctcttccccagctttttgcctgatgccattttattgacagacaatggactttgaagtcagcctttgcctttgagaaagttcaagaactatggttggtcacgtctatctacaacctaatcctactctttggtagtctctgcagcagccacagccttagcagagctggggttcctgtcttctgcacacgattgactttcttgatgggtaattttttttaagattataccaacagtggatcagctgggttttggccaggaagttgtctttgtggactctgcctgcatggcttagtagtagaaggaaatttttttttggttttgttttttataattcagtttaatcaataaacatgtatttattgactgtttcctgtgttgagactg

SEQ ID NO: 324722 - DNA, 5896 bp, Homo sapiens
ttaaagatcattttgctttttaatacagggatttcctgtaaggaatgtccggcctgtacaaaatgcaatgaatcaggttgggattgtgctgaacgtacagcaaggccaaacggttagaccaattacactagttccagccccaggtacccagtttgttaagccgacagttggagttccacaagtgttctcccagatgacccctgtgaggccaggctccacaatgcctgtgaggcccaccaccaacaccttcaccaccgtcatcccggccactcttaccattcgaagcaccgtcccacagtcccagtcccagcagaccaagtccactcccagcacttctaccactcccactgccacacagccaacctcactggggcaactagctgttcagtctccaggccagtcaaaccagaccacgaatcccaagctagctccctccttcccctctccacctgcagtgagcattgccagctttgtcactgtgaagcgacctggtgttacaggcgaaaatagcaatgaagtggccaaattggtgaatacccttaacaccatcccttccctgggccagagtcctgggccagtggtggtgtccaacaacagctctgctcatggctctcaaagaaccagcggacctgagtcttcaatgaaagtgacctcttccatcccagtatttgacctccaggatggtggacggaaaatatgtccacgatgtaatgctcaatttcgtgttactgaagctttgagaggtcacatgtgttactgttgcccagaaatggttgaataccagaagaaaggaaagtccctggattcagaacccagtgtcccatcagcagcaaagcccccatcccctgagaaaacagctcctgttgcttccacaccctcttctacacctattcctgctctgtcaccgcctaccaaagtaccagaaccaaatgagaacgtgggcgatgccgtccagaccaaactcattatgcttgtagatgacttctactatggacgggatggtggcaaagtagcccagctcacaaatttccctaaggtcgccacatctttccgatgcccacattgtaccaaaaggctaaaaaacaatattcgattcatgaaccatatgaaacaccacgtagaactcgatcagcagaacggtgaggtagatggtcacactatctgccagcactgttaccgccagttttccactcccttccagcttcagtgccacttggaaaatgttcatagtccctatgaatctactaccaagtgcaagatctgtgaatgggcgtttgaaagtgagccactatttctccagcatatgaaggatactcataagcctggagagatgccttatgtttgccaggtgtgtcaatatcgctcctcactctactctgaggtagatgtccattttcggatgatccatgaggatacccggcatctgctctgcccttattgcctgaaggtcttcaaaaatggcaatgcattccaacagcattacatgaggcaccagaagagaaatgtttatcactgcaacaaatgccggctgcagtttctctttgccaaggacaaaattgaacacaagcttcaacaccataaaaccttccgtaaacccaagcagctggagggcttgaaaccaggcaccaaggtgacaatccgggcttcccgagggcagccacgaactgttcctgtatcctctaatgatacacctcccagcgccttgcaggaggcagcaccgctgacctcctcaatggaccctctgcctgtcttcctttatccccctgtccagcgcagcatccagaagagagctgttaggaaaatgagtgtcatgggccggcagacatgcctggagtgcagcttcgagatcccagacttccctaatcatttccctacttacgtacactgctctctgtgtcgctatagcacctgctgttctcgagcttatgccaaccacatgatcaacaatcatgttccacggaagagccccaagtatttggctttgtttaaaaattctgtgagtggaatcaagctggcctgcacttcatgtacctttgttacctctgtgggcgatgctatggccaagcatttggtattcaacccctctcacagatccagcagcatcctgccacggggactcacttggatagctcactcaaggcatggccagactcgtgaccgagtgcatgaccggaacgtgaagaatatgtaccctcctccttccttccccactaacaaagctgccactgtgaaatctgcgggggccaccccagctgagcctgaagagctactaactcccttagccccagcactcccatcaccagcctcaactgcaaccccaccaccaacccccactcacccgcaggctttagcccttccaccgctggctacagagggagccgaatgtctgaatgttgatgatcaggatgaagggagcccagtcacccaagaacctgagctagcatcaggtggtggtggtagtggtggagttggcaaaaaggagcagctgtctgtgaagaagcttcgagtagtactgtttgctctatgctgcaatacagaacaggcagctgaacacttccgaaatccccagcgacgtattcgccgttggcttcgacgtttccaggcctcccagggggagaatctagagggcaaatatctgagctttgaggcagaagagaaactggctgagtgggtgctaacccagcgcgaacaacagctacctgtaaatgaggagaccttgttccagaaggccaccaaaataggacgttctttggaaggggggtttaagatctcctatgagtgggctgtgcgtttcatgctgcggcaccacctgactccccatgcccggcgagctgtggcccacaccctacctaaggatgtagcagagaatgcaggactcttcattgattttgtacaacggcagattcacaaccaggacttacccttgtctatgattgtggctattgatgagatctctttgttcctggatacagaggtgctgagcagtgatgatcgaaaggagaatgccctgcagacagtgggcacaggggaaccttggtgtgatgtagtcctagccattctggcagatggcactgtccttcccaccctggttttctacagagggcagatggatcagcctgctaacatgccagactccatattgctagaggcaaaggagagtggctacagtgatgacgagatcatggagctgtggtcaactcgagtgtggcagaagcacacagcttgccagcgcagcaaaggcatgcttgtgatggactgtcatcgcactcacttgtcagaagaggtactggctatgcttagtgcctctagcactttgcctgcagtggtcccagcaggctgtagctccaaaattcagccattagatgtatgcatcaaaagaactgtcaagaacttcctgcataaaaaatggaaggaacaggctcgggaaatggcagatactgcatgtgattctgatgtcctgcttcagctggtgcttgtctggctgggtgaagtgctaggtgtcattggggactgtccagagctagttcagcgctccttcctggtggctagtgttctgcctggccccgatggcaacattaactcacctacaagaaatgctgacatgcaggaggagctaattgcctccctagaggagcaactgaagctgagtggggaacattctgagtcttccactccacgacccagatcatctcctgaagagacaattgagcctgaaagtcttcaccagctctttgagggtgaaagtgagaccgagtctttctatggctttgaagaagctgacctagatctgatggagatttgagtgttggggtcatgagggggtgtggagtgggggtgggaacatgtgagggagggtaaaggggcttagggaaaagggggcataccaggtggggtatttggtttctattttttaattttataccaccactcccccctgaagttgacttacacttccctgtggatttgtggattaattaggaaaaccaatagtaatcacgtctgagccaaggagctggcccattggtcattcacttctgctaaaaacaggtttttgtgactttttttttttttaaatttaaatcactgtgtttggtatttttctgacaaaattaagaaaaagaaaaaaaattatttgtgggcaaatgttaaatttttttgtttccccttttacctcaattgtatcatagtactgggtttttttgtttgttttattgtgtggccaatgtctttgggcatgatgctatctaatcattgttaatgtgagaacatttctgaagatgggaaagacaaattatgtagctcacaaactggtttattatatatatggataaaaaacttttttcattgtggtcttaacacttttatataaaaatgaaaatggaaaaaaagtcccactgaactctctcttccttctccttttctttccttccctctccagagatgttggtttctacagcaaccctagatataaaattgtggctttaaaaatgcatgaaaccacctttaattatccagaatgaatagatttgtcttttcctcaccaccttccctccaaaacatgacataaacaatattttttgcacttgtgatccttggcccctttccccattctcaacaccatccatccctctggacaaaggatcatacaggtgttattagcaagcaagagatactgaagcgatcaaacagttttagggtggaagccattcccagtttgagtcttcatcctgtaagcccccaggggcagtccctgctttactgaacttcatcctgttagatggagagcatgcctgtttaagggattactggtcctacagccaggagctaattgttcaagaagtgttgaactttaaaaagacaagaccacttgttgaaatccagcgtgctctgtggctttcccctatttctcttaatacttagggaagaatctgacaggaagaagcgcacaggggtgtgcacaaagaaaatgacatgaatctttatttttcactgccagcttcaaggaaagaaaattttttctacaatttgcatgagggatttttttaattgtatgtactcatggttgtaaaccaaaacgtactgtaccgtacagagaaaaggagcaaaaaaccaagtcttctgtttatcctgaggctttccacaatgttcccctcctgtgagccaaggaggcaaactgcacaagcttgtaaatggttcgtctttaaaatgtacataagtggaacatttaataaaatgaggggaaatggatttataaacttgttttttttctaggtgaccctgtttaataggctttcacagactggggaatgctcaagatgtgatgggcctggtggtacaggtgtgacatttgttaccacccatttctcccaccccaccctgcttttttgtttgtttgttttttcatcccccagcacactataatatagtgaactggaaaagtcccttccagaaacagcttggccagctttgtgaacctttgacatctgaaaacaaccaaggatccatctgggcttctcttccccagctttttgcctgatgccattttattgacagacaatggactttgaagtcagcctttgcctttgagaaagttcaagaactatggttggtcacgtctatctacaacctaatcctactctttggtagtctctgcagcagccacagccttagcagagctggggttcctgtcttctgcacacgattgactttcttgatgggtaattttttttaagattataccaacagtggatcagctgggttttggccaggaagttgtctttgtggactctgcctgcatggcttagtagtagaaggaaatttttttttggttttgttttttataattcagtttaatcaataaacatgtatttattgactgtttcctgtgttgagactg

SEQ ID NO: 324723 - DNA, 5731 bp, Homo sapiens
gctctaaaatgactgaagctttttaaagggttactgtttctcttggtctgtttttagaagagctgtgtactttggaatgtgatgggatacatttaaagaccctcaaatagatcagaacatatgtgatcttactttcttagtgtggtagattttgaaaccacacaggagaacaggtttatagataataaggactcaaaccatattggcctcagttcatttttgttaattgtgtcattggatgaatcgggagctcttacttccattttttagcttttcattttttggtattagtccagataaaaaggttggaacttcttctttgccagggagctcagagccaagttatactaatgattaagggacctaagacaggcaggagggagaaatacaaagtatagcgcttgggtggcatatgtggatatactctagaaaaggagtaaaacttggaaacgctaaaaaaaactgaagggtgaaagctgaatgagaatacctgaaaccaaaccgttaacaaggaatggtagtgaagttaaggagttagcacattctagcccccaggataaccagaatgatcagatgtctttctttatagtactgttgcccagaaatggttgaataccagaagaaaggaaagtccctggattcagaacccagtgtcccatcagcagcaaagcccccatcccctgagaaaacagctcctgttgcttccacaccctcttctacacctattcctgctctgtcaccgcctaccaaagtaccagaaccaaatgagaacgtgggcgatgccgtccagaccaaactcattatgcttgtagatgacttctactatggacgggatggtggcaaagtagcccagctcacaaatttccctaaggtcgccacatctttccgatgcccacattgtaccaaaaggctaaaaaacaatattcgattcatgaaccatatgaaacaccacgtagaactcgatcagcagaacggtgaggtagatggtcacactatctgccagcactgttaccgccagttttccactcccttccagcttcagtgccacttggaaaatgttcatagtccctatgaatctactaccaagtgcaagatctgtgaatgggcgtttgaaagtgagccactatttctccagcatatgaaggatactcataagcctggagagatgccttatgtttgccaggtgtgtcaatatcgctcctcactctactctgaggtagatgtccattttcggatgatccatgaggatacccggcatctgctctgcccttattgcctgaaggtcttcaaaaatggcaatgcattccaacagcattacatgaggcaccagaagagaaatgtttatcactgcaacaaatgccggctgcagtttctctttgccaaggacaaaattgaacacaagcttcaacaccataaaaccttccgtaaacccaagcagctggagggcttgaaaccaggcaccaaggtgacaatccgggcttcccgagggcagccacgaactgttcctgtatcctctaatgatacacctcccagcgccttgcaggaggcagcaccgctgacctcctcaatggaccctctgcctgtcttcctttatccccctgtccagcgcagcatccagaagagagctgttaggaaaatgagtgtcatgggccggcagacatgcctggagtgcagcttcgagatcccagacttccctaatcatttccctacttacgtacactgctctctgtgtcgctatagcacctgctgttctcgagcttatgccaaccacatgatcaacaatcatgttccacggaagagccccaagtatttggctttgtttaaaaattctgtgagtggaatcaagctggcctgcacttcatgtacctttgttacctctgtgggcgatgctatggccaagcatttggtattcaacccctctcacagatccagcagcatcctgccacggggactcacttggatagctcactcaaggcatggccagactcgtgaccgagtgcatgaccggaacgtgaagaatatgtaccctcctccttccttccccactaacaaagctgccactgtgaaatctgcgggggccaccccagctgagcctgaagagctactaactcccttagccccagcactcccatcaccagcctcaactgcaaccccaccaccaacccccactcacccgcaggctttagcccttccaccgctggctacagagggagccgaatgtctgaatgttgatgatcaggatgaagggagcccagtcacccaagaacctgagctagcatcaggtggtggtggtagtggtggagttggcaaaaaggagcagctgtctgtgaagaagcttcgagtagtactgtttgctctatgctgcaatacagaacaggcagctgaacacttccgaaatccccagcgacgtattcgccgttggcttcgacgtttccaggcctcccagggggagaatctagagggcaaatatctgagctttgaggcagaagagaaactggctgagtgggtgctaacccagcgcgaacaacagctacctgtaaatgaggagaccttgttccagaaggccaccaaaataggacgttctttggaaggggggtttaagatctcctatgagtgggctgtgcgtttcatgctgcggcaccacctgactccccatgcccggcgagctgtggcccacaccctacctaaggatgtagcagagaatgcaggactcttcattgattttgtacaacggcagattcacaaccaggacttacccttgtctatgattgtggctattgatgagatctctttgttcctggatacagaggtgctgagcagtgatgatcgaaaggagaatgccctgcagacagtgggcacaggggaaccttggtgtgatgtagtcctagccattctggcagatggcactgtccttcccaccctggttttctacagagggcagatggatcagcctgctaacatgccagactccatattgctagaggcaaaggagagtggctacagtgatgacgagatcatggagctgtggtcaactcgagtgtggcagaagcacacagcttgccagcgcagcaaaggcatgcttgtgatggactgtcatcgcactcacttgtcagaagaggtactggctatgcttagtgcctctagcactttgcctgcagtggtcccagcaggctgtagctccaaaattcagccattagatgtatgcatcaaaagaactgtcaagaacttcctgcataaaaaatggaaggaacaggctcgggaaatggcagatactgcatgtgattctgatgtcctgcttcagctggtgcttgtctggctgggtgaagtgctaggtgtcattggggactgtccagagctagttcagcgctccttcctggtggctagtgttctgcctggccccgatggcaacattaactcacctacaagaaatgctgacatgcaggaggagctaattgcctccctagaggagcaactgaagctgagtggggaacattctgagtcttccactccacgacccagatcatctcctgaagagacaattgagcctgaaagtcttcaccagctctttgagggtgaaagtgagaccgagtctttctatggctttgaagaagctgacctagatctgatggagatttgagtgttggggtcatgagggggtgtggagtgggggtgggaacatgtgagggagggtaaaggggcttagggaaaagggggcataccaggtggggtatttggtttctattttttaattttataccaccactcccccctgaagttgacttacacttccctgtggatttgtggattaattaggaaaaccaatagtaatcacgtctgagccaaggagctggcccattggtcattcacttctgctaaaaacaggtttttgtgactttttttttttttaaatttaaatcactgtgtttggtatttttctgacaaaattaagaaaaagaaaaaaaattatttgtgggcaaatgttaaatttttttgtttccccttttacctcaattgtatcatagtactgggtttttttgtttgttttattgtgtggccaatgtctttgggcatgatgctatctaatcattgttaatgtgagaacatttctgaagatgggaaagacaaattatgtagctcacaaactggtttattatatatatggataaaaaacttttttcattgtggtcttaacacttttatataaaaatgaaaatggaaaaaaagtcccactgaactctctcttccttctccttttctttccttccctctccagagatgttggtttctacagcaaccctagatataaaattgtggctttaaaaatgcatgaaaccacctttaattatccagaatgaatagatttgtcttttcctcaccaccttccctccaaaacatgacataaacaatattttttgcacttgtgatccttggcccctttccccattctcaacaccatccatccctctggacaaaggatcatacaggtgttattagcaagcaagagatactgaagcgatcaaacagttttagggtggaagccattcccagtttgagtcttcatcctgtaagcccccaggggcagtccctgctttactgaacttcatcctgttagatggagagcatgcctgtttaagggattactggtcctacagccaggagctaattgttcaagaagtgttgaactttaaaaagacaagaccacttgttgaaatccagcgtgctctgtggctttcccctatttctcttaatacttagggaagaatctgacaggaagaagcgcacaggggtgtgcacaaagaaaatgacatgaatctttatttttcactgccagcttcaaggaaagaaaattttttctacaatttgcatgagggatttttttaattgtatgtactcatggttgtaaaccaaaacgtactgtaccgtacagagaaaaggagcaaaaaaccaagtcttctgtttatcctgaggctttccacaatgttcccctcctgtgagccaaggaggcaaactgcacaagcttgtaaatggttcgtctttaaaatgtacataagtggaacatttaataaaatgaggggaaatggatttataaacttgttttttttctaggtgaccctgtttaataggctttcacagactggggaatgctcaagatgtgatgggcctggtggtacaggtgtgacatttgttaccacccatttctcccaccccaccctgcttttttgtttgtttgttttttcatcccccagcacactataatatagtgaactggaaaagtcccttccagaaacagcttggccagctttgtgaacctttgacatctgaaaacaaccaaggatccatctgggcttctcttccccagctttttgcctgatgccattttattgacagacaatggactttgaagtcagcctttgcctttgagaaagttcaagaactatggttggtcacgtctatctacaacctaatcctactctttggtagtctctgcagcagccacagccttagcagagctggggttcctgtcttctgcacacgattgactttcttgatgggtaattttttttaagattataccaacagtggatcagctgggttttggccaggaagttgtctttgtggactctgcctgcatggcttagtagtagaaggaaatttttttttggttttgttttttataattcagtttaatcaataaacatgtatttattgactgtttcctgtgttgagactg

SEQ ID NO: 324724 - DNA, 5416 bp, Homo sapiens
gaccgtgtctcaaaaaaaacaaaaacaaacaaaaaccatagtgatctctcatgcttgcttacccttttatatacttctcagggagtgtttgactttttcccaaaaggtcagtaatctttttccagtgtcattgtattaatcttatcaattcttctcacttctttcagtgacctcttccatcccagtatttgacctccaggatggtggacggaaaatatgtccacgatgtaatgctcaatttcgtgttactgaagctttgagaggtcacatgtgttactgttgcccagaaatggttgaataccagaagaaaggaaagtccctggattcagaacccagtgtcccatcagcagcaaagcccccatcccctgagaaaacagctcctgttgcttccacaccctcttctacacctattcctgctctgtcaccgcctaccaaagtaccagaaccaaatgagaacgtgggcgatgccgtccagaccaaactcattatgcttgtagatgacttctactatggacgggatggtggcaaagtagcccagctcacaaatttccctaaggtcgccacatctttccgatgcccacattgtaccaaaaggctaaaaaacaatattcgattcatgaaccatatgaaacaccacgtagaactcgatcagcagaacggtgaggtagatggtcacactatctgccagcactgttaccgccagttttccactcccttccagcttcagtgccacttggaaaatgttcatagtccctatgaatctactaccaagtgcaagatctgtgaatgggcgtttgaaagtgagccactatttctccagcatatgaaggatactcataagcctggagagatgccttatgtttgccaggtgtgtcaatatcgctcctcactctactctgaggtagatgtccattttcggatgatccatgaggatacccggcatctgctctgcccttattgcctgaaggtcttcaaaaatggcaatgcattccaacagcattacatgaggcaccagaagagaaatgtttatcactgcaacaaatgccggctgcagtttctctttgccaaggacaaaattgaacacaagcttcaacaccataaaaccttccgtaaacccaagcagctggagggcttgaaaccaggcaccaaggtgacaatccgggcttcccgagggcagccacgaactgttcctgtatcctctaatgatacacctcccagcgccttgcaggaggcagcaccgctgacctcctcaatggaccctctgcctgtcttcctttatccccctgtccagcgcagcatccagaagagagctgttaggaaaatgagtgtcatgggccggcagacatgcctggagtgcagcttcgagatcccagacttccctaatcatttccctacttacgtacactgctctctgtgtcgctatagcacctgctgttctcgagcttatgccaaccacatgatcaacaatcatgttccacggaagagccccaagtatttggctttgtttaaaaattctgtgagtggaatcaagctggcctgcacttcatgtacctttgttacctctgtgggcgatgctatggccaagcatttggtattcaacccctctcacagatccagcagcatcctgccacggggactcacttggatagctcactcaaggcatggccagactcgtgaccgagtgcatgaccggaacgtgaagaatatgtaccctcctccttccttccccactaacaaagctgccactgtgaaatctgcgggggccaccccagctgagcctgaagagctactaactcccttagccccagcactcccatcaccagcctcaactgcaaccccaccaccaacccccactcacccgcaggctttagcccttccaccgctggctacagagggagccgaatgtctgaatgttgatgatcaggatgaagggagcccagtcacccaagaacctgagctagcatcaggtggtggtggtagtggtggagttggcaaaaaggagcagctgtctgtgaagaagcttcgagtagtactgtttgctctatgctgcaatacagaacaggcagctgaacacttccgaaatccccagcgacgtattcgccgttggcttcgacgtttccaggcctcccagggggagaatctagagggcaaatatctgagctttgaggcagaagagaaactggctgagtgggtgctaacccagcgcgaacaacagctacctgtaaatgaggagaccttgttccagaaggccaccaaaataggacgttctttggaaggggggtttaagatctcctatgagtgggctgtgcgtttcatgctgcggcaccacctgactccccatgcccggcgagctgtggcccacaccctacctaaggatgtagcagagaatgcaggactcttcattgattttgtacaacggcagattcacaaccaggacttacccttgtctatgattgtggctattgatgagatctctttgttcctggatacagaggtgctgagcagtgatgatcgaaaggagaatgccctgcagacagtgggcacaggggaaccttggtgtgatgtagtcctagccattctggcagatggcactgtccttcccaccctggttttctacagagggcagatggatcagcctgctaacatgccagactccatattgctagaggcaaaggagagtggctacagtgatgacgagatcatggagctgtggtcaactcgagtgtggcagaagcacacagcttgccagcgcagcaaaggcatgcttgtgatggactgtcatcgcactcacttgtcagaagaggtactggctatgcttagtgcctctagcactttgcctgcagtggtcccagcaggctgtagctccaaaattcagccattagatgtatgcatcaaaagaactgtcaagaacttcctgcataaaaaatggaaggaacaggctcgggaaatggcagatactgcatgtgattctgatgtcctgcttcagctggtgcttgtctggctgggtgaagtgctaggtgtcattggggactgtccagagctagttcagcgctccttcctggtggctagtgttctgcctggccccgatggcaacattaactcacctacaagaaatgctgacatgcaggaggagctaattgcctccctagaggagcaactgaagctgagtggggaacattctgagtcttccactccacgacccagatcatctcctgaagagacaattgagcctgaaagtcttcaccagctctttgagggtgaaagtgagaccgagtctttctatggctttgaagaagctgacctagatctgatggagatttgagtgttggggtcatgagggggtgtggagtgggggtgggaacatgtgagggagggtaaaggggcttagggaaaagggggcataccaggtggggtatttggtttctattttttaattttataccaccactcccccctgaagttgacttacacttccctgtggatttgtggattaattaggaaaaccaatagtaatcacgtctgagccaaggagctggcccattggtcattcacttctgctaaaaacaggtttttgtgactttttttttttttaaatttaaatcactgtgtttggtatttttctgacaaaattaagaaaaagaaaaaaaattatttgtgggcaaatgttaaatttttttgtttccccttttacctcaattgtatcatagtactgggtttttttgtttgttttattgtgtggccaatgtctttgggcatgatgctatctaatcattgttaatgtgagaacatttctgaagatgggaaagacaaattatgtagctcacaaactggtttattatatatatggataaaaaacttttttcattgtggtcttaacacttttatataaaaatgaaaatggaaaaaaagtcccactgaactctctcttccttctccttttctttccttccctctccagagatgttggtttctacagcaaccctagatataaaattgtggctttaaaaatgcatgaaaccacctttaattatccagaatgaatagatttgtcttttcctcaccaccttccctccaaaacatgacataaacaatattttttgcacttgtgatccttggcccctttccccattctcaacaccatccatccctctggacaaaggatcatacaggtgttattagcaagcaagagatactgaagcgatcaaacagttttagggtggaagccattcccagtttgagtcttcatcctgtaagcccccaggggcagtccctgctttactgaacttcatcctgttagatggagagcatgcctgtttaagggattactggtcctacagccaggagctaattgttcaagaagtgttgaactttaaaaagacaagaccacttgttgaaatccagcgtgctctgtggctttcccctatttctcttaatacttagggaagaatctgacaggaagaagcgcacaggggtgtgcacaaagaaaatgacatgaatctttatttttcactgccagcttcaaggaaagaaaattttttctacaatttgcatgagggatttttttaattgtatgtactcatggttgtaaaccaaaacgtactgtaccgtacagagaaaaggagcaaaaaaccaagtcttctgtttatcctgaggctttccacaatgttcccctcctgtgagccaaggaggcaaactgcacaagcttgtaaatggttcgtctttaaaatgtacataagtggaacatttaataaaatgaggggaaatggatttataaacttgttttttttctaggtgaccctgtttaataggctttcacagactggggaatgctcaagatgtgatgggcctggtggtacaggtgtgacatttgttaccacccatttctcccaccccaccctgcttttttgtttgtttgttttttcatcccccagcacactataatatagtgaactggaaaagtcccttccagaaacagcttggccagctttgtgaacctttgacatctgaaaacaaccaaggatccatctgggcttctcttccccagctttttgcctgatgccattttattgacagacaatggactttgaagtcagcctttgcctttgagaaagttcaagaactatggttggtcacgtctatctacaacctaatcctactctttggtagtctctgcagcagccacagccttagcagagctggggttcctgtcttctgcacacgattgactttcttgatgggtaattttttttaagattataccaacagtggatcagctgggttttggccaggaagttgtctttgtggactctgcctgcatggcttagtagtagaaggaaatttttttttggttttgttttttataattcagtttaatcaataaacatgtatttattgactgtttcctgtgttgagactg

SEQ ID NO: 324725 - DNA, 6653 bp, Homo sapiens
  misc_feature (301)..(301): n is a, c, g, or t
cggcgtctctctcccccgcgccagctcccgtacacggagccgcattccttggcccccccacccccctccctcggggcccccccgcccccctcgggaaaaaaatccaccccgaatcactcgaacccgagggaggcttcctttcacccttggggagacgagctttcaacggttacctcttcttcgtctccccccaagcccccgtcccctccccctgctcccacccccttctggcgccgggtgtaaggtccctttaaggcgacggcgccttcctcgggtcagactaccggcggcgacgaccacnggagcatggcggacaccgacctgttcatggaatgtgaggaggaggagttggagccatggcagaaaatcagtgatgtcattgaggactctgtagttgaagattataattcagtggataaaactaccacagtttctgtgagccagcagccagtctcggctccagtgcccatcgctgcccatgcttctgttgctgggcacctctctacatccaccaccgttagtagcagcggggcacagaacagcgacagtacaaagaagactcttgtcacactaattgccaacaacaatgctggcaatcctttggtccagcaaggtggacagccactcatcctgacccagaatccagccccaggtctgggcacaatggttactcaaccagtattgaggcctgttcaggtcatgcagaatgccaatcatgtgactagttcccctgtggcctcacaaccaatatttatcactacgcagggatttcctgtaaggaatgtccggcctgtacaaaatgcaatgaatcaggttgggattgtgctgaacgtacagcaaggccaaacggttagaccaattacactagttccagccccaggtacccagtttgttaagccgacagttggagttccacaagtgttctcccagatgacccctgtgaggccaggctccacaatgcctgtgaggcccaccaccaacaccttcaccaccgtcatcccggccactcttaccattcgaagcaccgtcccacagtcccagtcccagcagaccaagtccactcccagcacttctaccactcccactgccacacagccaacctcactggggcaactagctgttcagtctccaggccagtcaaaccagaccacgaatcccaagctagctccctccttcccctctccacctgcagtgagcattgccagctttgtcactgtgaagcgacctggtgttacaggcgaaaatagcaatgaagtggccaaattggtgaatacccttaacaccatcccttccctgggccagagtcctgggccagtggtggtgtccaacaacagctctgctcatggctctcaaagaaccagcggacctgagtcttcaatgaaagtgacctcttccatcccagtatttgacctccaggatggtggacggaaaatatgtccacgatgtaatgctcaatttcgtgttactgaagctttgagaggtcacatgtgttactgttgcccagaaatggttgaataccagaagaaaggaaagtccctggattcagaacccagtgtcccatcagcagcaaagcccccatcccctgagaaaacagctcctgttgcttccacaccctcttctacacctattcctgctctgtcaccgcctaccaaagtaccagaaccaaatgagaacgtgggcgatgccgtccagaccaaactcattatgcttgtagatgacttctactatggacgggatggtggcaaagtagcccagctcacaaatttccctaaggtcgccacatctttccgatgcccacattgtaccaaaaggctaaaaaacaatattcgattcatgaaccatatgaaacaccacgtagaactcgatcagcagaacggtgaggtagatggtcacactatctgccagcactgttaccgccagttttccactcccttccagcttcagtgccacttggaaaatgttcatagtccctatgaatctactaccaagtgcaagatctgtgaatgggcgtttgaaagtgagccactatttctccagcatatgaaggatactcataagcctggagagatgccttatgtttgccaggtgtgtcaatatcgctcctcactctactctgaggtagatgtccattttcggatgatccatgaggatacccggcatctgctctgcccttattgcctgaaggtcttcaaaaatggcaatgcattccaacagcattacatgaggcaccagaagagaaatgtttatcactgcaacaaatgccggctgcagtttctctttgccaaggacaaaattgaacacaagcttcaacaccataaaaccttccgtaaacccaagcagctggagggcttgaaaccaggcaccaaggtgacaatccgggcttcccgagggcagccacgaactgttcctgtatcctctaatgatacacctcccagcgccttgcaggaggcagcaccgctgacctcctcaatggaccctctgcctgtcttcctttatccccctgtccagcgcagcatccagaagagagctgttaggaaaatgagtgtcatgggccggcagacatgcctggagtgcagcttcgagatcccagacttccctaatcatttccctacttacgtacactgctctctgtgtcgctatagcacctgctgttctcgagcttatgccaaccacatgatcaacaatcatgttccacggaagagccccaagtatttggctttgtttaaaaattctgtgagtggaatcaagctggcctgcacttcatgtacctttgttacctctgtgggcgatgctatggccaagcatttggtattcaacccctctcacagatccagcagcatcctgccacggggactcacttggatagctcactcaaggcatggccagactcgtgaccgagtgcatgaccggaacgtgaagaatatgtaccctcctccttccttccccactaacaaagctgccactgtgaaatctgcgggggccaccccagctgagcctgaagagctactaactcccttagccccagcactcccatcaccagcctcaactgcaaccccaccaccaacccccactcacccgcaggctttagcccttccaccgctggctacagagggagccgaatgtctgaatgttgatgatcaggatgaagggagcccagtcacccaagaacctgagctagcatcaggtggtggtggtagtggtggagttggcaaaaaggagcagctgtctgtgaagaagcttcgagtagtactgtttgctctatgctgcaatacagaacaggcagctgaacacttccgaaatccccagcgacgtattcgccgttggcttcgacgtttccaggcctcccagggggagaatctagagggcaaatatctgagctttgaggcagaagagaaactggctgagtgggtgctaacccagcgcgaacaacagctacctgtaaatgaggagaccttgttccagaaggccaccaaaataggacgttctttggaaggggggtttaagatctcctatgagtgggctgtgcgtttcatgctgcggcaccacctgactccccatgcccggcgagctgtggcccacaccctacctaaggatgtagcagagaatgcaggactcttcattgattttgtacaacggcagattcacaaccaggacttacccttgtctatgattgtggctattgatgagatctctttgttcctggatacagaggtgctgagcagtgatgatcgaaaggagaatgccctgcagacagtgggcacaggggaaccttggtgtgatgtagtcctagccattctggcagatggcactgtccttcccaccctggttttctacagagggcagatggatcagcctgctaacatgccagactccatattgctagaggcaaaggagagtggctacagtgatgacgagatcatggagctgtggtcaactcgagtgtggcagaagcacacagcttgccagcgcagcaaaggcatgcttgtgatggactgtcatcgcactcacttgtcagaagaggtactggctatgcttagtgcctctagcactttgcctgcagtggtcccagcaggctgtagctccaaaattcagccattagatgtatgcatcaaaagaactgtcaagaacttcctgcataaaaaatggaaggaacaggctcgggaaatggcagatactgcatgtgattctgatgtcctgcttcagctggtgcttgtctggctgggtgaagtgctaggtgtcattggggactgtccagagctagttcagcgctccttcctggtggctagtgttctgcctggccccgatggcaacattaactcacctacaagaaatgctgacatgcaggaggagctaattgcctccctagaggagcaactgaagctgagtggggaacattctgagtcttccactccacgacccagatcatctcctgaagagacaattgagcctgaaagtcttcaccagctctttgagggtgaaagtgagaccgagtctttctatggctttgaagaagctgacctagatctgatggagatttgagtgttggggtcatgagggggtgtggagtgggggtgggaacatgtgagggagggtaaaggggcttagggaaaagggggcataccaggtggggtatttggtttctattttttaattttataccaccactcccccctgaagttgacttacacttccctgtggatttgtggattaattaggaaaaccaatagtaatcacgtctgagccaaggagctggcccattggtcattcacttctgctaaaaacaggtttttgtgactttttttttttttaaatttaaatcactgtgtttggtatttttctgacaaaattaagaaaaagaaaaaaaattatttgtgggcaaatgttaaatttttttgtttccccttttacctcaattgtatcatagtactgggtttttttgtttgttttattgtgtggccaatgtctttgggcatgatgctatctaatcattgttaatgtgagaacatttctgaagatgggaaagacaaattatgtagctcacaaactggtttattatatatatggataaaaaacttttttcattgtggtcttaacacttttatataaaaatgaaaatggaaaaaaagtcccactgaactctctcttccttctccttttctttccttccctctccagagatgttggtttctacagcaaccctagatataaaattgtggctttaaaaatgcatgaaaccacctttaattatccagaatgaatagatttgtcttttcctcaccaccttccctccaaaacatgacataaacaatattttttgcacttgtgatccttggcccctttccccattctcaacaccatccatccctctggacaaaggatcatacaggtgttattagcaagcaagagatactgaagcgatcaaacagttttagggtggaagccattcccagtttgagtcttcatcctgtaagcccccaggggcagtccctgctttactgaacttcatcctgttagatggagagcatgcctgtttaagggattactggtcctacagccaggagctaattgttcaagaagtgttgaactttaaaaagacaagaccacttgttgaaatccagcgtgctctgtggctttcccctatttctcttaatacttagggaagaatctgacaggaagaagcgcacaggggtgtgcacaaagaaaatgacatgaatctttatttttcactgccagcttcaaggaaagaaaattttttctacaatttgcatgagggatttttttaattgtatgtactcatggttgtaaaccaaaacgtactgtaccgtacagagaaaaggagcaaaaaaccaagtcttctgtttatcctgaggctttccacaatgttcccctcctgtgagccaaggaggcaaactgcacaagcttgtaaatggttcgtctttaaaatgtacataagtggaacatttaataaaatgaggggaaatggatttataaacttgttttttttctaggtgaccctgtttaataggctttcacagactggggaatgctcaagatgtgatgggcctggtggtacaggtgtgacatttgttaccacccatttctcccaccccaccctgcttttttgtttgtttgttttttcatcccccagcacactataatatagtgaactggaaaagtcccttccagaaacagcttggccagctttgtgaacctttgacatctgaaaacaaccaaggatccatctgggcttctcttccccagctttttgcctgatgccattttattgacagacaatggactttgaagtcagcctttgcctttgagaaagttcaagaactatggttggtcacgtctatctacaacctaatcctactctttggtagtctctgcagcagccacagccttagcagagctggggttcctgtcttctgcacacgattgactttcttgatgggtaattttttttaagattataccaacagtggatcagctgggttttgagccttctgaggggtcttgatgaccagatggacagtgagcccgtccttgattccgtggctggttcagtgtgtcccccatcagctgctgcgaagatcaggaccagctgatccttgctgagccttaaactccgggaagtttcctcctttgatagc

SEQ ID NO: 324726 - DNA, 5998 bp, Homo sapiens
  misc_feature (301)..(301): n is a, c, g, or t
cggcgtctctctcccccgcgccagctcccgtacacggagccgcattccttggcccccccacccccctccctcggggcccccccgcccccctcgggaaaaaaatccaccccgaatcactcgaacccgagggaggcttcctttcacccttggggagacgagctttcaacggttacctcttcttcgtctccccccaagcccccgtcccctccccctgctcccacccccttctggcgccgggtgtaaggtccctttaaggcgacggcgccttcctcgggtcagactaccggcggcgacgaccacnggagcatggcggacaccgacctgttcatggaatgtgaggaggaggagttggagccatggcagaaaatcagtgatgtcattgaggactctgtagttgaagattataattcagtggataaaactaccacagtttctgtgagccagcagccagtctcggctccagtgcccatcgctgcccatgcttctgttgctgggcacctctctacatccaccaccgttagtagcagcggggcacagaacagcgacagtacaaagaagactcttgtcacactaattgccaacaacaatgctggcaatcctttggtccagcaaggtggacagccactcatcctgacccagaatccagccccaggtctgggcacaatggttactcaaccagtattgaggcctgttcaggtcatgcagaatgccaatcatgtgactagttcccctgtggcctcacaaccaatatttatcactacgcagggatttcctgtaaggaatgtccggcctgtacaaaatgcaatgaatcaggttgggattgtgctgaacgtacagcaaggccaaacggttagaccaattacactagttccagccccaggtacccagtttgttaagccgacagttggagttccacaagtgttctcccagatgacccctgtgaggccaggctccacaatgcctgtgaggcccaccaccaacaccttcaccaccgtcatcccggccactcttaccattcgaagcaccgtcccacagtcccagtcccagcagaccaagtccactcccagcacttctaccactcccactgccacacagccaacctcactggggcaactagctgttcagtctccaggccagtcaaaccagaccacgaatcccaagctagctccctccttcccctctccacctgcagtgagcattgccagctttgtcactgtgaagcgacctggtgttacaggcgaaaatagcaatgaagtggccaaattggtgaatacccttaacaccatcccttccctgggccagagtcctgggccagtggtggtgtccaacaacagctctgctcatggctctcaaagaaccagcggacctgagtcttcaatgaaagtgacctcttccatcccagtatttgacctccaggatggtggacggaaaatatgtccacgatgtaatgctcaatttcgtgttactgaagctttgagaggtcacatgtgttactgttgcccagaaatggttgaataccagaagaaaggaaagtccctggattcagaacccagtgtcccatcagcagcaaagcccccatcccctgagaaaacagctcctgttgcttccacaccctcttctacacctattcctgctctgtcaccgcctaccaaagtaccagaaccaaatgagaacgtgggcgatgccgtccagaccaaactcattatgcttgtagatgacttctactatggacgggatggtggcaaagtagcccagctcacaaatttccctaaggtcgccacatctttccgatgcccacattgtaccaaaaggctaaaaaacaatattcgattcatgaaccatatgaaacaccacgtagaactcgatcagcagaacggtgaggtagatggtcacactatctgccagcactgttaccgccagttttccactcccttccagcttcagtgccacttggaaaatgttcatagtccctatgaatctactaccaagtgcaagatctgtgaatgggcgtttgaaagtgagccactatttctccagcatatgaaggatactcataagcctggagagatgccttatgtttgccaggtgtgtcaatatcgctcctcactctactctgaggtagatgtccattttcggatgatccatgaggatacccggcatctgctctgcccttattgcctgaaggtcttcaaaaatggcaatgcattccaacagcattacatgaggcaccagaagagaaatgtttatcactgcaacaaatgccggctgcagtttctctttgccaaggacaaaattgaacacaagcttcaacaccataaaaccttccgtaaacccaagcagctggagggcttgaaaccaggcaccaaggtgacaatccgggcttcccgagggcagccacgaactgttcctgtatcctctaatgatacacctcccagcgccttgcaggaggcagcaccgctgacctcctcaatggaccctctgcctgtcttcctttatccccctgtccagcgcagcatccagaagagagctgttaggaaaatgagtgtcatgggccggcagacatgcctggagtgcagcttcgagatcccagacttccctaatcatttccctacttacgtacactgctctctgtgtcgctatagcacctgctgttctcgagcttatgccaaccacatgatcaacaatcatgttccacggaagagccccaagtatttggctttgtttaaaaattctgtgagtggaatcaagctggcctgcacttcatgtacctttgttacctctgtgggcgatgctatggccaagcatttggtattcaacccctctcacagatccagcagcatcctgccacggggactcacttggatagctcactcaaggcatggccagactcgtgaccgagtgcatgaccggaacgtgaagaatatgtaccctcctccttccttccccactaacaaagctgccactgtgaaatctgcgggggccaccccagctgagcctgaagagctactaactcccttagccccagcactcccatcaccagcctcaactgcaaccccaccaccaacccccactcacccgcaggctttagcccttccaccgctggctacagagggagccgaatgtctgaatgttgatgatcaggatgaagggagcccagtcacccaagaacctgagctagcatcaggtggtggtggtagtggtggagttggcaaaaaggagcagctgtctgtgaagaagcttcgagtagtactgtttgctctatgctgcaatacagaacaggcagctgaacacttccgaaatccccagcgacgtattcgccgttggcttcgacgtttccaggcctcccagggggagaatctagagggcaaatatctgagctttgaggcagaagagaaactggctgagtgggtgctaacccagcgcgaacaacagctacctgtaaatgaggagaccttgttccagaaggccaccaaaataggacgttctttggaaggggggtttaagatctcctatgagtgggctgtgcgtttcatgctgcggcaccacctgactccccatgcccggcgagctgtggcccacaccctacctaaggatgtagcagagaatgcaggactcttcattgattttgtacaacggcagattcacaaccaggacttacccttgtctatgattgtggctattgatgagatctctttgttcctggatacagaggtgctgagcagtgatgatcgaaaggagaatgccctgcagacagtgggcacaggggaaccttggtgtgatgtagtcctagccattctggcagatggcactgtccttcccaccctggttttctacagagggcagatggatcagcctgctaacatgccagactccatattgctagaggcaaaggagagtggctacagtgatgacgagatcatggagctgtggtcaactcgagtgtggcagaagcacacagcttgccagcgcagcaaaggcatgcttgtgatggactgtcatcgcactcacttgtcagaagaggtactggctatgcttagtgcctctagcactttgcctgcagtggtcccagcaggctgtagctccaaaattcagccattagatgtatgcatcaaaagaactgtcaagaacttcctgcataaaaaatggaaggaacaggctcgggaaatggcagatactgcatgtgattctgatgtcctgcttcagctggtgcttgtctggctgggtgaagtgctaggtgtcattggggactgtccagagctagttcagcgctccttcctggtggctagtgttctgcctggccccgatggcaacattaactcacctacaagaaatgctgacatgcaggaggagctaattgcctccctagaggagcaactgaagctgagtggggaacattctgagtcttccactccacgacccagatcatctcctgaagagacaattgagcctgaaagtcttcaccagctctttgagggtgaaagtgagaccgagtctttctatggctttgaagaagctgacctagatctgatggagatttgagtgttggggtcatgagggggtgtggagtgggggtgggaacatgtgagggagggtaaaggggcttagggaaaagggggcataccaggtggggtatttggtttctattttttaattttataccaccactcccccctgaagttgacttacacttccctgtggatttgtggattaattaggaaaaccaatagtaatcacgtctgagccaaggagctggcccattggtcattcacttctgctaaaaacaggtttttgtgactttttttttttttaaatttaaatcactgtgtttggtatttttctgacaaaattaagaaaaagaaaaaaaattatttgtgggcaaatgttaaatttttttgtttccccttttacctcaattgtatcatagtactgggtttttttgtttgttttattgtgtggccaatgtctttgggcatgatgctatctaatcattgttaatgtgagaacatttctgaagatgggaaagacaaattatgtagctcacaaactggtttattatatatatggataaaaaacttttttcattgtggtcttaacacttttatataaaaatgaaaatggaaaaaaagtcccactgaactctctcttccttctccttttctttccttccctctccagagatgttggtttctacagcaaccctagatataaaattgtggctttaaaaatgcatgaaaccacctttaattatccagaatgaatagatttgtcttttcctcaccaccttccctccaaaacatgacataaacaatattttttgcacttgtgatccttggcccctttccccattctcaacaccatccatccctctggacaaaggatcatacaggtgttattagcaagcaagagatactgaagcgatcaaacagttttagggtggaagccattcccagtttgagtcttcatcctgtaagcccccaggggcagtccctgctttactgaacttcatcctgttagatggagagcatgcctgtttaagggattactggtcctacagccaggagctaattgttcaagaagtgttgaactttaaaaagacaagaccacttgttgaaatccagcgtgctctgtggctttcccctatttctcttaatacttagggaagaatctgacaggaagaagcgcacaggggtgtgcacaaagaaaatgacatgaatctttatttttcactgccagcttcaaggaaagaaaattttttctacaatttgcatgagggatttttttaattgtatgtactcatggttgtaaaccaaaacgtactgtaccgtacagagaaaaggagcaaaaaaccaagtcttctgtttatcctgaggctttccacaatgttcccctcctgtgagccaaggaggcaaactgcacaagcttgtaaatggttcgtctttaaaatgtacataagtggaacatttaataaaatgaggggaaatggatttataaacttgtt

SEQ ID NO: 324727 - DNA, 449 bp, Homo sapiens
ggactatagaaggagatattgtggtaataaacaaaaggtaactggatcgagtaagggaaagcagtatgtctcctttcccagaactctcttagtttcaagaactcattatctttctgggctcagaaaaggatatcccaaacaggaagtctggggaatggaggggagcagataatgtttgttctgtgattttaccattatatttctaaaaggctaccaattttttatgttttctgtactttctctttgtgctttattacagattcatgaaccatatgaaacaccacgtagaactcgatcagcagaacggtgaggtagatggtcacactatctgccagcactgttaccgccagttttccactcccttccagcttcagtgccacttggaaaatgttcatagtccctatgaatctactagtaagtttggaaactcttaaactcaaggggaatat

SEQ ID NO: 324728 - DNA, 525 bp, Homo sapiens
gtaagtaggagagaaggggattagttgagcaaggggaggaaaaaagatacaggttcgtactgtatgcatcaggagcatacctacttggcctcactcattcactgttgagatgtgctggacctaattagaaaccttccgacctgaagtttatataaaactgggaaagctggtcactgcgaacagcgtatttgtatgtagtaagttgaatcccagggcactgtctttggagggcttattttttcactgagctaactatttttgttgtttcattttccataggactcacttggatagctcactcaaggtaacaaaaactcacctcacaatttaatttctggtttgcagtgtgtttactctgttattattattattattatcatattattgtttcaatttcctagttgaactgagatttctcctcttctctttgctcctcacccctttaggcatggccagactcgtgaccgagtgcatgaccggaacgtgaagaatatgtaccctcctccttccttccccactaacaaa

SEQ ID NO: 324729 - DNA, 6633 bp, Homo sapiens
  misc_feature (301)..(301): n is a, c, g, or t
cggcgtctctctcccccgcgccagctcccgtacacggagccgcattccttggcccccccacccccctccctcggggcccccccgcccccctcgggaaaaaaatccaccccgaatcactcgaacccgagggaggcttcctttcacccttggggagacgagctttcaacggttacctcttcttcgtctccccccaagcccccgtcccctccccctgctcccacccccttctggcgccgggtgtaaggtccctttaaggcgacggcgccttcctcgggtcagactaccggcggcgacgaccacnggagcatggcggacaccgacctgttcatggaatgtgaggaggaggagttggagccatggcagaaaatcagtgatgtcattgaggactctgtagttgaagattataattcagtggataaaactaccacagtttctgtgagccagcagccagtctcggctccagtgcccatcgctgcccatgcttctgttgctgggcacctctctacatccaccaccgttagtagcagcggggcacagaacagcgacagtacaaagaagactcttgtcacactaattgccaacaacaatgctggcaatcctttggtccagcaaggtggacagccactcatcctgacccagaatccagccccaggtctgggcacaatggttactcaaccagtattgaggcctgttcaggtcatgcagaatgccaatcatgtgactagttcccctgtggcctcacaaccaatatttatcactacgcagggatttcctgtaaggaatgtccggcctgtacaaaatgcaatgaatcaggttgggattgtgctgaacgtacagcaaggccaaacggttagaccaattacactagttccagccccaggtacccagtttgttaagccgacagttggagttccacaagtgttctcccagatgacccctgtgaggccaggctccacaatgcctgtgaggcccaccaccaacaccttcaccaccgtcatcccggccactcttaccattcgaagcaccgtcccacagtcccagtcccagcagaccaagtccactcccagcacttctaccactcccactgccacacagccaacctcactggggcaactagctgttcagtctccaggccagtcaaaccagaccacgaatcccaagctagctccctccttcccctctccacctgcagtgagcattgccagctttgtcactgtgaagcgacctggtgttacaggcgaaaatagcaatgaagtggccaaattggtgaatacccttaacaccatcccttccctgggccagagtcctgggccagtggtggtgtccaacaacagctctgctcatggctctcaaagaaccagcggacctgagtcttcaatgaaagtgacctcttccatcccagtatttgacctccaggatggtggacggaaaatatgtccacgatgtaatgctcaatttcgtgttactgaagctttgagaggtcacatgtgttactgttgcccagaaatggttgaataccagaagaaaggaaagtccctggattcagaacccagtgtcccatcagcagcaaagcccccatcccctgagaaaacagctcctgttgcttccacaccctcttctacacctattcctgctctgtcaccgcctaccaaagtaccagaaccaaatgagaacgtgggcgatgccgtccagaccaaactcattatgcttgtagatgacttctactatggacgggatggtggcaaagtagcccagctcacaaatttccctaaggtcgccacatctttccgatgcccacattgtaccaaaaggctaaaaaacaatattcgattcatgaaccatatgaaacaccacgtagaactcgatcagcagaacggtgaggtagatggtcacactatctgccagcactgttaccgccagttttccactcccttccagcttcagtgccacttggaaaatgttcatagtccctatgaatctactaccaagtgcaagatctgtgaatgggcgtttgaaagtgagccactatttctccagcatatgaaggatactcataagcctggagagatgccttatgtttgccaggtgtgtcaatatcgctcctcactctactctgaggtagatgtccattttcggatgatccatgaggatacccggcatctgctctgcccttattgcctgaaggtcttcaaaaatggcaatgcattccaacagcattacatgaggcaccagaagagaaatgtttatcactgcaacaaatgccggctgcagtttctctttgccaaggacaaaattgaacacaagcttcaacaccataaaaccttccgtaaacccaagcagctggagggcttgaaaccaggcaccaaggtgacaatccgggcttcccgagggcagccacgaactgttcctgtatcctctaatgatacacctcccagcgccttgcaggaggcagcaccgctgacctcctcaatggaccctctgcctgtcttcctttatccccctgtccagcgcagcatccagaagagagctgttaggaaaatgagtgtcatgggccggcagacatgcctggagtgcagcttcgagatcccagacttccctaatcatttccctacttacgtacactgctctctgtgtcgctatagcacctgctgttctcgagcttatgccaaccacatgatcaacaatcatgttccacggaagagccccaagtatttggctttgtttaaaaattctgtgagtggaatcaagctggcctgcacttcatgtacctttgttacctctgtgggcgatgctatggccaagcatttggtattcaacccctctcacagatccagcagcatcctgccacggggactcacttggatagctcactcaaggcatggccagactcgtgaccgagtgcatgaccggaacgtgaagaatatgtaccctcctccttccttccccactaacaaagctgccactgtgaaatctgcgggggccaccccagctgagcctgaagagctactaactcccttagccccagcactcccatcaccagcctcaactgcaaccccaccaccaacccccactcacccgcaggctttagcccttccaccgctggctacagagggagccgaatgtctgaatgttgatgatcaggatgaagggagcccagtcacccaagaacctgagctagcatcaggtggtggtggtagtggtggagttggcaaaaaggagcagctgtctgtgaagaagcttcgagtagtactgtttgctctatgctgcaatacagaacaggcagctgaacacttccgaaatccccagcgacgtattcgccgttggcttcgacgtttccaggcctcccagggggagaatctagagggcaaatatctgagctttgaggcagaagagaaactggctgagtgggtgctaacccagcgcgaacaacagctacctgtaaatgaggagaccttgttccagaaggccaccaaaataggacgttctttggaaggggggtttaagatctcctatgagtgggctgtgcgtttcatgctgcggcaccacctgactccccatgcccggcgagctgtggcccacaccctacctaaggatgtagcagagaatgcaggactcttcattgattttgtacaacggcagattcacaaccaggacttacccttgtctatgattgtggctattgatgagatctctttgttcctggatacagaggtgctgagcagtgatgatcgaaaggagaatgccctgcagacagtgggcacaggggaaccttggtgtgatgtagtcctagccattctggcagatggcactgtccttcccaccctggttttctacagagggcagatggatcagcctgctaacatgccagactccatattgctagaggcaaaggagagtggctacagtgatgacgagatcatggagctgtggtcaactcgagtgtggcagaagcacacagcttgccagcgcagcaaaggcatgcttgtgatggactgtcatcgcactcacttgtcagaagaggtactggctatgcttagtgcctctagcactttgcctgcagtggtcccagcaggctgtagctccaaaattcagccattagatgtatgcatcaaaagaactgtcaagaacttcctgcataaaaaatggaaggaacaggctcgggaaatggcagatactgcatgtgattctgatgtcctgcttcagctggtgcttgtctggctgggtgaagtgctaggtgtcattggggactgtccagagctagttcagcgctccttcctggtggctagtgttctgcctggccccgatggcaacattaactcacctacaagaaatgctgacatgcaggaggagctaattgcctccctagaggagcaactgaagctgagtggggaacattctgagtcttccactccacgacccagatcatctcctgaagagacaattgagcctgaaagtcttcaccagctctttgagggtgaaagtgagaccgagtctttctatggctttgaagaagctgacctagatctgatggagatttgagtgttggggtcatgagggggtgtggagtgggggtgggaacatgtgagggagggtaaaggggcttagggaaaagggggcataccaggtggggtatttggtttctattttttaattttataccaccactcccccctgaagttgacttacacttccctgtggatttgtggattaattaggaaaaccaatagtaatcacgtctgagccaaggagctggcccattggtcattcacttctgctaaaaacaggtttttgtgactttttttttttttaaatttaaatcactgtgtttggtatttttctgacaaaattaagaaaaagaaaaaaaattatttgtgggcaaatgttaaatttttttgtttccccttttacctcaattgtatcatagtactgggtttttttgtttgttttattgtgtggccaatgtctttgggcatgatgctatctaatcattgttaatgtgagaacatttctgaagatgggaaagacaaattatgtagctcacaaactggtttattatatatatggataaaaaacttttttcattgtggtcttaacacttttatataaaaatgaaaatggaaaaaaagtcccactgaactctctcttccttctccttttctttccttccctctccagagatgttggtttctacagcaaccctagatataaaattgtggctttaaaaatgcatgaaaccacctttaattatccagaatgaatagatttgtcttttcctcaccaccttccctccaaaacatgacataaacaatattttttgcacttgtgatccttggcccctttccccattctcaacaccatccatccctctggacaaaggatcatacaggtgttattagcaagcaagagatactgaagcgatcaaacagttttagggtggaagccattcccagtttgagtcttcatcctgtaagcccccaggggcagtccctgctttactgaacttcatcctgttagatggagagcatgcctgtttaagggattactggtcctacagccaggagctaattgttcaagaagtgttgaactttaaaaagacaagaccacttgttgaaatccagcgtgctctgtggctttcccctatttctcttaatacttagggaagaatctgacaggaagaagcgcacaggggtgtgcacaaagaaaatgacatgaatctttatttttcactgccagcttcaaggaaagaaaattttttctacaatttgcatgagggatttttttaattgtatgtactcatggttgtaaaccaaaacgtactgtaccgtacagagaaaaggagcaaaaaaccaagtcttctgtttatcctgaggctttccacaatgttcccctcctgtgagccaaggaggcaaactgcacaagcttgtaaatggttcgtctttaaaatgtacataagtggaacatttaataaaatgaggggaaatggatttataaacttgttttttttctaggtgaccctgtttaataggctttcacagactggggaatgctcaagatgtgatgggcctggtggtacaggtgtgacatttgttaccacccatttctcccaccccaccctgcttttttgtttgtttgttttttcatcccccagcacactataatatagtgaactggaaaagtcccttccagaaacagcttggccagctttgtgaacctttgacatctgaaaacaaccaaggatccatctgggcttctcttccccagctttttgcctgatgccattttattgacagacaatggactttgaagtcagcctttgcctttgagaaagttcaagaactatggttggtcacgtctatctacaacctaatcctactctttggtagtctctgcagcagccacagccttagcagagctggggttcctgtcttctgcacacgattgactttcttgatgggtaattttttttaagattataccaacagtggatcagctgggttttggccaggaagttgtctttgtggactctgcctgcatggcttagtagtagaaggaaatttttttttggttttgttttttataattcagtttaatcaataaacatgtatttattgactgtttcctgtgttgagactg

SEQ ID NO: 324730 - DNA, 6460 bp, Homo sapiens
gagtgatgatcgaaaggagaatgccctgcagacagtgggcacaggggaaccttggtgtgatgtagtcctagccattctggcagatggcactgtccttcccaccctggttttctacagagggcagatggatcagcctgctaacatgccagactccatattgctagaggcaaaggagttggagccatggcagaaaatcagtgatgtcattgaggactctgtagttgaagattataattcagtggataaaactaccacagtttctgtgagccagcagccagtctcggctccagtgcccatcgctgcccatgcttctgttgctgggcacctctctacatccaccaccgttagtagcagcggggcacagaacagcgacagtacaaagaagactcttgtcacactaattgccaacaacaatgctggcaatcctttggtccagcaaggtggacagccactcatcctgacccagaatccagccccaggtctgggcacaatggttactcaaccagtattgaggcctgttcaggtcatgcagaatgccaatcatgtgactagttcccctgtggcctcacaaccaatatttatcactacgcagggatttcctgtaaggaatgtccggcctgtacaaaatgcaatgaatcaggttgggattgtgctgaacgtacagcaaggccaaacggttagaccaattacactagttccagccccaggtacccagtttgttaagccgacagttggagttccacaagtgttctcccagatgacccctgtgaggccaggctccacaatgcctgtgaggcccaccaccaacaccttcaccaccgtcatcccggccactcttaccattcgaagcaccgtcccacagtcccagtcccagcagaccaagtccactcccagcacttctaccactcccactgccacacagccaacctcactggggcaactagctgttcagtctccaggccagtcaaaccagaccacgaatcccaagctagctccctccttcccctctccacctgcagtgagcattgccagctttgtcactgtgaagcgacctggtgttacaggcgaaaatagcaatgaagtggccaaattggtgaatacccttaacaccatcccttccctgggccagagtcctgggccagtggtggtgtccaacaacagctctgctcatggctctcaaagaaccagcggacctgagtcttcaatgaaagtgacctcttccatcccagtatttgacctccaggatggtggacggaaaatatgtccacgatgtaatgctcaatttcgtgttactgaagctttgagaggtcacatgtgttactgttgcccagaaatggttgaataccagaagaaaggaaagtccctggattcagaacccagtgtcccatcagcagcaaagcccccatcccctgagaaaacagctcctgttgcttccacaccctcttctacacctattcctgctctgtcaccgcctaccaaagtaccagaaccaaatgagaacgtgggcgatgccgtccagaccaaactcattatgcttgtagatgacttctactatggacgggatggtggcaaagtagcccagctcacaaatttccctaaggtcgccacatctttccgatgcccacattgtaccaaaaggctaaaaaacaatattcgattcatgaaccatatgaaacaccacgtagaactcgatcagcagaacggtgaggtagatggtcacactatctgccagcactgttaccgccagttttccactcccttccagcttcagtgccacttggaaaatgttcatagtccctatgaatctactaccaagtgcaagatctgtgaatgggcgtttgaaagtgagccactatttctccagcatatgaaggatactcataagcctggagagatgccttatgtttgccaggtgtgtcaatatcgctcctcactctactctgaggtagatgtccattttcggatgatccatgaggatacccggcatctgctctgcccttattgcctgaaggtcttcaaaaatggcaatgcattccaacagcattacatgaggcaccagaagagaaatgtttatcactgcaacaaatgccggctgcagtttctctttgccaaggacaaaattgaacacaagcttcaacaccataaaaccttccgtaaacccaagcagctggagggcttgaaaccaggcaccaaggtgacaatccgggcttcccgagggcagccacgaactgttcctgtatcctctaatgatacacctcccagcgccttgcaggaggcagcaccgctgacctcctcaatggaccctctgcctgtcttcctttatccccctgtccagcgcagcatccagaagagagctgttaggaaaatgagtgtcatgggccggcagacatgcctggagtgcagcttcgagatcccagacttccctaatcatttccctacttacgtacactgctctctgtgtcgctatagcacctgctgttctcgagcttatgccaaccacatgatcaacaatcatgttccacggaagagccccaagtatttggctttgtttaaaaattctgtgagtggaatcaagctggcctgcacttcatgtacctttgttacctctgtgggcgatgctatggccaagcatttggtattcaacccctctcacagatccagcagcatcctgccacggggactcacttggatagctcactcaaggcatggccagactcgtgaccgagtgcatgaccggaacgtgaagaatatgtaccctcctccttccttccccactaacaaagctgccactgtgaaatctgcgggggccaccccagctgagcctgaagagctactaactcccttagccccagcactcccatcaccagcctcaactgcaaccccaccaccaacccccactcacccgcaggctttagcccttccaccgctggctacagagggagccgaatgtctgaatgttgatgatcaggatgaagggagcccagtcacccaagaacctgagctagcatcaggtggtggtggtagtggtggagttggcaaaaaggagcagctgtctgtgaagaagcttcgagtagtactgtttgctctatgctgcaatacagaacaggcagctgaacacttccgaaatccccagcgacgtattcgccgttggcttcgacgtttccaggcctcccagggggagaatctagagggcaaatatctgagctttgaggcagaagagaaactggctgagtgggtgctaacccagcgcgaacaacagctacctgtaaatgaggagaccttgttccagaaggccaccaaaataggacgttctttggaaggggggtttaagatctcctatgagtgggctgtgcgtttcatgctgcggcaccacctgactccccatgcccggcgagctgtggcccacaccctacctaaggatgtagcagagaatgcaggactcttcattgattttgtacaacggcagattcacaaccaggacttacccttgtctatgattgtggctattgatgagatctctttgttcctggatacagaggtgctgagcagtgatgatcgaaaggagaatgccctgcagacagtgggcacaggggaaccttggtgtgatgtagtcctagccattctggcagatggcactgtccttcccaccctggttttctacagagggcagatggatcagcctgctaacatgccagactccatattgctagaggcaaaggagagtggctacagtgatgacgagatcatggagctgtggtcaactcgagtgtggcagaagcacacagcttgccagcgcagcaaaggcatgcttgtgatggactgtcatcgcactcacttgtcagaagaggtactggctatgcttagtgcctctagcactttgcctgcagtggtcccagcaggctgtagctccaaaattcagccattagatgtatgcatcaaaagaactgtcaagaacttcctgcataaaaaatggaaggaacaggctcgggaaatggcagatactgcatgtgattctgatgtcctgcttcagctggtgcttgtctggctgggtgaagtgctaggtgtcattggggactgtccagagctagttcagcgctccttcctggtggctagtgttctgcctggccccgatggcaacattaactcacctacaagaaatgctgacatgcaggaggagctaattgcctccctagaggagcaactgaagctgagtggggaacattctgagtcttccactccacgacccagatcatctcctgaagagacaattgagcctgaaagtcttcaccagctctttgagggtgaaagtgagaccgagtctttctatggctttgaagaagctgacctagatctgatggagatttgagtgttggggtcatgagggggtgtggagtgggggtgggaacatgtgagggagggtaaaggggcttagggaaaagggggcataccaggtggggtatttggtttctattttttaattttataccaccactcccccctgaagttgacttacacttccctgtggatttgtggattaattaggaaaaccaatagtaatcacgtctgagccaaggagctggcccattggtcattcacttctgctaaaaacaggtttttgtgactttttttttttttaaatttaaatcactgtgtttggtatttttctgacaaaattaagaaaaagaaaaaaaattatttgtgggcaaatgttaaatttttttgtttccccttttacctcaattgtatcatagtactgggtttttttgtttgttttattgtgtggccaatgtctttgggcatgatgctatctaatcattgttaatgtgagaacatttctgaagatgggaaagacaaattatgtagctcacaaactggtttattatatatatggataaaaaacttttttcattgtggtcttaacacttttatataaaaatgaaaatggaaaaaaagtcccactgaactctctcttccttctccttttctttccttccctctccagagatgttggtttctacagcaaccctagatataaaattgtggctttaaaaatgcatgaaaccacctttaattatccagaatgaatagatttgtcttttcctcaccaccttccctccaaaacatgacataaacaatattttttgcacttgtgatccttggcccctttccccattctcaacaccatccatccctctggacaaaggatcatacaggtgttattagcaagcaagagatactgaagcgatcaaacagttttagggtggaagccattcccagtttgagtcttcatcctgtaagcccccaggggcagtccctgctttactgaacttcatcctgttagatggagagcatgcctgtttaagggattactggtcctacagccaggagctaattgttcaagaagtgttgaactttaaaaagacaagaccacttgttgaaatccagcgtgctctgtggctttcccctatttctcttaatacttagggaagaatctgacaggaagaagcgcacaggggtgtgcacaaagaaaatgacatgaatctttatttttcactgccagcttcaaggaaagaaaattttttctacaatttgcatgagggatttttttaattgtatgtactcatggttgtaaaccaaaacgtactgtaccgtacagagaaaaggagcaaaaaaccaagtcttctgtttatcctgaggctttccacaatgttcccctcctgtgagccaaggaggcaaactgcacaagcttgtaaatggttcgtctttaaaatgtacataagtggaacatttaataaaatgaggggaaatggatttataaacttgttttttttctaggtgaccctgtttaataggctttcacagactggggaatgctcaagatgtgatgggcctggtggtacaggtgtgacatttgttaccacccatttctcccaccccaccctgcttttttgtttgtttgttttttcatcccccagcacactataatatagtgaactggaaaagtcccttccagaaacagcttggccagctttgtgaacctttgacatctgaaaacaaccaaggatccatctgggcttctcttccccagctttttgcctgatgccattttattgacagacaatggactttgaagtcagcctttgcctttgagaaagttcaagaactatggttggtcacgtctatctacaacctaatcctactctttggtagtctctgcagcagccacagccttagcagagctggggttcctgtcttctgcacacgattgactttcttgatgggtaattttttttaagattataccaacagtggatcagctgggttttggccaggaagttgtctttgtggactctgcctgcatggcttagtagtagaaggaaatttttttttggttttgttttttataattcagtttaatcaataaacatgtatttattgactgtttcctgtgttgagactg

SEQ ID NO: 324731 - DNA, 5106 bp, Homo sapiens
  misc_feature (55)..(55): n is a, c, g, or t
gcagaagattgtggttatcaagggtagcgatgagcccgcgtgttgtgtaatattntcagtgcgacagaggtcggtcgctcctcaacctcttctacacctattcctgctctgtcaccgcctaccaaagtaccagaaccaaatgagaacgtgggcgatgccgtccagaccaaactcattatgcttgtagatgacttctactatggacgggatggtggcaaagtagcccagctcacaaatttccctaaggtcgccacatctttccgatgcccacattgtaccaaaaggctaaaaaacaatattcgattcatgaaccatatgaaacaccacgtagaactcgatcagcagaacggtgaggtagatggtcacactatctgccagcactgttaccgccagttttccactcccttccagcttcagtgccacttggaaaatgttcatagtccctatgaatctactaccaagtgcaagatctgtgaatgggcgtttgaaagtgagccactatttctccagcatatgaaggatactcataagcctggagagatgccttatgtttgccaggtgtgtcaatatcgctcctcactctactctgaggtagatgtccattttcggatgatccatgaggatacccggcatctgctctgcccttattgcctgaaggtcttcaaaaatggcaatgcattccaacagcattacatgaggcaccagaagagaaatgtttatcactgcaacaaatgccggctgcagtttctctttgccaaggacaaaattgaacacaagcttcaacaccataaaaccttccgtaaacccaagcagctggagggcttgaaaccaggcaccaaggtgacaatccgggcttcccgagggcagccacgaactgttcctgtatcctctaatgatacacctcccagcgccttgcaggaggcagcaccgctgacctcctcaatggaccctctgcctgtcttcctttatccccctgtccagcgcagcatccagaagagagctgttaggaaaatgagtgtcatgggccggcagacatgcctggagtgcagcttcgagatcccagacttccctaatcatttccctacttacgtacactgctctctgtgtcgctatagcacctgctgttctcgagcttatgccaaccacatgatcaacaatcatgttccacggaagagccccaagtatttggctttgtttaaaaattctgtgagtggaatcaagctggcctgcacttcatgtacctttgttacctctgtgggcgatgctatggccaagcatttggtattcaacccctctcacagatccagcagcatcctgccacggggactcacttggatagctcactcaaggcatggccagactcgtgaccgagtgcatgaccggaacgtgaagaatatgtaccctcctccttccttccccactaacaaagctgccactgtgaaatctgcgggggccaccccagctgagcctgaagagctactaactcccttagccccagcactcccatcaccagcctcaactgcaaccccaccaccaacccccactcacccgcaggctttagcccttccaccgctggctacagagggagccgaatgtctgaatgttgatgatcaggatgaagggagcccagtcacccaagaacctgagctagcatcaggtggtggtggtagtggtggagttggcaaaaaggagcagctgtctgtgaagaagcttcgagtagtactgtttgctctatgctgcaatacagaacaggcagctgaacacttccgaaatccccagcgacgtattcgccgttggcttcgacgtttccaggcctcccagggggagaatctagagggcaaatatctgagctttgaggcagaagagaaactggctgagtgggtgctaacccagcgcgaacaacagctacctgtaaatgaggagaccttgttccagaaggccaccaaaataggacgttctttggaaggggggtttaagatctcctatgagtgggctgtgcgtttcatgctgcggcaccacctgactccccatgcccggcgagctgtggcccacaccctacctaaggatgtagcagagaatgcaggactcttcattgattttgtacaacggcagattcacaaccaggacttacccttgtctatgattgtggctattgatgagatctctttgttcctggatacagaggtgctgagcagtgatgatcgaaaggagaatgccctgcagacagtgggcacaggggaaccttggtgtgatgtagtcctagccattctggcagatggcactgtccttcccaccctggttttctacagagggcagatggatcagcctgctaacatgccagactccatattgctagaggcaaaggagagtggctacagtgatgacgagatcatggagctgtggtcaactcgagtgtggcagaagcacacagcttgccagcgcagcaaaggcatgcttgtgatggactgtcatcgcactcacttgtcagaagaggtactggctatgcttagtgcctctagcactttgcctgcagtggtcccagcaggctgtagctccaaaattcagccattagatgtatgcatcaaaagaactgtcaagaacttcctgcataaaaaatggaaggaacaggctcgggaaatggcagatactgcatgtgattctgatgtcctgcttcagctggtgcttgtctggctgggtgaagtgctaggtgtcattggggactgtccagagctagttcagcgctccttcctggtggctagtgttctgcctggccccgatggcaacattaactcacctacaagaaatgctgacatgcaggaggagctaattgcctccctagaggagcaactgaagctgagtggggaacattctgagtcttccactccacgacccagatcatctcctgaagagacaattgagcctgaaagtcttcaccagctctttgagggtgaaagtgagaccgagtctttctatggctttgaagaagctgacctagatctgatggagatttgagtgttggggtcatgagggggtgtggagtgggggtgggaacatgtgagggagggtaaaggggcttagggaaaagggggcataccaggtggggtatttggtttctattttttaattttataccaccactcccccctgaagttgacttacacttccctgtggatttgtggattaattaggaaaaccaatagtaatcacgtctgagccaaggagctggcccattggtcattcacttctgctaaaaacaggtttttgtgactttttttttttttaaatttaaatcactgtgtttggtatttttctgacaaaattaagaaaaagaaaaaaaattatttgtgggcaaatgttaaatttttttgtttccccttttacctcaattgtatcatagtactgggtttttttgtttgttttattgtgtggccaatgtctttgggcatgatgctatctaatcattgttaatgtgagaacatttctgaagatgggaaagacaaattatgtagctcacaaactggtttattatatatatggataaaaaacttttttcattgtggtcttaacacttttatataaaaatgaaaatggaaaaaaagtcccactgaactctctcttccttctccttttctttccttccctctccagagatgttggtttctacagcaaccctagatataaaattgtggctttaaaaatgcatgaaaccacctttaattatccagaatgaatagatttgtcttttcctcaccaccttccctccaaaacatgacataaacaatattttttgcacttgtgatccttggcccctttccccattctcaacaccatccatccctctggacaaaggatcatacaggtgttattagcaagcaagagatactgaagcgatcaaacagttttagggtggaagccattcccagtttgagtcttcatcctgtaagcccccaggggcagtccctgctttactgaacttcatcctgttagatggagagcatgcctgtttaagggattactggtcctacagccaggagctaattgttcaagaagtgttgaactttaaaaagacaagaccacttgttgaaatccagcgtgctctgtggctttcccctatttctcttaatacttagggaagaatctgacaggaagaagcgcacaggggtgtgcacaaagaaaatgacatgaatctttatttttcactgccagcttcaaggaaagaaaattttttctacaatttgcatgagggatttttttaattgtatgtactcatggttgtaaaccaaaacgtactgtaccgtacagagaaaaggagcaaaaaaccaagtcttctgtttatcctgaggctttccacaatgttcccctcctgtgagccaaggaggcaaactgcacaagcttgtaaatggttcgtctttaaaatgtacataagtggaacatttaataaaatgaggggaaatggatttataaacttgttttttttctaggtgaccctgtttaataggctttcacagactggggaatgctcaagatgtgatgggcctggtggtacaggtgtgacatttgttaccacccatttctcccaccccaccctgcttttttgtttgtttgttttttcatcccccagcacactataatatagtgaactggaaaagtcccttccagaaacagcttggccagctttgtgaacctttgacatctgaaaacaaccaaggatccatctgggcttctcttccccagctttttgcctgatgccattttattgacagacaatggactttgaagtcagcctttgcctttgagaaagttcaagaactatggttggtcacgtctatctacaacctaatcctactctttggtagtctctgcagcagccacagccttagcagagctggggttcctgtcttctgcacacgattgactttcttgatgggtaattttttttaagattataccaacagtggatcagctgggttttggccaggaagttgtctttgtggactctgcctgcatggcttagtagtagaaggaaatttttttttggttttgttttttataattcagtttaatcaataaacatgtatttattgactgtttcctgtgttgagactg

SEQ ID NO: 324732 - DNA, 6629 bp, Homo sapiens
  misc_feature (301)..(301): n is a, c, g, or t
cggcgtctctctcccccgcgccagctcccgtacacggagccgcattccttggcccccccacccccctccctcggggcccccccgcccccctcgggaaaaaaatccaccccgaatcactcgaacccgagggaggcttcctttcacccttggggagacgagctttcaacggttacctcttcttcgtctccccccaagcccccgtcccctccccctgctcccacccccttctggcgccgggtgtaaggtccctttaaggcgacggcgccttcctcgggtcagactaccggcggcgacgaccacnggagcatggcggacaccgacctgttcatggaatgtgaggaggaggagttggagccatggcagaaaatcagtgatgtcattgaggactctgtagttgaagattataattcagtggataaaactaccacagtttctgtgagccagcagccagtctcggctccagtgcccatcgctgcccatgcttctgttgctgggcacctctctacatccaccaccgttagtagcagcggggcacagaacagcgacagtacaaagaagactcttgtcacactaattgccaacaacaatgctggcaatcctttggtccagcaaggtggacagccactcatcctgacccagaatccagccccaggtctgggcacaatggttactcaaccagtattgaggcctgttcaggtcatgcagaatgccaatcatgtgactagttcccctgtggcctcacaaccaatatttatcactacgcagggatttcctgtaaggaatgtccggcctgtacaaaatgcaatgaatcaggttgggattgtgctgaacgtacagcaaggccaaacggttagaccaattacactagttccagccccaggtacccagtttgttaagccgacagttggagttccacaagtgttctcccagatgacccctgtgaggccaggctccacaatgcctgtgaggcccaccaccaacaccttcaccaccgtcatcccggccactcttaccattcgaagcaccgtcccacagtcccagtcccagcagaccaagtccactcccagcacttctaccactcccactgccacacagccaacctcactggggcaactagctgttcagtctccaggccagtcaaaccagaccacgaatcccaagctagctccctccttcccctctccacctgcagtgagcattgccagctttgtcactgtgaagcgacctggtgttacaggcgaaaatagcaatgaagtggccaaattggtgaatacccttaacaccatcccttccctgggccagagtcctgggccagtggtggtgtccaacaacagctctgctcatggctctcaaagaaccagcggacctgagtcttcaatgaaagtgacctcttccatcccagtatttgacctccaggatggtggacggaaaatatgtccacgatgtaatgctcaatttcgtgttactgaagctttgagaggtcacatgtgttactgttgcccagaaatggttgaataccagaagaaaggaaagtccctggattcagaacccagtgtcccatcagcagcaaagcccccatcccctgagaaaacagctcctgttgcttccacaccctcttctacacctattcctgctctgtcaccgcctaccaaagtaccagaaccaaatgagaacgtgggcgatgccgtccagaccaaactcattatgcttgtagatgacttctactatggacgggatggtggcaaagtagcccagctcacaaatttccctaaggtcgccacatctttccgatgcccacattgtaccaaaaggctaaaaaacaatattcgattcatgaaccatatgaaacaccacgtagaactcgatcagcagaacggtgaggtagatggtcacactatctgccagcactgttaccgccagttttccactcccttccagcttcagtgccacttggaaaatgttcatagtccctatgaatctactaccaagtgcaagatctgtgaatgggcgtttgaaagtgagccactatttctccagcatatgaaggatactcataagcctggagagatgccttatgtttgccaggtgtgtcaatatcgctcctcactctactctgaggtagatgtccattttcggatgatccatgaggatacccggcatctgctctgcccttattgcctgaaggtcttcaaaaatggcaatgcattccaacagcattacatgaggcaccagaagagaaatgtttatcactgcaacaaatgccggctgcagtttctctttgccaaggacaaaattgaacacaagcttcaacaccataaaaccttccgtaaacccaagcagctggagggcttgaaaccaggcaccaaggtgacaatccgggcttcccgagggcagccacgaactgttcctgtatcctctaatgatacacctcccagcgccttgcaggaggcagcaccgctgacctcctcaatggaccctctgcctgtcttcctttatccccctgtccagcgcagcatccagaagagagctgttaggaaaatgagtgtcatgggccggcagacatgcctggagtgcagcttcgagatcccagacttccctaatcatttccctacttacgtacactgctctctgtgtcgctatagcacctgctgttctcgagcttatgccaaccacatgatcaacaatcatgttccacggaagagccccaagtatttggctttgtttaaaaattctgtgagtggaatcaagctggcctgcacttcatgtacctttgttacctctgtgggcgatgctatggccaagcatttggtattcaacccctctcacagatccagcagcatcctgccacggggactcacttggatagctcactcaaggcatggccagactcgtgaccgagtgcatgaccggaacgtgaagaatatgtaccctcctccttccttccccactaacaaagctgccactgtgaaatctgcgggggccaccccagctgagcctgaagagctactaactcccttagccccagcactcccatcaccagcctcaactgcaaccccaccaccaacccccactcacccgcaggctttagcccttccaccgctggctacagagggagccgaatgtctgaatgttgatgatcaggatgaagggagcccagtcacccaagaacctgagctagcatcaggtggtggtggtagtggtggagttggcaaaaaggagcagctgtctgtgaagaagcttcgagtagtactgtttgctctatgctgcaatacagaacaggcagctgaacacttccgaaatccccagcgacgtattcgccgttggcttcgacgtttccaggcctcccagggggagaatctagagggcaaatatctgagctttgaggcagaagagaaactggctgagtgggtgctaacccagcgcgaacaacagctacctgtaaatgaggagaccttgttccagaaggccaccaaaataggacgttctttggaaggggggtttaagatctcctatgagtgggctgtgcgtttcatgctgcggcaccacctgactccccatgcccggcgagctgtggcccacaccctacctaaggatgtagcagagaatgcaggactcttcattgattttgtacaacggcagattcacaaccaggacttacccttgtctatgattgtggctattgatgagatctctttgttcctggatacagaggtgctgagcagtgatgatcgaaaggagaatgccctgcagacagtgggcacaggggaaccttggtgtgatgtagtcctagccattctggcagatggcactgtccttcccaccctggttttctacagagggcagatggatcagcctgctaacatgccagactccatattgctagaggcaaaggagagtggctacagtgatgacgagatcatggagctgtggtcaactcgagtgtggcagaagcacacagcttgccagcgcagcaaaggcatgcttgtgatggactgtcatcgcactcacttgtcagaagaggtactggctatgcttagtgcctctagcactttgcctgcagtggtcccagcaggctgtagctccaaaattcagccattagatgtatgcatcaaaagaactgtcaagaacttcctgcataaaaaatggaaggaacaggctcgggaaatggcagatactgcatgtgattctgatgtcctgcttcagctggtgcttgtctggctgggtgaagtgctaggtgtcattggggactgtccagagctagttcagcgctccttcctggtggctagtgttctgcctggccccgatggcaacattaactcacctacaagaaatgctgacatgcaggaggagctaattgcctccctagaggagcaactgaagctgagtggggaacattctgagtcttccactccacgacccagatcatctcctgaagagacaattgagcctgaaagtcttcaccagctctttgagggtgaaagtgagaccgagtctttctatggctttgaagaagctgacctagatctgatggagatttgagtgttggggtcatgagggggtgtggagtgggggtgggaacatgtgagggagggtaaaggggcttagggaaaagggggcataccaggtggggtatttggtttctattttttaattttataccaccactcccccctgaagttgacttacacttccctgtggatttgtggattaattaggaaaaccaatagtaatcacgtctgagccaaggagctggcccattggtcattcacttctgctaaaaacaggtttttgtgactttttttttttttaaatttaaatcactgtgtttggtatttttctgacaaaattaagaaaaagaaaaaaaattatttgtgggcaaatgttaaatttttttgtttccccttttacctcaattgtatcatagtactgggtttttttgtttgttttattgtgtggccaatgtctttgggcatgatgctatctaatcattgttaatgtgagaacatttctgaagatgggaaagacaaattatgtagctcacaaactggtttattatatatatggataaaaaacttttttcattgtggtcttaacacttttatataaaaatgaaaatggaaaaaaagtcccactgaactctctcttccttctccttttctttccttccctctccagagatgttggtttctacagcaaccctagatataaaattgtggctttaaaaatgcatgaaaccacctttaattatccagaatgaatagatttgtcttttcctcaccaccttccctccaaaacatgacataaacaatattttttgcacttgtgatccttggcccctttccccattctcaacaccatccatccctctggacaaaggatcatacaggtgttattagcaagcaagagatactgaagcgatcaaacagttttagggtggaagccattcccagtttgagtcttcatcctgtaagcccccaggggcagtccctgctttactgaacttcatcctgttagatggagagcatgcctgtttaagggattactggtcctacagccaggagctaattgttcaagaagtgttgaactttaaaaagacaagaccacttgttgaaatccagcgtgctctgtggctttcccctatttctcttaatacttagggaagaatctgacaggaagaagcgcacaggggtgtgcacaaagaaaatgacatgaatctttatttttcactgccagcttcaaggaaagaaaattttttctacaatttgcatgagggatttttttaattgtatgtactcatggttgtaaaccaaaacgtactgtaccgtacagagaaaaggagcaaaaaaccaagtcttctgtttatcctgaggctttccacaatgttcccctcctgtgagccaaggaggcaaactgcacaagcttgtaaatggttcgtctttaaaatgtacataagtggaacatttaataaaatgaggggaaatggatttataaacttgttttttttctaggtgaccctgtttaataggctttcacagactggggaatgctcaagatgtgatgggcctggtggtacaggtgtgacatttgttaccacccatttctcccaccccaccctgcttttttgtttgtttgttttttcatcccccagcacactataatatagtgaactggaaaagtcccttccagaaacagcttggccagctttgtgaacctttgacatctgaaaacaaccaaggatccatctgggcttctcttccccagctttttgcctgatgccattttattgacagacaatggactttgaagtcagcctttgcctttgagaaagttcaagaactatggttggtcacgtctatctacaacctaatcctactctttggtagtctctgcagcagccacagccttagcagagctggggttcctgtcttctgcacacgattgactttcttgatgggtaattttttttaagattataccaacagtggatcagctgggttttggccaggaagttgtctttgtggactctgcctgcatggcttagtagtagaaggaaatttttttttggttttgttttttataattcagtttaatcaataaacatgtatttaaaaaatatataaacaaaacca

SEQ ID NO: 324733 - DNA, 2936 bp, Homo sapiens
gagtgatgatcgaaaggagaatgccctgcagacagtgggcacaggggaaccttggtgtgatgtagtcctagccattctggcagatggcactgtccttcccaccctggttttctacagagggcagatggatcagcctgctaacatgccagactccatattgctagaggcaaaggagttggagccatggcagaaaatcagtgatgtcattgaggactctgtagttgaagattataattcagtggataaaactaccacagtttctgtgagccagcagccagtctcggctccagtgcccatcgctgcccatgcttctgttgctgggcacctctctacatccaccaccgttagtagcagcggggcacagaacagcgacagtacaaagaagactcttgtcacactaattgccaacaacaatgctggcaatcctttggtccagcaaggtggacagccactcatcctgacccagaatccagccccaggtctgggcacaatggttactcaaccagtattgaggcctgttcaggtcatgcagaatgccaatcatgtgactagttcccctgtggcctcacaaccaatatttatcactacgcagggatttcctgtaaggaatgtccggcctgtacaaaatgcaatgaatcaggttgggattgtgctgaacgtacagcaaggccaaacggttagaccaattacactagttccagccccaggtacccagtttgttaagccgacagttggagttccacaagtgttctcccagatgacccctgtgaggccaggctccacaatgcctgtgaggcccaccaccaacaccttcaccaccgtcatcccggccactcttaccattcgaagcaccgtcccacagtcccagtcccagcagaccaagtccactcccagcacttctaccactcccactgccacacagccaacctcactggggcaactagctgttcagtctccaggccagtcaaaccagaccacgaatcccaagctaggtaaggcttcggaagaggagatggcagagccaggttgggatggtgggtggagaacagatgattatcacttggtcaccgtagctccctccttcccctctccacctgcagtgagcattgccagctttgtcactgtgaagcgacctggtgttacaggcgaaaatagcaatgaagtggccaaattggtgaatacccttaacaccatcccttccctgggccagagtcctgggccagtggtggtgtccaacaacagctctgctcatggctctcaaagaaccagcggacctgagtcttcaatgaaaggtacaataacctgaaagactctgagcagccagtcattcaaaaacattaataaagtgtttgttgtatcagagctttatactcagaaatagaaaaataaaataaaatacagctgctgtagtttgttcttacagaaactttagtaaggagaaagccacttacaaaaagtgtaactgaatcagctccaagaaattatgtgtgtaattgtgctttggagattagtgaaattgattgattaaagatgggtgagataatgaaagataacttcatggaagagatggatttctgagcaaggttttaaagttaggatttggtagagagatcttcaggttgagaatgatgagcatgagggttttcagtggtctagagcaggggtcggcaaatgttttctgtaaagggcctagtagtaaagttgtaggctttgtgcacaatatatagcctctgttgcagctattaactgtgctgttgtggtggggaagcagccacagatacataaacgaatgagcatggctgtgctccactaaaaactatttatggactctgaaatttaagtttcataaaattttcatgtgtcgaaaagttttattcttttatttcaaccatttaaaaataaaaaccgcaaggtatagtggctcacacctcatcccagcattatgggaggccaagacgggaggatcacttgagcctaggagtttgagaccagcctgggcaacatggtgagatcccatctctacaaaaaaaaaaaaaaaaaaagattagccaggcgtggtggtgtatgtctgcagtcctcgctactcagaagtctgaggtgagaggatggcttgggcttgaacccagaaggttgagcctgcagtgagccatgagcatgccactgcaacagaacgacaccctgtctcaaaaaaagtaaaaacctttaaaacatggtgttgggaaaactagatatccatgtccaaaagaagttggatcttaccttacaataaatacaaaaattaactcaaaatggatcaaagacctaaatgaactaaaactataagactcttagaaaaattataggacaaaaagcttcatgatactggatttgacagtgattactatttcttggatatgacaccaaaagcatacgcaagaaaagaaaaaatgagtaaattaaattatatcaaaatttaaaacttttgtgcaggacgttgtcaacacagtgaaaagggaagccacagaatgggagaaaatatttgcaaattatgtatctaataaggggttaatatccagaatatataaagaatttgtgcagttcaacaacaaaaaaactcccaaacaacctttttaaaaaatagacaaaggactcgctgggcgtggtggttcatgcctgtaatcccagcactttgagaggccaaggcaggtggatcacgaggtcaggagtccaagaccagcctgaccaataatggtgaaaccccgtctatactaaaaatacaaaaattagccaggcgtggtggtgtgtgcctgtattcccagctgctcgggaggctgagacacaagaattgcttgaacctggaaggcagaggttgtggtgagtcgagatcgtgccactgcactccagtctgggcaacagagaaagaccccatctcaaaaaaaaaaaaaaaagtaggaaag

SEQ ID NO: 324734 - DNA, 526 bp, Homo sapiens
taatgtagaattacctgactggaatttccttcaactgttcttccttggtgatcctgatctgttggctaaatcaacatctctaagttcttaaaagccaaataaacatgacctattaatagataatttagaaatgaaaacaagccagttaaaactgaaagcataagtctagatgttgtacattattctgtaggtttatttataatgttttgctatccttacaaagagttagaaggattggaaaatgtgttgctgatttaaatatatttccctcttcctttatgtgttatctgagggcaggaagatgtactgaattagctcttgagcttaaatactatccttagaaagcttaacccacattgagtacctcctgtacattgaagcatcatggacattccatgatgcgtacatgaggaatacaaagatgttgcagtgtctgacatttaggggctcaagacttgtgtcagataaacactaaaccttgacatgtaggtacaaatcatattgctgctccttgaattaagtttat

SEQ ID NO: 324735 - DNA, 4438 bp, Homo sapiens
atggggacgcagctcggagcgctagagagacgcggcggcgctggcagaagaggcggcggcgggcgggtactggcttctggggccaggggccaggggcggtgggcgccgggaccgcggagctgaggagcggggcccggccagggctggagactttgcgcccgggggcaccggggctgcgcgcggtcgcacacatccaccggcgcggcttccctcggcggcccgggctccgctcatcctgcggcgggcggcgccgctcaggggcgggaagaggaggcggtagacgcgaccacagaagatgtcgggccaaacgctcacggatcggatcgccgccgctcagtacagcgttacaggctctgctgtagcaagagcggtctgcaaagccactactcatgaagtaatgggccccaagaaaaagcacctggactatttgatccaggctaccaacgagaccaatgttaatattcctcagatggccgacactctctttgagcgggcaacaaacagtagctgggtggttgtgtttaaggctttagtgacaacacatcatctcatggtgcatggaaatgagagatttattcaatatttggcttctagaaatacactattcaatctcagcaattttttggacaaaagtggatcccatggttatgatatgtctaccttcataaggcgctatagtagatatttgaatgaaaaggctttttcttacagacagatggcctttgattttgccagggtgaagaaaggggccgatggtgtaatgaggacaatggctcccgaaaagctgctaaagagtatgccaatactacagggacaaattgatgcactgcttgaatttgatgtgcatccaaatgaactaacaaatggtgtcataaatgcagcatttatgcttcttttcaaagatcttatcaaactttttgcttgctacaatgatggtgttattaacttactcgaaaagttttttgaaatgaagaaaggacaatgtaaagatgctctagaaatttacaaacgatttctaactagaatgacacgagtgtctgaatttctcaaggttgcagagcaagttggtattgataaaggtgacattcctgacctcacacaggctcccagcagtcttatggagacgcttgaacagcatctaaatacattagaaggaaagaaacctggaaacaatgaaggatctggtgctccctctccattaagtaagtcttctccagccacaactgttacgtctcctaattctacaccagctaaaactattgacacatccccaccggttgatttatttgcaactgcatctgcggctgtcccagtcagcacttctaaaccatctagtgatctcctggacctccagccagacttttcctctggaggggcagcagcagccgcagcaccagcaccaccaccacctgctggaggagccactgcatggggagaccttttgggagaggattctttggctgcactttcctctgttccctctgaagcacagatttcagatccatttgcaccagaacctacccctcctactacaactgctgaaattgcaactgcctcagcttctgcctccactactacaactgttactgctgtcactgctgaagtggatctctttggagatgcctttgcagcttctcctggggaggcccctgcagcatccgaaggggccgccgcaccagctaccccaacccctgtagcagcagcacttgatgcatgttcaggaaatgacccctttgccccgtctgaaggtagtgcagaggctgcacctgagctggacctctttgcaatgaagccacctgagaccagtgttcctgtagttacccctacagctagcacagcccctccggttcccgcaactgctccttctcctgctcctgccgttgcagctgctgctgctgccactactgctgccaccgccgctgccaccaccactaccaccacctccgctgccaccgccaccactgctcctcctgctctagatatctttggtgatttatttgagtccactcctgaagttgctgcagcgcctaagccagatgctgctcctagcatagacctgtttagtacagatgctttctcctctccaccacaaggggcctctcctgtgcctgagagttctctcactgctgacctcttatctgtggatgcatttgcagcaccatctcctgcaaccactgcctcgccagcaaaggtggattcttcaggtgtcatagacctttttggggatgcatttggaagtagcgcttctgaaccccaacctgcatctcaggctgcttctagttcatcagcatcggcagacctactagctggatttgggggttctttcatggcgccttccccatctccagtgactccagctcagaataacctgctacagcccaattttgaggcagcttttgggacaacgccttcaacttccagcagcagctcctttgatccatcagtgtttgatggtctaggtgatcttttgatgccaaccatggcaccagctgggcagcctgcacctgtctcaatggtaccacccagtcctgcaatggcagccagcaaagcccttggaagtgatcttgattcatctcttgccagcttagtaggcaatcttggaatttctggtaccacaacaaaaaagggagatcttcagtggaatgctggagagaaaaagttgactggtggagccaactggcagcctaaagtagctccagcaacctggtcagcaggcgttccaccaagtgcacctttgcaaggagctgtacctccaaccagttcagttcctcctgttgccggggccccatcggttggacaacctggagcaggatttggaatgcctcctgctgggacaggcatgcccatgatgcctcagcagccggtcatgtttgcacagcccatgatgaggcccccctttggagctgccgctgtacctggcacgcagctttctccaagccctacacctgccagtcagagtcccaagaaacctccagcaaaggacccattagcggatcttaacatcaaggatttcttgtaaacaatttaagctgcaatatttgtgactgaataggaaaataaatgagtttggagacttcaaataagattgatgctgagtttcaaagggagccaccagtaccaaacccaatacttactcataacttctcttccaaaatgtgtaacacagccgtgaaagtgaacattaggaatatgtactaccttagctgttatccctactcttgaaattgtagtgtatttggattatttgtgtattgtacgatgtaaacaatgaatggatgttactgatgccgttagtgcttttttggacttcacctgaggacagatgatgcagctgttgtgtggcgagctatttggaaagacgtctgtgtttttgaaggtttcaatgtacatataacttttgaacaaaccccaaactcttcccataaattatcttttcttctgtatctctgttacaagcgtagtgtgataataccagataataaggaaaacactcataaatatacaaaactttttcagtgtggagtacatttttccaatcacaggaacttcaactgttgtgagaaatgtttatttttgtggcactgtatatgttaagaaattttattttaaaaaatataaaggttaacgtccataataaatacttctctttgaagctaccttatcaagaacgaaaaatcgtatgggaagaatcccctatttatcactgctatattaaaatatatatattttaattatatttgacaggttttgcatctaaattgacctatttattcattcttgattaaatgcactgaaaagtaaagggtctgtttgtgtcatgttcatgaaaatgcggttagagaggtgctattcaagtgattctgaaggcaccccaaggtatatctgtaatttaaagattactgcaaatatctttactttactgtgggtttttagtacatctgttaatttagtgtttctttgtgtgttttgtagactagtgttcttccatccttcaactgagctcaaagtaggttttgttgtaacattgtgattaggatttaaactaattcagagaattgtatcttttactgtacatactgtattctttaagttttaatttgttgtcatactgtctgtgctgatggcttggcttaagattttgatgcataaatgaggtcactgttgatcagtgttgctagtagcttggcagctcttcataaaagcatattgggttggaaaggtgtttgcctatttttcaaattatttaatagatgtatggtaccatttaaaagtggttgtatctgaatttactgtggggataacatacactgtaatggggaaaaattacctaaaaccaatttcaaaatggctttctttgtatttcagtttaaaaacccagtgcatgtacgccctctgagatgcaataaacaccttgaacaaagaaatgcaaaaaataacg

SEQ ID NO: 324736 - DNA, 4357 bp, Homo sapiens
ctccttcttctccccgccggcttgccggggatgcttgcgcgaggcgccccctcgcctttaagctcccggccccggggggcggtgtgtgtgagtagctgggagggggccgcgaggcgctccgccgagggctcgtccgggtttgtccgccgccgtcacctgactcgtcggaggagccacagctgagaagaggaggcggtagacgcgaccacagaagatgtcgggccaaacgctcacggatcggatcgccgccgctcagtacagcgttacaggctctgctgtagcaagagcggtctgcaaagccactactcatgaagtaatgggccccaagaaaaagcacctggactatttgatccaggctaccaacgagaccaatgttaatattcctcagatggccgacactctctttgagcgggcaacaaacagtagctgggtggttgtgtttaaggctttagtgacaacacatcatctcatggtgcatggaaatgagagatttattcaatatttggcttctagaaatacactattcaatctcagcaattttttggacaaaagtggatcccatggttatgatatgtctaccttcataaggcgctatagtagatatttgaatgaaaaggctttttcttacagacagatggcctttgattttgccagggtgaagaaaggggccgatggtgtaatgaggacaatggctcccgaaaagctgctaaagagtatgccaatactacagggacaaattgatgcactgcttgaatttgatgtgcatccaaatgaactaacaaatggtgtcataaatgcagcatttatgcttcttttcaaagatcttatcaaactttttgcttgctacaatgatggtgttattaacttactcgaaaagttttttgaaatgaagaaaggacaatgtaaagatgctctagaaatttacaaacgatttctaactagaatgacacgagtgtctgaatttctcaaggttgcagagcaagttggtattgataaaggtgacattcctgacctcacacaggctcccagcagtcttatggagacgcttgaacagcatctaaatacattagaaggaaagaaacctggaaacaatgaaggatctggtgctccctctccattaagtaagtcttctccagccacaactgttacgtctcctaattctacaccagctaaaactattgacacatccccaccggttgatttatttgcaactgcatctgcggctgtcccagtcagcacttctaaaccatctagtgatctcctggacctccagccagacttttcctctggaggggcagcagcagccgcagcaccagcaccaccaccacctgctggaggagccactgcatggggagaccttttgggagaggattctttggctgcactttcctctgttccctctgaagcacagatttcagatccatttgcaccagaacctacccctcctactacaactgctgaaattgcaactgcctcagcttctgcctccactactacaactgttactgctgtcactgctgaagtggatctctttggagatgcctttgcagcttctcctggggaggcccctgcagcatccgaaggggccgccgcaccagctaccccaacccctgtagcagcagcacttgatgcatgttcaggaaatgacccctttgccccgtctgaaggtagtgcagaggctgcacctgagctggacctctttgcaatgaagccacctgagaccagtgttcctgtagttacccctacagctagcacagcccctccggttcccgcaactgctccttctcctgctcctgccgttgcagctgctgctgctgccactactgctgccaccgccgctgccaccaccactaccaccacctccgctgccaccgccaccactgctcctcctgctctagatatctttggtgatttatttgagtccactcctgaagttgctgcagcgcctaagccagatgctgctcctagcatagacctgtttagtacagatgctttctcctctccaccacaaggggcctctcctgtgcctgagagttctctcactgctgacctcttatctgtggatgcatttgcagcaccatctcctgcaaccactgcctcgccagcaaaggtggattcttcaggtgtcatagacctttttggggatgcatttggaagtagcgcttctgaaccccaacctgcatctcaggctgcttctagttcatcagcatcggcagacctactagctggatttgggggttctttcatggcgccttccccatctccagtgactccagctcagaataacctgctacagcccaattttgaggcagcttttgggacaacgccttcaacttccagcagcagctcctttgatccatcagtgtttgatggtctaggtgatcttttgatgccaaccatggcaccagctgggcagcctgcacctgtctcaatggtaccacccagtcctgcaatggcagccagcaaagcccttggaagtgatcttgattcatctcttgccagcttagtaggcaatcttggaatttctggtaccacaacaaaaaagggagatcttcagtggaatgctggagagaaaaagttgactggtggagccaactggcagcctaaagtagctccagcaacctggtcagcaggcgttccaccaagtgcacctttgcaaggagctgtacctccaaccagttcagttcctcctgttgccggggccccatcggttggacaacctggagcaggatttggaatgcctcctgctgggacaggcatgcccatgatgcctcagcagccggtcatgtttgcacagcccatgatgaggcccccctttggagctgccgctgtacctggcacgcagctttctccaagccctacacctgccagtcagagtcccaagaaacctccagcaaaggacccattagcggatcttaacatcaaggatttcttgtaaacaatttaagctgcaatatttgtgactgaataggaaaataaatgagtttggagacttcaaataagattgatgctgagtttcaaagggagccaccagtaccaaacccaatacttactcataacttctcttccaaaatgtgtaacacagccgtgaaagtgaacattaggaatatgtactaccttagctgttatccctactcttgaaattgtagtgtatttggattatttgtgtattgtacgatgtaaacaatgaatggatgttactgatgccgttagtgcttttttggacttcacctgaggacagatgatgcagctgttgtgtggcgagctatttggaaagacgtctgtgtttttgaaggtttcaatgtacatataacttttgaacaaaccccaaactcttcccataaattatcttttcttctgtatctctgttacaagcgtagtgtgataataccagataataaggaaaacactcataaatatacaaaactttttcagtgtggagtacatttttccaatcacaggaacttcaactgttgtgagaaatgtttatttttgtggcactgtatatgttaagaaattttattttaaaaaatataaaggttaacgtccataataaatacttctctttgaagctaccttatcaagaacgaaaaatcgtatgggaagaatcccctatttatcactgctatattaaaatatatatattttaattatatttgacaggttttgcatctaaattgacctatttattcattcttgattaaatgcactgaaaagtaaagggtctgtttgtgtcatgttcatgaaaatgcggttagagaggtgctattcaagtgattctgaaggcaccccaaggtatatctgtaatttaaagattactgcaaatatctttactttactgtgggtttttagtacatctgttaatttagtgtttctttgtgtgttttgtagactagtgttcttccatccttcaactgagctcaaagtaggttttgttgtaacattgtgattaggatttaaactaattcagagaattgtatcttttactgtacatactgtattctttaagttttaatttgttgtcatactgtctgtgctgatggcttggcttaagattttgatgcataaatgaggtcactgttgatcagtgttgctagtagcttggcagctcttcataaaagcatattgggttggaaaggtgtttgcctatttttcaaattatttaatagatgtatggtaccatttaaaagtggttgtatctgaatttactgtggggataacatacactgtaatggggaaaaattacctaaaaccaatttcaaaatggctttctttgtatttcagtttaaaaacccagtgcatgtacgccctctgagatgcaataaacaccttgaacaaagaaatgcaaaaaataacg

SEQ ID NO: 324737 - DNA, 4073 bp, Homo sapiens
agcccagtgcgtgccgggtgcggcgccagcagcggaggggcggcccggcgcccagcggagagccgctggctggaagaggaggcggtagacgcgaccacagaagatgtcgggccaaacgctcacggatcggatcgccgccgctcagtacagcgttacaggctctgctgtagcaagagcggtctgcaaagccactactcatgaagtaatgggccccaagaaaaagcacctggactatttgatccaggctaccaacgagaccaatgttaatattcctcagatggccgacactctctttgagcgggcaacaaacagtagctgggtggttgtgtttaaggctttagtgacaacacatcatctcatggtgcatggaaatgagagatttattcaatatttggcttctagaaatacactattcaatctcagcaattttttggacaaaagtggatcccatggttatgatatgtctaccttcataaggcgctatagtagatatttgaatgaaaaggctttttcttacagacagatggcctttgattttgccagggtgaagaaaggggccgatggtgtaatgaggacaatggctcccgaaaagctgctaaagagtatgccaatactacagggacaaattgatgcactgcttgaatttgatgtgcatccaaatgaactaacaaatggtgtcataaatgcagcatttatgcttcttttcaaagatcttatcaaactttttgcttgctacaatgatggtgttattaacttactcgaaaagttttttgaaatgaagaaaggacaatgtaaagatgctctagaaatttacaaacgatttctaactagaatgacacgagtgtctgaatttctcaaggttgcagagcaagttggtattgataaaggtgacattcctgacctcacacaggctcccagcagtcttatggagacgcttgaacagcatctaaatacattagaaggaaagaaacctggaaacaatgaaggatctggtgctccctctccattaagtaagtcttctccagccacaactgttacgtctcctaattctacaccagctaaaactattgacacatccccaccggttgatttatttgcaactgcatctgcggctgtcccagtcagcacttctaaaccatctagtgatctcctggacctccagccagacttttcctctggaggggcagcagcagccgcagcaccagcaccaccaccacctgctggaggagccactgcatggggagaccttttgggagaggattctttggctgcactttcctctgttccctctgaagcacagatttcagatccatttgcaccagaacctacccctcctactacaactgctgaaattgcaactgcctcagcttctgcctccactactacaactgttactgctgtcactgctgaagtggatctctttggagatgcctttgcagcttctcctggggaggcccctgcagcatccgaaggggccgccgcaccagctaccccaacccctgtagcagcagcacttgatgcatgttcaggaaatgacccctttgccccgtctgaaggtagtgcagaggctgcacctgagctggacctctttgcaatgaagccacctgagaccagtgttcctgtagttacccctacagctagcacagcccctccggttcccgcaactgctccttctcctgctcctgccgttgcagctgctgctgctgccactactgctgccaccgccgctgccaccaccactaccaccacctccgctgccaccgccaccactgctcctcctgctctagatatctttggtgatttatttgagtccactcctgaagttgctgcagcgcctaagccagatgctgctcctagcatagacctgtttagtacagatgctttctcctctccaccacaaggggcctctcctgtgcctgagagttctctcactgctgacctcttatctgtggatgcatttgcagcaccatctcctgcaaccactgcctcgccagcaaaggtggattcttcaggtgtcatagacctttttggggatgcatttggaagtagcgcttctgaaccccaacctgcatctcaggctgcttctagttcatcagcatcggcagacctactagctggatttgggggttctttcatggcgccttccccatctccagtgactccagctcagaataacctgctacagcccaattttgaggcagcttttgggacaacgccttcaacttccagcagcagctcctttgatccatcagtgtttgatggtctaggtgatcttttgatgccaaccatggcaccagctgggcagcctgcacctgtctcaatggtaccacccagtcctgcaatggcagccagcaaagcccttggaagtgatcttgattcatctcttgccagcttagtaggcaatcttggaatttctggtaccacaacaaaaaagggagatcttcagtggaatgctggagagaaaaagttgactggtggagccaactggcagcctaaagtagctccagcaacctggtcagcaggcgttccaccaagtgcacctttgcaaggagctgtacctccaaccagttcagttcctcctgttgccggggccccatcggttggacaacctggagcaggatttggaatgcctcctgctgggacaggcatgcccatgatgcctcagcagccggtcatgtttgcacagcccatgatgaggcccccctttggagctgccgctgtacctggcacgcagctttctccaagccctacacctgccagtcagagtcccaagaaacctccagcaaaggacccattagcggatcttaacatcaaggatttcttgtaaacaatttaagctgcaatatttgtgactgaataggaaaataaatgagtttggagacttcaaataagattgatgctgagtttcaaagggagccaccagtaccaaacccaatacttactcataacttctcttccaaaatgtgtaacacagccgtgaaagtgaacattaggaatatgtactaccttagctgttatccctactcttgaaattgtagtgtatttggattatttgtgtattgtacgatgtaaacaatgaatggatgttactgatgccgttagtgcttttttggacttcacctgaggacagatgatgcagctgttgtgtggcgagctatttggaaagacgtctgtgtttttgaaggtttcaatgtacatataacttttgaacaaaccccaaactcttcccataaattatcttttcttctgtatctctgttacaagcgtagtgtgataataccagataataaggaaaacactcataaatatacaaaactttttcagtgtggagtacatttttccaatcacaggaacttcaactgttgtgagaaatgtttatttttgtggcactgtatatgttaagaaattttattttaaaaaatataaaggttaacgtccataataaatacttctctttgaagctaccttatcaagaacgaaaaatcgtatgggaagaatcccctatttatcactgctatattaaaatatatatattttaattatatttgacaggttttgcatctaaattgacctatttattcattcttgattaaatgcactgaaaagtaaagggtctgtttgtgtcatgttcatgaaaatgcggttagagaggtgctattcaagtgattctgaaggcaccccaaggtatatctgtaatttaaagattactgcaaatatctttactttactgtgggtttttagtacatctgttaatttagtgtttctttgtgtgttttgtagactagtgttcttccatccttcaactgagctcaaagtaggttttgttgtaacattgtgattaggatttaaactaattcagagaattgtatcttttactgtacatactgtattctttaagttttaatttgttgtcatactgtctgtgctgatggcttggcttaagattttgatgcataaatgaggtcactgttgatcagtgttgctagtagcttggcagctcttcataaaagcatattgggttggaaaggtgtttgcctatttttcaaattatttaatagatgtatggtaccatt

SEQ ID NO: 324738 - DNA, 4143 bp, Homo sapiens
agcccagtgcgtgccgggtgcggcgccagcagcggaggggcggcccggcgcccagcggagagccgctggctggaagaggaggcggtagacgcgaccacagaagatgtcgggccaaacgctcacggatcggatcgccgccgctcagtacagcgttacaggctctgctgtagcaagagcggtctgcaaagccactactcatgaagtaatgggccccaagaaaaagcacctggactatttgatccaggctaccaacgagaccaatgttaatattcctcagatggccgacactctctttgagcgggcaacaaacagtagctgggtggttgtgtttaaggctttagtgacaacacatcatctcatggtgcatggaaatgagagatttattcaatatttggcttctagaaatacactattcaatctcagcaattttttggacaaaagtggatcccatggttatgatatgtctaccttcataaggcgctatagtagatatttgaatgaaaaggctttttcttacagacagatggcctttgattttgccagggtgaagaaaggggccgatggtgtaatgaggacaatggctcccgaaaagctgctaaagagtatgccaatactacagggacaaattgatgcactgcttgaatttgatgtgcatccaaatgaactaacaaatggtgtcataaatgcagcatttatgcttcttttcaaagatcttatcaaactttttgcttgctacaatgatggtgttattaacttactcgaaaagttttttgaaatgaagaaaggacaatgtaaagatgctctagaaatttacaaacgatttctaactagaatgacacgagtgtctgaatttctcaaggttgcagagcaagttggtattgataaaggtgacattcctgacctcacacaggctcccagcagtcttatggagacgcttgaacagcatctaaatacattagaaggaaagaaacctggaaacaatgaaggatctggtgctccctctccattaagtaagtcttctccagccacaactgttacgtctcctaattctacaccagctaaaactattgacacatccccaccggttgatttatttgcaactgcatctgcggctgtcccagtcagcacttctaaaccatctagtgatctcctggacctccagccagacttttcctctggaggggcagcagcagccgcagcaccagcaccaccaccacctgctggaggagccactgcatggggagaccttttgggagaggattctttggctgcactttcctctgttccctctgaagcacagatttcagatccatttgcaccagaacctacccctcctactacaactgctgaaattgcaactgcctcagcttctgcctccactactacaactgttactgctgtcactgctgaagtggatctctttggagatgcctttgcagcttctcctggggaggcccctgcagcatccgaaggggccgccgcaccagctaccccaacccctgtagcagcagcacttgatgcatgttcaggaaatgacccctttgccccgtctgaaggtagtgcagaggctgcacctgagctggacctctttgcaatgaagccacctgagaccagtgttcctgtagttacccctacagctagcacagcccctccggttcccgcaactgctccttctcctgctcctgccgttgcagctgctgctgctgccactactgctgccaccgccgctgccaccaccactaccaccacctccgctgccaccgccaccactgctcctcctgctctagatatctttggtgatttatttgagtccactcctgaagttgctgcagcgcctaagccagatgctgctcctagcatagacctgtttagtacagatgctttctcctctccaccacaaggggcctctcctgtgcctgagagttctctcactgctgacctcttatctgtggatgcatttgcagcaccatctcctgcaaccactgcctcgccagcaaaggtggattcttcaggtgtcatagacctttttggggatgcatttggaagtagcgcttctgaaccccaacctgcatctcaggctgcttctagttcatcagcatcggcagacctactagctggatttgggggttctttcatggcgccttccccatctccagtgactccagctcagaataacctgctacagcccaattttgaggcagcttttgggacaacgccttcaacttccagcagcagctcctttgatccatcagtgtttgatggtctaggtgatcttttgatgccaaccatggcaccagctgggcagcctgcacctgtctcaatggtaccacccagtcctgcaatggcagccagcaaagcccttggaagtgatcttgattcatctcttgccagcttagtaggcaatcttggaatttctggtaccacaacaaaaaagggagatcttcagtggaatgctggagagaaaaagttgactggtggagccaactggcagcctaaagtagctccagcaacctggtcagcaggcgttccaccaagtgcacctttgcaaggagctgtacctccaaccagttcagttcctcctgttgccggggccccatcggttggacaacctggagcaggatttggaatgcctcctgctgggacaggcatgcccatgatgcctcagcagccggtcatgtttgcacagcccatgatgaggcccccctttggagctgccgctgtacctggcacgcagctgcaatatttgtgactgaataggaaaataaatgagtttggagacttcaaataagattgatgctgagtttcaaagggagccaccagtaccaaacccaatacttactcataacttctcttccaaaatgtgtaacacagccgtgaaagtgaacattaggaatatgtactaccttagctgttatccctactcttgaaattgtagtgtatttggattatttgtgtattgtacgatgtaaacaatgaatggatgttactgatgccgttagtgcttttttggacttcacctgaggacagatgatgcagctgttgtgtggcgagctatttggaaagacgtctgtgtttttgaaggtttcaatgtacatataacttttgaacaaaccccaaactcttcccataaattatcttttcttctgtatctctgttacaagcgtagtgtgataataccagataataaggaaaacactcataaatatacaaaactttttcagtgtggagtacatttttccaatcacaggaacttcaactgttgtgagaaatgtttatttttgtggcactgtatatgttaagaaattttattttaaaaaatataaaggttaacgtccataataaatacttctctttgaagctaccttatcaagaacgaaaaatcgtatgggaagaatcccctatttatcactgctatattaaaatatatatattttaattatatttgacaggttttgcatctaaattgacctatttattcattcttgattaaatgcactgaaaagtaaagggtctgtttgtgtcatgttcatgaaaatgcggttagagaggtgctattcaagtgattctgaaggcaccccaaggtatatctgtaatttaaagattactgcaaatatctttactttactgtgggtttttagtacatctgttaatttagtgtttctttgtgtgttttgtagactagtgttcttccatccttcaactgagctcaaagtaggttttgttgtaacattgtgattaggatttaaactaattcagagaattgtatcttttactgtacatactgtattctttaagttttaatttgttgtcatactgtctgtgctgatggcttggcttaagattttgatgcataaatgaggtcactgttgatcagtgttgctagtagcttggcagctcttcataaaagcatattgggttggaaaggtgtttgcctatttttcaaattatttaatagatgtatggtaccatttaaaagtggttgtatctgaatttactgtggggataacatacactgtaatggggaaaaattacctaaaaccaatttcaaaatggctttctttgtatttcagtttaaaaacccagtgcatgtacgccctctgagatgcaataaacaccttgaacaaagaaatgcaaaaaataacg

SEQ ID NO: 324739 - DNA, 3005 bp, Homo sapiens
gtctctggtgaaatatagattctttggctgcactttcctctgttccctctgaagcacagatttcagatccatttgcaccagaacctacccctcctactacaactgctgaaattgcaactgcctcagcttctgcctccactactacaactgttactgctgtcactgctgaagtggatctctttggagatgcctttgcagcttctcctggggaggcccctgcagcatccgaaggggccgccgcaccagctaccccaacccctgtagcagcagcacttgatgcatgttcaggaaatgacccctttgccccgtctgaaggtagtgcagaggctgcacctgagctggacctctttgcaatgaagccacctgagaccagtgttcctgtagttacccctacagctagcacagcccctccggttcccgcaactgctccttctcctgctcctgccgttgcagctgctgctgctgccactactgctgccaccgccgctgccaccaccactaccaccacctccgctgccaccgccaccactgctcctcctgctctagatatctttggtgatttatttgagtccactcctgaagttgctgcagcgcctaagccagatgctgctcctagcatagacctgtttagtacagatgctttctcctctccaccacaaggggcctctcctgtgcctgagagttctctcactgctgacctcttatctgtggatgcatttgcagcaccatctcctgcaaccactgcctcgccagcaaaggtggattcttcaggtgtcatagacctttttggggatgcatttggaagtagcgcttctgaaccccaacctgcatctcaggctgcttctagttcatcagcatcggcagacctactagctggatttgggggttctttcatggcgccttccccatctccagtgactccagctcagaataacctgctacagcccaattttgaggcagcttttgggacaacgccttcaacttccagcagcagctcctttgatccatcagtgtttgatggtctaggtgatcttttgatgccaaccatggcaccagctgggcagcctgcacctgtctcaatggtaccacccagtcctgcaatggcagccagcaaagcccttggaagtgatcttgattcatctcttgccagcttagtaggcaatcttggaatttctggtaccacaacaaaaaagggagatcttcagtggaatgctggagagaaaaagttgactggtggagccaactggcagcctaaagtagctccagcaacctggtcagcaggcgttccaccaagtgcacctttgcaaggagctgtacctccaaccagttcagttcctcctgttgccggggccccatcggttggacaacctggagcaggatttggaatgcctcctgctgggacaggcatgcccatgatgcctcagcagccggtcatgtttgcacagcccatgatgaggcccccctttggagctgccgctgtacctggcacgcagctttctccaagccctacacctgccagtcagagtcccaagaaacctccagcaaaggacccattagcggatcttaacatcaaggatttcttgtaaacaatttaagctgcaatatttgtgactgaataggaaaataaatgagtttggagacttcaaataagattgatgctgagtttcaaagggagccaccagtaccaaacccaatacttactcataacttctcttccaaaatgtgtaacacagccgtgaaagtgaacattaggaatatgtactaccttagctgttatccctactcttgaaattgtagtgtatttggattatttgtgtattgtacgatgtaaacaatgaatggatgttactgatgccgttagtgcttttttggacttcacctgaggacagatgatgcagctgttgtgtggcgagctatttggaaagacgtctgtgtttttgaaggtttcaatgtacatataacttttgaacaaaccccaaactcttcccataaattatcttttcttctgtatctctgttacaagcgtagtgtgataataccagataataaggaaaacactcataaatatacaaaactttttcagtgtggagtacatttttccaatcacaggaacttcaactgttgtgagaaatgtttatttttgtggcactgtatatgttaagaaattttattttaaaaaatataaaggttaacgtccataataaatacttctctttgaagctaccttatcaagaacgaaaaatcgtatgggaagaatcccctatttatcactgctatattaaaatatatatattttaattatatttgacaggttttgcatctaaattgacctatttattcattcttgattaaatgcactgaaaagtaaagggtctgtttgtgtcatgttcatgaaaatgcggttagagaggtgctattcaagtgattctgaaggcaccccaaggtatatctgtaatttaaagattactgcaaatatctttactttactgtgggtttttagtacatctgttaatttagtgtttctttgtgtgttttgtagactagtgttcttccatccttcaactgagctcaaagtaggttttgttgtaacattgtgattaggatttaaactaattcagagaattgtatcttttactgtacatactgtattctttaagttttaatttgttgtcatactgtctgtgctgatggcttggcttaagattttgatgcataaatgaggtcactgttgatcagtgttgctagtagcttggcagctcttcataaaagcatattgggttggaaaggtgtttgcctatttttcaaattatttaatagatgtatggtaccatttaaaagtggttgtatctgaatttactgtggggataacatacactgtaatggggaaaaattacctaaaaccaatttcaaaatggctttctttgtatttcagtttaaaaacccagtgcatgtacgccctctgagatgcaataaacaccttgaacaaagaaatgcaaaaaataacg

SEQ ID NO: 324740 - DNA, 2867 bp, Homo sapiens
atggggacgcagctcggagcgctagagagacgcggcggcgctggcagaagaggcggcggcgggcggctggggaggcccctgcagcatccgaaggggccgccgcaccagctaccccaacccctgtagcagcagcacttgatgcatgttcaggaaatgacccctttgccccgtctgaaggtagtgcagaggctgcacctgagctggacctctttgcaatgaagccacctgagaccagtgttcctgtagttacccctacagctagcacagcccctccggttcccgcaactgctccttctcctgctcctgccgttgcagctgctgctgctgccactactgctgccaccgccgctgccaccaccactaccaccacctccgctgccaccgccaccactgctcctcctgctctagatatctttggtgatttatttgagtccactcctgaagttgctgcagcgcctaagccagatgctgctcctagcatagacctgtttagtacagatgctttctcctctccaccacaaggggcctctcctgtgcctgagagttctctcactgctgacctcttatctgtggatgcatttgcagcaccatctcctgcaaccactgcctcgccagcaaaggtggattcttcaggtgtcatagacctttttggggatgcatttggaagtagcgcttctgaaccccaacctgcatctcaggctgcttctagttcatcagcatcggcagacctactagctggatttgggggttctttcatggcgccttccccatctccagtgactccagctcagaataacctgctacagcccaattttgaggcagcttttgggacaacgccttcaacttccagcagcagctcctttgatccatcagtgtttgatggtctaggtgatcttttgatgccaaccatggcaccagctgggcagcctgcacctgtctcaatggtaccacccagtcctgcaatggcagccagcaaagcccttggaagtgatcttgattcatctcttgccagcttagtaggcaatcttggaatttctggtaccacaacaaaaaagggagatcttcagtggaatgctggagagaaaaagttgactggtggagccaactggcagcctaaagtagctccagcaacctggtcagcaggcgttccaccaagtgcacctttgcaaggagctgtacctccaaccagttcagttcctcctgttgccggggccccatcggttggacaacctggagcaggatttggaatgcctcctgctgggacaggcatgcccatgatgcctcagcagccggtcatgtttgcacagcccatgatgaggcccccctttggagctgccgctgtacctggcacgcagctttctccaagccctacacctgccagtcagagtcccaagaaacctccagcaaaggacccattagcggatcttaacatcaaggatttcttgtaaacaatttaagctgcaatatttgtgactgaataggaaaataaatgagtttggagacttcaaataagattgatgctgagtttcaaagggagccaccagtaccaaacccaatacttactcataacttctcttccaaaatgtgtaacacagccgtgaaagtgaacattaggaatatgtactaccttagctgttatccctactcttgaaattgtagtgtatttggattatttgtgtattgtacgatgtaaacaatgaatggatgttactgatgccgttagtgcttttttggacttcacctgaggacagatgatgcagctgttgtgtggcgagctatttggaaagacgtctgtgtttttgaaggtttcaatgtacatataacttttgaacaaaccccaaactcttcccataaattatcttttcttctgtatctctgttacaagcgtagtgtgataataccagataataaggaaaacactcataaatatacaaaactttttcagtgtggagtacatttttccaatcacaggaacttcaactgttgtgagaaatgtttatttttgtggcactgtatatgttaagaaattttattttaaaaaatataaaggttaacgtccataataaatacttctctttgaagctaccttatcaagaacgaaaaatcgtatgggaagaatcccctatttatcactgctatattaaaatatatatattttaattatatttgacaggttttgcatctaaattgacctatttattcattcttgattaaatgcactgaaaagtaaagggtctgtttgtgtcatgttcatgaaaatgcggttagagaggtgctattcaagtgattctgaaggcaccccaaggtatatctgtaatttaaagattactgcaaatatctttactttactgtgggtttttagtacatctgttaatttagtgtttctttgtgtgttttgtagactagtgttcttccatccttcaactgagctcaaagtaggttttgttgtaacattgtgattaggatttaaactaattcagagaattgtatcttttactgtacatactgtattctttaagttttaatttgttgtcatactgtctgtgctgatggcttggcttaagattttgatgcataaatgaggtcactgttgatcagtgttgctagtagcttggcagctcttcataaaagcatattgggttggaaaggtgtttgcctatttttcaaattatttaatagatgtatggtaccatttaaaagtggttgtatctgaatttactgtggggataacatacactgtaatggggaaaaattacctaaaaccaatttcaaaatggctttctttgtatttcagtttaaaaacccagtgcatgtacgccctctgagatgcaataaacaccttgaacaaagaaatgcaaaaaataacg

SEQ ID NO: 324741 - DNA, 1754 bp, Homo sapiens
agcccagtgcgtgccgggtgcggcgccagcagcggaggggcggcccggcgcccagcggagagccgctggctggaagaggaggcggtagacgcgaccacagaagatgtcgggccaaacgctcacggatcggatcgccgccgctcagtacagcgttacaggctctgctgtagcaagagcggtctgcaaagccactactcatgaagtaatgggccccaagaaaaagcacctggactatttgatccaggctaccaacgagaccaatgttaatattcctcagatggccgacactctctttgagcgggcaacaaacagtagctgggtggttgtgtttaaggctttagtgacaacacatcatctcatggtgcatggaaatgagagatttattcaatatttggcttctagaaatacactattcaatctcagcaattttttggacaaaagtggatcccatggttatgatatgtctaccttcataaggcgctatagtagatatttgaatgaaaaggctttttcttacagacagatggcctttgattttgccagggtgaagaaaggggccgatggtgtaatgaggacaatggctcccgaaaagctgctaaagagtatgccaatactacagggacaaattgatgcactgcttgaatttgatgtgcatccaaatgaactaacaaatggtgtcataaatgcagcatttatgcttcttttcaaagatcttatcaaactttttgcttgctacaatgatggtgttattaacttactcgaaaagttttttgaaatgaagaaaggacaatgtaaagatgctctagaaatttacaaacgatttctaactagaatgacacgagtgtctgaatttctcaaggttgcagagcaagttggtattgataaaggtgacattcctgacctcacacaggctcccagcagtcttatggagacgcttgaacagcatctaaatacattagaaggaaagaaacctggaaacaatgaaggatctggtgctccctctccattaagtaagtcttctccagccacaactgttacgtctcctaattctacaccagctaaaactattgacacatccccaccggttgatttatttgcaactgcatctgcggctgtcccagtcagcacttctaaaccatctagtgatctcctggacctccagccagacttttcctctggaggggcagcagcagccgcagcaccagcaccaccaccacctgctggaggagccactgcatggggagaccttttgggagaggattctttggctgcactttcctctgttccctctgaagcacagatttcagatccatttgcaccagaacctacccctcctactacaactgctgaaattgcaactgcctcagcttctgcctccactactacaactgttactgctgtcactgctgaagtggatctctttggagatgcctttgcagcttctcctggggaggcccctgcagcatccgaaggggccgccgcaccagctaccccaacccctgtagcagcagcacttgatgcatgttcaggaaatgacccctttgccccgtctgaaggtagtgcagaggctgcacctgagctggacctctttgcaatgaagccacctgagaccagtgttcctgtagttacccctacagctagcacagcccctccggttcccgcaactgctccttctcctgctcctgccgttgcagctgctgctgctgccactactgctgccgagtccgctgcattgggatcctctagacgaggga

SEQ ID NO: 324742 - DNA, 98 bp, Homo sapiens
actttgatttcagctttctactacttacctctgcttggttttggtttgtttcacttttggaagatgctttctcctctccaccacaaggggcctctcct

SEQ ID NO: 324743 - DNA, 550 bp, Homo sapiens
gttctggagagcgtgtattttaaaacccgtttgcttttccttaactgttaagattgtctacagtctttctgcctggagtgaaccatgaaatcccaagatgccatttgtcaaggctcatggttttcttttcccttgggtgacatgcactttttcctgtctgtgcttcactgcagtggatgcatttgcagcaccatctcctgcaaccactgcctcgccagcaaaggtggattcttcaggtgtcatagacctttttgggggtgcgtatttctcctccatcaacacttaaggaatctttttttcttcagaataatttttaaatctattttattatatttcatcattttttctttaggctatataaaattctgtctcttaaatgtaaacttaagtttttaagatcattttcatttcttcgtcatcatcatcttcatcctcatcatttcatcataactttcagtgcatgacctaacaaaacacataatttttcacttggtgttttcaactttttgttcttcatcctaatgtagaattacctgactggaatttcctt

SEQ ID NO: 324744 - DNA, 582 bp, Homo sapiens
  misc_feature (30)..(30): n is a, c, g, or t
tctagaggatcccaatgcagcggactcggnacagcacaccaccacctgctggaggagccactgcatggggagaccttttgggagaggattctttggctgcactttcctctgttccctctgaagcacagatttcagatccatttgcaccagaacctacccctcctactacaactgctgaaattgcaactgcctcagcttctgcctccactactacaactgttactgctgtcactgctgaagtggatctctttggagatgcctttgcagcttctcctggggaggcccctgcagcatccgaaggggccgccgcaccagctaccccaacccctgtagcagcagcacttgatgcatgttcaggaaatgacccctttgccccgtctgaaggtagtgcagaggctgcacctgagctggacctctttgcaatgaagccacctgagaccagtgttcctgtagttacccctacagctagcacagcccctccggttcccgcaactgctccttctcctgctcctgccgttgcagctgctgctgctgccactactgctgccgagtccgctgcattgggatcctctagacgaggga

SEQ ID NO: 324745 - DNA, 4246 bp, Homo sapiens
agcccagtgcgtgccgggtgcggcgccagcagcggaggggcggcccggcgcccagcggagagccgctggctggaagaggaggcggtagacgcgaccacagaagatgtcgggccaaacgctcacggatcggatcgccgccgctcagtacagcgttacaggctctgctgtagcaagagcggtctgcaaagccactactcatgaagtaatgggccccaagaaaaagcacctggactatttgatccaggctaccaacgagaccaatgttaatattcctcagatggccgacactctctttgagcgggcaacaaacagtagctgggtggttgtgtttaaggctttagtgacaacacatcatctcatggtgcatggaaatgagagatttattcaatatttggcttctagaaatacactattcaatctcagcaattttttggacaaaagtggatcccatggttatgatatgtctaccttcataaggcgctatagtagatatttgaatgaaaaggctttttcttacagacagatggcctttgattttgccagggtgaagaaaggggccgatggtgtaatgaggacaatggctcccgaaaagctgctaaagagtatgccaatactacagggacaaattgatgcactgcttgaatttgatgtgcatccaaatgaactaacaaatggtgtcataaatgcagcatttatgcttcttttcaaagatcttatcaaactttttgcttgctacaatgatggtgttattaacttactcgaaaagttttttgaaatgaagaaaggacaatgtaaagatgctctagaaatttacaaacgatttctaactagaatgacacgagtgtctgaatttctcaaggttgcagagcaagttggtattgataaaggtgacattcctgacctcacacaggctcccagcagtcttatggagacgcttgaacagcatctaaatacattagaaggaaagaaacctggaaacaatgaaggatctggtgctccctctccattaagtaagtcttctccagccacaactgttacgtctcctaattctacaccagctaaaactattgacacatccccaccggttgatttatttgcaactgcatctgcggctgtcccagtcagcacttctaaaccatctagtgatctcctggacctccagccagacttttcctctggaggggcagcagcagccgcagcaccagcaccaccaccacctgctggaggagccactgcatggggagaccttttgggagaggattctttggctgcactttcctctgttccctctgaagcacagatttcagatccatttgcaccagaacctacccctcctactacaactgctgaaattgcaactgcctcagcttctgcctccactactacaactgttactgctgtcactgctgaagtggatctctttggagatgcctttgcagcttctcctggggaggcccctgcagcatccgaaggggccgccgcaccagctaccccaacccctgtagcagcagcacttgatgcatgttcaggaaatgacccctttgccccgtctgaaggtagtgcagaggctgcacctgagctggacctctttgcaatgaagccacctgagaccagtgttcctgtagttacccctacagctagcacagcccctccggttcccgcaactgctccttctcctgctcctgccgttgcagctgctgctgctgccactactgctgccaccgccgctgccaccaccactaccaccacctccgctgccaccgccaccactgctcctcctgctctagatatctttggtgatttatttgagtccactcctgaagttgctgcagcgcctaagccagatgctgctcctagcatagacctgtttagtacagatgctttctcctctccaccacaaggggcctctcctgtgcctgagagttctctcactgctgacctcttatctgtggatgcatttgcagcaccatctcctgcaaccactgcctcgccagcaaaggtggattcttcaggtgtcatagacctttttggggatgcatttggaagtagcgcttctgaaccccaacctgcatctcaggctgcttctagttcatcagcatcggcagacctactagctggatttgggggttctttcatggcgccttccccatctccagtgactccagctcagaataacctgctacagcccaattttgaggcagcttttgggacaacgccttcaacttccagcagcagctcctttgatccatcagtgtttgatggtctaggtgatcttttgatgccaaccatggcaccagctgggcagcctgcacctgtctcaatggtaccacccagtcctgcaatggcagccagcaaagcccttggaagtgatcttgattcatctcttgccagcttagtaggcaatcttggaatttctggtaccacaacaaaaaagggagatcttcagtggaatgctggagagaaaaagttgactggtggagccaactggcagcctaaagtagctccagcaacctggtcagcaggcgttccaccaagtgcacctttgcaaggagctgtacctccaaccagttcagttcctcctgttgccggggccccatcggttggacaacctggagcaggatttggaatgcctcctgctgggacaggcatgcccatgatgcctcagcagccggtcatgtttgcacagcccatgatgaggcccccctttggagctgccgctgtacctggcacgcagctttctccaagccctacacctgccagtcagagtcccaagaaacctccagcaaaggacccattagcggatcttaacatcaaggatttcttgtaaacaatttaagctgcaatatttgtgactgaataggaaaataaatgagtttggagacttcaaataagattgatgctgagtttcaaagggagccaccagtaccaaacccaatacttactcataacttctcttccaaaatgtgtaacacagccgtgaaagtgaacattaggaatatgtactaccttagctgttatccctactcttgaaattgtagtgtatttggattatttgtgtattgtacgatgtaaacaatgaatggatgttactgatgccgttagtgcttttttggacttcacctgaggacagatgatgcagctgttgtgtggcgagctatttggaaagacgtctgtgtttttgaaggtttcaatgtacatataacttttgaacaaaccccaaactcttcccataaattatcttttcttctgtatctctgttacaagcgtagtgtgataataccagataataaggaaaacactcataaatatacaaaactttttcagtgtggagtacatttttccaatcacaggaacttcaactgttgtgagaaatgtttatttttgtggcactgtatatgttaagaaattttattttaaaaaatataaaggttaacgtccataataaatacttctctttgaagctaccttatcaagaacgaaaaatcgtatgggaagaatcccctatttatcactgctatattaaaatatatatattttaattatatttgacaggttttgcatctaaattgacctatttattcattcttgattaaatgcactgaaaagtaaagggtctgtttgtgtcatgttcatgaaaatgcggttagagaggtgctattcaagtgattctgaaggcaccccaaggtatatctgtaatttaaagattactgcaaatatctttactttactgtgggtttttagtacatctgttaatttagtgtttctttgtgtgttttgtagactagtgttcttccatccttcaactgagctcaaagtaggttttgttgtaacattgtgattaggatttaaactaattcagagaattgtatcttttactgtacatactgtattctttaagttttaatttgttgtcatactgtctgtgctgatggcttggcttaagattttgatgcataaatgaggtcactgttgatcagtgttgctagtagcttggcagctcttcataaaagcatattgggttggaaaggtgtttgcctatttttcaaattatttaatagatgtatggtaccatttaaaagtggttgtatctgaatttactgtggggataacatacactgtaatggggaaaaattacctaaaaccaatttcaaaatggctttctttgtatttcagtttaaaaacccagtgcatgtacgccctctgagatgcaataaacaccttgaacaaagaaatgcaaaaaataacg

SEQ ID NO: 324746 - DNA, 4134 bp, Homo sapiens
agcccagtgcgtgccgggtgcggcgccagcagcggaggggcggcccggcgcccagcggagagccgctggctggaagaggaggcggtagacgcgaccacagaagatgtcgggccaaacgctcacggatcggatcgccgccgctcagtacagcgttacaggctctgctgtagcaagagcggtctgcaaagccactactcatgaagtaatgggccccaagaaaaagcacctggactatttgatccaggctaccaacgagaccaatgttaatattcctcagatggccgacactctctttgagcgggcaacaaacagtagctgggtggttgtgtttaaggctttagtgacaacacatcatctcatggtgcatggaaatgagagatttattcaatatttggcttctagaaatacactattcaatctcagcaattttttggacaaaagtggatcccatggttatgatatgtctaccttcataaggcgctatagtagatatttgaatgaaaaggctttttcttacagacagatggcctttgattttgccagggtgaagaaaggggccgatggtgtaatgaggacaatggctcccgaaaagctgctaaagagtatgccaatactacagggacaaattgatgcactgcttgaatttgatgtgcatccaaatgaactaacaaatggtgtcataaatgcagcatttatgcttcttttcaaagatcttatcaaactttttgcttgctacaatgatggtgttattaacttactcgaaaagttttttgaaatgaagaaaggacaatgtaaagatgctctagaaatttacaaacgatttctaactagaatgacacgagtgtctgaatttctcaaggttgcagagcaagttggtattgataaaggtgacattcctgacctcacacaggctcccagcagtcttatggagacgcttgaacagcatctaaatacattagaaggaaagaaacctggaaacaatgaaggatctggtgctccctctccattaagtaagtcttctccagccacaactgttacgtctcctaattctacaccagctaaaactattgacacatccccaccggttgatttatttgcaactgcatctgcggctgtcccagtcagcacttctaaaccatctagtgatctcctggacctccagccagacttttcctctggaggggcagcagcagccgcagcaccagcaccaccaccacctgctggaggagccactgcatggggagaccttttgggagaggattctttggctgcactttcctctgttccctctgaagcacagatttcagatccatttgcaccagaacctacccctcctactacaactgctgaaattgcaactgcctcagcttctgcctccactactacaactgttactgctgtcactgctgaagtggatctctttggagatgcctttgcagcttctcctggggaggcccctgcagcatccgaaggggccgccgcaccagctaccccaacccctgtagcagcagcacttgatgcatgttcaggaaatgacccctttgccccgtctgaaggtagtgcagaggctgcacctgagctggacctctttgcaatgaagccacctgagaccagtgttcctgtagttacccctacagctagcacagcccctccggttcccgcaactgctccttctcctgctcctgccgttgcagctgctgctgctgccactactgctgccaccgccgctgccaccaccactaccaccacctccgctgccaccgccaccactgctcctcctgctctagatatctttggtgatttatttgagtccactcctgaagttgctgcagcgcctaagccagatgctgctcctagcatagacctgtttagtacagatgctttctcctctccaccacaaggggcctctcctgtgcctgagagttctctcactgctgacctcttatctgtggatgcatttgcagcaccatctcctgcaaccactgcctcgccagcaaaggtggattcttcaggtgtcatagacctttttggggatgcatttggaagtagcgcttctgaaccccaacctgcatctcaggctgcttctagttcatcagcatcggcagacctactagctggatttgggggttctttcatggcgccttccccatctccagtgactccagctcagaataacctgctacagcccaattttgaggcagcttttgggacaacgccttcaacttccagcagcagctcctttgatccatcagtgtttgatggtctaggtgatcttttgatgccaaccatggcaccagctgggcagcctgcacctgtctcaatggtaccacccagtcctgcaatggcagccagcaaagcccttggaagtgatcttgattcatctcttgccagcttagtaggcaatcttggaatttctggtaccacaacaaaaaacaaggagctgtacctccaaccagttcagttcctcctgttgccggggccccatcggttggacaacctggagcaggatttggaatgcctcctgctgggacaggcatgcccatgatgcctcagcagccggtcatgtttgcacagcccatgatgaggcccccctttggagctgccgctgtacctggcacgcagctttctccaagccctacacctgccagtcagagtcccaagaaacctccagcaaaggacccattagcggatcttaacatcaaggatttcttgtaaacaatttaagctgcaatatttgtgactgaataggaaaataaatgagtttggagacttcaaataagattgatgctgagtttcaaagggagccaccagtaccaaacccaatacttactcataacttctcttccaaaatgtgtaacacagccgtgaaagtgaacattaggaatatgtactaccttagctgttatccctactcttgaaattgtagtgtatttggattatttgtgtattgtacgatgtaaacaatgaatggatgttactgatgccgttagtgcttttttggacttcacctgaggacagatgatgcagctgttgtgtggcgagctatttggaaagacgtctgtgtttttgaaggtttcaatgtacatataacttttgaacaaaccccaaactcttcccataaattatcttttcttctgtatctctgttacaagcgtagtgtgataataccagataataaggaaaacactcataaatatacaaaactttttcagtgtggagtacatttttccaatcacaggaacttcaactgttgtgagaaatgtttatttttgtggcactgtatatgttaagaaattttattttaaaaaatataaaggttaacgtccataataaatacttctctttgaagctaccttatcaagaacgaaaaatcgtatgggaagaatcccctatttatcactgctatattaaaatatatatattttaattatatttgacaggttttgcatctaaattgacctatttattcattcttgattaaatgcactgaaaagtaaagggtctgtttgtgtcatgttcatgaaaatgcggttagagaggtgctattcaagtgattctgaaggcaccccaaggtatatctgtaatttaaagattactgcaaatatctttactttactgtgggtttttagtacatctgttaatttagtgtttctttgtgtgttttgtagactagtgttcttccatccttcaactgagctcaaagtaggttttgttgtaacattgtgattaggatttaaactaattcagagaattgtatcttttactgtacatactgtattctttaagttttaatttgttgtcatactgtctgtgctgatggcttggcttaagattttgatgcataaatgaggtcactgttgatcagtgttgctagtagcttggcagctcttcataaaagcatattgggttggaaaggtgtttgcctatttttcaaattatttaatagatgtatggtaccatttaaaagtggttgtatctgaatttactgtggggataacatacactgtaatggggaaaaattacctaaaaccaatttcaaaatggctttctttgtatttcagtttaaaaacccagtgcatgtacgccctctgagatgcaataaacaccttgaacaaagaaatgcaaaaaataacg

SEQ ID NO: 324747 - DNA, 3074 bp, Homo sapiens
  misc_feature (30)..(30): n is a, c, g, or t
tctagaggatcccaatgcagcggactcggnacagcacaccaccacctgctggaggagccactgcatggggagaccttttgggagaggattctttggctgcactttcctctgttccctctgaagcacagatttcagatccatttgcaccagaacctacccctcctactacaactgctgaaattgcaactgcctcagcttctgcctccactactacaactgttactgctgtcactgctgaagtggatctctttggagatgcctttgcagcttctcctggggaggcccctgcagcatccgaaggggccgccgcaccagctaccccaacccctgtagcagcagcacttgatgcatgttcaggaaatgacccctttgccccgtctgaaggtagtgcagaggctgcacctgagctggacctctttgcaatgaagccacctgagaccagtgttcctgtagttacccctacagctagcacagcccctccggttcccgcaactgctccttctcctgctcctgccgttgcagctgctgctgctgccactactgctgccaccgccgctgccaccaccactaccaccacctccgctgccaccgccaccactgctcctcctgctctagatatctttggtgatttatttgagtccactcctgaagttgctgcagcgcctaagccagatgctgctcctagcatagacctgtttagtacagatgctttctcctctccaccacaaggggcctctcctgtgcctgagagttctctcactgctgacctcttatctgtggatgcatttgcagcaccatctcctgcaaccactgcctcgccagcaaaggtggattcttcaggtgtcatagacctttttggggatgcatttggaagtagcgcttctgaaccccaacctgcatctcaggctgcttctagttcatcagcatcggcagacctactagctggatttgggggttctttcatggcgccttccccatctccagtgactccagctcagaataacctgctacagcccaattttgaggcagcttttgggacaacgccttcaacttccagcagcagctcctttgatccatcagtgtttgatggtctaggtgatcttttgatgccaaccatggcaccagctgggcagcctgcacctgtctcaatggtaccacccagtcctgcaatggcagccagcaaagcccttggaagtgatcttgattcatctcttgccagcttagtaggcaatcttggaatttctggtaccacaacaaaaaagggagatcttcagtggaatgctggagagaaaaagttgactggtggagccaactggcagcctaaagtagctccagcaacctggtcagcaggcgttccaccaagtgcacctttgcaaggagctgtacctccaaccagttcagttcctcctgttgccggggccccatcggttggacaacctggagcaggatttggaatgcctcctgctgggacaggcatgcccatgatgcctcagcagccggtcatgtttgcacagcccatgatgaggcccccctttggagctgccgctgtacctggcacgcagctttctccaagccctacacctgccagtcagagtcccaagaaacctccagcaaaggacccattagcggatcttaacatcaaggatttcttgtaaacaatttaagctgcaatatttgtgactgaataggaaaataaatgagtttggagacttcaaataagattgatgctgagtttcaaagggagccaccagtaccaaacccaatacttactcataacttctcttccaaaatgtgtaacacagccgtgaaagtgaacattaggaatatgtactaccttagctgttatccctactcttgaaattgtagtgtatttggattatttgtgtattgtacgatgtaaacaatgaatggatgttactgatgccgttagtgcttttttggacttcacctgaggacagatgatgcagctgttgtgtggcgagctatttggaaagacgtctgtgtttttgaaggtttcaatgtacatataacttttgaacaaaccccaaactcttcccataaattatcttttcttctgtatctctgttacaagcgtagtgtgataataccagataataaggaaaacactcataaatatacaaaactttttcagtgtggagtacatttttccaatcacaggaacttcaactgttgtgagaaatgtttatttttgtggcactgtatatgttaagaaattttattttaaaaaatataaaggttaacgtccataataaatacttctctttgaagctaccttatcaagaacgaaaaatcgtatgggaagaatcccctatttatcactgctatattaaaatatatatattttaattatatttgacaggttttgcatctaaattgacctatttattcattcttgattaaatgcactgaaaagtaaagggtctgtttgtgtcatgttcatgaaaatgcggttagagaggtgctattcaagtgattctgaaggcaccccaaggtatatctgtaatttaaagattactgcaaatatctttactttactgtgggtttttagtacatctgttaatttagtgtttctttgtgtgttttgtagactagtgttcttccatccttcaactgagctcaaagtaggttttgttgtaacattgtgattaggatttaaactaattcagagaattgtatcttttactgtacatactgtattctttaagttttaatttgttgtcatactgtctgtgctgatggcttggcttaagattttgatgcataaatgaggtcactgttgatcagtgttgctagtagcttggcagctcttcataaaagcatattgggttggaaaggtgtttgcctatttttcaaattatttaatagatgtatggtaccatttaaaagtggttgtatctgaatttactgtggggataacatacactgtaatggggaaaaattacctaaaaccaatttcaaaatggctttctttgtatttcagtttaaaaacccagtgcatgtacgccctctgagatgcaataaacaccttgaacaaagaaatgcaaaaaataacg

SEQ ID NO: 324748 - DNA, 2866 bp, Homo sapiens
ctctttttattcttttaatttctgctgttttaaaaaccgcacccaagatgcctttgcagcttctcctggggaggcccctgcagcatccgaaggggccgccgcaccagctaccccaacccctgtagcagcagcacttgatgcatgttcaggaaatgacccctttgccccgtctgaaggtagtgcagaggctgcacctgagctggacctctttgcaatgaagccacctgagaccagtgttcctgtagttacccctacagctagcacagcccctccggttcccgcaactgctccttctcctgctcctgccgttgcagctgctgctgctgccactactgctgccaccgccgctgccaccaccactaccaccacctccgctgccaccgccaccactgctcctcctgctctagatatctttggtgatttatttgagtccactcctgaagttgctgcagcgcctaagccagatgctgctcctagcatagacctgtttagtacagatgctttctcctctccaccacaaggggcctctcctgtgcctgagagttctctcactgctgacctcttatctgtggatgcatttgcagcaccatctcctgcaaccactgcctcgccagcaaaggtggattcttcaggtgtcatagacctttttggggatgcatttggaagtagcgcttctgaaccccaacctgcatctcaggctgcttctagttcatcagcatcggcagacctactagctggatttgggggttctttcatggcgccttccccatctccagtgactccagctcagaataacctgctacagcccaattttgaggcagcttttgggacaacgccttcaacttccagcagcagctcctttgatccatcagtgtttgatggtctaggtgatcttttgatgccaaccatggcaccagctgggcagcctgcacctgtctcaatggtaccacccagtcctgcaatggcagccagcaaagcccttggaagtgatcttgattcatctcttgccagcttagtaggcaatcttggaatttctggtaccacaacaaaaaagggagatcttcagtggaatgctggagagaaaaagttgactggtggagccaactggcagcctaaagtagctccagcaacctggtcagcaggcgttccaccaagtgcacctttgcaaggagctgtacctccaaccagttcagttcctcctgttgccggggccccatcggttggacaacctggagcaggatttggaatgcctcctgctgggacaggcatgcccatgatgcctcagcagccggtcatgtttgcacagcccatgatgaggcccccctttggagctgccgctgtacctggcacgcagctttctccaagccctacacctgccagtcagagtcccaagaaacctccagcaaaggacccattagcggatcttaacatcaaggatttcttgtaaacaatttaagctgcaatatttgtgactgaataggaaaataaatgagtttggagacttcaaataagattgatgctgagtttcaaagggagccaccagtaccaaacccaatacttactcataacttctcttccaaaatgtgtaacacagccgtgaaagtgaacattaggaatatgtactaccttagctgttatccctactcttgaaattgtagtgtatttggattatttgtgtattgtacgatgtaaacaatgaatggatgttactgatgccgttagtgcttttttggacttcacctgaggacagatgatgcagctgttgtgtggcgagctatttggaaagacgtctgtgtttttgaaggtttcaatgtacatataacttttgaacaaaccccaaactcttcccataaattatcttttcttctgtatctctgttacaagcgtagtgtgataataccagataataaggaaaacactcataaatatacaaaactttttcagtgtggagtacatttttccaatcacaggaacttcaactgttgtgagaaatgtttatttttgtggcactgtatatgttaagaaattttattttaaaaaatataaaggttaacgtccataataaatacttctctttgaagctaccttatcaagaacgaaaaatcgtatgggaagaatcccctatttatcactgctatattaaaatatatatattttaattatatttgacaggttttgcatctaaattgacctatttattcattcttgattaaatgcactgaaaagtaaagggtctgtttgtgtcatgttcatgaaaatgcggttagagaggtgctattcaagtgattctgaaggcaccccaaggtatatctgtaatttaaagattactgcaaatatctttactttactgtgggtttttagtacatctgttaatttagtgtttctttgtgtgttttgtagactagtgttcttccatccttcaactgagctcaaagtaggttttgttgtaacattgtgattaggatttaaactaattcagagaattgtatcttttactgtacatactgtattctttaagttttaatttgttgtcatactgtctgtgctgatggcttggcttaagattttgatgcataaatgaggtcactgttgatcagtgttgctagtagcttggcagctcttcataaaagcatattgggttggaaaggtgtttgcctatttttcaaattatttaatagatgtatggtaccatttaaaagtggttgtatctgaatttactgtggggataacatacactgtaatggggaaaaattacctaaaaccaatttcaaaatggctttctttgtatttcagtttaaaaacccagtgcatgtacgccctctgagatgcaataaacaccttgaacaaagaaatgcaaaaaataacg

SEQ ID NO: 324749 - DNA, 1074 bp, Homo sapiens
gaggagacttggcctccgcagctgccctccggccccccacggctgccgggttccggggtgcaagtgaagcagcctccccgcggaggccgcagcgccccgaccaggcctctttaagcgcaggccccgccccgggcgccaccgccccgccccgcggatcccgctcccgcaccgccatcatgatctgcctggtgctgaccatcttcgctaacctcttccccgcgggtgagccgcgcggcgcgggccgggggcgggtggccggtgctgggccggcctgacggcccgtccccgcctgccccgcagcctgcaccggcgcacacgaacgcaccttcctggccgtgaagccggacggcgtgcagcggcggctggtgggcgagattgtgcggcgcttcgagaggaagggcttcaagttggtggcgctgaagctggtgcagggcctccgaggagctgctgcgtgagcactacgccgagctgcgtgaacgcccgttctacggccgccttgtcaagtatatggcctccgggccggtggtggccatggtttggcaggggctggacgtggtgcgcacctcgcgggcgctcatcggagccacgaacccggccgacgccccgcccggcaccatccgcggggatttctgcatcgaggttggcaagaacctgattcacggcagcgactcggtggagagtgcccgccgcgagatcgctctctggttccgcgcagacgagctcctctgctgggaggacagcgctgggcactggctgtatgagtagcccggcagatgcgcgtcacagaggctctcacactccagcctcctccagggcccaggtgggcgggcttctggccccaccccacagcgcttggagcatccctttggacgggctgctgaacatccacctgtctggacgttgcatggagggtggcgcaggcctctccaatccctggcgtacagggtttcctgcccgaggagctgctccaggagcctgcgcggctcgcctggaaacgtgccaggacactgtcctggtgcccagcccaacgtggtccaacgtttttttataataaagtcctcgttttcgtttcgg

SEQ ID NO: 324750 - DNA, 835 bp, Homo sapiens
tatgggtagcgaggctgggtggccgtcccgcggcctgcaccggcgcacacgaacgcaccttcctggccgtgaagccggacggcgtgcagcggcggctggtgggcgagattgtgcggcgcttcgagaggaagggcttcaagttggtggcgctgaagctggtgcagggcctccgaggagctgctgcgtgagcactacgccgagctgcgtgaacgcccgttctacggccgccttgtcaagtatatggcctccgggccggtggtggccatggtttggcaggggctggacgtggtgcgcacctcgcgggcgctcatcggagccacgaacccggccgacgccccgcccggcaccatccgcggggatttctgcatcgaggttggcaagaacctgattcacggcagcgactcggtggagagtgcccgccgcgagatcgctctctggttccgcgcagacgagctcctctgctgggaggacagcgctgggcactggctgtatgagtagcccggcagatgcgcgtcacagaggctctcacactccagcctcctccagggcccaggtgggcgggcttctggccccaccccacagcgcttggagcatccctttggacgggctgctgaacatccacctgtctggacgttgcatggagggtggcgcaggcctctccaatccctggcgtacagggtttcctgcccgaggagctgctccaggagcctgcgcggctcgcctggaaacgtgccaggacactgtcctggtgcccagcccaacgtggtccaacgtttttttataataaagtcctcgttttcgtttcggtttgggcccaggaacaggcaaaaaaaaa

SEQ ID NO: 324751 - DNA, 1100 bp, Homo sapiens
gaggagacttggcctccgcagctgccctccggccccccacggctgccgggttccggggtgcaagtgaagcagcctccccgcggaggccgcagcgccccgaccaggcctctttaagcgcaggccccgccccgggcgccaccgccccgccccgcggatcccgctcccgcaccgccatcatgatctgcctggtgctgaccatcttcgctaacctcttccccgcggcctgcaccggcgcacacgaacgcaccttcctggccgtgaagccggacggcgtgcagcggcggctggtgggcgagattgtgcggcgcttcgagaggaagggcttcaagttggtggcgctgaagctggtgcaggggcgcggtgagcgagcgggggcgcggtgtggggggaaggggagcggggacctggggacgcctaggtgccgggtgcgggcgcaggcggcctgacccttccgcagggcctccgaggagctgctgcgtgagcactacgccgagctgcgtgaacgcccgttctacggccgccttgtcaagtatatggcctccgggccggtggtggccatggtttggcaggggctggacgtggtgcgcacctcgcgggcgctcatcggagccacgaacccggccgacgccccgcccggcaccatccgcggggatttctgcatcgaggttggcaagaacctgattcacggcagcgactcggtggagagtgcccgccgcgagatcgctctctggttccgcgcagacgagctcctctgctgggaggacagcgctgggcactggctgtatgagtagcccggcagatgcgcgtcacagaggctctcacactccagcctcctccagggcccaggtgggcgggcttctggccccaccccacagcgcttggagcatccctttggacgggctgctgaacatccacctgtctggacgttgcatggagggtggcgcaggcctctccaatccctggcgtacagggtttcctgcccgaggagctgctccaggagcctgcgcggctcgcctggaaacgtgccaggacactgtcctggtgcccagcccaacgtggtccaacgtttttttataataaagtcctcgttttcgtttcgg

SEQ ID NO: 324752 - DNA, 744 bp, Homo sapiens
aaaacatataggctaggtacgaggctggttgtaatcggccgaggaggactggggacgcctaggtgccgggtgcgggcgcaggcggcctgacccttccgcagggcctccgaggagctgctgcgtgagcactacgccgagctgcgtgaacgcccgttctacggccgccttgtcaagtatatggcctccgggccggtggtggccatggtttggcaggggctggacgtggtgcgcacctcgcgggcgctcatcggagccacgaacccggccgacgccccgcccggcaccatccgcggggatttctgcatcgaggttggcaagaacctgattcacggcagcgactcggtggagagtgcccgccgcgagatcgctctctggttccgcgcagacgagctcctctgctgggaggacagcgctgggcactggctgtatgagtagcccggcagatgcgcgtcacagaggctctcacactccagcctcctccagggcccaggtgggcgggcttctggccccaccccacagcgcttggagcatccctttggacgggctgctgaacatccacctgtctggacgttgcatggagggtggcgcaggcctctccaatccctggcgtacagggtttcctgcccgaggagctgctccaggagcctgcgcggctcgcctggaaacgtgccaggacactgtcctggtgcccagcccaacgtggtccaacgtttttttataataaagtcctcgttttcgtttcgg

SEQ ID NO: 324753 - DNA, 1009 bp, Homo sapiens
gaggagacttggcctccgcagctgccctccggccccccacggctgccgggttccggggtgcaagtgaagcagcctccccgcggaggccgcagcgccccgaccaggcctctttaagcgcaggccccgccccgggcgccaccgccccgccccgcggatcccgctcccgcaccgccatcatgatctgcctggtgctgaccatcttcgctaacctcttccccgcgggtgagccgcgcggcgcgggccgggggcgggtggccggtgctgggccggcctgacggcccgtccccgcctgccccgcagcctgcaccggcgcacacgaacgcaccttcctggccgtgaagccggacggcgtgcagcggcggctggtgcctccgaggagctgctgcgtgagcactacgccgagctgcgtgaacgcccgttctacggccgccttgtcaagtatatggcctccgggccggtggtggccatggtttggcaggggctggacgtggtgcgcacctcgcgggcgctcatcggagccacgaacccggccgacgccccgcccggcaccatccgcggggatttctgcatcgaggttggcaagaacctgattcacggcagcgactcggtggagagtgcccgccgcgagatcgctctctggttccgcgcagacgagctcctctgctgggaggacagcgctgggcactggctgtatgagtagcccggcagatgcgcgtcacagaggctctcacactccagcctcctccagggcccaggtgggcgggcttctggccccaccccacagcgcttggagcatccctttggacgggctgctgaacatccacctgtctggacgttgcatggagggtggcgcaggcctctccaatccctggcgtacagggtttcctgcccgaggagctgctccaggagcctgcgcggctcgcctggaaacgtgccaggacactgtcctggtgcccagcccaacgtggtccaacgtttttttataataaagtcctcgttttcgtttcgg

SEQ ID NO: 324754 - DNA, 1176 bp, Homo sapiens
gaggagacttggcctccgcagctgccctccggccccccacggctgccgggttccggggtgcaagtgaagcagcctccccgcggaggccgcagcgccccgaccaggcctctttaagcgcaggccccgccccgggcgccaccgccccgccccgcggatcccgctcccgcaccgccatcatgatctgcctggtgctgaccatcttcgctaacctcttccccgcggcctgcaccggcgcacacgaacgcaccttcctggccgtgaagccggacggcgtgcagcggcggctggtgggcgagattgtgcggcgcttcgagaggaagggcttcaagttggtggcgctgaagctggtgcaggggcgcggtgagcgagcgggggcgcggtgtggggggaaggggagcggggacctggggacgcctaggtgccgggtgcgggcgcaggcggcctgacccttccgcagggcctccgaggagctgctgcgtgagcactacgccgagctgcgtgaacgcccgttctacggccgccttgtcaagtatatggcctccgggccggtggtggccatggtgagtatccgggaagcgggcgggcggctccgggacccccacccccgcgtgataccgcgcccgttcctccgcacaggtttggcaggggctggacgtggtgcgcacctcgcgggcgctcatcggagccacgaacccggccgacgccccgcccggcaccatccgcggggatttctgcatcgaggttggcaagaacctgattcacggcagcgactcggtggagagtgcccgccgcgagatcgctctctggttccgcgcagacgagctcctctgctgggaggacagcgctgggcactggctgtatgagtagcccggcagatgcgcgtcacagaggctctcacactccagcctcctccagggcccaggtgggcgggcttctggccccaccccacagcgcttggagcatccctttggacgggctgctgaacatccacctgtctggacgttgcatggagggtggcgcaggcctctccaatccctggcgtacagggtttcctgcccgaggagctgctccaggagcctgcgcggctcgcctggaaacgtgccaggacactgtcctggtgcccagcccaacgtggtccaacgtttttttataataaagtcctcgttttcgtttcgg

SEQ ID NO: 324755 - DNA, 1102 bp, Homo sapiens
gaggagacttggcctccgcagctgccctccggccccccacggctgccgggttccggggtgcaagtgaagcagcctccccgcggaggccgcagcgccccgaccaggcctctttaagcgcaggccccgccccgggcgccaccgccccgccccgcggatcccgctcccgcaccgccatcatgatctgcctggtgctgaccatcttcgctaacctcttccccgcgggtgagccgcgcggcgcgggccgggggcgggtggccggtgctgggccggcctgacggcccgtccccgcctgccccgcagcctgcaccggcgcacacgaacgcaccttcctggccgtgaagccggacggcgtgcagcggcggctggtgggcgagattgtgcggcgcttcgagaggaagggcttcaagttggtggcgctgaagctggtgcagggcctccgaggagctgctgcgtgagcactacgccgagctgcgtgaacgcccgttctacggccgccttgtcaagtatatggcctccgggccggtggtggccatggtttggcaggggctggacgtggtgcgcacctcgcgggcgctcatcggagccacgaacccggccgacgccccgcccggcaccatccgcggggatttctgcatcgaggttggcaagaacctgattcacggcagcgactcggtggagagtgcccgccgcgagatcgctctctggttccgcgcagacgagctcctctgctgggaggacagcgctgggcactggctgtatgagtagcccggcagatgcgcgtcacagaggctctcacactccagcctcctccagggcccaggtgggcgggcttctggccccaccccacagcgcttggagcatccctttggacgggctgctgaacatccacctgtctggacgttgcatggagggtggcgcaggcctctccaatccctggcgtacagggtttcctgcccgaggagctgctccaggagcctgcgcggctcgcctggaaacgtgccaggacactgtcctggtgcccagcccaacgtggtccaacgtttttttataataaagtcctcgttttcgtttcggtttgggcccaggaacaggcaaaaaaaaa

SEQ ID NO: 324756 - DNA, 996 bp, Homo sapiens
gaggagacttggcctccgcagctgccctccggccccccacggctgccgggttccggggtgcaagtgaagcagcctccccgcggaggccgcagcgccccgaccaggcctctttaagcgcaggccccgccccgggcgccaccgccccgccccgcggatcccgctcccgcaccgccatcatgatctgcctggtgctgaccatcttcgctaacctcttccccgcggcctgcaccggcgcacacgaacgcaccttcctggccgtgaagccggacggcgtgcagcggcggctggtgggcgagattgtgcggcgcttcgagaggaagggcttcaagttggtggcgctgaagctggtgcagggcctccgaggagctgctgcgtgagcactacgccgagctgcgtgaacgcccgttctacggccgccttgtcaagtatatggcctccgggccggtggtggccatggtttggcaggggctggacgtggtgcgcacctcgcgggcgctcatcggagccacgaacccggccgacgccccgcccggcaccatccgcggggatttctgcatcgaggttggcaagaacctgattcacggcagcgactcggtggagagtgcccgccgcgagatcgctctctggttccgcgcagacgagctcctctgctgggaggacagcgctgggcactggctgtatgagtagcccggcagatgcgcgtcacagaggctctcacactccagcctcctccagggcccaggtgggcgggcttctggccccaccccacagcgcttggagcatccctttggacgggctgctgaacatccacctgtctggacgttgcatggagggtggcgcaggcctctccaatccctggcgtacagggtttcctgcccgaggagctgctccaggagcctgcgcggctcgcctggaaacgtgccaggacactgtcctggtgcccagcccaacgtggtccaacgtttttttataataaagtcctcgttttcgtttcgg

SEQ ID NO: 324757 - DNA, 807 bp, Homo sapiens
tatgggtagcgaggctgggtggccgtcccgcggcctgcaccggcgcacacgaacgcaccttcctggccgtgaagccggacggcgtgcagcggcggctggtgggcgagattgtgcggcgcttcgagaggaagggcttcaagttggtggcgctgaagctggtgcagggcctccgaggagctgctgcgtgagcactacgccgagctgcgtgaacgcccgttctacggccgccttgtcaagtatatggcctccgggccggtggtggccatggtttggcaggggctggacgtggtgcgcacctcgcgggcgctcatcggagccacgaacccggccgacgccccgcccggcaccatccgcggggatttctgcatcgaggttggcaagaacctgattcacggcagcgactcggtggagagtgcccgccgcgagatcgctctctggttccgcgcagacgagctcctctgctgggaggacagcgctgggcactggctgtatgagtagcccggcagatgcgcgtcacagaggctctcacactccagcctcctccagggcccaggtgggcgggcttctggccccaccccacagcgcttggagcatccctttggacgggctgctgaacatccacctgtctggacgttgcatggagggtggcgcaggcctctccaatccctggcgtacagggtttcctgcccgaggagctgctccaggagcctgcgcggctcgcctggaaacgtgccaggacactgtcctggtgcccagcccaacgtggtccaacgtttttttataataaagtcctcgttttcgtttcgg

SEQ ID NO: 324758 - DNA, 1178 bp, Homo sapiens
gaggagacttggcctccgcagctgccctccggccccccacggctgccgggttccggggtgcaagtgaagcagcctccccgcggaggccgcagcgccccgaccaggcctctttaagcgcaggccccgccccgggcgccaccgccccgccccgcggatcccgctcccgcaccgccatcatgatctgcctggtgctgaccatcttcgctaacctcttccccgcgggtgagccgcgcggcgcgggccgggggcgggtggccggtgctgggccggcctgacggcccgtccccgcctgccccgcagcctgcaccggcgcacacgaacgcaccttcctggccgtgaagccggacggcgtgcagcggcggctggtgggcgagattgtgcggcgcttcgagaggaagggcttcaagttggtggcgctgaagctggtgcaggggcgcggtgagcgagcgggggcgcggtgtggggggaaggggagcggggacctggggacgcctaggtgccgggtgcgggcgcaggcggcctgacccttccgcagggcctccgaggagctgctgcgtgagcactacgccgagctgcgtgaacgcccgttctacggccgccttgtcaagtatatggcctccgggccggtggtggccatggtttggcaggggctggacgtggtgcgcacctcgcgggcgctcatcggagccacgaacccggccgacgccccgcccggcaccatccgcggggatttctgcatcgaggttggcaagaacctgattcacggcagcgactcggtggagagtgcccgccgcgagatcgctctctggttccgcgcagacgagctcctctgctgggaggacagcgctgggcactggctgtatgagtagcccggcagatgcgcgtcacagaggctctcacactccagcctcctccagggcccaggtgggcgggcttctggccccaccccacagcgcttggagcatccctttggacgggctgctgaacatccacctgtctggacgttgcatggagggtggcgcaggcctctccaatccctggcgtacagggtttcctgcccgaggagctgctccaggagcctgcgcggctcgcctggaaacgtgccaggacactgtcctggtgcccagcccaacgtggtccaacgtttttttataataaagtcctcgttttcgtttcgg

SEQ ID NO: 324759 - DNA, 1254 bp, Homo sapiens
gaggagacttggcctccgcagctgccctccggccccccacggctgccgggttccggggtgcaagtgaagcagcctccccgcggaggccgcagcgccccgaccaggcctctttaagcgcaggccccgccccgggcgccaccgccccgccccgcggatcccgctcccgcaccgccatcatgatctgcctggtgctgaccatcttcgctaacctcttccccgcgggtgagccgcgcggcgcgggccgggggcgggtggccggtgctgggccggcctgacggcccgtccccgcctgccccgcagcctgcaccggcgcacacgaacgcaccttcctggccgtgaagccggacggcgtgcagcggcggctggtgggcgagattgtgcggcgcttcgagaggaagggcttcaagttggtggcgctgaagctggtgcaggggcgcggtgagcgagcgggggcgcggtgtggggggaaggggagcggggacctggggacgcctaggtgccgggtgcgggcgcaggcggcctgacccttccgcagggcctccgaggagctgctgcgtgagcactacgccgagctgcgtgaacgcccgttctacggccgccttgtcaagtatatggcctccgggccggtggtggccatggtgagtatccgggaagcgggcgggcggctccgggacccccacccccgcgtgataccgcgcccgttcctccgcacaggtttggcaggggctggacgtggtgcgcacctcgcgggcgctcatcggagccacgaacccggccgacgccccgcccggcaccatccgcggggatttctgcatcgaggttggcaagaacctgattcacggcagcgactcggtggagagtgcccgccgcgagatcgctctctggttccgcgcagacgagctcctctgctgggaggacagcgctgggcactggctgtatgagtagcccggcagatgcgcgtcacagaggctctcacactccagcctcctccagggcccaggtgggcgggcttctggccccaccccacagcgcttggagcatccctttggacgggctgctgaacatccacctgtctggacgttgcatggagggtggcgcaggcctctccaatccctggcgtacagggtttcctgcccgaggagctgctccaggagcctgcgcggctcgcctggaaacgtgccaggacactgtcctggtgcccagcccaacgtggtccaacgtttttttataataaagtcctcgttttcgtttcgg

SEQ ID NO: 324760 - DNA, 1598 bp, Homo sapiens
gaggagacttggcctccgcagctgccctccggccccccacggctgccgggttccggggtgcaagtgaagcagcctccccgcggaggccgcagcgccccgaccaggcctctttaagcgcaggccccgccccgggcgccaccgccccgccccgcggatcccgctcccgcaccgccatcatgatctgcctggtgctgaccatcttcgctaacctcttccccgcgggtgagccgcgcggcgcgggccgggggcgggtggccggtgctgggccggcctgacggcccgtccccgcctgccccgcagcctgcaccggcgcacacgaacgcaccttcctggccgtgaagccggacggcgtgcagcggcggctggtgggcgagattgtgcggcgcttcgagaggaagggcttcaagttggtggcgctgaagctggtgcagggcctccgaggagctgctgcgtgagcactacgccgagctgcgtgaacgcccgttctacggccgccttgtcaagtatatggcctccgggccggtggtggccatggtttggcaggggctggacgtggtgcgcacctcgcgggcgctcatcggagccacgaacccggccgacgccccgcccggcaccatccgcggggatttctgcatcgaggttggcaagaacctgattcacggcagcgactcggtggagagtgcccgccgcgagatcgctctctggttccgcgcagacgagctcctctgctgggaggacagcgctgggcactggctgtatgagtagcccggcagatgcgcgtcacagaggctctcacactccagcctcctccagggcccaggtgggcgggcttctggccccaccccacagcgcttggagcatccctttggacgggctgctgaacatccacctgtctggacgttgcatggagggtggcgcaggcctctccaatccctggcgtacagggtttcctgcccgaggagctgctccaggagcctgcgcggctcgcctggaaacgtgccaggacactgtcctggtgcccagcccaacgtggtccaacgtttttttataataaagtcctcgttttcgtttcggaaaacaaaacaaaataaaaaaacaaaaaaaaaaaaaagacaacaaaaaacaaaataaaaaaaaaaaaaaaaaaagaacgagagagcggagagcgagaggagagagacacaccccgagcggccgacggagccccaccagatgtgcgctcaaatattgtggcgcccatagggggggcactgaaatgaggagcacgctaggacagagcgccggatgtcgacacacagcagaccaccaacgggcgaatcccgcgggcgaatgcgcgcgacaaacgcgcgccacgtggacgccaactcaacaccggcccgaggggagcccgacgacgccgacagcgtgtgggtgcgcccacatctagcgtggtgtaatatacacacgcagatggatgaccaagaagggcagtacacatgacgcgcgtatcaagctgggtacggacactcttgcatgcgcgaaagtgacaacaaaaccagcggctgaccatcgccgacacgggcggcgccggccaccctatcccccccccccgctactag

SEQ ID NO: 324761 - DNA, 4725 bp, Homo sapiens
  misc_feature (410)..(410): n is a, c, g, or t
  misc_feature (2094)..(2094): n is a, c, g, or t
  misc_feature (2200)..(2200): n is a, c, g, or t
  misc_feature (2582)..(2582): n is a, c, g, or t
  misc_feature (3527)..(3527): n is a, c, g, or t
  misc_feature (3553)..(3553): n is a, c, g, or t
ataaacattatttgcatttagtataattcttaacaagaaattttaaatattcaatgatcagaaattttgcactgagaaaaatagaaatgttaagatatttgttgtttaaaaatttagcagagagggagatgttgatggaggtattcctctcttaggaatatagtatattccttataattattttgcttgtacgaactttgttttcaacatatttgaagtgtcttaaagcactgactctttctctccacgtaaattctaatttatcaggaggtcctttcctaaattaggtaaaatgtagtgacagtttcgaaaatacattcaagtataagaccagtggaccaatgttatctcaggatgaaatcatagatacatacttcaacaaaggtgtacacaggctaaagtgggagagngtattttagttttcatccatttccaacagtgagaggtgtgaatgcttatgcaatatagaaaaaattcccctttttcagttctaattttttatccttaaaaagtcttttggggcaaattcttgaatcactgatttatattattcttttatttcttctgcctgccttctccttcccactgtctttcaccccctgccctttgaatccttccctgcttcctagaaatagcccttaatgctcttttacctctcctcagctaagtcaaatttttactagtagaagcagggtgaatactgtgaagactatatccaatctgagaaacccctagctaatttgatcttgaaaaaacaaactatccacttcaagctgacctgctgtttggcagccggtacgctatttaccatagcaagcatgaaacatatacattgttatggtatgccaaccccagatatcctctcaggtggtcagtcatctgtattacatggtcttggcaatttcagacctcacattttgctctttatttccatttggacaatactcagttaccttcttaacccatttgacacctggattattaaaaccaaatccatggagaaaaactcaatttctgttgggacagtaacaagtgctttagatatgttacctcatttaatcttaataatgtgcatataatatcctcgttttgtagatgagaaaaatcaagacctagagaatgtctttaaatgaatgaagaaactcaatttttaaaaatatatatatttaaagtatacaacttgatgatttgctgccctcttaacaaatttcaagtattgttatctttagtcaccttgcacatgagatcgcccaagaaccaaagaattgaagtaaagtgcccaaggtcaaatagttaatggcaaagctgggattaaacataagtttataattccaaagtctatgccctttacctgtatcatcaatcaataactgttcatcagtgaaatcaactgtatgtctattctttatacctcagttttggcatatgcattgtacagatccacattaaatgatttgatctatgtttcacttctgtctataaaatgggtataaagagacctacttcgttggattattatcagaatcaaatgagaaaacatacatgtaaagtatgtgcctgacgcaaagtaagtccttgataacctgtagctatcattgttatcagagaaaagaaaaatacagacatataaatcctgtgtttgttctctagaattgatgaaatcaaaagttaagtctataaaaatctgacctgtccatttgttaccatgattattggagacatttgccatttcttcagtggtgcaagttattagttaccatataatatccacaaaaaccaagatgatagacctactttcattattcaaaacatgtaggaaaaattgtatataattttaggcaccacactctaaagggaacattgaaaacttgaagcaggtcaagaagaaaaaaactgaggtatggagaaaacttgaaattatattgtaggaagaatgtcggaggaactgcagatgtttacctgggagaagagtgaaaggatgggagggaagaggtgaggaagtagacatggaaattactgtatggatatttgcaaggctgctactatgtaggagacttattttttatgactctgggttggcagaactgcccaaanacagatttttgccttaatttaaggaaaaacttgtcccttagaactgtctgacaaaaggaatggagaaatgggctgcctctggagtagcgagtgttccagcatggantggattggcacttattggaggtgttgcagtgaaagttcattcattggataagtgttggattaaatgacctccaggttcccctttcaactcagaaagtcagtgacttaaattctgatccctacttaccaataatcactgaatagatttgacagtgatgcattcttttgtgttgcctgttcttccaattgttatttccttagtaacactcctcccgcccctggcaggttgtaacagttatgatagcaatgatttgtagtgactaccaaccctcagggaaccaggatactatagattcatagggttataagggaccttaaaggtcatttagtccagtcttgtagacttgattctctagggatatctggccacttttttagtgggnattttttaagacagttagtttataatgttactctaaactgacttgattttttagtaaaattgactggtatcagaaaactggtgtaagaaagctggcatgtgggaagtactcttggaagggaacaagataacagctgtccacttctaaaggccttgtaggtttcgttctctggcatcattaacattagcagagtaatacaatagtaataaccttgctaggcctaattaatttttctctgctttctttatctcatattaatgagttttcataaaaataagagaagattttaattctttttttccctcacattatcaatttgggacactggccattccagtgatggctgtcattgagtcaggaatcttgttttcaagattaaaattttatcatttgtatgtagatcattagaatacaaaatgccctcccccacttttgccatttttgctagaattggtgtcagaatagattcagttaggagcaaagttcagacacacatgttgattcagggatcagagtccaacaggtaaaaggctagaactaccgtaacaaatcaatgctgttttatttttatgttgtgtttaactaaaggacattctgtattgacaggccacatttgtgccatttcttttttagactaataatcattattggagaggagttgtctgctaatgtaactactttgtgagttatagtgttattgtctgataattttgcagtatttttaaatttttagttgactaatacaggtgatttatttgaaacatatctattttgtcatctttaataaaatgtctttattgtttttactgattttgaaggtaattcatgctcattgtttaaaatacaaacaatttgaaaatgtttaaaatagaaagtaaaagtattccaggcccacaggtaatataatcagttaaatttggttggcttttgcaaacttacaatacntacataaaattacatgtatgtatatnatgtgcatatgtttttaacatatctattatactatgcatactttttgtaactttttaaaaatttgatatagaatggacatttttctattgcagtacatacagatatgctaatgtttttaaacagctgtatagtatttatttaaccagtccttaatccctaattggtggggaattaggttttttgttgttgttgttacacagtgtgcatctttgtacatatgtatcagaggtgcttatttatgtatgtaagtaatcaaattcctaaaagcagcattgctggtcaaagggtatgcgttttaaactgatctatattgccagatttttctccagaaaaaggtttacagaattttcactcccagcaatgtgtgagaatgccagtttcttccctgaaacaggcttcttctcattatgtaatcagcattggttttttaaaatgtctgacaattttttttaaaataatttaactagctggtcttacatactagctcagttcttaaggtactaatcctaatgtaaacatgttctctacaaatgtaaatcttaacttgcgtgtcttctgtgtaaccaagaaaaagaagaaactagatcagagacaactatattgcaagagataattgacttacaagagttgatattggaattgctactttaactcagtgtaacttagagaagtttcgatgagacttaaaatccttggcctttttgctgagattctttggtaacccttggcttatttatatatgttttaaaagaatttattgtacctgtgagagtgaattaaatttctagagagtcataaaagttgaagctgagttaaataaaaagttaattgtattggcgaataattcaaaatgtgctttaagtataataggtttttaaaaatcatcttttttaaatgaacaggaaactctgatgaggaagaaagtgcttcagaatctgaactttggaagggtccactaccagagacagatgaaaaatcacaggaagaagaatttgatgagtattttcaggatttgtttctatgagacgagagagagaagcctccgctccttaatgtgaaacttcatgaagttttaaacttcatgcaatttgaaattccatataagtttttatctgcaagttacagcttgtgtggtttgtctttggaaataaaaatccaggttctctcagaa

SEQ ID NO: 324762 - DNA, 322 bp, Homo sapiens
  misc_feature (42)..(43): n is a, c, g, or t
ggtatgtgtgcgataaggctgtattaattgtgacgctctgtnnggcccttcgggaaactctgatgaggaagaaagtgcttcagaatctgaactttggaagggtccactaccagagacagatgaaaaatcacaggaagaagaatttgatgagtattttcaggatttgtttctatgagacgagagagagaagcctccgctccttaatgtgaaacttcatgaagttttaaacttcatgcaatttgaaattccatataagtttttatctgcaagttacagcttgtgtggtttgtctttggaaataaaaatccaggttctctcagaa

SEQ ID NO: 324763 - DNA, 1163 bp, Homo sapiens
gtacacctgtcaaacggtaacgcaggtgtcctaggggcgaacttggcacacagggaggaagggaaaggatgcatggtcatggaggctatgattctgattttagtgatgatgaacgctgtggagaatccagcaaaaggaaaaaaaggacagttgaagatgacttactgctccaaaaaccatttcagaaagaaaaacatggaaaggtggcccataaacaagttgcagcagaattgctggatagggaagaagcaagaaatagaaggtttcatctcatagctatggatgcttatcaaagacatacaaagttcgtaaatgactatattttatactatggtggcaaaaaagaagacttcaagcgtttgggggaaaatgacaagacagacttggatgttatacgagaaaatcatagattcctatggaatgaggaggacgaaatggacatgacttgggagaagagacttgctaagaaatactatgataaattatttaaggaatactgcatagcagatctcagtaaatataaagaaaataagtttggatttaggtggcgagtagaaaaagaagtaatttcaggaaaaggtcaatttttctgtggaaataaatattgtgataaaaaagaaggcttaaagagttgggaagttaattttggttatattgagcatggtgagaagagaaatgcacttgttaaattaaggttatgccaagaatgttccattaaattaaatttccatcacaggagaaaagaaatcaagtcaaaaaaaagaaaagataaaaccaaaaaagactgtgaagagtcatcacataaaaaatccagattatcttctgcagaagaggcctccaagaaaaaagataaaggacattcatcttcaaagaaatctgaagattctctacttagaaactctgatgaggaagaaagtgcttcagaatctgaactttggaagggtccactaccagagacagatgaaaaatcacaggaagaagaatttgatgagtattttcaggatttgtttctatgagacgagagagagaagcctccgctccttaatgtgaaacttcatgaagttttaaacttcatgcaatttgaaattccatataagtttttatctgcaagttacagcttgtgtggtttgtctttggaaataaaaatccaggttctctcagaa

SEQ ID NO: 324764 - DNA, 3102 bp, Homo sapiens
cgggacccgtagggagaggcgggttgcgggcggcggcggcggcggcggcggcggtggtggttgtggcgaggctgtgcggcagggcgcacgggacctgtcctgcagcggctctctcaggccgtgggtcgtcgctgcagctgccgggaaagaaggaaacgacgactccgggggcgaacttggcacacagggaggaagggaaaggatgcatggtcatggaggctatgattctgattttagtgatgatgaacgctgtggagaatccagcaaaaggaaaaaaaggacagttgaagatgacttactgctccaaaaaccatttcagaaagaaaaacatggaaaggtggcccataaacaagttgcagcagaattgctggatagggaagaagcaagaaatagaaggtttcatctcatagctatggatgcttatcaaagacatacaaagttcgtaaatgactatattttatactatggtggcaaaaaagaagacttcaagcgtttgggggaaaatgacaagacagacttggatgttatacgagaaaatcatagattcctatggaatgaggaggacgaaatggacatgacttgggagaagagacttgctaagaaatactatgataaattatttaaggaatactgcatagcagatctcagtaaatataaagaaaataagtttggatttaggtggcgagtagaaaaagaagtaatttcaggaaaaggtcaatttttctgtggaaataaatattgtgataaaaaagaaggcttaaagagttgggaagttaattttggttatattgagcatggtgagaagagaaatgcacttgttaaattaaggttatgccaagaatgttccattaaattaaatttccatcacaggagaaaagaaatcaagtcaaaaaaaagaaaagataaaaccaaaaaagactgtgaagagtcatcacataaaaaatccagattatcttctgcagaagaggcctccaagaaaaaagataaaggacattcatcttcaaagaaatctgaagattctctacttagaaactctgatgaggaagaaagtgcttcagaatctgaactttggaagggtccactaccagagacagatgaaaaatcacaggaagaagaatttgatgagtattttcaggatttgtttctatgagacgagagagagaagcctccgctccttaatgtgaaacttcatgaagttttaaacttcatgcaatttgaaattccatataagtttttatctgcaagttacagcttgtgtggtttgtctttggaaataaaaatccaggttctctcagaatgtcagaggctttggaagttcattagttcaattaaagactttcctgtcctttaaatatcttttcaattgcttatctacaattctgttttatttgtagctcctagaggatagagctggacagattccattgttcctacattttgtaggttttttttcactgccttcattatgtatcttctcttgccttcattattttattttattatttcttctttttctcttttttagagccaccaatactggatttgtttgtttttcatttttttcttttgtggaaacggagtcctcctgtgttgcccaggctggtattcaaactcctggccttatgcattcctcccaccctggcctcccagagtgctgggattacaggtgtgagccaccatgctctgccaattattttaaattactaggattaaagtatattatgtatgtctttaacttctttctttcccattgataaactggcacccttcttttaagtacctgctctcccattaccacctatttccagctgctttttgaggttttttgcttgcctgtctcttgcttccttcttaacctctaccacttaagagagtttgttataatcaaatttgacttcctagcctgtggataatttactattaagtaaattattaccacagggagccagtgaggtcccagtagtctaaaacagttcatgtgttcacaaaaattgcctccccggcagagattatgcagtaagataatttaactgaataatactatgtgcatgtatcttgcctcagatatactcatgcaaatatgaatatacctctgatatggtttggctctgtgtccccacccaaatctcatcttgaatgtgtactcccataattcccacattttataggagggatccagtgagagataatttgaatcaagggggcggtttcccccatattgttcttgtggtagtgaataagtctcacaagatctgatggttttatcaggggcttctgcttttgcatccttctcattttcttttgctgctgccatgtaagaagtgccttttgcctcccaccatgattctgaggctttcccagccatgtggaactgtaagtccaattaaacctctttttcttccccagtctctggtatgtctttatcagcagtgtgaaaatggactaatagaacttctatgcagaaatataaaatgtaacttcttaacataaggtcctagtcgcaagggtctatggaggtgcttcaggagatccaagcctttttagaatctgtgcaaacttctgtgtatgttttttggaggaaaagtccataaatttcaaattttcaaaaatcagattttcaaaaggatttattgatttctgaaaactagcaaagatctgcttttataaagagcaaatagatggatagatataggagaagatgcttgacttgatgaataagagaaaggacatatagaaaatgaactgaacataagcaagtattttattgaagatatactattttaaataacatttaaacacggaatgattggcaataaactgcaaaatgagtaatttggtatcattttaaaatggttattatcagagattttccttttattaaacagttattcattaattccacaaatatttatcaggcttctattatatgtgaggcactgagctgggcatggctgtaaaggaaccatctaggaagtaattatgcaatcatttctgaacctgtttcagaaaagtaaatcagtgttgggtttatcagtgtttaacattgtttgatagtcccctcacttcttgaataaattgttttttttcacctcactacttgta

SEQ ID NO: 324765 - DNA, 1414 bp, Homo sapiens
taatatgtacttaagtttctccatgtcttcatggtttgatatttcttcttaccactgaataatattaattgtctggatgtaccacagttgtttatccattcacttaatgaagaacatcttggttgcttccaagtttcagcaattagaaataaagttgctgtaaacatctatatttaggttttcatgtggacattagttttcagctcatttgagtaaataccaagaagcatgattgttggagtatactagttactattctaagtgtttcatatgtattatctcatttaaacctctttaaacctctgtgagtaccaaggaagtaggtactcatatttctactttacatatatgaggaagctgaggcaaaaaagagattaatttgcccagtactatacaactgttaagtggtagagctaaaatgcaaatgtaaataatctgactccaaaggctgtacttttttgtactagaatatactacctctttactataccataacctctttttttcttgtcagtcttacagaacaggatatattatttgttaacttaggtatcttgtggcctggcacctataacttttaagctatcttaaagtagattgttcttaacagataaattggtgattgttcaatgtattttcttcaaatcctataagaagagaaaaatctgtcatgatgggaattacatttattttttaggttggtgaatgtcattgttggctccatgtttagatttctgtataatttaaatttacattggcataaatgtaatttttttattatcagtttggatttaggtggcgagtagaaaaagaagtaatttcaggaaaaggtcaatttttctgtggaaataaatattgtgataaaaaagaaggcttaaagagttgggaagttaattttggttatattgagcatggtgagaagagaaatgcacttgttaaattaaggttatgccaagaatgttccattaaattaaatttccatcacaggagaaaagaaatcaagtcaaaaaaaagaaaagataaaaccaaaaaagactgtgaagagtcatcacataaaaaatccagattatcttctgcagaagaggcctccaagaaaaaagataaaggacattcatcttcaaagaaatctgaagattctctacttagaaactctgatgaggaagaaagtgcttcagaatctgaactttggaagggtccactaccagagacagatgaaaaatcacaggaagaagaatttgatgagtattttcaggatttgtttctatgagacgagagagagaagcctccgctccttaatgtgaaacttcatgaagttttaaacttcatgcaatttgaaattccatataagtttttatctgcaagttacagcttgtgtggtttgtctttggaaataaaaatccaggttctctcagaa

SEQ ID NO: 324766 - DNA, 2198 bp, Homo sapiens
cgggacccgtagggagaggcgggttgcgggcggcggcggcggcggcggcggcggtggtggttgtggcgaggctgtgcggcagggcgcacgggacctgtcctgcagcggctctctcaggccgtgggtcgtcgctgcagctgccgggaaagaaggaaacgacgactccgggggcgaacttggcacacagggaggaagggaaaggatgcatggtcatggaggctatgattctgattttagtgatgatgaacgctgtggagaatccagcaaaaggaaaaaaaggacagttgaagatgacttactgctccaaaaaccatttcagaaagaaaaacatggaaaggtggcccataaacaagttgcagcagaattgctggatagggaagaagcaagaaatagaaggtttcatctcatagctatggatgcttatcaaagacatacaaagttcgtaaatgactatattttatactatggtggcaaaaaagaagacttcaagcgtttgggggaaaatgacaagacagacttggatgttatacgagaaaatcatagattcctatggaatgaggaggacgaaatggacatgacttgggagaagagacttgctaagaaatactatgataaattatttaaggaatactgcatagcagatctcagtaaatataaagaaaataagtttggatttaggtggcgagtagaaaaagaagtaatttcaggaaaaggtcaatttttctgtggaaataaatattgtgataaaaaagaaggcttaaagagttgggaagttaattttggttatattgagcatggtgagaagagaaatgcacttgttaaattaaggttatgccaagaatgttccattaaattaaatttccatcacaggagaaaagaaatcaagtcaaaaaaaagaaaagataaaaccaaaaaagactgtgaagagtcatcacataaaaaatccagattatcttctgcagaagaggcctccaagaaaaaagataaaggacattcatcttcaaagaaatctgaagattctctacttagaaactctgatgaggaagaaagtgcttcagaatctgaactttggaagggtccactaccagagacagatgaaaaatcacagtaagtgctgatattaatagagaatatgtaccttttcaatcagtttaggaagctataaccacagctttattaatggaaaaatacaacatcatggtgatctatttaatgccaaggactgcctagcctggtaagattagagcttattcccagccattgtcataagcagccaacacatccagcttcctcctggtaaataaatctttcatcagttcactttaacagatgaacctctggtccttgcttggatttcttcagagatggctgtttcctaagcttccagagaagcctattccatcatactgtgattatcataaacctatgcaagggaatcccttgcatgggaagtacacttctatactgctatcccactggtcttttaaaaagtaaaataataatatttactgttacaaatacataatatatttactatgctcagtgtagtaaaaaaactacagcctaaggagatttacccaattccccttagttattccccaatataacttaggcttacatttttccttaaaaatagtttcttttttattcacttcttgagcagactataatttaaaatgagaatgaacagagaagttataaagtaagcccacaaagtaaagagaagcaatgacatttcacaagtatttcaaagcaaaattttaggtaatacatttagggagaggtgccaccatatgaaatatttttattttaatcaatctgggtatagttatgattattctagaaactaagaattatttgatggctgaatcatggcgatatattgatatatagcagaatcagccaatatgttgacttaaagtattttatttttattaatctcatataatgtatcatgtagtaatttttttactctattgatcttaagtatgcttttttttttaaatagggaagaagaatttgatgagtattttcaggatttgtttctatgagacgagagagagaagcctccgctccttaatgtgaaacttcatgaagttttaaacttcatgcaatttgaaattccatataagtttttatctgcaagttacagcttgtgtggtttgtctttggaaataaaaatccaggttctctcagaa

SEQ ID NO: 324767 - DNA, 688 bp, Homo sapiens
ggttaatttgcatattttagaagtacattttaggggtaatactagatcatatagataaatattatcaccaactaccatagctaatattcctttcctttctgcaggtcaatttttctgtggaaataaatattgtgataaaaaagaaggcttaaagagttgggaagttaattttggttatattgagcatggtgagaagagaaatgcacttgttaaattaaggttatgccaagaatgttccattaaattaaatttccatcacaggagaaaagaaatcaagtcaaaaaaaagaaaagataaaaccaaaaaagactgtgaagagtcatcacataaaaaatccagattatcttctgcagaagaggcctccaagaaaaaagataaaggacattcatcttcaaagaaatctgaagattctctacttagaaactctgatgaggaagaaagtgcttcagaatctgaactttggaagggtccactaccagagacagatgaaaaatcacaggaagaagaatttgatgagtattttcaggatttgtttctatgagacgagagagagaagcctccgctccttaatgtgaaacttcatgaagttttaaacttcatgcaatttgaaattccatataagtttttatctgcaagttacagcttgtgtggtttgtctttggaaataaaaatccaggttctctcagaa

SEQ ID NO: 324768 - DNA, 6530 bp, Homo sapiens
  misc_feature (410)..(410): n is a, c, g, or t
  misc_feature (2094)..(2094): n is a, c, g, or t
  misc_feature (2200)..(2200): n is a, c, g, or t
  misc_feature (2582)..(2582): n is a, c, g, or t
  misc_feature (3527)..(3527): n is a, c, g, or t
  misc_feature (3553)..(3553): n is a, c, g, or t
ataaacattatttgcatttagtataattcttaacaagaaattttaaatattcaatgatcagaaattttgcactgagaaaaatagaaatgttaagatatttgttgtttaaaaatttagcagagagggagatgttgatggaggtattcctctcttaggaatatagtatattccttataattattttgcttgtacgaactttgttttcaacatatttgaagtgtcttaaagcactgactctttctctccacgtaaattctaatttatcaggaggtcctttcctaaattaggtaaaatgtagtgacagtttcgaaaatacattcaagtataagaccagtggaccaatgttatctcaggatgaaatcatagatacatacttcaacaaaggtgtacacaggctaaagtgggagagngtattttagttttcatccatttccaacagtgagaggtgtgaatgcttatgcaatatagaaaaaattcccctttttcagttctaattttttatccttaaaaagtcttttggggcaaattcttgaatcactgatttatattattcttttatttcttctgcctgccttctccttcccactgtctttcaccccctgccctttgaatccttccctgcttcctagaaatagcccttaatgctcttttacctctcctcagctaagtcaaatttttactagtagaagcagggtgaatactgtgaagactatatccaatctgagaaacccctagctaatttgatcttgaaaaaacaaactatccacttcaagctgacctgctgtttggcagccggtacgctatttaccatagcaagcatgaaacatatacattgttatggtatgccaaccccagatatcctctcaggtggtcagtcatctgtattacatggtcttggcaatttcagacctcacattttgctctttatttccatttggacaatactcagttaccttcttaacccatttgacacctggattattaaaaccaaatccatggagaaaaactcaatttctgttgggacagtaacaagtgctttagatatgttacctcatttaatcttaataatgtgcatataatatcctcgttttgtagatgagaaaaatcaagacctagagaatgtctttaaatgaatgaagaaactcaatttttaaaaatatatatatttaaagtatacaacttgatgatttgctgccctcttaacaaatttcaagtattgttatctttagtcaccttgcacatgagatcgcccaagaaccaaagaattgaagtaaagtgcccaaggtcaaatagttaatggcaaagctgggattaaacataagtttataattccaaagtctatgccctttacctgtatcatcaatcaataactgttcatcagtgaaatcaactgtatgtctattctttatacctcagttttggcatatgcattgtacagatccacattaaatgatttgatctatgtttcacttctgtctataaaatgggtataaagagacctacttcgttggattattatcagaatcaaatgagaaaacatacatgtaaagtatgtgcctgacgcaaagtaagtccttgataacctgtagctatcattgttatcagagaaaagaaaaatacagacatataaatcctgtgtttgttctctagaattgatgaaatcaaaagttaagtctataaaaatctgacctgtccatttgttaccatgattattggagacatttgccatttcttcagtggtgcaagttattagttaccatataatatccacaaaaaccaagatgatagacctactttcattattcaaaacatgtaggaaaaattgtatataattttaggcaccacactctaaagggaacattgaaaacttgaagcaggtcaagaagaaaaaaactgaggtatggagaaaacttgaaattatattgtaggaagaatgtcggaggaactgcagatgtttacctgggagaagagtgaaaggatgggagggaagaggtgaggaagtagacatggaaattactgtatggatatttgcaaggctgctactatgtaggagacttattttttatgactctgggttggcagaactgcccaaanacagatttttgccttaatttaaggaaaaacttgtcccttagaactgtctgacaaaaggaatggagaaatgggctgcctctggagtagcgagtgttccagcatggantggattggcacttattggaggtgttgcagtgaaagttcattcattggataagtgttggattaaatgacctccaggttcccctttcaactcagaaagtcagtgacttaaattctgatccctacttaccaataatcactgaatagatttgacagtgatgcattcttttgtgttgcctgttcttccaattgttatttccttagtaacactcctcccgcccctggcaggttgtaacagttatgatagcaatgatttgtagtgactaccaaccctcagggaaccaggatactatagattcatagggttataagggaccttaaaggtcatttagtccagtcttgtagacttgattctctagggatatctggccacttttttagtgggnattttttaagacagttagtttataatgttactctaaactgacttgattttttagtaaaattgactggtatcagaaaactggtgtaagaaagctggcatgtgggaagtactcttggaagggaacaagataacagctgtccacttctaaaggccttgtaggtttcgttctctggcatcattaacattagcagagtaatacaatagtaataaccttgctaggcctaattaatttttctctgctttctttatctcatattaatgagttttcataaaaataagagaagattttaattctttttttccctcacattatcaatttgggacactggccattccagtgatggctgtcattgagtcaggaatcttgttttcaagattaaaattttatcatttgtatgtagatcattagaatacaaaatgccctcccccacttttgccatttttgctagaattggtgtcagaatagattcagttaggagcaaagttcagacacacatgttgattcagggatcagagtccaacaggtaaaaggctagaactaccgtaacaaatcaatgctgttttatttttatgttgtgtttaactaaaggacattctgtattgacaggccacatttgtgccatttcttttttagactaataatcattattggagaggagttgtctgctaatgtaactactttgtgagttatagtgttattgtctgataattttgcagtatttttaaatttttagttgactaatacaggtgatttatttgaaacatatctattttgtcatctttaataaaatgtctttattgtttttactgattttgaaggtaattcatgctcattgtttaaaatacaaacaatttgaaaatgtttaaaatagaaagtaaaagtattccaggcccacaggtaatataatcagttaaatttggttggcttttgcaaacttacaatacntacataaaattacatgtatgtatatnatgtgcatatgtttttaacatatctattatactatgcatactttttgtaactttttaaaaatttgatatagaatggacatttttctattgcagtacatacagatatgctaatgtttttaaacagctgtatagtatttatttaaccagtccttaatccctaattggtggggaattaggttttttgttgttgttgttacacagtgtgcatctttgtacatatgtatcagaggtgcttatttatgtatgtaagtaatcaaattcctaaaagcagcattgctggtcaaagggtatgcgttttaaactgatctatattgccagatttttctccagaaaaaggtttacagaattttcactcccagcaatgtgtgagaatgccagtttcttccctgaaacaggcttcttctcattatgtaatcagcattggttttttaaaatgtctgacaattttttttaaaataatttaactagctggtcttacatactagctcagttcttaaggtactaatcctaatgtaaacatgttctctacaaatgtaaatcttaacttgcgtgtcttctgtgtaaccaagaaaaagaagaaactagatcagagacaactatattgcaagagataattgacttacaagagttgatattggaattgctactttaactcagtgtaacttagagaagtttcgatgagacttaaaatccttggcctttttgctgagattctttggtaacccttggcttatttatatatgttttaaaagaatttattgtacctgtgagagtgaattaaatttctagagagtcataaaagttgaagctgagttaaataaaaagttaattgtattggcgaataattcaaaatgtgctttaagtataataggtttttaaaaatcatcttttttaaatgaacaggaaactctgatgaggaagaaagtgcttcagaatctgaactttggaagggtccactaccagagacagatgaaaaatcacaggaagaagaatttgatgagtattttcaggatttgtttctatgagacgagagagagaagcctccgctccttaatgtgaaacttcatgaagttttaaacttcatgcaatttgaaattccatataagtttttatctgcaagttacagcttgtgtggtttgtctttggaaataaaaatccaggttctctcagaatgtcagaggctttggaagttcattagttcaattaaagactttcctgtcctttaaatatcttttcaattgcttatctacaattctgttttatttgtagctcctagaggatagagctggacagattccattgttcctacattttgtaggttttttttcactgccttcattatgtatcttctcttgccttcattattttattttattatttcttctttttctcttttttagagccaccaatactggatttgtttgtttttcatttttttcttttgtggaaacggagtcctcctgtgttgcccaggctggtattcaaactcctggccttatgcattcctcccaccctggcctcccagagtgctgggattacaggtgtgagccaccatgctctgccaattattttaaattactaggattaaagtatattatgtatgtctttaacttctttctttcccattgataaactggcacccttcttttaagtacctgctctcccattaccacctatttccagctgctttttgaggttttttgcttgcctgtctcttgcttccttcttaacctctaccacttaagagagtttgttataatcaaatttgacttcctagcctgtggataatttactattaagtaaattattaccacagggagccagtgaggtcccagtagtctaaaacagttcatgtgttcacaaaaattgcctccccggcagagattatgcagtaagataatttaactgaataatactatgtgcatgtatcttgcctcagatatactcatgcaaatatgaatatacctctgatatggtttggctctgtgtccccacccaaatctcatcttgaatgtgtactcccataattcccacattttataggagggatccagtgagagataatttgaatcaagggggcggtttcccccatattgttcttgtggtagtgaataagtctcacaagatctgatggttttatcaggggcttctgcttttgcatccttctcattttcttttgctgctgccatgtaagaagtgccttttgcctcccaccatgattctgaggctttcccagccatgtggaactgtaagtccaattaaacctctttttcttccccagtctctggtatgtctttatcagcagtgtgaaaatggactaatagaacttctatgcagaaatataaaatgtaacttcttaacataaggtcctagtcgcaagggtctatggaggtgcttcaggagatccaagcctttttagaatctgtgcaaacttctgtgtatgttttttggaggaaaagtccataaatttcaaattttcaaaaatcagattttcaaaaggatttattgatttctgaaaactagcaaagatctgcttttataaagagcaaatagatggatagatataggagaagatgcttgacttgatgaataagagaaaggacatatagaaaatgaactgaacataagcaagtattttattgaagatatactattttaaataacatttaaacacggaatgattggcaataaactgcaaaatgagtaatttggtatcattttaaaatggttattatcagagattttccttttattaaacagttattcattaattccacaaatatttatcaggcttctattatatgtgaggcactgagctgggcatggctgtaaaggaaccatctaggaagtaattatgcaatcatttctgaacctgtttcagaaaagtaaatcagtgttgggtttatcagtgtttaacattgtttgatagtcccctcacttcttgaataaattgttttttttcacctcactacttgta

SEQ ID NO: 324769 - DNA, 5337 bp, Homo sapiens
  misc_feature (410)..(410): n is a, c, g, or t
  misc_feature (2094)..(2094): n is a, c, g, or t
  misc_feature (2200)..(2200): n is a, c, g, or t
  misc_feature (2582)..(2582): n is a, c, g, or t
ataaacattatttgcatttagtataattcttaacaagaaattttaaatattcaatgatcagaaattttgcactgagaaaaatagaaatgttaagatatttgttgtttaaaaatttagcagagagggagatgttgatggaggtattcctctcttaggaatatagtatattccttataattattttgcttgtacgaactttgttttcaacatatttgaagtgtcttaaagcactgactctttctctccacgtaaattctaatttatcaggaggtcctttcctaaattaggtaaaatgtagtgacagtttcgaaaatacattcaagtataagaccagtggaccaatgttatctcaggatgaaatcatagatacatacttcaacaaaggtgtacacaggctaaagtgggagagngtattttagttttcatccatttccaacagtgagaggtgtgaatgcttatgcaatatagaaaaaattcccctttttcagttctaattttttatccttaaaaagtcttttggggcaaattcttgaatcactgatttatattattcttttatttcttctgcctgccttctccttcccactgtctttcaccccctgccctttgaatccttccctgcttcctagaaatagcccttaatgctcttttacctctcctcagctaagtcaaatttttactagtagaagcagggtgaatactgtgaagactatatccaatctgagaaacccctagctaatttgatcttgaaaaaacaaactatccacttcaagctgacctgctgtttggcagccggtacgctatttaccatagcaagcatgaaacatatacattgttatggtatgccaaccccagatatcctctcaggtggtcagtcatctgtattacatggtcttggcaatttcagacctcacattttgctctttatttccatttggacaatactcagttaccttcttaacccatttgacacctggattattaaaaccaaatccatggagaaaaactcaatttctgttgggacagtaacaagtgctttagatatgttacctcatttaatcttaataatgtgcatataatatcctcgttttgtagatgagaaaaatcaagacctagagaatgtctttaaatgaatgaagaaactcaatttttaaaaatatatatatttaaagtatacaacttgatgatttgctgccctcttaacaaatttcaagtattgttatctttagtcaccttgcacatgagatcgcccaagaaccaaagaattgaagtaaagtgcccaaggtcaaatagttaatggcaaagctgggattaaacataagtttataattccaaagtctatgccctttacctgtatcatcaatcaataactgttcatcagtgaaatcaactgtatgtctattctttatacctcagttttggcatatgcattgtacagatccacattaaatgatttgatctatgtttcacttctgtctataaaatgggtataaagagacctacttcgttggattattatcagaatcaaatgagaaaacatacatgtaaagtatgtgcctgacgcaaagtaagtccttgataacctgtagctatcattgttatcagagaaaagaaaaatacagacatataaatcctgtgtttgttctctagaattgatgaaatcaaaagttaagtctataaaaatctgacctgtccatttgttaccatgattattggagacatttgccatttcttcagtggtgcaagttattagttaccatataatatccacaaaaaccaagatgatagacctactttcattattcaaaacatgtaggaaaaattgtatataattttaggcaccacactctaaagggaacattgaaaacttgaagcaggtcaagaagaaaaaaactgaggtatggagaaaacttgaaattatattgtaggaagaatgtcggaggaactgcagatgtttacctgggagaagagtgaaaggatgggagggaagaggtgaggaagtagacatggaaattactgtatggatatttgcaaggctgctactatgtaggagacttattttttatgactctgggttggcagaactgcccaaanacagatttttgccttaatttaaggaaaaacttgtcccttagaactgtctgacaaaaggaatggagaaatgggctgcctctggagtagcgagtgttccagcatggantggattggcacttattggaggtgttgcagtgaaagttcattcattggataagtgttggattaaatgacctccaggttcccctttcaactcagaaagtcagtgacttaaattctgatccctacttaccaataatcactgaatagatttgacagtgatgcattcttttgtgttgcctgttcttccaattgttatttccttagtaacactcctcccgcccctggcaggttgtaacagttatgatagcaatgatttgtagtgactaccaaccctcagggaaccaggatactatagattcatagggttataagggaccttaaaggtcatttagtccagtcttgtagacttgattctctagggatatctggccacttttttagtgggnattttttaagacagttagtttataatgttactctaaactgacttgattttttagtaaaattgactggtatcagaaaactggtgtaagaaagctggcatgtgggaagtactcttggaagggaacaagataacagctgtccacttctaaaggccttgtaggtttcgttctctggcatcattaacattagcagagtaatacaatagtaataaccttgctaggcctaattaatttttctctgctttctttatctcatattaatgagttttcataaaaataagagaagattttaattctttttttccctcacattatcaatttgggacactggccattccagtgatggctgtcattgagtcaggaatcttgttttcaagattaaaattttatcatttgtatgtagatcattagaatacaaaatgccctcccccacttttgccatttttgctagaattggtgtcagaatagattcagttaggagcaaagttcagacacacatgttgattcagggatcagagtccaacaggtaaaaggctagaactaccgtaacaaatcaatgctgttttatttttatgttgtgtttaactaaaggacattctgtattgacaggccacatttgtgccatttcttttttagactaataatcattattggagaggagttgtctgctaatgtaactactttgaaactctgatgaggaagaaagtgcttcagaatctgaactttggaagggtccactaccagagacagatgaaaaatcacaggaagaagaatttgatgagtattttcaggatttgtttctatgagacgagagagagaagcctccgctccttaatgtgaaacttcatgaagttttaaacttcatgcaatttgaaattccatataagtttttatctgcaagttacagcttgtgtggtttgtctttggaaataaaaatccaggttctctcagaatgtcagaggctttggaagttcattagttcaattaaagactttcctgtcctttaaatatcttttcaattgcttatctacaattctgttttatttgtagctcctagaggatagagctggacagattccattgttcctacattttgtaggttttttttcactgccttcattatgtatcttctcttgccttcattattttattttattatttcttctttttctcttttttagagccaccaatactggatttgtttgtttttcatttttttcttttgtggaaacggagtcctcctgtgttgcccaggctggtattcaaactcctggccttatgcattcctcccaccctggcctcccagagtgctgggattacaggtgtgagccaccatgctctgccaattattttaaattactaggattaaagtatattatgtatgtctttaacttctttctttcccattgataaactggcacccttcttttaagtacctgctctcccattaccacctatttccagctgctttttgaggttttttgcttgcctgtctcttgcttccttcttaacctctaccacttaagagagtttgttataatcaaatttgacttcctagcctgtggataatttactattaagtaaattattaccacagggagccagtgaggtcccagtagtctaaaacagttcatgtgttcacaaaaattgcctccccggcagagattatgcagtaagataatttaactgaataatactatgtgcatgtatcttgcctcagatatactcatgcaaatatgaatatacctctgatatggtttggctctgtgtccccacccaaatctcatcttgaatgtgtactcccataattcccacattttataggagggatccagtgagagataatttgaatcaagggggcggtttcccccatattgttcttgtggtagtgaataagtctcacaagatctgatggttttatcaggggcttctgcttttgcatccttctcattttcttttgctgctgccatgtaagaagtgccttttgcctcccaccatgattctgaggctttcccagccatgtggaactgtaagtccaattaaacctctttttcttccccagtctctggtatgtctttatcagcagtgtgaaaatggactaatagaacttctatgcagaaatataaaatgtaacttcttaacataaggtcctagtcgcaagggtctatggaggtgcttcaggagatccaagcctttttagaatctgtgcaaacttctgtgtatgttttttggaggaaaagtccataaatttcaaattttcaaaaatcagattttcaaaaggatttattgatttctgaaaactagcaaagatctgcttttataaagagcaaatagatggatagatataggagaagatgcttgacttgatgaataagagaaaggacatatagaaaatgaactgaacataagcaagtattttattgaagatatactattttaaataacatttaaacacggaatgattggcaataaactgcaaaatgagtaatttggtatcattttaaaatggttattatcagagattttccttttattaaacagttattcattaattccacaaatatttatcaggcttctattatatgtgaggcactgagctgggcatggctgtaaaggaaccatctaggaagtaattatgcaatcatttctgaacctgtttcagaaaagtaaatcagtgttgggtttatcagtgtttaacattgtttgatagtcccctcacttcttgaataaattgttttttttcacctcactacttgta

SEQ ID NO: 324770 - DNA, 3532 bp, Homo sapiens
  misc_feature (410)..(410): n is a, c, g, or t
  misc_feature (2094)..(2094): n is a, c, g, or t
  misc_feature (2200)..(2200): n is a, c, g, or t
  misc_feature (2582)..(2582): n is a, c, g, or t
ataaacattatttgcatttagtataattcttaacaagaaattttaaatattcaatgatcagaaattttgcactgagaaaaatagaaatgttaagatatttgttgtttaaaaatttagcagagagggagatgttgatggaggtattcctctcttaggaatatagtatattccttataattattttgcttgtacgaactttgttttcaacatatttgaagtgtcttaaagcactgactctttctctccacgtaaattctaatttatcaggaggtcctttcctaaattaggtaaaatgtagtgacagtttcgaaaatacattcaagtataagaccagtggaccaatgttatctcaggatgaaatcatagatacatacttcaacaaaggtgtacacaggctaaagtgggagagngtattttagttttcatccatttccaacagtgagaggtgtgaatgcttatgcaatatagaaaaaattcccctttttcagttctaattttttatccttaaaaagtcttttggggcaaattcttgaatcactgatttatattattcttttatttcttctgcctgccttctccttcccactgtctttcaccccctgccctttgaatccttccctgcttcctagaaatagcccttaatgctcttttacctctcctcagctaagtcaaatttttactagtagaagcagggtgaatactgtgaagactatatccaatctgagaaacccctagctaatttgatcttgaaaaaacaaactatccacttcaagctgacctgctgtttggcagccggtacgctatttaccatagcaagcatgaaacatatacattgttatggtatgccaaccccagatatcctctcaggtggtcagtcatctgtattacatggtcttggcaatttcagacctcacattttgctctttatttccatttggacaatactcagttaccttcttaacccatttgacacctggattattaaaaccaaatccatggagaaaaactcaatttctgttgggacagtaacaagtgctttagatatgttacctcatttaatcttaataatgtgcatataatatcctcgttttgtagatgagaaaaatcaagacctagagaatgtctttaaatgaatgaagaaactcaatttttaaaaatatatatatttaaagtatacaacttgatgatttgctgccctcttaacaaatttcaagtattgttatctttagtcaccttgcacatgagatcgcccaagaaccaaagaattgaagtaaagtgcccaaggtcaaatagttaatggcaaagctgggattaaacataagtttataattccaaagtctatgccctttacctgtatcatcaatcaataactgttcatcagtgaaatcaactgtatgtctattctttatacctcagttttggcatatgcattgtacagatccacattaaatgatttgatctatgtttcacttctgtctataaaatgggtataaagagacctacttcgttggattattatcagaatcaaatgagaaaacatacatgtaaagtatgtgcctgacgcaaagtaagtccttgataacctgtagctatcattgttatcagagaaaagaaaaatacagacatataaatcctgtgtttgttctctagaattgatgaaatcaaaagttaagtctataaaaatctgacctgtccatttgttaccatgattattggagacatttgccatttcttcagtggtgcaagttattagttaccatataatatccacaaaaaccaagatgatagacctactttcattattcaaaacatgtaggaaaaattgtatataattttaggcaccacactctaaagggaacattgaaaacttgaagcaggtcaagaagaaaaaaactgaggtatggagaaaacttgaaattatattgtaggaagaatgtcggaggaactgcagatgtttacctgggagaagagtgaaaggatgggagggaagaggtgaggaagtagacatggaaattactgtatggatatttgcaaggctgctactatgtaggagacttattttttatgactctgggttggcagaactgcccaaanacagatttttgccttaatttaaggaaaaacttgtcccttagaactgtctgacaaaaggaatggagaaatgggctgcctctggagtagcgagtgttccagcatggantggattggcacttattggaggtgttgcagtgaaagttcattcattggataagtgttggattaaatgacctccaggttcccctttcaactcagaaagtcagtgacttaaattctgatccctacttaccaataatcactgaatagatttgacagtgatgcattcttttgtgttgcctgttcttccaattgttatttccttagtaacactcctcccgcccctggcaggttgtaacagttatgatagcaatgatttgtagtgactaccaaccctcagggaaccaggatactatagattcatagggttataagggaccttaaaggtcatttagtccagtcttgtagacttgattctctagggatatctggccacttttttagtgggnattttttaagacagttagtttataatgttactctaaactgacttgattttttagtaaaattgactggtatcagaaaactggtgtaagaaagctggcatgtgggaagtactcttggaagggaacaagataacagctgtccacttctaaaggccttgtaggtttcgttctctggcatcattaacattagcagagtaatacaatagtaataaccttgctaggcctaattaatttttctctgctttctttatctcatattaatgagttttcataaaaataagagaagattttaattctttttttccctcacattatcaatttgggacactggccattccagtgatggctgtcattgagtcaggaatcttgttttcaagattaaaattttatcatttgtatgtagatcattagaatacaaaatgccctcccccacttttgccatttttgctagaattggtgtcagaatagattcagttaggagcaaagttcagacacacatgttgattcagggatcagagtccaacaggtaaaaggctagaactaccgtaacaaatcaatgctgttttatttttatgttgtgtttaactaaaggacattctgtattgacaggccacatttgtgccatttcttttttagactaataatcattattggagaggagttgtctgctaatgtaactactttgaaactctgatgaggaagaaagtgcttcagaatctgaactttggaagggtccactaccagagacagatgaaaaatcacaggaagaagaatttgatgagtattttcaggatttgtttctatgagacgagagagagaagcctccgctccttaatgtgaaacttcatgaagttttaaacttcatgcaatttgaaattccatataagtttttatctgcaagttacagcttgtgtggtttgtctttggaaataaaaatccaggttctctcagaa

SEQ ID NO: 324771 - DNA, 2129 bp, Homo sapiens
  misc_feature (66)..(66): n is a, c, g, or t
  misc_feature (77)..(77): n is a, c, g, or t
aatctaaaccgtattaatatttctatgcgtatagcccccacaaacaaggctgaggagtctactgangaggaagctgncgggtcaaaatctgaactttggaagggtccactaccagagacagatgaaaaatcacaggaagaagaatttgatgagtattttcaggatttgtttctatgagacgagagagagaagcctccgctccttaatgtgaaacttcatgaagttttaaacttcatgcaatttgaaattccatataagtttttatctgcaagttacagcttgtgtggtttgtctttggaaataaaaatccaggttctctcagaatgtcagaggctttggaagttcattagttcaattaaagactttcctgtcctttaaatatcttttcaattgcttatctacaattctgttttatttgtagctcctagaggatagagctggacagattccattgttcctacattttgtaggttttttttcactgccttcattatgtatcttctcttgccttcattattttattttattatttcttctttttctcttttttagagccaccaatactggatttgtttgtttttcatttttttcttttgtggaaacggagtcctcctgtgttgcccaggctggtattcaaactcctggccttatgcattcctcccaccctggcctcccagagtgctgggattacaggtgtgagccaccatgctctgccaattattttaaattactaggattaaagtatattatgtatgtctttaacttctttctttcccattgataaactggcacccttcttttaagtacctgctctcccattaccacctatttccagctgctttttgaggttttttgcttgcctgtctcttgcttccttcttaacctctaccacttaagagagtttgttataatcaaatttgacttcctagcctgtggataatttactattaagtaaattattaccacagggagccagtgaggtcccagtagtctaaaacagttcatgtgttcacaaaaattgcctccccggcagagattatgcagtaagataatttaactgaataatactatgtgcatgtatcttgcctcagatatactcatgcaaatatgaatatacctctgatatggtttggctctgtgtccccacccaaatctcatcttgaatgtgtactcccataattcccacattttataggagggatccagtgagagataatttgaatcaagggggcggtttcccccatattgttcttgtggtagtgaataagtctcacaagatctgatggttttatcaggggcttctgcttttgcatccttctcattttcttttgctgctgccatgtaagaagtgccttttgcctcccaccatgattctgaggctttcccagccatgtggaactgtaagtccaattaaacctctttttcttccccagtctctggtatgtctttatcagcagtgtgaaaatggactaatagaacttctatgcagaaatataaaatgtaacttcttaacataaggtcctagtcgcaagggtctatggaggtgcttcaggagatccaagcctttttagaatctgtgcaaacttctgtgtatgttttttggaggaaaagtccataaatttcaaattttcaaaaatcagattttcaaaaggatttattgatttctgaaaactagcaaagatctgcttttataaagagcaaatagatggatagatataggagaagatgcttgacttgatgaataagagaaaggacatatagaaaatgaactgaacataagcaagtattttattgaagatatactattttaaataacatttaaacacggaatgattggcaataaactgcaaaatgagtaatttggtatcattttaaaatggttattatcagagattttccttttattaaacagttattcattaattccacaaatatttatcaggcttctattatatgtgaggcactgagctgggcatggctgtaaaggaaccatctaggaagtaattatgcaatcatttctgaacctgtttcagaaaagtaaatcagtgttgggtttatcagtgtttaacattgtttgatagtcccctcacttcttgaataaattgttttttttcacctcactacttgta

SEQ ID NO: 324772 - DNA, 3860 bp, Homo sapiens
  misc_feature (410)..(410): n is a, c, g, or t
  misc_feature (2094)..(2094): n is a, c, g, or t
  misc_feature (2200)..(2200): n is a, c, g, or t
  misc_feature (2582)..(2582): n is a, c, g, or t
  misc_feature (3699)..(3699): n is a, c, g, or t
  misc_feature (3713)..(3713): n is a, c, g, or t
  misc_feature (3763)..(3763): n is a, c, g, or t
  misc_feature (3809)..(3809): n is a, c, g, or t
ataaacattatttgcatttagtataattcttaacaagaaattttaaatattcaatgatcagaaattttgcactgagaaaaatagaaatgttaagatatttgttgtttaaaaatttagcagagagggagatgttgatggaggtattcctctcttaggaatatagtatattccttataattattttgcttgtacgaactttgttttcaacatatttgaagtgtcttaaagcactgactctttctctccacgtaaattctaatttatcaggaggtcctttcctaaattaggtaaaatgtagtgacagtttcgaaaatacattcaagtataagaccagtggaccaatgttatctcaggatgaaatcatagatacatacttcaacaaaggtgtacacaggctaaagtgggagagngtattttagttttcatccatttccaacagtgagaggtgtgaatgcttatgcaatatagaaaaaattcccctttttcagttctaattttttatccttaaaaagtcttttggggcaaattcttgaatcactgatttatattattcttttatttcttctgcctgccttctccttcccactgtctttcaccccctgccctttgaatccttccctgcttcctagaaatagcccttaatgctcttttacctctcctcagctaagtcaaatttttactagtagaagcagggtgaatactgtgaagactatatccaatctgagaaacccctagctaatttgatcttgaaaaaacaaactatccacttcaagctgacctgctgtttggcagccggtacgctatttaccatagcaagcatgaaacatatacattgttatggtatgccaaccccagatatcctctcaggtggtcagtcatctgtattacatggtcttggcaatttcagacctcacattttgctctttatttccatttggacaatactcagttaccttcttaacccatttgacacctggattattaaaaccaaatccatggagaaaaactcaatttctgttgggacagtaacaagtgctttagatatgttacctcatttaatcttaataatgtgcatataatatcctcgttttgtagatgagaaaaatcaagacctagagaatgtctttaaatgaatgaagaaactcaatttttaaaaatatatatatttaaagtatacaacttgatgatttgctgccctcttaacaaatttcaagtattgttatctttagtcaccttgcacatgagatcgcccaagaaccaaagaattgaagtaaagtgcccaaggtcaaatagttaatggcaaagctgggattaaacataagtttataattccaaagtctatgccctttacctgtatcatcaatcaataactgttcatcagtgaaatcaactgtatgtctattctttatacctcagttttggcatatgcattgtacagatccacattaaatgatttgatctatgtttcacttctgtctataaaatgggtataaagagacctacttcgttggattattatcagaatcaaatgagaaaacatacatgtaaagtatgtgcctgacgcaaagtaagtccttgataacctgtagctatcattgttatcagagaaaagaaaaatacagacatataaatcctgtgtttgttctctagaattgatgaaatcaaaagttaagtctataaaaatctgacctgtccatttgttaccatgattattggagacatttgccatttcttcagtggtgcaagttattagttaccatataatatccacaaaaaccaagatgatagacctactttcattattcaaaacatgtaggaaaaattgtatataattttaggcaccacactctaaagggaacattgaaaacttgaagcaggtcaagaagaaaaaaactgaggtatggagaaaacttgaaattatattgtaggaagaatgtcggaggaactgcagatgtttacctgggagaagagtgaaaggatgggagggaagaggtgaggaagtagacatggaaattactgtatggatatttgcaaggctgctactatgtaggagacttattttttatgactctgggttggcagaactgcccaaanacagatttttgccttaatttaaggaaaaacttgtcccttagaactgtctgacaaaaggaatggagaaatgggctgcctctggagtagcgagtgttccagcatggantggattggcacttattggaggtgttgcagtgaaagttcattcattggataagtgttggattaaatgacctccaggttcccctttcaactcagaaagtcagtgacttaaattctgatccctacttaccaataatcactgaatagatttgacagtgatgcattcttttgtgttgcctgttcttccaattgttatttccttagtaacactcctcccgcccctggcaggttgtaacagttatgatagcaatgatttgtagtgactaccaaccctcagggaaccaggatactatagattcatagggttataagggaccttaaaggtcatttagtccagtcttgtagacttgattctctagggatatctggccacttttttagtgggnattttttaagacagttagtttataatgttactctaaactgacttgattttttagtaaaattgactggtatcagaaaactggtgtaagaaagctggcatgtgggaagtactcttggaagggaacaagataacagctgtccacttctaaaggccttgtaggtttcgttctctggcatcattaacattagcagagtaatacaatagtaataaccttgctaggcctaattaatttttctctgctttctttatctcatattaatgagttttcataaaaataagagaagattttaattctttttttccctcacattatcaatttgggacactggccattccagtgatggctgtcattgagtcaggaatcttgttttcaagattaaaattttatcatttgtatgtagatcattagaatacaaaatgccctcccccacttttgccatttttgctagaattggtgtcagaatagattcagttaggagcaaagttcagacacacatgttgattcagggatcagagtccaacaggtaaaaggctagaactaccgtaacaaatcaatgctgttttatttttatgttgtgtttaactaaaggacattctgtattgacaggccacatttgtgccatttcttttttagactaataatcattattggagaggagttgtctgctaatgtaactactttgtaattcatgctcattgtttaaaatacaaacaatttgaaaatgtttaaaatagaaagtaaaagtattccaggcccacaggaaactctgatgaggaagaaagtgcttcagaatctgaactttggaagggtccactaccagagacagatgaaaaatcacaggaagaagaatttgatgagtattttcaggatttgtttctatgagacgagagagagaagcctccgctccttaatgtgaaacttcatgaagttttaaacttcatgcaatttgaaattccatataagtttttatctgcaagttacagcttgtgtggtttgtctttggaaataaaaatccaggttctctcagaaaaaaaaaaaaaaaaaaaaaaaaaaaaaaaaaaaaacaaaaaaaaaaaaaaaaaaaaaaaaaaaaaaaaaaaaaaaaaaaaaaaccccnaaaaccaaccccancacacaataccacccccaccccaccacaccccactacacgcccacaatcncaatacccccccccaacaaaacaccacacccacaaaccaccaaaancccaaaccccatctcctatttctcctctttctatcagcctctttcatttcc

SEQ ID NO: 324773 - DNA, 1297 bp, Homo sapiens
cgggacccgtagggagaggcgggttgcgggcggcggcggcggcggcggcggcggtggtggttgtggcgaggctgtgcggcagggcgcacgggacctgtcctgcagcggctctctcaggccgtgggtcgtcgctgcagctgccgggaaagaaggaaacgacgactccgggggcgaacttggcacacagggaggaagggaaaggatgcatggtcatggaggctatgattctgattttagtgatgatgaacgctgtggagaatccagcaaaaggaaaaaaaggacagttgaagatgacttactgctccaaaaaccatttcagaaagaaaaacatggaaaggtggcccataaacaagttgcagcagaattgctggatagggaagaagcaagaaatagaaggtttcatctcatagctatggatgcttatcaaagacatacaaagttcgtaaatgactatattttatactatggtggcaaaaaagaagacttcaagcgtttgggggaaaatgacaagacagacttggatgttatacgagaaaatcatagattcctatggaatgaggaggacgaaatggacatgacttgggagaagagacttgctaagaaatactatgataaattatttaaggaatactgcatagcagatctcagtaaatataaagaaaataagtttggatttaggtggcgagtagaaaaagaagtaatttcaggaaaaggtcaatttttctgtggaaataaatattgtgataaaaaagaaggcttaaagagttgggaagttaattttggttatattgagcatggtgagaagagaaatgcacttgttaaattaaggttatgccaagaatgttccattaaattaaatttccatcacaggagaaaagaaatcaagtcaaaaaaaagaaaagataaaaccaaaaaagactgtgaagagtcatcacataaaaaatccagattatcttctgcagaagaggcctccaagaaaaaagataaaggacattcatcttcaaagaaatctgaagattctctacttagaaactctgatgaggaagaaagtgcttcagaatctgaactttggaagggtccactaccagagacagatgaaaaatcacaggaagaagaatttgatgagtattttcaggatttgtttctatgagacgagagagagaagcctccgctccttaatgtgaaacttcatgaagttttaaacttcatgcaatttgaaattccatataagtttttatctgcaagttacagcttgtgtggtttgtctttggaaataaaaatccaggttctctcagaa

SEQ ID NO: 324774 - DNA, 4003 bp, Homo sapiens
cgggacccgtagggagaggcgggttgcgggcggcggcggcggcggcggcggcggtggtggttgtggcgaggctgtgcggcagggcgcacgggacctgtcctgcagcggctctctcaggccgtgggtcgtcgctgcagctgccgggaaagaaggaaacgacgactccgggggcgaacttggcacacagggaggaagggaaaggatgcatggtcatggaggctatgattctgattttagtgatgatgaacgctgtggagaatccagcaaaaggaaaaaaaggacagttgaagatgacttactgctccaaaaaccatttcagaaagaaaaacatggaaaggtggcccataaacaagttgcagcagaattgctggatagggaagaagcaagaaatagaaggtttcatctcatagctatggatgcttatcaaagacatacaaagttcgtaaatgactatattttatactatggtggcaaaaaagaagacttcaagcgtttgggggaaaatgacaagacagacttggatgttatacgagaaaatcatagattcctatggaatgaggaggacgaaatggacatgacttgggagaagagacttgctaagaaatactatgataaattatttaaggaatactgcatagcagatctcagtaaatataaagaaaataagtttggatttaggtggcgagtagaaaaagaagtaatttcaggaaaaggtcaatttttctgtggaaataaatattgtgataaaaaagaaggcttaaagagttgggaagttaattttggttatattgagcatggtgagaagagaaatgcacttgttaaattaaggttatgccaagaatgttccattaaattaaatttccatcacaggagaaaagaaatcaagtcaaaaaaaagaaaagataaaaccaaaaaagactgtgaagagtcatcacataaaaaatccagattatcttctgcagaagaggcctccaagaaaaaagataaaggacattcatcttcaaagaaatctgaagattctctacttagaaactctgatgaggaagaaagtgcttcagaatctgaactttggaagggtccactaccagagacagatgaaaaatcacagtaagtgctgatattaatagagaatatgtaccttttcaatcagtttaggaagctataaccacagctttattaatggaaaaatacaacatcatggtgatctatttaatgccaaggactgcctagcctggtaagattagagcttattcccagccattgtcataagcagccaacacatccagcttcctcctggtaaataaatctttcatcagttcactttaacagatgaacctctggtccttgcttggatttcttcagagatggctgtttcctaagcttccagagaagcctattccatcatactgtgattatcataaacctatgcaagggaatcccttgcatgggaagtacacttctatactgctatcccactggtcttttaaaaagtaaaataataatatttactgttacaaatacataatatatttactatgctcagtgtagtaaaaaaactacagcctaaggagatttacccaattccccttagttattccccaatataacttaggcttacatttttccttaaaaatagtttcttttttattcacttcttgagcagactataatttaaaatgagaatgaacagagaagttataaagtaagcccacaaagtaaagagaagcaatgacatttcacaagtatttcaaagcaaaattttaggtaatacatttagggagaggtgccaccatatgaaatatttttattttaatcaatctgggtatagttatgattattctagaaactaagaattatttgatggctgaatcatggcgatatattgatatatagcagaatcagccaatatgttgacttaaagtattttatttttattaatctcatataatgtatcatgtagtaatttttttactctattgatcttaagtatgcttttttttttaaatagggaagaagaatttgatgagtattttcaggatttgtttctatgagacgagagagagaagcctccgctccttaatgtgaaacttcatgaagttttaaacttcatgcaatttgaaattccatataagtttttatctgcaagttacagcttgtgtggtttgtctttggaaataaaaatccaggttctctcagaatgtcagaggctttggaagttcattagttcaattaaagactttcctgtcctttaaatatcttttcaattgcttatctacaattctgttttatttgtagctcctagaggatagagctggacagattccattgttcctacattttgtaggttttttttcactgccttcattatgtatcttctcttgccttcattattttattttattatttcttctttttctcttttttagagccaccaatactggatttgtttgtttttcatttttttcttttgtggaaacggagtcctcctgtgttgcccaggctggtattcaaactcctggccttatgcattcctcccaccctggcctcccagagtgctgggattacaggtgtgagccaccatgctctgccaattattttaaattactaggattaaagtatattatgtatgtctttaacttctttctttcccattgataaactggcacccttcttttaagtacctgctctcccattaccacctatttccagctgctttttgaggttttttgcttgcctgtctcttgcttccttcttaacctctaccacttaagagagtttgttataatcaaatttgacttcctagcctgtggataatttactattaagtaaattattaccacagggagccagtgaggtcccagtagtctaaaacagttcatgtgttcacaaaaattgcctccccggcagagattatgcagtaagataatttaactgaataatactatgtgcatgtatcttgcctcagatatactcatgcaaatatgaatatacctctgatatggtttggctctgtgtccccacccaaatctcatcttgaatgtgtactcccataattcccacattttataggagggatccagtgagagataatttgaatcaagggggcggtttcccccatattgttcttgtggtagtgaataagtctcacaagatctgatggttttatcaggggcttctgcttttgcatccttctcattttcttttgctgctgccatgtaagaagtgccttttgcctcccaccatgattctgaggctttcccagccatgtggaactgtaagtccaattaaacctctttttcttccccagtctctggtatgtctttatcagcagtgtgaaaatggactaatagaacttctatgcagaaatataaaatgtaacttcttaacataaggtcctagtcgcaagggtctatggaggtgcttcaggagatccaagcctttttagaatctgtgcaaacttctgtgtatgttttttggaggaaaagtccataaatttcaaattttcaaaaatcagattttcaaaaggatttattgatttctgaaaactagcaaagatctgcttttataaagagcaaatagatggatagatataggagaagatgcttgacttgatgaataagagaaaggacatatagaaaatgaactgaacataagcaagtattttattgaagatatactattttaaataacatttaaacacggaatgattggcaataaactgcaaaatgagtaatttggtatcattttaaaatggttattatcagagattttccttttattaaacagttattcattaattccacaaatatttatcaggcttctattatatgtgaggcactgagctgggcatggctgtaaaggaaccatctaggaagtaattatgcaatcatttctgaacctgtttcagaaaagtaaatcagtgttgggtttatcagtgtttaacattgtttgatagtcccctcacttcttgaataaattgttttttttcacctcactacttgta

SEQ ID NO: 324775 - DNA, 7431 bp, Homo sapiens
  misc_feature (410)..(410): n is a, c, g, or t
  misc_feature (2094)..(2094): n is a, c, g, or t
  misc_feature (2200)..(2200): n is a, c, g, or t
  misc_feature (2582)..(2582): n is a, c, g, or t
  misc_feature (3527)..(3527): n is a, c, g, or t
  misc_feature (3553)..(3553): n is a, c, g, or t
ataaacattatttgcatttagtataattcttaacaagaaattttaaatattcaatgatcagaaattttgcactgagaaaaatagaaatgttaagatatttgttgtttaaaaatttagcagagagggagatgttgatggaggtattcctctcttaggaatatagtatattccttataattattttgcttgtacgaactttgttttcaacatatttgaagtgtcttaaagcactgactctttctctccacgtaaattctaatttatcaggaggtcctttcctaaattaggtaaaatgtagtgacagtttcgaaaatacattcaagtataagaccagtggaccaatgttatctcaggatgaaatcatagatacatacttcaacaaaggtgtacacaggctaaagtgggagagngtattttagttttcatccatttccaacagtgagaggtgtgaatgcttatgcaatatagaaaaaattcccctttttcagttctaattttttatccttaaaaagtcttttggggcaaattcttgaatcactgatttatattattcttttatttcttctgcctgccttctccttcccactgtctttcaccccctgccctttgaatccttccctgcttcctagaaatagcccttaatgctcttttacctctcctcagctaagtcaaatttttactagtagaagcagggtgaatactgtgaagactatatccaatctgagaaacccctagctaatttgatcttgaaaaaacaaactatccacttcaagctgacctgctgtttggcagccggtacgctatttaccatagcaagcatgaaacatatacattgttatggtatgccaaccccagatatcctctcaggtggtcagtcatctgtattacatggtcttggcaatttcagacctcacattttgctctttatttccatttggacaatactcagttaccttcttaacccatttgacacctggattattaaaaccaaatccatggagaaaaactcaatttctgttgggacagtaacaagtgctttagatatgttacctcatttaatcttaataatgtgcatataatatcctcgttttgtagatgagaaaaatcaagacctagagaatgtctttaaatgaatgaagaaactcaatttttaaaaatatatatatttaaagtatacaacttgatgatttgctgccctcttaacaaatttcaagtattgttatctttagtcaccttgcacatgagatcgcccaagaaccaaagaattgaagtaaagtgcccaaggtcaaatagttaatggcaaagctgggattaaacataagtttataattccaaagtctatgccctttacctgtatcatcaatcaataactgttcatcagtgaaatcaactgtatgtctattctttatacctcagttttggcatatgcattgtacagatccacattaaatgatttgatctatgtttcacttctgtctataaaatgggtataaagagacctacttcgttggattattatcagaatcaaatgagaaaacatacatgtaaagtatgtgcctgacgcaaagtaagtccttgataacctgtagctatcattgttatcagagaaaagaaaaatacagacatataaatcctgtgtttgttctctagaattgatgaaatcaaaagttaagtctataaaaatctgacctgtccatttgttaccatgattattggagacatttgccatttcttcagtggtgcaagttattagttaccatataatatccacaaaaaccaagatgatagacctactttcattattcaaaacatgtaggaaaaattgtatataattttaggcaccacactctaaagggaacattgaaaacttgaagcaggtcaagaagaaaaaaactgaggtatggagaaaacttgaaattatattgtaggaagaatgtcggaggaactgcagatgtttacctgggagaagagtgaaaggatgggagggaagaggtgaggaagtagacatggaaattactgtatggatatttgcaaggctgctactatgtaggagacttattttttatgactctgggttggcagaactgcccaaanacagatttttgccttaatttaaggaaaaacttgtcccttagaactgtctgacaaaaggaatggagaaatgggctgcctctggagtagcgagtgttccagcatggantggattggcacttattggaggtgttgcagtgaaagttcattcattggataagtgttggattaaatgacctccaggttcccctttcaactcagaaagtcagtgacttaaattctgatccctacttaccaataatcactgaatagatttgacagtgatgcattcttttgtgttgcctgttcttccaattgttatttccttagtaacactcctcccgcccctggcaggttgtaacagttatgatagcaatgatttgtagtgactaccaaccctcagggaaccaggatactatagattcatagggttataagggaccttaaaggtcatttagtccagtcttgtagacttgattctctagggatatctggccacttttttagtgggnattttttaagacagttagtttataatgttactctaaactgacttgattttttagtaaaattgactggtatcagaaaactggtgtaagaaagctggcatgtgggaagtactcttggaagggaacaagataacagctgtccacttctaaaggccttgtaggtttcgttctctggcatcattaacattagcagagtaatacaatagtaataaccttgctaggcctaattaatttttctctgctttctttatctcatattaatgagttttcataaaaataagagaagattttaattctttttttccctcacattatcaatttgggacactggccattccagtgatggctgtcattgagtcaggaatcttgttttcaagattaaaattttatcatttgtatgtagatcattagaatacaaaatgccctcccccacttttgccatttttgctagaattggtgtcagaatagattcagttaggagcaaagttcagacacacatgttgattcagggatcagagtccaacaggtaaaaggctagaactaccgtaacaaatcaatgctgttttatttttatgttgtgtttaactaaaggacattctgtattgacaggccacatttgtgccatttcttttttagactaataatcattattggagaggagttgtctgctaatgtaactactttgtgagttatagtgttattgtctgataattttgcagtatttttaaatttttagttgactaatacaggtgatttatttgaaacatatctattttgtcatctttaataaaatgtctttattgtttttactgattttgaaggtaattcatgctcattgtttaaaatacaaacaatttgaaaatgtttaaaatagaaagtaaaagtattccaggcccacaggtaatataatcagttaaatttggttggcttttgcaaacttacaatacntacataaaattacatgtatgtatatnatgtgcatatgtttttaacatatctattatactatgcatactttttgtaactttttaaaaatttgatatagaatggacatttttctattgcagtacatacagatatgctaatgtttttaaacagctgtatagtatttatttaaccagtccttaatccctaattggtggggaattaggttttttgttgttgttgttacacagtgtgcatctttgtacatatgtatcagaggtgcttatttatgtatgtaagtaatcaaattcctaaaagcagcattgctggtcaaagggtatgcgttttaaactgatctatattgccagatttttctccagaaaaaggtttacagaattttcactcccagcaatgtgtgagaatgccagtttcttccctgaaacaggcttcttctcattatgtaatcagcattggttttttaaaatgtctgacaattttttttaaaataatttaactagctggtcttacatactagctcagttcttaaggtactaatcctaatgtaaacatgttctctacaaatgtaaatcttaacttgcgtgtcttctgtgtaaccaagaaaaagaagaaactagatcagagacaactatattgcaagagataattgacttacaagagttgatattggaattgctactttaactcagtgtaacttagagaagtttcgatgagacttaaaatccttggcctttttgctgagattctttggtaacccttggcttatttatatatgttttaaaagaatttattgtacctgtgagagtgaattaaatttctagagagtcataaaagttgaagctgagttaaataaaaagttaattgtattggcgaataattcaaaatgtgctttaagtataataggtttttaaaaatcatcttttttaaatgaacaggaaactctgatgaggaagaaagtgcttcagaatctgaactttggaagggtccactaccagagacagatgaaaaatcacagtaagtgctgatattaatagagaatatgtaccttttcaatcagtttaggaagctataaccacagctttattaatggaaaaatacaacatcatggtgatctatttaatgccaaggactgcctagcctggtaagattagagcttattcccagccattgtcataagcagccaacacatccagcttcctcctggtaaataaatctttcatcagttcactttaacagatgaacctctggtccttgcttggatttcttcagagatggctgtttcctaagcttccagagaagcctattccatcatactgtgattatcataaacctatgcaagggaatcccttgcatgggaagtacacttctatactgctatcccactggtcttttaaaaagtaaaataataatatttactgttacaaatacataatatatttactatgctcagtgtagtaaaaaaactacagcctaaggagatttacccaattccccttagttattccccaatataacttaggcttacatttttccttaaaaatagtttcttttttattcacttcttgagcagactataatttaaaatgagaatgaacagagaagttataaagtaagcccacaaagtaaagagaagcaatgacatttcacaagtatttcaaagcaaaattttaggtaatacatttagggagaggtgccaccatatgaaatatttttattttaatcaatctgggtatagttatgattattctagaaactaagaattatttgatggctgaatcatggcgatatattgatatatagcagaatcagccaatatgttgacttaaagtattttatttttattaatctcatataatgtatcatgtagtaatttttttactctattgatcttaagtatgcttttttttttaaatagggaagaagaatttgatgagtattttcaggatttgtttctatgagacgagagagagaagcctccgctccttaatgtgaaacttcatgaagttttaaacttcatgcaatttgaaattccatataagtttttatctgcaagttacagcttgtgtggtttgtctttggaaataaaaatccaggttctctcagaatgtcagaggctttggaagttcattagttcaattaaagactttcctgtcctttaaatatcttttcaattgcttatctacaattctgttttatttgtagctcctagaggatagagctggacagattccattgttcctacattttgtaggttttttttcactgccttcattatgtatcttctcttgccttcattattttattttattatttcttctttttctcttttttagagccaccaatactggatttgtttgtttttcatttttttcttttgtggaaacggagtcctcctgtgttgcccaggctggtattcaaactcctggccttatgcattcctcccaccctggcctcccagagtgctgggattacaggtgtgagccaccatgctctgccaattattttaaattactaggattaaagtatattatgtatgtctttaacttctttctttcccattgataaactggcacccttcttttaagtacctgctctcccattaccacctatttccagctgctttttgaggttttttgcttgcctgtctcttgcttccttcttaacctctaccacttaagagagtttgttataatcaaatttgacttcctagcctgtggataatttactattaagtaaattattaccacagggagccagtgaggtcccagtagtctaaaacagttcatgtgttcacaaaaattgcctccccggcagagattatgcagtaagataatttaactgaataatactatgtgcatgtatcttgcctcagatatactcatgcaaatatgaatatacctctgatatggtttggctctgtgtccccacccaaatctcatcttgaatgtgtactcccataattcccacattttataggagggatccagtgagagataatttgaatcaagggggcggtttcccccatattgttcttgtggtagtgaataagtctcacaagatctgatggttttatcaggggcttctgcttttgcatccttctcattttcttttgctgctgccatgtaagaagtgccttttgcctcccaccatgattctgaggctttcccagccatgtggaactgtaagtccaattaaacctctttttcttccccagtctctggtatgtctttatcagcagtgtgaaaatggactaatagaacttctatgcagaaatataaaatgtaacttcttaacataaggtcctagtcgcaagggtctatggaggtgcttcaggagatccaagcctttttagaatctgtgcaaacttctgtgtatgttttttggaggaaaagtccataaatttcaaattttcaaaaatcagattttcaaaaggatttattgatttctgaaaactagcaaagatctgcttttataaagagcaaatagatggatagatataggagaagatgcttgacttgatgaataagagaaaggacatatagaaaatgaactgaacataagcaagtattttattgaagatatactattttaaataacatttaaacacggaatgattggcaataaactgcaaaatgagtaatttggtatcattttaaaatggttattatcagagattttccttttattaaacagttattcattaattccacaaatatttatcaggcttctattatatgtgaggcactgagctgggcatggctgtaaaggaaccatctaggaagtaattatgcaatcatttctgaacctgtttcagaaaagtaaatcagtgttgggtttatcagtgtttaacattgtttgatagtcccctcacttcttgaataaattgttttttttcacctcactacttgta

SEQ ID NO: 324776 - DNA, 449 bp, Homo sapiens
ctggtacactaaggtaagaacccaggagagagaaagccctctgtccttgtgataagtcagagagtctaactgagctgattaatgcaagccacctgcagacggctaaactgaaagagtgcactgtaacacacgtccactggggcttccagagctgtaaacactcaaccctagatgctgctgtggagtcagtgctctccacgacctgcccttctgcatgctcccctaagggtatgagcagtagggcaccaaagaagcgagccacacccccatcacatgtcctgcaatggggataagggaacttttcccatttcaatagtgagtgagttctcacagatctgattgttttataagcacctggcatttcccctgcttgcactcactgcatcctgctgccctgtgaagaaggcacctgcttctcctttgccttccaccatgattttaagtttcct

SEQ ID NO: 324777 - DNA, 2542 bp, Homo sapiens
cgcccccaccgccacccaaccaagcatcacccattccagcacttccggcctgacccctgtccagcgcctttcctttctccagcttctgctctgccccaagagtggtcgccttcgtggcagggcacgactctctcccagctcgggtcgccgcccacattagtgtggggccctgcggcctagcgtccctcaccagaggcctccccttgcctagctggaccgccgagggacatcgacgagtatcctcctcctgctgtccccggcttcgcctgccgcccctaaccggccagtcaagatggccgccgctgggtgaggcaagctggcgcgccgcgggggcgtctgggagttgtagttcgggacggcgggctgacgcacttcgccgccggccgacgggcgccattgtgcggcgcgcgccggagtatcctgagctccagctggaccctaaattggatcctcttcctgctgagagtcccctaatgaacattgaggttgttgaggtcctcacactgaaccaggaggtggctggtccccggaatgcccagatccaggccctatatgctgaagatggaagcctgagtgcagatgcccccagtgagcaggtccaacagcagggcaagcatccaggtgaccctgaggccgcgcgccagaggttccggcagttccgttataaggacatgacaggtccccgggaggccctggaccagctccgagagctgtgtcaccagtggctacagcctaaggcacgctccaaggagcagatcctggagctgctggtgctggagcagttcctaggtgcactgcctgtgaagctccggacatgggtggaatcgcagcacccagagaactgccaagaggtggtggccctggtagagggtgtgacctggatgtctgaggaggaagtacttcctgcaggacaacctgccgagggcaccacctgctgcctcgaggtcactgcccagcaggaggagaagcaggaggatgcagccatctgcccagtgacagtgctccctgaggagccagtgaccttccaggatgtggctgtggacttcagccgggaggagtgggggctgctgggcccgacacagaggaccgagtaccgcgatgtgatgctggagacctttgggcacctggtctctgtggggtgggagactacactggaaaataaagagttagctccaaattctgacattcctgaggaagaaccagcccccagcctgaaagtacaagaatcctcaagggattgtgccttgtcctctacattagaagataccttgcagggtggggtccaggaagtccaagacacagtgttgaagcagatggagtctgctcaggaaaaagaccttcctcagaagaagcactttgacaaccgtgagtcccaggcaaacagtggtgctcttgacacaaaccaagtttcgctccagaaaattgacaaccctgagtcccaggcaaacagtggcgctcttgacacaaaccaagttttgctccacaaaattcctcctagaaaacgattgcgcaaacgtgactcacaagttaaaagtatgaaacataattcacgtgtaaaaattcatcagaagagctgtgaaaggcaaaaggccaaggaaggcaatggttgtaggaaaaccttcagtcggagtactaaacagattacgtttataagaattcacaaggggagccaagtttgccgatgcagtgaatgtggtaaaatattccggaacccaagatacttttctgtgcataagaaaatccataccggagagaggccctatgtgtgtcaagactgtgggaaaggatttgttcagagctcttccctcacacagcatcagagagttcattctggagagagaccatttgaatgtcaggagtgtgggaggaccttcaatgatcgctcagccatctcccagcacctgaggactcacactggcgctaagccctacaagtgtcaggactgtggaaaagccttccgccagagctcccacctcatcagacatcagaggactcacaccggggagcgcccatatgcatgcaacaaatgtggaaaggccttcacccagagctcacaccttattgggcaccagagaacccacaataggacaaagcgaaagaagaaacagcctacctcatagctctcaagccagttgaagaaaccttgccttttcagcttgaccctgcaatataacatgcacaggcctgcttgtgaatcaggactgaatgtgaaagggaagtattgagtgaggacattcccaaaaccaaaggacaactgaggagactgcccagcacataatgaataaataagaaaatgagtgaggagttattaacatcatttggaaaaaagatttcccattcacttgatattgtttgttcactcatttagtcattaaaagtgagattaataaaatctgaaaatgttatataataactttaaaaagccaggtaattaataatctgcactgatattacatccacagtaccacagtatttatgtgtatgaattaaggattaaaagataatgtggataaataaactattgatctatgtctgtgtagaa

SEQ ID NO: 324778 - DNA, 2525 bp, Homo sapiens
  misc_feature (1362)..(1362): n is a, c, g, or t
  misc_feature (1402)..(1402): n is a, c, g, or t
  misc_feature (1404)..(1404): n is a, c, g, or t
  misc_feature (1817)..(1817): n is a, c, g, or t
  misc_feature (1860)..(1860): n is a, c, g, or t
cgcccccaccgccacccaaccaagcatcacccattccagcacttccggcctgacccctgtccagcgcctttcctttctccagcttctgctctgccccaagagtggtcgccttcgtggcagggcacgactctctcccagctcgggtcgccgcccacattagtgtggggccctgcggcctagcgtccctcaccagaggcctccccttgcctagctggaccgccgagggacatcgacgagtatcctcctcctgctgtccccggcttcgcctgccgcccctaaccggccagtcaagatggccgccgctgggtgaggcaagctggcgcgccgcgggggcgtctgggagttgtagttcgggacggcgggctgacgcacttcgccgccggccgacgggcgccattgtgcggcgcgcgccgggtgagtgccgcgcgaaacctgcgtccgtcgggggctgcgctgggcgggtccagaaccgttagttgggggcgagcgcggcctctgcattttccgccgagctcgggtaccctgagccggccgtgcctgcagtcctcccgccgctctgtgggatggggtcggtgacccggaaccccgaggggagacagtgctttcagggcgccgcggtggagagaacagatcgcctccggaagcgtggggtctgggccagggaggcgatcccctccgatgcgcgggacagaggaggctcggtgtcctctcggggaggggaaaactggtcctatccagtcctgtgggagtcctatgactcactctgggcgttttccagtttgggtggacttgtcatttcccgctgagggagccgttcctgggcggaggctgcggtagctccccagcggacaccttaagcctctccctcccctcccaacttcggtttcctcaggactctgcccacttccaccagagacacattgagaaggaggaaactatggcctccaggcttccgacggcctggtcctgtgtgagtagaggcttccttcagcttttgagtccgctactgcacctgggaggatgcggatggtggtgagataccaccttccctgagatacccccatcctccagagcacctcggggagggggtagagattggttgggcatgagagatcctgcgtgatggtggaaccgcaggttgcttggttttccaagggtgtagttagaatagagaccagattgtaggggcttctgaaggccaggttaaggctcttgcttgtatcctttatattgggaagagtaattgacaggtcttttgtttgtttgttttttgttttttgagatggagtctccctctgtcgcccaggctggagtgcagtggcgcgatcttggctcactgcaacctccgcctcctgggttcangtgattctcctgcctcagcctccccgagtagctgggactncnggcgtgtgccaccatacccagctaattttttttatttttattttttgtgtgtgttttttgtggagacggggtttcaccatgttggccaggctggtctggaactcttgacctaaggtgatccgaccatctcggcctcccaaaggtctatgcagggatcaggcttatgtttagatttcagcagataaattggcatcaagcaagaggtgacagcagcagagttcaataacaagtagaaaagacaggtgaggatggatccctgacaggtgaaggagatagaaagaagcatcagggccctgggtaggggctgacggcttgggtgtgatggtgcagctcagagaattccctaggaggcatacgcaccactcccaaagtcagaattttcaaatgaataagaaatagggggccgggcgcgnttttcatatgctacagagatctcatgtgttgctctccttattntaacctgaatagagtcaagcttgggtttgcttggggtttcagacaaagacaggaactcaggatgagactcccaaaatgcccttgggtcatcttgtagaccattctgtgctttcactggcctggtcagcctcccctgtctttcttttgtcgtggatgcggatggcctgtggctgaacaagaatctggatttttaggaaccagtgacctttgaagatgtaacactgggttttaccccggaagagtggggactgctggacctcaaacagaagtccctgtacagggaagtgatgctggagaactacaggaacctggtctcagtgggtaaggctggcctccaggtcaagaaggatctgtgctttgtagcacaaatgtagcacctctgaagtatgtgtctgcttgggctcagactgcaggggcaccagtaggaaaagggcagcttttcagtatgacttctgaatcattgcctagtccatccctccctgaataccagggagatgggtctgtcagggatgttttcagctgcagtagtggatgcttattgttcttgcaacaagagttccggccaggcatggtggctcactttaggagactgaagcaggaggattgcttgagcccaggagtttgagaccagcatgggcaacatagaccgtgtctctattaaaaaa

SEQ ID NO: 324779 - DNA, 4405 bp, Homo sapiens
  misc_feature (1362)..(1362): n is a, c, g, or t
  misc_feature (1402)..(1402): n is a, c, g, or t
  misc_feature (1404)..(1404): n is a, c, g, or t
  misc_feature (1817)..(1817): n is a, c, g, or t
  misc_feature (1860)..(1860): n is a, c, g, or t
cgcccccaccgccacccaaccaagcatcacccattccagcacttccggcctgacccctgtccagcgcctttcctttctccagcttctgctctgccccaagagtggtcgccttcgtggcagggcacgactctctcccagctcgggtcgccgcccacattagtgtggggccctgcggcctagcgtccctcaccagaggcctccccttgcctagctggaccgccgagggacatcgacgagtatcctcctcctgctgtccccggcttcgcctgccgcccctaaccggccagtcaagatggccgccgctgggtgaggcaagctggcgcgccgcgggggcgtctgggagttgtagttcgggacggcgggctgacgcacttcgccgccggccgacgggcgccattgtgcggcgcgcgccgggtgagtgccgcgcgaaacctgcgtccgtcgggggctgcgctgggcgggtccagaaccgttagttgggggcgagcgcggcctctgcattttccgccgagctcgggtaccctgagccggccgtgcctgcagtcctcccgccgctctgtgggatggggtcggtgacccggaaccccgaggggagacagtgctttcagggcgccgcggtggagagaacagatcgcctccggaagcgtggggtctgggccagggaggcgatcccctccgatgcgcgggacagaggaggctcggtgtcctctcggggaggggaaaactggtcctatccagtcctgtgggagtcctatgactcactctgggcgttttccagtttgggtggacttgtcatttcccgctgagggagccgttcctgggcggaggctgcggtagctccccagcggacaccttaagcctctccctcccctcccaacttcggtttcctcaggactctgcccacttccaccagagacacattgagaaggaggaaactatggcctccaggcttccgacggcctggtcctgtgtgagtagaggcttccttcagcttttgagtccgctactgcacctgggaggatgcggatggtggtgagataccaccttccctgagatacccccatcctccagagcacctcggggagggggtagagattggttgggcatgagagatcctgcgtgatggtggaaccgcaggttgcttggttttccaagggtgtagttagaatagagaccagattgtaggggcttctgaaggccaggttaaggctcttgcttgtatcctttatattgggaagagtaattgacaggtcttttgtttgtttgttttttgttttttgagatggagtctccctctgtcgcccaggctggagtgcagtggcgcgatcttggctcactgcaacctccgcctcctgggttcangtgattctcctgcctcagcctccccgagtagctgggactncnggcgtgtgccaccatacccagctaattttttttatttttattttttgtgtgtgttttttgtggagacggggtttcaccatgttggccaggctggtctggaactcttgacctaaggtgatccgaccatctcggcctcccaaaggtctatgcagggatcaggcttatgtttagatttcagcagataaattggcatcaagcaagaggtgacagcagcagagttcaataacaagtagaaaagacaggtgaggatggatccctgacaggtgaaggagatagaaagaagcatcagggccctgggtaggggctgacggcttgggtgtgatggtgcagctcagagaattccctaggaggcatacgcaccactcccaaagtcagaattttcaaatgaataagaaatagggggccgggcgcgnttttcatatgctacagagatctcatgtgttgctctccttattntaacctgaatagagtcaagcttgggtttgcttggggtttcagacaaagacaggaactcaggatgagactcccaaaatgcccttgggtcatcttgtagaccattctgtgctttcactggcctggtcagcctcccctgtctttcttttgtcgtggatgcggatggcctgtggctgaacaagaatctggatttttaggaaccagtgacctttgaagatgtaacactgggttttaccccggaagagtggggactgctggacctcaaacagaagtccctgtacagggaagtgatgctggagaactacaggaacctggtctcagtggaacatcagctttccaaaccagatgtggtatctcagttagaggaggcagaagatttctggccagtggagagaggaattcctcaagacaccattccagagtatcctgagctccagctggaccctaaattggatcctcttcctgctgagagtcccctaatgaacattgaggttgttgaggtcctcacactgaaccaggaggtggctggtccccggaatgcccagatccaggccctatatgctgaagatggaagcctgagtgcagatgcccccagtgagcaggtccaacagcagggcaagcatccaggtgaccctgaggccgcgcgccagaggttccggcagttccgttataaggacatgacaggtccccgggaggccctggaccagctccgagagctgtgtcaccagtggctacagcctaaggcacgctccaaggagcagatcctggagctgctggtgctggagcagttcctaggtgcactgcctgtgaagctccggacatgggtggaatcgcagcacccagagaactgccaagaggtggtggccctggtagagggtgtgacctggatgtctgaggaggaagtacttcctgcaggacaacctgccgagggcaccacctgctgcctcgaggtcactgcccagcaggaggagaagcaggaggatgcagccatctgcccagtgacagtgctccctgaggagccagtgaccttccaggatgtggctgtggacttcagccgggaggagtgggggctgctgggcccgacacagaggaccgagtaccgcgatgtgatgctggagacctttgggcacctggtctctgtggggtgggagactacactggaaaataaagagttagctccaaattctgacattcctgaggaagaaccagcccccagcctgaaagtacaagaatcctcaagggattgtgccttgtcctctacattagaagataccttgcagggtggggtccaggaagtccaagacacagtgttgaagcagatggagtctgctcaggaaaaagaccttcctcagaagaagcactttgacaaccgtgagtcccaggcaaacagtggtgctcttgacacaaaccaagtttcgctccagaaaattgacaaccctgagtcccaggcaaacagtggcgctcttgacacaaaccaagttttgctccacaaaattcctcctagaaaacgattgcgcaaacgtgactcacaagttaaaagtatgaaacataattcacgtgtaaaaattcatcagaagagctgtgaaaggcaaaaggccaaggaaggcaatggttgtaggaaaaccttcagtcggagtactaaacagattacgtttataagaattcacaaggggagccaagtttgccgatgcagtgaatgtggtaaaatattccggaacccaagatacttttctgtgcataagaaaatccataccggagagaggccctatgtgtgtcaagactgtgggaaaggatttgttcagagctcttccctcacacagcatcagagagttcattctggagagagaccatttgaatgtcaggagtgtgggaggaccttcaatgatcgctcagccatctcccagcacctgaggactcacactggcgctaagccctacaagtgtcaggactgtggaaaagccttccgccagagctcccacctcatcagacatcagaggactcacaccggggagcgcccatatgcatgcaacaaatgtggaaaggccttcacccagagctcacaccttattgggcaccagagaacccacaataggacaaagcgaaagaagaaacagcctacctcatagctctcaagccagttgaagaaaccttgccttttcagcttgaccctgcaatataacatgcacaggcctgcttgtgaatcaggactgaatgtgaaagggaagtattgagtgaggacattcccaaaaccaaaggacaactgaggagactgcccagcacataatgaataaataagaaaatgagtgaggagttattaacatcatttggaaaaaagatttcccattcacttgatattgtttgttcactcatttagtcattaaaagtgagattaataaaatctgaaaatgttatataataactttaaaaagccaggtaattaataatctgcactgatattacatccacagtaccacagtatttatgtgtatgaattaaggattaaaagataatgtggataaataaactattgatctatgtctgtgtagaa

SEQ ID NO: 324780 - DNA, 1570 bp, Homo sapiens
cgcccccaccgccacccaaccaagcatcacccattccagcacttccggcctgacccctgtccagcgcctttcctttctccagcttctgctctgccccaagagtggtcgccttcgtggcagggcacgactctctcccagctcgggtcgccgcccacattagtgtggggccctgcggcctagcgtccctcaccagaggcctccccttgcctagctggaccgccgagggacatcgacgagtatcctcctcctgctgtccccggcttcgcctgccgcccctaaccggccagtcaagatggccgccgctgggtgaggcaagctggcgcgccgcgggggcgtctgggagttgtagttcgggacggcgggctgacgcacttcgccgccggccgacgggcgccattgtgcggcgcgcgccgggactctgcccacttccaccagagacacattgagaaggaggaaactatggcctccaggcttccgacggcctggtcctgtgaaccagtgacctttgaagatgtaacactgggttttaccccggaagagtggggactgctggacctcaaacagaagtccctgtacagggaagtgatgctggagaactacaggaacctggtctcagtggaacatcagctttccaaaccagatgtggtatctcagttagaggaggcagaagatttctggccagtggagagaggaattcctcaagacaccattccagagtatcctgagctccagctggaccctaaattggatcctcttcctgctgagagtcccctaatgaacattgaggttgttgaggtcctcacactgaaccaggaggtggctggtccccggaatgcccagatccaggccctatatgctgaagatggaagcctgagtgcagatgcccccagtgagcaggtccaacagcagggcaagcatccaggtgaccctgaggccgcgcgccagaggttccggcagttccgttataaggacatgacaggtccccgggaggccctggaccagctccgagagctgtgtcaccagtggctacagcctaaggcacgctccaaggagcagatcctggagctgctggtgctggagcagttcctaggtgcactgcctgtgaagctccggacatgggtggaatcgcagcacccagagaactgccaagaggtggtggccctggtagagggtgtgacctggatgtctgaggaggaagtacttcctgcaggacaacctgccgagggcaccacctgctgcctcgaggtcactgcccagcaggaggagaagcaggaggatgcagccatctgcccagtgacagtgctccctgaggagccagtgaccttccaggatgtggctgtggacttcagccgggaggagtgggggctgctgggcccgacacagaggaccgagtaccgcgatgtgatgctggagacctttgggcacctggtctctgtggggtgggagactccactgaaacacatctgtagaccactaagtttatccttgtcacccagtttgctcttggaaagagtctgttcccttttgtcactgaaccaatcatgacataaacttgtgctttacctcctat

SEQ ID NO: 324781 - DNA, 2097 bp, Homo sapiens
  misc_feature (1362)..(1362): n is a, c, g, or t
  misc_feature (1402)..(1402): n is a, c, g, or t
  misc_feature (1404)..(1404): n is a, c, g, or t
cgcccccaccgccacccaaccaagcatcacccattccagcacttccggcctgacccctgtccagcgcctttcctttctccagcttctgctctgccccaagagtggtcgccttcgtggcagggcacgactctctcccagctcgggtcgccgcccacattagtgtggggccctgcggcctagcgtccctcaccagaggcctccccttgcctagctggaccgccgagggacatcgacgagtatcctcctcctgctgtccccggcttcgcctgccgcccctaaccggccagtcaagatggccgccgctgggtgaggcaagctggcgcgccgcgggggcgtctgggagttgtagttcgggacggcgggctgacgcacttcgccgccggccgacgggcgccattgtgcggcgcgcgccgggtgagtgccgcgcgaaacctgcgtccgtcgggggctgcgctgggcgggtccagaaccgttagttgggggcgagcgcggcctctgcattttccgccgagctcgggtaccctgagccggccgtgcctgcagtcctcccgccgctctgtgggatggggtcggtgacccggaaccccgaggggagacagtgctttcagggcgccgcggtggagagaacagatcgcctccggaagcgtggggtctgggccagggaggcgatcccctccgatgcgcgggacagaggaggctcggtgtcctctcggggaggggaaaactggtcctatccagtcctgtgggagtcctatgactcactctgggcgttttccagtttgggtggacttgtcatttcccgctgagggagccgttcctgggcggaggctgcggtagctccccagcggacaccttaagcctctccctcccctcccaacttcggtttcctcaggactctgcccacttccaccagagacacattgagaaggaggaaactatggcctccaggcttccgacggcctggtcctgtgtgagtagaggcttccttcagcttttgagtccgctactgcacctgggaggatgcggatggtggtgagataccaccttccctgagatacccccatcctccagagcacctcggggagggggtagagattggttgggcatgagagatcctgcgtgatggtggaaccgcaggttgcttggttttccaagggtgtagttagaatagagaccagattgtaggggcttctgaaggccaggttaaggctcttgcttgtatcctttatattgggaagagtaattgacaggtcttttgtttgtttgttttttgttttttgagatggagtctccctctgtcgcccaggctggagtgcagtggcgcgatcttggctcactgcaacctccgcctcctgggttcangtgattctcctgcctcagcctccccgagtagctgggactncnggcgtgtgccaccatacccagctaattttttttatttttattttttgtgtgtgttttttgtggagacggggtttcaccatgttggccaggctggtctggaactcttgacctaaggtgatccgaccatctcggcctcccaaaggtctatgcagggatcaggcttatgtttagatttcagcagataaattggcatcaagcaagaggtgacagcagcagagttcaataacaagtagaaaagacaggtgaggatggatccctgacaggtgaaggagatagaaagaagcatcagggccctgggtaggggctgacggcttgggtgtgatggtgcagctcagagaattccctaggaggcatacgcaccactcccaaagtcagaattttcaaatgaataagaaatagggggccgggcgcggtggctcacgtctgtaatcccagcactttgggaggccgaggcaggtggatcacgaggtcaggagattgagaccatcctggctaacatagtgaaaccccgtctctacttaaaaaaatacaaaaaattagccgggcgtggtggcgggcgcctgtagtcccagctactcgggaggctgaggcaggagaatggcgtgaaccggggaggcggagcttgcagtgagccgagatggcgccactgcactccagcctgggcgacagagagagactccgtctcaaaaaaaa

SEQ ID NO: 324782 - DNA, 408 bp, Homo sapiens
gctgcctcgaggtcactgcccagcaggaggagaagcaggaggatgcagccatctgcccagtgacagtgctccctgaggtaagcggggagtatcaccctgttttggtcacagcatctcctgtgaggcaggcccacccctgaggcatccactctgccctgggctttcctaagacctcccacaggctgggacattctgagattctgagctcttaggtctgtgctgaagcaatctgagtatgaagagcagccctgccctccagccactgtggcatcactggagacaacgcatggtgacccgggagctgagaaagcaggaggcaagagggaagggactaagtgtttacagagacttgagaggtggaactaccacaggcaggcacatctgtatccaggtcagaacaagagagcc

SEQ ID NO: 324783 - DNA, 2747 bp, Homo sapiens
cgcccccaccgccacccaaccaagcatcacccattccagcacttccggcctgacccctgtccagcgcctttcctttctccagcttctgctctgccccaagagtggtcgccttcgtggcagggcacgactctctcccagctcgggtcgccgcccacattagtgtggggccctgcggcctagcgtccctcaccagaggcctccccttgcctagctggaccgccgagggacatcgacgagtatcctcctcctgctgtccccggcttcgcctgccgcccctaaccggccagtcaagatggccgccgctgggtgaggcaagctggcgcgccgcgggggcgtctgggagttgtagttcgggacggcgggctgacgcacttcgccgccggccgacgggcgccattgtgcggcgcgcgccgggactctgcccacttccaccagagacacattgagaaggaggaaactatggcctccaggcttccgacggcctggtcctgtgaaccagtgacctttgaagatgtaacactgggttttaccccggaagagtggggactgctggacctcaaacagaagtccctgtacagggaagtgatgctggagaactacaggaacctggtctcagtggagtatcctgagctccagctggaccctaaattggatcctcttcctgctgagagtcccctaatgaacattgaggttgttgaggtcctcacactgaaccaggaggtggctggtccccggaatgcccagatccaggccctatatgctgaagatggaagcctgagtgcagatgcccccagtgagcaggtccaacagcagggcaagcatccaggtgaccctgaggccgcgcgccagaggttccggcagttccgttataaggacatgacaggtccccgggaggccctggaccagctccgagagctgtgtcaccagtggctacagcctaaggcacgctccaaggagcagatcctggagctgctggtgctggagcagttcctaggtgcactgcctgtgaagctccggacatgggtggaatcgcagcacccagagaactgccaagaggtggtggccctggtagagggtgtgacctggatgtctgaggaggaagtacttcctgcaggacaacctgccgagggcaccacctgctgcctcgaggtcactgcccagcaggaggagaagcaggaggatgcagccatctgcccagtgacagtgctccctgaggagccagtgaccttccaggatgtggctgtggacttcagccgggaggagtgggggctgctgggcccgacacagaggaccgagtaccgcgatgtgatgctggagacctttgggcacctggtctctgtggggtgggagactacactggaaaataaagagttagctccaaattctgacattcctgaggaagaaccagcccccagcctgaaagtacaagaatcctcaagggattgtgccttgtcctctacattagaagataccttgcagggtggggtccaggaagtccaagacacagtgttgaagcagatggagtctgctcaggaaaaagaccttcctcagaagaagcactttgacaaccgtgagtcccaggcaaacagtggtgctcttgacacaaaccaagtttcgctccagaaaattgacaaccctgagtcccaggcaaacagtggcgctcttgacacaaaccaagttttgctccacaaaattcctcctagaaaacgattgcgcaaacgtgactcacaagttaaaagtatgaaacataattcacgtgtaaaaattcatcagaagagctgtgaaaggcaaaaggccaaggaaggcaatggttgtaggaaaaccttcagtcggagtactaaacagattacgtttataagaattcacaaggggagccaagtttgccgatgcagtgaatgtggtaaaatattccggaacccaagatacttttctgtgcataagaaaatccataccggagagaggccctatgtgtgtcaagactgtgggaaaggatttgttcagagctcttccctcacacagcatcagagagttcattctggagagagaccatttgaatgtcaggagtgtgggaggaccttcaatgatcgctcagccatctcccagcacctgaggactcacactggcgctaagccctacaagtgtcaggactgtggaaaagccttccgccagagctcccacctcatcagacatcagaggactcacaccggggagcgcccatatgcatgcaacaaatgtggaaaggccttcacccagagctcacaccttattgggcaccagagaacccacaataggacaaagcgaaagaagaaacagcctacctcatagctctcaagccagttgaagaaaccttgccttttcagcttgaccctgcaatataacatgcacaggcctgcttgtgaatcaggactgaatgtgaaagggaagtattgagtgaggacattcccaaaaccaaaggacaactgaggagactgcccagcacataatgaataaataagaaaatgagtgaggagttattaacatcatttggaaaaaagatttcccattcacttgatattgtttgttcactcatttagtcattaaaagtgagattaataaaatctgaaaatgttatataataactttaaaaagccaggtaattaataatctgcactgatattacatccacagtaccacagtatttatgtgtatgaattaaggattaaaagataatgtggataaataaactattgatctatgtctgtgtagaa

SEQ ID NO: 324784 - DNA, 2843 bp, Homo sapiens
cgcccccaccgccacccaaccaagcatcacccattccagcacttccggcctgacccctgtccagcgcctttcctttctccagcttctgctctgccccaagagtggtcgccttcgtggcagggcacgactctctcccagctcgggtcgccgcccacattagtgtggggccctgcggcctagcgtccctcaccagaggcctccccttgcctagctggaccgccgagggacatcgacgagtatcctcctcctgctgtccccggcttcgcctgccgcccctaaccggccagtcaagatggccgccgctgggtgaggcaagctggcgcgccgcgggggcgtctgggagttgtagttcgggacggcgggctgacgcacttcgccgccggccgacgggcgccattgtgcggcgcgcgccgggactctgcccacttccaccagagacacattgagaaggaggaaactatggcctccaggcttccgacggcctggtcctgtgaaccagtgacctttgaagatgtaacactgggttttaccccggaagagtggggactgctggacctcaaacagaagtccctgtacagggaagtgatgctggagaactacaggaacctggtctcagtggaacatcagctttccaaaccagatgtggtatctcagttagaggaggcagaagatttctggccagtggagagaggaattcctcaagacaccattccagagtatcctgagctccagctggaccctaaattggatcctcttcctgctgagagtcccctaatgaacattgaggttgttgaggtcctcacactgaaccaggaggtggctggtccccggaatgcccagatccaggccctatatgctgaagatggaagcctgagtgcagatgcccccagtgagcaggtccaacagcagggcaagcatccaggtgaccctgaggccgcgcgccagaggttccggcagttccgttataaggacatgacaggtccccgggaggccctggaccagctccgagagctgtgtcaccagtggctacagcctaaggcacgctccaaggagcagatcctggagctgctggtgctggagcagttcctaggtgcactgcctgtgaagctccggacatgggtggaatcgcagcacccagagaactgccaagaggtggtggccctggtagagggtgtgacctggatgtctgaggaggaagtacttcctgcaggacaacctgccgagggcaccacctgctgcctcgaggtcactgcccagcaggaggagaagcaggaggatgcagccatctgcccagtgacagtgctccctgaggagccagtgaccttccaggatgtggctgtggacttcagccgggaggagtgggggctgctgggcccgacacagaggaccgagtaccgcgatgtgatgctggagacctttgggcacctggtctctgtggggtgggagactacactggaaaataaagagttagctccaaattctgacattcctgaggaagaaccagcccccagcctgaaagtacaagaatcctcaagggattgtgccttgtcctctacattagaagataccttgcagggtggggtccaggaagtccaagacacagtgttgaagcagatggagtctgctcaggaaaaagaccttcctcagaagaagcactttgacaaccgtgagtcccaggcaaacagtggtgctcttgacacaaaccaagtttcgctccagaaaattgacaaccctgagtcccaggcaaacagtggcgctcttgacacaaaccaagttttgctccacaaaattcctcctagaaaacgattgcgcaaacgtgactcacaagttaaaagtatgaaacataattcacgtgtaaaaattcatcagaagagctgtgaaaggcaaaaggccaaggaaggcaatggttgtaggaaaaccttcagtcggagtactaaacagattacgtttataagaattcacaaggggagccaagtttgccgatgcagtgaatgtggtaaaatattccggaacccaagatacttttctgtgcataagaaaatccataccggagagaggccctatgtgtgtcaagactgtgggaaaggatttgttcagagctcttccctcacacagcatcagagagttcattctggagagagaccatttgaatgtcaggagtgtgggaggaccttcaatgatcgctcagccatctcccagcacctgaggactcacactggcgctaagccctacaagtgtcaggactgtggaaaagccttccgccagagctcccacctcatcagacatcagaggactcacaccggggagcgcccatatgcatgcaacaaatgtggaaaggccttcacccagagctcacaccttattgggcaccagagaacccacaataggacaaagcgaaagaagaaacagcctacctcatagctctcaagccagttgaagaaaccttgccttttcagcttgaccctgcaatataacatgcacaggcctgcttgtgaatcaggactgaatgtgaaagggaagtattgagtgaggacattcccaaaaccaaaggacaactgaggagactgcccagcacataatgaataaataagaaaatgagtgaggagttattaacatcatttggaaaaaagatttcccattcacttgatattgtttgttcactcatttagtcattaaaagtgagattaataaaatctgaaaatgttatataataactttaaaaagccaggtaattaataatctgcactgatattacatccacagtaccacagtatttatgtgtatgaattaaggattaaaagataatgtggataaataaactattgatctatgtctgtgtagaa

SEQ ID NO: 324785 - DNA, 2317 bp, Homo sapiens
agaggttctgacagagctcacagtgctagggtctctcctgctttggggatttgctcagagacaccaacccaggcccacaagagttctactgggaacatcagctttccaaaccagatgtggtatctcagttagaggaggcagaagatttctggccagtggagagaggaattcctcaagacaccattccagagtatcctgagctccagctggaccctaaattggatcctcttcctgctgagagtcccctaatgaacattgaggttgttgaggtcctcacactgaaccaggaggtggctggtccccggaatgcccagatccaggccctatatgctgaagatggaagcctgagtgcagatgcccccagtgagcaggtccaacagcagggcaagcatccaggtgaccctgaggccgcgcgccagaggttccggcagttccgttataaggacatgacaggtccccgggaggccctggaccagctccgagagctgtgtcaccagtggctacagcctaaggcacgctccaaggagcagatcctggagctgctggtgctggagcagttcctaggtgcactgcctgtgaagctccggacatgggtggaatcgcagcacccagagaactgccaagaggtggtggccctggtagagggtgtgacctggatgtctgaggaggaagtacttcctgcaggacaacctgccgagggcaccacctgctgcctcgaggtcactgcccagcaggaggagaagcaggaggatgcagccatctgcccagtgacagtgctccctgaggagccagtgaccttccaggatgtggctgtggacttcagccgggaggagtgggggctgctgggcccgacacagaggaccgagtaccgcgatgtgatgctggagacctttgggcacctggtctctgtggggtgggagactacactggaaaataaagagttagctccaaattctgacattcctgaggaagaaccagcccccagcctgaaagtacaagaatcctcaagggattgtgccttgtcctctacattagaagataccttgcagggtggggtccaggaagtccaagacacagtgttgaagcagatggagtctgctcaggaaaaagaccttcctcagaagaagcactttgacaaccgtgagtcccaggcaaacagtggtgctcttgacacaaaccaagtttcgctccagaaaattgacaaccctgagtcccaggcaaacagtggcgctcttgacacaaaccaagttttgctccacaaaattcctcctagaaaacgattgcgcaaacgtgactcacaagttaaaagtatgaaacataattcacgtgtaaaaattcatcagaagagctgtgaaaggcaaaaggccaaggaaggcaatggttgtaggaaaaccttcagtcggagtactaaacagattacgtttataagaattcacaaggggagccaagtttgccgatgcagtgaatgtggtaaaatattccggaacccaagatacttttctgtgcataagaaaatccataccggagagaggccctatgtgtgtcaagactgtgggaaaggatttgttcagagctcttccctcacacagcatcagagagttcattctggagagagaccatttgaatgtcaggagtgtgggaggaccttcaatgatcgctcagccatctcccagcacctgaggactcacactggcgctaagccctacaagtgtcaggactgtggaaaagccttccgccagagctcccacctcatcagacatcagaggactcacaccggggagcgcccatatgcatgcaacaaatgtggaaaggccttcacccagagctcacaccttattgggcaccagagaacccacaataggacaaagcgaaagaagaaacagcctacctcatagctctcaagccagttgaagaaaccttgccttttcagcttgaccctgcaatataacatgcacaggcctgcttgtgaatcaggactgaatgtgaaagggaagtattgagtgaggacattcccaaaaccaaaggacaactgaggagactgcccagcacataatgaataaataagaaaatgagtgaggagttattaacatcatttggaaaaaagatttcccattcacttgatattgtttgttcactcatttagtcattaaaagtgagattaataaaatctgaaaatgttatataataactttaaaaagccaggtaattaataatctgcactgatattacatccacagtaccacagtatttatgtgtatgaattaaggattaaaagataatgtggataaataaactattgatctatgtctgtgtagaa

SEQ ID NO: 324786 - DNA, 671 bp, Homo sapiens
gcatggtggtgcgcacctgtaatcccaactacttgggaggctgaggaaggagaatcacttgaacccaggaggtggaggttgcagtaagctgagaccgagccactgcacgccagcctaggcaacaagaacaataacaacaacaaaaacaatagaaatttattctcttacaactctggaggctggaagttggaaatcaatgtgtcaacagggctgtgttcctcctgagattccagtagaatcctttcttgactcttctagcttctgctggtggctctcagtccttggcattttttggtttgcagctgcatggctccactctgtctctgtcattacatggccttccccttgtatgtctctaccttcatgtctctaccttcacatcatcttatgaacacacttgtcatattagattagagcccaccctaatgtcttcttcttagctctattatatctgcaaagtccctatttccaaaaaaaaaaccacattcacaggtatggagttaggacttaaaacgtatgtttttgggaggacacaatttaacccatagctataataaggggggttgaataaagattgctttctatagattgcaaagaattaataaaatatttcgatcatggtttctgttgcttttcagttaggagacatgacccacagggaatgtgatggc

SEQ ID NO: 324787 - DNA, 456 bp, Homo sapiens
ggagtgcacaggctccatgccagacgcttccagaatcggcagagctggcctctggggaagaggagccaggggttcctcctgcaaaattaaaaaggttccaaaagtctttgtaattagaaaggacaaccatgaggacactggaggtcttcctgcccagtgtgggctgagccagccccggcagtgagcctcagagccccaggcctcctctgtctggcttccagggccccacacaggttgtcattggggagagactgttctgctgagagcccctcacccaggtttttgcctggtagccccagcccttcccctactctctgtgggctctgggaccccagttctccgtccctggttctcatcctcactccctcgcctacccagttaggaccccacggtggggcttcagcagccccagaccccatccttggtgcctggctgtgccctgggccctccaagcca

SEQ ID NO: 324788 - DNA, 285 bp, Homo sapiens
agcccgttttaagtcaagtttctttgatagttttctccttcagtgatctgtttggtgttttctctgggatgtcgaagtttcccactattattgtatggctttttattttattttcttaggtgtagtagtacttttataaatctgggtgctctggtgttgggtaatgtatatatttaggatagttaaatcttcttattgagttgaagtctttatcatgtatcatacccttctttgtctttttttactcttgttggtttaaagtctattttatctgacataagaata

SEQ ID NO: 324789 - DNA, 3660 bp, Homo sapiens
gcgcctgcgcgggaggccgcgtcacgtgacccaccgcggccccgccccgcgacgagctcccgccggtcacgtgacccgcctctgcgcgcccccgggcacgaccccggagtctccgcgggcggccagggcgcgcgtgcgcggaggttctcctcgtccgcccgttgttcagcgagggaggctctgcgcgtgccgcagctgacggggaaactgaggcacggagcgggcctgtaggagctgtccaggccatctccaaccatgggagtgaggcacccgccctgctcccaccggctcctggccgtctgcgccctcgtgtccttggcaaccgctgcactcctggggcacatcctactccatgatttcctgctggttccccgagagctgagtggctcctccccagtcctggaggagactcacccagctcaccagcagggagccagcagaccagggccccgggatgcccaggcacaccccggccgtcccagagcagtgcccacacagtgcgacgtcccccccaacagccgcttcgattgcgcccctgacaaggccatcacccaggaacagtgcgaggcccgcggctgctgctacatccctgcaaagcaggggctgcagggagcccagatggggcagccctggtgcttcttcccacccagctaccccagctacaagctggagaacctgagctcctctgaaatgggctacacggccaccctgacccgtaccacccccaccttcttccccaaggacatcctgaccctgcggctggacgtgatgatggagactgagaaccgcctccacttcacgatcaaagatccagctaacaggcgctacgaggtgcccttggagaccccgcgtgtccacagccgggcaccgtccccactctacagcgtggagttctccgaggagcccttcggggtgatcgtgcaccggcagctggacggccgcgtgctgctgaacacgacggtggcgcccctgttctttgcggaccagttccttcagctgtccacctcgctgccctcgcagtatatcacaggcctcgccgagcacctcagtcccctgatgctcagcaccagctggaccaggatcaccctgtggaaccgggaccttgcgcccacgcccggtgcgaacctctacgggtctcaccctttctacctggcgctggaggacggcgggtcggcacacggggtgttcctgctaaacagcaatgccatggatgtggtcctgcagccgagccctgcccttagctggaggtcgacaggtgggatcctggatgtctacatcttcctgggcccagagcccaagagcgtggtgcagcagtacctggacgttgtgggatacccgttcatgccgccatactggggcctgggcttccacctgtgccgctggggctactcctccaccgctatcacccgccaggtggtggagaacatgaccagggcccacttccccctggacgtccaatggaacgacctggactacatggactcccggagggacttcacgttcaacaaggatggcttccgggacttcccggccatggtgcaggagctgcaccagggcggccggcgctacatgatgatcgtggatcctgccatcagcagctcgggccctgccgggagctacaggccctacgacgagggtctgcggaggggggttttcatcaccaacgagaccggccagccgctgattgggaaggtatggcccgggtccactgccttccccgacttcaccaaccccacagccctggcctggtgggaggacatggtggctgagttccatgaccaggtgcccttcgacggcatgtggattgacatgaacgagccttccaacttcatcagaggctctgaggacggctgccccaacaatgagctggagaacccaccctacgtgcctggggtggttggggggaccctccaggcggccaccatctgtgcctccagccaccagtttctctccacacactacaacctgcacaacctctacggcctgaccgaagccatcgcctcccacagggcgctggtgaaggctcgggggacacgcccatttgtgatctcccgctcgacctttgctggccacggccgatacgccggccactggacgggggacgtgtggagctcctgggagcagctcgcctcctccgtgccagaaatcctgcagtttaacctgctgggggtgcctctggtcggggccgacgtctgcggcttcctgggcaacacctcagaggagctgtgtgtgcgctggacccagctgggggccttctaccccttcatgcggaaccacaacagcctgctcagtctgccccaggagccgtacagcttcagcgagccggcccagcaggccatgaggaaggccctcaccctgcgctacgcactcctcccccacctctacacactgttccaccaggcccacgtcgcgggggagaccgtggcccggcccctcttcctggagttccccaaggactctagcacctggactgtggaccaccagctcctgtggggggaggccctgctcatcaccccagtgctccaggccgggaaggccgaagtgactggctacttccccttgggcacatggtacgacctgcagacggtgccaatagaggcccttggcagcctcccacccccacctgcagctccccgtgagccagccatccacagcgaggggcagtgggtgacgctgccggcccccctggacaccatcaacgtccacctccgggctgggtacatcatccccctgcagggccctggcctcacaaccacagagtcccgccagcagcccatggccctggctgtggccctgaccaagggtggggaggcccgaggggagctgttctgggacgatggagagagcctggaagtgctggagcgaggggcctacacacaggtcatcttcctggccaggaataacacgatcgtgaatgagctggtacgtgtgaccagtgagggagctggcctgcagctgcagaaggtgactgtcctgggcgtggccacggcgccccagcaggtcctctccaacggtgtccctgtctccaacttcacctacagccccgacaccaaggtcctggacatctgtgtctcgctgttgatgggagagcagtttctcgtcagctggtgttagccgggcggagtgtgttagtctctccagagggaggctggttccccagggaagcagagcctgtgtgcgggcagcagctgtgtgcgggcctgggggttgcatgtgtcacctggagctgggcactaaccattccaagccgccgcatcgcttgtttccacctcctgggccggggctctggcccccaacgtgtctaggagagctttctccctagatcgcactgtgggccggggccctggagggctgctctgtgttaataagattgtaaggtttgccctcctcacctgttgccggcatgcgggtagtattagccacccccctccatctgttcccagcaccggagaagggggtgctcaggtggaggtgtggggtatgcacctgagctcctgcttcgcgcctgctgctctgccccaacgcgaccgctgcccggctgcccagagggctggatgcctgccggtccccgagcaagcctgggaactcaggaaaattcacaggacttgggagattctaaatcttaagtgcaattatttttaataaaaggggcatttggaa

SEQ ID NO: 324790 - DNA, 3695 bp, Homo sapiens
gcgcctgcgcgggaggccgcgtcacgtgacccaccgcggccccgccccgcgacgagctcccgccggtcacgtgacccgcctctgcgcgcccccgggcacgaccccggagtctccgcgggcggccagggcgcgcgtgcgcggaggttctcctcgtccgcccgttgttcagcgagggaggctctgcgcgtgccgcagctgacggggaaactgaggcacggagcgggtgagacacctgacgtctgccccgcgctgccggcggcctgtaggagctgtccaggccatctccaaccatgggagtgaggcacccgccctgctcccaccggctcctggccgtctgcgccctcgtgtccttggcaaccgctgcactcctggggcacatcctactccatgatttcctgctggttccccgagagctgagtggctcctccccagtcctggaggagactcacccagctcaccagcagggagccagcagaccagggccccgggatgcccaggcacaccccggccgtcccagagcagtgcccacacagtgcgacgtcccccccaacagccgcttcgattgcgcccctgacaaggccatcacccaggaacagtgcgaggcccgcggctgctgctacatccctgcaaagcaggggctgcagggagcccagatggggcagccctggtgcttcttcccacccagctaccccagctacaagctggagaacctgagctcctctgaaatgggctacacggccaccctgacccgtaccacccccaccttcttccccaaggacatcctgaccctgcggctggacgtgatgatggagactgagaaccgcctccacttcacgatcaaagatccagctaacaggcgctacgaggtgcccttggagaccccgcgtgtccacagccgggcaccgtccccactctacagcgtggagttctccgaggagcccttcggggtgatcgtgcaccggcagctggacggccgcgtgctgctgaacacgacggtggcgcccctgttctttgcggaccagttccttcagctgtccacctcgctgccctcgcagtatatcacaggcctcgccgagcacctcagtcccctgatgctcagcaccagctggaccaggatcaccctgtggaaccgggaccttgcgcccacgcccggtgcgaacctctacgggtctcaccctttctacctggcgctggaggacggcgggtcggcacacggggtgttcctgctaaacagcaatgccatggatgtggtcctgcagccgagccctgcccttagctggaggtcgacaggtgggatcctggatgtctacatcttcctgggcccagagcccaagagcgtggtgcagcagtacctggacgttgtgggatacccgttcatgccgccatactggggcctgggcttccacctgtgccgctggggctactcctccaccgctatcacccgccaggtggtggagaacatgaccagggcccacttccccctggacgtccaatggaacgacctggactacatggactcccggagggacttcacgttcaacaaggatggcttccgggacttcccggccatggtgcaggagctgcaccagggcggccggcgctacatgatgatcgtggatcctgccatcagcagctcgggccctgccgggagctacaggccctacgacgagggtctgcggaggggggttttcatcaccaacgagaccggccagccgctgattgggaaggtatggcccgggtccactgccttccccgacttcaccaaccccacagccctggcctggtgggaggacatggtggctgagttccatgaccaggtgcccttcgacggcatgtggattgacatgaacgagccttccaacttcatcagaggctctgaggacggctgccccaacaatgagctggagaacccaccctacgtgcctggggtggttggggggaccctccaggcggccaccatctgtgcctccagccaccagtttctctccacacactacaacctgcacaacctctacggcctgaccgaagccatcgcctcccacagggcgctggtgaaggctcgggggacacgcccatttgtgatctcccgctcgacctttgctggccacggccgatacgccggccactggacgggggacgtgtggagctcctgggagcagctcgcctcctccgtgccagaaatcctgcagtttaacctgctgggggtgcctctggtcggggccgacgtctgcggcttcctgggcaacacctcagaggagctgtgtgtgcgctggacccagctgggggccttctaccccttcatgcggaaccacaacagcctgctcagtctgccccaggagccgtacagcttcagcgagccggcccagcaggccatgaggaaggccctcaccctgcgctacgcactcctcccccacctctacacactgttccaccaggcccacgtcgcgggggagaccgtggcccggcccctcttcctggagttccccaaggactctagcacctggactgtggaccaccagctcctgtggggggaggccctgctcatcaccccagtgctccaggccgggaaggccgaagtgactggctacttccccttgggcacatggtacgacctgcagacggtgccaatagaggcccttggcagcctcccacccccacctgcagctccccgtgagccagccatccacagcgaggggcagtgggtgacgctgccggcccccctggacaccatcaacgtccacctccgggctgggtacatcatccccctgcagggccctggcctcacaaccacagagtcccgccagcagcccatggccctggctgtggccctgaccaagggtggggaggcccgaggggagctgttctgggacgatggagagagcctggaagtgctggagcgaggggcctacacacaggtcatcttcctggccaggaataacacgatcgtgaatgagctggtacgtgtgaccagtgagggagctggcctgcagctgcagaaggtgactgtcctgggcgtggccacggcgccccagcaggtcctctccaacggtgtccctgtctccaacttcacctacagccccgacaccaaggtcctggacatctgtgtctcgctgttgatgggagagcagtttctcgtcagctggtgttagccgggcggagtgtgttagtctctccagagggaggctggttccccagggaagcagagcctgtgtgcgggcagcagctgtgtgcgggcctgggggttgcatgtgtcacctggagctgggcactaaccattccaagccgccgcatcgcttgtttccacctcctgggccggggctctggcccccaacgtgtctaggagagctttctccctagatcgcactgtgggccggggccctggagggctgctctgtgttaataagattgtaaggtttgccctcctcacctgttgccggcatgcgggtagtattagccacccccctccatctgttcccagcaccggagaagggggtgctcaggtggaggtgtggggtatgcacctgagctcctgcttcgcgcctgctgctctgccccaacgcgaccgctgcccggctgcccagagggctggatgcctgccggtccccgagcaagcctgggaactcaggaaaattcacaggacttgggagattctaaatcttaagtgcaattatttttaataaaaggggcatttggaa

SEQ ID NO: 324791 - DNA, 3691 bp, Homo sapiens
gcgcctgcgcgggaggccgcgtcacgtgacccaccgcggccccgccccgcgacgagctcccgccggtcacgtgacccgcctctgcgcgcccccgggcacgaccccggagtctccgcgggcggccagggcgcgcgtgcgcggaggttctcctcgtccgcccgttgttcagcgagggaggctctgcgcgtgccgcagctgacggggaaactgaggcacggagcgggcctgtaggagctgtccaggccatctccaaccatgggagtgaggcacccgccctgctcccaccggctcctggccgtctgcgccctcgtgtccttggcaaccgctgcactcctggggcacatcctactccatgatttcctgctggttccccgagagctgagtggctcctccccagtcctggaggagactcacccagctcaccagcagggagccagcagaccagggccccgggatgcccaggcacaccccggccgtcccagagcagtgcccacacagtgcgacgtcccccccaacagccgcttcgattgcgcccctgacaaggccatcacccaggaacagtgcgaggcccgcggctgctgctacatccctgcaaagcaggggctgcagggagcccagatggggcagccctggtgcttcttcccacccagctaccccagctacaagctggagaacctgagctcctctgaaatgggctacacggccaccctgacccgtaccacccccaccttcttccccaaggacatcctgaccctgcggctggacgtgatgatggagactgagaaccgcctccacttcacgatcaaagatccagctaacaggcgctacgaggtgcccttggagaccccgcgtgtccacagccgggcaccgtccccactctacagcgtggagttctccgaggagcccttcggggtgatcgtgcaccggcagctggacggccgcgtgctgctgaacacgacggtggcgcccctgttctttgcggaccagttccttcagctgtccacctcgctgccctcgcagtatatcacaggcctcgccgagcacctcagtcccctgatgctcagcaccagctggaccaggatcaccctgtggaaccgggaccttgcgcccacgcccggtgcgaacctctacgggtctcaccctttctacctggcgctggaggacggcgggtcggcacacggggtgttcctgctaaacagcaatgccatggatgtggtcctgcagccgagccctgcccttagctggaggtcgacaggtgggatcctggatgtctacatcttcctgggcccagagcccaagagcgtggtgcagcagtacctggacgttgtgggatacccgttcatgccgccatactggggcctgggcttccacctgtgccgctggggctactcctccaccgctatcacccgccaggtggtggagaacatgaccagggcccacttccccctggacgtccaatggaacgacctggactacatggactcccggagggacttcacgttcaacaaggatggcttccgggacttcccggccatggtgcaggagctgcaccagggcggccggcgctacatgatgatcgtggatcctgccatcagcagctcgggccctgccgggagctacaggccctacgacgagggtctgcggaggggggttttcatcaccaacgagaccggccagccgctgattgggaaggtatggcccgggtccactgccttccccgacttcaccaaccccacagccctggcctggtgggaggacatggtggctgagttccatgaccaggtgcccttcgacggcatgtggattgacatgaacgagccttccaacttcatcagaggctctgaggacggctgccccaacaatgagctggagaacccaccctacgtgcctggggtggttggggggaccctccaggcggccaccatctgtgcctccagccaccagtttctctccacacactacaacctgcacaacctctacggcctgaccgaagccatcgcctcccacagggcgctggtgaaggctcgggggacacgcccatttgtgatctcccgctcgacctttgctggccacggccgatacgccggccactggacgggggacgtgtggagctcctgggagcagctcgcctcctccgtgccagcctgaggaccagcctgactctgccctcccagaaatcctgcagtttaacctgctgggggtgcctctggtcggggccgacgtctgcggcttcctgggcaacacctcagaggagctgtgtgtgcgctggacccagctgggggccttctaccccttcatgcggaaccacaacagcctgctcagtctgccccaggagccgtacagcttcagcgagccggcccagcaggccatgaggaaggccctcaccctgcgctacgcactcctcccccacctctacacactgttccaccaggcccacgtcgcgggggagaccgtggcccggcccctcttcctggagttccccaaggactctagcacctggactgtggaccaccagctcctgtggggggaggccctgctcatcaccccagtgctccaggccgggaaggccgaagtgactggctacttccccttgggcacatggtacgacctgcagacggtgccaatagaggcccttggcagcctcccacccccacctgcagctccccgtgagccagccatccacagcgaggggcagtgggtgacgctgccggcccccctggacaccatcaacgtccacctccgggctgggtacatcatccccctgcagggccctggcctcacaaccacagagtcccgccagcagcccatggccctggctgtggccctgaccaagggtggggaggcccgaggggagctgttctgggacgatggagagagcctggaagtgctggagcgaggggcctacacacaggtcatcttcctggccaggaataacacgatcgtgaatgagctggtacgtgtgaccagtgagggagctggcctgcagctgcagaaggtgactgtcctgggcgtggccacggcgccccagcaggtcctctccaacggtgtccctgtctccaacttcacctacagccccgacaccaaggtcctggacatctgtgtctcgctgttgatgggagagcagtttctcgtcagctggtgttagccgggcggagtgtgttagtctctccagagggaggctggttccccagggaagcagagcctgtgtgcgggcagcagctgtgtgcgggcctgggggttgcatgtgtcacctggagctgggcactaaccattccaagccgccgcatcgcttgtttccacctcctgggccggggctctggcccccaacgtgtctaggagagctttctccctagatcgcactgtgggccggggccctggagggctgctctgtgttaataagattgtaaggtttgccctcctcacctgttgccggcatgcgggtagtattagccacccccctccatctgttcccagcaccggagaagggggtgctcaggtggaggtgtggggtatgcacctgagctcctgcttcgcgcctgctgctctgccccaacgcgaccgctgcccggctgcccagagggctggatgcctgccggtccccgagcaagcctgggaactcaggaaaattcacaggacttgggagattctaaatcttaagtgcaattatttttaataaaaggggcatttggaa

SEQ ID NO: 324792 - DNA, 3700 bp, Homo sapiens
gcgcctgcgcgggaggccgcgtcacgtgacccaccgcggccccgccccgcgacgagctcccgccggtcacgtgacccgcctctgcgcgcccccgggcacgaccccggagtctccgcgggcggccagggcgcgcgtgcgcggaggtgagccgggccggggctgcggggcttccctgagcgccggccgggtcggtggggcggtcggctgcccgcgcggcctctcagttgggaaagctgaggttgtcgccggggccgcgggtggaggtcggggatgaggcagcaggccatctccaaccatgggagtgaggcacccgccctgctcccaccggctcctggccgtctgcgccctcgtgtccttggcaaccgctgcactcctggggcacatcctactccatgatttcctgctggttccccgagagctgagtggctcctccccagtcctggaggagactcacccagctcaccagcagggagccagcagaccagggccccgggatgcccaggcacaccccggccgtcccagagcagtgcccacacagtgcgacgtcccccccaacagccgcttcgattgcgcccctgacaaggccatcacccaggaacagtgcgaggcccgcggctgctgctacatccctgcaaagcaggggctgcagggagcccagatggggcagccctggtgcttcttcccacccagctaccccagctacaagctggagaacctgagctcctctgaaatgggctacacggccaccctgacccgtaccacccccaccttcttccccaaggacatcctgaccctgcggctggacgtgatgatggagactgagaaccgcctccacttcacgatcaaagatccagctaacaggcgctacgaggtgcccttggagaccccgcgtgtccacagccgggcaccgtccccactctacagcgtggagttctccgaggagcccttcggggtgatcgtgcaccggcagctggacggccgcgtgctgctgaacacgacggtggcgcccctgttctttgcggaccagttccttcagctgtccacctcgctgccctcgcagtatatcacaggcctcgccgagcacctcagtcccctgatgctcagcaccagctggaccaggatcaccctgtggaaccgggaccttgcgcccacgcccggtgcgaacctctacgggtctcaccctttctacctggcgctggaggacggcgggtcggcacacggggtgttcctgctaaacagcaatgccatggatgtggtcctgcagccgagccctgcccttagctggaggtcgacaggtgggatcctggatgtctacatcttcctgggcccagagcccaagagcgtggtgcagcagtacctggacgttgtgggatacccgttcatgccgccatactggggcctgggcttccacctgtgccgctggggctactcctccaccgctatcacccgccaggtggtggagaacatgaccagggcccacttccccctggacgtccaatggaacgacctggactacatggactcccggagggacttcacgttcaacaaggatggcttccgggacttcccggccatggtgcaggagctgcaccagggcggccggcgctacatgatgatcgtggatcctgccatcagcagctcgggccctgccgggagctacaggccctacgacgagggtctgcggaggggggttttcatcaccaacgagaccggccagccgctgattgggaaggtatggcccgggtccactgccttccccgacttcaccaaccccacagccctggcctggtgggaggacatggtggctgagttccatgaccaggtgcccttcgacggcatgtggattgacatgaacgagccttccaacttcatcagaggctctgaggacggctgccccaacaatgagctggagaacccaccctacgtgcctggggtggttggggggaccctccaggcggccaccatctgtgcctccagccaccagtttctctccacacactacaacctgcacaacctctacggcctgaccgaagccatcgcctcccacagggcgctggtgaaggctcgggggacacgcccatttgtgatctcccgctcgacctttgctggccacggccgatacgccggccactggacgggggacgtgtggagctcctgggagcagctcgcctcctccgtgccagaaatcctgcagtttaacctgctgggggtgcctctggtcggggccgacgtctgcggcttcctgggcaacacctcagaggagctgtgtgtgcgctggacccagctgggggccttctaccccttcatgcggaaccacaacagcctgctcagtctgccccaggagccgtacagcttcagcgagccggcccagcaggccatgaggaaggccctcaccctgcgctacgcactcctcccccacctctacacactgttccaccaggcccacgtcgcgggggagaccgtggcccggcccctcttcctggagttccccaaggactctagcacctggactgtggaccaccagctcctgtggggggaggccctgctcatcaccccagtgctccaggccgggaaggccgaagtgactggctacttccccttgggcacatggtacgacctgcagacggtgccaatagaggcccttggcagcctcccacccccacctgcagctccccgtgagccagccatccacagcgaggggcagtgggtgacgctgccggcccccctggacaccatcaacgtccacctccgggctgggtacatcatccccctgcagggccctggcctcacaaccacagagtcccgccagcagcccatggccctggctgtggccctgaccaagggtggggaggcccgaggggagctgttctgggacgatggagagagcctggaagtgctggagcgaggggcctacacacaggtcatcttcctggccaggaataacacgatcgtgaatgagctggtacgtgtgaccagtgagggagctggcctgcagctgcagaaggtgactgtcctgggcgtggccacggcgccccagcaggtcctctccaacggtgtccctgtctccaacttcacctacagccccgacaccaaggtcctggacatctgtgtctcgctgttgatgggagagcagtttctcgtcagctggtgttagccgggcggagtgtgttagtctctccagagggaggctggttccccagggaagcagagcctgtgtgcgggcagcagctgtgtgcgggcctgggggttgcatgtgtcacctggagctgggcactaaccattccaagccgccgcatcgcttgtttccacctcctgggccggggctctggcccccaacgtgtctaggagagctttctccctagatcgcactgtgggccggggccctggagggctgctctgtgttaataagattgtaaggtttgccctcctcacctgttgccggcatgcgggtagtattagccacccccctccatctgttcccagcaccggagaagggggtgctcaggtggaggtgtggggtatgcacctgagctcctgcttcgcgcctgctgctctgccccaacgcgaccgctgcccggctgcccagagggctggatgcctgccggtccccgagcaagcctgggaactcaggaaaattcacaggacttgggagattctaaatcttaagtgcaattatttttaataaaaggggcatttggaa

SEQ ID NO: 324793 - DNA, 2810 bp, Homo sapiens
  misc_feature (26)..(26): n is a, c, g, or t
accctcgtctggtccccccgcgttantggctatcgtcgacccaggccctcgccttcggggtgaggcgtgcgccggctgactggactggcgcggtgctgctgaacacgacggtggcgcccctgttctttgcggaccagttccttcagctgtccacctcgctgccctcgcagtatatcacaggcctcgccgagcacctcagtcccctgatgctcagcaccagctggaccaggatcaccctgtggaaccgggaccttgcgcccacgcccggtgcgaacctctacgggtctcaccctttctacctggcgctggaggacggcgggtcggcacacggggtgttcctgctaaacagcaatgccatggatgtggtcctgcagccgagccctgcccttagctggaggtcgacaggtgggatcctggatgtctacatcttcctgggcccagagcccaagagcgtggtgcagcagtacctggacgttgtgggatacccgttcatgccgccatactggggcctgggcttccacctgtgccgctggggctactcctccaccgctatcacccgccaggtggtggagaacatgaccagggcccacttccccctggacgtccaatggaacgacctggactacatggactcccggagggacttcacgttcaacaaggatggcttccgggacttcccggccatggtgcaggagctgcaccagggcggccggcgctacatgatgatcgtggatcctgccatcagcagctcgggccctgccgggagctacaggccctacgacgagggtctgcggaggggggttttcatcaccaacgagaccggccagccgctgattgggaaggtatggcccgggtccactgccttccccgacttcaccaaccccacagccctggcctggtgggaggacatggtggctgagttccatgaccaggtgcccttcgacggcatgtggattgacatgaacgagccttccaacttcatcagaggctctgaggacggctgccccaacaatgagctggagaacccaccctacgtgcctggggtggttggggggaccctccaggcggccaccatctgtgcctccagccaccagtttctctccacacactacaacctgcacaacctctacggcctgaccgaagccatcgcctcccacagggcgctggtgaaggctcgggggacacgcccatttgtgatctcccgctcgacctttgctggccacggccgatacgccggccactggacgggggacgtgtggagctcctgggagcagctcgcctcctccgtgccagaaatcctgcagtttaacctgctgggggtgcctctggtcggggccgacgtctgcggcttcctgggcaacacctcagaggagctgtgtgtgcgctggacccagctgggggccttctaccccttcatgcggaaccacaacagcctgctcagtctgccccaggagccgtacagcttcagcgagccggcccagcaggccatgaggaaggccctcaccctgcgctacgcactcctcccccacctctacacactgttccaccaggcccacgtcgcgggggagaccgtggcccggcccctcttcctggagttccccaaggactctagcacctggactgtggaccaccagctcctgtggggggaggccctgctcatcaccccagtgctccaggccgggaaggccgaagtgactggctacttccccttgggcacatggtacgacctgcagacggtgccaatagaggcccttggcagcctcccacccccacctgcagctccccgtgagccagccatccacagcgaggggcagtgggtgacgctgccggcccccctggacaccatcaacgtccacctccgggctgggtacatcatccccctgcagggccctggcctcacaaccacagagtcccgccagcagcccatggccctggctgtggccctgaccaagggtggggaggcccgaggggagctgttctgggacgatggagagagcctggaagtgctggagcgaggggcctacacacaggtcatcttcctggccaggaataacacgatcgtgaatgagctggtacgtgtgaccagtgagggagctggcctgcagctgcagaaggtgactgtcctgggcgtggccacggcgccccagcaggtcctctccaacggtgtccctgtctccaacttcacctacagccccgacaccaaggtcctggacatctgtgtctcgctgttgatgggagagcagtttctcgtcagctggtgttagccgggcggagtgtgttagtctctccagagggaggctggttccccagggaagcagagcctgtgtgcgggcagcagctgtgtgcgggcctgggggttgcatgtgtcacctggagctgggcactaaccattccaagccgccgcatcgcttgtttccacctcctgggccggggctctggcccccaacgtgtctaggagagctttctccctagatcgcactgtgggccggggccctggagggctgctctgtgttaataagattgtaaggtttgccctcctcacctgttgccggcatgcgggtagtattagccacccccctccatctgttcccagcaccggagaagggggtgctcaggtggaggtgtggggtatgcacctgagctcctgcttcgcgcctgctgctctgccccaacgcgaccgctgcccggctgcccagagggctggatgcctgccggtccccgagcaagcctgggaactcaggaaaattcacaggacttgggagattctaaatcttaagtgcaattatttttaataaaaggggcatttggaa

SEQ ID NO: 324794 - DNA, 1583 bp, Homo sapiens
  misc_feature (45)..(45): n is a, c, g, or t
ggtctagtcaggcctgtgtgatcggccgaggggactcctgggagnagctcgcctcctccgtgccagaaatcctgcagtttaacctgctgggggtgcctctggtcggggccgacgtctgcggcttcctgggcaacacctcagaggagctgtgtgtgcgctggacccagctgggggccttctaccccttcatgcggaaccacaacagcctgctcagtctgccccaggagccgtacagcttcagcgagccggcccagcaggccatgaggaaggccctcaccctgcgctacgcactcctcccccacctctacacactgttccaccaggcccacgtcgcgggggagaccgtggcccggcccctcttcctggagttccccaaggactctagcacctggactgtggaccaccagctcctgtggggggaggccctgctcatcaccccagtgctccaggccgggaaggccgaagtgactggctacttccccttgggcacatggtacgacctgcagacggtgccaatagaggcccttggcagcctcccacccccacctgcagctccccgtgagccagccatccacagcgaggggcagtgggtgacgctgccggcccccctggacaccatcaacgtccacctccgggctgggtacatcatccccctgcagggccctggcctcacaaccacagagtcccgccagcagcccatggccctggctgtggccctgaccaagggtggggaggcccgaggggagctgttctgggacgatggagagagcctggaagtgctggagcgaggggcctacacacaggtcatcttcctggccaggaataacacgatcgtgaatgagctggtacgtgtgaccagtgagggagctggcctgcagctgcagaaggtgactgtcctgggcgtggccacggcgccccagcaggtcctctccaacggtgtccctgtctccaacttcacctacagccccgacaccaaggtcctggacatctgtgtctcgctgttgatgggagagcagtttctcgtcagctggtgttagccgggcggagtgtgttagtctctccagagggaggctggttccccagggaagcagagcctgtgtgcgggcagcagctgtgtgcgggcctgggggttgcatgtgtcacctggagctgggcactaaccattccaagccgccgcatcgcttgtttccacctcctgggccggggctctggcccccaacgtgtctaggagagctttctccctagatcgcactgtgggccggggccctggagggctgctctgtgttaataagattgtaaggtttgccctcctcacctgttgccggcatgcgggtagtattagccacccccctccatctgttcccagcaccggagaagggggtgctcaggtggaggtgtggggtatgcacctgagctcctgcttcgcgcctgctgctctgccccaacgcgaccgctgcccggctgcccagagggctggatgcctgccggtccccgagcaagcctgggaactcaggaaaattcacaggacttgggagattctaaatcttaagtgcaattatttttaataaaaggggcatttggaa

SEQ ID NO: 324795 - DNA, 1358 bp, Homo sapiens
gacctgagtcctccaagtcctccggcaccttgagctccagagagcagaattcagcctcttcctgtgcctccccagggtgggcatatgagccagccccatcccattcatcacccgtatgcctgtgtgcccatcccccttgcaggttccccaaggactctagcacctggactgtggaccaccagctcctgtggggggaggccctgctcatcaccccagtgctccaggccgggaaggccgaagtgactggctacttccccttgggcacatggtacgacctgcagacggtgccaatagaggcccttggcagcctcccacccccacctgcagctccccgtgagccagccatccacagcgaggggcagtgggtgacgctgccggcccccctggacaccatcaacgtccacctccgggctgggtacatcatccccctgcagggccctggcctcacaaccacagagtcccgccagcagcccatggccctggctgtggccctgaccaagggtggggaggcccgaggggagctgttctgggacgatggagagagcctggaagtgctggagcgaggggcctacacacaggtcatcttcctggccaggaataacacgatcgtgaatgagctggtacgtgtgaccagtgagggagctggcctgcagctgcagaaggtgactgtcctgggcgtggccacggcgccccagcaggtcctctccaacggtgtccctgtctccaacttcacctacagccccgacaccaaggtcctggacatctgtgtctcgctgttgatgggagagcagtttctcgtcagctggtgttagccgggcggagtgtgttagtctctccagagggaggctggttccccagggaagcagagcctgtgtgcgggcagcagctgtgtgcgggcctgggggttgcatgtgtcacctggagctgggcactaaccattccaagccgccgcatcgcttgtttccacctcctgggccggggctctggcccccaacgtgtctaggagagctttctccctagatcgcactgtgggccggggccctggagggctgctctgtgttaataagattgtaaggtttgccctcctcacctgttgccggcatgcgggtagtattagccacccccctccatctgttcccagcaccggagaagggggtgctcaggtggaggtgtggggtatgcacctgagctcctgcttcgcgcctgctgctctgccccaacgcgaccgctgcccggctgcccagagggctggatgcctgccggtccccgagcaagcctgggaactcaggaaaattcacaggacttgggagattctaaatcttaagtgcaattatttttaataaaaggggcatttggaa

SEQ ID NO: 324796 - DNA, 1102 bp, Homo sapiens
gcgcctgcgcgggaggccgcgtcacgtgacccaccgcggccccgccccgcgacgagctcccgccggtcacgtgacccgcctctgcgcgcccccgggcacgaccccggagtctccgcgggcggccagggcgcgcgtgcgcggaggttctcctcgtccgcccgttgttcagcgagggaggctctgcgcgtgccgcagctgacggggaaactgaggcacggagcgggcctgtaggagctgtccaggccatctccaaccatgggagtgaggcacccgccctgctcccaccggctcctggccgtctgcgccctcgtgtccttggcaaccgctgcactcctggggcacatcctactccatgatttcctgctggttccccgagagctgagtggctcctccccagtcctggaggagactcacccagctcaccagcagggagccagcagaccagggccccgggatgcccaggcacaccccggccgtcccagagcagtgcccacacagtgcgacgtcccccccaacagccgcttcgattgcgcccctgacaaggccatcacccaggaacagtgcgaggcccgcggctgctgctacatccctgcaaagcaggggctgcagggagcccagatggggcagccctggtgcttcttcccacccagctaccccagctacaagctggagaacctgagctcctctgaaatgggctacacggccaccctgacccgtaccacccccaccttcttccccaaggacatcctgaccctgcggctggacgtgatgatggagactgagaaccgcctccacttcacgatcaaagatccagctaacaggcgctacgaggtgcccttggagaccccgcgtgtccacagccgggcaccgtccccactctacagcgtggagttctccgaggagcccttcggggtgatcgtgcaccggcagctggacggccgcgtgctctgctgctctgccccaacgcgaccgctgcccggctgcccagagggctggatgcctgccggtccccgagcaagcctgggaactcaggaaaattcacaggacttgggagattctaaatcttaagtgcaattatttttaataaaaggggcatttggaa

SEQ ID NO: 324797 - DNA, 906 bp, Homo sapiens
gcgcctgcgcgggaggccgcgtcacgtgacccaccgcggccccgccccgcgacgagctcccgccggtcacgtgacccgcctctgcgcgcccccgggcacgaccccggagtctccgcgggcggccagggcgcgcgtgcgcggaggtgagccgggccggggctgcggggcttccctgagcgccggccgggtcggtggggcggtcggctgcccgcgcggcctctcagttgggaaagctgaggttgtcgccggggccgcgggtggaggtcggggatgaggcagcaggtaggacagtgacctcggtgacgcgaaggaccccggccacctctaggttctcctcgtccgcccgttgttcagcgagggaggctctgcgcgtgccgcagctgacggggaaactgaggcacggagcgggcctgtaggagctgtccaggccatctccaaccatgggagtgaggcacccgccctgctcccaccggctcctggccgtctgcgccctcgtgtccttggcaaccgctgcactcctggggcacatcctactccatgatttcctgctggttccccgagagctgagtggctcctccccagtcctggaggagactcacccagctcaccagcagggagccagcagaccagggccccgggatgcccaggcacaccccggccgtcccagagcagtgcccacacagtgcgacgtcccccccaacagccgcttcgattgcgcccctgacaaggccatcacccaggaacagtgcgaggcccgcggctgctgctacatccctgcaaagcaggggctgcagggagcccagatggggcagccctggtgcttcttcccacccagctaccccagctacaagctggagaacctgagctcctctgaaatgggcacgcattatgtataagatcctctag

SEQ ID NO: 324798 - DNA, 3845 bp, Homo sapiens
gcgcctgcgcgggaggccgcgtcacgtgacccaccgcggccccgccccgcgacgagctcccgccggtcacgtgacccgcctctgcgcgcccccgggcacgaccccggagtctccgcgggcggccagggcgcgcgtgcgcggaggtgagccgggccggggctgcggggcttccctgagcgccggccgggtcggtggggcggtcggctgcccgcgcggcctctcagttgggaaagctgaggttgtcgccggggccgcgggtggaggtcggggatgaggcagcaggtaggacagtgacctcggtgacgcgaaggaccccggccacctctaggttctcctcgtccgcccgttgttcagcgagggaggctctgcgcgtgccgcagctgacggggaaactgaggcacggagcgggcctgtaggagctgtccaggccatctccaaccatgggagtgaggcacccgccctgctcccaccggctcctggccgtctgcgccctcgtgtccttggcaaccgctgcactcctggggcacatcctactccatgatttcctgctggttccccgagagctgagtggctcctccccagtcctggaggagactcacccagctcaccagcagggagccagcagaccagggccccgggatgcccaggcacaccccggccgtcccagagcagtgcccacacagtgcgacgtcccccccaacagccgcttcgattgcgcccctgacaaggccatcacccaggaacagtgcgaggcccgcggctgctgctacatccctgcaaagcaggggctgcagggagcccagatggggcagccctggtgcttcttcccacccagctaccccagctacaagctggagaacctgagctcctctgaaatgggctacacggccaccctgacccgtaccacccccaccttcttccccaaggacatcctgaccctgcggctggacgtgatgatggagactgagaaccgcctccacttcacgatcaaagatccagctaacaggcgctacgaggtgcccttggagaccccgcgtgtccacagccgggcaccgtccccactctacagcgtggagttctccgaggagcccttcggggtgatcgtgcaccggcagctggacggccgcgtgctgctgaacacgacggtggcgcccctgttctttgcggaccagttccttcagctgtccacctcgctgccctcgcagtatatcacaggcctcgccgagcacctcagtcccctgatgctcagcaccagctggaccaggatcaccctgtggaaccgggaccttgcgcccacgcccggtgcgaacctctacgggtctcaccctttctacctggcgctggaggacggcgggtcggcacacggggtgttcctgctaaacagcaatgccatggatgtggtcctgcagccgagccctgcccttagctggaggtcgacaggtgggatcctggatgtctacatcttcctgggcccagagcccaagagcgtggtgcagcagtacctggacgttgtgggatacccgttcatgccgccatactggggcctgggcttccacctgtgccgctggggctactcctccaccgctatcacccgccaggtggtggagaacatgaccagggcccacttccccctggacgtccaatggaacgacctggactacatggactcccggagggacttcacgttcaacaaggatggcttccgggacttcccggccatggtgcaggagctgcaccagggcggccggcgctacatgatgatcgtggatcctgccatcagcagctcgggccctgccgggagctacaggccctacgacgagggtctgcggaggggggttttcatcaccaacgagaccggccagccgctgattgggaaggtatggcccgggtccactgccttccccgacttcaccaaccccacagccctggcctggtgggaggacatggtggctgagttccatgaccaggtgcccttcgacggcatgtggattgacatgaacgagccttccaacttcatcagaggctctgaggacggctgccccaacaatgagctggagaacccaccctacgtgcctggggtggttggggggaccctccaggcggccaccatctgtgcctccagccaccagtttctctccacacactacaacctgcacaacctctacggcctgaccgaagccatcgcctcccacagggcgctggtgaaggctcgggggacacgcccatttgtgatctcccgctcgacctttgctggccacggccgatacgccggccactggacgggggacgtgtggagctcctgggagcagctcgcctcctccgtgccagaaatcctgcagtttaacctgctgggggtgcctctggtcggggccgacgtctgcggcttcctgggcaacacctcagaggagctgtgtgtgcgctggacccagctgggggccttctaccccttcatgcggaaccacaacagcctgctcagtctgccccaggagccgtacagcttcagcgagccggcccagcaggccatgaggaaggccctcaccctgcgctacgcactcctcccccacctctacacactgttccaccaggcccacgtcgcgggggagaccgtggcccggcccctcttcctggagttccccaaggactctagcacctggactgtggaccaccagctcctgtggggggaggccctgctcatcaccccagtgctccaggccgggaaggccgaagtgactggctacttccccttgggcacatggtacgacctgcagacggtgccaatagaggcccttggcagcctcccacccccacctgcagctccccgtgagccagccatccacagcgaggggcagtgggtgacgctgccggcccccctggacaccatcaacgtccacctccgggctgggtacatcatccccctgcagggccctggcctcacaaccacagagtcccgccagcagcccatggccctggctgtggccctgaccaagggtggggaggcccgaggggagctgttctgggacgatggagagagcctggaagtgctggagcgaggggcctacacacaggtcatcttcctggccaggaataacacgatcgtgaatgagctggtacgtgtgaccagtgagggagctggcctgcagctgcagaaggtgactgtcctgggcgtggccacggcgccccagcaggtcctctccaacggtgtccctgtctccaacttcacctacagccccgacaccaaggtcctggacatctgtgtctcgctgttgatgggagagcagtttctcgtcagctggtgttagccgggcggagtgtgttagtctctccagagggaggctggttccccagggaagcagagcctgtgtgcgggcagcagctgtgtgcgggcctgggggttgcatgtgtcacctggagctgggcactaaccattccaagccgccgcatcgcttgtttccacctcctgggccggggctctggcccccaacgtgtctaggagagctttctccctagatcgcactgtgggccggggccctggagggctgctctgtgttaataagattgtaaggtttgccctcctcacctgttgccggcatgcgggtagtattagccacccccctccatctgttcccagcaccggagaagggggtgctcaggtggaggtgtggggtatgcacctgagctcctgcttcgcgcctgctgctctgccccaacgcgaccgctgcccggctgcccagagggctggatgcctgccggtccccgagcaagcctgggaactcaggaaaattcacaggacttgggagattctaaatcttaagtgcaattatttttaataaaaggggcatttggaa

SEQ ID NO: 324799 - DNA, 3580 bp, Homo sapiens
gcgcctgcgcgggaggccgcgtcacgtgacccaccgcggccccgccccgcgacgagctcccgccggtcacgtgacccgcctctgcgcgcccccgggcacgaccccggagtctccgcgggcggccagggcgcgcgtgcgcggaggcctgtaggagctgtccaggccatctccaaccatgggagtgaggcacccgccctgctcccaccggctcctggccgtctgcgccctcgtgtccttggcaaccgctgcactcctggggcacatcctactccatgatttcctgctggttccccgagagctgagtggctcctccccagtcctggaggagactcacccagctcaccagcagggagccagcagaccagggccccgggatgcccaggcacaccccggccgtcccagagcagtgcccacacagtgcgacgtcccccccaacagccgcttcgattgcgcccctgacaaggccatcacccaggaacagtgcgaggcccgcggctgctgctacatccctgcaaagcaggggctgcagggagcccagatggggcagccctggtgcttcttcccacccagctaccccagctacaagctggagaacctgagctcctctgaaatgggctacacggccaccctgacccgtaccacccccaccttcttccccaaggacatcctgaccctgcggctggacgtgatgatggagactgagaaccgcctccacttcacgatcaaagatccagctaacaggcgctacgaggtgcccttggagaccccgcgtgtccacagccgggcaccgtccccactctacagcgtggagttctccgaggagcccttcggggtgatcgtgcaccggcagctggacggccgcgtgctgctgaacacgacggtggcgcccctgttctttgcggaccagttccttcagctgtccacctcgctgccctcgcagtatatcacaggcctcgccgagcacctcagtcccctgatgctcagcaccagctggaccaggatcaccctgtggaaccgggaccttgcgcccacgcccggtgcgaacctctacgggtctcaccctttctacctggcgctggaggacggcgggtcggcacacggggtgttcctgctaaacagcaatgccatggatgtggtcctgcagccgagccctgcccttagctggaggtcgacaggtgggatcctggatgtctacatcttcctgggcccagagcccaagagcgtggtgcagcagtacctggacgttgtgggatacccgttcatgccgccatactggggcctgggcttccacctgtgccgctggggctactcctccaccgctatcacccgccaggtggtggagaacatgaccagggcccacttccccctggacgtccaatggaacgacctggactacatggactcccggagggacttcacgttcaacaaggatggcttccgggacttcccggccatggtgcaggagctgcaccagggcggccggcgctacatgatgatcgtggatcctgccatcagcagctcgggccctgccgggagctacaggccctacgacgagggtctgcggaggggggttttcatcaccaacgagaccggccagccgctgattgggaaggtatggcccgggtccactgccttccccgacttcaccaaccccacagccctggcctggtgggaggacatggtggctgagttccatgaccaggtgcccttcgacggcatgtggattgacatgaacgagccttccaacttcatcagaggctctgaggacggctgccccaacaatgagctggagaacccaccctacgtgcctggggtggttggggggaccctccaggcggccaccatctgtgcctccagccaccagtttctctccacacactacaacctgcacaacctctacggcctgaccgaagccatcgcctcccacagggcgctggtgaaggctcgggggacacgcccatttgtgatctcccgctcgacctttgctggccacggccgatacgccggccactggacgggggacgtgtggagctcctgggagcagctcgcctcctccgtgccagaaatcctgcagtttaacctgctgggggtgcctctggtcggggccgacgtctgcggcttcctgggcaacacctcagaggagctgtgtgtgcgctggacccagctgggggccttctaccccttcatgcggaaccacaacagcctgctcagtctgccccaggagccgtacagcttcagcgagccggcccagcaggccatgaggaaggccctcaccctgcgctacgcactcctcccccacctctacacactgttccaccaggcccacgtcgcgggggagaccgtggcccggcccctcttcctggagttccccaaggactctagcacctggactgtggaccaccagctcctgtggggggaggccctgctcatcaccccagtgctccaggccgggaaggccgaagtgactggctacttccccttgggcacatggtacgacctgcagacggtgccaatagaggcccttggcagcctcccacccccacctgcagctccccgtgagccagccatccacagcgaggggcagtgggtgacgctgccggcccccctggacaccatcaacgtccacctccgggctgggtacatcatccccctgcagggccctggcctcacaaccacagagtcccgccagcagcccatggccctggctgtggccctgaccaagggtggggaggcccgaggggagctgttctgggacgatggagagagcctggaagtgctggagcgaggggcctacacacaggtcatcttcctggccaggaataacacgatcgtgaatgagctggtacgtgtgaccagtgagggagctggcctgcagctgcagaaggtgactgtcctgggcgtggccacggcgccccagcaggtcctctccaacggtgtccctgtctccaacttcacctacagccccgacaccaaggtcctggacatctgtgtctcgctgttgatgggagagcagtttctcgtcagctggtgttagccgggcggagtgtgttagtctctccagagggaggctggttccccagggaagcagagcctgtgtgcgggcagcagctgtgtgcgggcctgggggttgcatgtgtcacctggagctgggcactaaccattccaagccgccgcatcgcttgtttccacctcctgggccggggctctggcccccaacgtgtctaggagagctttctccctagatcgcactgtgggccggggccctggagggctgctctgtgttaataagattgtaaggtttgccctcctcacctgttgccggcatgcgggtagtattagccacccccctccatctgttcccagcaccggagaagggggtgctcaggtggaggtgtggggtatgcacctgagctcctgcttcgcgcctgctgctctgccccaacgcgaccgctgcccggctgcccagagggctggatgcctgccggtccccgagcaagcctgggaactcaggaaaattcacaggacttgggagattctaaatcttaagtgcaattatttttaataaaaggggcatttggaa

SEQ ID NO: 324800 - DNA, 3491 bp, Homo sapiens
aattatggctaggtagaggcctgcggtgtaatcaggcagagggaggccggagcggcctgtaggagctgtccaggccatctccaaccatgggagtgaggcacccgccctgctcccaccggctcctggccgtctgcgccctcgtgtccttggcaaccgctgcactcctggggcacatcctactccatgatttcctgctggttccccgagagctgagtggctcctccccagtcctggaggagactcacccagctcaccagcagggagccagcagaccagggccccgggatgcccaggcacaccccggccgtcccagagcagtgcccacacagtgcgacgtcccccccaacagccgcttcgattgcgcccctgacaaggccatcacccaggaacagtgcgaggcccgcggctgctgctacatccctgcaaagcaggggctgcagggagcccagatggggcagccctggtgcttcttcccacccagctaccccagctacaagctggagaacctgagctcctctgaaatgggctacacggccaccctgacccgtaccacccccaccttcttccccaaggacatcctgaccctgcggctggacgtgatgatggagactgagaaccgcctccacttcacgatcaaagatccagctaacaggcgctacgaggtgcccttggagaccccgcgtgtccacagccgggcaccgtccccactctacagcgtggagttctccgaggagcccttcggggtgatcgtgcaccggcagctggacggccgcgtgctgctgaacacgacggtggcgcccctgttctttgcggaccagttccttcagctgtccacctcgctgccctcgcagtatatcacaggcctcgccgagcacctcagtcccctgatgctcagcaccagctggaccaggatcaccctgtggaaccgggaccttgcgcccacgcccggtgcgaacctctacgggtctcaccctttctacctggcgctggaggacggcgggtcggcacacggggtgttcctgctaaacagcaatgccatggatgtggtcctgcagccgagccctgcccttagctggaggtcgacaggtgggatcctggatgtctacatcttcctgggcccagagcccaagagcgtggtgcagcagtacctggacgttgtgggatacccgttcatgccgccatactggggcctgggcttccacctgtgccgctggggctactcctccaccgctatcacccgccaggtggtggagaacatgaccagggcccacttccccctggacgtccaatggaacgacctggactacatggactcccggagggacttcacgttcaacaaggatggcttccgggacttcccggccatggtgcaggagctgcaccagggcggccggcgctacatgatgatcgtggatcctgccatcagcagctcgggccctgccgggagctacaggccctacgacgagggtctgcggaggggggttttcatcaccaacgagaccggccagccgctgattgggaaggtatggcccgggtccactgccttccccgacttcaccaaccccacagccctggcctggtgggaggacatggtggctgagttccatgaccaggtgcccttcgacggcatgtggattgacatgaacgagccttccaacttcatcagaggctctgaggacggctgccccaacaatgagctggagaacccaccctacgtgcctggggtggttggggggaccctccaggcggccaccatctgtgcctccagccaccagtttctctccacacactacaacctgcacaacctctacggcctgaccgaagccatcgcctcccacagggcgctggtgaaggctcgggggacacgcccatttgtgatctcccgctcgacctttgctggccacggccgatacgccggccactggacgggggacgtgtggagctcctgggagcagctcgcctcctccgtgccagaaatcctgcagtttaacctgctgggggtgcctctggtcggggccgacgtctgcggcttcctgggcaacacctcagaggagctgtgtgtgcgctggacccagctgggggccttctaccccttcatgcggaaccacaacagcctgctcagtctgccccaggagccgtacagcttcagcgagccggcccagcaggccatgaggaaggccctcaccctgcgctacgcactcctcccccacctctacacactgttccaccaggcccacgtcgcgggggagaccgtggcccggcccctcttcctggagttccccaaggactctagcacctggactgtggaccaccagctcctgtggggggaggccctgctcatcaccccagtgctccaggccgggaaggccgaagtgactggctacttccccttgggcacatggtacgacctgcagacggtgccaatagaggcccttggcagcctcccacccccacctgcagctccccgtgagccagccatccacagcgaggggcagtgggtgacgctgccggcccccctggacaccatcaacgtccacctccgggctgggtacatcatccccctgcagggccctggcctcacaaccacagagtcccgccagcagcccatggccctggctgtggccctgaccaagggtggggaggcccgaggggagctgttctgggacgatggagagagcctggaagtgctggagcgaggggcctacacacaggtcatcttcctggccaggaataacacgatcgtgaatgagctggtacgtgtgaccagtgagggagctggcctgcagctgcagaaggtgactgtcctgggcgtggccacggcgccccagcaggtcctctccaacggtgtccctgtctccaacttcacctacagccccgacaccaaggtcctggacatctgtgtctcgctgttgatgggagagcagtttctcgtcagctggtgttagccgggcggagtgtgttagtctctccagagggaggctggttccccagggaagcagagcctgtgtgcgggcagcagctgtgtgcgggcctgggggttgcatgtgtcacctggagctgggcactaaccattccaagccgccgcatcgcttgtttccacctcctgggccggggctctggcccccaacgtgtctaggagagctttctccctagatcgcactgtgggccggggccctggagggctgctctgtgttaataagattgtaaggtttgccctcctcacctgttgccggcatgcgggtagtattagccacccccctccatctgttcccagcaccggagaagggggtgctcaggtggaggtgtggggtatgcacctgagctcctgcttcgcgcctgctgctctgccccaacgcgaccgctgcccggctgcccagagggctggatgcctgccggtccccgagcaagcctgggaactcaggaaaattcacaggacttgggagattctaaatcttaagtgcaattatttttaataaaaggggcatttggaa

SEQ ID NO: 324801 - DNA, 3621 bp, Homo sapiens
gcgcctgcgcgggaggccgcgtcacgtgacccaccgcggccccgccccgcgacgagctcccgccggtcacgtgacccgcctctgcgcgcccccgggcacgaccccggagtctccgcgggcggccagggcgcgcgtgcgcggaggttctcctcgtccgcccgttgttcagcgagggaggctctgcgcgtgccgcagctgacggggaaactgaggcacggagcgggcctgtaggagctgtccaggccatctccaaccatgggagtgaggcacccgccctgctcccaccggctcctggccgtctgcgccctcgtgtccttggcaaccgctgcactcctggggcacatcctactccatgatttcctgctggttccccgagagctgagtggctcctccccagtcctggaggagactcacccagctcaccagcagggagccagcagaccagggccccgggatgcccaggcacaccccggccgtcccagagcagtgcccacacagtgcgacgtcccccccaacagccgcttcgattgcgcccctgacaaggccatcacccaggaacagtgcgaggcccgcggctgctgctacatccctgcaaagcaggggctgcagggagcccagatggggcagccctggtgcttcttcccacccagctaccccagctacaagctggagaacctgagctcctctgaaatgggctacacggccaccctgacccgtaccacccccaccttcttccccaaggacatcctgaccctgcggctggacgtgatgatggagactgagaaccgcctccacttcacgatcaaagatccagctaacaggcgctacgaggtgcccttggagaccccgcgtgtccacagccgggcaccgtccccactctacagcgtggagttctccgaggagcccttcggggtgatcgtgcaccggcagctggacggccgcgtgctgctgaacacgacggtggcgcccctgttctttgcggaccagttccttcagctgtccacctcgctgccctcgcagtatatcacaggcctcgccgagcacctcagtcccctgatgctcagcaccagctggaccaggatcaccctgtggaaccgggaccttgcgcccacgcccggtgcgaacctctacgggtctcaccctttctacctggcgctggaggacggcgggtcggcacacggggtgttcctgctaaacagcaatgccatggatgtggtcctgcagccgagccctgcccttagctggaggtcgacaggtgggatcctggatgtctacatcttcctgggcccagagcccaagagcgtggtgcagcagtacctggacgttgtgggatacccgttcatgccgccatactggggcctgggcttccacctgtgccgctggggctactcctccaccgctatcacccgccaggtggtggagaacatgaccagggcccacttccccctggacgtccaatggaacgacctggactacatggactcccggagggacttcacgttcaacaaggatggcttccgggacttcccggccatggtgcaggagctgcaccagggcggccggcgctacatgatgatcgtggatcctgccatcagcagctcgggccctgccgggagctacaggccctacgacgagggtctgcggaggggggttttcatcaccaacgagaccggccagccgctgattgggaaggtatggcccgggtccactgccttccccgacttcaccaaccccacagccctggcctggtgggaggacatggtggctgagttccatgaccaggtgcccttcgacggcatgtggattgacatgaacgagccttccaacttcatcagaggctctgaggacggctgccccaacaatgagctggagaacccaccctacgtgcctggggtggttggggggaccctccaggcggccaccatctgtgcctccagccaccagtttctctccacacactacaacctgcacaacctctacggcctgaccgaagccatcgcctcccacagctcccgctcgacctttgctggccacggccgatacgccggccactggacgggggacgtgtggagctcctgggagcagctcgcctcctccgtgccagaaatcctgcagtttaacctgctgggggtgcctctggtcggggccgacgtctgcggcttcctgggcaacacctcagaggagctgtgtgtgcgctggacccagctgggggccttctaccccttcatgcggaaccacaacagcctgctcagtctgccccaggagccgtacagcttcagcgagccggcccagcaggccatgaggaaggccctcaccctgcgctacgcactcctcccccacctctacacactgttccaccaggcccacgtcgcgggggagaccgtggcccggcccctcttcctggagttccccaaggactctagcacctggactgtggaccaccagctcctgtggggggaggccctgctcatcaccccagtgctccaggccgggaaggccgaagtgactggctacttccccttgggcacatggtacgacctgcagacggtgccaatagaggcccttggcagcctcccacccccacctgcagctccccgtgagccagccatccacagcgaggggcagtgggtgacgctgccggcccccctggacaccatcaacgtccacctccgggctgggtacatcatccccctgcagggccctggcctcacaaccacagagtcccgccagcagcccatggccctggctgtggccctgaccaagggtggggaggcccgaggggagctgttctgggacgatggagagagcctggaagtgctggagcgaggggcctacacacaggtcatcttcctggccaggaataacacgatcgtgaatgagctggtacgtgtgaccagtgagggagctggcctgcagctgcagaaggtgactgtcctgggcgtggccacggcgccccagcaggtcctctccaacggtgtccctgtctccaacttcacctacagccccgacaccaaggtcctggacatctgtgtctcgctgttgatgggagagcagtttctcgtcagctggtgttagccgggcggagtgtgttagtctctccagagggaggctggttccccagggaagcagagcctgtgtgcgggcagcagctgtgtgcgggcctgggggttgcatgtgtcacctggagctgggcactaaccattccaagccgccgcatcgcttgtttccacctcctgggccggggctctggcccccaacgtgtctaggagagctttctccctagatcgcactgtgggccggggccctggagggctgctctgtgttaataagattgtaaggtttgccctcctcacctgttgccggcatgcgggtagtattagccacccccctccatctgttcccagcaccggagaagggggtgctcaggtggaggtgtggggtatgcacctgagctcctgcttcgcgcctgctgctctgccccaacgcgaccgctgcccggctgcccagagggctggatgcctgccggtccccgagcaagcctgggaactcaggaaaattcacaggacttgggagattctaaatcttaagtgcaattatttttaataaaaggggcatttggaa

SEQ ID NO: 324802 - DNA, 2396 bp, Homo sapiens
  misc_feature (21)..(21): n is a, c, g, or t
aagctagtaagctcggttcanttcggacgaggcaagagcgtgtgcagcagtacctggacgttgtgggatacccgttcatgccgccatactggggcctgggcttccacctgtgccgctggggctactcctccaccgctatcacccgccaggtggtggagaacatgaccagggcccacttccccctggacgtccaatggaacgacctggactacatggactcccggagggacttcacgttcaacaaggatggcttccgggacttcccggccatggtgcaggagctgcaccagggcggccggcgctacatgatgatcgtggatcctgccatcagcagctcgggccctgccgggagctacaggccctacgacgagggtctgcggaggggggttttcatcaccaacgagaccggccagccgctgattgggaaggtatggcccgggtccactgccttccccgacttcaccaaccccacagccctggcctggtgggaggacatggtggctgagttccatgaccaggtgcccttcgacggcatgtggattgacatgaacgagccttccaacttcatcagaggctctgaggacggctgccccaacaatgagctggagaacccaccctacgtgcctggggtggttggggggaccctccaggcggccaccatctgtgcctccagccaccagtttctctccacacactacaacctgcacaacctctacggcctgaccgaagccatcgcctcccacagggcgctggtgaaggctcgggggacacgcccatttgtgatctcccgctcgacctttgctggccacggccgatacgccggccactggacgggggacgtgtggagctcctgggagcagctcgcctcctccgtgccagaaatcctgcagtttaacctgctgggggtgcctctggtcggggccgacgtctgcggcttcctgggcaacacctcagaggagctgtgtgtgcgctggacccagctgggggccttctaccccttcatgcggaaccacaacagcctgctcagtctgccccaggagccgtacagcttcagcgagccggcccagcaggccatgaggaaggccctcaccctgcgctacgcactcctcccccacctctacacactgttccaccaggcccacgtcgcgggggagaccgtggcccggcccctcttcctggagttccccaaggactctagcacctggactgtggaccaccagctcctgtggggggaggccctgctcatcaccccagtgctccaggccgggaaggccgaagtgactggctacttccccttgggcacatggtacgacctgcagacggtgccaatagaggcccttggcagcctcccacccccacctgcagctccccgtgagccagccatccacagcgaggggcagtgggtgacgctgccggcccccctggacaccatcaacgtccacctccgggctgggtacatcatccccctgcagggccctggcctcacaaccacagagtcccgccagcagcccatggccctggctgtggccctgaccaagggtggggaggcccgaggggagctgttctgggacgatggagagagcctggaagtgctggagcgaggggcctacacacaggtcatcttcctggccaggaataacacgatcgtgaatgagctggtacgtgtgaccagtgagggagctggcctgcagctgcagaaggtgactgtcctgggcgtggccacggcgccccagcaggtcctctccaacggtgtccctgtctccaacttcacctacagccccgacaccaaggtcctggacatctgtgtctcgctgttgatgggagagcagtttctcgtcagctggtgttagccgggcggagtgtgttagtctctccagagggaggctggttccccagggaagcagagcctgtgtgcgggcagcagctgtgtgcgggcctgggggttgcatgtgtcacctggagctgggcactaaccattccaagccgccgcatcgcttgtttccacctcctgggccggggctctggcccccaacgtgtctaggagagctttctccctagatcgcactgtgggccggggccctggagggctgctctgtgttaataagattgtaaggtttgccctcctcacctgttgccggcatgcgggtagtattagccacccccctccatctgttcccagcaccggagaagggggtgctcaggtggaggtgtggggtatgcacctgagctcctgcttcgcgcctgctgctctgccccaacgcgaccgctgcccggctgcccagagggctggatgcctgccggtccccgagcaagcctgggaactcaggaaaattcacaggacttgggagattctaaatcttaagtgcaattatttttaataaaaggggcatttggaa

SEQ ID NO: 324803 - DNA, 3801 bp, Homo sapiens
gcgcctgcgcgggaggccgcgtcacgtgacccaccgcggccccgccccgcgacgagctcccgccggtcacgtgacccgcctctgcgcgcccccgggcacgaccccggagtctccgcgggcggccagggcgcgcgtgcgcggaggttctcctcgtccgcccgttgttcagcgagggaggctctgcgcgtgccgcagctgacggggaaactgaggcacggagcgggcctgtaggagctgtccaggccatctccaaccatgggagtgaggcacccgccctgctcccaccggctcctggccgtctgcgccctcgtgtccttggcaaccgctgcactcctggggcacatcctactccatgatttcctgctggttccccgagagctgagtggctcctccccagtcctggaggagactcacccagctcaccagcagggagccagcagaccagggccccgggatgcccaggcacaccccggccgtcccagagcagtgcccacacagtgcgacgtcccccccaacagccgcttcgattgcgcccctgacaaggccatcacccaggaacagtgcgaggcccgcggctgctgctacatccctgcaaagcaggggctgcagggagcccagatggggcagccctggtgcttcttcccacccagctaccccagctacaagctggagaacctgagctcctctgaaatgggctacacggccaccctgacccgtaccacccccaccttcttccccaaggacatcctgaccctgcggctggacgtgatgatggagactgagaaccgcctccacttcacgatcaaagatccagctaacaggcgctacgaggtgcccttggagaccccgcgtgtccacagccgggcaccgtccccactctacagcgtggagttctccgaggagcccttcggggtgatcgtgcaccggcagctggacggccgcgtgctgctgaacacgacggtggcgcccctgttctttgcggaccagttccttcagctgtccacctcgctgccctcgcagtatatcacaggcctcgccgagcacctcagtcccctgatgctcagcaccagctggaccaggatcaccctgtggaaccgggaccttgcgcccacgcccggtgcgaacctctacgggtctcaccctttctacctggcgctggaggacggcgggtcggcacacggggtgttcctgctaaacagcaatgccatggatgtggtcctgcagccgagccctgcccttagctggaggtcgacaggtgggatcctggatgtctacatcttcctgggcccagagcccaagagcgtggtgcagcagtacctggacgttgtgggatacccgttcatgccgccatactggggcctgggcttccacctgtgccgctggggctactcctccaccgctatcacccgccaggtggtggagaacatgaccagggcccacttccccctggacgtccaatggaacgacctggactacatggactcccggagggacttcacgttcaacaaggatggcttccgggacttcccggccatggtgcaggagctgcaccagggcggccggcgctacatgatgatcgtggatcctgccatcagcagctcgggccctgccgggagctacaggccctacgacgagggtctgcggaggggggttttcatcaccaacgagaccggccagccgctgattgggaaggtatggcccgggtccactgccttccccgacttcaccaaccccacagccctggcctggtgggaggacatggtggctgagttccatgaccaggtgcccttcgacggcatgtggattgacatgaacgagccttccaacttcatcagaggctctgaggacggctgccccaacaatgagctggagaacccaccctacgtgcctggggtggttggggggaccctccaggcggccaccatctgtgcctccagccaccagtttctctccacacactacaacctgcacaacctctacggcctgaccgaagccatcgcctcccacagggcgctggtgaaggctcgggggacacgcccatttgtgatctcccgctcgacctttgctggccacggccgatacgccggccactggacgggggacgtgtggagctcctgggagcagctcgcctcctccgtgccagaaatcctgcagtttaacctgctgggggtgcctctggtcggggccgacgtctgcggcttcctgggcaacacctcagaggagctgtgtgtgcgctggacccagctgggggccttctaccccttcatgcggaaccacaacagcctgctcagtctgccccaggagccgtacagcttcagcgagccggcccagcaggccatgaggaaggccctcaccctgcgctacgcactcctcccccacctctacacactgttccaccaggcccacgtcgcgggggagaccgtggcccggcccctcttcctggagttccccaaggactctagcacctggactgtggaccaccagctcctgtggggggaggccctgctcatcaccccagtgctccaggccgggaaggccgaagtgactggctacttccccttgggcacatggtacgacctgcagacggtgccaatagaggcccttggcagcctcccacccccacctgcagctccccgtgagccagccatccacagcgaggggcagtgggtgacgctgccggcccccctggacaccatcaacgtccacctccgggctgggtacatcatccccctgcagggccctggcctcacaaccacagagtcccgccagcagcccatggccctggctgtggccctgaccaagggtggggaggcccgaggggagctgttctgggacgatggagagagcctggaagtgctggagcgaggggcctacacacaggtcatcttcctggccaggaataacacgatcgtgaatgagctggtacgtgtgaccagtgagggagctggcctgcagctgcagaaggtgactgtcctgggcgtggccacggcgccccagcaggtcctctccaacggtgtccctgtctccaacttcacctacagccccgacaccaaggtcctggacatctgtgtctcgctgttgatgggagagcagtttctcgtcagctggtgttagccgggcggagtgtgttagtctctccagagggaggctggttccccagggaagcagagcctgtgtgcgggcagcagctgtgtgcgggcctgggggttgcatgtgtcacctggagctgggcactaaccattccaagccgccgcatcgcttgtttccacctcctgggccggggctctggcccccaacgtgtctaggagagctttctccctagatcgcactgtgggccggggccctggagggctgctctgtgttaataagattgtaaggtttgccctcctcacctgttgccggcatgcgggtagtattagccacccccctccatctgttcccagcaccggagaagggggtgctcaggtggaggtgtggggtatgcacctgagctcctgcttcgcgcctgctgctctgccccaacgcgaccgctgcccggctgcccagagggctggatgcctgccggtccccgagcaagcctgggaactcaggaaaattcacaggacttgggagattctaaatcttaagtgcaattatttttaataaaaggggcatttggaaaaaaaaaaaataatataaacacaaatattagaaataaatctatatgagtgccaacttcctatttattagtttacttactaaaaatccttgggggggacccgggtccaatattacccctatgtgagagcgttttatctcgcc

SEQ ID NO: 324804 - DNA, 3143 bp, Homo sapiens
gcgcctgcgcgggaggccgcgtcacgtgacccaccgcggccccgccccgcgacgagctcccgccggtcacgtgacccgcctctgcgcgcccccgggcacgaccccggagtctccgcgggcggccagggcgcgcgtgcgcggaggttctcctcgtccgcccgttgttcagcgagggaggctctgcgcgtgccgcagctgacggggaaactgaggcacggagcgggcctgtaggagctgtccaggccatctccaaccatgggagtgaggcacccgccctgctcccaccggctcctggccgtctgcgccctcgtgtccttggcaaccgctgcactcctggggcacatcctactccatgatttcctgctggttccccgagagctgagtggctcctccccagtcctggaggagactcacccagctcaccagcagggagccagcagaccagggccccgggatgcccaggcacaccccggccgtcccagagcagtgcccacacagtgcgacgtcccccccaacagccgcttcgattgcgcccctgacaaggccatcacccaggaacagtgcgaggcccgcggctgctgctacatccctgcaaagcaggggctgcagggagcccagatggggcagccctggtgcttcttcccacccagctaccccagctacaagctggagaacctgagctcctctgaaatgggctacacggccaccctgacccgtaccacccccaccttcttccccaaggacatcctgaccctgcggctggacgtgatgatggagactgagaaccgcctccacttcacgatcaaagatccagctaacaggcgctacgaggtgcccttggagaccccgcgtgtccacagccgggcaccgtccccactctacagcgtggagttctccgaggagcccttcggggtgatcgtgcaccggcagctggacggccgcgtgctgctgaacacgacggtggcgcccctgttctttgcggaccagttccttcagctgtccacctcgctgccctcgcagtatatcacaggcctcgccgagcacctcagtcccctgatgctcagcaccagctggaccaggatcaccctgtggaaccgggaccttgcgcccacgcccggtgcgaacctctacgggtctcaccctttctacctggcgctggaggacggcgggtcggcacacggggtgttcctgctaaacagcaatgccatggatgtggtcctgcagccgagccctgcccttagctggaggtcgacaggtgggatcctggatgtctacatcttcctgggcccagagcccaagagcgtggtgcagcagtacctggacgttgtgggatacccgttcatgccgccatactggggcctgggcttccacctgtgccgctggggctactcctccaccgctatcacccgccaggtggtggagaacatgaccagggcccacttccccctggacgtccaatggaacgacctggactacatggactcccggagggacttcacgttcaacaaggatggcttccgggacttcccggccatggtgcaggagctgcaccagggcggccggcgctacatgatgatcgtggatcctgccatcagcagctcgggccctgccgggagctacaggccctacgacgagggtctgcggaggggggttttcatcaccaacgagaccggccagccgctgattgggaaggtatggcccgggtccactgccttccccgacttcaccaaccccacagccctggcctggtgggaggacatggtggctgagttccatgaccaggtgcccttcgacggcatgtggattgacatgaacgagccttccaacttcatcagaggctctgaggacggctgccccaacaatgagctggagaacccaccctacgtgcctggggtggttggggggaccctccaggcggccaccatctgtgcctccagccaccagtttctctccacacactacaacctgcacaacctctacggcctgaccgaagccatcgcctcccacagggcgctggtgaaggctcgggggacacgcccatttgtgatctcccgctcgacctttgctggccacggccgatacgccggccactggacgggggacgtgtggagctcctgggagcagctcgcctcctccgtgccagaaatcctgcagtttaacctgctgggggtgcctctggtcggggccgacgtctgcggcttcctgggcaacacctcagaggagctgtgtgtgcgctggacccagctgggggccttctaccccttcatgcggaaccacaacagcctgctcagtctgccccaggagccgtacagcttcagcgagccggcccagcaggccatgaggaaggccctcaccctgcgctacgcactcctcccccacctctacacactgttccaccaggcccacgtcgcgggggagaccgtggcccggcccctcttcctggagttccccaaggactctagcacctggactgtggaccaccagctcctgtggggggaggccctgctcatcaccccagtgctccaggccgggaaggccgaagtgactggctacttccccttgggcacatggtacgacctgcagacggtgccaatagaggcccttggcagcctcccacccccacctgcagctccccgtgagccagccatccacagcgaggggcagtgggtgacgctgccggcccccctggacaccatcaacgtccacctccgggctgggtacatcatccccctgcagggccctggcctcacaaccacagagtcccgccagcagcccatggccctggctgtggccctgaccaagggtggggaggcccgaggggagctgttctgggacgatggagagagcctggaagtgctggagcgaggggcctacacacaggtcatcttcctggccaggaataacacgatcgtgaatgagctggtacgtgtgaccagtgagggagctggcctgcagctgcagaaggtgactgtcctgggcgtggccacggcgccccagcaggtcctctccaacggtgtccctgtctccaacttcacctacagccccgacaccaaggtcctggacatctgtgtctcgctattcacaggacttgggagattctaaatcttaagtgcaattatttttaataaaaggggcatttggaa

SEQ ID NO: 324805 - DNA, 457 bp, Homo sapiens
  misc_feature (5)..(6): n is a, c, g, or t
gccgnnctccgcctcgcttgctcctgccgggcgtgcagggccccgccgccgccatgtcgggctcgttcgagctctcggtgcaggatctcaacgacctgctctcggacggcagcggctgctacagcctcccgagccagccctgcaacgaggtcaccccgcggatctacgtgggcaacgcgtctgtggctcaggacatccccaagctgcagaaactaggcatcacccatgtgctgaacgcggctgagggcaggtccttcatgcacgtcaacaccaatgccaacttctacaaggactcctcgacctggtgatgatcgaagtgcagagcggcgaatacctgggcgaagacgacattgtgcgcttcgatgacatctacgccgtgcgcccgccgacgtgaaaaaatgacatgctgtacctcactgatcatcccgacccgtaacgccgtgagatcagcatgtcc

SEQ ID NO: 324806 - DNA, 4320 bp, Homo sapiens
gaatctgtgaccagcttgggaagctcctgcagggaggaaggaatgatccacaagtcccccagcccttcatgctgaggcatctgtctggctggagaaacactaaggttggcattgtgctcacactgggaaatgacctggaggaagttgggaagaggagtccaggccggttccaacctctgggtcagaaacccggctggaaagcactggaaatagggaaatagaagaccgaaaggctggacccccctcacacccaacctgcgtgcatggccgaggttgagtgaggagtcctggagactctggcttcatgttctttgctcttgttcttctgtgcctcaggggtcgctgcccacatagttcagcgtctgacgtcagacgctgaactatgtgggcaacgcgtctgtggctcaggacatccccaagctgcagaaactaggcatcacccatgtgctgaacgcggctgagggcaggtccttcatgcacgtcaacaccaatgccaacttctacaaggactccggcatcacatacctgggcatcaaggccaacgacacacaggagttcaacctcagcgcttactttgaaagggctgccgacttcattgaccaggctttggctcaaaagaatggccgggtgctcgtccactgccgggaaggttatagccgctccccaacgctagttatcgcctacctcatgatgcggcagaagatggacgtcaagtctgccctgagcatcgtgaggcagaaccgtgagatcggccccaacgatggcttcctggcccagctctgccagctcaatgacagactagccaaggaggggaagttgaaaccctagggcacccccaccgcctctgctcgagaggtccgtgggggaggccgtgggcaaaggtgtcccgagctgccatgtttaggaaacacactgtaccctgctcccagcatcacaaggcacttgtctacaagtgtgtcccaacacagtcctgggccactttccccaccctggggagcacataaagaagcttgccaaggggggcgtccttgctccccagttgtcctgtttctgtaacttatgatgtcttttccctgagatgggggctcagagggggaaggcctgtggcctgcatgcttcccgatggcccacggcaggaggtgtgtggaagtgtaaggcctaagatgctcacagaggtccctcatgacctcccttccccaactcccgaatcctctcttgagtgtggacctcaacaccttgagccctagtaaaggaactatgcaaatgcaggccactctccccaccacgtctgtgccccgcactgtccccacagccttccacaccctgtgcataggcagccctctcacgtcttgaggtccgaagctggggtgggggtgtccgtcagttattagtggatggagattcccacagcaaggctgcatttgaatgatttccttaggatgaatggtccctacacaaagaggccttgtgggcaaacctggagaaccctcctaaatccatagagttttcaaaatgtgaatctttggaagccttgagttcagaatctgctgctctggaatatttcccttcgatcttatctcagtcacttcgtttttgagaagagtgatgccttgggcatgcttttttttttttcttttttagaaaacagggagttgaagtccaacctatttaaaaaccccaccatttggagaattacaagggttttgtcctgaattgtagtgttggcaagcccaagccactcgtgctaactgctttttgtctcggttgctattccaagaacagaaggaggaagttggccaattacagcgtgtgtgcatggatgtgtgtggggggcgtgcctctcagaaacgcggccagaagacaagcagggaagtgaaaggtcccaggcacacaccctgcccattgcaggtggctcttacagctctctggtgccagcacgggatccctgaagtgactcagccaggcagacatgagacatggcggagtgtccaaatggatcctttattggtggtagagcaaaaaaacccaaacacgataaacctttcaaaagactttctaaggatgatattggaatgcaccagccctcacatgtgtatgcacatttgccagaatataagagttttgttttaaatacagtcttgttaggattttacgttattgttattatggaaagtgattgtgatgctatttatcttcagggtcactctgggcaaagagaaggtcctcagccatgcccccagcaccttgcacataggtgtctgataaaagtttaagaaattaaacactttttgagcaccaaatatatatagggcattgttctggtgggtgtgtcacgctcccagaagactgaatttatggtaggatcactcgcaaggccttgtgaaggagtcttacctaaaacaaaagaaatatcagggacttttgttgactatttacaactcagttttacatttaaattcaggcagtgttaatatgccaaggtagggaatgtgcctttttcagagttggccaggagctcctggctgggacacggagaggcaggtgtggcgtaaggcctcactcccggctgtgaaggtctctgatcacacagaagcagccctgcccagcctggtcatttgctgtccgcttttctctgtgaccacagcagccctgaacaaccagtatgtgtcttcttctccagatagtgaaaaaggtgtccagataaacccacctaagtgaaatggccatcctctaaactgggtacctcactgcacagcttctaggtagccttccaacttaatctaacttgagcctcacagtaaccctgtaaagttagtagagcttgttcttgtattgtgaccttttttaaaaaaaaggaactgaggttcagaatgattaagggcctggcccccagggttgtccagctccataaggtggagctgggcaagattttgggtttgctgctccctgaagctggattctttcatacgatactctttctcaagaagggggctccctgggatctccaggtgtactgcacttaccctcaatccagccccggagaagcaagtgaaaagggtgggtccctcataggctagaatgtgcagctctttctccaggtgggatgtagcaccccaaagtagagctttctgctctgctcctggaaaaggctagggagctggggctggggctcccctcccatgaccaggcagtggtcaccccatgggacaggcacagctacttacgcgaacacagcaggttggtgtggctggctaactaggacctctcgaaagtctctgtgggggcatgagggagaaaaggccattgggagaattactgcctttactttgggactacttttatgctgataacttgggatttcttgatagtccttcacccctgaaaccccgtatttacttaacaagatttagctcttagttcttcaagtaaaattaaagtctcttgtgtaagagccaacacatgcccagctgcggatgggagctgttcctggacagccttctactgcctgggaagtgatggaacaggaactcagggtgcccttaccccctccccagacctgttccctttctttgactgacagagcaccatccaggcaaaattagagcgccaaatggttttcttctcaatcttaaagcagtatacctttccacaggctcgtctgtgtccctgccactctgagttatccagaaaccaccacctacaaatgaggggactcatctagaagacctctaaggtccccttttggctctgaggggtctctaataatccccacttggaattcagcaccgcaaggaaattatgggtatgtgagccataatatgatggccagcaggtggcgctgccttccacccatggtgatggatggtttggaaagggaatgttggtgccttttgtgccacaagttaagatgctactgttttaaaggaaaaaaaaaaaaaaagtactgatcttcaatatgaagacatgagcttttctcgcaggaaattttctttttcacagaactggtgtcaggaatcactgaagggctaaccgtgatagtccttgcaagtaagtcaaggttttatcctgattggaaatagaagacatttccggttgagagaacagattcgttggaagcttaacttttgttgcctcttaacgccaccaaattttagggtaatttgattatgaaagagtgaatttttctggacagaaaagggagagctaccaaattgtttttttctttttaaaaggaagtttaatgtccgttgtatcacaaatcagtgttaaaacaccagaactttagccaaaataaatgtcttacattacaaaagaaaaaat

SEQ ID NO: 324807 - DNA, 4050 bp, Homo sapiens
  misc_feature (5)..(6): n is a, c, g, or t
gccgnnctccgcctcgcttgctcctgccgggcgtgcagggccccgccgccgccatgtcgggctcgttcgagctctcggtgcaggatctcaacgacctgctctcggacggcagcggctgctacagcctcccgagccagccctgcaacgaggtcaccccgcggatctacgtgggcaacgcgtctgtggctcaggacatccccaagctgcagaaactaggcatcacccatgtgctgaacgcggctgagggcaggtccttcatgcacgtcaacaccaatgccaacttctacaaggactccggcatcacatacctgggcatcaaggccaacgacacacaggagttcaacctcagcgcttactttgaaagggctgccgacttcattgaccaggctttggctcaaaagaatggccgggtgctcgtccactgccgggaaggttatagccgctccccaacgctagttatcgcctacctcatgatgcggcagaagatggacgtcaagtctgccctgagcatcgtgaggcagaaccgtgagatcggccccaacgatggcttcctggcccagctctgccagctcaatgacagactagccaaggaggggaagttgaaaccctagggcacccccaccgcctctgctcgagaggtccgtgggggaggccgtgggcaaaggtgtcccgagctgccatgtttaggaaacacactgtaccctgctcccagcatcacaaggcacttgtctacaagtgtgtcccaacacagtcctgggccactttccccaccctggggagcacataaagaagcttgccaaggggggcgtccttgctccccagttgtcctgtttctgtaacttatgatgtcttttccctgagatgggggctcagagggggaaggcctgtggcctgcatgcttcccgatggcccacggcaggaggtgtgtggaagtgtaaggcctaagatgctcacagaggtccctcatgacctcccttccccaactcccgaatcctctcttgagtgtggacctcaacaccttgagccctagtaaaggaactatgcaaatgcaggccactctccccaccacgtctgtgccccgcactgtccccacagccttccacaccctgtgcataggcagccctctcacgtcttgaggtccgaagctggggtgggggtgtccgtcagttattagtggatggagattcccacagcaaggctgcatttgaatgatttccttaggatgaatggtccctacacaaagaggccttgtgggcaaacctggagaaccctcctaaatccatagagttttcaaaatgtgaatctttggaagccttgagttcagaatctgctgctctggaatatttcccttcgatcttatctcagtcacttcgtttttgagaagagtgatgccttgggcatgcttttttttttttcttttttagaaaacagggagttgaagtccaacctatttaaaaaccccaccatttggagaattacaagggttttgtcctgaattgtagtgttggcaagcccaagccactcgtgctaactgctttttgtctcggttgctattccaagaacagaaggaggaagttggccaattacagcgtgtgtgcatggatgtgtgtggggggcgtgcctctcagaaacgcggccagaagacaagcagggaagtgaaaggtcccaggcacacaccctgcccattgcaggtggctcttacagctctctggtgccagcacgggatccctgaagtgactcagccaggcagacatgagacatggcggagtgtccaaatggatcctttattggtggtagagcaaaaaaacccaaacacgataaacctttcaaaagactttctaaggatgatattggaatgcaccagccctcacatgtgtatgcacatttgccagaatataagagttttgttttaaatacagtcttgttaggattttacgttattgttattatggaaagtgattgtgatgctatttatcttcagggtcactctgggcaaagagaaggtcctcagccatgcccccagcaccttgcacataggtgtctgataaaagtttaagaaattaaacactttttgagcaccaaatatatatagggcattgttctggtgggtgtgtcacgctcccagaagactgaatttatggtaggatcactcgcaaggccttgtgaaggagtcttacctaaaacaaaagaaatatcagggacttttgttgactatttacaactcagttttacatttaaattcaggcagtgttaatatgccaaggtagggaatgtgcctttttcagagttggccaggagctcctggctgggacacggagaggcaggtgtggcgtaaggcctcactcccggctgtgaaggtctctgatcacacagaagcagccctgcccagcctggtcatttgctgtccgcttttctctgtgaccacagcagccctgaacaaccagtatgtgtcttcttctccagatagtgaaaaaggtgtccagataaacccacctaagtgaaatggccatcctctaaactgggtacctcactgcacagcttctaggtagccttccaacttaatctaacttgagcctcacagtaaccctgtaaagttagtagagcttgttcttgtattgtgaccttttttaaaactccataaggtggagctgggcaagattttgggtttgctgctccctgaagctggattctttcatacgatactctttctcaagaagggggctccctgggatctccaggtgtactgcacttaccctcaatccagccccggagaagcaagtgaaaagggtgggtccctcataggctagaatgtgcagctctttctccaggtgggatgtagcaccccaaagtagagctttctgctctgctcctggaaaaggctagggagctggggctggggctcccctcccatgaccaggcagtggtcaccccatgggacaggcacagctacttacgcgaacacagcaggttggtgtggctggctaactaggacctctcgaaagtctctgtgggggcatgagggagaaaaggccattgggagaattactgcctttactttgggactacttttatgctgataacttgggatttcttgatagtccttcacccctgaaaccccgtatttacttaacaagatttagctcttagttcttcaagtaaaattaaagtctcttgtgtaagagccaacacatgcccagctgcggatgggagctgttcctggacagccttctactgcctgggaagtgatggaacaggaactcagggtgcccttaccccctccccagacctgttccctttctttgactgacagagcaccatccaggcaaaattagagcgccaaatggttttcttctcaatcttaaagcagtatacctttccacaggctcgtctgtgtccctgccactctgagttatccagaaaccaccacctacaaatgaggggactcatctagaagacctctaaggtccccttttggctctgaggggtctctaataatccccacttggaattcagcaccgcaaggaaattatgggtatgtgagccataatatgatggccagcaggtggcgctgccttccacccatggtgatggatggtttggaaagggaatgttggtgccttttgtgccacaagttaagatgctactgttttaaaggaaaaaaaaaaaaaaagtactgatcttcaatatgaagacatgagcttttctcgcaggaaattttctttttcacagaactggtgtcaggaatcactgaagggctaaccgtgatagtccttgcaagtaagtcaaggttttatcctgattggaaatagaagacatttccggttgagagaacagattcgttggaagcttaacttttgttgcctcttaacgccaccaaattttagggtaatttgattatgaaagagtgaatttttctggacagaaaagggagagctaccaaattgtttttttctttttaaaaggaagtttaatgtccgttgtatcacaaatcagtgttaaaacaccagaactttagccaaaataaatgtcttacattacaaaagaaaaaat

SEQ ID NO: 324808 - DNA, 3834 bp, Homo sapiens
tcgagctcggtaccgtcacgcccacagggcatcacatacctgggcatcaaggccaacgacacacaggagttcaacctcagcgcttactttgaaagggctgccgacttcattgaccaggctttggctcaaaagaatggccgggtgctcgtccactgccgggaaggttatagccgctccccaacgctagttatcgcctacctcatgatgcggcagaagatggacgtcaagtctgccctgagcatcgtgaggcagaaccgtgagatcggccccaacgatggcttcctggcccagctctgccagctcaatgacagactagccaaggaggggaagttgaaaccctagggcacccccaccgcctctgctcgagaggtccgtgggggaggccgtgggcaaaggtgtcccgagctgccatgtttaggaaacacactgtaccctgctcccagcatcacaaggcacttgtctacaagtgtgtcccaacacagtcctgggccactttccccaccctggggagcacataaagaagcttgccaaggggggcgtccttgctccccagttgtcctgtttctgtaacttatgatgtcttttccctgagatgggggctcagagggggaaggcctgtggcctgcatgcttcccgatggcccacggcaggaggtgtgtggaagtgtaaggcctaagatgctcacagaggtccctcatgacctcccttccccaactcccgaatcctctcttgagtgtggacctcaacaccttgagccctagtaaaggaactatgcaaatgcaggccactctccccaccacgtctgtgccccgcactgtccccacagccttccacaccctgtgcataggcagccctctcacgtcttgaggtccgaagctggggtgggggtgtccgtcagttattagtggatggagattcccacagcaaggctgcatttgaatgatttccttaggatgaatggtccctacacaaagaggccttgtgggcaaacctggagaaccctcctaaatccatagagttttcaaaatgtgaatctttggaagccttgagttcagaatctgctgctctggaatatttcccttcgatcttatctcagtcacttcgtttttgagaagagtgatgccttgggcatgcttttttttttttcttttttagaaaacagggagttgaagtccaacctatttaaaaaccccaccatttggagaattacaagggttttgtcctgaattgtagtgttggcaagcccaagccactcgtgctaactgctttttgtctcggttgctattccaagaacagaaggaggaagttggccaattacagcgtgtgtgcatggatgtgtgtggggggcgtgcctctcagaaacgcggccagaagacaagcagggaagtgaaaggtcccaggcacacaccctgcccattgcaggtggctcttacagctctctggtgccagcacgggatccctgaagtgactcagccaggcagacatgagacatggcggagtgtccaaatggatcctttattggtggtagagcaaaaaaacccaaacacgataaacctttcaaaagactttctaaggatgatattggaatgcaccagccctcacatgtgtatgcacatttgccagaatataagagttttgttttaaatacagtcttgttaggattttacgttattgttattatggaaagtgattgtgatgctatttatcttcagggtcactctgggcaaagagaaggtcctcagccatgcccccagcaccttgcacataggtgtctgataaaagtttaagaaattaaacactttttgagcaccaaatatatatagggcattgttctggtgggtgtgtcacgctcccagaagactgaatttatggtaggatcactcgcaaggccttgtgaaggagtcttacctaaaacaaaagaaatatcagggacttttgttgactatttacaactcagttttacatttaaattcaggcagtgttaatatgccaaggtagggaatgtgcctttttcagagttggccaggagctcctggctgggacacggagaggcaggtgtggcgtaaggcctcactcccggctgtgaaggtctctgatcacacagaagcagccctgcccagcctggtcatttgctgtccgcttttctctgtgaccacagcagccctgaacaaccagtatgtgtcttcttctccagatagtgaaaaaggtgtccagataaacccacctaagtgaaatggccatcctctaaactgggtacctcactgcacagcttctaggtagccttccaacttaatctaacttgagcctcacagtaaccctgtaaagttagtagagcttgttcttgtattgtgaccttttttaaaaaaaaggaactgaggttcagaatgattaagggcctggcccccagggttgtccagctccataaggtggagctgggcaagattttgggtttgctgctccctgaagctggattctttcatacgatactctttctcaagaagggggctccctgggatctccaggtgtactgcacttaccctcaatccagccccggagaagcaagtgaaaagggtgggtccctcataggctagaatgtgcagctctttctccaggtgggatgtagcaccccaaagtagagctttctgctctgctcctggaaaaggctagggagctggggctggggctcccctcccatgaccaggcagtggtcaccccatgggacaggcacagctacttacgcgaacacagcaggttggtgtggctggctaactaggacctctcgaaagtctctgtgggggcatgagggagaaaaggccattgggagaattactgcctttactttgggactacttttatgctgataacttgggatttcttgatagtccttcacccctgaaaccccgtatttacttaacaagatttagctcttagttcttcaagtaaaattaaagtctcttgtgtaagagccaacacatgcccagctgcggatgggagctgttcctggacagccttctactgcctgggaagtgatggaacaggaactcagggtgcccttaccccctccccagacctgttccctttctttgactgacagagcaccatccaggcaaaattagagcgccaaatggttttcttctcaatcttaaagcagtatacctttccacaggctcgtctgtgtccctgccactctgagttatccagaaaccaccacctacaaatgaggggactcatctagaagacctctaaggtccccttttggctctgaggggtctctaataatccccacttggaattcagcaccgcaaggaaattatgggtatgtgagccataatatgatggccagcaggtggcgctgccttccacccatggtgatggatggtttggaaagggaatgttggtgccttttgtgccacaagttaagatgctactgttttaaaggaaaaaaaaaaaaaaagtactgatcttcaatatgaagacatgagcttttctcgcaggaaattttctttttcacagaactggtgtcaggaatcactgaagggctaaccgtgatagtccttgcaagtaagtcaaggttttatcctgattggaaatagaagacatttccggttgagagaacagattcgttggaagcttaacttttgttgcctcttaacgccaccaaattttagggtaatttgattatgaaagagtgaatttttctggacagaaaagggagagctaccaaattgtttttttctttttaaaaggaagtttaatgtccgttgtatcacaaatcagtgttaaaacaccagaactttagccaaaataaatgtcttacattacaaaagaaaaaat

SEQ ID NO: 324809 - DNA, 3335 bp, Homo sapiens
ctctttgagagaatctggtgtgggaaacgtcttcatcaagaacctggacacatctatagatatcaaggcactttatgatgtcttttccctgagatgggggctcagagggggaaggcctgtggcctgcatgcttcccgatggcccacggcaggaggtgtgtggaagtgtaaggcctaagatgctcacagaggtccctcatgacctcccttccccaactcccgaatcctctcttgagtgtggacctcaacaccttgagccctagtaaaggaactatgcaaatgcaggccactctccccaccacgtctgtgccccgcactgtccccacagccttccacaccctgtgcataggcagccctctcacgtcttgaggtccgaagctggggtgggggtgtccgtcagttattagtggatggagattcccacagcaaggctgcatttgaatgatttccttaggatgaatggtccctacacaaagaggccttgtgggcaaacctggagaaccctcctaaatccatagagttttcaaaatgtgaatctttggaagccttgagttcagaatctgctgctctggaatatttcccttcgatcttatctcagtcacttcgtttttgagaagagtgatgccttgggcatgcttttttttttttcttttttagaaaacagggagttgaagtccaacctatttaaaaaccccaccatttggagaattacaagggttttgtcctgaattgtagtgttggcaagcccaagccactcgtgctaactgctttttgtctcggttgctattccaagaacagaaggaggaagttggccaattacagcgtgtgtgcatggatgtgtgtggggggcgtgcctctcagaaacgcggccagaagacaagcagggaagtgaaaggtcccaggcacacaccctgcccattgcaggtggctcttacagctctctggtgccagcacgggatccctgaagtgactcagccaggcagacatgagacatggcggagtgtccaaatggatcctttattggtggtagagcaaaaaaacccaaacacgataaacctttcaaaagactttctaaggatgatattggaatgcaccagccctcacatgtgtatgcacatttgccagaatataagagttttgttttaaatacagtcttgttaggattttacgttattgttattatggaaagtgattgtgatgctatttatcttcagggtcactctgggcaaagagaaggtcctcagccatgcccccagcaccttgcacataggtgtctgataaaagtttaagaaattaaacactttttgagcaccaaatatatatagggcattgttctggtgggtgtgtcacgctcccagaagactgaatttatggtaggatcactcgcaaggccttgtgaaggagtcttacctaaaacaaaagaaatatcagggacttttgttgactatttacaactcagttttacatttaaattcaggcagtgttaatatgccaaggtagggaatgtgcctttttcagagttggccaggagctcctggctgggacacggagaggcaggtgtggcgtaaggcctcactcccggctgtgaaggtctctgatcacacagaagcagccctgcccagcctggtcatttgctgtccgcttttctctgtgaccacagcagccctgaacaaccagtatgtgtcttcttctccagatagtgaaaaaggtgtccagataaacccacctaagtgaaatggccatcctctaaactgggtacctcactgcacagcttctaggtagccttccaacttaatctaacttgagcctcacagtaaccctgtaaagttagtagagcttgttcttgtattgtgaccttttttaaaaaaaaggaactgaggttcagaatgattaagggcctggcccccagggttgtccagctccataaggtggagctgggcaagattttgggtttgctgctccctgaagctggattctttcatacgatactctttctcaagaagggggctccctgggatctccaggtgtactgcacttaccctcaatccagccccggagaagcaagtgaaaagggtgggtccctcataggctagaatgtgcagctctttctccaggtgggatgtagcaccccaaagtagagctttctgctctgctcctggaaaaggctagggagctggggctggggctcccctcccatgaccaggcagtggtcaccccatgggacaggcacagctacttacgcgaacacagcaggttggtgtggctggctaactaggacctctcgaaagtctctgtgggggcatgagggagaaaaggccattgggagaattactgcctttactttgggactacttttatgctgataacttgggatttcttgatagtccttcacccctgaaaccccgtatttacttaacaagatttagctcttagttcttcaagtaaaattaaagtctcttgtgtaagagccaacacatgcccagctgcggatgggagctgttcctggacagccttctactgcctgggaagtgatggaacaggaactcagggtgcccttaccccctccccagacctgttccctttctttgactgacagagcaccatccaggcaaaattagagcgccaaatggttttcttctcaatcttaaagcagtatacctttccacaggctcgtctgtgtccctgccactctgagttatccagaaaccaccacctacaaatgaggggactcatctagaagacctctaaggtccccttttggctctgaggggtctctaataatccccacttggaattcagcaccgcaaggaaattatgggtatgtgagccataatatgatggccagcaggtggcgctgccttccacccatggtgatggatggtttggaaagggaatgttggtgccttttgtgccacaagttaagatgctactgttttaaaggaaaaaaaaaaaaaaagtactgatcttcaatatgaagacatgagcttttctcgcaggaaattttctttttcacagaactggtgtcaggaatcactgaagggctaaccgtgatagtccttgcaagtaagtcaaggttttatcctgattggaaatagaagacatttccggttgagagaacagattcgttggaagcttaacttttgttgcctcttaacgccaccaaattttagggtaatttgattatgaaagagtgaatttttctggacagaaaagggagagctaccaaattgtttttttctttttaaaaggaagtttaatgtccgttgtatcacaaatcagtgttaaaacaccagaactttagccaaaataaatgtcttacattacaaaagaaaaaat

SEQ ID NO: 324810 - DNA, 916 bp, Homo sapiens
agcagaaaacttagctagtacaggccctgtattcgcacgaggctctgtcgtagatatgcccagctgcggatgggagctgttcctggacagccttctactgcctgggaagtgatggaacaggaactcagggtgcccttaccccctccccagacctgttccctttctttgactgacagagcaccatccaggcaaaattagagcgccaaatggttttcttctcaatcttaaagcagtatacctttccacaggctcgtctgtgtccctgccactctgagttatccagaaaccaccacctacaaatgaggggactcatctagaagacctctaaggtccccttttggctctgaggggtctctaataatccccacttggaattcagcaccgcaaggaaattatgggtatgtgagccataatatgatggccagcaggtggcgctgccttccacccatggtgatggatggtttggaaagggaatgttggtgccttttgtgccacaagttaagatgctactgttttaaaggaaaaaaaaaaaaaaagtactgatcttcaatatgaagacatgagcttttctcgcaggaaattttctttttcacagaactggtgtcaggaatcactgaagggctaaccgtgatagtccttgcaagtaagtcaaggttttatcctgattggaaatagaagacatttccggttgagagaacagattcgttggaagcttaacttttgttgcctcttaacgccaccaaattttagggtaatttgattatgaaagagtgaatttttctggacagaaaagggagagctaccaaattgtttttttctttttaaaaggaagtttaatgtccgttgtatcacaaatcagtgttaaaacaccagaactttagccaaaataaatgtcttacattacaaaagaaaaaat

SEQ ID NO: 324811 - DNA, 1306 bp, Homo sapiens
  misc_feature (5)..(6): n is a, c, g, or t
gccgnnctccgcctcgcttgctcctgccgggcgtgcagggccccgccgccgccatgtcgggctcgttcgagctctcggtgcaggatctcaacgacctgctctcggacggcagcggctgctacagcctcccgagccagccctgcaacgaggtcaccccgcggatctacgtgggcaacgcgtctgtggctcaggacatccccaagctgcagaaactaggcatcacccatgtgctgaacgcggctgagggcaggtccttcatgcacgtcaacaccaatgccaacttctacaaggactccggcatcacatacctgggcatcaaggccaacgacacacaggagttcaacctcagcgcttactttgaaagggctgccgacttcattgaccaggctttggctcaaaagaatggccgggtgctcgtccactgccgggaaggttatagccgctccccaacgctagttatcgcctacctcatgatgcggcagaagatggacgtcaagtctgccctgagcatcgtgaggcagaaccgtgagatcggccccaacgatggcttcctggcccagctctgccagctcaatgacagactagccaaggaggggaagttgaaaccctagggcacccccaccgcctctgctcgagaggctcgtctgtgtccctgccactctgagttatccagaaaccaccacctacaaatgaggggactcatctagaagacctctaaggtccccttttggctctgaggggtctctaataatccccacttggaattcagcaccgcaaggaaattatgggtatgtgagccataatatgatggccagcaggtggcgctgccttccacccatggtgatggatggtttggaaagggaatgttggtgccttttgtgccacaagttaagatgctactgttttaaaggaaaaaaaaaaaaaaagtactgatcttcaatatgaagacatgagcttttctcgcaggaaattttctttttcacagaactggtgtcaggaatcactgaagggctaaccgtgatagtccttgcaagtaagtcaaggttttatcctgattggaaatagaagacatttccggttgagagaacagattcgttggaagcttaacttttgttgcctcttaacgccaccaaattttagggtaatttgattatgaaagagtgaatttttctggacagaaaagggagagctaccaaattgtttttttctttttaaaaggaagtttaatgtccgttgtatcacaaatcagtgttaaaacaccagaactttagccaaaataaatgtcttacattacaaaagaaaaaat

SEQ ID NO: 324812 - DNA, 1109 bp, Homo sapiens
  misc_feature (5)..(6): n is a, c, g, or t
gccgnnctccgcctcgcttgctcctgccgggcgtgcagggccccgccgccgccatgtcgggctcgttcgagctctcggtgcaggatctcaacgacctgctctcggacggcagcggctgctacagcctcccgagccagccctgcaacgaggtcaccccgcggatctacgtgggcaacgcgtctgtggctcaggacatccccaagctgcagaaactaggcatcacccatgtgctgaacgcggctgagggcaggtccttcatgcacgtcaacaccaatgccaacttctacaaggactccggcatcacatacctgggcatcaaggccaacgacacacaggagttcaacctcagcgcttactttgaaagggctgccgacttcattgaccaggctttggctcaaaagaatggccgggtgctcgtccactgccgggaaggttatagccgctccccaacgctagttatcgcctacctcatgatgcggcagaagatggacgtcaagtctgccctgagcatcgtgaggcagaaccgtgagatcggccccaacgatggcttcctggcccagctctgccagctcaatgacagactagccaaggaggggaagttgaaaccctagggcacccccaccgcctctgctcgagaggctcgtctgtgtccctgccactctgagttatccagaaaccaccacctacaaatgaggggactcatctagaagacctctaaggtccccttttggctctgaggggtctctaataatccccacttggaattcagcaccgcaaggaaattatggaactggtgtcaggaatcactgaagggctaaccgtgatagtccttgcaagtaagtcaaggttttatcctgattggaaatagaagacatttccggttgagagaacagattcgttggaagcttaacttttgttgcctcttaacgccaccaaattttagggtaatttgattatgaaagagtgaatttttctggacagaaaagggagagctaccaaattgtttttttctttttaaaaggaagtttaatgtccgttgtatcacaaatcagtgttaaaacaccagaactttagccaaaataaatgtcttacattacaaaagaaaaaat

SEQ ID NO: 324813 - DNA, 847 bp, Homo sapiens
gaatctgtgaccagcttgggaagctcctgcagggaggaaggaatgatccacaagtcccccagcccttcatgctgaggcatctgtctggctggagaaacactaaggttggcattgtgctcacactgggaaatgacctggaggaagttgggaagaggagtccaggccggttccaacctctgggtcagaaacccggctggaaagcactggaaatagggaaatagaagaccgaaaggctggacccccctcacacccaacctgcgtgcatggccgaggttgagtgaggagtcctggagactctggcttcatgttctttgctcttgttcttctgtgcctcaggggtcgctgcccacatagttcagcgtctgacgtcagacgctgaactatgtgggcaacgcgtctgtggctcaggacatccccaagctgcagaaactaggcatcacccatgtgctgaacgcggctgagggcaggtccttcatgcacgtcaacaccaatgccaacttctacaaggactccggcatcacatacctgggcatcaaggccaacgacacacaggagttcaacctcagcgcttactttgaaagggctgccgacttcattgaccaggctttggctcaaaagaatggtaagggacctcccaccaggaaaagatgggaggcagctctgactggactgtccctctggaaaacaggcccacaacaggtctcttcttagaaactcccttgtttcccatcttctggggtgaacgacagagctgtaggtctctctctgctcacctggctggctgtcaagtggccccgtgtgtcacaggatgtgcaactcattcacaccatggcagccccagggtcct

SEQ ID NO: 324814 - DNA, 1911 bp, Homo sapiens
  misc_feature (5)..(6): n is a, c, g, or t
gccgnnctccgcctcgcttgctcctgccgggcgtgcagggccccgccgccgccatgtcgggctcgttcgagctctcggtgcaggatctcaacgacctgctctcggacggcagcggctgctacagcctcccgagccagccctgcaacgaggtcaccccgcggatctacgtgggcaacgcgtctgtggctcaggacatccccaagctgcagaaactaggcatcacccatgtgctgaacgcggctgagggcaggtccttcatgcacgtcaacaccaatgccaacttctacaaggactccggcatcacatacctgggcatcaaggccaacgacacacaggagttcaacctcagcgcttactttgaaagggctgccgacttcattgaccaggctttggctcaaaagaatggccgggtgctcgtccactgccgggaaggttatagccgctccccaacgctagttatcgcctacctcatgatgcggcagaagatggacgtcaagtctgccctgagcatcgtgaggcagaaccgtgagatcggccccaacgatggcttcctggcccagctctgccagctcaatgacagactagccaaggaggggaagttgaaaccctagggcacccccaccgcctctgctcgagaggtccgtgggggaggccgtgggcaaaggtgtcccgagctgccatgtttaggaaacacactgtaccctgctcccagcatcacaaggcacttgtctacaagtgtgtcccaacacagtcctgggccactttccccaccctggggagcacataaagaagcttgccaaggggggcgtccttgctccccagttgtcctgtttctgtaacttatgatgtcttttccctgagatgggggctcagagggggaaggcctgtggcctgcatgcttcccgatggcccacggcaggaggtgtgtggaagtgtaaggcctaagatgctcacagaggtccctcatgacctcccttccccaactcccgaatcctctcttgagtgtggacctcaacaccttgagccctagtaaaggaactatgcaaatgcaggccactctccccaccacgtctgtgccccgcactgtccccacagccttccacaccctgtgcataggcagccctctcacgtcttgaggtccgaagctggggtgggggtgtccgtcagttattagtggatggagattcccacagcaaggctgcatttgaatgatttccttaggatgaatggtccctacacaaagaggccttgtgggcaaacctggagaaccctcctaaatccatagagttttcaaaatgtgaatctttggaagccttgagttcagaatctgctgctctggaatatttcccttcgatcttatctcagtcacttcgtttttgagaagagtgatgccttgggcatgcttttttttttttcttttttagaaaacagggagttgaagtccaacctatttaaaaaccccaccatttggagaattacaagggttttgtcctgaattgtagtgttggcaagcccaagccactcgtgctaactgctttttgtctcggttgctattccaagaacagaaggaggaagttggccaattacagcgtgtgtgcatggatgtgtgtggggggcgtgcctctcagaaacgcggccagaagacaagcagggaagtgaaaggtcccaggcacacaccctgcccattgcaggtggctcttacagctctctggtgccagcacgggatccctgaagtgactcagccaggcagacatgagacatggcggagtgtccaaatggatcctttattggtggtagagcaaaaaaacccaaacacgataaacctttcaaaagactttctaaggatgatattggaatgcaccagccctcacatgtgtatgcacatttgccagaatataagagttttgtttt

SEQ ID NO: 324815 - DNA, 4103 bp, Homo sapiens
  misc_feature (5)..(6): n is a, c, g, or t
gccgnnctccgcctcgcttgctcctgccgggcgtgcagggccccgccgccgccatgtcgggctcgttcgagctctcggtgcaggatctcaacgacctgctctcggacggcagcggctgctacagcctcccgagccagccctgcaacgaggtcaccccgcggatctacgtgggcaacgcgtctgtggctcaggacatccccaagctgcagaaactaggcatcacccatgtgctgaacgcggctgagggcaggtccttcatgcacgtcaacaccaatgccaacttctacaaggactccggcatcacatacctgggcatcaaggccaacgacacacaggagttcaacctcagcgcttactttgaaagggctgccgacttcattgaccaggctttggctcaaaagaatggccgggtgctcgtccactgccgggaaggttatagccgctccccaacgctagttatcgcctacctcatgatgcggcagaagatggacgtcaagtctgccctgagcatcgtgaggcagaaccgtgagatcggccccaacgatggcttcctggcccagctctgccagctcaatgacagactagccaaggaggggaagttgaaaccctagggcacccccaccgcctctgctcgagaggtccgtgggggaggccgtgggcaaaggtgtcccgagctgccatgtttaggaaacacactgtaccctgctcccagcatcacaaggcacttgtctacaagtgtgtcccaacacagtcctgggccactttccccaccctggggagcacataaagaagcttgccaaggggggcgtccttgctccccagttgtcctgtttctgtaacttatgatgtcttttccctgagatgggggctcagagggggaaggcctgtggcctgcatgcttcccgatggcccacggcaggaggtgtgtggaagtgtaaggcctaagatgctcacagaggtccctcatgacctcccttccccaactcccgaatcctctcttgagtgtggacctcaacaccttgagccctagtaaaggaactatgcaaatgcaggccactctccccaccacgtctgtgccccgcactgtccccacagccttccacaccctgtgcataggcagccctctcacgtcttgaggtccgaagctggggtgggggtgtccgtcagttattagtggatggagattcccacagcaaggctgcatttgaatgatttccttaggatgaatggtccctacacaaagaggccttgtgggcaaacctggagaaccctcctaaatccatagagttttcaaaatgtgaatctttggaagccttgagttcagaatctgctgctctggaatatttcccttcgatcttatctcagtcacttcgtttttgagaagagtgatgccttgggcatgcttttttttttttcttttttagaaaacagggagttgaagtccaacctatttaaaaaccccaccatttggagaattacaagggttttgtcctgaattgtagtgttggcaagcccaagccactcgtgctaactgctttttgtctcggttgctattccaagaacagaaggaggaagttggccaattacagcgtgtgtgcatggatgtgtgtggggggcgtgcctctcagaaacgcggccagaagacaagcagggaagtgaaaggtcccaggcacacaccctgcccattgcaggtggctcttacagctctctggtgccagcacgggatccctgaagtgactcagccaggcagacatgagacatggcggagtgtccaaatggatcctttattggtggtagagcaaaaaaacccaaacacgataaacctttcaaaagactttctaaggatgatattggaatgcaccagccctcacatgtgtatgcacatttgccagaatataagagttttgttttaaatacagtcttgttaggattttacgttattgttattatggaaagtgattgtgatgctatttatcttcagggtcactctgggcaaagagaaggtcctcagccatgcccccagcaccttgcacataggtgtctgataaaagtttaagaaattaaacactttttgagcaccaaatatatatagggcattgttctggtgggtgtgtcacgctcccagaagactgaatttatggtaggatcactcgcaaggccttgtgaaggagtcttacctaaaacaaaagaaatatcagggacttttgttgactatttacaactcagttttacatttaaattcaggcagtgttaatatgccaaggtagggaatgtgcctttttcagagttggccaggagctcctggctgggacacggagaggcaggtgtggcgtaaggcctcactcccggctgtgaaggtctctgatcacacagaagcagccctgcccagcctggtcatttgctgtccgcttttctctgtgaccacagcagccctgaacaaccagtatgtgtcttcttctccagatagtgaaaaaggtgtccagataaacccacctaagtgaaatggccatcctctaaactgggtacctcactgcacagcttctaggtagccttccaacttaatctaacttgagcctcacagtaaccctgtaaagttagtagagcttgttcttgtattgtgaccttttttaaaaaaaaggaactgaggttcagaatgattaagggcctggcccccagggttgtccagctccataaggtggagctgggcaagattttgggtttgctgctccctgaagctggattctttcatacgatactctttctcaagaagggggctccctgggatctccaggtgtactgcacttaccctcaatccagccccggagaagcaagtgaaaagggtgggtccctcataggctagaatgtgcagctctttctccaggtgggatgtagcaccccaaagtagagctttctgctctgctcctggaaaaggctagggagctggggctggggctcccctcccatgaccaggcagtggtcaccccatgggacaggcacagctacttacgcgaacacagcaggttggtgtggctggctaactaggacctctcgaaagtctctgtgggggcatgagggagaaaaggccattgggagaattactgcctttactttgggactacttttatgctgataacttgggatttcttgatagtccttcacccctgaaaccccgtatttacttaacaagatttagctcttagttcttcaagtaaaattaaagtctcttgtgtaagagccaacacatgcccagctgcggatgggagctgttcctggacagccttctactgcctgggaagtgatggaacaggaactcagggtgcccttaccccctccccagacctgttccctttctttgactgacagagcaccatccaggcaaaattagagcgccaaatggttttcttctcaatcttaaagcagtatacctttccacaggctcgtctgtgtccctgccactctgagttatccagaaaccaccacctacaaatgaggggactcatctagaagacctctaaggtccccttttggctctgaggggtctctaataatccccacttggaattcagcaccgcaaggaaattatgggtatgtgagccataatatgatggccagcaggtggcgctgccttccacccatggtgatggatggtttggaaagggaatgttggtgccttttgtgccacaagttaagatgctactgttttaaaggaaaaaaaaaaaaaaagtactgatcttcaatatgaagacatgagcttttctcgcaggaaattttctttttcacagaactggtgtcaggaatcactgaagggctaaccgtgatagtccttgcaagtaagtcaaggttttatcctgattggaaatagaagacatttccggttgagagaacagattcgttggaagcttaacttttgttgcctcttaacgccaccaaattttagggtaatttgattatgaaagagtgaatttttctggacagaaaagggagagctaccaaattgtttttttctttttaaaaggaagtttaatgtccgttgtatcacaaatcagtgttaaaacaccagaactttagccaaaataaatgtcttacattacaaaagaaaaaat

SEQ ID NO: 324816 - DNA, 2545 bp, Homo sapiens
  misc_feature (18)..(18): n is a, c, g, or t
  misc_feature (26)..(26): n is a, c, g, or t
tacaggctggtacccccncgcagtantggatatcgatcgacccaggcgctcgggggggcgtgcctctcagaaacgcggccagaagacaagcagggaagtgaaaggtcccaggcacacaccctgcccattgcaggtggctcttacagctctctggtgccagcacgggatccctgaagtgactcagccaggcagacatgagacatggcggagtgtccaaatggatcctttattggtggtagagcaaaaaaacccaaacacgataaacctttcaaaagactttctaaggatgatattggaatgcaccagccctcacatgtgtatgcacatttgccagaatataagagttttgttttaaatacagtcttgttaggattttacgttattgttattatggaaagtgattgtgatgctatttatcttcagggtcactctgggcaaagagaaggtcctcagccatgcccccagcaccttgcacataggtgtctgataaaagtttaagaaattaaacactttttgagcaccaaatatatatagggcattgttctggtgggtgtgtcacgctcccagaagactgaatttatggtaggatcactcgcaaggccttgtgaaggagtcttacctaaaacaaaagaaatatcagggacttttgttgactatttacaactcagttttacatttaaattcaggcagtgttaatatgccaaggtagggaatgtgcctttttcagagttggccaggagctcctggctgggacacggagaggcaggtgtggcgtaaggcctcactcccggctgtgaaggtctctgatcacacagaagcagccctgcccagcctggtcatttgctgtccgcttttctctgtgaccacagcagccctgaacaaccagtatgtgtcttcttctccagatagtgaaaaaggtgtccagataaacccacctaagtgaaatggccatcctctaaactgggtacctcactgcacagcttctaggtagccttccaacttaatctaacttgagcctcacagtaaccctgtaaagttagtagagcttgttcttgtattgtgaccttttttaaaaaaaaggaactgaggttcagaatgattaagggcctggcccccagggttgtccagctccataaggtggagctgggcaagattttgggtttgctgctccctgaagctggattctttcatacgatactctttctcaagaagggggctccctgggatctccaggtgtactgcacttaccctcaatccagccccggagaagcaagtgaaaagggtgggtccctcataggctagaatgtgcagctctttctccaggtgggatgtagcaccccaaagtagagctttctgctctgctcctggaaaaggctagggagctggggctggggctcccctcccatgaccaggcagtggtcaccccatgggacaggcacagctacttacgcgaacacagcaggttggtgtggctggctaactaggacctctcgaaagtctctgtgggggcatgagggagaaaaggccattgggagaattactgcctttactttgggactacttttatgctgataacttgggatttcttgatagtccttcacccctgaaaccccgtatttacttaacaagatttagctcttagttcttcaagtaaaattaaagtctcttgtgtaagagccaacacatgcccagctgcggatgggagctgttcctggacagccttctactgcctgggaagtgatggaacaggaactcagggtgcccttaccccctccccagacctgttccctttctttgactgacagagcaccatccaggcaaaattagagcgccaaatggttttcttctcaatcttaaagcagtatacctttccacaggctcgtctgtgtccctgccactctgagttatccagaaaccaccacctacaaatgaggggactcatctagaagacctctaaggtccccttttggctctgaggggtctctaataatccccacttggaattcagcaccgcaaggaaattatgggtatgtgagccataatatgatggccagcaggtggcgctgccttccacccatggtgatggatggtttggaaagggaatgttggtgccttttgtgccacaagttaagatgctactgttttaaaggaaaaaaaaaaaaaaagtactgatcttcaatatgaagacatgagcttttctcgcaggaaattttctttttcacagaactggtgtcaggaatcactgaagggctaaccgtgatagtccttgcaagtaagtcaaggttttatcctgattggaaatagaagacatttccggttgagagaacagattcgttggaagcttaacttttgttgcctcttaacgccaccaaattttagggtaatttgattatgaaagagtgaatttttctggacagaaaagggagagctaccaaattgtttttttctttttaaaaggaagtttaatgtccgttgtatcacaaatcagtgttaaaacaccagaactttagccaaaataaatgtcttacattacaaaagaaaaaat

SEQ ID NO: 324817 - DNA, 1171 bp, Homo sapiens
agtgtgtgagggactacaaggacagggtcaatgtcttgttcatgtctgtggctcaggacatccccaagctgcagaaactaggcatcacccatgtgctgaacgcggctgagggcaggtccttcatgcacgtcaacaccaatgccaacttctacaaggactccggcatcacatacctgggcatcaaggccaacgacacacaggagttcaacctcagcgcttactttgaaagggctgccgacttcattgaccaggctttggctcaaaagaatggccgggtgctcgtccactgccgggaaggttatagccgctccccaacgctagttatcgcctacctcatgatgcggcagaagatggacgtcaagtctgccctgagcatcgtgaggcagaaccgtgagatcggccccaacgatggcttcctggcccagctctgccagctcaatgacagactagccaaggaggggaagttgaaaccctagggcacccccaccgcctctgctcgagaggctcgtctgtgtccctgccactctgagttatccagaaaccaccacctacaaatgaggggactcatctagaagacctctaaggtccccttttggctctgaggggtctctaataatccccacttggaattcagcaccgcaaggaaattatgggtatgtgagccataatatgatggccagcaggtggcgctgccttccacccatggtgatggatggtttggaaagggaatgttggtgccttttgtgccacaagttaagatgctactgttttaaaggaaaaaaaaaaaaaaagtactgatcttcaatatgaagacatgagcttttctcgcaggaaattttctttttcacagaactggtgtcaggaatcactgaagggctaaccgtgatagtccttgcaagtaagtcaaggttttatcctgattggaaatagaagacatttccggttgagagaacagattcgttggaagcttaacttttgttgcctcttaacgccaccaaattttagggtaatttgattatgaaagagtgaatttttctggacagaaaagggagagctaccaaattgtttttttctttttaaaaggaagtttaatgtccgttgtatcacaaatcagtgttaaaacaccagaactttagccaaaataaatgtcttacattacaaaagaaaaaat

SEQ ID NO: 324818 - DNA, 1079 bp, Homo sapiens
  misc_feature (5)..(6): n is a, c, g, or t
gccgnnctccgcctcgcttgctcctgccgggcgtgcagggccccgccgccgccatgtcgggctcgttcgagctctcggtgcaggatctcaacgacctgctctcggacggcagcggctgctacagcctcccgagccagccctgcaacgaggtcaccccgcggatctacgtgggcaacgcgccgggtgctcgtccactgccgggaaggttatagccgctccccaacgctagttatcgcctacctcatgatgcggcagaagatggacgtcaagtctgccctgagcatcgtgaggcagaaccgtgagatcggccccaacgatggcttcctggcccagctctgccagctcaatgacagactagccaaggaggggaagttgaaaccctagggcacccccaccgcctctgctcgagaggctcgtctgtgtccctgccactctgagttatccagaaaccaccacctacaaatgaggggactcatctagaagacctctaaggtccccttttggctctgaggggtctctaataatccccacttggaattcagcaccgcaaggaaattatgggtatgtgagccataatatgatggccagcaggtggcgctgccttccacccatggtgatggatggtttggaaagggaatgttggtgccttttgtgccacaagttaagatgctactgttttaaaggaaaaaaaaaaaaaaagtactgatcttcaatatgaagacatgagcttttctcgcaggaaattttctttttcacagaactggtgtcaggaatcactgaagggctaaccgtgatagtccttgcaagtaagtcaaggttttatcctgattggaaatagaagacatttccggttgagagaacagattcgttggaagcttaacttttgttgcctcttaacgccaccaaattttagggtaatttgattatgaaagagtgaatttttctggacagaaaagggagagctaccaaattgtttttttctttttaaaaggaagtttaatgtccgttgtatcacaaatcagtgttaaaacaccagaactttagccaaaataaatgtcttacattacaaaagaaaaaat

SEQ ID NO: 324819 - DNA, 2550 bp, Homo sapiens
tgtggcgttctgtgaagagttcggtgctaacctccctcacgcggcggtggctgccgggaccctagcaggtttcagctggagcggcggcggcggcaacatggcagagaccgcggccggagtgggccgcttcaagaccaactatgctgtggagcgcaaaattgagcctttctacaagggcggaaaagcacagctggaccagactggccagcacctcttctgcgtctgtggcaccagagtcaacattctggaagtggcctcgggggccgtgctgcggagtctggagcaggaggaccaggaggacatcactgcctttgacctcagccctgacaacgaggtgctggtgacagccagtcgggcattgctgctggctcagtgggcctggcaagagggcagcgttacccgcctgtggaaggcgatacacacggcccccgtggccaccatggccttcgaccccacctccactctgctagccacaggtggctgtgatggggccgtgcgcgtctgggacatcgtgcggcactacgggacacaccacttccgaggctcgcccggtgtcgtgcacctagtggccttccacccggaccctacacgcctgctgctcttctcctcggccacggatgccgccatccgcgtgtggtcactgcaggaccggtcatgcctggctgtgctgactgcccactacagcgccgtcacctcactggccttcagcgccgacggccacaccatgctcagctccggccgtgacaagatatgtatcatctgggaccttcagagctgccaggccacgaggaccgtgcctgtgtttgagagcgtggaggctgctgtgctgttgccagaggagccagtgtcccagctgggtgtgaagtccccagggctgtactttctgacagctggcgaccaaggcactctgcgcgtgtgggaggcagcttctgggcagtgtgtgtacacgcaggcccagccgccgggccctgggcaggagctgacccactgcaccctggcacacaccgccggcgtggtcctcaccgccaccgccgaccacaacctgttgctctacgaggctcgctccctgcggctgcagaaacagttcgctggctacagtgaggaggttttggatgtccggtttcttgggcccgaggactcccacgttgtcgtggcctccaatagcccctgcctaaaagtgtttgagctgcagacgtcagcctgccagatcctccacggccacacggatatcgtcctggccctggatgtgttccggaaggggtggctctttgccagctgtgccaaggatcagagcgtccgtatctggagaatgaacaaggctggccaggtgatgtgcgtggctcagggttccggtcacacacacagtgtgggcaccgtctgctgctctaggctgaaggagtccttcctggtgacaggcagccaggactgcactgtgaagctgtggcctcttcccaaagccttgctgtccaagaacacagccccagacaacggccctatcctcctgcaggcccagaccactcagcgctgccatgataaggacatcaacagcgtggctattgcccccaacgacaagctgctggccacaggctcacaggaccgcacggccaagctctgggccctgccacagtgccagctgctgggtgtcttctcaggccaccggcgtggcctctggtgcgtccagttctctcccatggaccaggtgctggccacggcctcagctgatggcaccatcaagctctgggcactccaggacttcagctgtctcaagacatttgaggggcacgatgcttctgtgctgaaggtggcctttgtgagccgtggcacgcagctgctgtccagcggttcggatggcctcgtgaagctctggaccatcaagaacaacgagtgtgtgcggacgctggatgcccacgaggacaaggtctgggggctgcactgcagccggctggacgaccacgccctcactggggccagtgactcccgagtcatcctctggaaggatgtgaccgaggcggagcaggcagaggagcaggccaggcaagaggagcaggtggtcaggcagcaagagctggacaacctgctgcatgagaagcggtacctgcgggcgctgggcctggccatctccctggatcggccccacaccgtgctgactgtcatccaggccatccggagggaccctgaggcctgcgagaagctggaagccaccatgctccgactgcggcgcgaccagaaagaggccctgctgcgcttctgcgtcacgtggaacaccaactcgcggcactgccacgaggcccaggccgtgctgggtgtgctcttgaggcgagaggcccccgaggagctgctggcctacgaaggcgtgcgggcagcgcttgaggccctgctgccctacactgagcggcactttcagcggctcagcaggaccctccaggccgccgctttcttggacttcctgtggcacaacatgaagctccctgtgccggccgccgcccccaccccctgggaaacccataaaggcgcactgccctagccggtccggcctctctccagtccatc

SEQ ID NO: 324820 - DNA, 564 bp, Homo sapiens
tgtggcgttctgtgaagagttcggtgctaacctccctcacgcggcggtggctgccgggaccctagcaggtttcagctggagcggcggcggcggcaacatggcagagaccgcggccggagtgggccgcttcaagaccaactatgctgtggagcgcaaaattgagcctttctacaagggcggaaaagcacaggtaccagcctggggaagggcagcggggcgggcagccagaggccgcggggggtgctgaatgttgcctggctgagacctctctgtcccctggaccagactggccagcacctcttctgcgtctgtggcaccagagtcaacattctggaagtggcctcgggggccgtgctgcggagtctggagcaggaggaccaggaggacatcactgcctttgacctcagccctgacaacgaggtgctggtgacagccagtcgggcattgctgctggctcagtgggcctggcaagagggcagcgttacccgcctgtggaaggcgatacacacggcccccgtggccaccatggccttcgaccccacctccactctgctagccacaggt

SEQ ID NO: 324821 - DNA, 2493 bp, Homo sapiens
tgtggcgttctgtgaagagttcggtgctaacctccctcacgcggcggtggctgccgggaccctagcaggtttcagctggagcggcggcggcggcaacatggcagagaccgcggccggagtgggccgcttcaagaccaactatgctgtggagcgcaaaattgagcctttctacaagggcggaaaagcacagctggaccagactggccagcacctcttctgcgtctgtggcaccagagtcaacattctggaagtggcctcgggggccgtgctgcggagtctggagcaggaggaccaggaggacatcactgcctttgacctcagccctgacaacgaggtgctggtgacagccagtcgggcattgctgctggctcagtgggcctggcaagagggcagcgttacccgcctgtggaaggcgatacacacggcccccgtggccaccatggccttcgaccccacctccactctgctagccacaggtggctgtgatggggccgtgcgcgtctgggacatcgtgcggcactacgggacacaccacttccgaggctcgcccggtgtcgtgcacctagtggccttccacccggaccctacacgcctgctgctcttctcctcggccacggatgccgccatccgcgtgtggtcactgcaggaccggtcatgcctggctgtgctgactgcccactacagcgccgtcacctcactggccttcagcgccgacggccacaccatgctcagctccggccgtgacaagatatgtatcatctgggaccttcagagctgccaggccacgaggaccgtgcctgtgtttgagagcgtggaggctgctgtgctgttgccagaggagccagtgtcccagctgggtgtgaagtccccagggctgtactttctgacagctggcgaccaaggcactctgcgcgtgtgggaggcagcttctgggcagtgtgtgtacacgcaggcccagccgccgggccctgggcaggagctgacccactgcaccctggcacacaccgccggcgtggtcctcaccgccaccgccgaccacaacctgttgctctacgaggctcgctccctgcggctgcagaaacagttcgctggctacagtgaggaggttttggatgtccggtttcttgggcccgaggactcccacgttgtcgtggcctccaatagcccctgcctaaaagtgtttgagctgcagacgtcagcctgccagatcctccacggccacacggatatcgtcctggccctggatgtgttccggaaggggtggctctttgccagctgtgccaaggatcagagcgtccgtatctggagaatgaacaaggctggccaggtgatgctgaaggagtccttcctggtgacaggcagccaggactgcactgtgaagctgtggcctcttcccaaagccttgctgtccaagaacacagccccagacaacggccctatcctcctgcaggcccagaccactcagcgctgccatgataaggacatcaacagcgtggctattgcccccaacgacaagctgctggccacaggctcacaggaccgcacggccaagctctgggccctgccacagtgccagctgctgggtgtcttctcaggccaccggcgtggcctctggtgcgtccagttctctcccatggaccaggtgctggccacggcctcagctgatggcaccatcaagctctgggcactccaggacttcagctgtctcaagacatttgaggggcacgatgcttctgtgctgaaggtggcctttgtgagccgtggcacgcagctgctgtccagcggttcggatggcctcgtgaagctctggaccatcaagaacaacgagtgtgtgcggacgctggatgcccacgaggacaaggtctgggggctgcactgcagccggctggacgaccacgccctcactggggccagtgactcccgagtcatcctctggaaggatgtgaccgaggcggagcaggcagaggagcaggccaggcaagaggagcaggtggtcaggcagcaagagctggacaacctgctgcatgagaagcggtacctgcgggcgctgggcctggccatctccctggatcggccccacaccgtgctgactgtcatccaggccatccggagggaccctgaggcctgcgagaagctggaagccaccatgctccgactgcggcgcgaccagaaagaggccctgctgcgcttctgcgtcacgtggaacaccaactcgcggcactgccacgaggcccaggccgtgctgggtgtgctcttgaggcgagaggcccccgaggagctgctggcctacgaaggcgtgcgggcagcgcttgaggccctgctgccctacactgagcggcactttcagcggctcagcaggaccctccaggccgccgctttcttggacttcctgtggcacaacatgaagctccctgtgccggccgccgcccccaccccctgggaaacccataaaggcgcactgccctagccggtccggcctctctccagtccatc

SEQ ID NO: 324822 - DNA, 2708 bp, Homo sapiens
tgtggcgttctgtgaagagttcggtgctaacctccctcacgcggcggtggctgccgggaccctagcaggtttcagctggagcggcggcggcggcaacatggcagagaccgcggccggagtgggccgcttcaagaccaactatgctgtggagcgcaaaattgagcctttctacaagggcggaaaagcacagctggaccagactggccagcacctcttctgcgtctgtggcaccagagtcaacattctggaagtggcctcgggggccgtgctgcggagtctggagcaggaggaccaggaggacatcactgcctttgacctcagccctgacaacgaggtgctggtgacagccagtcgggcattgctgctggctcagtgggcctggcaagagggcagcgttacccgcctgtggaaggcgatacacacggcccccgtggccaccatggccttcgaccccacctccactctgctagccacaggtggctgtgatggggccgtgcgcgtctgggacatcgtgcggcactacgggacacaccacttccgaggctcgcccggtgtcgtgcacctagtggccttccacccggaccctacacgcctgctgctcttctcctcggccacggatgccgccatccgcgtgtggtcactgcaggaccggtcatgcctggctgtgctgactgcccactacagcgccgtcacctcactggccttcagcgccgacggccacaccatgctcagctccggccgtgacaagatatgtatcatctgggaccttcagagctgccaggccacgaggaccgtgcctgtgtttgagagcgtggaggctgctgtgctgttgccagaggagccagtgtcccagctgggtgtgaagtccccagggctgtactttctgacagctggcgaccaaggcactctgcgcgtgtgggaggcagcttctgggcagtgtgtgtacacgcaggcccagccgccgggccctgggcaggagctgacccactgcaccctggcacacaccgccggcgtggtcctcaccgccaccgccgaccacaacctgttgctctacgaggctcgctccctgcggctgcagaaacagttcgctggctacagtgaggaggttttggatgtccggtttcttgggcccgaggactcccacgttgtcgtggcctccaatagcccctgcctaaaagtgtttgagctgcagacgtcagcctgccagatcctccacggccacacggatatcgtcctggccctggatgtgttccggaaggggtggctctttgccagctgtgccaaggatcagagcgtccgtatctggagaatgaacaaggctggccaggtgatgtgcgtggctcagggttccggtcacacacacagtgtgggcaccgtctgctgctctaggctgaaggagtccttcctggtgacaggcagccaggactgcactgtgaagctgtggcctcttcccaaagccttgctgtccaagaacacagccccagacaacggccctatcctcctgcaggcccagaccactcagcgctgccatgataaggacatcaacagcgtggctattgcccccaacgacaagctgctggccacaggctcacaggaccgcacggccaagctctgggccctgccacagtgccagctgctgggtgtcttctcaggccaccggcgtggcctctggtgcgtccagttctctcccatggaccaggtgctggccacggcctcagctgatggcaccatcaagctctgggcactccaggacttcagctgtctcaaggtaagtggcgctccagaccctccccacttcccgccctggtgacatctcatgccctaccccccaccttgcagacatttgaggggcacgatgcttctgtgctgaaggtggcctttgtgagccgtggcacgcagctgctgtccaggtgagtgggctggggtggggcagcgatggagtggggggtggcggggggacctgcctgacgctgagcctctccccaccccaaacccagcggttcggatggcctcgtgaagctctggaccatcaagaacaacgagtgtgtgcggacgctggatgcccacgaggacaaggtctgggggctgcactgcagccggctggacgaccacgccctcactggggccagtgactcccgagtcatcctctggaaggatgtgaccgaggcggagcaggcagaggagcaggccaggcaagaggagcaggtggtcaggcagcaagagctggacaacctgctgcatgagaagcggtacctgcgggcgctgggcctggccatctccctggatcggccccacaccgtgctgactgtcatccaggccatccggagggaccctgaggcctgcgagaagctggaagccaccatgctccgactgcggcgcgaccagaaagaggccctgctgcgcttctgcgtcacgtggaacaccaactcgcggcactgccacgaggcccaggccgtgctgggtgtgctcttgaggcgagaggcccccgaggagctgctggcctacgaaggcgtgcgggcagcgcttgaggccctgctgccctacactgagcggcactttcagcggctcagcaggaccctccaggccgccgctttcttggacttcctgtggcacaacatgaagctccctgtgccggccgccgcccccaccccctgggaaacccataaaggcgcactgccctagccggtccggcctctctccagtccatc

SEQ ID NO: 324823 - DNA, 2344 bp, Homo sapiens
tgtggcgttctgtgaagagttcggtgctaacctccctcacgcggcggtggctgccgggaccctagcaggtttcagctggagcggcggcggcggcaacatggcagagaccgcggccggagtgggccgcttcaagaccaactatgctgtggagcgcaaaattgagcctttctacaagggcggaaaagcacagctggaccagactggccagcacctcttctgcccccgtggccaccatggccttcgaccccacctccactctgctagccacaggtggctgtgatggggccgtgcgcgtctgggacatcgtgcggcactacgggacacaccacttccgaggctcgcccggtgtcgtgcacctagtggccttccacccggaccctacacgcctgctgctcttctcctcggccacggatgccgccatccgcgtgtggtcactgcaggaccggtcatgcctggctgtgctgactgcccactacagcgccgtcacctcactggccttcagcgccgacggccacaccatgctcagctccggccgtgacaagatatgtatcatctgggaccttcagagctgccaggccacgaggaccgtgcctgtgtttgagagcgtggaggctgctgtgctgttgccagaggagccagtgtcccagctgggtgtgaagtccccagggctgtactttctgacagctggcgaccaaggcactctgcgcgtgtgggaggcagcttctgggcagtgtgtgtacacgcaggcccagccgccgggccctgggcaggagctgacccactgcaccctggcacacaccgccggcgtggtcctcaccgccaccgccgaccacaacctgttgctctacgaggctcgctccctgcggctgcagaaacagttcgctggctacagtgaggaggttttggatgtccggtttcttgggcccgaggactcccacgttgtcgtggcctccaatagcccctgcctaaaagtgtttgagctgcagacgtcagcctgccagatcctccacggccacacggatatcgtcctggccctggatgtgttccggaaggggtggctctttgccagctgtgccaaggatcagagcgtccgtatctggagaatgaacaaggctggccaggtgatgtgcgtggctcagggttccggtcacacacacagtgtgggcaccgtctgctgctctaggctgaaggagtccttcctggtgacaggcagccaggactgcactgtgaagctgtggcctcttcccaaagccttgctgtccaagaacacagccccagacaacggccctatcctcctgcaggcccagaccactcagcgctgccatgataaggacatcaacagcgtggctattgcccccaacgacaagctgctggccacaggctcacaggaccgcacggccaagctctgggccctgccacagtgccagctgctgggtgtcttctcaggccaccggcgtggcctctggtgcgtccagttctctcccatggaccaggtgctggccacggcctcagctgatggcaccatcaagctctgggcactccaggacttcagctgtctcaagacatttgaggggcacgatgcttctgtgctgaaggtggcctttgtgagccgtggcacgcagctgctgtccagcggttcggatggcctcgtgaagctctggaccatcaagaacaacgagtgtgtgcggacgctggatgcccacgaggacaaggtctgggggctgcactgcagccggctggacgaccacgccctcactggggccagtgactcccgagtcatcctctggaaggatgtgaccgaggcggagcaggcagaggagcaggccaggcaagaggagcaggtggtcaggcagcaagagctggacaacctgctgcatgagaagcggtacctgcgggcgctgggcctggccatctccctggatcggccccacaccgtgctgactgtcatccaggccatccggagggaccctgaggcctgcgagaagctggaagccaccatgctccgactgcggcgcgaccagaaagaggccctgctgcgcttctgcgtcacgtggaacaccaactcgcggcactgccacgaggcccaggccgtgctgggtgtgctcttgaggcgagaggcccccgaggagctgctggcctacgaaggcgtgcgggcagcgcttgaggccctgctgccctacactgagcggcactttcagcggctcagcaggaccctccaggccgccgctttcttggacttcctgtggcacaacatgaagctccctgtgccggccgccgcccccaccccctgggaaacccataaaggcgcactgccctagccggtccggcctctctccagtccatc

SEQ ID NO: 324824 - DNA, 2303 bp, Homo sapiens
  misc_feature (91)..(91): n is a, c, g, or t
ggggagcggagtacgacgtgaccctcagagcagccctgcatgcagacccagcggtgcggcgtgcagggctagttagcactctatacttgcntgggcatcgaaggccgggcacgtgtgccagcgatggcggaggccgctagtccagccatcgtgcggcaggccgatgagcacgggacgcgccgatgacccacgaaggcgttcgaccccagctccactctgctagccacaggtggctgtgatggggccgtgcgcgtctgggacatcgtgcggcactacgggacacaccacttccgaggctcgcccggtgtcgtgcacctagtggccttccacccggaccctacacgcctgctgctcttctcctcggccacggatgccgccatccgcgtgtggtcactgcaggaccggtcatgcctggctgtgctgactgcccactacagcgccgtcacctcactggccttcagcgccgacggccacaccatgctcagctccggccgtgacaagatatgtatcatctgggaccttcagagctgccaggccacgaggaccgtgcctgtgtttgagagcgtggaggctgctgtgctgttgccagaggagccagtgtcccagctgggtgtgaagtccccagggctgtactttctgacagctggcgaccaaggcactctgcgcgtgtgggaggcagcttctgggcagtgtgtgtacacgcaggcccagccgccgggccctgggcaggagctgacccactgcaccctggcacacaccgccggcgtggtcctcaccgccaccgccgaccacaacctgttgctctacgaggctcgctccctgcggctgcagaaacagttcgctggctacagtgaggaggttttggatgtccggtttcttgggcccgaggactcccacgttgtcgtggcctccaatagcccctgcctaaaagtgtttgagctgcagacgtcagcctgccagatcctccacggccacacggatatcgtcctggccctggatgtgttccggaaggggtggctctttgccagctgtgccaaggatcagagcgtccgtatctggagaatgaacaaggctggccaggtgatgtgcgtggctcagggttccggtcacacacacagtgtgggcaccgtctgctgctctaggctgaaggagtccttcctggtgacaggcagccaggactgcactgtgaagctgtggcctcttcccaaagccttgctgtccaagaacacagccccagacaacggccctatcctcctgcaggcccagaccactcagcgctgccatgataaggacatcaacagcgtggctattgcccccaacgacaagctgctggccacaggctcacaggaccgcacggccaagctctgggccctgccacagtgccagctgctgggtgtcttctcaggccaccggcgtggcctctggtgcgtccagttctctcccatggaccaggtgctggccacggcctcagctgatggcaccatcaagctctgggcactccaggacttcagctgtctcaagacatttgaggggcacgatgcttctgtgctgaaggtggcctttgtgagccgtggcacgcagctgctgtccagcggttcggatggcctcgtgaagctctggaccatcaagaacaacgagtgtgtgcggacgctggatgcccacgaggacaaggtctgggggctgcactgcagccggctggacgaccacgccctcactggggccagtgactcccgagtcatcctctggaaggatgtgaccgaggcggagcaggcagaggagcaggccaggcaagaggagcaggtggtcaggcagcaagagctggacaacctgctgcatgagaagcggtacctgcgggcgctgggcctggccatctccctggatcggccccacaccgtgctgactgtcatccaggccatccggagggaccctgaggcctgcgagaagctggaagccaccatgctccgactgcggcgcgaccagaaagaggccctgctgcgcttctgcgtcacgtggaacaccaactcgcggcactgccacgaggcccaggccgtgctgggtgtgctcttgaggcgagaggcccccgaggagctgctggcctacgaaggcgtgcgggcagcgcttgaggccctgctgccctacactgagcggcactttcagcggctcagcaggaccctccaggccgccgctttcttggacttcctgtggcacaacatgaagctccctgtgccggccgccgcccccaccccctgggaaacccataaaggcgcactgccctagccggtccggcctctctccagtccatc

SEQ ID NO: 324825 - DNA, 1870 bp, Homo sapiens
cggtccccatgcacagttcggtccccatgcacagttcggtccccatgcacagctccggccgtgacaagatatgtatcatctgggaccttcagagctgccaggccacgaggaccgtgcctgtgtttgagagcgtggaggctgctgtgctgttgccagaggagccagtgtcccagctgggtgtgaagtccccagggctgtactttctgacagctggcgaccaaggcactctgcgcgtgtgggaggcagcttctgggcagtgtgtgtacacgcaggcccagccgccgggccctgggcaggagctgacccactgcaccctggcacacaccgccggcgtggtcctcaccgccaccgccgaccacaacctgttgctctacgaggctcgctccctgcggctgcagaaacagttcgctggctacagtgaggaggttttggatgtccggtttcttgggcccgaggactcccacgttgtcgtggcctccaatagcccctgcctaaaagtgtttgagctgcagacgtcagcctgccagatcctccacggccacacggatatcgtcctggccctggatgtgttccggaaggggtggctctttgccagctgtgccaaggatcagagcgtccgtatctggagaatgaacaaggctggccaggtgatgtgcgtggctcagggttccggtcacacacacagtgtgggcaccgtctgctgctctaggctgaaggagtccttcctggtgacaggcagccaggactgcactgtgaagctgtggcctcttcccaaagccttgctgtccaagaacacagccccagacaacggccctatcctcctgcaggcccagaccactcagcgctgccatgataaggacatcaacagcgtggctattgcccccaacgacaagctgctggccacaggctcacaggaccgcacggccaagctctgggccctgccacagtgccagctgctgggtgtcttctcaggccaccggcgtggcctctggtgcgtccagttctctcccatggaccaggtgctggccacggcctcagctgatggcaccatcaagctctgggcactccaggacttcagctgtctcaagacatttgaggggcacgatgcttctgtgctgaaggtggcctttgtgagccgtggcacgcagctgctgtccagcggttcggatggcctcgtgaagctctggaccatcaagaacaacgagtgtgtgcggacgctggatgcccacgaggacaaggtctgggggctgcactgcagccggctggacgaccacgccctcactggggccagtgactcccgagtcatcctctggaaggatgtgaccgaggcggagcaggcagaggagcaggccaggcaagaggagcaggtggtcaggcagcaagagctggacaacctgctgcatgagaagcggtacctgcgggcgctgggcctggccatctccctggatcggccccacaccgtgctgactgtcatccaggccatccggagggaccctgaggcctgcgagaagctggaagccaccatgctccgactgcggcgcgaccagaaagaggccctgctgcgcttctgcgtcacgtggaacaccaactcgcggcactgccacgaggcccaggccgtgctgggtgtgctcttgaggcgagaggcccccgaggagctgctggcctacgaaggcgtgcgggcagcgcttgaggccctgctgccctacactgagcggcactttcagcggctcagcaggaccctccaggccgccgctttcttggacttcctgtggcacaacatgaagctccctgtgccggccgccgcccccaccccctgggaaacccataaaggcgcactgccctagccggtccggcctctctccagtccatc

SEQ ID NO: 324826 - DNA, 747 bp, Homo sapiens
agatcgagctcggtaccggcatgtgctgtaggccagcggttcggatggcctcgtgaagctctggaccatcaagaacaacgagtgtgtgcggacgctggatgcccacgaggacaaggtctgggggctgcactgcagccggctggacgaccacgccctcactggggccagtgactcccgagtcatcctctggaaggatgtgaccgaggcggagcaggcagaggagcaggccaggcaagaggagcaggtggtcaggcagcaagagctggacaacctgctgcatgagaagcggtacctgcgggcgctgggcctggccatctccctggatcggccccacaccgtgctgactgtcatccaggccatccggagggaccctgaggcctgcgagaagctggaagccaccatgctccgactgcggcgcgaccagaaagaggccctgctgcgcttctgcgtcacgtggaacaccaactcgcggcactgccacgaggcccaggccgtgctgggtgtgctcttgaggcgagaggcccccgaggagctgctggcctacgaaggcgtgcgggcagcgcttgaggccctgctgccctacactgagcggcactttcagcggctcagcaggaccctccaggccgccgctttcttggacttcctgtggcacaacatgaagctccctgtgccggccgccgcccccaccccctgggaaacccataaaggcgcactgccctagccggtccggcctctctccagtccatc

SEQ ID NO: 324827 - DNA, 516 bp, Homo sapiens
tgtggcgttctgtgaagagttcggtgctaacctccctcacgcggcggtggctgccgggaccctagcaggtttcagctggagcggcggcggcggcaacatggcagagaccgcggccggagtgggccgcttcaagaccaactatgctgtggagcgcaaaattgagcctttctacaagggcggaaaagcacagctggaccagactggccagcacctcttctgcgtctgtggcaccagagtcaacattctggaagtggcctcgggggccgtgctgcggagtctggagcaggaggaccaggaggacatcactgcctttgacctcagccctgacaacgaggtgctggtgacagccagtcgggcattgctgctggctcagtgggcctggcaagagggcagcgttacccgcctgtggaaggcgatacacacggcccccgtggccaccatggccttcgaccccaccccctgggaaacccataaaggcgcactgccctagccggtccggcctctctccagtccatc

SEQ ID NO: 324828 - DNA, 511 bp, Homo sapiens
tgctggtgacagccagtcgggcattgctgctggctcagtgggcctggcaagagggcagcgttacccgcctgtggaaggcgatacacacggcccccgtggccaccatggccttcgaccccacctccactctgctagccacaggtagggccctgccgtgcaggtgggtcgtgggcacagatgcaggggctttgggcattccaccccctcaccttgcttccccgcaggtggctgtgatggggccgtgcgcgtctgggacatcgtgcggcactacgggacacaccacttccgaggctcgcccggtgtcgtgcagtgagttggaaggtggagggggagggcagaggcaccacccaggctgcacagctcacccatcctgtcccgtccgcccacagcctagtggccttccacccggaccctacacgcctgctgctcttctcctcggccacggatgccgccatccgcgtgtggtcactgcaggaccggtcatgcctggctgtgctgactgcccactaca

SEQ ID NO: 324829 - DNA, 848 bp, Homo sapiens
tgtggcgttctgtgaagagttcggtgctaacctccctcacgcggcggtggctgccgggaccctagcaggtttcagctggagcggcggcggcggcaacatggcagagaccgcggccggagtgggccgcttcaagaccaactatgctgtggagcgcaaaattgagcctttctacaagggcggaaaagcacagctggaccagactggccagcacctcttctgcgtctgtggcaccagagtcaacattctggaagtggcctcgggggccgtgctgcggagtctggagcaggaggaccaggaggacatcactgcctttgacctcagccctgacaacgaggtgctggtgacagccagtcgggcattgctgctggctcagtgggcctggcaagagggcagcgttacccgcctgtggaaggcgatacacacggcccccgtggccaccatggccttcgaccccacctccactctgctagccacaggtggctgtgatggggccgtgcgcgtctgggacatcgtgcggcactacgggacacaccacttccgaggctcgcccggtgtcgtgcacctagtggccttccacccggaccctacacgcctgctgctcttctcctcggccacggatgccgccatccgcgtgtggtcactgcaggaccggtcatgctggtgggtgatgcataaggcgttaacttatggtttaaggcgaggcaaacaggtcaagtcggggacagattggtcactgggcttaagtggggcaagaacggctggttggaacggaagtggtgtttaaggaatgtcaggtgggcccggggttgggagggaggttgttgggggttggggtaaaaacgtgaggg

SEQ ID NO: 324830 - DNA, 2775 bp, Homo sapiens
tgtggcgttctgtgaagagttcggtgctaacctccctcacgcggcggtggctgccgggaccctagcaggtttcagctggagcggcggcggcggcaacatggcagagaccgcggccggagtgggccgcttcaagaccaactatgctgtggagcgcaaaattgagcctttctacaagggcggaaaagcacagctggaccagactggccagcacctcttctgcgtctgtggcaccagagtcaacattctggaagtggcctcgggggccgtgctgcggagtctggagcaggaggaccaggaggacatcactgcctttgacctcagccctgacaacgaggtgctggtgacagccagtcgggcattgctgctggctcagtgggcctggcaagagggcagcgttacccgcctgtggaaggcgatacacacggcccccgtggccaccatggccttcgaccccacctccactctgctagccacaggtggctgtgatggggccgtgcgcgtctgggacatcgtgcggcactacgggacacaccacttccgaggctcgcccggtgtcgtgcacctagtggccttccacccggaccctacacgcctgctgctcttctcctcggccacggatgccgccatccgcgtgtggtcactgcaggaccggtcatgcctggctgtgctgactgcccactacagcgccgtcacctcactggccttcagcgccgacggccacaccatgctcagctccggccgtgacaagatatgtatcatctgggaccttcagagctgccaggccacgaggaccgtgcctgtgtttgagagcgtggaggctgctgtgctgttgccagaggagccagtgtcccagctgggtgtgaagtccccagggctgtactttctgacagctggcgaccaaggcactctgcgcgtgtgggaggcagcttctgggcagtgtgtgtacacgcaggcccagccgccgggccctgggcaggagctgacccactgcaccctggcacacaccgccggcgtggtcctcaccgccaccgccgaccacaacctgttgctctacgaggctcgctccctgcggctgcagaaacagttcgctggctacagtgaggaggttttggatgtccggtttcttgggcccgaggactcccacgttgtcgtggcctccaatagcccctgcctaaaagtgtttgagctgcagacgtcagcctgccagatcctccacggccacacggatatcgtcctggccctggatgtgttccggaaggggtggctctttgccagctgtgccaaggatcagagcgtccgtatctggagaatgaacaaggctggccaggtgatgtgcgtggctcagggttccggtcacacacacagtgtgggcaccgtctgctgctctaggctgaaggagtccttcctggtgacaggcagccaggactgcactgtgaagctgtggcctcttcccaaagccttgctgtccaagaacacagccccagacaacggccctatcctcctgcaggcccagaccactcagcgctgccatgataaggacatcaacagcgtggctattgcccccaacgacaagctgctggccacaggctcacaggaccgcacggccaagctctgggccctgccacagtgccagctgctgggtgtcttctcaggccaccggcgtggcctctggtgcgtccagttctctcccatggaccaggtgctggccacggcctcagctgatggcaccatcaagctctgggcactccaggacttcagctgtctcaagacatttgaggggcacgatgcttctgtgctgaaggtggcctttgtgagccgtggcacgcagctgctgtccagcggttcggatggcctcgtgaagctctggaccatcaagaacaacgagtgtgtgcggacgctggatgcccacgaggacaaggtctgggggctgcactgcagccggctggacgaccacgccctcactggggccagtgactcccgagtcatcctctggaaggatgtgaccgaggcggagcaggcagaggagcaggccaggcaagaggagcaggtggtcaggcagcaagagctggacaacctgctgcatgagaagcggtacctgcgggcgctgggcctggccatctccctggatcggccccacaccgtgctgactgtcatccaggccatccggagggaccctgaggcctgcgagaagctggaagccaccatgctccgactgcggcgcgaccagaaagaggccctgctgcgcttctgcgtcacgtggaacaccaactcgcggcactgccacgaggcccaggccgtgctgggtgtgctcttgaggcgagaggcccccgaggagctgctggcctacgaaggcgtgcgggcagcgcttgaggccctgctgccctacactgagcggcactttcagcggctcagcaggaccctccaggccgccgctttcttggacttcctgtggcacaacatgaagctccctgtgccggccgccgcccccaccccctgggaaacccataaaggcgcactgccctagccggtccggcctctctccagtccatcctgaacccctggaaaacccataaaggccgctctcctggccggctctgtctctctggactgcagtccagcccccacctgcaaacctactagcagcagaaggcatgtactgatgtttagccctgcagccaatcgacctactggaaaatcaccgggtcgaccttaagggggttgcaacaggttcaaacgaaaaaaaaaaggggctaaaccaggctatccctttaagct

SEQ ID NO: 324831 - DNA, 2636 bp, Homo sapiens
tgtggcgttctgtgaagagttcggtgctaacctccctcacgcggcggtggctgccgggaccctagcaggtttcagctggagcggcggcggcggcaacatggcagagaccgcggccggagtgggccgcttcaagaccaactatgctgtggagcgcaaaattgagcctttctacaagggcggaaaagcacaggtaccagcctggggaagggcagcggggcgggcagccagaggccgcggggggtgctgaatgttgcctggctgagacctctctgtcccctggaccagactggccagcacctcttctgcgtctgtggcaccagagtcaacattctggaagtggcctcgggggccgtgctgcggagtctggagcaggaggaccaggaggacatcactgcctttgacctcagccctgacaacgaggtgctggtgacagccagtcgggcattgctgctggctcagtgggcctggcaagagggcagcgttacccgcctgtggaaggcgatacacacggcccccgtggccaccatggccttcgaccccacctccactctgctagccacaggtggctgtgatggggccgtgcgcgtctgggacatcgtgcggcactacgggacacaccacttccgaggctcgcccggtgtcgtgcacctagtggccttccacccggaccctacacgcctgctgctcttctcctcggccacggatgccgccatccgcgtgtggtcactgcaggaccggtcatgcctggctgtgctgactgcccactacagcgccgtcacctcactggccttcagcgccgacggccacaccatgctcagctccggccgtgacaagatatgtatcatctgggaccttcagagctgccaggccacgaggaccgtgcctgtgtttgagagcgtggaggctgctgtgctgttgccagaggagccagtgtcccagctgggtgtgaagtccccagggctgtactttctgacagctggcgaccaaggcactctgcgcgtgtgggaggcagcttctgggcagtgtgtgtacacgcaggcccagccgccgggccctgggcaggagctgacccactgcaccctggcacacaccgccggcgtggtcctcaccgccaccgccgaccacaacctgttgctctacgaggctcgctccctgcggctgcagaaacagttcgctggctacagtgaggaggttttggatgtccggtttcttgggcccgaggactcccacgttgtcgtggcctccaatagcccctgcctaaaagtgtttgagctgcagacgtcagcctgccagatcctccacggccacacggatatcgtcctggccctggatgtgttccggaaggggtggctctttgccagctgtgccaaggatcagagcgtccgtatctggagaatgaacaaggctggccaggtgatgtgcgtggctcagggttccggtcacacacacagtgtgggcaccgtctgctgctctaggctgaaggagtccttcctggtgacaggcagccaggactgcactgtgaagctgtggcctcttcccaaagccttgctgtccaagaacacagccccagacaacggccctatcctcctgcaggcccagaccactcagcgctgccatgataaggacatcaacagcgtggctattgcccccaacgacaagctgctggccacaggctcacaggaccgcacggccaagctctgggccctgccacagtgccagctgctgggtgtcttctcaggccaccggcgtggcctctggtgcgtccagttctctcccatggaccaggtgctggccacggcctcagctgatggcaccatcaagctctgggcactccaggacttcagctgtctcaagacatttgaggggcacgatgcttctgtgctgaaggtggcctttgtgagccgtggcacgcagctgctgtccagcggttcggatggcctcgtgaagctctggaccatcaagaacaacgagtgtgtgcggacgctggatgcccacgaggacaaggtctgggggctgcactgcagccggctggacgaccacgccctcactggggccagtgactcccgagtcatcctctggaaggatgtgaccgaggcggagcaggcagaggagcaggccaggcaagaggagcaggtggtcaggcagcaagagctggacaacctgctgcatgagaagcggtacctgcgggcgctgggcctggccatctccctggatcggccccacaccgtgctgactgtcatccaggccatccggagggaccctgaggcctgcgagaagctggaagccaccatgctccgactgcggcgcgaccagaaagaggccctgctgcgcttctgcgtcacgtggaacaccaactcgcggcactgccacgaggcccaggccgtgctgggtgtgctcttgaggcgagaggcccccgaggagctgctggcctacgaaggcgtgcgggcagcgcttgaggccctgctgccctacactgagcggcactttcagcggctcagcaggaccctccaggccgccgctttcttggacttcctgtggcacaacatgaagctccctgtgccggccgccgcccccaccccctgggaaacccataaaggcgcactgccctagccggtccggcctctctccagtccatc

SEQ ID NO: 324832 - DNA, 1697 bp, Homo sapiens
  misc_feature (243)..(243): n is a, c, g, or t
gctctcttacgaggtgtattggtgcagttggacatctggtagcccctcctggtgagaagggtgctggcatcccgagccaacggcgccagcattggcctcaatgccaccaacgaacacagtgatgaggacgaggatgatcacatgctgcatggcaggatgcaggaggcatgtaccgacgtggaccgtagcgattgaagggaatggattgtatggaatgtttgcaggccatctatgcgatccganggagctaccctaggtgtgctccgtggggctctacccagagtatgcacgcgcatggcacttgagagagttgatctgtagagactgactagaacgatcgaggcatgacagaatccgtccacatggcactcggatatcgtcctggccctggatgtgttccggaaggggtggctctttgccagctgtgccaaggatcagagcgtccgtatctggagaatgaacaaggctggccaggtgatgtgcgtggctcagggttccggtcacacacacagtgtgggcaccgtctgctgctctaggctgaaggagtccttcctggtgacaggcagccaggactgcactgtgaagctgtggcctcttcccaaagccttgctgtccaagaacacagccccagacaacggccctatcctcctgcaggcccagaccactcagcgctgccatgataaggacatcaacagcgtggctattgcccccaacgacaagctgctggccacaggctcacaggaccgcacggccaagctctgggccctgccacagtgccagctgctgggtgtcttctcaggccaccggcgtggcctctggtgcgtccagttctctcccatggaccaggtgctggccacggcctcagctgatggcaccatcaagctctgggcactccaggacttcagctgtctcaagacatttgaggggcacgatgcttctgtgctgaaggtggcctttgtgagccgtggcacgcagctgctgtccagcggttcggatggcctcgtgaagctctggaccatcaagaacaacgagtgtgtgcggacgctggatgcccacgaggacaaggtctgggggctgcactgcagccggctggacgaccacgccctcactggggccagtgactcccgagtcatcctctggaaggatgtgaccgaggcggagcaggcagaggagcaggccaggcaagaggagcaggtggtcaggcagcaagagctggacaacctgctgcatgagaagcggtacctgcgggcgctgggcctggccatctccctggatcggccccacaccgtgctgactgtcatccaggccatccggagggaccctgaggcctgcgagaagctggaagccaccatgctccgactgcggcgcgaccagaaagaggccctgctgcgcttctgcgtcacgtggaacaccaactcgcggcactgccacgaggcccaggccgtgctgggtgtgctcttgaggcgagaggcccccgaggagctgctggcctacgaaggcgtgcgggcagcgcttgaggccctgctgccctacactgagcggcactttcagcggctcagcaggaccctccaggccgccgctttcttggacttcctgtggcacaacatgaagctccctgtgccggccgccgcccccaccccctgggaaacccataaaggcgcactgccctagccggtccggcctctctccagtccatc

SEQ ID NO: 324833 - DNA, 454 bp, Homo sapiens
cagaaagcctggtacagccttgcttctaccgttttctcggttgttttggaatcgcctttgcaaaagccatgcacggctatagttctgtgatagcacccagggctcatggtctctctctgctgtgtaccaaatgcgtcgaactagcgctgaggacttcttgcaggggatgtctgtttaacagcggtcatttctgcttccctggcggtgaaagcaggaaacacctggaatccttagattctgaaaacttcatgttactctctggaatatgtgcgtgcatgtgtgtgtgtgcatgcgtgtgcatgcgtgcgtgcatgtgtataagtatgatctgctctagtgcattctctcaagtgatttttttaaactgtatgatttattgcctactttgtaaatgcaacaggcttacacagcagttggtccataacctgcccccaagcacacagccctcatgacc

SEQ ID NO: 324834 - DNA, 707 bp, Homo sapiens
tttttttccaacatattttattgtagtaaaatatacatagcataacatttaccatcttagccatatgtaggtgtgtggttcaggggcactaaatacattcacgatgttgtacggccatcacccccacacatctccagaactcttttcatcttgtacaactaaaactctgagcttcaagttggggtaagcggggcagtggggggactaaaactgtccccataaacaccaactctccattccctttttccccaaccctggcagccactattccactttctgtctctatgattttgactacgctgctttcttcacagaagtggaatcacagaatatttgtctttctgtgactggcttatttcacctagcacagtattctcaaggttcatgttgtagaaagtgtctcagtgtcctttaaggcggagtaaaatttcactgtgcataccacattttgctcattcattcatctgtcaatggacacttgggttgcttccaccttttagctattatgaataatgctgctgtgaacacgggtgttcaattacctccttgaggccctcctttcaattttttggggtatatatccagaagtaggattgctagattttaagtggaattttcattttctttagttccttttcagactgttcattgtttgttagtatttagaaatgcagctgatttttgtctattgactttttttttttttt

SEQ ID NO: 324835 - DNA, 377 bp, Homo sapiens
cccacgacttaatggcttcactgctgaattctaccaaacatttaaagaagactaataccaatcctcttcaaactattaagggaatttaagaggagggactacttccaaattttttttacaagaccaacattattctgactccaaaaccagataaggatacagcaacaacaacaaaaattataggccaatatctctgataaacacaaatccaaaaattctcaacaagatactagcaaaccaaattcaaaagcacattaaaaatgtcattcaataagatcaagggggatttatccagggaatgcaaggatagtgcaatatatgcaaatcaataaatgagataaatcgcattaacaggaaaacaaaaaccatatgatctt

SEQ ID NO: 324836 - DNA, 1044 bp, Homo sapiens
  misc_feature (927)..(927): n is a, c, g, or t
ggggaagggaagaaaaaactataggctaggtacgaggctgggtgtcgggagaggccgtgtagcgtcgccgttactccgaggagataccagtcggtagaggagaagtcgaggttagagggaactgggaggcactttgctgtctgcaatcgaagttgagggtgcaaaaatgcagagtaataaaacttttaacttggagaagcaaaaccatactccaagaaagcatcatcaacatcaccaccagcagcagcaccaccagcagcaacagcagcagccgccaccaccgccaatacctgcaaatgggcaacaggccagcagccaaaatgaaggcttgactattgacctgaagaattttagaaaaccaggagagaagaccttcacccaacgaagccgtctttttgtgggaaatcttcctcccgacatcactgaggaagaaatgaggaaactatttgagaaatatggaaaggcaggcgaagtcttcattcataaggataaaggatttggctttatccgcttggaaacccgaaccctagcggagattgccaaagtggagctggacaatatgccactccgtggaaagcagctgcgtgtgcgctttgcctgccatagtgcatcccttacagttcgaaaccttcctcagtatgtgtccaacgaactgctggaagaagccttttctgtgtttggccaggtagagagggctgtagtcattgtggatgatcgaggaaggccctcaggaaaaggcattgttgagttctcagggaagccagctgctcggaaagctctggacagatgcagtgaaggctccttcctgctaaccacatttcctcgtcctgtgactgtggagcccatggaccagttagatgatgaagagggacttccagagaagctggttataaaaaaccagcaatttcacaaccgcattccaggagngagagcccccgaatggccggcggcctggtagaaagcaggcggaggccctggagggaaacaggggccaggccgcaaggaggggaaagggaggaaggacgcgcaaccaggaaacgaggg

SEQ ID NO: 324837 - DNA, 907 bp, Homo sapiens
  misc_feature (10)..(11): n is a, c, g, or t
  misc_feature (18)..(18): n is a, c, g, or t
atcgctaggnncgaggcnggggttgaatcggccgcgggagaggccgtgtagcgtcgccgttactccgaggagataccagtcggtagaggagaagtcgaggttagagggaactgggaggcactttgctgtctgcaatcgaagttgagggtgcaaaaatgcagagtaataaaacttttaacttggagaagcaaaaccatactccaagaaagcatcatcaacatcaccaccagcagcagcaccaccagcagcaacagcagcagccgccaccaccgccaatacctgcaaatgggcaacaggccagcagccaaaatgaaggcttgactattgacctgaagaattttagaaaaccaggagagaagaccttcacccaacgaagccgtctttttgtgggaaatcttcctcccgacatcactgaggaagaaatgaggaaactatttgagaaatatggaaaggcaggcgaagtcttcattcataaggataaaggatttggctttatccgcttggaaacccgaaccctagcggagattgccaaagtggagctggacaatatgccactccgtggaaagcagctgcgtgtgcgctttgcctgccatagtgcatcccttacagttcgaaaccttcctcagtatgtgtccaacgaactgctggaagaagccttttctgtgtttggccaggtagagagggctgtagtcattgtggatgatcgaggaaggccctcaggaaaaggcattgttgagttctcagggaagccagctgctcggaaagctctggacagatgcagtgaaggctccttcctgctaaccacattttctcgtctgtggatgtggggccatggacattaatggtgaaaagggttccgaaaagtggttttaaaacaattttagagaagagggccgaatgggaaggg

SEQ ID NO: 324838 - DNA, 997 bp, Homo sapiens
ggggaagggaagaaaaaactataggctaggtacgaggctgggtgttcattgtggatgatcgaggaaggccctcaggaaaaggcattgttgagttctcagggaagccagctgctcggaaagctctggacagatgcagtgaaggctccttcctgctaaccacatttcctcgtcctgtgactgtggagcccatggaccagttagatgatgaagagggacttccagagaagctggttataaaaaaccagcaatttcacaaggaacgagagcagccacccagatttgcacagcctggctcctttgagtatgaatatgccatgcgctggaaggcactcattgagatggagaagcagcagcaggaccaagtggaccgcaacatcaaggaggctcgtgagaagctggagatggagatggaagctgcacgccatgagcaccaggtcatgctaatgagacaggatttgatgaggcgccaagaagaacttcggaggatggaagagctgcacaaccaagaggtgcaaaaacgaaagcaactggagctcaggcaggaggaagagcgcaggcgccgtgaagaagagatgcggcggcagcaagaagaaatgatgcggcgacagcaggaaggattcaagggaaccttccctgatgcgagagagcaggagattcggatgggtcagatggctatgggaggtgctatgggcataaacaacagaggtgccatgccccctgctcctgtgccagctggtaccccagctcctccaggacctgccactatgatgccggatggaactttgggattgaccccaccaacaactgaacgctttggtcaggctgctacaatggaaggaattggggcaattggtggaactcctcctgcattcaacggagttctggatgaattgcccaaaaagtgcgatactatagtgcggtcattttcaacctaaaaggactttggtacgattccgaaaggagggcccaataaacgcgaaacgatcgagacaagggc

SEQ ID NO: 324839 - DNA, 686 bp, Homo sapiens
gactgggcaaaacagcggctcacgcctgtaatcccagcaatttgggaggccgaggcggtcctgacctcgtgatctacccacctcggcctcccaaaatgctgggattacaggggtgagccaccgtgcccaacctcacttgcttcttatccttacactcccccagccccagagaaactgccacatacaccacaaaaaccaaacatcccccaatgaccttagccccattgctccattcactcccaggtgagaattcaggcaaacgtccacaaaggtcacaggcagcgtacatacggttctgttataccccatatattaccccttcatgtcctaaagaagacattttctcttagagattttcattttagtgtatctttaaaaaaaaatcttgtgttaacttgcctccatctttttcttgggtgaggacacccaggaatgacccttttgtgtctatgatgttgctgttcacagcttttcttgataggcctagtacaatcttgggaacagggttactgtatactgaaggtctgacagtagctcttagactcgcctatcttaggtagtcatgctgtgcattttttttttcattggtgtactgtgtttgatttgtctcatatatttggagtttttctgaaaaatggagcagtaatgcagcatcaacctattaaaatacattttaagccttttaa

SEQ ID NO: 324840 - DNA, 1033 bp, Homo sapiens
tatggacagcccacttggatgtcagctatacccaggctcagaccactgcaacctaagggcagaccgcctatgcaacttcttatggacagcctcccactggttatactactccaactgccccccaggcatacaagccagcctgttccaggggtatggcactggtgcttatgataccaccactgctacagtcaccaccacccaggcctcctatgcagctcagtctgcatatggcactcagcctgcttattcagcccaccaccagcagcaacagcagcagccgccaccaccgccaatacctgcaaatgggcaacaggccagcagccaaagtgtgtatatgctaggtgatggagtagaaatggattccctctgggaatggtttcttggtttttagattagtttctcgggcttataagggaataggcctttatggcacacctttgttcttttttctctttacctcttaatacttacgatggaaaaggctgattctccggaaccaaggagcaacatgtatgacagcagttgagtacaggttgctctgctgtgttgacacattctactgttaaacagatgtctgcatgttttacctcagcttggttcttagaggtagtcatcagatgactggtagttaaaaataatatagaaaagtctttaaggcttaaatggagaagtctggtactgaatactgtacttttagccttgagcctgtaccagctcattgtaaaaagtctttaagtatatgttcctgtttgagtaccagttgtgtgcctctaagactagaaccaatcccaactttgtttatttccagagattactataaagagttgctctttcctaactcatttcattctgttgcccccagcctgaaagaatgggaactgttaaggttatgaaaattggtgagagattaggaaaatggaacagttactttgttttttgtttttttattggttggtttattctcatctgaaggtacgttttgaatgttaaaatctgatgccttgtgacatagggctgcttccttgaattgctt

SEQ ID NO: 324841 - DNA, 574 bp, Homo sapiens
gaatcataactaaagtacacgacgtgctaggtgcgaggccgggtgtttgacgcgggagaggccgtgtagcgtcgccgttactccgaggagataccagtcggtagaggagaagtcgaggttagagggaactgggaggcactttgctgtctgcaatcgaagttgagggtgcaaaaatgcagagtaataaaacttttaacttggagaagcaaaaccatactccaagaaagcatcatcaacatcaccaccagcagcagcaccaccagcagcaacagcagcagccgccaccaccgccaatacctgcattaatgaactcggcagctggtgcgggtgcgggtcagctattgtctcaattttatttccgagcaatatctctaaaaaccaaaaagaaaatacagataataaacatcaaaacactataatacacatccaaaaaaacatatatataaatataaacataaaagtaaaatatactacaaaaacaatagcaaaacaaacaaacatcatactataataacaaaaaaaataaactataaacaaaaaagataaaataaaaaagtaaagaaacaaaaaagaa

SEQ ID NO: 324842 - DNA, 638 bp, Homo sapiens
tgagacagagttttgctcttgtcgcccaggctggagtgcagtggtgcaatcttggctccctgcaacctccgcctcccaggttcaagcgattctcctgcctcagcctcctgagtagctgggattacaggcatgcgccaccacttttggggttatccactagagttctaaacagacttagtcacccactcctacctaccatcaggagccttgaatagttgaatggaaatagcctccagtggagggactacagatgggtgggaagcttccaacaatggctctgttacagtgttgctctctttttctctttaagaccccaccaacaactgaacgctttggtcaggctgctacaatggaaggaattggggcaattggtggaactcctcctgcattcaaccgtgcagctcctggagctgaatttgccccaaacaaacgtcgccgatactaataagttgcagtgtctagtttctcaaaacccttaaaagaaggaccctttttggactagccagaattctaccctggaaaagtgttagggattccttccaatagttagatctaccctgcctgtactactctagggagtatgctggaggcagagggcaagggaggggtggtattaaacaagtcaattctgtgtggta

SEQ ID NO: 324843 - DNA, 557 bp, Homo sapiens
gagttccttcggatattggaacaaggagcaacatgtatgacagcagttgagtacaggttgctctgctgtgttgacacattctactgttaaacagatgtctgcatgttttacctcagcttggttcttagaggtagtcatcagatgactggtagttaaaaataatatagaaaagtctttaaggcttaaatggagaagtctggtactgaatactgtacttttagccttgagcctgtaccagctcattgtaaaaagtctttaagtatatgttcctgtttgagtaccagttgtgtgcctctaagactagaaccaatcccaactttgtttatttccagagattactataaagagttgctctttcctaactcatttcattctgttgcccccagcctgaaagaatgggaactgttaaggttatgaaaattggtgagagattaggaaaatggaacagttactttgttttttgtttttttattggttggtttattctcatctgaaggtacgttttgaatgttaaaatctgatgccttgtgacatagggctgcttccttgaattgctt

SEQ ID NO: 324844 - DNA, 2674 bp, Homo sapiens
ggggaagggaagaaaaaactataggctaggtacgaggctgggtgtcgggagaggccgtgtagcgtcgccgttactccgaggagataccagtcggtagaggagaagtcgaggttagagggaactgggaggcactttgctgtctgcaatcgaagttgagggtgcaaaaatgcagagtaataaaacttttaacttggagaagcaaaaccatactccaagaaagcatcatcaacatcaccaccagcagcagcaccaccagcagcaacagcagcagccgccaccaccgccaatacctgcaaatgggcaacaggccagcagccaaaatgaaggcttgactattgacctgaagaattttagaaaaccaggagagaagaccttcacccaacgaagccgtctttttgtgggaaatcttcctcccgacatcactgaggaagaaatgaggaaactatttgagaaatatggaaaggcaggcgaagtcttcattcataaggataaaggatttggctttatccgcttggaaacccgaaccctagcggagattgccaaagtggagctggacaatatgccactccgtggaaagcagctgcgtgtgcgctttgcctgccatagtgcatcccttacagttcgaaaccttcctcagtatgtgtccaacgaactgctggaagaagccttttctgtgtttggccaggtagagagggctgtagtcattgtggatgatcgaggaaggccctcaggaaaaggcattgttgagttctcagggaagccagctgctcggaaagctctggacagatgcagtgaaggctccttcctgctaaccacatttcctcgtcctgtgactgtggagcccatggaccagttagatgatgaagagggacttccagagaagctggttataaaaaaccagcaatttcacaaggaacgagagcagccacccagatttgcacagcctggctcctttgagtatgaatatgccatgcgctggaaggcactcattgagatggagaagcagcagcaggaccaagtggaccgcaacatcaaggaggctcgtgagaagctggagatggagatggaagctgcacgccatgagcaccaggtcatgctaatgagacaggatttgatgaggcgccaagaagaacttcggaggatggaagagctgcacaaccaagaggtgcaaaaacgaaagcaactggagctcaggcaggaggaagagcgcaggcgccgtgaagaagagatgcggcggcagcaagaagaaatgatgcggcgacagcaggaaggattcaagggaaccttccctgatgcgagagagcaggagattcggatgggtcagatggctatgggaggtgctatgggcataaacaacagaggtgccatgccccctgctcctgtgccagctggtaccccagctcctccaggacctgccactatgatgccggatggaactttgggattgaccccaccaacaactgaacgctttggtcaggctgctacaatggaaggaattggggcaattggtggaactcctcctgcattcaaccgtgcagctcctggagctgaatttgccccaaacaaacgtcgccgatactaataagttgcagtgtctagtttctcaaaacccttaaaagaaggaccctttttggactagccagaattctaccctggaaaagtgttagggattccttccaatagttagatctaccctgcctgtactactctagggagtatgctggaggcagagggcaagggaggggtggtattaaacaagtcaattctgtgtggtatattgtttaatcagttctgtgtggtgcattcctgaagtctctaatgtgactgttgagggcctggggaaaccatggcaaagtggatccagttagagcccattaatcttgatcattccggtttttttttttttggtccatcttgtttcatttgcttgccccgcccccgagacggagtcttactctgtcgcccaggctggagtgtagtggcatgatctcggctcactgcaatctctgcctcccgggttcaagcttgtccaggttgatcttgaactcctgacctcgtgatctacccacctcggcctcccaaaatgctgggattacaggggtgagccaccgtgcccaacctcacttgcttcttatccttacactcccccagccccagagaaactgccacatacaccacaaaaaccaaacatcccccaatgaccttagccccattgctccattcactcccaggtgagaattcaggcaaacgtccacaaaggtcacaggcagcgtacatacggttctgttataccccatatattaccccttcatgtcctaaagaagacattttctcttagagattttcattttagtgtatctttaaaaaaaaatcttgtgttaacttgcctccatctttttcttgggtgaggacacccaggaatgacccttttgtgtctatgatgttgctgttcacagcttttcttgataggcctagtacaatcttgggaacagggttactgtatactgaaggtctgacagtagctcttagactcgcctatcttaggtagtcatgctgtgcattttttttttcattggtgtactgtgtttgatttgtctcatatatttggagtttttctgaaaaatggagcagtaatgcagcatcaacctattaaaatacattttaagccttttaa

SEQ ID NO: 324845 - DNA, 3085 bp, Homo sapiens
ggggaagggaagaaaaaactataggctaggtacgaggctgggtgtcgggagaggccgtgtagcgtcgccgttactccgaggagataccagtcggtagaggagaagtcgaggttagagggaactgggaggcactttgctgtctgcaatcgaagttgagggtgcaaaaatgcagagtaataaaacttttaacttggagaagcaaaaccatactccaagaaagcatcatcaacatcaccaccagcagcagcaccaccagcagcaacagcagcagccgccaccaccgccaatacctgcaaatgggcaacaggccagcagccaaaatgaaggcttgactattgacctgaagaattttagaaaaccaggagagaagaccttcacccaacgaagccgtctttttgtgggaaatcttcctcccgacatcactgaggaagaaatgaggaaactatttgagaaatatggaaaggcaggcgaagtcttcattcataaggataaaggatttggctttatccgcttggaaacccgaaccctagcggagattgccaaagtggagctggacaatatgccactccgtggaaagcagctgcgtgtgcgctttgcctgccatagtgcatcccttacagttcgaaaccttcctcagtatgtgtccaacgaactgctggaagaagccttttctgtgtttggccaggtagagagggctgtagtcattgtggatgatcgaggaaggccctcaggaaaaggcattgttgagttctcagggaagccagctgctcggaaagctctggacagatgcagtgaaggctccttcctgctaaccacatttcctcgtcctgtgactgtggagcccatggaccagttagatgatgaagagggacttccagagaagctggttataaaaaaccagcaatttcacaaggaacgagagcagccacccagatttgcacagcctggctcctttgagtatgaatatgccatgcgctggaaggcactcattgagatggagaagcagcagcaggaccaagtggaccgcaacatcaaggaggctcgtgagaagctggagatggagatggaagctgcacgccatgagcaccaggtcatgctaatgagacaggatttgatgaggcgccaagaagaacttcggaggatggaagagctgcacaaccaagaggtgcaaaaacgaaagcaactggagctcaggcaggaggaagagcgcaggcgccgtgaagaagagatgcggcggcagcaagaagaaatgatgcggcgacagcaggaaggattcaagggaaccttccctgatgcgagagagcaggagattcggatgggtcagatggctatgggaggtgctatgggcataaacaacagaggtgccatgccccctgctcctgtgccagctggtaccccagctcctccaggacctgccactatgatgccggatggaactttgggattgaccccaccaacaactgaacgctttggtcaggctgctacaatggaaggaattggggcaattggtggaactcctcctgcattcaaccgtgcagctcctggagctgaatttgccccaaacaaacgtcgccgatactaataagttgcagtgtctagtttctcaaaacccttaaaagaaggaccctttttggactagccagaattctaccctggaaaagtgttagggattccttccaatagttagatctaccctgcctgtactactctagggagtatgctggaggcagagggcaagggaggggtggtattaaacaagtcaattctgtgtggtatattgtttaatcagttctgtgtggtgcattcctgaagtctctaatgtgactgttgagggcctggggaaaccatggcaaagtggatccagttagagcccattaatcttgatcattccggtttttttttttttggtccatcttgtttcatttgcttgccccgcccccgagacggagtcttactctgtcgcccaggctggagtgtagtggcatgatctcggctcactgcaatctctgcctcccgggttcaagcttgtccaggttgatcttgaactcctgacctcgtgatctacccacctcggcctcccaaaatgctgggattacaggggtgagccaccgtgcccaacctcacttgcttcttatccttacactcccccagccccagagaaactgccacatacaccacaaaaaccaaacatcccccaatgaccttagccccattgctccattcactcccaggtgagaattcaggcaaacgtccacaaaggtcacaggcagcgtacatacggttctgttataccccatatattaccccttcatgtcctaaagaagacattttctcttagagattttcattttagtgtatctttaaaaaaaaatcttgtgttaacttgcctccatctttttcttgggtgaggacacccaggaatgacccttttgtgtctatgatgttgctgttcacagcttttcttgataggcctagtacaatcttgggaacagggttactgtatactgaaggtctgacagtagctcttagactcgcctatcttaggtagtcatgctgtgcattttttttttcattggtgtactgtgtttgatttgtctcatatatttggagtttttctgaaaaatggagcagtaatgcagcatcaacctattaaaatacattttaagccttttaaaaaaaaaaaaagagatactaataagtgttctgctagatagactatttgaaaactataaatgtatttttggattaacaatgccaaggtattttttcatattcacattgaaaaatacaggcaaaactatcaatattttttctgcattatatgaaatttcacaggtagaactaaatctatgatatagaaaataatagcacattacacatagagaaaaccaagccacttaggtttagatagatatataacatgtaacatcttctctgttaaccaattatagatacatatacaacatgtaatgttttcttagttaaacaattggaaatgtttaggcattttactgtgtgggggcggtgagtatgcacatgatcagacttgtattctagctttacaattaaaattcacagaatcatt

SEQ ID NO: 324846 - DNA, 2619 bp, Homo sapiens
ggggaagggaagaaaaaactataggctaggtacgaggctgggtgtcgggagaggccgtgtagcgtcgccgttactccgaggagataccagtcggtagaggagaagtcgaggttagagggaactgggaggcactttgctgtctgcaatcgaagttgagggtgcaaaaatgcagagtaataaaacttttaacttggagaagcaaaaccatactccaagaaagcatcatcaacatcaccaccagcagcagcaccaccagcagcaacagcagcagccgccaccaccgccaatacctgcaaatgggcaacaggccagcagccaaaatgaaggcttgactattgacctgaagaattttagaaaaccaggagagaagaccttcacccaacgaagccgtctttttgtgggaaatcttcctcccgacatcactgaggaagaaatgaggaaactatttgagaaatatggaaaggcaggcgaagtcttcattcataaggataaaggatttggctttatccgcttggaaacccgaaccctagcggagattgccaaagtggagctggacaatatgccactccgtggaaagcagctgcgtgtgcgctttgcctgccatagtgcatcccttacagttcgaaaccttcctcagtatgtgtccaacgaactgctggaagaagccttttctgtgtttggccaggtagagagggctgtagtcattgtggatgatcgaggaaggccctcaggaaaaggcattgttgagttctcagggaagccagctgctcggaaagctctggacagatgcagtgaaggctccttcctgctaaccacatttcctcgtcctgtgactgtggagcccatggaccagttagatgatgaagagggacttccagagaagctggttataaaaaaccagcaatttcacaaggaacgagagcagccacccagatttgcacagcctggctcctttgagtatgaatatgccatgcgctggaaggcactcattgagatggagaagcagcagcaggaccaagtggaccgcaacatcaaggaggctcgtgagaagctggagatggagatggaagctgcacgccatgagcaccaggtcatgctaatgagacaggatttgatgaggcgccaagaagaacttcggaggatggaagagctgcacaaccaagaggtgcaaaaacgaaagcaactggagctcaggcaggaggaagagcgcaggcgccgtgaagaagagatgcggcggcagcaagaagaaatgatgcggcgacagcaggaaggattcaagggaaccttccctgatgcgagagagcaggagattcggatgggtcagatggctatgggaggtgctatgggcataaacaacagaggtgccatgccccctgctcctgtgccagctggtaccccagctcctccaggacctgccactatgatgccggatggaactttgggattgaccccaccaacaactgaacgctttggtcaggctgctacaatggaaggaattggggcaattggtggaactcctcctgcattcaaccgtgcagctcctggagctgaatttgccccaaacaaacgtcgccgatactaataagttgcagtgtctagtttctcaaaacccttaaaagaaggaccctttttggactagccagaattctaccctggaaaagtgttagggattccttccaatagttagatctaccctgcctgtactactctagggagtatgctggaggcagagggcaagggaggggtggtattaaacaagtcaattctgtgtggtatattgtttaatcagttctgtgtggtgcattcctgaagtctctaatgtgactgttgagggcctggggaaaccatggcaaagtggatccagttagagcccattaatcttgatcattccggtttttttttttttggtccatcttgtttcatttgcttgccccgcccccgagacggagtcttactctgtcgcccaggctggagtgtagtggcatgatctcggctcactgcaatctctgcctcccgggttcaagcttgtccaggttgatcttgaactcctgacctcgtgatctacccacctcggcctcccaaaatgctgggattacaggggtgagccaccgtgcccaacctcacttgcttcttatccttacactcccccagccccagagaaactgccacatacaccacaaaaaccaaacatcccccaatgaccttagccccattgctccattcactcccaggtgagaattcaggcaaacgtccacaaaggtcacaggcagcgtacatacggttctgttataccccatatattaccccttcatgtcctaaagaagacattttctcttagagattttcattttagtgtatctttaaaatgacccttttgtgtctatgatgttgctgttcacagcttttcttgataggcctagtacaatcttgggaacagggttactgtatactgaaggtctgacagtagctcttagactcgcctatcttaggtagtcatgctgtgcattttttttttcattggtgtactgtgtttgatttgtctcatatatttggagtttttctgaaaaatggagcagtaatgcagcatcaacctattaaaatacattttaagccttttaa

SEQ ID NO: 324847 - DNA, 3578 bp, Homo sapiens
ggggaagggaagaaaaaactataggctaggtacgaggctgggtgtcgggagaggccgtgtagcgtcgccgttactccgaggagataccagtcggtagaggagaagtcgaggttagagggaactgggaggcactttgctgtctgcaatcgaagttgagggtgcaaaaatgcagagtaataaaacttttaacttggagaagcaaaaccatactccaagaaagcatcatcaacatcaccaccagcagcagcaccaccagcagcaacagcagcagccgccaccaccgccaatacctgcaaatgggcaacaggccagcagccaaaatgaaggcttgactattgacctgaagaattttagaaaaccaggagagaagaccttcacccaacgaagccgtctttttgtgggaaatcttcctcccgacatcactgaggaagaaatgaggaaactatttgagaaatatggaaaggcaggcgaagtcttcattcataaggataaaggatttggctttatccgcttggaaacccgaaccctagcggagattgccaaagtggagctggacaatatgccactccgtggaaagcagctgcgtgtgcgctttgcctgccatagtgcatcccttacagttcgaaaccttcctcagtatgtgtccaacgaactgctggaagaagccttttctgtgtttggccaggtagagagggctgtagtcattgtggatgatcgaggaaggccctcaggaaaaggcattgttgagttctcagggaagccagctgctcggaaagctctggacagatgcagtgaaggctccttcctgctaaccacatttcctcgtcctgtgactgtggagcccatggaccagttagatgatgaagagggacttccagagaagctggttataaaaaaccagcaatttcacaaggaacgagagcagccacccagatttgcacagcctggctcctttgagtatgaatatgccatgcgctggaaggcactcattgagatggagaagcagcagcaggaccaagtggaccgcaacatcaaggaggctcgtgagaagctggagatggagatggaagctgcacgccatgagcaccaggtcatgctaatgagacaggatttgatgaggcgccaagaagaacttcggaggatggaagagctgcacaaccaagaggtgcaaaaacgaaagcaactggagctcaggtaacttttctcgaacactttttccctaacaactctaaaaggtaatgtctcactcctctttcctactgccatgctacctcgtgtatttataaatgtgttggcaaatatttcctggctgcttctcaggttctttctttggattggagatgttttagctgcccatggtcctagaagttacctgctaaaaagaaagcagctgaatgctggtctcatgaggtttctttgggggttgcctcagggctgggcacacttaacagtgagtttcctggtgaactgatagttttcagtaggccagtctccttggttgagtctcctgttaatctgctcaagttctgaaatgcctctgtcttaaatacattggtgactctctgtaggcaggaggaagagcgcaggcgccgtgaagaagagatgcggcggcagcaagaagaaatgatgcggcgacagcaggaaggattcaagggaaccttccctgatgcggtatatctcccatgtgcccgtgatgtaccagaccagtcctgataaactcaccatgaattgtctgctaggttaccggttatgaccaattttcccgtgttgtgaaataaccctttagaaaaaagaattcataagaaggagaggtaaggtttgaagaggagatcttgcctcacaagcaatataggatgaaaaactgggtctgctgtattctgtttagactcagtgactataggaagagatatgcaaccttggctagtcctctgctgtccttgcaattgtacaagttggagcttcagaagcaatctcttccccctttcacctctctgttgctaataggaggctctggcttacgtcctagtagctctgtgaccttgaatttgttgcacaactagcaagggttgtgctcctcagctttctcagtgctgtttggacgtgttatcactctatctacttcccttagtgtgtggtccttgatggattgtggtagaatgcactgctgtcttggactgtcttgagtattttttgtttttcagagagagcaggagattcggatgggtcagatggctatgggaggtgctatgggcataaacaacagaggtgccatgccccctgctcctgtgccagctggtaccccagctcctccaggacctgccactatgatgccggatggaactttgggattgaccccaccaacaactgaacgctttggtcaggctgctacaatggaaggaattggggcaattggtggaactcctcctgcattcaaccgtgcagctcctggagctgaatttgccccaaacaaacgtcgccgatactaataagttgcagtgtctagtttctcaaaacccttaaaagaaggaccctttttggactagccagaattctaccctggaaaagtgttagggattccttccaatagttagatctaccctgcctgtactactctagggagtatgctggaggcagagggcaagggaggggtggtattaaacaagtcaattctgtgtggtatattgtttaatcagttctgtgtggtgcattcctgaagtctctaatgtgactgttgagggcctggggaaaccatggcaaagtggatccagttagagcccattaatcttgatcattccggtttttttttttttggtccatcttgtttcatttgcttgccccgcccccgagacggagtcttactctgtcgcccaggctggagtgtagtggcatgatctcggctcactgcaatctctgcctcccgggttcaagcttgtccaggttgatcttgaactcctgacctcgtgatctacccacctcggcctcccaaaatgctgggattacaggggtgagccaccgtgcccaacctcacttgcttcttatccttacactcccccagccccagagaaactgccacatacaccacaaaaaccaaacatcccccaatgaccttagccccattgctccattcactcccaggtgagaattcaggcaaacgtccacaaaggtcacaggcagcgtacatacggttctgttataccccatatattaccccttcatgtcctaaagaagacattttctcttagagattttcattttagtgtatctttaaaaaaaaatcttgtgttaacttgcctccatctttttcttgggtgaggacacccaggaatgacccttttgtgtctatgatgttgctgttcacagcttttcttgataggcctagtacaatcttgggaacagggttactgtatactgaaggtctgacagtagctcttagactcgcctatcttaggtagtcatgctgtgcattttttttttcattggtgtactgtgtttgatttgtctcatatatttggagtttttctgaaaaatggagcagtaatgcagcatcaacctattaaaatacattttaagccttttaa

SEQ ID NO: 324848 - DNA, 2379 bp, Homo sapiens
ggggaagggaagaaaaaactataggctaggtacgaggctgggtgtcgggagaggccgtgtagcgtcgccgttactccgaggagataccagtcggtagaggagaagtcgaggttagagggaactgggaggcactttgctgtctgcaatcgaagttgagggtgcaaaaatgcagagtaataaaacttttaacttggagaagcaaaaccatactccaagaaagcatcatcaacatcaccaccagcagcagcaccaccagcagcaacagcagcagccgccaccaccgccaatacctgcaaatgggcaacaggccagcagccaaaatgaaggcttgactattgacctgaagaattttagaaaaccaggagagaagaccttcacccaacgaagccgtctttttgtgggaaatcttcctcccgacatcactgaggaagaaatgaggaaactatttgagaaatatggaaaggcaggcgaagtcttcattcataaggataaaggatttggctttatccgcttggaaacccgaaccctagcggagattgccaaagtggagctggacaatatgccactccgtggaaagcagctgcgtgtgcgctttgcctgccatagtgcatcccttacagttcgaaaccttcctcagtatgtgtccaacgaactgctggaagaagccttttctgtgtttggccaggtagagagggctgtagtcattgtggatgatcgaggaaggccctcaggaaaaggcattgttgagttctcagggaagccagctgctcggaaagctctggacagatgcagtgaaggctccttcctgctaaccacatttcctcgtcctgtgactgtggagcccatggaccagttagatgatgaagagggacttccagagaagctggttataaaaaaccagcaatttcacaaggaacgagagcagccacccagatttgcacagcctggctcctttgagtatgaatatgccatgcgctggaaggcactcattgagatggagaagcagcagcaggaccaagtggaccgcaacatcaaggaggctcgtgagaagctggagatggagatggaagctgcacgccatgagcaccaggtcatgctaatgagacaggatttgatgaggcgccaagaagaacttcggaggatggaagagctgcacaaccaagaggtgcaaaaacgaaagcaactggagctcaggcaggaggaagagcgcaggcgccgtgaagaagagatgcggcggcagcaagaagaaatgatgcggcgacagcaggaaggattcaagggaaccttccctgatgcgagagagcaggagattcggatgggtcagatggctatgggaggtgctatgggcataaacaacagaggtgccatgccccctgctcctgtgccagctggtaccccagctcctccaggacctgccactatgatgccggatggaactttgggattgaccccaccaacaactgaacgctttggtcaggctgctacaatggaaggaattggggcaattggtggaactcctcctgcattcaaccgtgcagctcctggagctgaatttgccccaaacaaacgtcgccgatactaataagttgcagtgtctagtttctcaaaacccttaaaagaaggaccctttttggactagccagaattctaccctggaaaagtgttagggattccttccaatagttagatctaccctgcctgtactactctagggagtatgctggaggcagagggcaagggaggggtggtattaaacaagtcaattctgtgtggtatattgtttaatcagttctgtgtggtgcattcctgaagtctctaatgtgactgttgagggcctggggaaaccatggcaaagtggatccagttagagcccattaatcttgatcattccggtttttttttttttggtccatcttgtttcatttgcttgccccgcccccgagacggagtcttactctgtcgcccaggctggagtgtagtggcatgatctcggctcactgcaatctctgcctcccgggttcaagcttgtccaggttgatcttgaactcctgacctcgtgatctacccacctcggcctcccaaaatgctgggattacaggggtgagccaccgtgcccaacctcacttgcttcttatccttacactcccccagccccagagaaactgccacatacaccacaaaaaccaaacatcccccaatgaccttagccccattgctccattcactcccaggtgagaattcaggcaaacgtccacaaaggtcacaggcagcgtacatacggttctgttataccccatatattaccccttcatgtcctaaagaagaaacgcaactacctgagaagaaccgcaactacctgagaagaaacgcaactacctg

SEQ ID NO: 324849 - DNA, 2617 bp, Homo sapiens
ggggaagggaagaaaaaactataggctaggtacgaggctgggtgtcgggagaggccgtgtagcgtcgccgttactccgaggagataccagtcggtagaggggtgcaaaaatgcagagtaataaaacttttaacttggagaagcaaaaccatactccaagaaagcatcatcaacatcaccaccagcagcagcaccaccagcagcaacagcagcagccgccaccaccgccaatacctgcaaatgggcaacaggccagcagccaaaatgaaggcttgactattgacctgaagaattttagaaaaccaggagagaagaccttcacccaacgaagccgtctttttgtgggaaatcttcctcccgacatcactgaggaagaaatgaggaaactatttgagaaatatggaaaggcaggcgaagtcttcattcataaggataaaggatttggctttatccgcttggaaacccgaaccctagcggagattgccaaagtggagctggacaatatgccactccgtggaaagcagctgcgtgtgcgctttgcctgccatagtgcatcccttacagttcgaaaccttcctcagtatgtgtccaacgaactgctggaagaagccttttctgtgtttggccaggtagagagggctgtagtcattgtggatgatcgaggaaggccctcaggaaaaggcattgttgagttctcagggaagccagctgctcggaaagctctggacagatgcagtgaaggctccttcctgctaaccacatttcctcgtcctgtgactgtggagcccatggaccagttagatgatgaagagggacttccagagaagctggttataaaaaaccagcaatttcacaaggaacgagagcagccacccagatttgcacagcctggctcctttgagtatgaatatgccatgcgctggaaggcactcattgagatggagaagcagcagcaggaccaagtggaccgcaacatcaaggaggctcgtgagaagctggagatggagatggaagctgcacgccatgagcaccaggtcatgctaatgagacaggatttgatgaggcgccaagaagaacttcggaggatggaagagctgcacaaccaagaggtgcaaaaacgaaagcaactggagctcaggcaggaggaagagcgcaggcgccgtgaagaagagatgcggcggcagcaagaagaaatgatgcggcgacagcaggaaggattcaagggaaccttccctgatgcgagagagcaggagattcggatgggtcagatggctatgggaggtgctatgggcataaacaacagaggtgccatgccccctgctcctgtgccagctggtaccccagctcctccaggacctgccactatgatgccggatggaactttgggattgaccccaccaacaactgaacgctttggtcaggctgctacaatggaaggaattggggcaattggtggaactcctcctgcattcaaccgtgcagctcctggagctgaatttgccccaaacaaacgtcgccgatactaataagttgcagtgtctagtttctcaaaacccttaaaagaaggaccctttttggactagccagaattctaccctggaaaagtgttagggattccttccaatagttagatctaccctgcctgtactactctagggagtatgctggaggcagagggcaagggaggggtggtattaaacaagtcaattctgtgtggtatattgtttaatcagttctgtgtggtgcattcctgaagtctctaatgtgactgttgagggcctggggaaaccatggcaaagtggatccagttagagcccattaatcttgatcattccggtttttttttttttggtccatcttgtttcatttgcttgccccgcccccgagacggagtcttactctgtcgcccaggctggagtgtagtggcatgatctcggctcactgcaatctctgcctcccgggttcaagcttgtccaggttgatcttgaactcctgacctcgtgatctacccacctcggcctcccaaaatgctgggattacaggggtgagccaccgtgcccaacctcacttgcttcttatccttacactcccccagccccagagaaactgccacatacaccacaaaaaccaaacatcccccaatgaccttagccccattgctccattcactcccaggtgagaattcaggcaaacgtccacaaaggtcacaggcagcgtacatacggttctgttataccccatatattaccccttcatgtcctaaagaagacattttctcttagagattttcattttagtgtatctttaaaaaaaaatcttgtgttaacttgcctccatctttttcttgggtgaggacacccaggaatgacccttttgtgtctatgatgttgctgttcacagcttttcttgataggcctagtacaatcttgggaacagggttactgtatactgaaggtctgacagtagctcttagactcgcctatcttaggtagtcatgctgtgcattttttttttcattggtgtactgtgtttgatttgtctcatatatttggagtttttctgaaaaatggagcagtaatgcagcatcaacctattaaaatacattttaagccttttaa

SEQ ID NO: 324850 - DNA, 1775 bp, Homo sapiens
ggggaagggaagaaaaaactataggctaggtacgaggctgggtgtcgggagaggccgtgtagcgtcgccgttactccgaggagataccagtcggtagaggagaagtcgaggttagagggaactgggaggcactttgctgtctgcaatcgaagttgagggtgcaaaaatgcagagtaataaaacttttaacttggagaagcaaaaccatactccaagaaagcatcatcaacatcaccaccagcagcagcaccaccagcagcaacagcagcagccgccaccaccgccaatacctgcaaatgggcaacaggccagcagccaaaatgaaggcttgactattgacctgaagaattttagaaaaccaggagagaagaccttcacccaacgaagccgtctttttgtgggaaatcttcctcccgacatcactgaggaagaaatgaggaaactatttgagaaatatggaaaggcaggcgaagtcttcattcataaggataaaggatttggctttatccgcttggaaacccgaaccctagcggagattgccaaagtggagctggacaatatgccactccgtggaaagcagctgcgtgtgcgctttgcctgccatagtgcatcccttacagttcgaaaccttcctcagtatgtgtccaacgaactgctggaagaagccttttctgtgtttggccaggtagagagggctgtagtcattgtggatgatcgaggaaggccctcaggaaaaggcattgttgagttctcagggaagccagctgctcggaaagctctggacagatgcagtgaaggctccttcctgctaaccacatttcctcgtcctgtgactgtggagcccatggaccagttagatgatgaagagggacttccagagaagctggttataaaaaaccagcaatttcacaaggaacgagagcagccacccagatttgcacagcctggctcctttgagtatgaatatgccatgcgctggaaggcactcattgagatggagaagcagcagcaggaccaagtggaccgcaacatcaaggaggctcgtgagaagctggagatggagatggaagctgcacgccatgagcaccaggtcatgctaatgagacaggatttgatgaggcgccaagaagaacttcggaggatggaagagctgcacaaccaagaggtgcaaaaacgaaagcaactggagctcaggcaggaggaagagcgcaggcgccgtgaagaagagatgcggcggcagcaagaagaaatgatgcggcgacagcaggaaggattcaagggaaccttccctgatgcgagagagcaggagattcggatgggtcagatggctatgggaggtgctatgggcataaacaacagaggtgccatgccccctgctcctgtgccagctggtaccccagctcctccaggacctgccactatgatgccggatggaactttgggattgaccccaccaacaactgaacgctttggtcaggctgctacaatggaaggaattggggcaattggtggaactcctcctgcattcaaccgtgcagctcctggagctgaatttgccccaaacaaacgtcgccgatactaataagttgcagtgtctagtttctcaaaacccttaaaagaaggaccctttttggactagccagaattctaccctggaaaagtgttagggattccttccaatagttagatctaccctgcctgtactactctagggagtatgctggaggcagagggcaagggaggggtggtattaaacaagtcaattctgtgtggta

SEQ ID NO: 324851 - DNA, 2634 bp, Homo sapiens
ggggcctgtcgctggtaacttacacgtgcccgcgtgggtcattaccaattcggcaagaggagaagtcgaggttagagggaactgggaggcactttgctgtctgcaatcgaagttgagggtgcaaaaatgcagagtaataaaacttttaacttggagaagcaaaaccatactccaagaaagcatcatcaacatcaccaccagcagcagcaccaccagcagcaacagcagcagccgccaccaccgccaatacctgcaaatgggcaacaggccagcagccaaaatgaaggcttgactattgacctgaagaattttagaaaaccaggagagaagaccttcacccaacgaagccgtctttttgtgggaaatcttcctcccgacatcactgaggaagaaatgaggaaactatttgagaaatatggaaaggcaggcgaagtcttcattcataaggataaaggatttggctttatccgcttggaaacccgaaccctagcggagattgccaaagtggagctggacaatatgccactccgtggaaagcagctgcgtgtgcgctttgcctgccatagtgcatcccttacagttcgaaaccttcctcagtatgtgtccaacgaactgctggaagaagccttttctgtgtttggccaggtagagagggctgtagtcattgtggatgatcgaggaaggccctcaggaaaaggcattgttgagttctcagggaagccagctgctcggaaagctctggacagatgcagtgaaggctccttcctgctaaccacatttcctcgtcctgtgactgtggagcccatggaccagttagatgatgaagagggacttccagagaagctggttataaaaaaccagcaatttcacaaggaacgagagcagccacccagatttgcacagcctggctcctttgagtatgaatatgccatgcgctggaaggcactcattgagatggagaagcagcagcaggaccaagtggaccgcaacatcaaggaggctcgtgagaagctggagatggagatggaagctgcacgccatgagcaccaggtcatgctaatgagacaggatttgatgaggcgccaagaagaacttcggaggatggaagagctgcacaaccaagaggtgcaaaaacgaaagcaactggagctcaggcaggaggaagagcgcaggcgccgtgaagaagagatgcggcggcagcaagaagaaatgatgcggcgacagcaggaaggattcaagggaaccttccctgatgcgagagagcaggagattcggatgggtcagatggctatgggaggtgctatgggcataaacaacagaggtgccatgccccctgctcctgtgccagctggtaccccagctcctccaggacctgccactatgatgccggatggaactttgggattgaccccaccaacaactgaacgctttggtcaggctgctacaatggaaggaattggggcaattggtggaactcctcctgcattcaaccgtgcagctcctggagctgaatttgccccaaacaaacgtcgccgatactaataagttgcagtgtctagtttctcaaaacccttaaaagaaggaccctttttggactagccagaattctaccctggaaaagtgttagggattccttccaatagttagatctaccctgcctgtactactctagggagtatgctggaggcagagggcaagggaggggtggtattaaacaagtcaattctgtgtggtatattgtttaatcagttctgtgtggtgcattcctgaagtctctaatgtgactgttgagggcctggggaaaccatggcaaagtggatccagttagagcccattaatcttgatcattccggtttttttttttttggtccatcttgtttcatttgcttgccccgcccccgagacggagtcttactctgtcgcccaggctggagtgtagtggcatgatctcggctcactgcaatctctgcctcccgggttcaagcttgtccaggttgatcttgaactcctgacctcgtgatctacccacctcggcctcccaaaatgctgggattacaggggtgagccaccgtgcccaacctcacttgcttcttatccttacactcccccagccccagagaaactgccacatacaccacaaaaaccaaacatcccccaatgaccttagccccattgctccattcactcccaggtgagaattcaggcaaacgtccacaaaggtcacaggcagcgtacatacggttctgttataccccatatattaccccttcatgtcctaaagaagacattttctcttagagattttcattttagtgtatctttaaaaaaaaatcttgtgttaacttgcctccatctttttcttgggtgaggacacccaggaatgacccttttgtgtctatgatgttgctgttcacagcttttcttgataggcctagtacaatcttgggaacagggttactgtatactgaaggtctgacagtagctcttagactcgcctatcttaggtagtcatgctgtgcattttttttttcattggtgtactgtgtttgatttgtctcatatatttggagtttttctgaaaaatggagcagtaatgcagcatcaacctattaaaatacattttaagccttttaa

SEQ ID NO: 324852 - DNA, 2815 bp, Homo sapiens
  misc_feature (7)..(7): n is a, c, g, or t
  misc_feature (21)..(21): n is a, c, g, or t
  misc_feature (26)..(26): n is a, c, g, or t
  misc_feature (28)..(28): n is a, c, g, or t
  misc_feature (65)..(65): n is a, c, g, or t
  misc_feature (70)..(70): n is a, c, g, or t
aacgaangatgtatgaggcgntcccngngtgtaatttcagtcacggggacgaggccgtgtatctngtcgncgttgctccgaggagataccagtcggtagaggggtgcaaaaatgcagagtaataaaacttttaacttggagaagcaaaaccatactccaagaaagcatcatcaacatcaccaccagcagcagcaccaccagcagcaacagcagcagccaccaccacgacgaattccgtctgagaagtcgaggttagagggaactgggaggcactttgctgtctgcaatcgaagttgagggtgcaaaaatgcagagtaataaaacttttaacttggagaagcaaaaccatactccaagaaagcatcatcaacatcaccaccagcagcagcaccaccagcagcaacagcagcagccgccaccaccgccaatacctgcaaatgggcaacaggccagcagccaaaatgaaggcttgactattgacctgaagaattttagaaaaccaggagagaagaccttcacccaacgaagccgtctttttgtgggaaatcttcctcccgacatcactgaggaagaaatgaggaaactatttgagaaatatggaaaggcaggcgaagtcttcattcataaggataaaggatttggctttatccgcttggaaacccgaaccctagcggagattgccaaagtggagctggacaatatgccactccgtggaaagcagctgcgtgtgcgctttgcctgccatagtgcatcccttacagttcgaaaccttcctcagtatgtgtccaacgaactgctggaagaagccttttctgtgtttggccaggtagagagggctgtagtcattgtggatgatcgaggaaggccctcaggaaaaggcattgttgagttctcagggaagccagctgctcggaaagctctggacagatgcagtgaaggctccttcctgctaaccacatttcctcgtcctgtgactgtggagcccatggaccagttagatgatgaagagggacttccagagaagctggttataaaaaaccagcaatttcacaaggaacgagagcagccacccagatttgcacagcctggctcctttgagtatgaatatgccatgcgctggaaggcactcattgagatggagaagcagcagcaggaccaagtggaccgcaacatcaaggaggctcgtgagaagctggagatggagatggaagctgcacgccatgagcaccaggtcatgctaatgagacaggatttgatgaggcgccaagaagaacttcggaggatggaagagctgcacaaccaagaggtgcaaaaacgaaagcaactggagctcaggcaggaggaagagcgcaggcgccgtgaagaagagatgcggcggcagcaagaagaaatgatgcggcgacagcaggaaggattcaagggaaccttccctgatgcgagagagcaggagattcggatgggtcagatggctatgggaggtgctatgggcataaacaacagaggtgccatgccccctgctcctgtgccagctggtaccccagctcctccaggacctgccactatgatgccggatggaactttgggattgaccccaccaacaactgaacgctttggtcaggctgctacaatggaaggaattggggcaattggtggaactcctcctgcattcaaccgtgcagctcctggagctgaatttgccccaaacaaacgtcgccgatactaataagttgcagtgtctagtttctcaaaacccttaaaagaaggaccctttttggactagccagaattctaccctggaaaagtgttagggattccttccaatagttagatctaccctgcctgtactactctagggagtatgctggaggcagagggcaagggaggggtggtattaaacaagtcaattctgtgtggtatattgtttaatcagttctgtgtggtgcattcctgaagtctctaatgtgactgttgagggcctggggaaaccatggcaaagtggatccagttagagcccattaatcttgatcattccggtttttttttttttggtccatcttgtttcatttgcttgccccgcccccgagacggagtcttactctgtcgcccaggctggagtgtagtggcatgatctcggctcactgcaatctctgcctcccgggttcaagcttgtccaggttgatcttgaactcctgacctcgtgatctacccacctcggcctcccaaaatgctgggattacaggggtgagccaccgtgcccaacctcacttgcttcttatccttacactcccccagccccagagaaactgccacatacaccacaaaaaccaaacatcccccaatgaccttagccccattgctccattcactcccaggtgagaattcaggcaaacgtccacaaaggtcacaggcagcgtacatacggttctgttataccccatatattaccccttcatgtcctaaagaagacattttctcttagagattttcattttagtgtatctttaaaaaaaaatcttgtgttaacttgcctccatctttttcttgggtgaggacacccaggaatgacccttttgtgtctatgatgttgctgttcacagcttttcttgataggcctagtacaatcttgggaacagggttactgtatactgaaggtctgacagtagctcttagactcgcctatcttaggtagtcatgctgtgcattttttttttcattggtgtactgtgtttgatttgtctcatatatttggagtttttctgaaaaatggagcagtaatgcagcatcaacctattaaaatacattttaagccttttaa

SEQ ID NO: 324853 - DNA, 2788 bp, Homo sapiens
ggggaagggaagaaaaaactataggctaggtacgaggctgggtgtcgggagaggccgtgtagcgtcgccgttactccgaggagataccagtcggtagaggagaagtcgaggttagagggaactgggaggcactttgctgtctgcaatcgaagttgagaggcccagtatttaggcgacagtgaatttattactctgaagagggttctgcacatatttccaaattatattggtggtcatcagaagtaggtgataggaagaaatacttctcaagggtgcaaaaatgcagagtaataaaacttttaacttggagaagcaaaaccatactccaagaaagcatcatcaacatcaccaccagcagcagcaccaccagcagcaacagcagcagccgccaccaccgccaatacctgcaaatgggcaacaggccagcagccaaaatgaaggcttgactattgacctgaagaattttagaaaaccaggagagaagaccttcacccaacgaagccgtctttttgtgggaaatcttcctcccgacatcactgaggaagaaatgaggaaactatttgagaaatatggaaaggcaggcgaagtcttcattcataaggataaaggatttggctttatccgcttggaaacccgaaccctagcggagattgccaaagtggagctggacaatatgccactccgtggaaagcagctgcgtgtgcgctttgcctgccatagtgcatcccttacagttcgaaaccttcctcagtatgtgtccaacgaactgctggaagaagccttttctgtgtttggccaggtagagagggctgtagtcattgtggatgatcgaggaaggccctcaggaaaaggcattgttgagttctcagggaagccagctgctcggaaagctctggacagatgcagtgaaggctccttcctgctaaccacatttcctcgtcctgtgactgtggagcccatggaccagttagatgatgaagagggacttccagagaagctggttataaaaaaccagcaatttcacaaggaacgagagcagccacccagatttgcacagcctggctcctttgagtatgaatatgccatgcgctggaaggcactcattgagatggagaagcagcagcaggaccaagtggaccgcaacatcaaggaggctcgtgagaagctggagatggagatggaagctgcacgccatgagcaccaggtcatgctaatgagacaggatttgatgaggcgccaagaagaacttcggaggatggaagagctgcacaaccaagaggtgcaaaaacgaaagcaactggagctcaggcaggaggaagagcgcaggcgccgtgaagaagagatgcggcggcagcaagaagaaatgatgcggcgacagcaggaaggattcaagggaaccttccctgatgcgagagagcaggagattcggatgggtcagatggctatgggaggtgctatgggcataaacaacagaggtgccatgccccctgctcctgtgccagctggtaccccagctcctccaggacctgccactatgatgccggatggaactttgggattgaccccaccaacaactgaacgctttggtcaggctgctacaatggaaggaattggggcaattggtggaactcctcctgcattcaaccgtgcagctcctggagctgaatttgccccaaacaaacgtcgccgatactaataagttgcagtgtctagtttctcaaaacccttaaaagaaggaccctttttggactagccagaattctaccctggaaaagtgttagggattccttccaatagttagatctaccctgcctgtactactctagggagtatgctggaggcagagggcaagggaggggtggtattaaacaagtcaattctgtgtggtatattgtttaatcagttctgtgtggtgcattcctgaagtctctaatgtgactgttgagggcctggggaaaccatggcaaagtggatccagttagagcccattaatcttgatcattccggtttttttttttttggtccatcttgtttcatttgcttgccccgcccccgagacggagtcttactctgtcgcccaggctggagtgtagtggcatgatctcggctcactgcaatctctgcctcccgggttcaagcttgtccaggttgatcttgaactcctgacctcgtgatctacccacctcggcctcccaaaatgctgggattacaggggtgagccaccgtgcccaacctcacttgcttcttatccttacactcccccagccccagagaaactgccacatacaccacaaaaaccaaacatcccccaatgaccttagccccattgctccattcactcccaggtgagaattcaggcaaacgtccacaaaggtcacaggcagcgtacatacggttctgttataccccatatattaccccttcatgtcctaaagaagacattttctcttagagattttcattttagtgtatctttaaaaaaaaatcttgtgttaacttgcctccatctttttcttgggtgaggacacccaggaatgacccttttgtgtctatgatgttgctgttcacagcttttcttgataggcctagtacaatcttgggaacagggttactgtatactgaaggtctgacagtagctcttagactcgcctatcttaggtagtcatgctgtgcattttttttttcattggtgtactgtgtttgatttgtctcatatatttggagtttttctgaaaaatggagcagtaatgcagcatcaacctattaaaatacattttaagccttttaa

SEQ ID NO: 324854 - DNA, 2461 bp, Homo sapiens
tctgtcttgagtatcccccgattctcagcaatagcaccaccagcagcaacagcagcagccgccaccaccgccaatacctgcaaatgggcaacaggccagcagccaaaatgaaggcttgactattgacctgaagaattttagaaaaccaggagagaagaccttcacccaacgaagccgtctttttgtgggaaatcttcctcccgacatcactgaggaagaaatgaggaaactatttgagaaatatggaaaggcaggcgaagtcttcattcataaggataaaggatttggctttatccgcttggaaacccgaaccctagcggagattgccaaagtggagctggacaatatgccactccgtggaaagcagctgcgtgtgcgctttgcctgccatagtgcatcccttacagttcgaaaccttcctcagtatgtgtccaacgaactgctggaagaagccttttctgtgtttggccaggtagagagggctgtagtcattgtggatgatcgaggaaggccctcaggaaaaggcattgttgagttctcagggaagccagctgctcggaaagctctggacagatgcagtgaaggctccttcctgctaaccacatttcctcgtcctgtgactgtggagcccatggaccagttagatgatgaagagggacttccagagaagctggttataaaaaaccagcaatttcacaaggaacgagagcagccacccagatttgcacagcctggctcctttgagtatgaatatgccatgcgctggaaggcactcattgagatggagaagcagcagcaggaccaagtggaccgcaacatcaaggaggctcgtgagaagctggagatggagatggaagctgcacgccatgagcaccaggtcatgctaatgagacaggatttgatgaggcgccaagaagaacttcggaggatggaagagctgcacaaccaagaggtgcaaaaacgaaagcaactggagctcaggcaggaggaagagcgcaggcgccgtgaagaagagatgcggcggcagcaagaagaaatgatgcggcgacagcaggaaggattcaagggaaccttccctgatgcgagagagcaggagattcggatgggtcagatggctatgggaggtgctatgggcataaacaacagaggtgccatgccccctgctcctgtgccagctggtaccccagctcctccaggacctgccactatgatgccggatggaactttgggattgaccccaccaacaactgaacgctttggtcaggctgctacaatggaaggaattggggcaattggtggaactcctcctgcattcaaccgtgcagctcctggagctgaatttgccccaaacaaacgtcgccgatactaataagttgcagtgtctagtttctcaaaacccttaaaagaaggaccctttttggactagccagaattctaccctggaaaagtgttagggattccttccaatagttagatctaccctgcctgtactactctagggagtatgctggaggcagagggcaagggaggggtggtattaaacaagtcaattctgtgtggtatattgtttaatcagttctgtgtggtgcattcctgaagtctctaatgtgactgttgagggcctggggaaaccatggcaaagtggatccagttagagcccattaatcttgatcattccggtttttttttttttggtccatcttgtttcatttgcttgccccgcccccgagacggagtcttactctgtcgcccaggctggagtgtagtggcatgatctcggctcactgcaatctctgcctcccgggttcaagcttgtccaggttgatcttgaactcctgacctcgtgatctacccacctcggcctcccaaaatgctgggattacaggggtgagccaccgtgcccaacctcacttgcttcttatccttacactcccccagccccagagaaactgccacatacaccacaaaaaccaaacatcccccaatgaccttagccccattgctccattcactcccaggtgagaattcaggcaaacgtccacaaaggtcacaggcagcgtacatacggttctgttataccccatatattaccccttcatgtcctaaagaagacattttctcttagagattttcattttagtgtatctttaaaaaaaaatcttgtgttaacttgcctccatctttttcttgggtgaggacacccaggaatgacccttttgtgtctatgatgttgctgttcacagcttttcttgataggcctagtacaatcttgggaacagggttactgtatactgaaggtctgacagtagctcttagactcgcctatcttaggtagtcatgctgtgcattttttttttcattggtgtactgtgtttgatttgtctcatatatttggagtttttctgaaaaatggagcagtaatgcagcatcaacctattaaaatacattttaagccttttaa

SEQ ID NO: 324855 - DNA, 2542 bp, Homo sapiens
tcggcaggtagcgagcggttatcgccgaggggagaggccggtcgtccttactccaaatagtctaaatcgtaagcggacactctcctcgaatagtgcaaatcattactacgaacacaatcgaaaatcatcaatcaaccagcagcagcaccaagcagccagccgccgccacaccgcctctgcagggccgcatgaaggcttgactattgacctgaagaattttagaaaaccaggagagaagaccttcacccaacgaagccgtctttttgtgggaaatcttcctcccgacatcactgaggaagaaatgaggaaactatttgagaaatatggaaaggcaggcgaagtcttcattcataaggataaaggatttggctttatccgcttggaaacccgaaccctagcggagattgccaaagtggagctggacaatatgccactccgtggaaagcagctgcgtgtgcgctttgcctgccatagtgcatcccttacagttcgaaaccttcctcagtatgtgtccaacgaactgctggaagaagccttttctgtgtttggccaggtagagagggctgtagtcattgtggatgatcgaggaaggccctcaggaaaaggcattgttgagttctcagggaagccagctgctcggaaagctctggacagatgcagtgaaggctccttcctgctaaccacatttcctcgtcctgtgactgtggagcccatggaccagttagatgatgaagagggacttccagagaagctggttataaaaaaccagcaatttcacaaggaacgagagcagccacccagatttgcacagcctggctcctttgagtatgaatatgccatgcgctggaaggcactcattgagatggagaagcagcagcaggaccaagtggaccgcaacatcaaggaggctcgtgagaagctggagatggagatggaagctgcacgccatgagcaccaggtcatgctaatgagacaggatttgatgaggcgccaagaagaacttcggaggatggaagagctgcacaaccaagaggtgcaaaaacgaaagcaactggagctcaggcaggaggaagagcgcaggcgccgtgaagaagagatgcggcggcagcaagaagaaatgatgcggcgacagcaggaaggattcaagggaaccttccctgatgcgagagagcaggagattcggatgggtcagatggctatgggaggtgctatgggcataaacaacagaggtgccatgccccctgctcctgtgccagctggtaccccagctcctccaggacctgccactatgatgccggatggaactttgggattgaccccaccaacaactgaacgctttggtcaggctgctacaatggaaggaattggggcaattggtggaactcctcctgcattcaaccgtgcagctcctggagctgaatttgccccaaacaaacgtcgccgatactaataagttgcagtgtctagtttctcaaaacccttaaaagaaggaccctttttggactagccagaattctaccctggaaaagtgttagggattccttccaatagttagatctaccctgcctgtactactctagggagtatgctggaggcagagggcaagggaggggtggtattaaacaagtcaattctgtgtggtatattgtttaatcagttctgtgtggtgcattcctgaagtctctaatgtgactgttgagggcctggggaaaccatggcaaagtggatccagttagagcccattaatcttgatcattccggtttttttttttttggtccatcttgtttcatttgcttgccccgcccccgagacggagtcttactctgtcgcccaggctggagtgtagtggcatgatctcggctcactgcaatctctgcctcccgggttcaagcttgtccaggttgatcttgaactcctgacctcgtgatctacccacctcggcctcccaaaatgctgggattacaggggtgagccaccgtgcccaacctcacttgcttcttatccttacactcccccagccccagagaaactgccacatacaccacaaaaaccaaacatcccccaatgaccttagccccattgctccattcactcccaggtgagaattcaggcaaacgtccacaaaggtcacaggcagcgtacatacggttctgttataccccatatattaccccttcatgtcctaaagaagacattttctcttagagattttcattttagtgtatctttaaaaaaaaatcttgtgttaacttgcctccatctttttcttgggtgaggacacccaggaatgacccttttgtgtctatgatgttgctgttcacagcttttcttgataggcctagtacaatcttgggaacagggttactgtatactgaaggtctgacagtagctcttagactcgcctatcttaggtagtcatgctgtgcattttttttttcattggtgtactgtgtttgatttgtctcatatatttggagtttttctgaaaaatggagcagtaatgcagcatcaacctattaaaatacattttaagccttttaa

SEQ ID NO: 324856 - DNA, 2620 bp, Homo sapiens
ggggaagggaagaaaaaactataggctaggtacgaggctgggtgtcgggagaggccgtgtagcgtcgccgttactccgaggagataccagtcggtagaggagaagtcgaggttagagggaactgggaggcactttgctgtctgcaatcgaagttgagggtgcaaaaatgcagagtaataaaacttttaacttggagaagcaaaaccatactccaagaaagcatcatcaacatcaccaccagcagcagcaccaccagcagcaacagcagcagccgccaccaccgccaatacctgcaaatgggcaacaggccagcagccaaaatgaaggcttgactattgacctgaagaattttagtcctcccgacatcactgaggaagaaatgaggaaactatttgagaaatatggaaaggcaggcgaagtcttcattcataaggataaaggatttggctttatccgcttggaaacccgaaccctagcggagattgccaaagtggagctggacaatatgccactccgtggaaagcagctgcgtgtgcgctttgcctgccatagtgcatcccttacagttcgaaaccttcctcagtatgtgtccaacgaactgctggaagaagccttttctgtgtttggccaggtagagagggctgtagtcattgtggatgatcgaggaaggccctcaggaaaaggcattgttgagttctcagggaagccagctgctcggaaagctctggacagatgcagtgaaggctccttcctgctaaccacatttcctcgtcctgtgactgtggagcccatggaccagttagatgatgaagagggacttccagagaagctggttataaaaaaccagcaatttcacaaggaacgagagcagccacccagatttgcacagcctggctcctttgagtatgaatatgccatgcgctggaaggcactcattgagatggagaagcagcagcaggaccaagtggaccgcaacatcaaggaggctcgtgagaagctggagatggagatggaagctgcacgccatgagcaccaggtcatgctaatgagacaggatttgatgaggcgccaagaagaacttcggaggatggaagagctgcacaaccaagaggtgcaaaaacgaaagcaactggagctcaggcaggaggaagagcgcaggcgccgtgaagaagagatgcggcggcagcaagaagaaatgatgcggcgacagcaggaaggattcaagggaaccttccctgatgcgagagagcaggagattcggatgggtcagatggctatgggaggtgctatgggcataaacaacagaggtgccatgccccctgctcctgtgccagctggtaccccagctcctccaggacctgccactatgatgccggatggaactttgggattgaccccaccaacaactgaacgctttggtcaggctgctacaatggaaggaattggggcaattggtggaactcctcctgcattcaaccgtgcagctcctggagctgaatttgccccaaacaaacgtcgccgatactaataagttgcagtgtctagtttctcaaaacccttaaaagaaggaccctttttggactagccagaattctaccctggaaaagtgttagggattccttccaatagttagatctaccctgcctgtactactctagggagtatgctggaggcagagggcaagggaggggtggtattaaacaagtcaattctgtgtggtatattgtttaatcagttctgtgtggtgcattcctgaagtctctaatgtgactgttgagggcctggggaaaccatggcaaagtggatccagttagagcccattaatcttgatcattccggtttttttttttttggtccatcttgtttcatttgcttgccccgcccccgagacggagtcttactctgtcgcccaggctggagtgtagtggcatgatctcggctcactgcaatctctgcctcccgggttcaagcttgtccaggttgatcttgaactcctgacctcgtgatctacccacctcggcctcccaaaatgctgggattacaggggtgagccaccgtgcccaacctcacttgcttcttatccttacactcccccagccccagagaaactgccacatacaccacaaaaaccaaacatcccccaatgaccttagccccattgctccattcactcccaggtgagaattcaggcaaacgtccacaaaggtcacaggcagcgtacatacggttctgttataccccatatattaccccttcatgtcctaaagaagacattttctcttagagattttcattttagtgtatctttaaaaaaaaatcttgtgttaacttgcctccatctttttcttgggtgaggacacccaggaatgacccttttgtgtctatgatgttgctgttcacagcttttcttgataggcctagtacaatcttgggaacagggttactgtatactgaaggtctgacagtagctcttagactcgcctatcttaggtagtcatgctgtgcattttttttttcattggtgtactgtgtttgatttgtctcatatatttggagtttttctgaaaaatggagcagtaatgcagcatcaacctattaaaatacattttaagccttttaa

SEQ ID NO: 324857 - DNA, 1512 bp, Homo sapiens
  misc_feature (1499)..(1499): n is a, c, g, or t
ggggaagggaagaaaaaactataggctaggtacgaggctgggtgtcgggagaggccgtgtagcgtcgccgttactccgaggagataccagtcggtagaggagaagtcgaggttagagggaactgggaggcactttgctgtctgcaatcgaagttgagggtgcaaaaatgcagagtaataaaacttttaacttggagaagcaaaaccatactccaagaaagcatcatcaacatcaccaccagcagcagcaccaccagcagcaacagcagcagccgccaccaccgccaatacctgcaaatgggcaacaggccagcagccaaaatgaaggcttgactattgacctgaagaattttagaaaaccaggagagaagaccttcacccaacgaagccgtctttttgtgggaaatcttcctcccgacatcactgaggaagaaatgaggaaactatttgagaaatatggaaaggcaggcgaagtcttcattcataaggataaaggatttggctttatccgcttggaaacccgaaccctagcggagattgccaaagtggagctggacaatatgccactccgtggaaagcagctgcgtgtgcgctttgcctgccatagtgcatcccttacagttcgaaaccttcctcagtatgtgtccaacgaactgctggaagaagccttttctgtgtttggccaggtagagagggctgtagtcattgtggatgatcgaggaaggccctcaggaaaaggcattgttgagttctcagggaagccagctgctcggaaagctctggacagatgcagtgaaggctccttcctgctaaccacatttcctcgtcctgtgactgtggagcccatggaccagttagatgatgaagagggacttccagagaagctggttataaaaaaccagcaatttcacaaggaacgagagcagccacccagatttgcacagcctggctcctttgagtatgaatatgccatgcgctggaaggcactcattgagatggagaagcagcagcaggaccaagtggaccgcaacatcaaggaggctcgtgagaagctggagatggagatggaagctgcacgccatgagcaccaggtcatgctaatgagacaggatttgatgaggcgccaagaagaacttcggaggatggaagagctgcacaaccaagaggtgcaaaaacgaaagcaactggagctcaggcaggaggaagagcgcaggcgccgtgaagaagagatgcggcggcagcaagaagaaatgatgcggcgacagcaggaaggattcaagggaaccttccctgatgcgagagagcaggagattcggatgggtcagatggctatgggaggtgctatgggcataaacaacagaggtgccatgccccctgctcctgtgccagctggtaccccagctcctccaggacctgccactatgatgccggatggaactttgggattgaccccaccaacaactgacgctttggtcaggctgctattgctgtgaatggggngtactctagagtg

SEQ ID NO: 324858 - DNA, 2240 bp, Homo sapiens
tgatgttatgtgcaggttccggtcggtcgtcacactaataattcattcataaggataaaggatttggctttatccgcatggaaacccgaaccctagcggagattgccaaagtggagctggacaatatgccactccgtggaaagcagctgcgtgtgcgctttgcctgccatagtgcatcccttacagttcgaaaccttcctcagtatgtgtccaacgaactgctggaagaagccttttctgtgtttggccaggtagagagggctgtagtcattgtggatgatcgaggaaggccctcaggaaaaggcattgttgagttctcagggaagccagctgctcggaaagctctggacagatgcagtgaaggctccttcctgctaaccacatttcctcgtcctgtgactgtggagcccatggaccagttagatgatgaagagggacttccagagaagctggttataaaaaaccagcaatttcacaaggaacgagagcagccacccagatttgcacagcctggctcctttgagtatgaatatgccatgcgctggaaggcactcattgagatggagaagcagcagcaggaccaagtggaccgcaacatcaaggaggctcgtgagaagctggagatggagatggaagctgcacgccatgagcaccaggtcatgctaatgagacaggatttgatgaggcgccaagaagaacttcggaggatggaagagctgcacaaccaagaggtgcaaaaacgaaagcaactggagctcaggcaggaggaagagcgcaggcgccgtgaagaagagatgcggcggcagcaagaagaaatgatgcggcgacagcaggaaggattcaagggaaccttccctgatgcgagagagcaggagattcggatgggtcagatggctatgggaggtgctatgggcataaacaacagaggtgccatgccccctgctcctgtgccagctggtaccccagctcctccaggacctgccactatgatgccggatggaactttgggattgaccccaccaacaactgaacgctttggtcaggctgctacaatggaaggaattggggcaattggtggaactcctcctgcattcaaccgtgcagctcctggagctgaatttgccccaaacaaacgtcgccgatactaataagttgcagtgtctagtttctcaaaacccttaaaagaaggaccctttttggactagccagaattctaccctggaaaagtgttagggattccttccaatagttagatctaccctgcctgtactactctagggagtatgctggaggcagagggcaagggaggggtggtattaaacaagtcaattctgtgtggtatattgtttaatcagttctgtgtggtgcattcctgaagtctctaatgtgactgttgagggcctggggaaaccatggcaaagtggatccagttagagcccattaatcttgatcattccggtttttttttttttggtccatcttgtttcatttgcttgccccgcccccgagacggagtcttactctgtcgcccaggctggagtgtagtggcatgatctcggctcactgcaatctctgcctcccgggttcaagcttgtccaggttgatcttgaactcctgacctcgtgatctacccacctcggcctcccaaaatgctgggattacaggggtgagccaccgtgcccaacctcacttgcttcttatccttacactcccccagccccagagaaactgccacatacaccacaaaaaccaaacatcccccaatgaccttagccccattgctccattcactcccaggtgagaattcaggcaaacgtccacaaaggtcacaggcagcgtacatacggttctgttataccccatatattaccccttcatgtcctaaagaagacattttctcttagagattttcattttagtgtatctttaaaaaaaaatcttgtgttaacttgcctccatctttttcttgggtgaggacacccaggaatgacccttttgtgtctatgatgttgctgttcacagcttttcttgataggcctagtacaatcttgggaacagggttactgtatactgaaggtctgacagtagctcttagactcgcctatcttaggtagtcatgctgtgcattttttttttcattggtgtactgtgtttgatttgtctcatatatttggagtttttctgaaaaatggagcagtaatgcagcatcaacctattaaaatacattttaagccttttaa

SEQ ID NO: 324859 - DNA, 1800 bp, Homo sapiens
ggggaagggaagaaaaaactataggctaggtacgaggctgggtgtcgggagaggccgtgtagcgtcgccgttactccgaggagataccagtcggtagaggagaagtcgaggttagagggaactgggaggcactttgctgtctgcaatcgaagttgagggtgcaaaaatgcagagtaataaaacttttaacttggagaagcaaaaccatactccaagaaagcatcatcaacatcaccaccagcagcagcaccaccagcagcaacagcagcagccgccaccaccgccaatacctgcaaatgggcaacaggccagcagccaaaatgaaggcttgactattgacctgaagaattttagaaaaccaggagagaagaccttcacccaacgaagccgtctttttgtgggaaatcttcctcccgacatcactgaggaagaaatgaggaaactatttgagaaatatggaaaggcaggcgaagtcttcattcataaggataaaggatttggctttatccgcttggaaacccgaaccctagcggagattgccaaagtggagctggacaatatgccactccgtggaaagcagctgcgtgtgcgctttgcctgccatagtgcatcccttacagttcgaaaccttcctcagtatgtgtccaacgaactgctggaagaagccttttctgtgtttggccaggtagagagggctgtagtcattgtggatgatcgaggaaggccctcaggaaaaggcattgttgagttctcagggaagccagctgctcggaaagctctggacagatgcagtgaaggctccttcctgctaaccacatttcctcgtcctgtgactgtggagcccatggaccagttagatgatgaagagggacttccagagaagctggttataaaaaaccagcaatttcacaaggaacgagagcagccacccagatttgcacagcctggctcctttgagtatgaatatgccatgcgctggaaggcactcattgagatggagaagcagcagcaggaccaagtggaccgcaacatcaaggaggctcgtgagaagctggagatggagatggaagctgcacgccatgagcaccaggtcatgctaatgagacaggatttgatgaggcgccaagaagaacttcggaggatggaagagctgcacaaccaagaggtgcaaaaacgaaagcaactggagctcaggcaggaggaagagcgcaggcgccgtgaagaagagatgcggcggcagcaagaagaaatgatgcggcgacagcaggaaggattcaagggaaccttccctgatgcggtatatctcccatgtgcccgtgatgtaccagaccagtcctgataaactcaccatgaattgtctgctaggttaccggttatgaccaattttcccgtgttgtgaaataaccctttagaaaaaagaattcataagaaggagaggtaaggtttgaagaggagatcttgcctcacaagcaatataggatgaaaaactgggtctgctgtattctgtttagactcagtgactataggaagagatatgcaaccttggctagtcctctgctgtccttgcaattgtacaagttggagcttcagaagcaatctcttccccctttcacctctctgttgctaataggaggctctggcttacgtcctagtagctctgtgaccttgaatttgttgcacaactagcaagggttttgagaaactagacactgcaacttattagtatcggcgacgtttgtttggggcaaattcagctccaggagctgaacggttgaatgcaggaggagttccagcaattgc

SEQ ID NO: 324860 - DNA, 2018 bp, Homo sapiens
ggggaagggaagaaaaaactataggctaggtacgaggctgggtgttcattgtggatgatcgaggaaggccctcaggaaaaggcattgttgagttctcagggaagccagctgctcggaaagctctggacagatgcagtgaaggctccttcctgctaaccacatttcctcgtcctgtgactgtggagcccatggaccagttagatgatgaagagggacttccagagaagctggttataaaaaaccagcaatttcacaaggaacgagagcagccacccagatttgcacagcctggctcctttgagtatgaatatgccatgcgctggaaggcactcattgagatggagaagcagcagcaggaccaagtggaccgcaacatcaaggaggctcgtgagaagctggagatggagatggaagctgcacgccatgagcaccaggtcatgctaatgagacaggatttgatgaggcgccaagaagaacttcggaggatggaagagctgcacaaccaagaggtgcaaaaacgaaagcaactggagctcaggcaggaggaagagcgcaggcgccgtgaagaagagatgcggcggcagcaagaagaaatgatgcggcgacagcaggaaggattcaagggaaccttccctgatgcgagagagcaggagattcggatgggtcagatggctatgggaggtgctatgggcataaacaacagaggtgccatgccccctgctcctgtgccagctggtaccccagctcctccaggacctgccactatgatgccggatggaactttgggattgaccccaccaacaactgaacgctttggtcaggctgctacaatggaaggaattggggcaattggtggaactcctcctgcattcaaccgtgcagctcctggagctgaatttgccccaaacaaacgtcgccgatactaataagttgcagtgtctagtttctcaaaacccttaaaagaaggaccctttttggactagccagaattctaccctggaaaagtgttagggattccttccaatagttagatctaccctgcctgtactactctagggagtatgctggaggcagagggcaagggaggggtggtattaaacaagtcaattctgtgtggtatattgtttaatcagttctgtgtggtgcattcctgaagtctctaatgtgactgttgagggcctggggaaaccatggcaaagtggatccagttagagcccattaatcttgatcattccggtttttttttttttggtccatcttgtttcatttgcttgccccgcccccgagacggagtcttactctgtcgcccaggctggagtgtagtggcatgatctcggctcactgcaatctctgcctcccgggttcaagcttgtccaggttgatcttgaactcctgacctcgtgatctacccacctcggcctcccaaaatgctgggattacaggggtgagccaccgtgcccaacctcacttgcttcttatccttacactcccccagccccagagaaactgccacatacaccacaaaaaccaaacatcccccaatgaccttagccccattgctccattcactcccaggtgagaattcaggcaaacgtccacaaaggtcacaggcagcgtacatacggttctgttataccccatatattaccccttcatgtcctaaagaagacattttctcttagagattttcattttagtgtatctttaaaaaaaaatcttgtgttaacttgcctccatctttttcttgggtgaggacacccaggaatgacccttttgtgtctatgatgttgctgttcacagcttttcttgataggcctagtacaatcttgggaacagggttactgtatactgaaggtctgacagtagctcttagactcgcctatcttaggtagtcatgctgtgcattttttttttcattggtgtactgtgtttgatttgtctcatatatttggagtttttctgaaaaatggagcagtaatgcagcatcaacctattaaaatacattttaagccttttaa

SEQ ID NO: 324861 - DNA, 1245 bp, Homo sapiens
ggggaagggaagaaaaaactataggctaggtacgaggctgggtgtcgggagaggccgtgtagcgtcgccgttactccgaggagataccagtcggtagaggagaagtcgaggttagagggaactgggaggcactttgctgtctgcaatcgaagttgagggtgcaaaaatgcagagtaataaaacttttaacttggagaagcaaaaccatactccaagaaagcatcatcaacatcaccaccagcagcagcaccaccagcagcaacagcagcagccgccaccaccgccaatacctgcaaatgggcaacaggccagcagccaaaatgaaggcttgactattgacctgaagaattttagaaaaccaggagagaagaccttcacccaacgaagccgtctttttgtgggaaatcttcctcccgacatcactgaggaagaaatgaggaaactatttgagaaatatggaaaggcaggcgaagtcttcattcataaggataaaggatttggctttatccgcttggaaacccgaaccctagcggagattgccaaagtggagctggacaatatgccactccgtggaaagcagctgcgtgtgcgctttgcctgccatagtgcatcccttacagttcgaaaccttcctcagtatgtgtccaacgaactgctggaagaagccttttctgtgtttggccaggtagagagggctgtagtcattgtggatgatcgaggaaggccctcaggaaaaggcattgttgagttctcagggaagccagctgctcggaaagctctggacagatgcagtgaaggctccttcctgctaaccacatttcctcgtcctgtgactgtggagcccatggaccagttagatgatgaagagggacttccagagaagctggttataaaaaaccagcaatttcacaaggaacgagagcagccacccagatttgcacagcctggctcctttgagtatgaatatgccatgcgctggaaggcactcattgagatggagaagcagcagcaggaccaagtggaccgcaacatcaaggaggctcgtgagaagctggagatggagatggaagctgcacgccatgagcaccaggtcatgctaatgagacaggatttgatgaggcgccaagaagaacttcggaggatggaagagctgcacaaccaagaggtgcaaaaacgaaagcaactggagctcagccgggaggaagagccgacggcccgtgaagatagtagtaggcgcagcgggat

SEQ ID NO: 324862 - DNA, 1359 bp, Homo sapiens
ggggaagggaagaaaaaactataggctaggtacgaggctgggtgtcgggagaggccgtgtagcgtcgccgttactccgaggagataccagtcggtagaggagaagtcgaggttagagggaactgggaggcactttgctgtctgcaatcgaagttgagggtgcaaaaatgcagagtaataaaacttttaacttggagaagcaaaaccatactccaagaaagcatcatcaacatcaccaccagcagcagcaccaccagcagcaacagcagcagccgccaccaccgccaatacctgcaaatgggcaacaggccagcagccaaaatgaaggcttgactattgacctgaagaattttagaaaaccaggagagaagaccttcacccaacgaagccgtctttttgtgggaaatcttcctcccgacatcactgaggaagaaatgaggaaactatttgagaaatatggaaaggcaggcgaagtcttcattcataaggataaaggatttggctttatccgcttggaaacccgaaccctagcggagattgccaaagtggagctggacaatatgccactccgtggaaagcagctgcgtgtgcgctttgcctgccatagtgcatcccttacagttcgaaaccttcctcagtatgtgtccaacgaactgctggaagaagccttttctgtgtttggccaggtagagagggctgtagtcattgtggatgatcgaggaaggccctcaggaaaaggcattgttgagttctcagggaagccagctgctcggaaagctctggacagatgcagtgaaggctccttcctgctaaccacatttcctcgtcctgtgactgtggagcccatggaccagttagatgatgaagagggacttccagagaagctggttataaaaaaccagcaatttcacaaggaacgagagcagccacccagatttgcacagcctggctcctttgagtatgaatatgccatgcgctggaaggcactcattgagatggagaagcagcagcaggaccaagtggaccgcaacatcaaggaggctcgtgagaagctggagatggagatggaagctgcacgccatgagcaccaggtcatgctaatgagacaggatttgatgaggcgccaagaagaacgttcacagcttttcttgataggcctagtacaatcttgggaacagggttactgtatactgaaggtctgacagtagctcttagactcgcctatcttaggtagtcatgctgtgcattttttttttcattggtgtactgtgtttgatttgtctcatatatttggagtttttctgaaaaatggagcagtaatgcagcatcaacctattaaaatacattttaagccttttaa

SEQ ID NO: 324863 - DNA, 1287 bp, Homo sapiens
ggggaagggaagaaaaaactataggctaggtacgaggctgggtgtcgggagaggccgtgtagcgtcgccgttactccgaggagataccagtcggtagaggagaagtcgaggttagagggaactgggaggcactttgctgtctgcaatcgaagttgagggtgcaaaaatgcagagtaataaaacttttaacttggagaagcaaaaccatactccaagaaagcatcatcaacatcaccaccagcagcagcaccaccagcagcaacagcagcagccgccaccaccgccaatacctgcaaatgggcaacaggccagcagccaaaatgaaggcttgactattgacctgaagaattttagaaaaccaggagagaagaccttcacccaacgaagccgtctttttgtgggaaatcttcctcccgacatcactgaggaagaaatgaggaaactatttgagaaatatggaaaggcaggcgaagtcttcattcataaggataaaggatttggctttatccgcttggaaacccgaaccctagcggagattgccaaagtggagctggacaatatgccactccgtggaaagcagctgcgtgtgcgctttgcctgccatagtgcatcccttacagttcgaaaccttcctcagtatgtgtccaacgaactgctggaagaagccttttctgtgtttggccaggtagagagggctgtagtcattgtggatgatcgaggaaggccctcaggaaaaggcattgttgagttctcagggaagccagctgctcggaaagctctggacagatgcagtgaaggctccttcctgctaaccacatttcctcgtcctgtgactgtggagcccatggaccagttagatgatgaagagggacttccagagaagctggttataaaaaaccagcaatttcacaaggaacgagagcagccacccagatttgcacagcctggctcctttgagtatgaatatgccatgcgctggaaggcactcattgagatggagaagcagcagcaggaccaagtggaccgcaacatcaaggaggctcgtgagaagctggagatggagatggaagctgcacgccatgagcaccaggtcatgctaatgagacaggtttgtggggccagaaaattggggtaggaaagcggacacccagtggcaaggaagctctgggcgcgggaacgggccgcgaacaaatcgggccacaaataaatggccacggtaggtagacacactgtgcaaaacaccggcaccagagagtgtaacaagacaccgctccggcaccaccaata

SEQ ID NO: 324864 - DNA, 1148 bp, Homo sapiens
ggggaagggaagaaaaaactataggctaggtacgaggctgggtgtcgggagaggccgtgtagcgtcgccgttactccgaggagataccagtcggtagaggagaagtcgaggttagagggaactgggaggcactttgctgtctgcaatcgaagttgagggtgcaaaaatgcagagtaataaaacttttaacttggagaagcaaaaccatactccaagaaagcatcatcaacatcaccaccagcagcagcaccaccagcagcaacagcagcagccgccaccaccgccaatacctgcaaatgggcaacaggccagcagccaaaatgaaggcttgactattgacctgaagaattttagaaaaccaggagagaagaccttcacccaacgaagccgtctttttgtgggaaatcttcctcccgacatcactgaggaagaaatgaggaaactatttgagaaatatggaaaggcaggcgaagtcttcattcataaggataaaggatttggctttatccgcttggaaacccgaaccctagcggagattgccaaagtggagctggacaatatgccactccgtggaaagcagctgcgtgtgcgctttgcctgccatagtgcatcccttacagttcgaaaccttcctcagtatgtgtccaacgaactgctggaagaagccttttctgtgtttggccaggtagagagggctgtagtcattgtggatgatcgaggaaggccctcaggaaaaggcattgttgagttctcagggaagccagctgctcggaaagctctggacagatgcagtgaaggctccttcctgctaaccacatttcctcgtcctgtgactgtggagcccatggaccagttagatgatgaagagggacttccagagaagctggttataaaaaaccagcaatttcacaaggaacgagagcagccacccagatttgcacagcctggctcctttgagtatgaatatgccatgcgctggaaggcactcattgagatggagaagcagcagcaggaccaagtggaccgcaacatcaaggaggctcgtgagaagctggagatggagatggaagctgcacgccatgagcactgcagataattatgactatgactaatgagtgtacactgcacatcgaatactctgaacagca

SEQ ID NO: 324865 - DNA, 1827 bp, Homo sapiens
ccctccaacaccagcagcccctccgactgctactacggccctgaggacccccagcaatttcacaaggaacgagagcagccacccagatttgcacagcctggctcctttgagtatgaatatgccatgcgctggaaggcactcattgagatggagaagcagcagcaggaccaagtggaccgcaacatcaaggaggctcgtgagaagctggagatggagatggaagctgcacgccatgagcaccaggtcatgctaatgagacaggatttgatgaggcgccaagaagaacttcggaggatggaagagctgcacaaccaagaggtgcaaaaacgaaagcaactggagctcaggcaggaggaagagcgcaggcgccgtgaagaagagatgcggcggcagcaagaagaaatgatgcggcgacagcaggaaggattcaagggaaccttccctgatgcgagagagcaggagattcggatgggtcagatggctatgggaggtgctatgggcataaacaacagaggtgccatgccccctgctcctgtgccagctggtaccccagctcctccaggacctgccactatgatgccggatggaactttgggattgaccccaccaacaactgaacgctttggtcaggctgctacaatggaaggaattggggcaattggtggaactcctcctgcattcaaccgtgcagctcctggagctgaatttgccccaaacaaacgtcgccgatactaataagttgcagtgtctagtttctcaaaacccttaaaagaaggaccctttttggactagccagaattctaccctggaaaagtgttagggattccttccaatagttagatctaccctgcctgtactactctagggagtatgctggaggcagagggcaagggaggggtggtattaaacaagtcaattctgtgtggtatattgtttaatcagttctgtgtggtgcattcctgaagtctctaatgtgactgttgagggcctggggaaaccatggcaaagtggatccagttagagcccattaatcttgatcattccggtttttttttttttggtccatcttgtttcatttgcttgccccgcccccgagacggagtcttactctgtcgcccaggctggagtgtagtggcatgatctcggctcactgcaatctctgcctcccgggttcaagcttgtccaggttgatcttgaactcctgacctcgtgatctacccacctcggcctcccaaaatgctgggattacaggggtgagccaccgtgcccaacctcacttgcttcttatccttacactcccccagccccagagaaactgccacatacaccacaaaaaccaaacatcccccaatgaccttagccccattgctccattcactcccaggtgagaattcaggcaaacgtccacaaaggtcacaggcagcgtacatacggttctgttataccccatatattaccccttcatgtcctaaagaagacattttctcttagagattttcattttagtgtatctttaaaaaaaaatcttgtgttaacttgcctccatctttttcttgggtgaggacacccaggaatgacccttttgtgtctatgatgttgctgttcacagcttttcttgataggcctagtacaatcttgggaacagggttactgtatactgaaggtctgacagtagctcttagactcgcctatcttaggtagtcatgctgtgcattttttttttcattggtgtactgtgtttgatttgtctcatatatttggagtttttctgaaaaatggagcagtaatgcagcatcaacctattaaaatacattttaagccttttaa

SEQ ID NO: 324866 - DNA, 1647 bp, Homo sapiens
gtatctaaggatccggtgtttcgatgccacgggcacactgcagcgtgtagcaccaggcctgagcagaagatgagcttgccctcgcttggcttagacctgtacgccattcggaggatggaagagctgcacaaccaagaggtgcaaaaacgaaagcaactggagctcaggcaggaggaagagcgcaggcgccgtgaagaagagatgcggcggcagcaagaagaaatgatgcggcgacagcaggaaggattcaagggaaccttccctgatgcgagagagcaggagattcggatgggtcagatggctatgggaggtgctatgggcataaacaacagaggtgccatgccccctgctcctgtgccagctggtaccccagctcctccaggacctgccactatgatgccggatggaactttgggattgaccccaccaacaactgaacgctttggtcaggctgctacaatggaaggaattggggcaattggtggaactcctcctgcattcaaccgtgcagctcctggagctgaatttgccccaaacaaacgtcgccgatactaataagttgcagtgtctagtttctcaaaacccttaaaagaaggaccctttttggactagccagaattctaccctggaaaagtgttagggattccttccaatagttagatctaccctgcctgtactactctagggagtatgctggaggcagagggcaagggaggggtggtattaaacaagtcaattctgtgtggtatattgtttaatcagttctgtgtggtgcattcctgaagtctctaatgtgactgttgagggcctggggaaaccatggcaaagtggatccagttagagcccattaatcttgatcattccggtttttttttttttggtccatcttgtttcatttgcttgccccgcccccgagacggagtcttactctgtcgcccaggctggagtgtagtggcatgatctcggctcactgcaatctctgcctcccgggttcaagcttgtccaggttgatcttgaactcctgacctcgtgatctacccacctcggcctcccaaaatgctgggattacaggggtgagccaccgtgcccaacctcacttgcttcttatccttacactcccccagccccagagaaactgccacatacaccacaaaaaccaaacatcccccaatgaccttagccccattgctccattcactcccaggtgagaattcaggcaaacgtccacaaaggtcacaggcagcgtacatacggttctgttataccccatatattaccccttcatgtcctaaagaagacattttctcttagagattttcattttagtgtatctttaaaaaaaaatcttgtgttaacttgcctccatctttttcttgggtgaggacacccaggaatgacccttttgtgtctatgatgttgctgttcacagcttttcttgataggcctagtacaatcttgggaacagggttactgtatactgaaggtctgacagtagctcttagactcgcctatcttaggtagtcatgctgtgcattttttttttcattggtgtactgtgtttgatttgtctcatatatttggagtttttctgaaaaatggagcagtaatgcagcatcaacctattaaaatacattttaagccttttaa

SEQ ID NO: 324867 - DNA, 1580 bp, Homo sapiens
ggggaagggaagaaaaaactataggctaggtacgaggctgggtgtcgggagaggccgtgtagcgtcgccgttactccgaggagataccagtcggtagagggcaggaggaagagcgcaggcgccgtgaagaagagatgcggcggcagcaagaagaaatgatgcggcgacagcaggaaggattcaagggaaccttccctgatgcgagagagcaggagattcggatgggtcagatggctatgggaggtgctatgggcataaacaacagaggtgccatgccccctgctcctgtgccagctggtaccccagctcctccaggacctgccactatgatgccggatggaactttgggattgaccccaccaacaactgaacgctttggtcaggctgctacaatggaaggaattggggcaattggtggaactcctcctgcattcaaccgtgcagctcctggagctgaatttgccccaaacaaacgtcgccgatactaataagttgcagtgtctagtttctcaaaacccttaaaagaaggaccctttttggactagccagaattctaccctggaaaagtgttagggattccttccaatagttagatctaccctgcctgtactactctagggagtatgctggaggcagagggcaagggaggggtggtattaaacaagtcaattctgtgtggtatattgtttaatcagttctgtgtggtgcattcctgaagtctctaatgtgactgttgagggcctggggaaaccatggcaaagtggatccagttagagcccattaatcttgatcattccggtttttttttttttggtccatcttgtttcatttgcttgccccgcccccgagacggagtcttactctgtcgcccaggctggagtgtagtggcatgatctcggctcactgcaatctctgcctcccgggttcaagcttgtccaggttgatcttgaactcctgacctcgtgatctacccacctcggcctcccaaaatgctgggattacaggggtgagccaccgtgcccaacctcacttgcttcttatccttacactcccccagccccagagaaactgccacatacaccacaaaaaccaaacatcccccaatgaccttagccccattgctccattcactcccaggtgagaattcaggcaaacgtccacaaaggtcacaggcagcgtacatacggttctgttataccccatatattaccccttcatgtcctaaagaagacattttctcttagagattttcattttagtgtatctttaaaaaaaaatcttgtgttaacttgcctccatctttttcttgggtgaggacacccaggaatgacccttttgtgtctatgatgttgctgttcacagcttttcttgataggcctagtacaatcttgggaacagggttactgtatactgaaggtctgacagtagctcttagactcgcctatcttaggtagtcatgctgtgcattttttttttcattggtgtactgtgtttgatttgtctcatatatttggagtttttctgaaaaatggagcagtaatgcagcatcaacctattaaaatacattttaagccttttaa

SEQ ID NO: 324868 - DNA, 1452 bp, Homo sapiens
ctatgtcacaaggtcgtgacatggaataacacgtctcctgtccggaagtattcatggggaaccttccctgatgcgagagagcaggagattcggatgggtcagatggctatgggaggtgctatgggcataaacaacagaggtgccatgccccctgctcctgtgccagctggtaccccagctcctccaggacctgccactatgatgccggatggaactttgggattgaccccaccaacaactgaacgctttggtcaggctgctacaatggaaggaattggggcaattggtggaactcctcctgcattcaaccgtgcagctcctggagctgaatttgccccaaacaaacgtcgccgatactaataagttgcagtgtctagtttctcaaaacccttaaaagaaggaccctttttggactagccagaattctaccctggaaaagtgttagggattccttccaatagttagatctaccctgcctgtactactctagggagtatgctggaggcagagggcaagggaggggtggtattaaacaagtcaattctgtgtggtatattgtttaatcagttctgtgtggtgcattcctgaagtctctaatgtgactgttgagggcctggggaaaccatggcaaagtggatccagttagagcccattaatcttgatcattccggtttttttttttttggtccatcttgtttcatttgcttgccccgcccccgagacggagtcttactctgtcgcccaggctggagtgtagtggcatgatctcggctcactgcaatctctgcctcccgggttcaagcttgtccaggttgatcttgaactcctgacctcgtgatctacccacctcggcctcccaaaatgctgggattacaggggtgagccaccgtgcccaacctcacttgcttcttatccttacactcccccagccccagagaaactgccacatacaccacaaaaaccaaacatcccccaatgaccttagccccattgctccattcactcccaggtgagaattcaggcaaacgtccacaaaggtcacaggcagcgtacatacggttctgttataccccatatattaccccttcatgtcctaaagaagacattttctcttagagattttcattttagtgtatctttaaaaaaaaatcttgtgttaacttgcctccatctttttcttgggtgaggacacccaggaatgacccttttgtgtctatgatgttgctgttcacagcttttcttgataggcctagtacaatcttgggaacagggttactgtatactgaaggtctgacagtagctcttagactcgcctatcttaggtagtcatgctgtgcattttttttttcattggtgtactgtgtttgatttgtctcatatatttggagtttttctgaaaaatggagcagtaatgcagcatcaacctattaaaatacattttaagccttttaa

SEQ ID NO: 324869 - DNA, 1113 bp, Homo sapiens
ggggaagggaagaaaaaactataggctaggtacgaggctgggtgtcgggagaggccgtgtagcgtcgccgttactccgaggagataccagtcggtagaggagaagtcgaggttagagggaactgggaggcactttgctgtctgcaatcgaagttgagggtgcaaaaatgcagagtaataaaacttttaacttggagaagcaaaaccatactccaagaaagcatcatcaacatcaccaccagcagcagcaccaccagcagcaacagcagcagccgccaccaccgccaatacctgcaaatgggcaacaggccagcagccaaaatgaaggcttgactattgacctgaagaattttagaaaaccaggagagaagaccttcacccaacgaagccgtctttttgtgggaaatcttcctcccgacatcactgaggaagaaatgaggaaactatttgagaaatatggaaaggcaggcgaagtcttcattcataaggataaaggatttggctttatccgcttggaaacccgaaccctagcggagattgccaaagtggagctggacaatatgccactccgtggaaagcagctgcgtgtgcgctttgcctgccatagtgcatcccttacagttcgaaaccttcctcagtatgtgtccaacgaactgctggaagaagccttttctgtgtttggccaggtagagagggctgtagtcattgtggatgatcgaggaaggccctcaggaaaaggcattgttgagttctcagggaagccagctgctcggaaagctctggacagatgcagtgaaggctccttcctgctaaccacatttcctcgtcctgtgactgtggagcccatggaccagttagatgatgaagaggagtctgatgaggaagtggtgatgaaaaacaagaaatgtgttctagtctgggagggtacaggcaaagaccggagctttggagagatgaagtttaaacagtgttcttcagagaacatgggtcgtgagcattcaaaaagcatgggggtgaaccaattacgggaccttgggtgagtgatctgtgtaagagtccactgatggaaatactgaaggcctggctctcctccttggcttggccttcagtctct

SEQ ID NO: 324870 - DNA, 1279 bp, Homo sapiens
ccaggtagacctaacccaggtaacctaactgccggatggaactttgggattgaccccaccaacaactgaacgctttggtcaggctgctacaatggaaggaattggggcaattggtggaactcctcctgcattcaaccgtgcagctcctggagctgaatttgccccaaacaaacgtcgccgatactaataagttgcagtgtctagtttctcaaaacccttaaaagaaggaccctttttggactagccagaattctaccctggaaaagtgttagggattccttccaatagttagatctaccctgcctgtactactctagggagtatgctggaggcagagggcaagggaggggtggtattaaacaagtcaattctgtgtggtatattgtttaatcagttctgtgtggtgcattcctgaagtctctaatgtgactgttgagggcctggggaaaccatggcaaagtggatccagttagagcccattaatcttgatcattccggtttttttttttttggtccatcttgtttcatttgcttgccccgcccccgagacggagtcttactctgtcgcccaggctggagtgtagtggcatgatctcggctcactgcaatctctgcctcccgggttcaagcttgtccaggttgatcttgaactcctgacctcgtgatctacccacctcggcctcccaaaatgctgggattacaggggtgagccaccgtgcccaacctcacttgcttcttatccttacactcccccagccccagagaaactgccacatacaccacaaaaaccaaacatcccccaatgaccttagccccattgctccattcactcccaggtgagaattcaggcaaacgtccacaaaggtcacaggcagcgtacatacggttctgttataccccatatattaccccttcatgtcctaaagaagacattttctcttagagattttcattttagtgtatctttaaaaaaaaatcttgtgttaacttgcctccatctttttcttgggtgaggacacccaggaatgacccttttgtgtctatgatgttgctgttcacagcttttcttgataggcctagtacaatcttgggaacagggttactgtatactgaaggtctgacagtagctcttagactcgcctatcttaggtagtcatgctgtgcattttttttttcattggtgtactgtgtttgatttgtctcatatatttggagtttttctgaaaaatggagcagtaatgcagcatcaacctattaaaatacattttaagccttttaa

SEQ ID NO: 324871 - DNA, 918 bp, Homo sapiens
ggggaagggaagaaaaaactataggctaggtacgaggctgggtgtcgggagaggccgtgtagcgtcgccgttactccgaggagataccagtcggtagaggagaagtcgaggttagagggaactgggaggcactttgctgtctgcaatcgaagttgagggtgcaaaaatgcagagtaataaaacttttaacttggagaagcaaaaccatactccaagaaagcatcatcaacatcaccaccagcagcagcaccaccagcagcaacagcagcagccgccaccaccgccaatacctgcaaatgggcaacaggccagcagccaaaatgaaggcttgactattgacctgaagaattttagaaaaccaggagagaagaccttcacccaacgaagccgtctttttgtgggaaatcttcctcccgacatcactgaggaagaaatgaggaaactatttgagaaatatggaaaggcaggcgaagtcttcattcataaggataaaggatttggctttatccgcttggaaacccgaaccctagcggagattgccaaagtggagctggacaatatgccactccgtggaaagcagctgcgtgtgcgctttgcctgccatagtgcatcccttacagttcgaaaccttcctcagtatgtgtccaacgaactgctggaagaagccttttctgtgtttggccaggtagagagggctgtagtcattgtggatgatcgaggaaggccctcaggaaaaggcattgttgagttctcagggaagccagctgctcggaaagctctggacagatgcagtgaaggctccttcctgctaaccacattttctcgtctgtggatgtggggccatggacattaatggtgaaaagggttccgaaaagtggttttaaaacaattttagagaagagggccgaatgggaaggg

SEQ ID NO: 324872 - DNA, 520 bp, Homo sapiens
aactcaggggcgagctgcaactcaggggcgagctgcaactcaggggcgagctgccccattgctccattcactcccaggtgagaattcaggcaaacgtccacaaaggtcacaggcagcgtacatacggttctgttataccccatatattaccccttcatgtcctaaagaagacattttctcttagagattttcattttagtgtatctttaaaaaaaaatcttgtgttaacttgcctccatctttttcttgggtgaggacacccaggaatgacccttttgtgtctatgatgttgctgttcacagcttttcttgataggcctagtacaatcttgggaacagggttactgtatactgaaggtctgacagtagctcttagactcgcctatcttaggtagtcatgctgtgcattttttttttcattggtgtactgtgtttgatttgtctcatatatttggagtttttctgaaaaatggagcagtaatgcagcatcaacctattaaaatacattttaagccttttaa

SEQ ID NO: 324873 - DNA, 981 bp, Homo sapiens
ggggaagggaagaaaaaactataggctaggtacgaggctgggtgtcgggagaggccgtgtagcgtcgccgttactccgaggagataccagtcggtagaggagaagtcgaggttagagggaactgggaggcactttgctgtctgcaatcgaagttgagaggcccagtatttaggcgacagtgaatttattactctgaagagggttctgcacatatttccaaattatattggtggtcatcagaagtaggtgataggaagaaatacttctcaagggtgcaaaaatgcagagtaataaaacttttaacttggagaagcaaaaccatactccaagaaagcatcatcaacatcaccaccagcagcagcaccaccagcagcaacagcagcagccgccaccaccgccaatacctgcaaatgggcaacaggccagcagccaaaatgaaggcttgactattgacctgaagaattttagaaaaccaggagagaagaccttcacccaacgaagccgtctttttgtgggaaatcttcctcccgacatcactgaggaagaaatgaggaaactatttgagaaatatggaaaggcaggcgaagtcttcattcataaggataaaggatttggctttatccgcttggaaacccgaaccctagcggagattgccaaagtggagctggacaatatgccactccgtggaaagcagctgcgtgtgcgctttgcctgccatagtgcatcccttacagttcgaaaccttcctcagtatgtgtccaacgaactgctggaagaagccttttctgtgtttggccaggtagagagggctgtagtcattgtggatgatcgaggaaggccctcaggaaaaggcattgttgagttctcagggaagccagctgctcggaaagctctggacagatgcagtgaaggctccttcctgctaaccacggatgcggggagggctctccggtgaccttttctcgttcctgggttgggggc

SEQ ID NO: 324874 - DNA, 1018 bp, Homo sapiens
ggggaagggaagaaaaaactataggctaggtacgaggctgggtgtgccgtctttttgtgggaaatcttcctcccgacatcactgaggaagaaatgaggaaactatttgagaaatatggaaaggcaggcgaagtcttcattcataaggataaaggatttggctttatccgcttggaaacccgaaccctagcggagattgccaaagtggagctggacaatatgccactccgtggaaagcagctgcgtgtgcgctttgcctgccatagtgcatcccttacagttcgaaaccttcctcagtatgtgtccaacgaactgctggaagaagccttttctgtgtttggccaggtagagagggctgtagtcattgtggatgatcgaggaaggccctcaggaaaaggcattgttgagttctcagggaagccagctgctcggaaagctctggacagatgcagtgaaggctccttcctgctaaccacatttcctcgtcctgtgactgtggagcccatggaccagttagatgatgaagagggacttccagagaagctggttataaaaaaccagcaatttcacaaggaacgagagcagccacccagatttgcacagcctggctcctttgagtatgaatatgccatgcgctggaaggcactcattgagatggagaagcagcagcaggaccaagtggaccgcaacatcaaggaggctcgtgagaagctggagatggagatggaagctgcacgccatgagcaccaggtcatgctaatgagacaggatttgatgaggcgccaagaagaacgttcacagcttttcttgataggcctagtacaatcttgggaacagggttactgtatactgaaggtctgacagtagctcttagactcgcctatcttaggtagtcatgctgtgcattttttttttcattggtgtactgtgtttgatttgtctcatatatttggagtttttctgaaaaatggagcagtaatgcagcatcaacctattaaaatacattttaagccttttaa

SEQ ID NO: 324875 - DNA, 663 bp, Homo sapiens
ggggaagggaagaaaaaactataggctaggtacgaggctgggtgtcgggagaggccgtgtagcgtcgccgttactccgaggagataccagtcggtagaggagaagtcgaggttagagggaactgggaggcactttgctgtctgcaatcgaagttgagggtgcaaaaatgcagagtaataaaacttttaacttggagaagcaaaaccatactccaagaaagcatcatcaacatcaccaccagcagcagcaccaccagcagcaacagcagcagccgccaccaccgccaatacctgcaaatgggcaacaggccagcagccaaaatgaaggcttgactattgacctgaagaattttagaaaaccaggagagaagaccttcacccaacgaagccgtctttttgtgggaaatcttcctcccgacatcactgaggaagaaatgaggaaactatttgagaaatatggaaaggcaggcgaagtcttcattcataaggataaagtgtaccagtaagtgctgatgcagaagctacagcaagtcatcctaataatctagcctaccgaattaatgaaagtagctacgctggtcaggcatgtttgctcaacgcctgtaagttcagccttctgggacgcctgaggcgggtggatcacctgagttcatggagttcgaga

SEQ ID NO: 324876 - DNA, 971 bp, Homo sapiens
ggggaagggaagaaaaaactataggctaggtacgaggctgggtgtcgggagaggccgtgtagcgtcgccgttactccgaggagataccagtcggtagaggagaagtcgaggttagagggaactgggaggcactttgctgtctgcaatcgaagttgagaggcccagtatttaggcgacagtgaatttattactctgaagagggttctgcacatatttccaaattatattggtggtcatcagaagtaggtgataggaagaaatacttctcaagggtgcaaaaatgcagagtaataaaacttttaacttggagaagcaaaaccatactccaagaaagcatcatcaacatcaccaccagcagcagcaccaccagcagcaacagcagcagccgccaccaccgccaatacctgcaaatgggcaacaggccagcagccaaaatgaaggcttgactattgacctgaagaattttagaaaaccaggagagaagaccttcacccaacgaagccgtctttttgtgggaaatcttcctcccgacatcactgaggaagaaatgaggaaactatttgagaaatatggaaaggcaggcgaagtcttcattcataaggataaaggatttggctttatccgcttggaaacccgaaccctagcggagattgccaaagtggagctggacaatatgccactccgtggaaagcagctgcgtgtgcgctttgcctgccatagtgcatcccttacagttcgaaaccttcctcagtatgtataggttgcacagaaccggtggaaaaaccctataggggagtcacagaaaagagcagtgacaagaatatgacaggaacgcccagaaacaagatgtgacacgtagaccagcgagtcagaacaaaagaccacaacacacacactatgaggaccacacatggatgacaagcatcattgaacatgcttgacgatagagcagtcgtgaaacaaaaagaaaa

SEQ ID NO: 324877 - DNA, 530 bp, Homo sapiens
tggcttaaaaatcgtattattaatcaggttgactcgcatggcattactagctccatttgtcagataactcctaatatatgacgactaatcgacacatgtatcaccaatgaatacaaacaaaatagcacatgcatgactacctaatataggcgagtctaagagctactcgtcagaccttcagtatacagtaaccctgttcccaacgattgtactaggcctatcaaaaatcttgtgttaacttgcctccatctttttcttgggtgaggacacccaggaatgacccttttgtgtctatgatgttgctgttcacagcttttcttgataggcctagtacaatcttgggaacagggttactgtatactgaaggtctgacagtagctcttagactcgcctatcttaggtagtcatgctgtgcattttttttttcattggtgtactgtgtttgatttgtctcatatatttggagtttttctgaaaaatggagcagtaatgcagcatcaacctattaaaatacattttaagccttttaa

SEQ ID NO: 324878 - DNA, 442 bp, Homo sapiens
ggggaagggaagaaaaaactataggctaggtacgaggctgggtgtcgggagaggccgtgtagcgtcgccgttactccgaggagataccagtcggtagaggagaagtcgaggttagagggaactgggaggcactttgctgtctgcaatcgaagttgaggtgcaaaaatgcagagtctgggtgtatttattttcctccccaccaggtggggagggggtttgggggcttgcaagtatgttttagcatgtgtttggttctggggcccctttttactccccttgagctgagatggaacccttttggcccccgagctgggggccatgagctccagacccccagcaaccctcctatcacctcccctccttgcctcctgtgtaatcatttcttgggccctcctgaaacttacacacaaaacgttaagtgatgaacattaaatagcaaaga

SEQ ID NO: 324879 - DNA, 3237 bp, Homo sapiens
  misc_feature (10)..(10): n is a, c, g, or t
  misc_feature (31)..(31): n is a, c, g, or t
  misc_feature (928)..(928): n is a, c, g, or t
  misc_feature (946)..(946): n is a, c, g, or t
cattcgctangagaggccggggttaatcggncgaggctctaaaggtggggaagctggagaataatagatgtgcaaaaataggcagtggaaataattctcagatgatgtgttccttgaaagcttgatgaaacagaaccacaaaaatggcacattttaatttttcctcataagttttgtttcaaggataacaagttttttgcctaggatactggagctaaagtatgccctttggaactttttttttttttttgagacggagtatcactcttgtggcccaggctggcgtgcagtggcatggtctcggctcactgcagcctccacctcccgggttcaggtgattctcctgcctcagcctcctgagtagctgggattacaggtgtctgtcaccacacccggctaatttttgtatttttggtagagacggggtttcactgttttggccaggctggtctcgagctcctgacctcaggagatccacccaccttggcctcccaaagtattggggttacagatgtgagccactgcacctggctggaacttttttgttttaattaggaaatttcaaacatatagaagtagacagaataataatgaacctgcacatatgcattgcatagcttcagtaattatcaagttgtggttaattttgttttatctgtaccctttccctattttgtccccccatgatcaagagatgggtatctcaccatgttgccttggctagacttgaattcctgagcttaagcaattctctgtcctcagcctcctgagtagctgggacaaaggcaacgcaccacggtgcctggtttatttgtatctttaaaaaactattttaaattgaattaaccaggcatggtatacgtctgtagtctaactactcaactaggctaagctgatagggctgattgagcctaggagtttgaggttncagtgagctatgctcatngcactgcacttcagcctgggtgatagagtgagacccagtctcttaaaaaaaaactaatgatggtaaaacatacataacataaaatttactatcttaaccgtttgtaagtgtagacattattttaaaatctggaaacccgaaccctagcggagattgccaaagtggagctggacaatatgccactccgtggaaagcagctgcgtgtgcgctttgcctgccatagtgcatcccttacagttcgaaaccttcctcagtatgtgtccaacgaactgctggaagaagccttttctgtgtttggccaggtagagagggctgtagtcattgtggatgatcgaggaaggccctcaggaaaaggcattgttgagttctcagggaagccagctgctcggaaagctctggacagatgcagtgaaggctccttcctgctaaccacatttcctcgtcctgtgactgtggagcccatggaccagttagatgatgaagagggacttccagagaagctggttataaaaaaccagcaatttcacaaggaacgagagcagccacccagatttgcacagcctggctcctttgagtatgaatatgccatgcgctggaaggcactcattgagatggagaagcagcagcaggaccaagtggaccgcaacatcaaggaggctcgtgagaagctggagatggagatggaagctgcacgccatgagcaccaggtcatgctaatgagacaggatttgatgaggcgccaagaagaacttcggaggatggaagagctgcacaaccaagaggtgcaaaaacgaaagcaactggagctcaggcaggaggaagagcgcaggcgccgtgaagaagagatgcggcggcagcaagaagaaatgatgcggcgacagcaggaaggattcaagggaaccttccctgatgcgagagagcaggagattcggatgggtcagatggctatgggaggtgctatgggcataaacaacagaggtgccatgccccctgctcctgtgccagctggtaccccagctcctccaggacctgccactatgatgccggatggaactttgggattgaccccaccaacaactgaacgctttggtcaggctgctacaatggaaggaattggggcaattggtggaactcctcctgcattcaaccgtgcagctcctggagctgaatttgccccaaacaaacgtcgccgatactaataagttgcagtgtctagtttctcaaaacccttaaaagaaggaccctttttggactagccagaattctaccctggaaaagtgttagggattccttccaatagttagatctaccctgcctgtactactctagggagtatgctggaggcagagggcaagggaggggtggtattaaacaagtcaattctgtgtggtatattgtttaatcagttctgtgtggtgcattcctgaagtctctaatgtgactgttgagggcctggggaaaccatggcaaagtggatccagttagagcccattaatcttgatcattccggtttttttttttttggtccatcttgtttcatttgcttgccccgcccccgagacggagtcttactctgtcgcccaggctggagtgtagtggcatgatctcggctcactgcaatctctgcctcccgggttcaagcttgtccaggttgatcttgaactcctgacctcgtgatctacccacctcggcctcccaaaatgctgggattacaggggtgagccaccgtgcccaacctcacttgcttcttatccttacactcccccagccccagagaaactgccacatacaccacaaaaaccaaacatcccccaatgaccttagccccattgctccattcactcccaggtgagaattcaggcaaacgtccacaaaggtcacaggcagcgtacatacggttctgttataccccatatattaccccttcatgtcctaaagaagacattttctcttagagattttcattttagtgtatctttaaaaaaaaatcttgtgttaacttgcctccatctttttcttgggtgaggacacccaggaatgacccttttgtgtctatgatgttgctgttcacagcttttcttgataggcctagtacaatcttgggaacagggttactgtatactgaaggtctgacagtagctcttagactcgcctatcttaggtagtcatgctgtgcattttttttttcattggtgtactgtgtttgatttgtctcatatatttggagtttttctgaaaaatggagcagtaatgcagcatcaacctattaaaatacattttaagccttttaa

SEQ ID NO: 324880 - DNA, 1481 bp, Homo sapiens
ctgctcccagtcagtcccgaaaatagtcattcaagtggtaaaataagacaaggcagaggacgatgtctctaacttccctgatgggagaagactgccatcaggtcatgctaatgagacaggatttgatgaggcgccaagaagaacttcggaggatggaagagctgcacaaccaagaggtgcaaaaacgaaagcaactggagctcaggcaggaggaagagcgcaggcgccgtgaagaagagatgcggcggcagcaagaagaaatgatgcggcgacagcaggaaggattcaagggaaccttccctgatgcgagagagcaggagattctggactgggtacagactgtgctatgcggacggtgctactgggcactaaacacacacgagtgtgccagtgccccatctgctcgctgtgcacaagctggtaccaccatgctcactccatggagcctgacaactagtgatgaccggatgcgaactcttgcggatttgacccacaccaagcaacttgacacgctatatgggtcagtgctgctaccaactgcgaagcgaatctcgcgtgcacatctgcgtggcaacctacactcctgacatatcagacctgtgcacgctccatggacgactgcaactttgaccctcaaaccaaagcgtcagccgactatctaactaacgcttgcacgctgtcactagccttctcgtcaacaagcgcgtcaacaacgaaggagcacttatactgcgactagcccagcaattcataccctgcgaaacacagcggtcagccgcataccacttcgcaatagcttagatactaccctgacctgctactaactctaggggagtatgcttgcgaggacagcagcgtgccacgtgcagtcgtctggcacttagaccaacgctacaattcatggtgtgggaatcataggcataactcagactactgatgaatggtcaatcccctgaaagtctctaacttgttgactgtctgaagaacactgcgacaaaacccactgtcacatcgtctaatcagccatacacgccgcgatacacctgcacacataccgcgataatatttaaataacatgggagcaacacctgtatcaaagtatgcgatgtccaacaagccacggggtaaaaagagagatataaatcacaaccatacaccaagacgtagaacatgtacagaacgaataaacccatcgaacaatataagaaaactattcatacccaccgctgcaaccgcacaccacacaaatcagcttaatacacactatcaccctaaactcacccaccatcagcaccacaatacccgatcatatcatatctacccgacacaacacactaaatatacatcccactcacacaaacgactaaaacacatacaaacatataactctccactacactcaccatatcatcatcacaccacaaccaatatccaacagccccaaacaaactcacaatacgacaatcattcatgctatacga

SEQ ID NO: 324881 - DNA, 2671 bp, Homo sapiens
ggaaaccttcctcagtatgtgtccaacgaactgctggaagaacgggagaggccgtgtagcgtcgccgttactccgaggagataccagtcggtagaggagaagtcgaggttagagggaactgggaggcactttgctgtctgcaatcgaagttgagggtgcaaaaatgcagagtaataaaacttttaacttggagaagcaaaaccatactccaagaaagcatcatcaacatcaccaccagcagcagcaccaccagcagcaacagcagcagccgccaccaccgccaatacctgcaaatgggcaacaggccagcagccaaaatgaaggcttgactattgacctgaagaattttagaaaaccaggagagaagaccttcacccaacgaagccgtctttttgtgggaaatcttcctcccgacatcactgaggaagaaatgaggaaactatttgagaaatatggaaaggcaggcgaagtcttcattcataaggataaaggatttggctttatccgcttggaaacccgaaccctagcggagattgccaaagtggagctggacaatatgccactccgtggaaagcagctgcgtgtgcgctttgcctgccatagtgcatcccttacagttcgaaaccttcctcagtatgtgtccaacgaactgctggaagaagccttttctgtgtttggccaggtagagagggctgtagtcattgtggatgatcgaggaaggccctcaggaaaaggcattgttgagttctcagggaagccagctgctcggaaagctctggacagatgcagtgaaggctccttcctgctaaccacatttcctcgtcctgtgactgtggagcccatggaccagttagatgatgaagagggacttccagagaagctggttataaaaaaccagcaatttcacaaggaacgagagcagccacccagatttgcacagcctggctcctttgagtatgaatatgccatgcgctggaaggcactcattgagatggagaagcagcagcaggaccaagtggaccgcaacatcaaggaggctcgtgagaagctggagatggagatggaagctgcacgccatgagcaccaggtcatgctaatgagacaggatttgatgaggcgccaagaagaacttcggaggatggaagagctgcacaaccaagaggtgcaaaaacgaaagcaactggagctcaggcaggaggaagagcgcaggcgccgtgaagaagagatgcggcggcagcaagaagaaatgatgcggcgacagcaggaaggattcaagggaaccttccctgatgcgagagagcaggagattcggatgggtcagatggctatgggaggtgctatgggcataaacaacagaggtgccatgccccctgctcctgtgccagctggtaccccagctcctccaggacctgccactatgatgccggatggaactttgggattgaccccaccaacaactgaacgctttggtcaggctgctacaatggaaggaattggggcaattggtggaactcctcctgcattcaaccgtgcagctcctggagctgaatttgccccaaacaaacgtcgccgatactaataagttgcagtgtctagtttctcaaaacccttaaaagaaggaccctttttggactagccagaattctaccctggaaaagtgttagggattccttccaatagttagatctaccctgcctgtactactctagggagtatgctggaggcagagggcaagggaggggtggtattaaacaagtcaattctgtgtggtatattgtttaatcagttctgtgtggtgcattcctgaagtctctaatgtgactgttgagggcctggggaaaccatggcaaagtggatccagttagagcccattaatcttgatcattccggtttttttttttttggtccatcttgtttcatttgcttgccccgcccccgagacggagtcttactctgtcgcccaggctggagtgtagtggcatgatctcggctcactgcaatctctgcctcccgggttcaagcttgtccaggttgatcttgaactcctgacctcgtgatctacccacctcggcctcccaaaatgctgggattacaggggtgagccaccgtgcccaacctcacttgcttcttatccttacactcccccagccccagagaaactgccacatacaccacaaaaaccaaacatcccccaatgaccttagccccattgctccattcactcccaggtgagaattcaggcaaacgtccacaaaggtcacaggcagcgtacatacggttctgttataccccatatattaccccttcatgtcctaaagaagacattttctcttagagattttcattttagtgtatctttaaaaaaaaatcttgtgttaacttgcctccatctttttcttgggtgaggacacccaggaatgacccttttgtgtctatgatgttgctgttcacagcttttcttgataggcctagtacaatcttgggaacagggttactgtatactgaaggtctgacagtagctcttagactcgcctatcttaggtagtcatgctgtgcattttttttttcattggtgtactgtgtttgatttgtctcatatatttggagtttttctgaaaaatggagcagtaatgcagcatcaacctattaaaatacattttaagccttttaa

SEQ ID NO: 324882 - DNA, 3204 bp, Homo sapiens
ggggaagggaagaaaaaactataggctaggtacgaggctgggtgtcgggagaggccgtgtagcgtcgccgttactccgaggagataccagtcggtagaggagaagtcgaggttagagggaactgggaggcactttgctgtctgcaatcgaagttgagggtgcaaaaatgcagagtaataaaacttttaacttggagaagcaaaaccatactccaagaaagcatcatcaacatcaccaccagcagcagcaccaccagcagcaacagcagcagccgccaccaccgccaatacctgcaaatgggcaacaggccagcagccaaaatgaaggcttgactattgacctgaagaattttagaaaaccaggagagaagaccttcacccaacgaagccgtctttttgtgggaaatcttcctcccgacatcactgaggaagaaatgaggaaactatttgagaaatatggaaaggcaggcgaagtcttcattcataaggataaaggatttggctttatccgcttggaaacccgaaccctagcggagattgccaaagtggagctggacaatatgccactccgtggaaagcagctgcgtgtgcgctttgcctgccatagtgcatcccttacagttcgaaaccttcctcagtatgtgtccaacgaactgctggaagaagccttttctgtgtttggccaggtagagagggctgtagtcattgtggatgatcgaggaaggccctcaggaaaaggcattgttgagttctcagggaagccagctgctcggaaagctctggacagatgcagtgaaggctccttcctgctaaccacatttcctcgtcctgtgactgtggagcccatggaccagttagatgatgaagagggacttccagagaagctggttataaaaaaccagcaatttcacaaggaacgagagcagccacccagatttgcacagcctggctcctttgagtatgaatatgccatgcgctggaaggcactcattgagatggagaagcagcagcaggaccaagtggaccgcaacatcaaggaggctcgtgagaagctggagatggagatggaagctgcacgccatgagcaccaggtcatgctaatgagacaggatttgatgaggcgccaagaagaacttcggaggatggaagagctgcacaaccaagaggtgcaaaaacgaaagcaactggagctcaggcaggaggaagagcgcaggcgccgtgaagaagagatgcggcggcagcaagaagaaatgatgcggcgacagcaggaaggattcaagggaaccttccctgatgcggtatatctcccatgtgcccgtgatgtaccagaccagtcctgataaactcaccatgaattgtctgctaggttaccggttatgaccaattttcccgtgttgtgaaataaccctttagaaaaaagaattcataagaaggagaggtaaggtttgaagaggagatcttgcctcacaagcaatataggatgaaaaactgggtctgctgtattctgtttagactcagtgactataggaagagatatgcaaccttggctagtcctctgctgtccttgcaattgtacaagttggagcttcagaagcaatctcttccccctttcacctctctgttgctaataggaggctctggcttacgtcctagtagctctgtgaccttgaatttgttgcacaactagcaagggttgtgctcctcagctttctcagtgctgtttggacgtgttatcactctatctacttcccttagtgtgtggtccttgatggattgtggtagaatgcactgctgtcttggactgtcttgagtattttttgtttttcagagagagcaggagattcggatgggtcagatggctatgggaggtgctatgggcataaacaacagaggtgccatgccccctgctcctgtgccagctggtaccccagctcctccaggacctgccactatgatgccggatggaactttgggattgaccccaccaacaactgaacgctttggtcaggctgctacaatggaaggaattggggcaattggtggaactcctcctgcattcaaccgtgcagctcctggagctgaatttgccccaaacaaacgtcgccgatactaataagttgcagtgtctagtttctcaaaacccttaaaagaaggaccctttttggactagccagaattctaccctggaaaagtgttagggattccttccaatagttagatctaccctgcctgtactactctagggagtatgctggaggcagagggcaagggaggggtggtattaaacaagtcaattctgtgtggtatattgtttaatcagttctgtgtggtgcattcctgaagtctctaatgtgactgttgagggcctggggaaaccatggcaaagtggatccagttagagcccattaatcttgatcattccggtttttttttttttggtccatcttgtttcatttgcttgccccgcccccgagacggagtcttactctgtcgcccaggctggagtgtagtggcatgatctcggctcactgcaatctctgcctcccgggttcaagcttgtccaggttgatcttgaactcctgacctcgtgatctacccacctcggcctcccaaaatgctgggattacaggggtgagccaccgtgcccaacctcacttgcttcttatccttacactcccccagccccagagaaactgccacatacaccacaaaaaccaaacatcccccaatgaccttagccccattgctccattcactcccaggtgagaattcaggcaaacgtccacaaaggtcacaggcagcgtacatacggttctgttataccccatatattaccccttcatgtcctaaagaagacattttctcttagagattttcattttagtgtatctttaaaaaaaaatcttgtgttaacttgcctccatctttttcttgggtgaggacacccaggaatgacccttttgtgtctatgatgttgctgttcacagcttttcttgataggcctagtacaatcttgggaacagggttactgtatactgaaggtctgacagtagctcttagactcgcctatcttaggtagtcatgctgtgcattttttttttcattggtgtactgtgtttgatttgtctcatatatttggagtttttctgaaaaatggagcagtaatgcagcatcaacctattaaaatacattttaagccttttaa

SEQ ID NO: 324883 - DNA, 3048 bp, Homo sapiens
ggggaagggaagaaaaaactataggctaggtacgaggctgggtgtcgggagaggccgtgtagcgtcgccgttactccgaggagataccagtcggtagaggagaagtcgaggttagagggaactgggaggcactttgctgtctgcaatcgaagttgagggtgcaaaaatgcagagtaataaaacttttaacttggagaagcaaaaccatactccaagaaagcatcatcaacatcaccaccagcagcagcaccaccagcagcaacagcagcagccgccaccaccgccaatacctgcaaatgggcaacaggccagcagccaaaatgaaggcttgactattgacctgaagaattttagaaaaccaggagagaagaccttcacccaacgaagccgtctttttgtgggaaatcttcctcccgacatcactgaggaagaaatgaggaaactatttgagaaatatggaaaggcaggcgaagtcttcattcataaggataaaggatttggctttatccgcttggaaacccgaaccctagcggagattgccaaagtggagctggacaatatgccactccgtggaaagcagctgcgtgtgcgctttgcctgccatagtgcatcccttacagttcgaaaccttcctcagtatgtgtccaacgaactgctggaagaagccttttctgtgtttggccaggtagagagggctgtagtcattgtggatgatcgaggaaggccctcaggaaaaggcattgttgagttctcagggaagccagctgctcggaaagctctggacagatgcagtgaaggctccttcctgctaaccacatttcctcgtcctgtgactgtggagcccatggaccagttagatgatgaagagggacttccagagaagctggttataaaaaaccagcaatttcacaaggaacgagagcagccacccagatttgcacagcctggctcctttgagtatgaatatgccatgcgctggaaggcactcattgagatggagaagcagcagcaggaccaagtggaccgcaacatcaaggaggctcgtgagaagctggagatggagatggaagctgcacgccatgagcaccaggtcatgctaatgagacaggatttgatgaggcgccaagaagaacttcggaggatggaagagctgcacaaccaagaggtgcaaaaacgaaagcaactggagctcaggtaacttttctcgaacactttttccctaacaactctaaaaggtaatgtctcactcctctttcctactgccatgctacctcgtgtatttataaatgtgttggcaaatatttcctggctgcttctcaggttctttctttggattggagatgttttagctgcccatggtcctagaagttacctgctaaaaagaaagcagctgaatgctggtctcatgaggtttctttgggggttgcctcagggctgggcacacttaacagtgagtttcctggtgaactgatagttttcagtaggccagtctccttggttgagtctcctgttaatctgctcaagttctgaaatgcctctgtcttaaatacattggtgactctctgtaggcaggaggaagagcgcaggcgccgtgaagaagagatgcggcggcagcaagaagaaatgatgcggcgacagcaggaaggattcaagggaaccttccctgatgcgagagagcaggagattcggatgggtcagatggctatgggaggtgctatgggcataaacaacagaggtgccatgccccctgctcctgtgccagctggtaccccagctcctccaggacctgccactatgatgccggatggaactttgggattgaccccaccaacaactgaacgctttggtcaggctgctacaatggaaggaattggggcaattggtggaactcctcctgcattcaaccgtgcagctcctggagctgaatttgccccaaacaaacgtcgccgatactaataagttgcagtgtctagtttctcaaaacccttaaaagaaggaccctttttggactagccagaattctaccctggaaaagtgttagggattccttccaatagttagatctaccctgcctgtactactctagggagtatgctggaggcagagggcaagggaggggtggtattaaacaagtcaattctgtgtggtatattgtttaatcagttctgtgtggtgcattcctgaagtctctaatgtgactgttgagggcctggggaaaccatggcaaagtggatccagttagagcccattaatcttgatcattccggtttttttttttttggtccatcttgtttcatttgcttgccccgcccccgagacggagtcttactctgtcgcccaggctggagtgtagtggcatgatctcggctcactgcaatctctgcctcccgggttcaagcttgtccaggttgatcttgaactcctgacctcgtgatctacccacctcggcctcccaaaatgctgggattacaggggtgagccaccgtgcccaacctcacttgcttcttatccttacactcccccagccccagagaaactgccacatacaccacaaaaaccaaacatcccccaatgaccttagccccattgctccattcactcccaggtgagaattcaggcaaacgtccacaaaggtcacaggcagcgtacatacggttctgttataccccatatattaccccttcatgtcctaaagaagacattttctcttagagattttcattttagtgtatctttaaaaaaaaatcttgtgttaacttgcctccatctttttcttgggtgaggacacccaggaatgacccttttgtgtctatgatgttgctgttcacagcttttcttgataggcctagtacaatcttgggaacagggttactgtatactgaaggtctgacagtagctcttagactcgcctatcttaggtagtcatgctgtgcattttttttttcattggtgtactgtgtttgatttgtctcatatatttggagtttttctgaaaaatggagcagtaatgcagcatcaacctattaaaatacattttaagccttttaa

SEQ ID NO: 324884 - DNA, 2609 bp, Homo sapiens
  misc_feature (10)..(10): n is a, c, g, or t
  misc_feature (31)..(31): n is a, c, g, or t
cattcgctangagaggccggggttaatcggncgaggccgggagaggccgtgtagcgtcgccgttactccgaggagataccagtcggtagaggggtgcaaaaatgcagagtaataaaacttttaacttggagaagcaaaaccatactccaagaaagcatcatcaacatcaccaccagcagcagcaccaccagcagcaacagcagcagccgccaccaccgccaatacctgcaaatgggcaacaggccagcagccaaaatgaaggcttgactattgacctgaagaattttagaaaaccaggagagaagaccttcacccaacgaagccgtctttttgtgggaaatcttcctcccgacatcactgaggaagaaatgaggaaactatttgagaaatatggaaaggcaggcgaagtcttcattcataaggataaaggatttggctttatccgcttggaaacccgaaccctagcggagattgccaaagtggagctggacaatatgccactccgtggaaagcagctgcgtgtgcgctttgcctgccatagtgcatcccttacagttcgaaaccttcctcagtatgtgtccaacgaactgctggaagaagccttttctgtgtttggccaggtagagagggctgtagtcattgtggatgatcgaggaaggccctcaggaaaaggcattgttgagttctcagggaagccagctgctcggaaagctctggacagatgcagtgaaggctccttcctgctaaccacatttcctcgtcctgtgactgtggagcccatggaccagttagatgatgaagagggacttccagagaagctggttataaaaaaccagcaatttcacaaggaacgagagcagccacccagatttgcacagcctggctcctttgagtatgaatatgccatgcgctggaaggcactcattgagatggagaagcagcagcaggaccaagtggaccgcaacatcaaggaggctcgtgagaagctggagatggagatggaagctgcacgccatgagcaccaggtcatgctaatgagacaggatttgatgaggcgccaagaagaacttcggaggatggaagagctgcacaaccaagaggtgcaaaaacgaaagcaactggagctcaggcaggaggaagagcgcaggcgccgtgaagaagagatgcggcggcagcaagaagaaatgatgcggcgacagcaggaaggattcaagggaaccttccctgatgcgagagagcaggagattcggatgggtcagatggctatgggaggtgctatgggcataaacaacagaggtgccatgccccctgctcctgtgccagctggtaccccagctcctccaggacctgccactatgatgccggatggaactttgggattgaccccaccaacaactgaacgctttggtcaggctgctacaatggaaggaattggggcaattggtggaactcctcctgcattcaaccgtgcagctcctggagctgaatttgccccaaacaaacgtcgccgatactaataagttgcagtgtctagtttctcaaaacccttaaaagaaggaccctttttggactagccagaattctaccctggaaaagtgttagggattccttccaatagttagatctaccctgcctgtactactctagggagtatgctggaggcagagggcaagggaggggtggtattaaacaagtcaattctgtgtggtatattgtttaatcagttctgtgtggtgcattcctgaagtctctaatgtgactgttgagggcctggggaaaccatggcaaagtggatccagttagagcccattaatcttgatcattccggtttttttttttttggtccatcttgtttcatttgcttgccccgcccccgagacggagtcttactctgtcgcccaggctggagtgtagtggcatgatctcggctcactgcaatctctgcctcccgggttcaagcttgtccaggttgatcttgaactcctgacctcgtgatctacccacctcggcctcccaaaatgctgggattacaggggtgagccaccgtgcccaacctcacttgcttcttatccttacactcccccagccccagagaaactgccacatacaccacaaaaaccaaacatcccccaatgaccttagccccattgctccattcactcccaggtgagaattcaggcaaacgtccacaaaggtcacaggcagcgtacatacggttctgttataccccatatattaccccttcatgtcctaaagaagacattttctcttagagattttcattttagtgtatctttaaaaaaaaatcttgtgttaacttgcctccatctttttcttgggtgaggacacccaggaatgacccttttgtgtctatgatgttgctgttcacagcttttcttgataggcctagtacaatcttgggaacagggttactgtatactgaaggtctgacagtagctcttagactcgcctatcttaggtagtcatgctgtgcattttttttttcattggtgtactgtgtttgatttgtctcatatatttggagtttttctgaaaaatggagcagtaatgcagcatcaacctattaaaatacattttaagccttttaa

SEQ ID NO: 324885 - DNA, 2685 bp, Homo sapiens
aaaatgatgtattaggtgcgggcgtcgggtgtagatttcagtcgacgcggggcagaggctgtgattgtatagtcgtgtgactcctggggcagtatatcagataggtagaggagaagtcgaggttagagggaactgggaggcactttgctgtctgcaatcgaagttgagggtgcaaaaatgcagagtaataaaacttttaacttggagaagcaaaaccatactccaagaaagcatcatcaacatcaccaccagcagcagcaccaccagcagcaacagcagcagccgccaccaccgccaatacctgcaaatgggcaacaggccagcagccaaaatgaaggcttgactattgacctgaagaattttagaaaaccaggagagaagaccttcacccaacgaagccgtctttttgtgggaaatcttcctcccgacatcactgaggaagaaatgaggaaactatttgagaaatatggaaaggcaggcgaagtcttcattcataaggataaaggatttggctttatccgcttggaaacccgaaccctagcggagattgccaaagtggagctggacaatatgccactccgtggaaagcagctgcgtgtgcgctttgcctgccatagtgcatcccttacagttcgaaaccttcctcagtatgtgtccaacgaactgctggaagaagccttttctgtgtttggccaggtagagagggctgtagtcattgtggatgatcgaggaaggccctcaggaaaaggcattgttgagttctcagggaagccagctgctcggaaagctctggacagatgcagtgaaggctccttcctgctaaccacatttcctcgtcctgtgactgtggagcccatggaccagttagatgatgaagagggacttccagagaagctggttataaaaaaccagcaatttcacaaggaacgagagcagccacccagatttgcacagcctggctcctttgagtatgaatatgccatgcgctggaaggcactcattgagatggagaagcagcagcaggaccaagtggaccgcaacatcaaggaggctcgtgagaagctggagatggagatggaagctgcacgccatgagcaccaggtcatgctaatgagacaggatttgatgaggcgccaagaagaacttcggaggatggaagagctgcacaaccaagaggtgcaaaaacgaaagcaactggagctcaggcaggaggaagagcgcaggcgccgtgaagaagagatgcggcggcagcaagaagaaatgatgcggcgacagcaggaaggattcaagggaaccttccctgatgcgagagagcaggagattcggatgggtcagatggctatgggaggtgctatgggcataaacaacagaggtgccatgccccctgctcctgtgccagctggtaccccagctcctccaggacctgccactatgatgccggatggaactttgggattgaccccaccaacaactgaacgctttggtcaggctgctacaatggaaggaattggggcaattggtggaactcctcctgcattcaaccgtgcagctcctggagctgaatttgccccaaacaaacgtcgccgatactaataagttgcagtgtctagtttctcaaaacccttaaaagaaggaccctttttggactagccagaattctaccctggaaaagtgttagggattccttccaatagttagatctaccctgcctgtactactctagggagtatgctggaggcagagggcaagggaggggtggtattaaacaagtcaattctgtgtggtatattgtttaatcagttctgtgtggtgcattcctgaagtctctaatgtgactgttgagggcctggggaaaccatggcaaagtggatccagttagagcccattaatcttgatcattccggtttttttttttttggtccatcttgtttcatttgcttgccccgcccccgagacggagtcttactctgtcgcccaggctggagtgtagtggcatgatctcggctcactgcaatctctgcctcccgggttcaagcttgtccaggttgatcttgaactcctgacctcgtgatctacccacctcggcctcccaaaatgctgggattacaggggtgagccaccgtgcccaacctcacttgcttcttatccttacactcccccagccccagagaaactgccacatacaccacaaaaaccaaacatcccccaatgaccttagccccattgctccattcactcccaggtgagaattcaggcaaacgtccacaaaggtcacaggcagcgtacatacggttctgttataccccatatattaccccttcatgtcctaaagaagacattttctcttagagattttcattttagtgtatctttaaaaaaaaatcttgtgttaacttgcctccatctttttcttgggtgaggacacccaggaatgacccttttgtgtctatgatgttgctgttcacagcttttcttgataggcctagtacaatcttgggaacagggttactgtatactgaaggtctgacagtagctcttagactcgcctatcttaggtagtcatgctgtgcattttttttttcattggtgtactgtgtttgatttgtctcatatatttggagtttttctgaaaaatggagcagtaatgcagcatcaacctattaaaatacattttaagccttttaa

SEQ ID NO: 324886 - DNA, 2608 bp, Homo sapiens
  misc_feature (10)..(11): n is a, c, g, or t
  misc_feature (18)..(18): n is a, c, g, or t
atcgctaggnncgaggcnggggttgaatcggccgagaagtcgaggttagagggaactgggaggcactttgctgtctgcaatcgaagttgagggtgcaaaaatgcagagtaataaaacttttaacttggagaagcaaaaccatactccaagaaagcatcatcaacatcaccaccagcagcagcaccaccagcagcaacagcagcagccgccaccaccgccaatacctgcaaatgggcaacaggccagcagccaaaatgaaggcttgactattgacctgaagaattttagaaaaccaggagagaagaccttcacccaacgaagccgtctttttgtgggaaatcttcctcccgacatcactgaggaagaaatgaggaaactatttgagaaatatggaaaggcaggcgaagtcttcattcataaggataaaggatttggctttatccgcttggaaacccgaaccctagcggagattgccaaagtggagctggacaatatgccactccgtggaaagcagctgcgtgtgcgctttgcctgccatagtgcatcccttacagttcgaaaccttcctcagtatgtgtccaacgaactgctggaagaagccttttctgtgtttggccaggtagagagggctgtagtcattgtggatgatcgaggaaggccctcaggaaaaggcattgttgagttctcagggaagccagctgctcggaaagctctggacagatgcagtgaaggctccttcctgctaaccacatttcctcgtcctgtgactgtggagcccatggaccagttagatgatgaagagggacttccagagaagctggttataaaaaaccagcaatttcacaaggaacgagagcagccacccagatttgcacagcctggctcctttgagtatgaatatgccatgcgctggaaggcactcattgagatggagaagcagcagcaggaccaagtggaccgcaacatcaaggaggctcgtgagaagctggagatggagatggaagctgcacgccatgagcaccaggtcatgctaatgagacaggatttgatgaggcgccaagaagaacttcggaggatggaagagctgcacaaccaagaggtgcaaaaacgaaagcaactggagctcaggcaggaggaagagcgcaggcgccgtgaagaagagatgcggcggcagcaagaagaaatgatgcggcgacagcaggaaggattcaagggaaccttccctgatgcgagagagcaggagattcggatgggtcagatggctatgggaggtgctatgggcataaacaacagaggtgccatgccccctgctcctgtgccagctggtaccccagctcctccaggacctgccactatgatgccggatggaactttgggattgaccccaccaacaactgaacgctttggtcaggctgctacaatggaaggaattggggcaattggtggaactcctcctgcattcaaccgtgcagctcctggagctgaatttgccccaaacaaacgtcgccgatactaataagttgcagtgtctagtttctcaaaacccttaaaagaaggaccctttttggactagccagaattctaccctggaaaagtgttagggattccttccaatagttagatctaccctgcctgtactactctagggagtatgctggaggcagagggcaagggaggggtggtattaaacaagtcaattctgtgtggtatattgtttaatcagttctgtgtggtgcattcctgaagtctctaatgtgactgttgagggcctggggaaaccatggcaaagtggatccagttagagcccattaatcttgatcattccggtttttttttttttggtccatcttgtttcatttgcttgccccgcccccgagacggagtcttactctgtcgcccaggctggagtgtagtggcatgatctcggctcactgcaatctctgcctcccgggttcaagcttgtccaggttgatcttgaactcctgacctcgtgatctacccacctcggcctcccaaaatgctgggattacaggggtgagccaccgtgcccaacctcacttgcttcttatccttacactcccccagccccagagaaactgccacatacaccacaaaaaccaaacatcccccaatgaccttagccccattgctccattcactcccaggtgagaattcaggcaaacgtccacaaaggtcacaggcagcgtacatacggttctgttataccccatatattaccccttcatgtcctaaagaagacattttctcttagagattttcattttagtgtatctttaaaaaaaaatcttgtgttaacttgcctccatctttttcttgggtgaggacacccaggaatgacccttttgtgtctatgatgttgctgttcacagcttttcttgataggcctagtacaatcttgggaacagggttactgtatactgaaggtctgacagtagctcttagactcgcctatcttaggtagtcatgctgtgcattttttttttcattggtgtactgtgtttgatttgtctcatatatttggagtttttctgaaaaatggagcagtaatgcagcatcaacctattaaaatacattttaagccttttaa

SEQ ID NO: 324887 - DNA, 2619 bp, Homo sapiens
  misc_feature (7)..(7): n is a, c, g, or t
  misc_feature (21)..(21): n is a, c, g, or t
  misc_feature (26)..(26): n is a, c, g, or t
  misc_feature (28)..(28): n is a, c, g, or t
  misc_feature (65)..(65): n is a, c, g, or t
  misc_feature (70)..(70): n is a, c, g, or t
aacgaangatgtatgaggcgntcccngngtgtaatttcagtcacggggacgaggccgtgtatctngtcgncgttgctccgaggagataccagtcggtagaggggtgcaaaaatgcagagtaataaaacttttaacttggagaagcaaaaccatactccaagaaagcatcatcaacatcaccaccagcagcagcaccaccagcagcaacagcagcagccgccaccaccgccaatacctgcaaatgggcaacaggccagcagccaaaatgaaggcttgactattgacctgaagaattttagaaaaccaggagagaagaccttcacccaacgaagccgtctttttgtgggaaatcttcctcccgacatcactgaggaagaaatgaggaaactatttgagaaatatggaaaggcaggcgaagtcttcattcataaggataaaggatttggctttatccgcttggaaacccgaaccctagcggagattgccaaagtggagctggacaatatgccactccgtggaaagcagctgcgtgtgcgctttgcctgccatagtgcatcccttacagttcgaaaccttcctcagtatgtgtccaacgaactgctggaagaagccttttctgtgtttggccaggtagagagggctgtagtcattgtggatgatcgaggaaggccctcaggaaaaggcattgttgagttctcagggaagccagctgctcggaaagctctggacagatgcagtgaaggctccttcctgctaaccacatttcctcgtcctgtgactgtggagcccatggaccagttagatgatgaagagggacttccagagaagctggttataaaaaaccagcaatttcacaaggaacgagagcagccacccagatttgcacagcctggctcctttgagtatgaatatgccatgcgctggaaggcactcattgagatggagaagcagcagcaggaccaagtggaccgcaacatcaaggaggctcgtgagaagctggagatggagatggaagctgcacgccatgagcaccaggtcatgctaatgagacaggatttgatgaggcgccaagaagaacttcggaggatggaagagctgcacaaccaagaggtgcaaaaacgaaagcaactggagctcaggcaggaggaagagcgcaggcgccgtgaagaagagatgcggcggcagcaagaagaaatgatgcggcgacagcaggaaggattcaagggaaccttccctgatgcgagagagcaggagattcggatgggtcagatggctatgggaggtgctatgggcataaacaacagaggtgccatgccccctgctcctgtgccagctggtaccccagctcctccaggacctgccactatgatgccggatggaactttgggattgaccccaccaacaactgaacgctttggtcaggctgctacaatggaaggaattggggcaattggtggaactcctcctgcattcaaccgtgcagctcctggagctgaatttgccccaaacaaacgtcgccgatactaataagttgcagtgtctagtttctcaaaacccttaaaagaaggaccctttttggactagccagaattctaccctggaaaagtgttagggattccttccaatagttagatctaccctgcctgtactactctagggagtatgctggaggcagagggcaagggaggggtggtattaaacaagtcaattctgtgtggtatattgtttaatcagttctgtgtggtgcattcctgaagtctctaatgtgactgttgagggcctggggaaaccatggcaaagtggatccagttagagcccattaatcttgatcattccggtttttttttttttggtccatcttgtttcatttgcttgccccgcccccgagacggagtcttactctgtcgcccaggctggagtgtagtggcatgatctcggctcactgcaatctctgcctcccgggttcaagcttgtccaggttgatcttgaactcctgacctcgtgatctacccacctcggcctcccaaaatgctgggattacaggggtgagccaccgtgcccaacctcacttgcttcttatccttacactcccccagccccagagaaactgccacatacaccacaaaaaccaaacatcccccaatgaccttagccccattgctccattcactcccaggtgagaattcaggcaaacgtccacaaaggtcacaggcagcgtacatacggttctgttataccccatatattaccccttcatgtcctaaagaagacattttctcttagagattttcattttagtgtatctttaaaaaaaaatcttgtgttaacttgcctccatctttttcttgggtgaggacacccaggaatgacccttttgtgtctatgatgttgctgttcacagcttttcttgataggcctagtacaatcttgggaacagggttactgtatactgaaggtctgacagtagctcttagactcgcctatcttaggtagtcatgctgtgcattttttttttcattggtgtactgtgtttgatttgtctcatatatttggagtttttctgaaaaatggagcagtaatgcagcatcaacctattaaaatacattttaagccttttaa

SEQ ID NO: 324888 - DNA, 2464 bp, Homo sapiens
  misc_feature (27)..(27): n is a, c, g, or t
ggctgtttctagagtatccctccgatnacagcaatagcaccaccagcagcaacagcagcagccgccaccaccgccaatacctgcaaatgggcaacaggccagcagccaaaatgaaggcttgactattgacctgaagaattttagaaaaccaggagagaagaccttcacccaacgaagccgtctttttgtgggaaatcttcctcccgacatcactgaggaagaaatgaggaaactatttgagaaatatggaaaggcaggcgaagtcttcattcataaggataaaggatttggctttatccgcttggaaacccgaaccctagcggagattgccaaagtggagctggacaatatgccactccgtggaaagcagctgcgtgtgcgctttgcctgccatagtgcatcccttacagttcgaaaccttcctcagtatgtgtccaacgaactgctggaagaagccttttctgtgtttggccaggtagagagggctgtagtcattgtggatgatcgaggaaggccctcaggaaaaggcattgttgagttctcagggaagccagctgctcggaaagctctggacagatgcagtgaaggctccttcctgctaaccacatttcctcgtcctgtgactgtggagcccatggaccagttagatgatgaagagggacttccagagaagctggttataaaaaaccagcaatttcacaaggaacgagagcagccacccagatttgcacagcctggctcctttgagtatgaatatgccatgcgctggaaggcactcattgagatggagaagcagcagcaggaccaagtggaccgcaacatcaaggaggctcgtgagaagctggagatggagatggaagctgcacgccatgagcaccaggtcatgctaatgagacaggatttgatgaggcgccaagaagaacttcggaggatggaagagctgcacaaccaagaggtgcaaaaacgaaagcaactggagctcaggcaggaggaagagcgcaggcgccgtgaagaagagatgcggcggcagcaagaagaaatgatgcggcgacagcaggaaggattcaagggaaccttccctgatgcgagagagcaggagattcggatgggtcagatggctatgggaggtgctatgggcataaacaacagaggtgccatgccccctgctcctgtgccagctggtaccccagctcctccaggacctgccactatgatgccggatggaactttgggattgaccccaccaacaactgaacgctttggtcaggctgctacaatggaaggaattggggcaattggtggaactcctcctgcattcaaccgtgcagctcctggagctgaatttgccccaaacaaacgtcgccgatactaataagttgcagtgtctagtttctcaaaacccttaaaagaaggaccctttttggactagccagaattctaccctggaaaagtgttagggattccttccaatagttagatctaccctgcctgtactactctagggagtatgctggaggcagagggcaagggaggggtggtattaaacaagtcaattctgtgtggtatattgtttaatcagttctgtgtggtgcattcctgaagtctctaatgtgactgttgagggcctggggaaaccatggcaaagtggatccagttagagcccattaatcttgatcattccggtttttttttttttggtccatcttgtttcatttgcttgccccgcccccgagacggagtcttactctgtcgcccaggctggagtgtagtggcatgatctcggctcactgcaatctctgcctcccgggttcaagcttgtccaggttgatcttgaactcctgacctcgtgatctacccacctcggcctcccaaaatgctgggattacaggggtgagccaccgtgcccaacctcacttgcttcttatccttacactcccccagccccagagaaactgccacatacaccacaaaaaccaaacatcccccaatgaccttagccccattgctccattcactcccaggtgagaattcaggcaaacgtccacaaaggtcacaggcagcgtacatacggttctgttataccccatatattaccccttcatgtcctaaagaagacattttctcttagagattttcattttagtgtatctttaaaaaaaaatcttgtgttaacttgcctccatctttttcttgggtgaggacacccaggaatgacccttttgtgtctatgatgttgctgttcacagcttttcttgataggcctagtacaatcttgggaacagggttactgtatactgaaggtctgacagtagctcttagactcgcctatcttaggtagtcatgctgtgcattttttttttcattggtgtactgtgtttgatttgtctcatatatttggagtttttctgaaaaatggagcagtaatgcagcatcaacctattaaaatacattttaagccttttaa

SEQ ID NO: 324889 - DNA, 1653 bp, Homo sapiens
ggggaagggaagaaaaaactataggctaggtacgaggctgggtgtcgggagaggccgtgtagcgtcgccgttactccgaggagataccagtcggtagaggagaagtcgaggttagagggaactgggaggcactttgctgtctgcaatcgaagttgagggtgcaaaaatgcagagtaataaaacttttaacttggagaagcaaaaccatactccaagaaagcatcatcaacatcaccaccagcagcagcaccaccagcagcaacagcagcagccgccaccaccgccaatacctgcaaatgggcaacaggccagcagccaaaatgaaggcttgactattgacctgaagaattttagaaaaccaggagagaagaccttcacccaacgaagccgtctttttgtgggaaatcttcctcccgacatcactgaggaagaaatgaggaaactatttgagaaatatggaaaggcaggcgaagtcttcattcataaggataaaggatttggctttatccgcttggaaacccgaaccctagcggagattgccaaagtggagctggacaatatgccactccgtggaaagcagctgcgtgtgcgctttgcctgccatagtgcatcccttacagttcgaaaccttcctcagtatgtgtccaacgaactgctggaagaagccttttctgtgtttggccaggtagagagggctgtagtcattgtggatgatcgaggaaggccctcaggaaaaggcattgttgagttctcagggaagccagctgctcggaaagctctggacagatgcagtgaaggctccttcctgctaaccacatttcctcgtcctgtgactgtggagcccatggaccagttagatgatgaagagggacttccagagaagctggttataaaaaaccagcaatttcacaaggaacgagagcagccacccagatttgcacagcctggctcctttgagtatgaatatgccatgcgctggaaggcactcattgagatggagaagcagcagcaggaccaagtggaccgcaacatcaaggaggctcgtgagaagctggagatggagatggaagctgcacgccatgagcaccaggtcatgctaatgagacaggatttgatgaggcgccaagaagaacttcggaggatggaagagctgcacaaccaagaggtgcaaaaacgaaagcaactggagctcaggcaggaggaagagcgcaggcgccgtgaagaagagatgcggcggcagcaagaagaaatgatgcggcgacagcaggaaggattcaagggaaccttccctgatgcgagagagcaggagattcggatgggtcagatggctatgggaggtgctatgggcataaacaacagaggtgccatgccccctgctcctgtgccagctggtaccccagctcctccaggacctgccactatgatgccggatggaactttgggattgaccccaccaacaactgaacgctttggtcaggctgctacaatggaaggaattggggcaattggtggaactcctcctgcattcaacggagttctggatgaattgcccaaaaagtgcgatactatagtgcggtcattttcaacctaaaaggactttggtacgattccgaaaggagggcccaataaacgcgaaacgatcgagacaagggc

SEQ ID NO: 324890 - DNA, 1619 bp, Homo sapiens
ggggaagggaagaaaaaactataggctaggtacgaggctgggtgtcgggagaggccgtgtagcgtcgccgttactccgaggagataccagtcggtagaggagaagtcgaggttagagggaactgggaggcactttgctgtctgcaatcgaagttgagggtgcaaaaatgcagagtaataaaacttttaacttggagaagcaaaaccatactccaagaaagcatcatcaacatcaccaccagcagcagcaccaccagcagcaacagcagcagccgccaccaccgccaatacctgcaaatgggcaacaggccagcagccaaaatgaaggcttgactattgacctgaagaattttagaaaaccaggagagaagaccttcacccaacgaagccgtctttttgtgggaaatcttcctcccgacatcactgaggaagaaatgaggaaactatttgagaaatatggaaaggcaggcgaagtcttcattcataaggataaaggatttggctttatccgcttggaaacccgaaccctagcggagattgccaaagtggagctggacaatatgccactccgtggaaagcagctgcgtgtgcgctttgcctgccatagtgcatcccttacagttcgaaaccttcctcagtatgtgtccaacgaactgctggaagaagccttttctgtgtttggccaggtagagagggctgtagtcattgtggatgatcgaggaaggccctcaggaaaaggcattgttgagttctcagggaagccagctgctcggaaagctctggacagatgcagtgaaggctccttcctgctaaccacatttcctcgtcctgtgactgtggagcccatggaccagttagatgatgaagagggacttccagagaagctggttataaaaaaccagcaatttcacaaggaacgagagcagccacccagatttgcacagcctggctcctttgagtatgaatatgccatgcgctggaaggcactcattgagatggagaagcagcagcaggaccaagtggaccgcaacatcaaggaggctcgtgagaagctggagatggagatggaagctgcacgccatgagcaccaggtcatgctaatgagacaggatttgatgaggcgccaagaagaacttcggaggatggaagagctgcacaaccaagaggtgcaaaaacgaaagcaactggagctcaggcaggaggaagagcgcaggcgccgtgaagaagagatgcggcggcagcaagaagaaatgatgcggcgacagcaggaaggattcaagggaaccttccctgatgcgagagagcaggagattcggatgggtcagatggctatgggaggtgctatgggcataaacaacagaggtgccatgccccctgctcctgtgccagctggtaccccagctcctccaggacctgccactatgatgccggatggaactttgggattgctgtgaaaaattggacccttagaaaagtcagaatccattaatttaagcactttcttagacacacttcaagggcttcaaatgtatttcatttacctcatctccactgatttgacagctaattctaatcagtgagttttcttctaatagttactgtcctcatgtgttaccatat

SEQ ID NO: 324891 - DNA, 2576 bp, Homo sapiens
ggggaagggaagaaaaaactataggctaggtacgaggctgggtgtcgggagaggccgtgtagcgtcgccgttactccgaggagataccagtcggtagaggagaagtcgaggttagagggaactgggaggcactttgctgtctgcaatcgaagttgagggtgcaaaaatgcagagtaataaaacttttaacttggagaagcaaaaccatactccaagaaagcatcatcaacatcaccaccagcagcagcaccaccagcagcaacagcagcagccgccaccaccgccaatacctgcaaatgggcaacaggccagcagccaaaatgaaggcttgactattgacctgaagaattttagaaaaccaggagagaagaccttcacccaacgaagccgtctttttgtgggaaatcttcctcccgacatcactgaggaagaaatgaggaaactatttgagaaatatggaaaggcaggcgaagtcttcattcataaggataaaggatttggctttatccgcttggaaacccgaaccctagcggagattgccaaagtccaacgaactgctggaagaagccttttctgtgtttggccaggtagagagggctgtagtcattgtggatgatcgaggaaggccctcaggaaaaggcattgttgagttctcagggaagccagctgctcggaaagctctggacagatgcagtgaaggctccttcctgctaaccacatttcctcgtcctgtgactgtggagcccatggaccagttagatgatgaagagggacttccagagaagctggttataaaaaaccagcaatttcacaaggaacgagagcagccacccagatttgcacagcctggctcctttgagtatgaatatgccatgcgctggaaggcactcattgagatggagaagcagcagcaggaccaagtggaccgcaacatcaaggaggctcgtgagaagctggagatggagatggaagctgcacgccatgagcaccaggtcatgctaatgagacaggatttgatgaggcgccaagaagaacttcggaggatggaagagctgcacaaccaagaggtgcaaaaacgaaagcaactggagctcaggcaggaggaagagcgcaggcgccgtgaagaagagatgcggcggcagcaagaagaaatgatgcggcgacagcaggaaggattcaagggaaccttccctgatgcgagagagcaggagattcggatgggtcagatggctatgggaggtgctatgggcataaacaacagaggtgccatgccccctgctcctgtgccagctggtaccccagctcctccaggacctgccactatgatgccggatggaactttgggattgaccccaccaacaactgaacgctttggtcaggctgctacaatggaaggaattggggcaattggtggaactcctcctgcattcaaccgtgcagctcctggagctgaatttgccccaaacaaacgtcgccgatactaataagttgcagtgtctagtttctcaaaacccttaaaagaaggaccctttttggactagccagaattctaccctggaaaagtgttagggattccttccaatagttagatctaccctgcctgtactactctagggagtatgctggaggcagagggcaagggaggggtggtattaaacaagtcaattctgtgtggtatattgtttaatcagttctgtgtggtgcattcctgaagtctctaatgtgactgttgagggcctggggaaaccatggcaaagtggatccagttagagcccattaatcttgatcattccggtttttttttttttggtccatcttgtttcatttgcttgccccgcccccgagacggagtcttactctgtcgcccaggctggagtgtagtggcatgatctcggctcactgcaatctctgcctcccgggttcaagcttgtccaggttgatcttgaactcctgacctcgtgatctacccacctcggcctcccaaaatgctgggattacaggggtgagccaccgtgcccaacctcacttgcttcttatccttacactcccccagccccagagaaactgccacatacaccacaaaaaccaaacatcccccaatgaccttagccccattgctccattcactcccaggtgagaattcaggcaaacgtccacaaaggtcacaggcagcgtacatacggttctgttataccccatatattaccccttcatgtcctaaagaagacattttctcttagagattttcattttagtgtatctttaaaaaaaaatcttgtgttaacttgcctccatctttttcttgggtgaggacacccaggaatgacccttttgtgtctatgatgttgctgttcacagcttttcttgataggcctagtacaatcttgggaacagggttactgtatactgaaggtctgacagtagctcttagactcgcctatcttaggtagtcatgctgtgcattttttttttcattggtgtactgtgtttgatttgtctcatatatttggagtttttctgaaaaatggagcagtaatgcagcatcaacctattaaaatacattttaagccttttaa

SEQ ID NO: 324892 - DNA, 2490 bp, Homo sapiens
ggggaagggaagaaaaaactataggctaggtacgaggctgggtgtcgggagaggccgtgtagcgtcgccgttactccgaggagataccagtcggtagaggagaagtcgaggttagagggaactgggaggcactttgctgtctgcaatcgaagttgagggtgcaaaaatgcagagtaataaaacttttaacttggagaagcaaaaccatactccaagaaagcatcatcaacatcaccaccagcagcagcaccaccagcagcaacagcagcagccgccaccaccgccaatacctgcaaatgggcaacaggccagcagccaaaatgaaggcttgactattgacctgaagaattttagaaaaccaggagagaagaccttcacccaacgaagccgtctttttgtgggaaatcttcctcccgacatcactgaggaagaaatgaggaaactatttgagaaatatggaaaggcaggcgaagtcttcattcataaggataaaggatttggctttatccgcttggaaacccgaaccctagcggagattgccaaagtggagctggacaatatgccactccgtggaagccagctgctcggaaagctctggacagatgcagtgaaggctccttcctgctaaccacatttcctcgtcctgtgactgtggagcccatggaccagttagatgatgaagagggacttccagagaagctggttataaaaaaccagcaatttcacaaggaacgagagcagccacccagatttgcacagcctggctcctttgagtatgaatatgccatgcgctggaaggcactcattgagatggagaagcagcagcaggaccaagtggaccgcaacatcaaggaggctcgtgagaagctggagatggagatggaagctgcacgccatgagcaccaggtcatgctaatgagacaggatttgatgaggcgccaagaagaacttcggaggatggaagagctgcacaaccaagaggtgcaaaaacgaaagcaactggagctcaggcaggaggaagagcgcaggcgccgtgaagaagagatgcggcggcagcaagaagaaatgatgcggcgacagcaggaaggattcaagggaaccttccctgatgcgagagagcaggagattcggatgggtcagatggctatgggaggtgctatgggcataaacaacagaggtgccatgccccctgctcctgtgccagctggtaccccagctcctccaggacctgccactatgatgccggatggaactttgggattgaccccaccaacaactgaacgctttggtcaggctgctacaatggaaggaattggggcaattggtggaactcctcctgcattcaaccgtgcagctcctggagctgaatttgccccaaacaaacgtcgccgatactaataagttgcagtgtctagtttctcaaaacccttaaaagaaggaccctttttggactagccagaattctaccctggaaaagtgttagggattccttccaatagttagatctaccctgcctgtactactctagggagtatgctggaggcagagggcaagggaggggtggtattaaacaagtcaattctgtgtggtatattgtttaatcagttctgtgtggtgcattcctgaagtctctaatgtgactgttgagggcctggggaaaccatggcaaagtggatccagttagagcccattaatcttgatcattccggtttttttttttttggtccatcttgtttcatttgcttgccccgcccccgagacggagtcttactctgtcgcccaggctggagtgtagtggcatgatctcggctcactgcaatctctgcctcccgggttcaagcttgtccaggttgatcttgaactcctgacctcgtgatctacccacctcggcctcccaaaatgctgggattacaggggtgagccaccgtgcccaacctcacttgcttcttatccttacactcccccagccccagagaaactgccacatacaccacaaaaaccaaacatcccccaatgaccttagccccattgctccattcactcccaggtgagaattcaggcaaacgtccacaaaggtcacaggcagcgtacatacggttctgttataccccatatattaccccttcatgtcctaaagaagacattttctcttagagattttcattttagtgtatctttaaaaaaaaatcttgtgttaacttgcctccatctttttcttgggtgaggacacccaggaatgacccttttgtgtctatgatgttgctgttcacagcttttcttgataggcctagtacaatcttgggaacagggttactgtatactgaaggtctgacagtagctcttagactcgcctatcttaggtagtcatgctgtgcattttttttttcattggtgtactgtgtttgatttgtctcatatatttggagtttttctgaaaaatggagcagtaatgcagcatcaacctattaaaatacattttaagccttttaa
